United States Patent Application Publication US 2024/0066114 A1 - sequence listing, part 10

SEQ ID NO: 13295 - protein, 223 aa, Artificial Sequence; identical to SEQ ID NO: 13243
  SARS-CoV-2/Iceland/280/2020__EPI_ISL_417608 spike protein (319-541)

SEQ ID NO: 13296 - protein, 223 aa, Artificial Sequence; identical to SEQ ID NO: 13243
  SARS-CoV-2/Iceland/247/2020__EPI_ISL_417575 spike protein (319-541)

SEQ ID NO: 13297 - protein, 223 aa, Artificial Sequence; identical to SEQ ID NO: 13243
  SARS-CoV-2/Iceland/238/2020__EPI_ISL_417566 spike protein (319-541)

SEQ ID NO: 13298 - protein, 223 aa, Artificial Sequence; identical to SEQ ID NO: 13243
  SARS-CoV-2/Greece/16/2020__EPI_ISL_418265 spike protein (319-541)

SEQ ID NO: 13299 - protein, 223 aa, Artificial Sequence; identical to SEQ ID NO: 13243
  SARS-CoV-2/Iceland/319/2020__EPI_ISL_417648 spike protein (319-541)

SEQ ID NO: 13300 - protein, 223 aa, Artificial Sequence; identical to SEQ ID NO: 13243
  SARS-CoV-2/Congo/94/2020__EPI_ISL_417947 spike protein (319-541)

SEQ ID NO: 13301 - protein, 223 aa, Artificial Sequence; identical to SEQ ID NO: 13243
  SARS-CoV-2/Congo/158/2020__EPI_ISL_417950 spike protein (319-541)

SEQ ID NO: 13302 - protein, 223 aa, Artificial Sequence; identical to SEQ ID NO: 13243
  SARS-CoV-2/USA/UT-00034/2020__EPI_ISL_417977 spike protein (319-541)

SEQ ID NO: 13303 - protein, 223 aa, Artificial Sequence; identical to SEQ ID NO: 13243
  SARS-CoV-2/USA/UT-00033/2020__EPI_ISL_417976 spike protein (319-541)

SEQ ID NO: 13304 - protein, 223 aa, Artificial Sequence
  SARS-CoV-2/USA/WI-13/2020__EPI_ISL_417516 spike protein (319-541)
RVLPTESIVRFPNITNLCPFGEVFNATRFASVYAWNRKRISNCVADYSVLYNSASFSTFKCYGVSPTKLNDLCFTNVYADSFVIRGDEVRQIAPGQTGKIADYNYKLPDDFTGCVIAWNSNNLDSKVGGNYNYLYRLFRKSNLKPFERDISTEIYQAGSTPCNGVEGFNCYFPLQSYGFQPTNGVGYQPYRVVVLSFELLHAPATVCGPKKSTNLVKNKCVNF

SEQ ID NO: 13305 - protein, 223 aa, Artificial Sequence
  SARS-CoV-2/India/1-27/2020__EPI_ISL_413522 spike protein (318-540)
RVQPTESIVRFPNITNLCPFGEVFNATRFASVYAWNRKRISNCVADYSVLYNSASFSTFKCYGVSPTKLNDLCFTNVYADSFVIRGDEVIQIAPGQTGKIADYNYKLPDDFTGCVIAWNSNNLDSKVGGNYNYLYRLFRKSNLKPFERDISTEIYQAGSTPCNGVEGFNCYFPLQSYGFQPTNGVGYQPYRVVVLSFELLHAPATVCGPKKSTNLVKNKCVNF

SEQ ID NO: 13306 - protein, 223 aa, Artificial Sequence
  SARS-CoV-2/pangolin/Guangxi/P4L/2017__EPI_ISL_410538 spike protein (313-535)
RVQPTISIVRFPNITNLCPFGEVFNASKFASVYAWNRKRISNCVADYSVLYNSTSFSTFKCYGVSPTKLNDLCFTNVYADSFVVKGDEVRQIAPGQTGVIADYNYKLPDDFTGCVIAWNSVKQDALTGGNYGYLYRLFRKSKLKPFERDISTEIYQAGSTPCNGQVGLNCYYPLERYGFHPTTGVNYQPFRVVVLSFELLNGPATVCGPKLSTTLVKDKCVNF

SEQ ID NO: 13307 - protein, 223 aa, Artificial Sequence; identical to SEQ ID NO: 13306
  SARS-CoV-2/pangolin/Guangxi/P5L/2017__EPI_ISL_410540 spike protein (313-535)

SEQ ID NO: 13308 - protein, 223 aa, Artificial Sequence
  SARS-CoV-2/pangolin/Guangxi/P5E/2017__EPI_ISL_410541 spike protein (313-535)
RVQPTISIVRFPNITNLCPFGEVFNASKFASVYAWNRKRISNCVADYSVLYNSTSFSTFKCYGVSPTKLNDLCFTNVYADSFVVKGDEVRQIAPGQTGVIADYNYKLPDDFTGCVIAWNSVKQDALTGDNYGYLYRLFRKSKLKPFERDISTEIYQAGSTPCNGQVGLNCYYPLERYGFHPTTGVNYQPFRVVVLSFELLNGPATVCGPKLSTTLVKDKCVNF

SEQ ID NO: 13309 - protein, 221 aa, Artificial Sequence
  SARS-CoV-2/pangolin/Guangxi/P1E/2017__EPI_ISL_410539 spike protein (311-533)
RVQPTISIVRFPNITNLCPFGEVFNASKFASVYAWNRKRISNCVADYSVLYNSTSFSTFKCYGVSPTKLNDLCFTNVYADSFVVKGDEVRQIAPGQTGVIADYNYKLPDDFTGCVIAWNSVKQDALTGGNYLYRLFRKSKLKPFERDISTEIYQAGSTPCNGQVGLNCYYPLERYGFHPTTGVNYQPFRVVVLSFELLNGPATVCGPKLSTTLVKDKCVNF

SEQ ID NO: 13310 - protein, 201 aa, Artificial Sequence
  SARS-CoV-2/Wuhan/WIV05/2019__EPI_ISL_402128 spike protein (329-529)
FPNITNLCPFGEVFNATRFASVYAWNRKRISNCVADYSVLYNSASFSTFKCYGVSPTKLNDLCFTNVYADSFVIRGDEVRQIAPGQTGKIADYNYKLPDDFTGCVIAWNSNNLDSKVGGNYNYLYRLFRKSNLKPFERDISTEIYQAGSTPCNGVEGFNCYFPLQSYGFQPTNGVGYQPYRVVVLSFELLHAPATVCGPKK

SEQ ID NO: 13311 - protein, 201 aa, Artificial Sequence; identical to SEQ ID NO: 13310
  SARS-CoV-2/bat/Yunnan/RaTG13/2013__EPI_ISL_402131 spike protein (325-525)

SEQ ID NO: 13312 - protein, 201 aa, Artificial Sequence; identical to SEQ ID NO: 13310
  SARS-CoV-2/Wuhan/HBCDC-HB-01/2019__EPI_ISL_402132 spike protein (329-529)

SEQ ID NO: 13313 - protein, 201 aa, Artificial Sequence; identical to SEQ ID NO: 13310
  SARS-CoV-2/Guangdong/20SF028/2020__EPI_ISL_403936 spike protein (329-529)

SEQ ID NO: 13314 - protein, 201 aa, Artificial Sequence; identical to SEQ ID NO: 13310
  SARS-CoV-2/Shenzhen/SZTH-001/2020__EPI_ISL_406592 spike protein (329-529)

SEQ ID NO: 13315 - protein, 201 aa, Artificial Sequence; identical to SEQ ID NO: 13310
  SARS-CoV-2/Shenzhen/SZTH-004/2020__EPI_ISL_406595 spike protein (329-529)

SEQ ID NO: 13316 - protein, 201 aa, Artificial Sequence; identical to SEQ ID NO: 13310
  SARS-CoV-2/France/IDF0372/2020__EPI_ISL_406596 spike protein (329-529)

SEQ ID NO: 13317 - protein, 201 aa, Artificial Sequence; identical to SEQ ID NO: 13310
  SARS-CoV-2/Australia/VIC01/2020__EPI_ISL_406844 spike protein (329-529)

SEQ ID NO: 13318 - protein, 201 aa, Artificial Sequence; identical to SEQ ID NO: 13310
  SARS-CoV-2/Germany/BavPat1/2020__EPI_ISL_406862 spike protein (329-529)

SEQ ID NO: 13319 - protein, 201 aa, Artificial Sequence; identical to SEQ ID NO: 13310
  SARS-CoV-2/Wuhan/HBCDC-HB-02/2020__EPI_ISL_412978 spike protein (329-529)

SEQ ID NO: 13320 - protein, 201 aa, Artificial Sequence; identical to SEQ ID NO: 13310
  SARS-CoV-2/Australia/QLD02/2020__EPI_ISL_407896 spike protein (329-529)

SEQ ID NO: 13321 - protein, 201 aa, Artificial Sequence; identical to SEQ ID NO: 13310
  SARS-CoV-2/India/1-31/2020__EPI_ISL_413523 spike protein (329-529)

SEQ ID NO: 13322 - protein, 201 aa, Artificial Sequence; identical to SEQ ID NO: 13310
  SARS-CoV-2/Guangdong/GD2020087-P0008/2020__EPI_ISL_413863 spike protein (329-529)

SEQ ID NO: 13323 - protein, 201 aa, Artificial Sequence; identical to SEQ ID NO: 13310
  SARS-CoV-2/Sweden/01/2020__EPI_ISL_411951 spike protein (329-529)

SEQ ID NO: 13324 - protein, 201 aa, Artificial Sequence; identical to SEQ ID NO: 13310
  SARS-CoV-2/Tianmen/HBCDC-HB-07/2020__EPI_ISL_412983 spike protein (329-529)

SEQ ID NO: 13325 - protein, 201 aa, Artificial Sequence; identical to SEQ ID NO: 13310
  SARS-CoV-2/Hong Kong/case42_VM20002493/2020__EPI_ISL_414527 spike protein (329-529)

SEQ ID NO: 13326 - protein, 201 aa, Artificial Sequence; identical to SEQ ID NO: 13310
  SARS-CoV-2/USA/CruiseA-23/2020__EPI_ISL_414482 spike protein (329-529)

SEQ ID NO: 13327 - protein, 201 aa, Artificial Sequence; identical to SEQ ID NO: 13310
  SARS-CoV-2/Hong Kong/case85_VM20002868/2020__EPI_ISL_414519 spike protein (329-529)

SEQ ID NO: 13328 - protein, 201 aa, Artificial Sequence; identical to SEQ ID NO: 13310
  SARS-CoV-2/England/200990660/2020__EPI_ISL_414523 spike protein (329-529)

SEQ ID NO: 13329 - protein, 201 aa, Artificial Sequence; identical to SEQ ID NO: 13310
  SARS-CoV-2/Australia/NSW09/2020__EPI_ISL_413595 spike protein (329-529)

SEQ ID NO: 13330 - protein, 201 aa, Artificial Sequence; identical to SEQ ID NO: 13310
  SARS-CoV-2/Australia/NSW10/2020__EPI_ISL_413596 spike protein (329-529)

SEQ ID NO: 13331 - protein, 201 aa, Artificial Sequence; identical to SEQ ID NO: 13310
  SARS-CoV-2/Switzerland/1000477797/2020__EPI_ISL_413023 spike protein (329-529)

SEQ ID NO: 13332 - protein, 201 aa, Artificial Sequence; identical to SEQ ID NO: 13310
  SARS-CoV-2/Belgium/BA-02291/2020__EPI_ISL_415159 spike protein (329-529)

SEQ ID NO: 13333 - protein, 201 aa, Artificial Sequence; identical to SEQ ID NO: 13310
  SARS-CoV-2/USA/WA8-UW5/2020__EPI_ISL_413486 spike protein (329-529)

SEQ ID NO: 13334 - protein, 201 aa, Artificial Sequence; identical to SEQ ID NO: 13310
  SARS-CoV-2/England/20102000506/2020__EPI_ISL_415147 spike protein (329-529)

SEQ ID NO: 13335 - protein, 201 aa, Artificial Sequence; identical to SEQ ID NO: 13310
  SARS-CoV-2/Belgium/VAG-03013/2020__EPI_ISL_415155 spike protein (329-529)

SEQ ID NO: 13336 - protein, 201 aa, Artificial Sequence; identical to SEQ ID NO: 13310
  SARS-CoV-2/Belgium/BC-03016/2020__EPI_ISL_415157 spike protein (329-529)

SEQ ID NO: 13337 - protein, 201 aa, Artificial Sequence; identical to SEQ ID NO: 13310
  SARS-CoV-2/Germany/BavPat3/2020__EPI_ISL_414521 spike protein (329-529)

SEQ ID NO: 13338 - protein, 201 aa, Artificial Sequence; identical to SEQ ID NO: 13310
  SARS-CoV-2/France/HF1805/2020__EPI_ISL_414628 spike protein (329-529)

SEQ ID NO: 13339 - protein, 201 aa, Artificial Sequence; identical to SEQ ID NO: 13310
  SARS-CoV-2/Netherlands/ZuidHolland_9/2020__EPI_ISL_414445 spike protein (329-529)

SEQ ID NO: 13340 - protein, 201 aa, Artificial Sequence; identical to SEQ ID NO: 13310
  SARS-CoV-2/Finland/FIN03032020A/2020__EPI_ISL_413602 spike protein (329-529)

SEQ ID NO: 13341 - protein, 201 aa, Artificial Sequence; identical to SEQ ID NO: 13310
  SARS-CoV-2/France/GE1977/2020__EPI_ISL_414632 spike protein (329-529)

SEQ ID NO: 13342 - protein, 201 aa, Artificial Sequence; identical to SEQ ID NO: 13310
  SARS-CoV-2/Finland/FIN-313/2020__EPI_ISL_414641 spike protein (329-529)

SEQ ID NO: 13343 - protein, 201 aa, Artificial Sequence; identical to SEQ ID NO: 13310
  SARS-CoV-2/Netherlands/ZuidHolland_2/2020__EPI_ISL_414556 spike protein (329-529)

SEQ ID NO: 13344 - protein, 201 aa, Artificial Sequence; identical to SEQ ID NO: 13310
  SARS-CoV-2/USA/WA-UW31/2020__EPI_ISL_414618 spike protein (329-529)

SEQ ID NO: 13345 - protein, 201 aa, Artificial Sequence; identical to SEQ ID NO: 13310
  SARS-CoV-2/South Korea/SNU01/2020__EPI_ISL_411929 spike protein (329-529)

SEQ ID NO: 13346 - protein, 201 aa, Artificial Sequence; identical to SEQ ID NO: 13310
  SARS-CoV-2/China/WF0004/2020__EPI_ISL_413694 spike protein (329-529)

SEQ ID NO: 13347 - protein, 201 aa, Artificial Sequence; identical to SEQ ID NO: 13310
  SARS-CoV-2/China/WF0028/2020__EPI_ISL_413791 spike protein (329-529)

SEQ ID NO: 13348 - protein, 201 aa, Artificial Sequence; identical to SEQ ID NO: 13310
  SARS-CoV-2/2019-nCoV/USA-CruiseA-18/2020__MT159716.1 spike protein (329-529)

SEQ ID NO: 13349 - protein, 201 aa, Artificial Sequence; identical to SEQ ID NO: 13310
  SARS-CoV-2/SARS-CoV-2/Yunnan-01/human/2020/CHN__MT049951.1 spike protein (329-529)

SEQ ID NO: 13350 - protein, 201 aa, Artificial Sequence; identical to SEQ ID NO: 13310
  SARS-CoV-2/USA/WA-UW292/2020__EPI_ISL_418077 spike protein (329-529)

SEQ ID NO: 13351 - protein, 201 aa, Artificial Sequence; identical to SEQ ID NO: 13310
  SARS-CoV-2/Iceland/192/2020__EPI_ISL_417819 spike protein (329-529)

SEQ ID NO: 13352 - protein, 201 aa, Artificial Sequence; identical to SEQ ID NO: 13310
  SARS-CoV-2/Belgium/ULG-6939/2020__EPI_ISL_417020 spike protein (329-529)

SEQ ID NO: 13353 - protein, 201 aa, Artificial Sequence; identical to SEQ ID NO: 13310
  SARS-CoV-2/France/HF2496/2020__EPI_ISL_418231 spike protein (329-529)

SEQ ID NO: 13354 - protein, 201 aa, Artificial Sequence; identical to SEQ ID NO: 13310
  SARS-CoV-2/USA/WA-UW291/2020__EPI_ISL_418076 spike protein (329-529)

SEQ ID NO: 13355 - protein, 201 aa, Artificial Sequence; identical to SEQ ID NO: 13310
  SARS-CoV-2/Portugal/PT0034/2020__EPI_ISL_418019 spike protein (329-529)

SEQ ID NO: 13356 - protein, 201 aa, Artificial Sequence; identical to SEQ ID NO: 13310
  SARS-CoV-2/Iceland/202/2020__EPI_ISL_417750 spike protein (329-529)

SEQ ID NO: 13357 - protein, 201 aa, Artificial Sequence; identical to SEQ ID NO: 13310
  SARS-CoV-2/USA/WA-UW261/2020__EPI_ISL_418046 spike protein (329-529)

SEQ ID NO: 13358 - protein, 201 aa, Artificial Sequence; identical to SEQ ID NO: 13310
  SARS-CoV-2/Portugal/PT0035/2020__EPI_ISL_418020 spike protein (329-529)

SEQ ID NO: 13359 - protein, 201 aa, Artificial Sequence; identical to SEQ ID NO: 13310
  SARS-CoV-2/USA/NY-NYUMC7/2020__EPI_ISL_418192 spike protein (329-529)

SEQ ID NO: 13360 - protein, 201 aa, Artificial Sequence; identical to SEQ ID NO: 13310
  SARS-CoV-2/Iceland/189/2020__EPI_ISL_417709 spike protein (329-529)

SEQ ID NO: 13361 - protein, 201 aa, Artificial Sequence; identical to SEQ ID NO: 13310
  SARS-CoV-2/Australia/NSW56/2020__EPI_ISL_417408 spike protein (329-529)

SEQ ID NO: 13362 - protein, 201 aa, Artificial Sequence; identical to SEQ ID NO: 13310
  SARS-CoV-2/Iceland/280/2020__EPI_ISL_417608 spike protein (329-529)

SEQ ID NO: 13363 - protein, 201 aa, Artificial Sequence; identical to SEQ ID NO: 13310
  SARS-CoV-2/Iceland/247/2020__EPI_ISL_417575 spike protein (329-529)

SEQ ID NO: 13364 - protein, 201 aa, Artificial Sequence; identical to SEQ ID NO: 13310
  SARS-CoV-2/Iceland/238/2020__EPI_ISL_417566 spike protein (329-529)

SEQ ID NO: 13365 - protein, 201 aa, Artificial Sequence; identical to SEQ ID NO: 13310
  SARS-CoV-2/Greece/16/2020__EPI_ISL_418265 spike protein (329-529)

SEQ ID NO: 13366 - protein, 201 aa, Artificial Sequence; identical to SEQ ID NO: 13310
  SARS-CoV-2/Iceland/319/2020__EPI_ISL_417648 spike protein (329-529)

SEQ ID NO: 13367 - protein, 201 aa, Artificial Sequence; identical to SEQ ID NO: 13310
  SARS-CoV-2/Congo/94/2020__EPI_ISL_417947 spike protein (329-529)

SEQ ID NO: 13368 - protein, 201 aa, Artificial Sequence; identical to SEQ ID NO: 13310
  SARS-CoV-2/Congo/158/2020__EPI_ISL_417950 spike protein (329-529)

SEQ ID NO: 13369 - protein, 201 aa, Artificial Sequence; identical to SEQ ID NO: 13310
  SARS-CoV-2/USA/UT-00034/2020__EPI_ISL_417977 spike protein (329-529)

SEQ ID NO: 13370 - protein, 201 aa, Artificial Sequence; identical to SEQ ID NO: 13310
  SARS-CoV-2/USA/UT-00033/2020__EPI_ISL_417976 spike protein (329-529)

SEQ ID NO: 13371 - protein, 201 aa, Artificial Sequence; identical to SEQ ID NO: 13310
  SARS-CoV-2/USA/WI-13/2020__EPI_ISL_417516 spike protein (329-529)

SEQ ID NO: 13372 - protein, 201 aa, Artificial Sequence
  SARS-CoV-2/India/1-27/2020__EPI_ISL_413522 spike protein (328-528)
FPNITNLCPFGEVFNATRFASVYAWNRKRISNCVADYSVLYNSASFSTFKCYGVSPTKLNDLCFTNVYADSFVIRGDEVIQIAPGQTGKIADYNYKLPDDFTGCVIAWNSNNLDSKVGGNYNYLYRLFRKSNLKPFERDISTEIYQAGSTPCNGVEGFNCYFPLQSYGFQPTNGVGYQPYRVVVLSFELLHAPATVCGPKK

SEQ ID NO: 13373 - protein, 201 aa, Artificial Sequence
  SARS-CoV-2/pangolin/Guangxi/P4L/2017__EPI_ISL_410538 spike protein (323-523)
FPNITNLCPFGEVFNASKFASVYAWNRKRISNCVADYSVLYNSTSFSTFKCYGVSPTKLNDLCFTNVYADSFVVKGDEVRQIAPGQTGVIADYNYKLPDDFTGCVIAWNSVKQDALTGGNYGYLYRLFRKSKLKPFERDISTEIYQAGSTPCNGQVGLNCYYPLERYGFHPTTGVNYQPFRVVVLSFELLNGPATVCGPKL

SEQ ID NO: 13374 - protein, 201 aa, Artificial Sequence; identical to SEQ ID NO: 13373
  SARS-CoV-2/pangolin/Guangxi/P5L/2017__EPI_ISL_410540 spike protein (323-523)

SEQ ID NO: 13375 - protein, 201 aa, Artificial Sequence
  SARS-CoV-2/pangolin/Guangxi/P5E/2017__EPI_ISL_410541 spike protein (323-523)
FPNITNLCPFGEVFNASKFASVYAWNRKRISNCVADYSVLYNSTSFSTFKCYGVSPTKLNDLCFTNVYADSFVVKGDEVRQIAPGQTGVIADYNYKLPDDFTGCVIAWNSVKQDALTGDNYGYLYRLFRKSKLKPFERDISTEIYQAGSTPCNGQVGLNCYYPLERYGFHPTTGVNYQPFRVVVLSFELLNGPATVCGPKL

SEQ ID NO: 13376 - protein, 199 aa, Artificial Sequence
  SARS-CoV-2/pangolin/Guangxi/P1E/2017__EPI_ISL_410539 spike protein (321-521)
FPNITNLCPFGEVFNASKFASVYAWNRKRISNCVADYSVLYNSTSFSTFKCYGVSPTKLNDLCFTNVYADSFVVKGDEVRQIAPGQTGVIADYNYKLPDDFTGCVIAWNSVKQDALTGGNYLYRLFRKSKLKPFERDISTEIYQAGSTPCNGQVGLNCYYPLERYGFHPTTGVNYQPFRVVVLSFELLNGPATVCGPKL

SEQ ID NO: 13377 - protein, 1211 aa, Artificial Sequence
  SARS-CoV-2/Wuhan/WIV05/2019__EPI_ISL_402128 spike protein (1-1211)(N914C_S1123C)
MFVFLVLLPLVSSQCVNLTTRTQLPPAYTNSFTRGVYYPDKVFRSSVLHSTQDLFLPFFSNVTWFHAIHVSGTNGTKRFDNPVLPFNDGVYFASTEKSNIIRGWIFGTTLDSKTQSLLIVNNATNVVIKVCEFQFCNDPFLGVYYHKNNKSWMESEFRVYSSANNCTFEYVSQPFLMDLEGKQGNFKNLREFVFKNIDGYFKIYSKHTPINLVRDLPQGFSALEPLVDLPIGINITRFQTLLALHRSYLTPGDSSSGWTAGAAAYYVGYLQPRTFLLKYNENGTITDAVDCALDPLSETKCTLKSFTVEKGIYQTSNFRVQPTESIVRFPNITNLCPFGEVFNATRFASVYAWNRKRISNCVADYSVLYNSASFSTFKCYGVSPTKLNDLCFTNVYADSFVIRGDEVRQIAPGQTGKIADYNYKLPDDFTGCVIAWNSNNLDSKVGGNYNYLYRLFRKSNLKPFERDISTEIYQAGSTPCNGVEGFNCYFPLQSYGFQPTNGVGYQPYRVVVLSFELLHAPATVCGPKKSTNLVKNKCVNFNFNGLTGTGVLTESNKKFLPFQQFGRDIADTTDAVRDPQTLEILDITPCSFGGVSVITPGTNTSNQVAVLYQDVNCTEVPVAIHADQLTPTWRVYSTGSNVFQTRAGCLIGAEHVNNSYECDIPIGAGICASYQTQTNSPRRARSVASQSIIAYTMSLGAENSVAYSNNSIAIPTNFTISVTTEILPVSMTKTSVDCTMYICGDSTECSNLLLQYGSFCTQLNRALTGIAVEQDKNTQEVFAQVKQIYKTPPIKDFGGFNFSQILPDPSKPSKRSFIEDLLFNKVTLADAGFIKQYGDCLGDIAARDLICAQKFNGLTVLPPLLTDEMIAQYTSALLAGTITSGWTFGAGAALQIPFAMQMAYRFNGIGVTQCVLYENQKLIANQFNSAIGKIQDSLSSTASALGKLQDVVNQNAQALNTLVKQLSSNFGAISSVLNDILSRLDKVEAEVQIDRLITGRLQSLQTYVTQQLIRAAEIRASANLAATKMSECVLGQSKRVDFCGKGYHLMSFPQSAPHGVVFLHVTYVPAQEKNFTTAPAICHDGKAHFPREGVFVSNGTHWFVTQRNFYEPQIITTDNTFVCGNCDVVIGIVNNTVYDPLQPELDSFKEELDKYFKNHTSPDVDLGDISGINASVVNIQKEIDRLNEVAKNLNESLIDLQELGKYEQYIK

SEQ ID NO: 13378 - protein, 1207 aa, Artificial Sequence
  SARS-CoV-2/bat/Yunnan/RaTG13/2013__EPI_ISL_402131 spike protein (1-1207)(N910C_S1119C)
MFVFLVLLPLVSSQCVNLTTRTQLPPAYTNSSTRGVYYPDKVFRSSVLHLTQDLFLPFFSNVTWFHAIHVSGTNGIKRFDNPVLPFNDGVYFASTEKSNIIRGWIFGTTLDSKTQSLLIVNNATNVVIKVCEFQFCNDPFLGVYYHKNNKSWMESEFRVYSSANNCTFEYVSQPFLMDLEGKQGNFKNLREFVFKNIDGYFKIYSKHTPINLVRDLPPGFSALEPLVDLPIGINITRFQTLLALHRSYLTPGDSSSGWTAGAAAYYVGYLQPRTFLLKYNENGTITDAVDCALDPLSETKCTLKSFTVEKGIYQTSNFRVQPTDSIVRFPNITNLCPFGEVFNATTFASVYAWNRKRISNCVADYSVLYNSTSFSTFKCYGVSPTKLNDLCFTNVYADSFVITGDEVRQIAPGQTGKIADYNYKLPDDFTGCVIAWNSKHIDAKEGGNFNYLYRLFRKANLKPFERDISTEIYQAGSKPCNGQTGLNCYYPLYRYGFYPTDGVGHQPYRVVVLSFELLNAPATVCGPKKSTNLVKNKCVNFNFNGLTGTGVLTESNKKFLPFQQFGRDIADTTDAVRDPQTLEILDITPCSFGGVSVITPGTNASNQVAVLYQDVNCTEVPVAIHADQLTPTWRVYSTGSNVFQTRAGCLIGAEHVNNSYECDIPIGAGICASYQTQTNSRSVASQSIIAYTMSLGAENSVAYSNNSIAIPTNFTISVTTEILPVSMTKTSVDCTMYICGDSTECSNLLLQYGSFCTQLNRALTGIAVEQDKNTQEVFAQVKQIYKTPPIKDFGGFNFSQILPDPSKPSKRSFIEDLLFNKVTLADAGFIKQYGDCLGDIAARDLICAQKFNGLTVLPPLLTDEMIAQYTSALLAGTITSGWTFGAGAALQIPFAMQMAYRFNGIGVTQCVLYENQKLIANQFNSAIGKIQDSLSSTASALGKLQDVVNQNAQALNTLVKQLSSNFGAISSVLNDILSRLDKVEAEVQIDRLITGRLQSLQTYVTQQLIRAAEIRASANLAATKMSECVLGQSKRVDFCGKGYHLMSFPQSAPHGVVFLHVTYVPAQEKNFTTAPAICHDGKAHFPREGVFVSNGTHWFVTQRNFYEPQIITTDNTFVCGSCDVVIGIVNNTVYDPLQPELDSFKEELDKYFKNHTSPDVDLGDISGINASVVNIQKEIDRLNEVAKNLNESLIDLQELGKYEQYIK

SEQ ID NO: 13379 - protein, 1211 aa, Artificial Sequence
  SARS-CoV-2/Wuhan/HBCDC-HB-01/2019__EPI_ISL_402132 spike protein (1-1211)(N914C_S1123C)
MFVFLVLLPLVSSQCVNLTTRTQLPPAYTNSITRGVYYPDKVFRSSVLHSTQDLFLPFFSNVTWFHAIHVSGTNGTKRFDNPVLPFNDGVYFASTEKSNIIRGWIFGTTLDSKTQSLLIVNNATNVVIKVCEFQFCNDPFLGVYYHKNNKSWMESEFRVYSSANNCTFEYVSQPFLMDLEGKQGNFKNLREFVFKNIDGYFKIYSKHTPINLVRDLPQGFSALEPLVDLPIGINITRFQTLLALHRSYLTPGDSSSGWTAGAAAYYVGYLQPRTFLLKYNENGTITDAVDCALDPLSETKCTLKSFTVEKGIYQTSNFRVQPTESIVRFPNITNLCPFGEVFNATRFASVYAWNRKRISNCVADYSVLYNSASFSTFKCYGVSPTKLNDLCFTNVYADSFVIRGDEVRQIAPGQTGKIADYNYKLPDDFTGCVIAWNSNNLDSKVGGNYNYLYRLFRKSNLKPFERDISTEIYQAGSTPCNGVEGFNCYFPLQSYGFQPTNGVGYQPYRVVVLSFELLHAPATVCGPKKSTNLVKNKCVNFNFNGLTGTGVLTESNKKFLPFQQFGRDIADTTDAVRDPQTLEILDITPCSFGGVSVITPGTNTSNQVAVLYQDVNCTEVPVAIHADQLTPTWRVYSTGSNVFQTRAGCLIGAEHVNNSYECDIPIGAGICASYQTQTNSPRRARSVASQSIIAYTMSLGAENSVAYSNNSIAIPTNFTISVTTEILPVSMTKTSVDCTMYICGDSTECSNLLLQYGSFCTQLNRALTGIAVEQDKNTQEVFAQVKQIYKTPPIKDFGGFNFSQILPDPSKPSKRSFIEDLLFNKVTLADAGFIKQYGDCLGDIAARDLICAQKFNGLTVLPPLLTDEMIAQYTSALLAGTITSGWTFGAGAALQIPFAMQMAYRFNGIGVTQCVLYENQKLIANQFNSAIGKIQDSLSSTASALGKLQDVVNQNAQALNTLVKQLSSNFGAISSVLNDILSRLDKVEAEVQIDRLITGRLQSLQTYVTQQLIRAAEIRASANLAATKMSECVLGQSKRVDFCGKGYHLMSFPQSAPHGVVFLHVTYVPAQEKNFTTAPAICHDGKAHFPREGVFVSNGTHWFVTQRNFYEPQIITTDNTFVCGNCDVVIGIVNNTVYDPLQPELDSFKEELDKYFKNHTSPDVDLGDISGINASVVNIQKEIDRLNEVAKNLNESLIDLQELGKYEQYIK

SEQ ID NO: 13380 - protein, 1211 aa, Artificial Sequence
  SARS-CoV-2/Guangdong/20SF028/2020__EPI_ISL_403936 spike protein (1-1211)(N914C_S1123C)
MFVFLVLLPLVSSQCVNLTTRTQLPPAYTNSFTRGVYYPDKVFRSSVLYSTQDLFLPFFSNVTWFHAIHVSGTNGTKRFDNPVLPFNDGVYFASTEKSNIIRGWIFGTTLDSKTQSLLIVNNATNVVIKVCEFQFCNDPFLGVYYHKNNKSWMESEFRVYSSANNCTFEYVSQPFLMDLEGKQGNFKNLREFVFKNIDGYFKIYSKHTPINLVRDLPQGFSALEPLVDLPIGINITRFQTLLALHRSYLTPGDSSSGWTAGAAAYYVGYLQPRTFLLKYNENGTITDAVDCALDPLSETKCTLKSFTVEKGIYQTSNFRVQPTESIVRFPNITNLCPFGEVFNATRFASVYAWNRKRISNCVADYSVLYNSASFSTFKCYGVSPTKLNDLCFTNVYADSFVIRGDEVRQIAPGQTGKIADYNYKLPDDFTGCVIAWNSNNLDSKVGGNYNYLYRLFRKSNLKPFERDISTEIYQAGSTPCNGVEGFNCYFPLQSYGFQPTNGVGYQPYRVVVLSFELLHAPATVCGPKKSTNLVKNKCVNFNFNGLTGTGVLTESNKKFLPFQQFGRDIADTTDAVRDPQTLEILDITPCSFGGVSVITPGTNTSNQVAVLYQDVNCTEVPVAIHADQLTPTWRVYSTGSNVFQTRAGCLIGAEHVNNSYECDIPIGAGICASYQTQTNSPRRARSVASQSIIAYTMSLGAENSVAYSNNSIAIPTNFTISVTTEILPVSMTKTSVDCTMYICGDSTECSNLLLQYGSFCTQLNRALTGIAVEQDKNTQEVFAQVKQIYKTPPIKDFGGFNFSQILPDPSKPSKRSFIEDLLFNKVTLADAGFIKQYGDCLGDIAARDLICAQKFNGLTVLPPLLTDEMIAQYTSALLAGTITSGWTFGAGAALQIPFAMQMAYRFNGIGVTQCVLYENQKLIANQFNSAIGKIQDSLSSTASALGKLQDVVNQNAQALNTLVKQLSSNFGAISSVLNDILSRLDKVEAEVQIDRLITGRLQSLQTYVTQQLIRAAEIRASANLAATKMSECVLGQSKRVDFCGKGYHLMSFPQSAPHGVVFLHVTYVPAQEKNFTTAPAICHDGKAHFPREGVFVSNGTHWFVTQRNFYEPQIITTDNTFVCGNCDVVIGIVNNTVYDPLQPELDSFKEELDKYFKNHTSPDVDLGDISGINASVVNIQKEIDRLNEVAKNLNESLIDLQELGKYEQYIK

SEQ ID NO: 13381 - protein, 1211 aa, Artificial Sequence
  SARS-CoV-2/Shenzhen/SZTH-001/2020__EPI_ISL_406592 spike protein (1-1211)(N914C_S1123C)
MFVFLVLLPLVSSQCVNLTTRTQLPPAYTNSFTRGVYYPDKVFRSSVLHSTQDLFLPFFSNVTWFHAIHVSGTNGTKRFDNPVLPFNDGVYFASTEKSNIIRGWIFGTTLDSKTQSLLIVNNATNVVIKVCEFQFCNDPFLGVYYHKNNKSWMESEFRVYSSANNCTFEYVSQPFLMDLEGKQGNFKNLREFVFKNIDGYFKIYSKHTPINLVRDLPQGFSALEPLVDLPIGINITRFQTLLALHRSYLTPGDSSSGWTAGAAAYYVGYLQPRTFLLKYNENGTITDAVDCALDPLSETKCTLKSFTVEKGIYQTSNFRVQPTESIVRFPNITNLCPFGEVFNATRFASVYAWNRKRISNCVADYSVLYNSASFSTFKCYGVSPTKLNDLCFTNVYADSFVIRGDEVRQIAPGQTGKIADYNYKLPDDFTGCVIAWNSNNLDSKVGGNYNYLYRLFRKSNLKPFERDISTEIYQAGSTPCNGVEGFNCYFPLQSYGFQPTNGVGYQPYRVVVLSFELLHAPATVCGPKKSTNLVKNKCVNFNFNGLTGTGVLTESNKKFLPFQQFGRDIADTTDAVRDPQTLEILDITPCSFGGVSVITPGTNTSNQVAVLYQDVNCTEVPVAIHADQLTPTWRVYSTGSNVFQTRAGCLIGAEHVNNSYECDIPIGAGICASYQTQTNSPRRARSVASQSIIAYTMSLGAENSVAYSNNSIAIPTNFTISVTTEILPVSMTKTSVDCTMYICGDSTECSNLLLQYGSFCTQLNRALTGIAVEQDKNTQEVFAQVKQIYKTPPIKDFGGFNFSQILPDPSKPSKRSFIEDLLFNKVTLADAGFIKQYGDCLGDIAARDLICAQKFNGLTVLPPLLTDEMIAQYTSALLAGTITSGWTFGAGAALQIPFAMQMAYRFNGIGVTQCVLYENQKLIANQFNSAIGKIQDSLSSTASALGKLQDVVNQNAQALNTLVKQLSSNFGAISSVLNDILSRLDKVEAEVQIDRLITGRLQSLQTYVTQQLIRAAEIRASANLAATKMSECVLGQSKRVDFCGKGYHLMSFPQSAPHGVVFLHVTYVPAQEKNFTTAPAICHDGKAHFPREGVFVSNGTHWFVTQRNFYEPQIITTDNTFVCGNCDVLIGIVNNTVYDPLQPELDSFKEELDKYFKNHTSPDVDLGDISGINASVVNIQKEIDRLNEVAKNLNESLIDLQELGKYEQYIK

SEQ ID NO: 13382 - protein, 1211 aa, Artificial Sequence
  SARS-CoV-2/Shenzhen/SZTH-004/2020__EPI_ISL_406595 spike protein (1-1211)(N914C_S1123C)
MFVFLVLLPLVSSQCVNLTTRTQLPPAYTNSFTRGVYYPDKVFRSSVLHSTQDLFLPFFSNVTWFHAIHVSGTNGTKRFDNPVLPFNDGVYFASTEKSNIIRGWIFGTTLDSKTQSLLIVNNATNVVIKVCEFQFCNDPFLGVYYHKNNKSWMESEFRVYSSANNCTFEYVSQPFLMDLEGKQGNFKNLREFVFKNIDGYFKIYSKHTPINLVRDLPQGFSALEPLVDLPIGINITRFQTLLALHRSYLTPGDSSSGWTAGAAAYYVGYLQPRTFLLKYNENGTITDAVDCALDPLSETKCTLKSFTVEKGIYQTSNFRVQPTESIVRFPNITNLCPFGEVFNATRFASVYAWDRKRISNCVAYYSVLYNSASFSTFKCYGVSPTKLNDLCFTNVYADSFVIRGDEVRQIAPGQTGKIADYNYKLPDDFTGCVIAWNSNNLDSKVGGNYNYLYRLFRKSNLKPFERDISTEIYQAGSTPCNGVEGFNCYFPLQSYGFQPTNGVGYQPYRVVVLSFELLHAPATVCGPKKSTNLVKNKCVNFNFNGLTGTGVLTESNKKFLPFQQFGRDIADTTDAVRDPQTLEILDITPCSFGGVSVITPGTNTSNQVAVLYQDVNCTEVPVAIHADQLTPTWRVYSTGSNVFQTRAGCLIGAEHVNNSYECDIPIGAGICASYQTQTNSPRRARSVASQSIIAYTMSLGAENSVAYSNNSIAIPTNFTISVTTEILPVSMTKTSVDCTMYICGDSTECSNLLLQYGSFCTQLNRALTGIAVEQDKNTQEVFAQVKQIYKTPPIKDFGGFNFSQILPDPSKPSKRSFIEDLLFNKVTLADAGFIKQYGDCLGDIAARDLICAQKFNGLTVLPPLLTDEMIAQYTSALLAGTITSGWTFGAGAALQIPFAMQMAYRFNGIGVTQCVLYENQKLIANQFNSAIGKIQDSLSSTASALGKLQDVVNQNAQALNTLVKQLSSNFGAISSVLNDILSRLDKVEAEVQIDRLITGRLQSLQTYVTQQLIRAAEIRASANLAATKMSECVLGQSKRVDFCGKGYHLMSFPQSAPHGVVFLHVTYVPAQEKNFTTAPAICHDGKAHFPREGVFVSNGTHWFVTQRNFYEPQIITTDNTFVCGNCDVVIGIVNNTVYDPLQPELDSFKEELDKYFKNHTSPDVDLGDISGINASVVNIQKEIDRLNEVAKNLNESLIDLQELGKYEQYIK

SEQ ID NO: 13383 - protein, 1211 aa, Artificial Sequence
  SARS-CoV-2/France/IDF0372/2020__EPI_ISL_406596 spike protein (1-1211)(N914C_S1123C)
MFVFLVLLPLVSSQCVNLTTRTQLPPAYTNSFTRGVYYPDKVFRSSVLHSTQDLFLPFFSNVTWFHAIHVSGTNGTKRFDNPVLPFNDGVYFASTEKSNIIRGWIFGTTLDSKTQSLLIVNNATNVVIKVCEFQFCNDPFLGVYYHKNNKSWMESEFRVYSSANNCTFEYVSQPFLMDLEGKQGNFKNLREFVFKNIDGYFKIYSKHTPINLVRDLPQGFSALEPLVDLPIGINITRFQTLLALHRSYLTPGDSSSGWTAGAAAYYVGYLQPRTFLLKYNENGTITDAVDCALDPLSETKCTLKSFTVEKGIYQTSNFRVQPTESIVRFPNITNLCPFGEVFNATRFASVYAWNRKRISNCVADYSFLYNSASFSTFKCYGVSPTKLNDLCFTNVYADSFVIRGDEVRQIAPGQTGKIADYNYKLPDDFTGCVIAWNSNNLDSKVGGNYNYLYRLFRKSNLKPFERDISTEIYQAGSTPCNGVEGFNCYFPLQSYGFQPTNGVGYQPYRVVVLSFELLHAPATVCGPKKSTNLVKNKCVNFNFNGLTGTGVLTESNKKFLPFQQFGRDIADTTDAVRDPQTLEILDITPCSFGGVSVITPGTNTSNQVAVLYQDVNCTEVPVAIHADQLTPTWRVYSTGSNVFQTRAGCLIGAEHVNNSYECDIPIGAGICASYQTQTNSPRRARSVASQSIIAYTMSLGAENSVAYSNNSIAIPTNFTISVTTEILPVSMTKTSVDCTMYICGDSTECSNLLLQYGSFCTQLNRALTGIAVEQDKNTQEVFAQVKQIYKTPPIKDFGGFNFSQILPDPSKPSKRSFIEDLLFNKVTLADAGFIKQYGDCLGDIAARDLICAQKFNGLTVLPPLLTDEMIAQYTSALLAGTITSGWTFGAGAALQIPFAMQMAYRFNGIGVTQCVLYENQKLIANQFNSAIGKIQDSLSSTASALGKLQDVVNQNAQALNTLVKQLSSNFGAISSVLNDILSRLDKVEAEVQIDRLITGRLQSLQTYVTQQLIRAAEIRASANLAATKMSECVLGQSKRVDFCGKGYHLMSFPQSAPHGVVFLHVTYVPAQEKNFTTAPAICHDGKAHFPREGVFVSNGTHWFVTQRNFYEPQIITTDNTFVCGNCDVVIGIVNNTVYDPLQPELDSFKEELDKYFKNHTSPDVDLGDISGINASVVNIQKEIDRLNEVAKNLNESLIDLQELGKYEQYIK

SEQ ID NO: 13384 - protein, 1211 aa, Artificial Sequence
  SARS-CoV-2/Australia/VIC01/2020__EPI_ISL_406844 spike protein (1-1211)(N914C_S1123C)
MFVFLVLLPLVSSQCVNLTTRTQLPPAYTNSFTRGVYYPDKVFRSSVLHSTQDLFLPFFSNVTWFHAIHVSGTNGTKRFDNPVLPFNDGVYFASTEKSNIIRGWIFGTTLDSKTQSLLIVNNATNVVIKVCEFQFCNDPFLGVYYHKNNKSWMESEFRVYSSANNCTFEYVSQPFLMDLEGKQGNFKNLREFVFKNIDGYFKIYSKHTPINLVRDLPQGFSALEPLVDLPIGINITRFQTLLALHRRYLTPGDSSSGWTAGAAAYYVGYLQPRTFLLKYNENGTITDAVDCALDPLSETKCTLKSFTVEKGIYQTSNFRVQPTESIVRFPNITNLCPFGEVFNATRFASVYAWNRKRISNCVADYSVLYNSASFSTFKCYGVSPTKLNDLCFTNVYADSFVIRGDEVRQIAPGQTGKIADYNYKLPDDFTGCVIAWNSNNLDSKVGGNYNYLYRLFRKSNLKPFERDISTEIYQAGSTPCNGVEGFNCYFPLQSYGFQPTNGVGYQPYRVVVLSFELLHAPATVCGPKKSTNLVKNKCVNFNFNGLTGTGVLTESNKKFLPFQQFGRDIADTTDAVRDPQTLEILDITPCSFGGVSVITPGTNTSNQVAVLYQDVNCTEVPVAIHADQLTPTWRVYSTGSNVFQTRAGCLIGAEHVNNSYECDIPIGAGICASYQTQTNSPRRARSVASQSIIAYTMSLGAENSVAYSNNSIAIPTNFTISVTTEILPVSMTKTSVDCTMYICGDSTECSNLLLQYGSFCTQLNRALTGIAVEQDKNTQEVFAQVKQIYKTPPIKDFGGFNFSQILPDPSKPSKRSFIEDLLFNKVTLADAGFIKQYGDCLGDIAARDLICAQKFNGLTVLPPLLTDEMIAQYTSALLAGTITSGWTFGAGAALQIPFAMQMAYRFNGIGVTQCVLYENQKLIANQFNSAIGKIQDSLSSTASALGKLQDVVNQNAQALNTLVKQLSSNFGAISSVLNDILSRLDKVEAEVQIDRLITGRLQSLQTYVTQQLIRAAEIRASANLAATKMSECVLGQSKRVDFCGKGYHLMSFPQSAPHGVVFLHVTYVPAQEKNFTTAPAICHDGKAHFPREGVFVSNGTHWFVTQRNFYEPQIITTDNTFVCGNCDVVIGIVNNTVYDPLQPELDSFKEELDKYFKNHTSPDVDLGDISGINASVVNIQKEIDRLNEVAKNLNESLIDLQELGKYEQYIK

SEQ ID NO: 13385 - protein, 1211 aa, Artificial Sequence
  SARS-CoV-2/Germany/BavPat1/2020__EPI_ISL_406862 spike protein (1-1211)(N914C_S1123C)
MFVFLVLLPLVSSQCVNLTTRTQLPPAYTNSFTRGVYYPDKVFRSSVLHSTQDLFLPFFSNVTWFHAIHVSGTNGTKRFDNPVLPFNDGVYFASTEKSNIIRGWIFGTTLDSKTQSLLIVNNATNVVIKVCEFQFCNDPFLGVYYHKNNKSWMESEFRVYSSANNCTFEYVSQPFLMDLEGKQGNFKNLREFVFKNIDGYFKIYSKHTPINLVRDLPQGFSALEPLVDLPIGINITRFQTLLALHRSYLTPGDSSSGWTAGAAAYYVGYLQPRTFLLKYNENGTITDAVDCALDPLSETKCTLKSFTVEKGIYQTSNFRVQPTESIVRFPNITNLCPFGEVFNATRFASVYAWNRKRISNCVADYSVLYNSASFSTFKCYGVSPTKLNDLCFTNVYADSFVIRGDEVRQIAPGQTGKIADYNYKLPDDFTGCVIAWNSNNLDSKVGGNYNYLYRLFRKSNLKPFERDISTEIYQAGSTPCNGVEGFNCYFPLQSYGFQPTNGVGYQPYRVVVLSFELLHAPATVCGPKKSTNLVKNKCVNFNFNGLTGTGVLTESNKKFLPFQQFGRDIADTTDAVRDPQTLEILDITPCSFGGVSVITPGTNTSNQVAVLYQGVNCTEVPVAIHADQLTPTWRVYSTGSNVFQTRAGCLIGAEHVNNSYECDIPIGAGICASYQTQTNSPRRARSVASQSIIAYTMSLGAENSVAYSNNSIAIPTNFTISVTTEILPVSMTKTSVDCTMYICGDSTECSNLLLQYGSFCTQLNRALTGIAVEQDKNTQEVFAQVKQIYKTPPIKDFGGFNFSQILPDPSKPSKRSFIEDLLFNKVTLADAGFIKQYGDCLGDIAARDLICAQKFNGLTVLPPLLTDEMIAQYTSALLAGTITSGWTFGAGAALQIPFAMQMAYRFNGIGVTQCVLYENQKLIANQFNSAIGKIQDSLSSTASALGKLQDVVNQNAQALNTLVKQLSSNFGAISSVLNDILSRLDKVEAEVQIDRLITGRLQSLQTYVTQQLIRAAEIRASANLAATKMSECVLGQSKRVDFCGKGYHLMSFPQSAPHGVVFLHVTYVPAQEKNFTTAPAICHDGKAHFPREGVFVSNGTHWFVTQRNFYEPQIITTDNTFVCGNCDVVIGIVNNTVYDPLQPELDSFKEELDKYFKNHTSPDVDLGDISGINASVVNIQKEIDRLNEVAKNLNESLIDLQELGKYEQYIK

SEQ ID NO: 13386 - protein, 1211 aa, Artificial Sequence
  SARS-CoV-2/Wuhan/HBCDC-HB-02/2020__EPI_ISL_412978 spike protein (1-1211)(N914C_S1123C)
MFVFLVLLPLVSSQCVNLTTRTQLPPAYTNSFTRGVYYPDKVFRSSVLHSTQDLFLPFFSNVTWFHAIHVSGTNGTKRFDNPVLPFNDGVYFASTEKSNIIRGWIFGTTLDSKTQSLLIVNNATNVVIKVCEFQFCNDPFLGVYYHKNNKSWMESEFRVYSSANNCTFEYVSQPFLMDLEGKQGNFKNLREFVFKNIDGYFKIYSKHTPINLVRDLPQGFSALEPLVDLPIGINITRFQTLLALHRSYLTPGDSSSGWTAGAAAYYVGYLQPRTFLLKYNENGTITDAVDCALDPLSETKCTLKSFTVEKGIYQTSNFRVQPTESIVRFPNITNLCPFGEVFNATRFASVYAWNRKRISNCVADYSVLYNSASFSTFKCYGVSPTKLNDLCFTNVYADSFVIRGDEVRQIAPGQTGKIADYNYKLPDDFTGCVIAWNSNNLDSKVGGNYNYLYRLFRKSNLKPFERDISTEIYQAGSTPCNGVEGFNCYFPLQSYGFQPTNGVGYQPYRVVVLSFELLHAPATVCGPKKSTNLVKNKCVNFNFNGLTGTGVLTESNKKFLPFQQFGRDIADTTDAVRDPQTLEILDITPCSFGGVSVITPGTNTSNQVAVLYQDVNCTEVPVAIHADQLTPTWRVYSTGSNVFQTRAGCLIGAEHVNNSYECDIPIGAGICASYQTQTNSPRRARSVASQSIIAYTMSLGAENSVAYSNNSIAIPTNFTISVTTEILPVSMTKTSVDCTMYICGDSTECSNFLLQYGSFCTQLNRALTGIAVEQDKNTQEVFAQVKQIYKTPPIKDFGGFNFSQILPDPSKPSKRSFIEDLLFNKVTLADAGFIKQYGDCLGDIAARDLICAQKFNGLTVLPPLLTDEMIAQYTSALLAGTITSGWTFGAGAALQIPFAMQMAYRFNGIGVTQCVLYENQKLIANQFNSAIGKIQDSLSSTASALGKLQDVVNQNAQALNTLVKQLSSNFGAISSVLNDILSRLDKVEAEVQIDRLITGRLQSLQTYVTQQLIRAAEIRASANLAATKMSECVLGQSKRVDFCGKGYHLMSFPQSAPHGVVFLHVTYVPAQEKNFTTAPAICHDGKAHFPREGVFVSNGTHWFVTQRNFYEPQIITTDNTFVCGNCDVVIGIVNNTVYDPLQPELDSFKEELDKYFKNHTSPDVDLGDISGINASVVNIQKEIDRLNEVAKNLNESLIDLQELGKYEQYIK

SEQ ID NO: 13387 - protein, 1211 aa, Artificial Sequence
  SARS-CoV-2/Australia/QLD02/2020__EPI_ISL_407896 spike protein (1-1211)(N914C_S1123C)
MFVFLVLLPLVSSQCVNLTTRTQLPPAYTNSFTRGVYYPDKVFRSSVLHSTQDLFLPFFSNVTWFHAIHVSGTNGTKRFDNPVLPFNDGVYFASTEKSNIIRGWIFGTTLDSKTQSLLIVNNATNVVIKVCEFQFCNDPFLGVYYHKNNKSWMESEFRVYSSANNCTFEYVSQPFLMDLEGKQGNFKNLREFVFKNIDGYFKIYSKHTPINLVRDLPQGFSALEPLVDLPIGINITRFQTLLALHRSYLTPGDSSSGWTAGAAAYYVGYLQPRTFLLKYNENGTITDAVDCALDPLSETKCTLKSFTVEKGIYQTSNFRVQPTESIVRFPNITNLCPFGEVFNATRFASVYAWNRKRISNCVADYSVLYNSASFSTFKCYGVSPTKLNDLCFTNVYADSFVIRGDEVRQIAPGQTGKIADYNYKLPDDFTGCVIAWNSNNLDSKVGGNYNYLYRLFRKSNLKPFERDISTEIYQAGSTPCNGVEGFNCYFPLQSYGFQPTNGVGYQPYRVVVLSFELLHAPATVCGPKKSTNLVKNKCVNFNFNGLTGTGVLTESNKKFLPFQQFGRDIADTTDAVRDPQTLEILDITPCSFGGVSVITPGTNTSNQVAVLYQDVNCTEVPVAIHADQLTPTWRVYSTGSNVFQTRAGCLIGAEHVNNSYECDIPIGAGICASYQTQTNSPRRARSVASQSIIAYTMSLGAENSVAYSNNSIAIPTNFTISVTTEILPVSMTKTSVDCTMYICGDSTECSNLLLQYGSFCTQLNRALTGIAVEQDKNTQEVFAQVKQIYKTPPIKDFGGFNFSQILPDPSKPSKRSFIEDLLFNKVTLADAGFIKQYGDCLGDIAARDLICAQKFNGLTVLPPLLTDEMIAQYTSALLAGTITSGWTFGAGAALQIPFAMQMAYRFNGIGVTQCVLYENQKLIANQFNSAIGKIQDSLSSTASALGKLQDVVNQNAQALNTLVKQLSSNFGAISSVLNDILSRLDKVEAEVQIDRLITGRLQSLQTYVTQQLIRAAEIRASANLAATKMSECVLGQSKRVDFCGKGYHLMSFPQSAPHGVVFLHVTYVPAQEKNFTTAPAICHDGKAHFPREGVFVSNGTHWFVTQRNFYEPQIITTDNTFVCGNCDVVIGIVNNTVYDPLQLELDSFKEELDKYFKNHTSPDVDLGDISGINASVVNIQKEIDRLNEVAKNLNESLIDLQELGKYEQYIK

SEQ ID NO: 13388 - protein, 1211 aa, Artificial Sequence
  SARS-CoV-2/India/1-31/2020__EPI_ISL_413523 spike protein (1-1211)(N914C_S1123C)
MFVFLVLLPLVSSQCVNLTTRTQLPPAYTNSFTRGVYYPDKVFRSSVLHSTQDLFLPFFSNVTWFHAIHVSGTNGTKRFDNPVLPFNDGVYFASTEKSNIIRGWIFGTTLDSKTQSLLIVNNATNVVIKVCEFQFCNDPFLGVYYHKNNKSWMESEFRVYSSANNCTFEYVSQPFLMDLEGKQGNFKNLREFVFKNIDGYFKIYSKHTPINLVRDLPQGFSALEPLVDLPIGINITRFQTLLALHRSYLTPGDSSSGWTAGAAAYYVGYLQPRTFLLKYNENGTITDAVDCALDPLSETKCTLKSFTVEKGIYQTSNFRVQPTESIVRFPNITNLCPFGEVFNATRFASVYAWNRKRISNCVADYSVLYNSASFSTFKCYGVSPTKLNDLCFTNVYADSFVIRGDEVRQIAPGQTGKIADYNYKLPDDFTGCVIAWNSNNLDSKVGGNYNYLYRLFRKSNLKPFERDISTEIYQAGSTPCNGVEGFNCYFPLQSYGFQPTNGVGYQPYRVVVLSFELLHAPATVCGPKKSTNLVKNKCVNFNFNGLTGTGVLTESNKKFLPFQQFGRDIADTTDAVRDPQTLEILDITPCSFGGVSVITPGTNTSNQVAVLYQDVNCTEVPVAIHADQLTPTWRVYSTGSNVFQTRAGCLIGAEHVNNSYECDIPIGAGICASYQTQTNSPRRARSVASQSIIAYTMSLGAENSVAYSNNSIAIPTNFTISVTTEILPVSMTKTSVDCTMYICGDSTECSNLLLQYGSFCTQLNRALTGIAVEQDKNTQEVFAQVKQIYKTPPIKDFGGFNFSQILPDPSKPSKRSFIEDLLFNKVTLADAGFIKQYGDCLGDIAARDLICAQKFNGLTVLPPLLTDEMIAQYTSALLAGTITSGWTFGAGAALQIPFAMQMAYRFNGIGVTQCVLYENQKLIANQFNSVIGKIQDSLSSTASALGKLQDVVNQNAQALNTLVKQLSSNFGAISSVLNDILSRLDKVEAEVQIDRLITGRLQSLQTYVTQQLIRAAEIRASANLAATKMSECVLGQSKRVDFCGKGYHLMSFPQSAPHGVVFLHVTYVPAQEKNFTTAPAICHDGKAHFPREGVFVSNGTHWFVTQRNFYEPQIITTDNTFVCGNCDVVIGIVNNTVYDPLQPELDSFKEELDKYFKNHTSPDVDLGDISGINASVVNIQKEIDRLNEVAKNLNESLIDLQELGKYEQYIK

SEQ ID NO: 13389 - protein, 1211 aa, Artificial Sequence
  SARS-CoV-2/Guangdong/GD2020087-P0008/2020__EPI_ISL_413863 spike protein (1-1211)(N914C_S1123C)
MFVFLVLLPLVSSQCVNLTTRTQLPPAYTNSFTRGVYYPDKVFRSSVLHSTQDLFLPFFSNVTWFHAIHVSGTNGTKRFDNPVLPFNDGVYFASTEKSNIIRGWIFGTTLDSKTQSLLIVNNATNVVIKVCEFQFCNDPFLGVYYHKNNKSWMESEFRVYSSANNCTFEYVSQPFLMDLEGKQGNFKNLREFVFKNIDGYFKIYSKHTPINLVRDLPQGFSALEPLVDLPIGINITRFQTLLALHRSYLTPGDSSSGWTAGAAAYYVGYLQPRTFLLKYNENGTITDAVDCALDPLSETKCTLKSFTVEKGIYQTSNFRVQPTESIVRFPNITNLCPFGEVFNATRFASVYAWNRKRISNCVADYSVLYNSASFSTFKCYGVSPTKLNDLCFTNVYADSFVIRGDEVREIAPGQTGKIADYNYKLPDDFTGCVIAWNSNNLDSKVGGNYNYLYRLFRKSNLKPFERDISTEIYQAGSTPCNGVEGFNCYFPLQSYGFQPTNGVGYQPYRVVVLSFELLHAPATVCGPKKSTNLVKNKCVNFNFNGLTGTGVLTESNKKFLPFQQFGRDIADTTDAVRDPQTLEILDITPCSFGGVSVITPGTNTSNQVAVLYQDVNCTEVPVAIHADQLTPTWRVYSTGSNVFQTRAGCLIGAEHVNNSYECDIPIGAGICASYQTQTNSPRRARSVASQSIIAYTMSLGAENSVAYSNNSIAIPTNFTISVTTEILPVSMTKTSVDCTMYICGDSTECSNLLLQYGSFCTQLNRALTGIAVEQDKNTQEVFAQVKQIYKTPPIKDFGGFNFSQILPDPSKPSKRSFIEDLLFNKVTLADAGFIKQYGDCLGDIAARDLICAQKFNGLTVLPPLLTDEMIAQYTSALLAGTITSGWTFGAGAALQIPFAMQMAYRFNGIGVTQCVLYENQKLIANQFNSAIGKIQDSLSSTASALGKLQDVVNQNAQALNTLVKQLSSNFGAISSVLNDILSRLDKVEAEVQIDRLITGRLQSLQTYVTQQLIRAAEIRASANLAATKMSECVLGQSKRVDFCGKGYHLMSFPQSAPHGVVFLHVTYVPAQEKNFTTAPAICHDGKAHFPREGVFVSNGTHWFVTQRNFYEPQIITTDNTFVCGNCDVVIGIVNNTVYDPLQPELDSFKEELDKYFKNHTSPDVDLGDISGINASVVNIQKEIDRLNEVAKNLNESLIDLQELGKYEQYIK

SEQ ID NO: 13390 - protein, 1211 aa, Artificial Sequence
  SARS-CoV-2/Sweden/01/2020__EPI_ISL_411951 spike protein (1-1211)(N914C_S1123C)
MFVFLVLLPLVSSQCVNLTTRTQLPPAYTNSFTRGVYYPDKVFRSSVLHSTQDLFLPFFSNVTWFHAIHVSGTNGTKRFDNPVLPFNDGVYFASTEKSNIIRGWIFGTTLDSKTQSLLIVNNATNVVIKVCEFQFCNDPFLGVYYHKNNKSWMESEFRVYSSANNCTFEYVSQPFLMDLEGKQGNFKNLREFVFKNIDGYFKIYSKHTPINLVRDLPQGFSALEPLVDLPIGINITRFQTLLALHRSYLTPGDSSSGWTAGAAAYYVGYLQPRTFLLKYNENGTITDAVDCALDPLSETKCTLKSFTVEKGIYQTSNFRVQPTESIVRFPNITNLCPFGEVFNATRFASVYAWNRKRISNCVADYSVLYNSASFSTFKCYGVSPTKLNDLCFTNVYADSFVIRGDEVRQIAPGQTGKIADYNYKLPDDFTGCVIAWNSNNLDSKVGGNYNYLYRLFRKSNLKPFERDISTEIYQAGSTPCNGVEGFNCYFPLQSYGFQPTNGVGYQPYRVVVLSFELLHAPATVCGPKKSTNLVKNKCVNFNFNGLTGTGVLTESNKKFLPFQQFGRDIADTTDAVRDPQTLEILDITPCSFGGVSVITPGTNTSNQVAVLYQDVNCTEVPVAIHADQLTPTWRVYSTGSNVFQTRAGCLIGAEHVNNSYECDIPIGAGICASYQTQTNSPRRARSVASQSIIAYTMSLGAENSVAYSNNSIAIPTNFTISVTTEILPVSMTKTSVDCTMYICGDSTECSNLLLQYGSFCTQLNRALTGIAVEQDKNTQEVFAQVKQIYKTPPIKDCGGFNFSQILPDPSKPSKRSFIEDLLFNKVTLADAGFIKQYGDCLGDIAARDLICAQKFNGLTVLPPLLTDEMIAQYTSALLAGTITSGWTFGAGAALQIPFAMQMAYRFNGIGVTQCVLYENQKLIANQFNSAIGKIQDSLSSTASALGKLQDVVNQNAQALNTLVKQLSSNFGAISSVLNDILSRLDKVEAEVQIDRLITGRLQSLQTYVTQQLIRAAEIRASANLAATKMSECVLGQSKRVDFCGKGYHLMSFPQSAPHGVVFLHVTYVPAQEKNFTTAPAICHDGKAHFPREGVFVSNGTHWFVTQRNFYEPQIITTDNTFVCGNCDVVIGIVNNTVYDPLQPELDSFKEELDKYFKNHTSPDVDLGDISGINASVVNIQKEIDRLNEVAKNLNESLIDLQELGKYEQYIK

SEQ ID NO: 13391 - protein, 1211 aa, Artificial Sequence
  SARS-CoV-2/Tianmen/HBCDC-HB-07/2020__EPI_ISL_412983 spike protein (1-1211)(N914C_S1123C)
MFVFLVLLPLVSSQCVNLTTRTQLPPAYTNSFTRGVYYPDKVFRSSVLHSTQDLFLPFFSNVTWFHAIHVSGTNGTKRFDNPVLPFNDGVYFASTEKSNIIRGWIFGTTLDSKTQSLLIVNNATNVVIKVCEFQFCNDPFLGVYYHKNNKSWMESEFRVYSSANNCTFEYVSQPFLMDLEGKQGNFKNLREFVFKNIDGYFKIYSKHTPINLVRDLPQGFSALEPLVDLPIGINITRFQTLLALHRSYLTPGDSSSGWTAGAAAYYVGYLQPRTFLLKYNENGTITDAVDCALDPLSETKCTLKSFTVEKGIYQTSNFRVQPTESIVRFPNITNLCPFGEVFNATRFASVYAWNRKRISNCVADYSVLYNSASFSTFKCYGVSPTKLNDLCFTNVYADSFVIRGDEVRQIAPGQTGKIADYNYKLPDDFTGCVIAWNSNNLDSKVGGNYNYLYRLFRKSNLKPFERDISTEIYQAGSTPCNGVEGFNCYFPLQSYGFQPTNGVGYQPYRVVVLSFELLHAPATVCGPKKSTNLVKNKCVNFNFNGLTGTGVLTESNKKFLPFQQFGRDIADTTDAVRDPQTLEILDITPCSFGGVSVITPGTNTSNQVAVLYQDLNCTEVPVAIHADQLTPTWRVYSTGSNVFQTRAGCLIGAEHVNNSYECDIPIGAGICASYQTQTNSPRRARSVASQSIIAYTMSLGAENSVAYSNNSIAIPTNFTISVTTEILPVSMTKTSVDCTMYICGDSTECSNLLLQYGSFCTQLNRALTGIAVEQDKNTQEVFAQVKQIYKTPPIKDFGGFNFSQILPDPSKPSKRSFIEDLLFNKVTLADAGFIKQYGDCLGDIAARDLICAQKFNGLTVLPPLLTDEMIAQYTSALLAGTITSGWTFGAGAALQIPFAMQMAYRFNGIGVTQCVLYENQKLIANQFNSAIGKIQDSLSSTASALGKLQDVVNQNAQALNTLVKQLSSNFGAISSVLNDILSRLDKVEAEVQIDRLITGRLQSLQTYVTQQLIRAAEIRASANLAATKMSECVLGQSKRVDFCGKGYHLMSFPQSAPHGVVFLHVTYVPAQEKNFTTAPAICHDGKAHFPREGVFVSNGTHWFVTQRNFYEPQIITTDNTFVCGNCDVVIGIVNNTVYDPLQPELDSFKEELDKYFKNHTSPDVDLGDISGINASVVNIQKEIDRLNEVAKNLNESLIDLQELGKYEQYIK

SEQ ID NO: 13392 - protein, 1211 aa, Artificial Sequence
  SARS-CoV-2/Hong Kong/case42_VM20002493/2020__EPI_ISL_414527 spike protein (1-1211)(N914C_S1123C)
MFVFLVLLPLVSSQCVNLTTRTQLPPAYTNSFTRGVYYPDKVFRSSVLHSTQDLFLPFFSNVTWFHAIHVSGTNGTKRFDNPVLPFNDGVYFASTEKSNIIRGWIFGTTLDSKTQSLLIVNNATNVVIKVCEFQFCNDPFLGVYYHKNNKSWMESEFRVYSSANNCTFEYVSQPFLMDLEGKQGNFKNLREFVFKNIDGYFKIYSKHTPINLVRDLPQGFSALEPLVDLPIGINITRFQTLLALHRSYLTPGDSSSGWTAGAAAYYVGYLQPRTFLLKYNENGTITDAVDCALDPLSETKCTLKSFTVEKGIYQTSNFRVQPTESIVRFPNITNLCPFGEVFNATRFASVYAWNRKRISNCVADYSVLYNSASFSTFKCYGVSPTKLNDLCFTNVYADSFVIRGDEVRQIAPGQTGKIADYNYKLPDDFTGCVIAWNSNNLDSKVGGNYNYLYRLFRKSNLKPFERDISTEIYQAGSTPCNGVEGFNCYFPLQSYGFQPTNGVGYQPYRVVVLSFELLHAPATVCGPKKSTNLVKNKCVNFNFNGLTGTGVLTESNKKFLPFQQFGRDIADTTDAVRDPQTLEILDITPCSFGGVSVITPGTNTSNQVAVLYQDVNCTEVPVAIHADQLTPTWRVYSTGSNVFQTRAGCLIGAEHVNNSYECDIPIGAGICASYQTQTNSPRRARSVASQSIIAYTMSLGAENSVAYSNNSIAIPTNFAISVTTEILPVSMTKTSVDCTMYICGDSTECSNLLLQYGSFCTQLNRALTGIAVEQDKNTQEVFAQVKQIYKTPPIKDFGGFNFSQILPDPSKPSKRSFIEDLLFNKVTLADAGFIKQYGDCLGDIAARDLICAQKFNGLTVLPPLLTDEMIAQYTSALLAGTITSGWTFGAGAALQIPFAMQMAYRFNGIGVTQCVLYENQKLIANQFNSAIGKIQDSLSSTASALGKLQDVVNQNAQALNTLVKQLSSNFGAISSVLNDILSRLDKVEAEVQIDRLITGRLQSLQTYVTQQLIRAAEIRASANLAATKMSECVLGQSKRVDFCGKGYHLMSFPQSAPHGVVFLHVTYVPAQEKNFTTAPAICHDGKAHFPREGVFVSNGTHWFVTQRNFYEPQIITTDNTFVCGNCDVVIGIVNNTVYDPLQPELDSFKEELDKYFKNHTSPDVDLGDISGINASVVNIQKEIDRLNEVAKNLNESLIDLQELGKYEQYIK

SEQ ID NO: 13393 - protein, 1211 aa, Artificial Sequence
  SARS-CoV-2/USA/CruiseA-23/2020__EPI_ISL_414482 spike protein (1-1211)(N914C_S1123C)
MFVFLVLLPLVSSQCVNLTTRTQLPPAYTNSFTRGVYYPDKVFRSSVLHSTQDLFLPFFSNVTWFHAIHVSGTNGTKRFDNPVLPFNDGVYFASTEKSNIIRGWIFGTTLDSKTQSLLIVNNATNVVIKVCEFQFCNDPFLGVYYHKNNKSWMESEFRVYSSANNCTFEYVSQPFLMDLEVKQGNFKNLREFVFKNIDGYFKIYSKHTPINLVRDLPQGFSALEPLVDLPIGINITRFQTLLALHRSYLTPGDSSSGWTAGAAAYYVGYLQPRTFLLKYNENGTITDAVDCALDPLSETKCTLKSFTVEKGIYQTSNFRVQPTESIVRFPNITNLCPFGEVFNATRFASVYAWNRKRISNCVADYSVLYNSASFSTFKCYGVSPTKLNDLCFTNVYADSFVIRGDEVRQIAPGQTGKIADYNYKLPDDFTGCVIAWNSNNLDSKVGGNYNYLYRLFRKSNLKPFERDISTEIYQAGSTPCNGVEGFNCYFPLQSYGFQPTNGVGYQPYRVVVLSFELLHAPATVCGPKKSTNLVKNKCVNFNFNGLTGTGVLTESNKKFLPFQQFGRDIADTTDAVRDPQTLEILDITPCSFGGVSVITPGTNTSNQVAVLYQDVNCTEVPVAIHADQLTPTWRVYSTGSNVFQTRAGCLIGAEHVNNSYECDIPIGAGICASYQTQTNSPRRARSVASQSIIAYTMSLGAENSVAYSNNSIAIPTNFTISVTTEILPVSMTKTSVDCTMYICGDSTECSNLLLQYGSFCTQLNRALTGIAVEQDKNTQEVFAQVKQIYKTPPIKDFGGFNFSQILPDPSKPSKRSFIEDLLFNKVTLADAGFIKQYGDCLGDIAARDLICAQKFNGLTVLPPLLTDEMIAQYTSALLAGTITSGWTFGAGAALQIPFAMQMAYRFNGIGVTQCVLYENQKLIANQFNSAIGKIQDSLSSTASALGKLQDVVNQNAQALNTLVKQLSSNFGAISSVLNDILSRLDKVEAEVQIDRLITGRLQSLQTYVTQQLIRAAEIRASANLAATKMSECVLGQSKRVDFCGKGYHLMSFPQSAPHGVVFLHVTYVPAQEKNFTTAPAICHDGKAHFPREGVFVSNGTHWFVTQRNFYEPQIITTDNTFVCGNCDVVIGIVNNTVYDPLQPELDSFKEELDKYFKNHTSPDVDLGDISGINASVVNIQKEIDRLNEVAKNLNESLIDLQELGKYEQYIK

SEQ ID NO: 13394 - protein, 1211 aa, Artificial Sequence
  SARS-CoV-2/Hong Kong/case85_VM20002868/2020__EPI_ISL_414519 spike protein (1-1211)(N914C_S1123C)
MFVFLVLVPLVSSQCVNLTTRTQLPPAYTNSFTRGVYYPDKVFRSSVLHSTQDLFLPFFSNVTWFHAIHVSGTNGTKRFDNPVLPFNDGVYFASTEKSNIIRGWIFGTTLDSKTQSLLIVNNATNVVIKVCEFQFCNDPFLGVYYHKNNKSWMESEFRVYSSANNCTFEYVSQPFLMDLEGKQGNFKNLREFVFKNIDGYFKIYSKHTPINLVRDLPQGFSALEPLVDLPIGINITRFQTLLALHRSYLTPGDSSSGWTAGAAAYYVGYLQPRTFLLKYNENGTITDAVDCALDPLSETKCTLKSFTVEKGIYQTSNFRVQPTESIVRFPNITNLCPFGEVFNATRFASVYAWNRKRISNCVADYSVLYNSASFSTFKCYGVSPTKLNDLCFTNVYADSFVIRGDEVRQIAPGQTGKIADYNYKLPDDFTGCVIAWNSNNLDSKVGGNYNYLYRLFRKSNLKPFERDISTEIYQAGSTPCNGVEGFNCYFPLQSYGFQPTNGVGYQPYRVVVLSFELLHAPATVCGPKKSTNLVKNKCVNFNFNGLTGTGVLTESNKKFLPFQQFGRDIADTTDAVRDPQTLEILDITPCSFGGVSVITPGTNTSNQVAVLYQDVNCTEVPVAIHADQLTPTWRVYSTGSNVFQTRAGCLIGAEHVNNSYECDIPIGAGICASYQTQTNSPRRARSVASQSIIAYTMSLGAENSVAYSNNSIAIPTNFTISVTTEILPVSMTKTSVDCTMYICGDSTECSNLLLQYGSFCTQLNRALTGIAVEQDKNTQEVFAQVKQIYKTPPIKDFGGFNFSQILPDPSKPSKRSFIEDLLFNKVTLADAGFIKQYGDCLGDIAARDLICAQKFNGLTVLPPLLTDEMIAQYTSALLAGTITSGWTFGAGAALQIPFAMQMAYRFNGIGVTQCVLYENQKLIANQFNSAIGKIQDSLSSTASALGKLQDVVNQNAQALNTLVKQLSSNFGAISSVLNDILSRLDKVEAEVQIDRLITGRLQSLQTYVTQQLIRAAEIRASANLAATKMSECVLGQSKRVDFCGKGYHLMSFPQSAPHGVVFLHVTYVPAQEKNFTTAPAICHDGKAHFPREGVFVSNGTHWFVTQRNFYEPQIITTDNTFVCGNCDVVIGIVNNTVYDPLQPELDSFKEELDKYFKNHTSPDVDLGDISGINASVVNIQKEIDRLNEVAKNLNESLIDLQELGKYEQYIK

SEQ ID NO: 13395 - protein, 1211 aa, Artificial Sequence; identical to SEQ ID NO: 13385
  SARS-CoV-2/England/200990660/2020__EPI_ISL_414523 spike protein (1-1211)(N914C_S1123C)

SEQ ID NO: 13396 - protein, 1211 aa, Artificial Sequence
  SARS-CoV-2/Australia/NSW09/2020__EPI_ISL_413595 spike protein (1-1211)(N914C_S1123C)
MFVFLVLLPLVSSQCVNLTTRTQLPPAYTNSFTRGVYYPDKVFRSSVLHSTQDLFLPFFSNVTWFHAIHVSGTNGTKRFDNPVLPFNDGVYFASTEKSNIIRGWIFGTTLDSKTQSLLIVNNATNVVIKVCEFQFCNDPFLGVYYHKNNKSWMESEFRVYSSANNCTFEYVSQPFLMDLEGKQGNFKNLREFVFKNIDGYFKIYSKHTPINLVRDLPQGFSALEPLVDLPIGINITRFQTLLALHRSYLTPGDSSSGWTAGAAAYYVGYLQPRTFLLKYNENGTITDAVDCALDPLSETKCTLKSFTVEKGIYQTSNFRVQPTESIVRFPNITNLCPFGEVFNATRFASVYAWNRKRISNCVADYSVLYNSASFSTFKCYGVSPTKLNDLCFTNVYADSFVIRGDEVRQIAPGQTGKIADYNYKLPDDFTGCVIAWNSNNLDSKVGGNYNYLYRLFRKSNLKPFERDISTEIYQAGSTPCNGVEGFNCYFPLQSYGFQPTNGVGYQPYRVVVLSFELLHAPATVCGPKKSTNLVKNKCVNFNFNGLTGTGVLTESNKKFLPFQQFGRDIADTTDAVRDPQTLEILDITPCSFGGVSVITPGTNTSNQVAVLYQDVNCTEVPVAIHADQLTPTWRVYSTGSNVFQTRAGCLIGAEHVNNSYECDIPIGAGICASYQTQTNSPRRARSVASQSIIAYTMSLGAENSVAYSNNSIAIPTNFTISVTTEILPVSMTKTSVDCTMYICGDSTECSNLLLQYGSFCTQLNRALTGIAVEQDKNTQEVFAQVKQIYKTPPIKDFGGFNFSQILPDPSKPSKRSFIEDLLFNKVTLADAGFIKQYGDCLGDIAARDLICAQKFNGLTVLPPLLTDEMIAQYTSALLAGTITSGWTFGAGAALQIPFAMQMAYRFNGIGVTQCVLYENQKLIANQFNSAIGKIQDSLSFTASALGKLQDVVNQNAQALNTLVKQLSSNFGAISSVLNDILSRLDKVEAEVQIDRLITGRLQSLQTYVTQQLIRAAEIRASANLAATKMSECVLGQSKRVDFCGKGYHLMSFPQSAPHGVVFLHVTYVPAQEKNFTTAPAICHDGKAHFPREGVFVSNGTHWFVTQRNFYEPQIITTDNTFVCGNCDVVIGIVNNTVYDPLQPELDSFKEELDKYFKNHTSPDVDLGDISGINASVVNIQKEIDRLNEVAKNLNESLIDLQELGKYEQYIK

SEQ ID NO: 13397 - protein, 1211 aa, Artificial Sequence; identical to SEQ ID NO: 13377
  SARS-CoV-2/Australia/NSW10/2020__EPI_ISL_413596 spike protein (1-1211)(N914C_S1123C)

SEQ ID NO: 13398 - protein, 1211 aa, Artificial Sequence
  SARS-CoV-2/Switzerland/1000477797/2020__EPI_ISL_413023 spike protein (1-1211)(N914C_S1123C)
MFVFLVLLPLVSSQCVNLTTRTQLPPAYTNSFTRGVYYPDKVFRSSVLHSTQDLFLPFFSNVTWFHAIHVSGTNGTKRFDNPVLPFNDGVYFASTEKSNIIRGWIFGTTLDSKTQSLLIVNNATNVVIKVCEFQFCNDPFLGVYYHKNNKSWMESEFRVYSSANNCTFEYVSQPFLMDLEGKQGNFKNLREFVFKNIDGYFNIYSKHTPINLVRDLPQGFSALEPLVDLPIGINITRFQTLLALHRSYLTPGDSSSGWTAGAAAYYVGYLQPRTFLLKYNENGTITDAVDCALDPLSETKCTLKSFTVEKGIYQTSNFRVQPTESIVRFPNITNLCPFGEVFNATRFASVYAWNRKRISNCVADYSVLYNSASFSTFKCYGVSPTKLNDLCFTNVYADSFVIRGDEVRQIAPGQTGKIADYNYKLPDDFTGCVIAWNSNNLDSKVGGNYNYLYRLFRKSNLKPFERDISTEIYQAGSTPCNGVEGFNCYFPLQSYGFQPTNGVGYQPYRVVVLSFELLHAPATVCGPKKSTNLVKNKCVNFNFNGLTGTGVLTESNKKFLPFQQFGRDIADTTDAVRDPQTLEILDITPCSFGGVSVITPGTNTSNQVAVLYQGVNCTEVPVAIHADQLTPTWRVYSTGSNVFQTRAGCLIGAEHVNNSYECDIPIGAGICASYQTQTNSPRRARSVASQSIIAYTMSLGAENSVAYSNNSIAIPTNFTISVTTEILPVSMTKTSVDCTMYICGDSTECSNLLLQYGSFCTQLNRALTGIAVEQDKNTQEVFAQVKQIYKTPPIKDFGGFNFSQILPDPSKPSKRSFIEDLLFNKVTLADAGFIKQYGDCLGDIAARDLICAQKFNGLTVLPPLLTDEMIAQYTSALLAGTITSGWTFGAGAALQIPFAMQMAYRFNGIGVTQCVLYENQKLIANQFNSAIGKIQDSLSSTASALGKLQDVVNQNAQALNTLVKQLSSNFGAISSVLNDILSRLDKVEAEVQIDRLITGRLQSLQTYVTQQLIRAAEIRASANLAATKMSECVLGQSKRVDFCGKGYHLMSFPQSAPHGVVFLHVTYVPAQEKNFTTAPAICHDGKAHFPREGVFVSNGTHWFVTQRNFYEPQIITTDNTFVCGNCDVVIGIVNNTVYDPLQPELDSFKEELDKYFKNHTSPDVDLGDISGINASVVNIQKEIDRLNEVAKNLNESLIDLQELGKYEQYIK

SEQ ID NO: 13399 - protein, 1211 aa, Artificial Sequence
  SARS-CoV-2/Belgium/BA-02291/2020__EPI_ISL_415159 spike protein (1-1211)(N914C_S1123C)
MFVFLVLLPLVSSQCVNLTTRTQLPPAYTNSFTRGVYYPDKVFRSSVLHSTQDLFLPFFSNVTWFHAIHVSGTNGTKRFDNPVLPFNDGVYFASTEKSNIIRGWIFGTTLDSKTQSLLIVNNATNVVIKVCEFQFCNDPFLGVYYHKNNKSWMESEFRVYSSANNCTFEYVSQPFLMDLEGKQGNFKNLREFVFKNIDGYFKIYSKHTPINLVRDLPQGFSALEPLVDLPIGINITRFQTLLALHRSYLTPGDSSSGWTAGAAAYYVGYLQPRTFLLKYNENGTITDAVDCALDPLSETKCTLKSFTVEKGIYQTSNFRVQPTESIVRFPNITNLCPFGEVFNATRFASVYAWNRKRISNCVADYSVLYNSASFSTFKCYGVSPTKLNDLCFTNVYADSFVIRGDEVRQIAPGQTGKIADYNYKLPDDFTGCVIAWNSNNLDSKVGGNYNYLYRLFRRSNLKPFERDISTEIYQAGSTPCNGVEGFNCYFPLQSYGFQPTNGVGYQPYRVVVLSFELLPAPATVCGPKKSTNLVKNKCVNFNFNGLTGTGVLTESNKKFLPFQQFGRDIADTTDAVRDPQTLEILDITPCSFGGVSVITPGTNTSNQVAVLYQGVNCTEVPVAIHADQLTPTWRVYSTGSNVFQTRAGCLIGAEHVNNSYECDIPIGAGICASYQTQTNSPRRARSVASQSIIAYTMSLGAENSVAYSNNSIAIPTNFTISVTTEILPVSMTKTSVDCTMYICGDSTECSNLLLQYGSFCTQLNRALTGIAVEQDKNTQEVFAQVKQIYKTPPIKDFGGFNFSQILPDPSKPSKRSFIEDLLFNKVTLADAGFIKQYGDCLGDIAARDLICAQKFNGLTVLPPLLTDEMIAQYTSALLAGTITSGWTFGAGAALQIPFAMQMAYRFNGIGVTQCVLYENQKLIANQFNSAIGKIQDSLSSAAPALGKLQDVVNQNAQALNTLVKQLSSNFGAISSVLNDILSRLDKVEAEVQIDRLITGRLQSLQTYVTQQLIRAAEIRASANLAATKMSECVLGQSKRVDFCGKGYHLMSFPQSAPHGVVFLHVTYVPAQEKNFTTAPAICHDGKAHFPREGVFVSNGTHWFVTQRNFYEPQIITTDNTFVCGNCDVVIGIVNNTVYDPLQPELDSFKEELDKYFKNHTSPDVDLGDISGINASVVNIQKEIDRLNEVAKNLNESLIDLQELGKYEQYIK

SEQ ID NO: 13400 - protein, 1211 aa, Artificial Sequence
  SARS-CoV-2/USA/WA8-UW5/2020__EPI_ISL_413486 spike protein (1-1211)(N914C_S1123C)
MFVFLVLLPLVSSQCVNLTTRTQLPPAYTNSFTRGVYYPDKVFRSSVLHSTQDLFLPFFSNVTWFHAIHVSGTNGTKRFDNPVLPFNDGVYFASTEKSNIIRGWIFGTTLDSKTQSLLIVNNATNVVIKVCEFQFCNDPFLGVYYHKNNKSWMESEFRVYSSANNCTFEYVSQPFLMDLEGKQGNFKNLREFVFKNIDGYFKIYSKHTPINLVRDLPQGFSALEPLVDLPIGINITRFQTLLALHRSYLTPGDSSSGWTAGAAAYYVGYLQPRTFLLKYNENGTITDAVDCALDPLSETKCTLKSFTVEKGIYQTSNFRVQPTESIVRFPNITNLCPFGEVFNATRFASVYAWNRKRISNCVADYSVLYNSASFSTFKCYGVSPTKLNDLCFTNVYADSFVIRGDEVRQIAPGQTGKIADYNYKLPDDFTGCVIAWNSNNLDSKVGGNYNYLYRLFRKSNLKPFERDISTEIYQAGSTPCNGVEGFNCYFPLQSYGFQPTNGVGYQPYRVVVLSFELLHAPATVCGPKKSTNLVKNKCVNFNFNGLTGTGVLTESNKKFLPFQQFGRDIADTTDAVRDPQTLEILDITPCSFGGVSVITPGTNTSNQVAVLYQDVNCTEVPVAIHADQLTPTWRVYSTGSNVFQTRAGCLIGAEYVNNSYECDIPIGAGICASYQTQTNSPRRARSVASQSIIAYTMSLGAENSVAYSNNSIAIPTNFTISVTTEILPVSMTKTSVDCTMYICGDSTECSNLLLQYGSFCTQLNRALTGIAVEQDKNTQEVFAQVKQIYKTPPIKDFGGFNFSQILPDPSKPSKRSFIEDLLFNKVTLADAGFIKQYGDCLGDIAARDLICAQKFNGLTVLPPLLTDEMIAQYTSALLAGTITSGWTFGAGAALQIPFAMQMAYRFNGIGVTQCVLYENQKLIANQFNSAIGKIQDSLSSTASALGKLQDVVNQNAQALNTLVKQLSSNFGAISSVLNDILSRLDKVEAEVQIDRLITGRLQSLQTYVTQQLIRAAEIRASANLAATKMSECVLGQSKRVDFCGKGYHLMSFPQSAPHGVVFLHVTYVPAQEKNFTTAPAICHDGKAHFPREGVFVSNGTHWFVTQRNFYEPQIITTDNTFVCGNCDVVIGIVNNTVYDPLQPELDSFKEELDKYFKNHTSPDVDLGDISGINASVVNIQKEIDRLNEVAKNLNESLIDLQELGKYEQYIK

SEQ ID NO: 13401 - protein, 1211 aa, Artificial Sequence
  SARS-CoV-2/England/20102000506/2020__EPI_ISL_415147 spike protein (1-1211)(N914C_S1123C)
MFVFLVLLPLVSSQCVNLTTRTQLPPAYTNSFTRGVYYPDKVFRSSVLHSTQDLFLPFFSNVTWFHAIHVSGTNGTKRFDNPVLPFNDGVYFASTEKSNIIRGWIFGTTLDSKTQSLLIVNNATNVVIKVCEFQFCNDPFLGVYYHKNNKSWMESEFRVYSSANNCTFEYVSQPFLMDLEGKQGNFKNLREFVFKNIDGYFKIYSKHTPINLVRDLPQGFSALEPLVDLPIGINITRFQTLLALHRSYLTPGDSSSGWTAGAAAYYVGYLQPRTFLLKYNENGTITDAVDCALDPLSETKCTLKSFTVEKGIYQTSNFRVQPTESIVRFPNITNLCPFGEVFNATRFASVYAWNRKRISNCVADYSVLYNSASFSTFKCYGVSPTKLNDLCFTNVYADSFVIRGDEVRQIAPGQTGKIADYNYKLPDDFTGCVIAWNSNNLDSKVGGNYNYLYRLFRKSNLKPFERDISTEIYQAGSTPCNGVEGFNCYFPLQSYGFQPTNGVGYQPYRVVVLSFELLHAPATVCGPKKSTNLVKNKCVNFNFNGLTGTGVLTESNKKFLPFQQFGRDIADTTDAVRDPQTLEILDITPCSFGGVSVITPGTNTSNQVAVLYQGVNCTEVPVAIHADQLTPTWRVYSTGSNVFQTRAGCLIGAEHVNNSYECDIPIGAGICASYQTQTNSPRRARSVASQSIIAYTMSLGAENSVAYSNNSIAIPTNFTISVTTEILPVSMTKTSVDCTMYICGDSTECSNLLLQYGSFCTQLNRALTGIAVEQDKNTQEVFAQVKQIYKTPPIKDFGGFNFSQILPDPSKPSKRSFIEDLLFNKVTLADAGFIKQYGYCLGDIAARDLICAQKFNGLTVLPPLLTDEMIAQYTSALLAGTITSGWTFGAGAALQIPFAMQMAYRFNGIGVTQCVLYENQKLIANQFNSAIGKIQDSLSSTASALGKLQDVVNQNAQALNTLVKQLSSNFGAISSVLNDILSRLDKVEAEVQIDRLITGRLQSLQTYVTQQLIRAAEIRASANLAATKMSECVLGQSKRVDFCGKGYHLMSFPQSAPHGVVFLHVTYVPAQEKNFTTAPAICHDGKAHFPREGVFVSNGTHWFVTQRNFYEPQIITTDNTFVCGNCDVVIGIVNNTVYDPLQPELDSFKEELDKYFKNHTSPDVDLGDISGINASVVNIQKEIDRLNEVAKNLNESLIDLQELGKYEQYIK

SEQ ID NO: 13402 - protein, 1211 aa, Artificial Sequence
  SARS-CoV-2/Belgium/VAG-03013/2020__EPI_ISL_415155 spike protein (1-1211)(N914C_S1123C)
MFVFLVLLPLVSSQCVNLTTRTQLPPAYTNSFTRGVYYPDKVFRSSVLHSTQDLFLPFFSNVTWFHAIHVSGTNGTKRFDNPVLPFNDGVYFASTEKSNIIRGWIFGTTLDSKTQSLLIVNNATNVVIKVCEFQFCNDPFLGVYYHKNNKSWMESEFRVYSSANNCTFEYVSQPFLMDLEGKQGNFKNLREFVFKNIDGYFKIYSKHTPINLVRDLPQGFSALEPLVDLPIGINITRFQTLLALHRSYLTPGDSSSGWTAGAAAYYVGYLQPRTFLLKYNENGTITDAVDCALDPLSETKCTLKSFTVEKGIYQTSNFRVQPTESIVRFPNITNLCPFGEVFNATRFASVYAWNRKRISNCVADYSVLYNSASFSTFKCYGVSPTKLNDLCFTNVYADSFVIRGDEVRQIAPGQTGKIADYNYKLPDDFTGCVIAWNSNNLDSKVGGNYNYLYRLFRKSNLKPFERDISTEIYQAGSTPCNGVEGFNCYFPLQSYGFQPTNGVGYQPYRVVVLSFELLHAPATVCGPKKSTNLVKNKCVNFNFNGLTGTGVLTESNKKFLPFQQFGRDIADTTDAVRDPQTLEILDITPCSFGGVSVITPGTNTSNQVAVLYQGVNCTEVPVAIHADQLTPTWRVYSTGSNVFQTRAGCLIGAEHVNNSYECDIPIGAGICASYQTQTNSPRRARSVASQSIIAYTMSLGAENSVAYSNNSIAIPTNFTISVTTEILPVSMTKTSVDCTMYICGDSTECSNLLLQYGSFCTQLNRALTGIAVEQDKNTQEVFAQVKQIYKTPPIKDFGGFNFSQILPDPSKPSKRSFIEDLLFNKVTLADAGFIKQYGDCLGDIAARDLICAQKFNGLTVLPPLLTDEMIAQYTSALLAGTITSGWTFGAGAALQIPFAMQMAYRFNGIGVTQCVLYENQKLIANQFNSAIGKIQDSLSSTATALGKLQDVVNQNAQALNTLVKQLSSNFGAISSVLNDILSRLDKVEAEVQIDRLITGRLQSLQTYVTQQLIRAAEIRASANLAATKMSECVLGQSKRVDFCGKGYHLMSFPQSAPHGVVFLHVTYVPAQEKNFTTAPAICHDGKAHFPREGVFVSNGTHWFVTQRNFYEPQIITTDNTFVCGNCDVVIGIVNNTVYDPLQPELDSFKEELDKYFKNHTSPDVDLGDISGINASVVNIQKEIDRLNEVAKNLNESLIDLQELGKYEQYIK

SEQ ID NO: 13403 - protein, 1211 aa, Artificial Sequence
  SARS-CoV-2/Belgium/BC-03016/2020__EPI_ISL_415157 spike protein (1-1211)(N914C_S1123C)
MFVFLVLLPLVSSQCVNLTTRTQLPPAYTNSFTRGVYYPDKVFRSSVLHSTQDLFLPFFSNVTWFHAIHVSGTNGTKRFDNPVLPFNDGVYFASTEKSNIIRGWIFGTTLDSKTQSLLIVNNATNVVIKVCEFQFCNDPFLGVYYHKNNKSWMESEFRVYSSANNCTFEYVSQPFLMDLEGKQGNFKNLREFVFKNIDGYFKIYSKHTPINLVRDLPQGFSALEPLVDLPIGINITRFQTLLALHRSYLTPGDSSSGWTAGAAAYYVGYLQPRTFLLKYNENGTITDAVDCALDPLSETKCTLKSFTVEKGIYQTSNFRVQPTESIVRFPNITNLCPFGEVFNATRFASVYAWNRKRISNCVADYSVLYNSASFSTFKCYGVSPTKLNDLCFTNVYADSFVIRGDEVRQIAPGQTGKIADYNYKLPDDFTGCVIAWNSNNLDSKVGGNYNYLYRLFRKSNLKPFERDISTEIYQAGSTPCNGVEGFNCYFPLQSYGFQPTNGVGYQPYRVVVLSFELLHAPATVCGPKKSTNLVKNKCVNFNFNGLTGTGVLTESNKKFLPFQQFGRDIADTTDAVRDPQTLEILDITPCSFGGVSVITPGTNTSNQVAVLYQGVNCTEVPVAIHADQLTPTWRVYSTGSNVFQTRAGCLIGAEHVNNSYECDIPIGAGICASYQTQTNSPRRARSVASQSIIAYTMSLGAENSVAYSNNSIAIPTNFTISVTTEILPVSMTKTSVDCTMYICGDSTECSNLLLQYGSFCTQLNRALTGIAVEQDKNTQEVFAQVKQIYKTPPIKDFGGFNFSQILPDPSKPSKRSFIEDLLFNKVTLADAGFIKQYGDCLGDIAARDLICAQKFNGLTVLPPLLTDEMIAQYTSALLAGTITSGWTFGAGAALQIPFAMQMAYRFNGIGVTQCVLYENQKLIANQFNSAIGKIQDSLSSTAPALGKLQDVVNQNAQALNTLVKQLSSNFGAISSVLNDILSRLDKVEAEVQIDRLITGRLQSLQTYVTQQLIRAAEIRASANLAATKMSECVLGQSKRVDFCGKGYHLMSFPQSAPHGVVFLHVTYVPAQEKNFTTAPAICHDGKAHFPREGVFVSNGTHWFVTQRNFYEPQIITTDNTFVCGNCDVVIGIVNNTVYDPLQPELDSFKEELDKYFKNHTSPDVDLGDISGINASVVNIQKEIDRLNEVAKNLNESLIDLQELGKYEQYIK

SEQ ID NO: 13404 - protein, 1211 aa, Artificial Sequence
  SARS-CoV-2/Germany/BavPat3/2020__EPI_ISL_414521 spike protein (1-1211)(N914C_S1123C)
MFVFLVLLPLVSSQCVNLTTRTQLPPAYTNSFTRGVYYPDKVFRSSVLHSTQDLFLPFFSNVTWFHAIHVSGTNGTKRFDNPVLPFNDGVYFASTEKSNIIRGWIFGTTLDSKTQSLLIVNNATNVVIKVCEFQFCNDPFLGVYYHKNNKSWMESEFRVYSSANNCTFEYVSQPFLMDLEGKQGNFKNLREFVFKNIDGYFKIYSKHTPINLVRDLPQGFSALEPLVDLPIGINITRFQTLLALHRSYLTPGDSSSGWTAGAAAYYVGYLQPRTFLLKYNENGTITDAVDCALDPLSETKCTLKSFTVEKGIYQTSNFRVQPTESIVRFPNITNLCPFGEVFNATRFASVYAWNRKRISNCVADYSVLYNSASFSTFKCYGVSPTKLNDLCFTNVYADSFVIRGDEVRQIAPGQTGKIADYNYKLPDDFTGCVIAWNSNNLDSKVGGNYNYLYRLFRKSNLKPFERDISTEIYQAGSTPCNGVEGFNCYFPLQSYGFQPTNGVGYQPYRVVVLSFELLHAPATVCGPKKSTNLVKNKCVNFNFNGLTGTGVLTESNKKFLPFQQFGRDIADTTDAVRDPQTLEILDITPCSFGGVSVITPGTNTSNQVAVLYQDVNCTEVPVAIHADQLTPTWRVYSTGSNVFQTRAGCLIGAEHVNNSYECDIPIGAGICASYQTQTNSPRRARSVASQSIIAYTMSLGAENSVAYSNNSIAIPTNFTISVTTEILPVSMTKTSVDCTMYICGDSTECSNLLLQYGSFCTQLNRALTGIAVEQDKNTQQVFAQVKQIYKTPPIKDFGGFNFSQILPDPSKPSKRSFIEDLLFNKVTLADAGFIKQYGDCLGDIAARDLICAQKFNGLTVLPPLLTDEMIAQYTSALLAGTITSGWTFGAGAALQIPFAMQMAYRFNGIGVTQCVLYENQKLIANQFNSAIGKIQDSLSSTASALGKLQDVVNQNAQALNTLVKQLSSNFGAISSVLNDILSRLDKVEAEVQIDRLITGRLQSLQTYVTQQLIRAAEIRASANLAATKMSECVLGQSKRVDFCGKGYHLMSFPQSAPHGVVFLHVTYVPAQEKNFTTAPAICHDGKAHFPREGVFVSNGTHWFVTQRNFYEPQIITTDNTFVCGNCDVVIGIVNNTVYDPLQPELDSFKEELDKYFKNHTSPDVDLGDISGINASVVNIQKEIDRLNEVAKNLNESLIDLQELGKYEQYIK

SEQ ID NO: 13405 - protein, 1211 aa, Artificial Sequence
  SARS-CoV-2/France/HF1805/2020__EPI_ISL_414628 spike protein (1-1211)(N914C_S1123C)
MFVFLVLLPLVSSQCVNLTTRTQLPPAYTNSFTRGVYYPDKVFRSSVLHSTQDLFLPFFSNVTWFHAIHVSGTNGTKRFDNPVLPFNDGVYFASTEKSNIIRGWIFGTTLDSKTQSLLIVNNATNVVIKVCEFQFCNDPFLGVYYHKNNKSWMESEFRVYSSANNCTFEYVSQPFLMDLEGKQGNFKNLREFVFKNIDGYFKIYSKHTPINLVRDLPQGFSALEPLVDLPIGINITRFQTLLALHRSYLTPGDSSSGWTAGAAAYYVGYLQPRTFLLKYNENGTITDAVDCALDPLSETKCTLKSFTVEKGIYQTSNFRVQPTESIVRFPNITNLCPFGEVFNATRFASVYAWNRKRISNCVADYSVLYNSASFSTFKCYGVSPTKLNDLCFTNVYADSFVIRGDEVRQIAPGQTGKIADYNYKLPDDFTGCVIAWNSNNLDSKVGGNYNYLYRLFRKSNLKPFERDISTEIYQAGSTPCNGVEGFNCYFPLQSYGFQPTNGVGYQPYRVVVLSFELLHAPATVCGPKKSTNLVKNKCVNFNFNGLTGTGVLTESNKKFLPFQQFGRDIADTTDAVRDPQTLEILDITPCSFGGVSVITPGTNTSNQVAVLYQGVNCTEVPVAIHADQLTPTWRVYSTGSNVFQTRAGCLIGAEHVNNSYECDIPIGAGICASYQTQTNSPRRARSVASQSIIAYTMSLGAENSVAYSNNSIAIPTNFTISVTTEILPVSMTKTSVDCTMYICGDSTECSNLLLQYGSFCTQLNRALTGIAVEQDKNTQEVFAQVKQIYKTPPIKDFGGFNFSQILPDPSKPSKRSFIEDLLFNKVTLADAGFIKQYGDCLGDIAARDLICAQKFNGLTVLPPLLTDEMIAQYTSALLAGTITSGWTFGAGAALQIPFAMQMAYRFNGIGVTQCVLYENQKLIANQFNSAIGKIQDSLSSTASALGKLQDVVNQNAQALNTLVKQLSSNFGAISSVLNDILSRLDKVEAEVQIDRLITGRLQSLQTYVTQQLIRAAEIRASANLAATKMSECVLGQSKRVDFCGKGYHLMSFPQSAPHGVVFLHVTYVPAQEKNFTTAPAICHDGKAHFPREGVFVSNGTHWFVTQRNFYEPQIITTDNTFVCGNCDVVIGVVNNTVYDPLQPELDSFKEELDKYFKNHTSPDVDLGDISGINASVVNIQKEIDRLNEVAKNLNESLIDLQELGKYEQYIK

SEQ ID NO: 13406 - protein, 1211 aa, Artificial Sequence
  SARS-CoV-2/Netherlands/ZuidHolland_9/2020__EPI_ISL_414445 spike protein (1-1211)(N914C_S1123C)
MFVFLVLLPLVSSQCVNLTTRTQLPPAYTNSFTRGVYYPDKVFRSSVLHSTQDLFLPFFSNVTWFHAIHVSGTNGTKRFDNPVLPFNDGVYFASTEKSNIIRGWIFGTTLDSKTQSLLIVNNATNVVIKVCEFQFCNDPFLGVYYHKNNKSWMESEFRVYSSANNCTFEYVSQPFLMDLEGKQGNFKNLREFVFKNIDGYFKIYSKHTPINLVRDLPQGFSALEPLVDLPIGINITRFQTLLALHRSYLTPGDSSSGWTAGAAAYYVGYLQPRTFLLKYNENGTITDAVDCALDPLSETKCTLKSFTVEKGIYQTSNFRVQPTESIVRFPNITNLCPFGEVFNATRFASVYAWNRKRISNCVADYSVLYNSASFSTFKCYGVSPTKLNDLCFTNVYADSFVIRGDEVRQIAPGQTGKIADYNYKLPDDFTGCVIAWNSNNLDSKVGGNYNYLYRLFRKSNLKPFERDISTEIYQAGSTPCNGVEGFNCYFPLQSYGFQPTNGVGYQPYRVVVLSFELLHAPATVCGPKKSTNLVKNKCVNFNFNGLTGTGVLTESNKKFLPFQQFGRDIADTTDAVRDPQTLEILDITPCSFGGVSVITPGTNTSNQVAVLYQGVNCTEVPVAIHADQLTPTWRVYSTGSNVFQTRAGCLIGAEHVNNSYECDIPIGAGICASYQTQTNSPRRARSVASQSIIAYTMSLGAENSVAYSNNSIAIPTNFTISVTTEILPVSMTKTSVDCTMYICGDSTECSNLLLQYGSFCTQLNRALTGIAVEQDKNTQEVFAQVKQIYKTPPIKDFGGFNFSQILPDPSKPSKRSFIEDLLFNKVTLADAGFIKQYGDCLGDIAARDLICVQKFNGLTVLPPLLTDEMIAQYTSALLAGTITSGWTFGAGAALQIPFAMQMAYRFNGIGVTQCVLYENQKLIANQFNSAIGKIQDSLSSTASALGKLQDVVNQNAQALNTLVKQLSSNFGAISSVLNDILSRLDKVEAEVQIDRLITGRLQSLQTYVTQQLIRAAEIRASANLAATKMSECVLGQSKRVDFCGKGYHLMSFPQSAPHGVVFLHVTYVPAQEKNFTTAPAICHDGKAHFPREGVFVSNGTHWFVTQRNFYEPQIITTDNTFVCGNCDVVIGIVNNTVYDPLQPELDSFKEELDKYFKNHTSPDVDLGDISGINASVVNIQKEIDRLNEVAKNLNESLIDLQELGKYEQYIK

SEQ ID NO: 13407 - protein, 1211 aa, Artificial Sequence
  SARS-CoV-2/Finland/FIN03032020A/2020__EPI_ISL_413602 spike protein (1-1211)(N914C_S1123C)
MFVFLVLLPLVSSQCVNLTTRTQLPPAYTNSFTRGVYYPDKVFRSSVLHSTQDLFLPFFSNVTWFHAIHVSGTNGTKRFDNPVLPFNDGVYFASTEKSNIIRGWIFGTTLDSKTQSLLIVNNATNVVIKVCEFQFCNDPFLGVYYHKNNKSWMESEFRVYSSANNCTFEYVSQPFLMDLEGKQGNFKNLREFVFKNIDGYFKIYSKHTPINLVRDLPQGFSALEPLVDLPIGINITRFQTLLALHRSYLTPGDSSSGWTAGAAAYYVGYLQPRTFLLKYNENGTITDAVDCALDPLSETKCTLKSFTVEKGIYQTSNFRVQPTESIVRFPNITNLCPFGEVFNATRFASVYAWNRKRISNCVADYSVLYNSASFSTFKCYGVSPTKLNDLCFTNVYADSFVIRGDEVRQIAPGQTGKIADYNYKLPDDFTGCVISWNSNNLDSKVGGNYNYLYRLFRKSNLKPFERDISTEIYQAGSTPCNGVEGFNCYFPLQSYGFQPTNGVGYQPYRVVVLSFELLHAPATVCGPKKSTNLVKNKCVNFNFNGLTGTGVLTESNKKFLPFQQFGRDIADTTDAVRDPQTLEILDITPCSFGGVSVITPGTNTSNQVAVLYQGVNCTEVPVAIHADQLTPTWRVYSTGSNVFQTRAGCLIGAEHVNNSYECDIPIGAGICASYQTQTNSPRRARSVASQSIIAYTMSLGAENSVAYSNNSIAIPTNFTISVTTEILPVSMTKTSVDCTMYICGDSTECSNLLLQYGSFCTQLNRALTGIAVEQDKNTQEVFAQVKQIYKTPPIKDFGGFNFSQILPDPSKPSKRSFIEDLLFNKVTLADAGFIKQYGDCLGDIAARDLICAQKFNGLTVLPPLLTDEMIAQYTSALLAGTITSGWTFGAGAALQIPFAMQMAYRFNGIGVTQCVLYENQKLIANQFNSAIGKIQDSLSSTASALGKLQDVVNQNAQALNTLVKQLSSNFGAISSVLNDILSRLDKVEAEVQIDRLITGRLQSLQTYVTQQLIRAAEIRASANLAATKMSECVLGQSKRVDFCGKGYHLMSFPQSAPHGVVFLHVTYVPAQEKNFTTAPAICHDGKAHFPREGVFVSNGTHWFVTQRNFYEPQIITTDNTFVCGNCDVVIGIVNNTVYDPLQPELDSFKEELDKYFKNHTSPDVDLGDISGINASVVNIQKEIDRLNEVAKNLNESLIDLQELGKYEQYIK

SEQ ID NO: 13408 - protein, 1211 aa, Artificial Sequence
  SARS-CoV-2/France/GE1977/2020__EPI_ISL_414632 spike protein (1-1211)(N914C_S1123C)
MFVFLVLLPLVSSQCVNLTTRTQLPPAYTNSFTRGVYYPDKVFRSSVLHSTQDLFLPFFSNVTWFHAIHVSGTNGTKRFDNPVLPFNDGVYFASTEKSNIIRGWIFGTTLDSKTQSLLIVNNATNVVIKVCEFQFCNDPFLGVYYHKNNKSWMESEFRVYSSANNCTFEYVSQPFLMDLEGKQGNFKNLREFVFKNIDGYFKIYSKHTPINLVRDLPQGFSALEPLVDLPIGINITRFQTLLALHRSYLTPGDSSSGWTAGAAAYYVGYLQPRTFLLKYNENGTITDAVDCALDPLSETKCTLKSFTVEKGIYQTSNFRVQPTESIVRFPNITNLCPFGEVFNATRFASVYAWNRKRISNCVADYSVLYNSASFSTFKCYGVSPTKLNDLCFTNVYADSFVIRGDEVRQIAPGQTGKIADYNYKLPDDFTGCVIAWNSNNLDSKVGGNYNYLYRLFRKSNLKPFERDISTEIYQAGSTPCNGVEGFNCYFPLQSYGFQPTNGVGYQPYRVVVLSFELLHAPATVCGPKKSTNLVKNKCVNFNFNGLTGTGVLTESNKKFLPFQQFGRDIADTTDAVRDPQTLEILDITPCSFGGVSVITPGTNTSNQVAVLYQGVNCTEVPVAIHADQLTPTWRVYSTGSNVFQTRAGCLIGAEHVNNSYECDIPIGAGICASYQTQTNSPRRARSVASQSIIAYTMSLGAENSVAYSNNSIAIPTNFTISVTTEILPVSMTKTSVDCTMYICGDSTECSNLLLQYGSFCTQLNRALTGIAVEQDKNTQEVFAQVKQIYKTPPIKDFGGFNFSQILPDPSKPSKRSFIEDLLFNKVTLADAGFIKQYGDCLGDIAARDLICAQKFNGLTVLPPLLTDEMIAQYTSALLAGTITSGWTFGAGAALQIPFAMQMAYRFNGIGVTQCVLYENQKLIANQFNSAIGKIQDSLFSTASALGKLQDVVNQNAQALNTLVKQLSSNFGAISSVLNDILSRLDKVEAEVQIDRLITGRLQSLQTYVTQQLIRAAEIRASANLAATKMSECVLGQSKRVDFCGKGYHLMSFPQSAPHGVVFLHVTYVPAQEKNFTTAPAICHDGKAHFPREGVFVSNGTHWFVTQRNFYEPQIITTDNTFVCGNCDVVIGIVNNTVYDPLQPELDSFKEELDKYFKNHTSPDVDLGDISGINASVVNIQKEIDRLNEVAKNLNESLIDLQELGKYEQYIK

SEQ ID NO: 13409 - protein, 1211 aa, Artificial Sequence
  SARS-CoV-2/Finland/FIN-313/2020__EPI_ISL_414641 spike protein (1-1211)(N914C_S1123C)
MFVFLVLLPLVSSQCVNLTTRTQLPPAYTNSFTRGVYYPDKVFRSSVLHSTQDLFLPFFSNVTWFHAIHVSGTNGTKRFDNPVLPFNDGVYFASTEKSNIIRGWIFGTTLDSKTQSLLIVNNATNVVIKVCEFQFCNDPFLGVYYHKNNKSWMESEFRVYSSANNCTFEYVSQPFLMDLEGKQGNFKNLREFVFKNIDGYFKIYSKHTPINLVRDLPQGFSALEPLVDLPIGINITRFKTLLALHRSYLTPGDSSSGWTAGAAAYYVGYLQPRTFLLKYNENGTITDAVDCALDPLSETKCTLKSFTVEKGIYQTSNFRVQPTESIVRFPNITNLCPFGEVFNATRFASVYAWNRKRISNCVADYSVLYNSASFSTFKCYGVSPTKLNDLCFTNVYADSFVIRGDEVRQIAPGQTGKIADYNYKLPDDFTGCVIAWNSNNLDSKVGGNYNYLYRLFRKSNLKPFERDISTEIYQAGSTPCNGVEGFNCYFPLQSYGFQPTNGVGYQPYRVVVLSFELLHAPATVCGPKKSTNLVKNKCVNFNFNGLTGTGVLTESNKKFLPFQQFGRDIADTTDAVRDPQTLEILDITPCSFGGVSVITPGTNTSNQVAVLYQGVNCTEVPVAIHADQLTPTWRVYSTGSNVFQTRAGCLIGAEHVNNSYECDIPIGAGICASYQTQTNSPRRARSVASQSIIAYTMSLGAENSVAYSNNSIAIPTNFTISVTTEILPVSMTKTSVDCTMYICGDSTECSNLLLQYGSFCTQLNRALTGIAVEQDKNTQEVFAQVKQIYKTPPIKDFGGFNFSQILPDPSKPSKRSFIEDLLFNKVTLADAGFIKQYGDCLGDIAARDLICAQKFNGLTVLPPLLTDEMIAQYTSALLAGTITSGWTFGAGAALQIPFAMQMAYRFNGIGVTQCVLYENQKLIANQFNSAIGKIQDSLSSTASALGKLQDVVNQNAQALNTLVKQLSSNFGAISSVLNDILSRLDKVEAEVQIDRLITGRLQSLQTYVTQQLIRAAEIRASANLAATKMSECVLGQSKRVDFCGKGYHLMSFPQSAPHGVVFLHVTYVPAQEKNFTTAPAICHDGKAHFPREGVFVSNGTHWFVTQRNFYEPQIITTDNTFVCGNCDVVIGIVNNTVYDPLQPELDSFKEELDKYFKNHTSPDVDLGDISGINASVVNIQKEIDRLNEVAKNLNESLIDLQELGKYEQYIK

SEQ ID NO: 13410 - protein, 1211 aa, Artificial Sequence
  SARS-CoV-2/Netherlands/ZuidHolland_2/2020__EPI_ISL_414556 spike protein (1-1211)(N914C_S1123C)
MFVFLVLLPLVSSQCVNLTTRTQLPPAYTNSFTRGVYYPDKVFRSSVLHSTQDLFLPFFSNVTWFHAIHVSGTNGTKRFDNPVLPFNDGVYFASTEKSNIIRGWIFGTTLDSKTQSLLIVNNATNVVIKVCEFQFCNDPFLGVYYHKNNKSWMESEFRVYSSANNCTFEYVSQPFLMDLEGKQGNFKNLREFVFKNIDGYFKIYSKHTPINLVRDLPQGFSALEPLVDLPIGINITRFQTLLALHRSYLTPGDSSSGWTAGAAAYYVGYLQPRTFLLKYNENGTITDAVDCALDPLSETKCTLKSFTVEKGIYQTSNFRVQPTESIVRFPNITNLCPFGEVFNATRFASVYAWNRKRISNCVADYSVLYNSASFSTFKCYGVSPTKLNDLCFTNVYADSFVIRGDEVRQIAPGQTGKIADYNYKLPDDFTGCVIAWNSNNLDSKVGGNYNYLYRLFRKSNLKPFERDISTEIYQAGSTPCNGVEGFNCYFPLQSYGFQPTNGVGYQPYRVVVLSFELLHAPATVCGPKKSTNLVKNKCVNFNFNGLTGTGVLTESNKKFLPFQQFGRDIADTTDAVRDPQTLEILDITPCSFGGVSVITPGTNTSNQVAVLYQGVNCTEVPVAIHADQLTPTWRVYSTGSNVFQTRAGCLIGAEHVNNSYECDIPIGAGICASYQTQTNSPRRARSVASQSIIAYTMSLGAENSVAYSNNSIAIPTNFTISVTTEILPVSMTKTSVDCTMYICGDSTECSNLLLQYGSFCTQLNRALTGIALEQDKNTQEVFAQVKQIYKTPPIKDFGGFNFSQILPDPSKPSKRSFIEDLLFNKVTLADAGFIKQYGDCLGDIAARDLICAQKFNGLTVLPPLLTDEMIAQYTSALLAGTITSGWTFGAGAALQIPFAMQMAYRFNGIGVTQCVLYENQKLIANQFNSAIGKIQDSLSSTASALGKLQDVVNQNAQALNTLVKQLSSNFGAISSVLNDILSRLDKVEAEVQIDRLITGRLQSLQTYVTQQLIRAAEIRASANLAATKMSECVLGQSKRVDFCGKGYHLMSFPQSAPHGVVFLHVTYVPAQEKNFTTAPAICHDGKAHFPREGVFVSNGTHWFVTQRNFYEPQIITTDNTFVCGNCDVVIGIVNNTVYDPLQPELDSFKEELDKYFKNHTSPDVDLGDISGINASVVNIQKEIDRLNEVAKNLNESLIDLQELGKYEQYIK

SEQ ID NO: 13411 - protein, 1211 aa, Artificial Sequence
  SARS-CoV-2/USA/WA-UW31/2020__EPI_ISL_414618 spike protein (1-1211)(N914C_S1123C)
MFVFLVLLPLVSSQCVNLTTRTQLPPAYTNSFTRGVYYPDKVFRSSVLHSTQDLFLPFFSNVTWFHAIHVSGTNGTKRFDNPVLPFNDGVYFASTEKSNIIRGWIFGTTLDSKTQSLLIVNNATNVVIKVCEFQFCNDPFLGVYYHKNNKSWMESEFRVYSSANNCTFEYVSQPFLMDLEGKQGNFKNLREFVFKNIDGYFKIYSKHTPINLVRDLPQGFSALEPLVDLPIGINITRFQTLLALHRSYLTPGDSSSGWTAGAAAYYVGYLQPRTFLLKYNENGTITDAVDCALDPLSETKCTLKSFTVEKGIYQTSNFRVQPTESIVRFPNITNLCPFGEVFNATRFASVYAWNRKRISNCVADYSVLYNSASFSTFKCYGVSPTKLNDLCFTNVYADSFVIRGDEVRQIAPGQTGKIADYNYKLPDDFTGCVIAWNSNNLDSKVGGNYNYLYRLFRKSNLKPFERDISTEIYQAGSTPCNGAEGFNCYFPLQSYGFQPTNGVGYQPYRVVVLSFELLHAPATVCGPKKSTNLVKNKCVNFNFNGLTGTGVLTESNKKFLPFQQFGRDIADTTDAVRDPQTLEILDITPCSFGGVSVITPGTNTSNQVAVLYQDVNCTEVPVAIHADQLTPTWRVYSTGSNVFQTRAGCLIGAEHVNNSYECDIPIGAGICASYQTQTNSPRRARSVASQSIIAYTMSLGAENSVAYSNNSIAIPTNFTISVTTEILPVSMTKTSVDCTMYICGDSTECSNLLLQYGSFCTQLNRALTGIAVEQDKNTQEVFAQVKQIYKTPPIKDFGGFNFSQILPDPSKPSKRSFIEDLLFNKVTLADAGFIKQYGDCLGDIAARDLICAQKFNGLTVLPPLLTDEMIAQYTSALLAGTITSGWTFGAGAALQIPFAMQMAYRFNGIGVTQCVLYENQKLIANQFNSAIGKIQDSLSSTASALGKLQDVVNQNAQALNTLVKQLSSNFGAISSVLNDILSRLDKVEAEVQIDRLITGRLQSLQTYVTQQLIRAAEIRASANLAATKMSECVLGQSKRVDFCGKGYHLMSFPQSAPHGVVFLHVTYVPAQEKNFTTAPAICHDGKAHFPREGVFVSNGTHWFVTQRNFYEPQIITTDNTFVCGNCDVVIGIVNNTVYDPLQPELDSFKEELDKYFKNHTSPDVDLGDISGINASVVNIQKEIDRLNEVAKNLNESLIDLQELGKYEQYIK

SEQ ID NO: 13412 - protein, 1211 aa, Artificial Sequence
  SARS-CoV-2/South Korea/SNU01/2020__EPI_ISL_411929 spike protein (1-1211)(N914C_S1123C)
MFVFLVLLPLVSSQCVNLTTRTQLPPAYTNSFTRGVYYPDKVFRSSVLHSTQDLFLPFFSNVTWFHAIHVSGTNGTKRFDNPVLPFNDGVYFASTEKSNIIRGWIFGTTLDSKTQSLLIVNNATNVVIKVCEFQFCNDPFLGVYYHKNNKSWMESEFRVYSSANNCTFEYVSQPFLMDLEGKQGNFKNLREFVFKNIDGYFKIYSKHTPINLVRDLPQGFWALEPLVDLPIGINITRFQTLLALHRSYLTPGDSSSGWTAGAAAYYVGYLQPRTFLLKYNENGTITDAVDCALDPLSETKCTLKSFTVEKGIYQTSNFRVQPTESIVRFPNITNLCPFGEVFNATRFASVYAWNRKRISNCVADYSVLYNSASFSTFKCYGVSPTKLNDLCFTNVYADSFVIRGDEVRQIAPGQTGKIADYNYKLPDDFTGCVIAWNSNNLDSKVGGNYNYLYRLFRKSNLKPFERDISTEIYQAGSTPCNGVEGFNCYFPLQSYGFQPTNGVGYQPYRVVVLSFELLHAPATVCGPKKSTNLVKNKCVNFNFNGLTGTGVLTESNKKFLPFQQFGRDIADTTDAVRDPQTLEILDITPCSFGGVSVITPGTNTSNQVAVLYQDVNCTEVPVAIHADQLTPTWRVYSTGSNVFQTRAGCLIGAEHVNNSYECDIPIGAGICASYQTQTNSPRRARSVASQSIIAYTMSLGAENSVAYSNNSIAIPTNFTISVTTEILPVSMTKTSVDCTMYICGDSTECSNLLLQYGSFCTQLNRALTGIAVEQDKNTQEVFAQVKQIYKTPPIKDFGGFNFSQILPDPSKPSKRSFIEDLLFNKVTLADAGFIKQYGDCLGDIAARDLICAQKFNGLTVLPPLLTDEMIAQYTSALLAGTITSGWTFGAGAALQIPFAMQMAYRFNGIGVTQCVLYENQKLIANQFNSAIGKIQDSLSSTASALGKLQDVVNQNAQALNTLVKQLSSNFGAISSVLNDILSRLDKVEAEVQIDRLITGRLQSLQTYVTQQLIRAAEIRASANLAATKMSECVLGQSKRVDFCGKGYHLMSFPQSAPHGVVFLHVTYVPAQEKNFTTAPAICHDGKAHFPREGVFVSNGTHWFVTQRNFYEPQIITTDNTFVCGNCDVVIGIVNNTVYDPLQPELDSFKEELDKYFKNHTSPDVDLGDISGINASVVNIQKEIDRLNEVAKNLNESLIDLQELGKYEQYIK

SEQ ID NO: 13413 - protein, 1211 aa, Artificial Sequence
  SARS-CoV-2/China/WF0004/2020__EPI_ISL_413694 spike protein (1-1211)(N914C_S1123C)
MFVFLVLLPLVSSQCVNLTTRTQLPPAYTNSFTRGVYYPDKVFRSSVLHSTQDLFLPFFSNVTWFHAIHVSGTNGTKRFDNPVLPFNDGVYFASTEKSNIIRGWIFGTTLDSKTQSLLIVNNATNVVIKVCEFQFCNDPFLGVYYHKNNKSWTESEFRVYSSANNCTFEYVSQPFLMDLEGKQGNFKNLREFVFKNIDGYFKIYSKHTPINLVRDLPQGFSALEPLVDLPIGINITRFQTLLALHRSYLTPGDSSSGWTAGAAAYYVGYLQPRTFLLKYNENGTITDAVDCALDPLSETKCTLKSFTVEKGIYQTSNFRVQPTESIVRFPNITNLCPFGEVFNATRFASVYAWNRKRISNCVADYSVLYNSASFSTFKCYGVSPTKLNDLCFTNVYADSFVIRGDEVRQIAPGQTGKIADYNYKLPDDFTGCVIAWNSNNLDSKVGGNYNYLYRLFRKSNLKPFERDISTEIYQAGSTPCNGVEGFNCYFPLQSYGFQPTNGVGYQPYRVVVLSFELLHAPATVCGPKKSTNLVKNKCVNFNFNGLTGTGVLTESNKKFLPFQQFGRDIADTTDAVRDPQTLEILDITPCSFGGVSVITPGTNTSNQVAVLYQDVNCTEVPVAIHADQLTPTWRVYSTGSNVFQTRAGCLIGAEHVNNSYECDIPIGAGICASYQTQTNSPRRARSVASQSIIAYTMSLGAENSVAYSNNSIAIPTNFTISVTTEILPVSMTKTSVDCTMYICGDSTECSNLLLQYGSFCTQLNRALTGIAVEQDKNTQEVFAQVKQIYKTPPIKDFGGFNFSQILPDPSKPSKRSFIEDLLFNKVTLADAGFIKQYGDCLGDIAARDLICAQKFNGLTVLPPLLTDEMIAQYTSALLAGTITSGWTFGAGAALQIPFAMQMAYRFNGIGVTQCVLYENQKLIANQFNSAIGKIQDSLSSTASALGKLQDVVNQNAQALNTLVKQLSSNFGAISSVLNDILSRLDKVEAEVQIDRLITGRLQSLQTYVTQQLIRAAEIRASANLAATKMSECVLGQSKRFDFCGKGYHLMSFPQSAPHGVVFLHVTYVPAQEKNFTTAPAICHDGKAHFPREGVFVSNGTHWFVTQRNFYEPQIITTDNTFVCGNCDVVIGIVNNTVYDPLQPELDSFKEELDKYFKNHTSPDVDLGDISGINASVVNIQKEIDRLNEVAKNLNESLIDLQELGKYEQYIK

SEQ ID NO: 13414 - protein, 1211 aa, Artificial Sequence
  SARS-CoV-2/China/WF0028/2020__EPI_ISL_413791 spike protein (1-1211)(N914C_S1123C)
MFVFLVLLPLVSSQCVNLTTRTQLPPAYTNSFTRGVYYPDKVFRSSVLHSTQDLFLPFFSNVTWFHAIHVSGTNGTKRFDNPVLPFNDGVYFASTEKSNIIRGWIFGTTLDSKTQSLLIVNNATNVVIKVCEFQFCNDPFLGVYYHKNNKSWMESEFRVYSSANNCTFEYVSQPFLMDLEGKQGNFKNLREFVFKNIDGYFKIYSKHTPINLVRDLPQGFSALEPLVDLPIGINITRFQTLLALHRSYLTPGDSSSGWTAGAAAYYVGYLQPRTFLLKYNENGTITDAVDCALDPLSETKCTLKSFTVEKGIYQTSNFRVQPTESIVRFPNITNLCPFGEVFNATRFASVYAWNRKRISNCVADYSVLYNSASFSTFKCYGVSPTKLNDLCFTNVYADSFVIRGDEVRQIAPGQTGKIADYNYKLPDDFTGCVIAWNSNNLDSKVGGNYNYLYRLFRKSNLKPFERDISTEIYQAGSTPCNGVEGFNCYFPLQSYGFQPTNGVGYQPYRVVVLSFELLHAPATVCGPKKSTNLVKNKCVNFNFNGLTGTGVLTESNKKFLPFQQFGRDIADTTDAVRDPQTLEILDITPCSFGGVSVITPGTNTSNQVAVLYQDVNCTEVPVAIHADQLTPTWRVYSTGSNVFQTRAGCLIGAEHVNNSYECDIPIGAGICASYQTQTNSPRRARSVASQSIIAYTMSLGAENSVAYSNNSIAIPTNFTISVTTEILPVSMTKTSVDCTMYICGDSTECSNLLLQYGSFCTQLNRALTGIAVEQDKNTQEVFAQVKQIYKTPPIKDFGGFNFSQILPDPSKPSKRSFIEDLLFNKVTLADAGFIKQYGDCLGDIAARDLICAQKFNGLTVLPPLLTDEMIAQYTSALLAGTITSGWTFGAGAALQIPFAMQMAYRFNGIGVTQCVLYENQKLIANQFNSAIGKIQDSLSSTASALGKLQDVVNQNAQALNTLVKQLSSNFGAISSVLNDILSRLDKVEAEVQIDRLITGRLQSLQTYVTQQLIRAAEIRASANLAATKMSECVLGQSKRVDFCGKGYHLMSFPQSAPHGVVFLHVTYVPAQEKNFTTAPAICHDGKAHFPREGVFVSNGTHWFVTQRNFYEPQIITTDNTFVCGNCDVVIGIVNNTVYDPLQPELESFKEELDKYFKNHTSPDVDLGDISGINASVVNIQKEIDRLNEVAKNLNESLIDLQELGKYEQYIK

SEQ ID NO: 13415 - protein, 1211 aa, Artificial Sequence
  SARS-CoV-2/2019-nCoV/USA-CruiseA-18/2020__MT159716.1 spike protein (1-1211)(N914C_S1123C)
MFVFLVLLPLVSSQCVNLTTRTQLPPAYTNSFTRGVYYPDKVFRSSVLHSTQDLFLPFFSNVTWFHAIHVSGTNGTKRFDNPVLPFNDGVYFASTEKSNIIRGWIFGTTLDSKTQSLLIVNNATNVVIKVCEFQFCNDPFLGVYYHKNNKSWMESELRVYSSANNCTFEYVSQPFLMDLEGKQGNFKNLREFVFKNIDGYFKIYSKHTPINLVRDLPQGFSALEPLVDLPIGINITRFQTLLALHRSYLTPGDSSSGWTAGAAAYYVGYLQPRTFLLKYNENGTITDAVDCALDPLSETKCTLKSFTVEKGIYQTSNFRVQPTESIVRFPNITNLCPFGEVFNATRFASVYAWNRKRISNCVADYSVLYNSASFSTFKCYGVSPTKLNDLCFTNVYADSFVIRGDEVRQIAPGQTGKIADYNYKLPDDFTGCVIAWNSNNLDSKVGGNYNYLYRLFRKSNLKPFERDISTEIYQAGSTPCNGVEGFNCYFPLQSYGFQPTNGVGYQPYRVVVLSFELLHAPATVCGPKKSTNLVKNKCVNFNFNGLTGTGVLTESNKKFLPFQQFGRDIADTTDAVRDPQTLEILDITPCSFGGVSVITPGTNTSNQVAVLYQDVNCTEVPVAIHADQLTPTWRVYSTGSNVFQTRAGCLIGAEHVNNSYECDIPIGAGICASYQTQTNSPRRARSVASQSIIAYTMSLGAENSVAYSNNSIAIPTNFTISVTTEILPVSMTKTSVDCTMYICGDSTECSNLLLQYGSFCTQLNRALTGIAVEQDKNTQEVFAQVKQIYKTPPIKDFGGFNFSQILPDPSKPSKRSFIEDLLFNKVTLADAGFIKQYGDCLGDIAARDLICAQKFNGLTVLPPLLTDEMIAQYTSALLAGTITSGWTFGAGAALQIPFAMQMAYRFNGIGVTQCVLYENQKLIANQFNSAIGKIQDSLSSTASALGKLQDVVNQNAQALNTLVKQLSSNFGAISSVLNDILSRLDKVEAEVQIDRLITGRLQSLQTYVTQQLIRAAEIRASANLAATKMSECVLGQSKRVDFCGKGYHLMSFPQSAPHGVVFLHVTYVPAQEKNFTTAPAICHDGKAHFPREGVFVSNGTHWFVTQRNFYEPQIITTDNTFVCGNCDVVIGIVNNTVYDPLQPELDSFKEELDKYFKNHTSPDVDLGDISGINASVVNIQKEIDRLNEVAKNLNESLIDLQELGKYEQYIK

SEQ ID NO: 13416 - protein, 1211 aa, Artificial Sequence
  SARS-CoV-2/SARS-CoV-2/Yunnan-01/human/2020/CHN__MT049951.1 spike protein (1-1211)(N914C_S1123C)
MFVFLVLLPLVSSQCVNLTTRTQLPPANTNSFTRGVYYPDKVFRSSVLHSTQDLFLPFFSNVTWFHAIHVSGTNGTKRFDNPVLPFNDGVYFASTEKSNIIRGWIFGTTLDSKTQSLLIVNNATNVVIKVCEFQFCNDPFLGVYYHKNNKSWMESEFRVYSSANNCTFEYVSQPFLMDLEGKQGNFKNLREFVFKNIDGYFKIYSKHTPINLVRDLPQGFSALEPLVDLPIGINITRFQTLLALHRSYLTPGDSSSGWTAGAAAYYVGYLQPRTFLLKYNENGTITDAVDCALDPLSETKCTLKSFTVEKGIYQTSNFRVQPTESIVRFPNITNLCPFGEVFNATRFASVYAWNRKRISNCVADYSVLYNSASFSTFKCYGVSPTKLNDLCFTNVYADSFVIRGDEVRQIAPGQTGKIADYNYKLPDDFTGCVIAWNSNNLDSKVGGNYNYLYRLFRKSNLKPFERDISTEIYQAGSTPCNGVEGFNCYFPLQSYGFQPTNGVGYQPYRVVVLSFELLHAPATVCGPKKSTNLVKNKCVNFNFNGLTGTGVLTESNKKFLPFQQFGRDIADTTDAVRDPQTLEILDITPCSFGGVSVITPGTNTSNQVAVLYQDVNCTEVPVAIHADQLTPTWRVYSTGSNVFQTRAGCLIGAEHVNNSYECDIPIGAGICASYQTQTNSPRRARSVASQSIIAYTMSLGAENSVAYSNNSIAIPTNFTISVTTEILPVSMTKTSVDCTMYICGDSTECSNLLLQYGSFCTQLNRALTGIAVEQDKNTQEVFAQVKQIYKTPPIKDFGGFNFSQILPDPSKPSKRSFIEDLLFNKVTLADAGFIKQYGDCLGDIAARDLICAQKFNGLTVLPPLLTDEMIAQYTSALLAGTITSGWTFGAGAALQIPFAMQMAYRFNGIGVTQCVLYENQKLIANQFNSAIGKIQDSLSSTASALGKLQDVVNQNAQALNTLVKQLSSNFGAISSVLNDILSRLDKVEAEVQIDRLITGRLQSLQTYVTQQLIRAAEIRASANLAATKMSECVLGQSKRVDFCGKGYHLMSFPQSAPHGVVFLHVTYVPAQEKNFTTAPAICHDGKAHFPREGVFVSNGTHWFVTQRNFYEPQIITTDNTFVCGNCDVVIGIVNNTVYDPLQPELDSFKEELDKYFKNHTSPDVDLGDISGINASVVNIQKEIDRLNEVAKNLNESLIDLQELGKYEQYIK

SEQ ID NO: 13417 - protein, 1211 aa, Artificial Sequence
  SARS-CoV-2/USA/WA-UW292/2020__EPI_ISL_418077 spike protein (1-1211)(N914C_S1123C)
MFVFLVLLPLVSSQCVNLTTRTQLPPAYTNSFTRGVYYPDKVFRSSVLHSTQDLFLPFFSNVTWFHAIHVSGTNGTKRFDNPVLPFNDGVYFASTEKSNIIRGWIFGTTLDSKTQSLLIVNNATNVVIKVCEFQFCNDPFLGVYYHKNNKSWMESEFRVYSSANNCTFEYVSQPFLMDLEGKQGNFKNLREFVFKNIDGYFKIYSKHTPINLVRDLPQGFSALEPLVDLPIGINITRFQTLLALHRSYLTPGDSSSGWTAGAAAYYVGYLQPRTFLLKYNENGTITDAVDCALDPLSETKCTLKSFTVEKGIYQTSNFRVQPTESIVRFPNITNLCPFGEVFNATRFASVYAWNRKRISNCVADYSVLYNSASFSTFKCYGVSPTKLNDLCFTNVYADSFVIRGDEVRQIAPGQTGKIADYNYKLPDDFTGCVIAWNSNNLDSKVGGNYNYLYRLFRKSNLKPFERDISTEIYQASSTPCNGVEGFNCYFPLQSYGFQPTNGVGYQPYRVVVLSFELLHAPATVCGPKKSTNLVKNKCVNFNFNGLTGTGVLTESNKKFLPFQQFGRDIADTTDAVRDPQTLEILDITPCSFGGVSVITPGTNTSNQVAVLYQDVNCTEVPVAIHADQLTPTWRVYSTGSNVFQTRAGCLIGAEHVNNSYECDIPIGAGICASYQTQTNSPRRARSVASQSIIAYTMSLGAENSVAYSNNSIAIPTNFTISVTTEILPVSMTKTSVDCTMYICGDSTECSNLLLQYGSFCTQLNRALTGIAVEQDKNTQEVFAQVKQIYKTPPIKDFGGFNFSQILPDPSKPSKRSFIEDLLFNKVTLADAGFIKQYGDCLGDIAARDLICAQKFNGLTVLPPLLTDEMIAQYTSALLAGTITSGWTFGAGAALQIPFAMQMAYRFNGIGVTQCVLYENQKLIANQFNSAIGKIQDSLSSTASALGKLQDVVNQNAQALNTLVKQLSSNFGAISSVLNDILSRLDKVEAEVQIDRLITGRLQSLQTYVTQQLIRAAEIRASANLAATKMSECVLGQSKRVDFCGKGYHLMSFPQSAPHGVVFLHVTYVPAQEKNFTTAPAICHDGKAHFPREGVFVSNGTHWFVTQRNFYEPQIITTDNTFVCGNCDVVIGIVNNTVYDPLQPELDSFKEELDKYFKNHTSPDVDLGDISGINASVVNIQKEIDRLNEVAKNLNESLIDLQELGKYEQYIK

SEQ ID NO: 13418 - protein, 1211 aa, Artificial Sequence
  SARS-CoV-2/Iceland/192/2020__EPI_ISL_417819 spike protein (1-1211)(N914C_S1123C)
MFVFFVLLPLVSSQCVNLTTRTQLPPAYTNSFTRGVYYPDKVFRSSVLHSTQDLFLPFFSNVTWFHAIHVSGTNGTKRFDNPVLPFNDGVYFASTEKSNIIRGWIFGTTLDSKTQSLLIVNNATNVVIKVCEFQFCNDPFLGVYYHKNNKSWMESEFRVYSSANNCTFEYVSQPFLMDLEGKQGNFKNLREFVFKNIDGYFKIYSKHTPINLVRDLPQGFSALEPLVDLPIGINITRFQTLLALHRSYLTPGDSSSGWTAGAAAYYVGYLQPRTFLLKYNENGTITDAVDCALDPLSETKCTLKSFTVEKGIYQTSNFRVQPTESIVRFPNITNLCPFGEVFNATRFASVYAWNRKRISNCVADYSVLYNSASFSTFKCYGVSPTKLNDLCFTNVYADSFVIRGDEVRQIAPGQTGKIADYNYKLPDDFTGCVIAWNSNNLDSKVGGNYNYLYRLFRKSNLKPFERDISTEIYQAGSTPCNGVEGFNCYFPLQSYGFQPTNGVGYQPYRVVVLSFELLHAPATVCGPKKSTNLVKNKCVNFNFNGLTGTGVLTESNKKFLPFQQFGRDIADTTDAVRDPQTLEILDITPCSFGGVSVITPGTNTSNQVAVLYQGVNCTEVPVAIHADQLTPTWRVYSTGSNVFQTRAGCLIGAEHVNNSYECDIPIGAGICASYQTQTNSPRRARSVASQSIIAYTMSLGAENSVAYSNNSIAIPTNFTISVTTEILPVSMTKTSVDCTMYICGDSTECSNLLLQYGSFCTQLNRALTGIAVEQDKNTQEVFAQVKQIYKTPPIKDFGGFNFSQILPDPSKPSKRSFIEDLLFNKVTLADAGFIKQYGDCLGDIAARDLICAQKFNGLTVLPPLLTDEMIAQYTSALLAGTITSGWTFGAGAALQIPFAMQMAYRFNGIGVTQCVLYENQKLIANQFNSAIGKIQDSLSSTASALGKLQDVVNQNAQALNTLVKQLSSNFGAISSVLNDILSRLDKVEAEVQIDRLITGRLQSLQTYVTQQLIRAAEIRASANLAATKMSECVLGQSKRVDFCGKGYHLMSFPQSAPHGVVFLHVTYVPAQEKNFTTAPAICHDGKAHFPREGVFVSNGTHWFVTQRNFYEPQIITTDNTFVCGNCDVVIGIVNNTVYDPLQPELDSFKEELDKYFKNHTSPDVDLGDISGINASVVNIQKEIDRLNEVAKNLNESLIDLQELGKYEQYIK

SEQ ID NO: 13419 - protein, 1211 aa, Artificial Sequence
  SARS-CoV-2/Belgium/ULG-6939/2020__EPI_ISL_417020 spike protein (1-1211)(N914C_S1123C)
MFVFLVLLPLVSSQCVNLTTRTQLPPAYTNSFTRGVYYPDKVFRSSVLHSTQDLFLPFFSNVTWFHAIHVSGTNGTKRFDNPVLPFNDGVYFASTEKSNIIRGWIFGTTLDSKTQSLLIVNNATNVVIKVCEFQFCNDPFLGVYYHKNNKSWMESEFRVYSSANNCTFEYVSQPFLMDLEGKQGNFKNLREFVFKNIDGYFKIYSKHTPINLVRDLPQGFSALEPLVDLPIGINITRFQTLLALHRSYLTPGDSSSGWTAGAAAYYVGYLQPRTFLLKYNENGTITDAVDCALDPLSETKCTLKSFTVEKGIYQTSNFRVQPTESIVRFPNITNLCPFGEVFNATRFASVYAWNRKRISNCVADYSVLYNSASFSTFKCYGVSPTKLNDLCFTNVYADSFVIRGDEVRQIAPGQTGKIADYNYKLPDDFTGCVIAWNSNNLDSKVGGNYNYLYRLFRKSNLKPFERDISTEIYQAGSTPCNGVEGFNCYFPLQSYGFQPTNGVGYQPYRVVVLSFELLHAPATVCGPKKSTNLVKNKCVNFNFNGLTGTGVLTESNKKFLPFQQFGRDIADTTDAVRDPQTLEILDITPCSFGGVSVITPGTNTSNQVAVLYQGVNCTEVPVAIHADQLTPTWRVYSTGSNVFQTRAGCLIGAEHVNNSYECDIPIGAGICASYQTQTNSPRRARSVASQSIIAYTMSLGAENSVVYSNNSIAIPTNFTISVTTEILPVSMTKTSVDCTMYICGDSTECSNLLLQYGSFCTQLNRALTGIAVEQDKNTQEVFAQVKQIYKTPPIKDFGGFNFSQILPDPSKPSKRSFIEDLLFNKVTLADAGFIKQYGDCLGDIAARDLICAQKFNGLTVLPPLLTDEMIAQYTSALLAGTITSGWTFGAGAALQIPFAMQMAYRFNGIGVTQCVLYENQKLIANQFNSAIGKIQDSLSSTASALGKLQDVVNQNAQALNTLVKQLSSNFGAISSVLNDILSRLDKVEAEVQIDRLITGRLQSLQTYVTQQLIRAAEIRASANLAATKMSECVLGQSKRVDFCGKGYHLMSFPQSAPHGVVFLHVTYVPAQEKNFTTAPAICHDGKAHFPREGVFVSNGTHWFVTQRNFYEPQIITTDNTFVCGNCDVVIGIVNNTVYDPLQPELDSFKEELDKYFKNHTSPDVDLGDISGINASVVNIQKEIDRLNEVAKNLNESLIDLQELGKYEQYIK

SEQ ID NO: 13420 - protein, 1211 aa, Artificial Sequence
  SARS-CoV-2/France/HF2496/2020__EPI_ISL_418231 spike protein (1-1211)(N914C_S1123C)
MFVFLVLLPLVSSQCVNLTTRTQLPPAYTNSFTRGVYYPDKVFRSSVLHSTQDLFLPFFSNVTWFHAIHVSGTNGTKRFDNPVLPFNDGVYFASTEKSNIIRGWIFGTTLDSKTQSLLIVNNATNVVIKVCEFQFCNDPFLGVYYHKNNKSWMESEFRVYSSANNCTFEYVSQPFLMDLEGKQGNFKNLREFVFKNIDGYFKIYSKHTPINLVRDLPQGFSALEPLVDLPIGINITRFQTLLALHRSYLTPGDSSSGWTAGAAAYYVGYLQPRTFLLKYNENGTITDAVDCALDPLSETKCTLKSFTVEKGIYQTSNFRVQPTESIVRFPNITNLCPFGEVFNATRFASVYAWNRKRISNCVADYSVLYNSASFSTFKCYGVSPTKLNDLCFTNVYADSFVIRGDEVRQIAPGQTGKIADYNYKLPDDFTGCVIAWNSNNLDSKVGGNYNYLYRLFRKSNLKPFERDISTEIYQAGSTPCNGVEGFNCYFPLQSYGFQPTNGVGYQPYRVVVLSFELLHAPATVCGPKKSTNLVKNKCVNFNFNGLTGTGVLTESNKKFLPFQQFGRDIADTTDAVRDPQTLEILDITPCSFGGVSVITPGTNTSNQVAVLYQGVNCTEVPVAIHADQLTPTWRVYSTGSNVFQTRAGCLIGAEHVNNSYECDIPIGAGICASYQTQTNSPRRARSVASQSIIAYTMSLGAENSVAYSNNSIAIPTNFTISVTTEILPVSMTKTSVDCTMYICGDSTECSNLLLQYGSFCTQLNRALTGIAVEQDKNTQEVFAQVKQIYKTPPIKDFGGFNFSQILPDPSKPSKRSFIEDLLFNKVTLADAGFIKQYGDCLGDIVARDLICAQKFNGLTVLPPLLTDEMIAQYTSALLAGTITSGWTFGAGAALQIPFAMQMAYRFNGIGVTQCVLYENQKLIANQFNSAIGKIQDSLSSTASALGKLQDVVNQNAQALNTLVKQLSSNFGAISSVLNDILSRLDKVEAEVQIDRLITGRLQSLQTYVTQQLIRAAEIRASANLAATKMSECVLGQSKRVDFCGKGYHLMSFPQSAPHGVVFLHVTYVPAQEKNFTTAPAICHDGKAHFPREGVFVSNGTHWFVTQRNFYEPQIITTDNTFVCGNCDVVIGIVNNTVYDPLQPELDSFKEELDKYFKNHTSPDVDLGDISGINASVVNIQKEIDRLNEVAKNLNESLIDLQELGKYEQYIK

SEQ ID NO: 13421 - protein, 1211 aa, Artificial Sequence
  SARS-CoV-2/USA/WA-UW291/2020__EPI_ISL_418076 spike protein (1-1211)(N914C_S1123C)
MFVFLVLLPLVSSQCVNLTTRTQLPPAYTNSFTRGVYYPDKVFRSSVLHSTQDLFLPFFSNVTWFHAIHVSGTNGTKRFDNPVLPFNDGVYFASTEKSNIIRGWIFGTTLDSKTQSLLIVNNATNVVIKVCEFQFCNDPFLGVYYHKNNKSWMESEFRVYSSANNCTFEYVSQPFLMDLEGKQGNFKNLREFVFKNIDGYFKIYSKHTPINLVRDLPQGFSALEPLVDLPIGINITRFQTLLALHRSYLTPGDSSSGWTAGAAAYYVGYLQPRTFLLKYNENGTITDAVDCALDPLSETKCTLKSFTVEKGIYQTSNFRVQPTESIVRFPNITNLCPFGEVFNATRFASVYAWNRKRISNCVADYSVLYNSASFSTFKCYGVSPTKLNDLCFTNVYADSFVIRGDEVRQIAPGQTGKIADYNYKLPDDFTGCVIAWNSNNLDSKVGGNYNYLYRLFRKSNLKPFERDISTEIYQAGSTPCNGVEGFNCYFPLQSYGFQPTNGVGYQPYRVVVLSFELLHAPATVCGPKKSTNLVKNKCVNFNFNGLTGTGVLTESNKKFLPFQQFGRDIADTTDAVRDPQTLEILDITPCSFGGVSVITPGTNTSNQVAVLYQGVNCTEVPVAIHADQLTPTWRVYSTGSNVFQTRAGCLIGAEHVNNSYECDIPIGAGICASYQTQTNSPRRARSVASQSIIAYTMSLGAENSVAYSNNSIAIPTNFTISVTTEILPVSMTKTSVDCTMYICGDSTECSNLLLQYGSFCTQLNRALTGIAVEQDKNTQEVFAQVKQIYKTPPIKDFGGFNFSQILPDPSKPSKRSFIEDLLFNKVTLADAGFIKQYGDCLGDIAARDLICAQKFNGLTVLPPLLTDEMIAQYTSALLAGTITSGWTFGAGAALQIPFAMQMAYRFNGIGVTQCVLYENQKLIANQFNSAIGKIQYSLSSTASALGKLQDVVNQNAQALNTLVKQLSSNFGAISSVLNDILSRLDKVEAEVQIDRLITGRLQSLQTYVTQQLIRAAEIRASANLAATKMSECVLGQSKRVDFCGKGYHLMSFPQSAPHGVVFLHVTYVPAQEKNFTTAPAICHDGKAHFPREGVFVSNGTHWFVTQRNFYEPQIITTDNTFVCGNCDVVIGIVNNTVYDPLQPELDSFKEELDKYFKNHTSPDVDLGDISGINASVVNIQKEIDRLNEVAKNLNESLIDLQELGKYEQYIK

SEQ ID NO: 13422 - protein, 1211 aa, Artificial Sequence; identical to SEQ ID NO: 13385
  SARS-CoV-2/Portugal/PT0034/2020__EPI_ISL_418019 spike protein (1-1211)(N914C_S1123C)

SEQ ID NO: 13423 - protein, 1211 aa, Artificial Sequence
  SARS-CoV-2/Iceland/202/2020__EPI_ISL_417750 spike protein (1-1211)(N914C_S1123C)
MFVFLVLLPLVSSQCVNLTTRTQLPPAYTNSFTRGVYYPDKVFRSSVLHSTQDLFLPFFSNVTWFHAIHVSGTNGTKRFDNPVLPFNDGVYFASTEKSNIIRGWIFGTTLDSKTQSLLIVNNATNVVIKVCEFQFCNDPFLGVYYHKNNKSWMESEFRVYSSANNCTFEYVSQPFLMDLEGKQGNFKNLREFVFKNIDGYFKIYSKHTPINLVRDLPQGFSALEPLVDLPIGINITRFQTLLALHRSYLTPGDSSSGWTAGAAAYYVGYLQPRTFLLKYNENGTITDAVDCALDPLSETKCTLKSFTVEKGIYQTSNFRVQPTESIVRFPNITNLCPFGEVFNATRFASVYAWNRKRISNCVADYSVLYNSASFSTFKCYGVSPTKLNDLCFTNVYADSFVIRGDEVRQIAPGQTGKIADYNYKLPDDFTGCVIAWNSNNLDSKVGGNYNYLYRLFRKSNLKPFERDISTEIYQAGSTPCNGVEGFNCYFPLQSYGFQPTNGVGYQPYRVVVLSFELLHAPATVCGPKKSTNLVKNKCVNFNFNGLTGTGVLTESNKKFLPFQQFGRDIADTTDAVRDPQTLEILDITPCSFGGVSVITPGTNTSNQVAVLYQDVNCTEVPVAIHADQLTPTWRVYSTGSNVFQTRAGCLIGAEHVNNSYECDIPIGAGICASYQTQTNSPRRARSVASQSIIAYTMSLGAENSVAYSNNSIAIPTNFTISVTTEILPVSMTKTSVDCTMYICGDSTECSNLLLQYGSFCTQLNRALTGIAVEQDKNTQEVFAQVKQIYKTPPIKDFGGFNFSQILPDPSKPSKRSFIEDLLFNKVTLADAGFIKQYGDCLGDIAARDLICAQKFNGLTVLPPLLTDEMIAQYTSALLAGTITSGWTFGAGAALQIPFAMQMAYRFNGIGVTQCVLYENQKLIANQFNSAIGKIQDSLSSTASALGKLQDVVNQNAQALNTLVKQLSSNFGAISSVLNDILSRLDKVEAEVQIDRLITGRLQSLQTYVTQQLIRAAEIRASANLAATKMSECVLGQSKRVDFCGKGYHLMSFPQSAPHGVVFLHVTYVPAQEKNFTTAPAICHDGKAHFPREGVFVSNGTHWFVTQRNFYEPQIITTDNTFVCGNCDVVIGIVNNTVYDPLQPELDSFKEELDKYFKNHTSPDVDLGDIPGINASVVNIQKEIDRLNEVAKNLNESLIDLQELGKYEQYIK

SEQ ID NO: 13424 - protein, 1211 aa, Artificial Sequence
  SARS-CoV-2/USA/WA-UW261/2020__EPI_ISL_418046 spike protein (1-1211)(N914C_S1123C)
MFVFLVLLPLVSSQCVNLTTRTQLPPAYTNSFTRGVYYPDKVFRSSVLHSTQDLFLPFFSNVTWFHAIHVSGTNGTKRFDNPVLPFNDGVYFASTEKSNIIRGWIFGTTLDSKTQSLLIVNNATNVVIKVCEFQFCNDPFLGVYYHKNNKSWMESEFRVYSSANNCTFEYVSQPFLMDLEGKQGNFKNLREFVFKNIDGYFKIYSKHTPINLVRDLPQGFSALEPLVDLPIGINITRFQTLLALHRSYLTPGDSSSGWTAGAAAYYVGYLQPRTFLLKYNENGTITDAVDCALDPLSETKCTLKSFTVEKGIYQTSNFRVQPTESIVRFPNITNLCPFGEVFNATRFTSVYAWNRKRISNCVADYSVLYNSASFSTFKCYGVSPTKLNDLCFTNVYADSFVIRGDEVRQIAPGQTGKIADYNYKLPDDFTGCVIAWNSNNLDSKVGGNYNYLYRLFRKSNLKPFERDISTEIYQAGSTPCNGVEGFNCYFPLQSYGFQPTNGVGYQPYRVVVLSFELLHAPATVCGPKKSTNLVKNKCVNFNFNGLTGTGVLTESNKKFLPFQQFGRDIADTTDAVRDPQTLEILDITPCSFGGVSVITPGTNTSNQVAVLYQDVNCTEVPVAIHADQLTPTWRVYSTGSNVFQTRAGCLIGAEHVNNSYECDIPIGAGICASYQTQTNSPRRARSVASQSIIAYTMSLGAENSVAYSNNSIAIPTNFTISVTTEILPVSMTKTSVDCTMYICGDSTECSNLLLQYGSFCTQLNRALTGIAVEQDKNTQEVFAQVKQIYKTPPIKDFGGFNFSQILPDPSKPSKRSFIEDLLFNKVTLADAGFIKQYGDCLGDIAARDLICAQKFNGLTVLPPLLTDEMIAQYTSALLAGTITSGWTFGAGAALQIPFAMQMAYRFNGIGVTQCVLYENQKLIANQFNSAIGKIQDSLSSTASALGKLQDVVNQNAQALNTLVKQLSSNFGAISSVLNDILSRLDKVEAEVQIDRLITGRLQSLQTYVTQQLIRAAEIRASANLAATKMSECVLGQSKRVDFCGKGYHLMSFPQSAPHGVVFLHVTYVPAQEKNFTTAPAICHDGKAHFPREGVFVSNGTHWFVTQRNFYEPQIITTDNTFVCGNCDVVIGIVNNTVYDPLQPELDSFKEELDKYFKNHTSPDVDLGDISGINASVVNIQKEIDRLNEVAKNLNESLIDLQELGKYEQYIK

SEQ ID NO: 13425 - protein, 1211 aa, Artificial Sequence
  SARS-CoV-2/Portugal/PT0035/2020__EPI_ISL_418020 spike protein (1-1211)(N914C_S1123C)
MFVFLVLLPLVSSQCVNLTTRTQLPPAYTNSFTRGVYYPDKVFRSSVLHSTQDLFLPFFSNVTWFHAIHVSGTNGTKRFDNPVLPFNDGVYFASTEKSNIIRGWIFGTTLDSKTQSLLIVNNATNVVIKVCEFQFCNDPFLGVYYHKNNKSWMESEFRVYSSANNCTFEYVSQPFLMDLEGKQGNFKNLREFVFKNIDGYFKIYSKHTPINLVRDLPQGFSALEPLVDLPIGINITRFQTLLALHRSYLTPGDSSSGWTAGAAAYYVGYLQPRTFLLKYNENGTITDAVDCALDPLSETKCTLKSFTVEKGIYQTSNFRVQPTESIVRFPNITNLCPFGEVFNATRFASVYAWNRKRISNCVADYSVLYNSASFSTFKCYGVSPTKLNDLCFTNVYADSFVIRGDEVRQIAPGQTGKIADYNYKLPDDFTGCVIAWNSNNLDSKVGGNYNYLYRLFRKSNLKPFERDISTEIYQAGSTPCNGVEGFNCYFPLQSYGFQPTNGVGYQPYRVVVLSFELLHAPATVCGPKKSTNLVKNKCVNFNFNGLTGTGVLTESNKKFLPFQQFGRDIADTTDAVRDPQTLEILDITPCSFGGVSVITPGTNTSNQVAVLYQDVNCTEVPVAIHADQLTPTWRVYSTGSNVFQTRAGCLIGAEHVNNSYECDIPIGAGICASYQTQTNSPRRARSVASQSIIAYTMSLGAENSVAYSNNSIAIPTNFTISVTTEILPVSMTKTSVDCTMYICGDSTECSNLLLQYGSFCTQLNRALTGIAVEQDKNTQEVFAQVKQIYKTPPIKDFGGFNFSQILPDPSKPSKRSFIEDLLFNKVTLADAGFIKQYGDCLGDISARDLICAQKFNGLTVLPPLLTDEMIAQYTSALLAGTITSGWTFGAGAALQIPFAMQMAYRFNGIGVTQCVLYENQKLIANQFNSAIGKIQDSLSSTASALGKLQDVVNQNAQALNTLVKQLSSNFGAISSVLNDILSRLDKVEAEVQIDRLITGRLQSLQTYVTQQLIRAAEIRASANLAATKMSECVLGQSKRVDFCGKGYHLMSFPQSAPHGVVFLHVTYVPAQEKNFTTAPAICHDGKAHFPREGVFVSNGTHWFVTQRNFYEPQIITTDNTFVCGNCDVVIGIVNNTVYDPLQPELDSFKEELDKYFKNHTSPDVDLGDISGINASVVNIQKEIDRLNEVAKNLNESLIDLQELGKYEQYIK

SEQ ID NO: 13426 - protein, 1211 aa, Artificial Sequence
  SARS-CoV-2/USA/NY-NYUMC7/2020__EPI_ISL_418192 spike protein (1-1211)(N914C_S1123C)
MFVFLVLLPLVSSQCVNLTTRTQLPPAYTNSFTRGVYYPDKVFRSSVLHSTQDLFLPFFSNVTWFHAIHVSGTNGTKRFDNPVLPFNDGVYFASTEKSNIIRGWIFGTTLDSKTQSLLIVNNATNVVIKVCEFQFCNDPFLGVYHHKNNKSWMESEFRVYSSANNCTFEYVSQPFLMDLEGKQGNFKNLREFVFKNIDGYFKIYSKHTPINLVRDLPQGFSALEPLVDLPIGINITRFQTLLALHRSYLTPGDSSSGWTAGAAAYYVGYLQPRTFLLKYNENGTITDAVDCALDPLSETKCTLKSFTVEKGIYQTSNFRVQPTESIVRFPNITNLCPFGEVFNATRFASVYAWNRKRISNCVADYSVLYNSASFSTFKCYGVSPTKLNDLCFTNVYADSFVIRGDEVRQIAPGQTGKIADYNYKLPDDFTGCVIAWNSNNLDSKVGGNYNYLYRLFRKSNLKPFERDISTEIYQAGSTPCNGVEGFNCYFPLQSYGFQPTNGVGYQPYRVVVLSFELLHAPATVCGPKKSTNLVKNKCVNFNFNGLTGTGVLTESNKKFLPFQQFGRDIADTTDAVRDPQTLEILDITPCSFGGVSVITPGTNTSNQVAVLYQGVNCTEVPVAIHADQLTPTWRVYSTGSNVFQTRAGCLIGAEHVNNSYECDIPIGAGICASYQTQTNSPRRARSVASQSIIAYTMSLGAENSVAYSNNSIAIPTNFTISVTTEILPVSMTKTSVDCTMYICGDSTECSNLLLQYGSFCTQLNRALTGIAVEQDKNTQEVFAQVKQIYKTPPIKDFGGFNFSQILPDPSKPSKRSFIEDLLFNKVTLADAGFIKQYGDCLGDIAARDLICAQKFNGLTVLPPLLTDEMIAQYTSALLAGTITSGWTFGAGAALQIPFAMQMAYRFNGIGVTQCVLYENQKLIANQFNSAIGKIQDSLSSTASALGKLQDVVNQNAQALNTLVKQLSSNFGAISSVLNDILSRLDKVEAEVQIDRLITGRLQSLQTYVTQQLIRAAEIRASANLAATKMSECVLGQSKRVDFCGKGYHLMSFPQSAPHGVVFLHVTYVPAQEKNFTTAPAICHDGKAHFPREGVFVSNGTHWFVTQRNFYEPQIITTDNTFVCGNCDVVIGIVNNTVYDPLQPELDSFKEELDKYFKNHTSPDVDLGDISGINASVVNIQKEIDRLNEVAKNLNESLIDLQELGKYEQYIK

SEQ ID NO: 13427 - protein, 1211 aa, Artificial Sequence
  SARS-CoV-2/Iceland/189/2020__EPI_ISL_417709 spike protein (1-1211)(N914C_S1123C)
MFVFLVLLPLVSSQCVNLTTRTQLPPAYTNSFTRGVYYPDKVFRSSVLHSTQDLFLPFFSNVTWFHAIHVSGTNGTKRFDNPVLPFNDGVYFASTEKSNIIRGWIFGTTLDSKTQSLLIVNNATNVVIKVCEFQFCNDPFLGVYYHKNNKSWMESEFRVYSSANNCTFEYVSQPFLMDLEGKQGNFKNLREFVFKNIDGYFKIYSKHTPINLVRDLPQGFSALEPLVDLPIGINITRFQTLLALHRSYLTPGDSSSGWTAGAAAYYVGYLQPRTFLLKYNENGTITDAVDCALDPLSETKCTLKSFTVEKGIYQTSNFRVQPTESIVRFPNITNLCPFGEVFNATRFASVYAWNRKRISNCVADYSVLYNSASFSTFKCYGVSPTKLNDLCFTNVYADSFVIRGDEVRQIAPGQTGKIADYNYKLPDDFTGCVIAWNSNNLDSKVGGNYNYLYRLFRKSNLKPFERDISTEIYQAGSTPCNGVEGFNCYFPLQSYGFQPTNGVGYQPYRVVVLSFELLHAPATVCGPKKSTNLVKNKCVNFNFNGLTGTGVLTESNKKFLPFQQFGRDIADTTDAVRDPQTLEILDITPCSFGGVSVITPGTNTSNQVAVLYQGVNCTEVPVAIHADQLTPTWRVYSTGSNVFQTRAGCLIGAEHVNNSYECDIPIGAGICASYQTQTNSPRRARSVASQSIIAYTMSLGAENSVAYSNNSIAIPTNFTISVTTEILPVSMTKTSVDCTMYICGDSTECSNLLLQYGSFCTQLNRALTGIAVEQDKNTQEVFAQVKQIYKTPPIKDFGGFNFSQILPDPSKPSKRSFIEDLLFNKVTLADAGFTKQYGDCLGDIAARDLICAQKFNGLTVLPPLLTDEMIAQYTSALLAGTITSGWTFGAGAALQIPFAMQMAYRFNGIGVTQCVLYENQKLIANQFNSAIGKIQDSLSSTASALGKLQDVVNQNAQALNTLVKQLSSNFGAISSVLNDILSRLDKVEAEVQIDRLITGRLQSLQTYVTQQLIRAAEIRASANLAATKMSECVLGQSKRVDFCGKGYHLMSFPQSAPHGVVFLHVTYVPAQEKNFTTAPAICHDGKAHFPREGVFVSNGTHWFVTQRNFYEPQIITTDNTFVCGNCDVVIGIVNNTVYDPLQPELDSFKEELDKYFKNHTSPDVDLGDISGINASVVNIQKEIDRLNEVAKNLNESLIDLQELGKYEQYIK

SEQ ID NO: 13428 - protein, 1211 aa, Artificial Sequence
  SARS-CoV-2/Australia/NSW56/2020__EPI_ISL_417408 spike protein (1-1211)(N914C_S1123C)
MFVFLVLLPLVSSQCVNLTTRTQLPPAYTNSFTRGVYYPDKVFRSSVLHSTQDLFLPFFSNVTWFHAIHVSGTNGTKRFDNPVLPFNDGVYFASTEKSNIIRGWIFGTTLDSKTQSLLIVNNATNVVIKVCEFQFCNDPFLGVYYHKNNKSWMESEFRVYSSANNCTFEYVSQPFLMDLEGKQGNFKNLREFVFKNIDGYFKIYSKHTPINLVRDLPQGFSALEPLVDLPIGINITRFQTLLALHRSYLTPGDSSSGWTAGAAAYYVGYLQPRTFLLKYNENGTITDAVDCALDPLSETKCTLKSFTVEKGIYQTSNFRVQPTESIVRFPNITNLCPFGEVFNATRFASVYAWNRKRISNCVADYSVLYNSASFSTFKCYGVSPTKLNDLCFTNVYADSFVIRGDEVRQIAPGQTGKIADYNYKLPDDFTGCVIAWNSNNLDSKVGGNYNYLYRLFRKSNLKPFERDISTEIYQAGSTPCNGVEGFNCYFPLQSYGFQPTNGVGYQPYRVVVLSFELLHAPATVCGPKKSTNLVKNKCVNFNFNGLTGTGVLTESNKKFLPFQQFGRDIADTTDAVRDPQTLEILDITPCSFGGVSVITPGTNTSNQVAVLYQDVNCTEVPVAIHADQLTPTWRVYSTGSNVFQTRAGCLIGAEHVNNSYECDIPIGAGICASYQTQTNSPRRARSVASQSIIAYTMSLGAENSVAYSNNSIAIPTNFTISVTTEILPVSMTKTSVDCTMYICGDSTECSNLLLQYGSFCTQLNRALTGIAVEQDKNTQEVFAQVKQIYKTPPIKDFGGFNFSQILPDSSKPSKRSFIEDLLFNKVTLADAGFIKQYGDCLGDIAARDLICAQKFNGLTVLPPLLTDEMIAQYTSALLAGTITSGWTFGAGAALQIPFAMQMAYRFNGIGVTQCVLYENQKLIANQFNSAIGKIQDSLSSTASALGKLQDVVNQNAQALNTLVKQLSSNFGAISSVLNDILSRLDKVEAEVQIDRLITGRLQSLQTYVTQQLIRAAEIRASANLAATKMSECVLGQSKRVDFCGKGYHLMSFPQSAPHGVVFLHVTYVPAQEKNFTTAPAICHDGKAHFPREGVFVSNGTHWFVTQRNFYEPQIITTDNTFVCGNCDVVIGIVNNTVYDPLQPELDSFKEELDKYFKNHTSPDVDLGDISGINASVVNIQKEIDRLNEVAKNLNESLIDLQELGKYEQYIK

SEQ ID NO: 13429 - protein, 1211 aa, Artificial Sequence
  SARS-CoV-2/Iceland/280/2020__EPI_ISL_417608 spike protein (1-1211)(N914C_S1123C)
MFVFLVLLPLVSSQCVNLTTRTQLPPAYTNSFTRGVYYPDKVFRSSVLHSTQDLFLPFFSNVTWFHAIHVSGTNGTKRFDNPVLPFNDGVYFASTEKSNIIRGWIFGTTLDSKTQSLLIVNNATNVVIKVCEFQFCNDPFLGVYYHKNNKSWMESEFRVYSSANNCTFEYVSQPFLMDLEGKQGNFKNLREFVFKNIDGYFKIYSKHTPINLVRDLPQGFSALEPLVDLPIGINITRFQTLLALHRSYLTPGDSSSGWTAGAAAYYVGYLQPRTFLLKYNENGTITDAVDCALDPLSETKCTLKSFTVEKGIYQTSNFRVQPTESIVRFPNITNLCPFGEVFNATRFASVYAWNRKRISNCVADYSVLYNSASFSTFKCYGVSPTKLNDLCFTNVYADSFVIRGDEVRQIAPGQTGKIADYNYKLPDDFTGCVIAWNSNNLDSKVGGNYNYLYRLFRKSNLKPFERDISTEIYQAGSTPCNGVEGFNCYFPLQSYGFQPTNGVGYQPYRVVVLSFELLHAPATVCGPKKSTNLVKNKCVNFNFNGLTGTGVLTESNKKFLPFQQFGRDIADTTDAVRDPQTLEILDITPCSFGGVSVITPGTNTSNQVAVLYQGVNCTEVPVAIHADQLTPTWRVYSTGSNVFQTRAGCLIGAEHVNNSYECDIPIGAGICASYHTQTNSPRRARSVASQSIIAYTMSLGAENSVAYSNNSIAIPTNFTISVTTEILPVSMTKTSVDCTMYICGDSTECSNLLLQYGSFCTQLNRALTGIAVEQDKNTQEVFAQVKQIYKTPPIKDFGGFNFSQILPDPSKPSKRSFIEDLLFNKVTLADAGFIKQYGDCLGDIAARDLICAQKFNGLTVLPPLLTDEMIAQYTSALLAGTITSGWTFGAGAALQIPFAMQMAYRFNGIGVTQCVLYENQKLIANQFNSAIGKIQDSLSSTASALGKLQDVVNQNAQALNTLVKQLSSNFGAISSVLNDILSRLDKVEAEVQIDRLITGRLQSLQTYVTQQLIRAAEIRASANLAATKMSECVLGQSKRVDFCGKGYHLMSFPQSAPHGVVFLHVTYVPAQEKNFTTAPAICHDGKAHFPREGVFVSNGTHWFVTQRNFYEPQIITTDNTFVCGNCDVVIGIVNNTVYDPLQPELDSFKEELDKYFKNHTSPDVDLGDISGINASVVNIQKEIDRLNEVAKNLNESLIDLQELGKYEQYIK

SEQ ID NO: 13430 - protein, 1211 aa, Artificial Sequence; identical to SEQ ID NO: 13385
  SARS-CoV-2/Iceland/247/2020__EPI_ISL_417575 spike protein (1-1211)(N914C_S1123C)

SEQ ID NO: 13431 - protein, 1211 aa, Artificial Sequence
  SARS-CoV-2/Iceland/238/2020__EPI_ISL_417566 spike protein (1-1211)(N914C_S1123C)
MFVFLVLLPLVSSQCVNLTTRTQLPPAYTNSFTRGVYYPDKVFRSSVLHSTQDLFLPFFSNVTWFHAIHVSGTNGTKRFDNPVLPFNDGVYFASTEKSNIIRGWIFGTTLDSKTQSLLIVNNATNVVIKVCEFQFCNDPFLGVYYHKNNKSWMESEFRVYSSANNCTFEYVSQPFLMDLEGKQGNFKNLREFVFKNIDGYFKIYSKHTPINLVRDLPQGFSALEPLVDLPIGINITRFQTLLALHRSYLTPGDSSSGWTAGAAAYYVGYLQPRTFLLKYNENGTITDAVDCALDPLSETKCTLKSFTVEKGIYQTSNFRVQPTESIVRFPNITNLCPFGEVFNATRFASVYAWNRKRISNCVADYSVLYNSASFSTFKCYGVSPTKLNDLCFTNVYADSFVIRGDEVRQIAPGQTGKIADYNYKLPDDFTGCVIAWNSNNLDSKVGGNYNYLYRLFRKSNLKPFERDISTEIYQAGSTPCNGVEGFNCYFPLQSYGFQPTNGVGYQPYRVVVLSFELLHAPATVCGPKKSTNLVKNKCVNFNFNGLTGTGVLTESNKKFLPFQQFGRDIADTTDAVRDPQTLEILDITPCSFGGVSVITPGTNTSNQVAVLYQGVNCTEVPVAIHADQLTPTWRVYSTGSNVFQTRAGCLIGAEHVNNSYECDIPIGAGICASYQTQTNSPRRARSVASQSIIAYTMSLGAENSVAYSNNSIAIPTNFTISVTTEILPVSMTKTSVDCTMYICGDSTECSNLLLQYGSFCTQLNRALTGIAVEQDKNTQEVFAQVKQIYKTPPIKDFGGFNFSQILPDPSKPSKRSFIEDLLFNKVTLADVGFIKQYGDCLGDIAARDLICAQKFNGLTVLPPLLTDEMIAQYTSALLAGTITSGWTFGAGAALQIPFAMQMAYRFNGIGVTQCVLYENQKLIANQFNSAIGKIQDSLSSTASALGKLQDVVNQNAQALNTLVKQLSSNFGAISSVLNDILSRLDKVEAEVQIDRLITGRLQSLQTYVTQQLIRAAEIRASANLAATKMSECVLGQSKRVDFCGKGYHLMSFPQSAPHGVVFLHVTYVPAQEKNFTTAPAICHDGKAHFPREGVFVSNGTHWFVTQRNFYEPQIITTDNTFVCGNCDVVIGIVNNTVYDPLQPELDSFKEELDKYFKNHTSPDVDLGDISGINASVVNIQKEIDRLNEVAKNLNESLIDLQELGKYEQYIK

SEQ ID NO: 13432 - protein, 1211 aa, Artificial Sequence
  SARS-CoV-2/Greece/16/2020__EPI_ISL_418265 spike protein (1-1211)(N914C_S1123C)
MFVFLVLLPLVSSQCVNLTTRTQLPPAYTNSFTRGVYYPDKVFRSSVLHSTQDLFLPFFSNVTWFHAIHVSGTNGTKRFDNPVLPFNDGVYFASTEKSNIIRGWIFGTTLDSKTQSLLIVNNATNVVIKVCEFQFCNDPFLGVYYHKNNKSWMESEFRVYSSANNCTFEYVSQPFLMDLEGKQGNFKNLREFVFKNVDGYFKIYSKHTPINLVRDLPQGFSALEPLVDLPIGINITRFQTLLALHRSYLTPGDSSSGWTAGAAAYYVGYLQPRTFLLKYNENGTITDAVDCALDPLSETKCTLKSFTVEKGIYQTSNFRVQPTESIVRFPNITNLCPFGEVFNATRFASVYAWNRKRISNCVADYSVLYNSASFSTFKCYGVSPTKLNDLCFTNVYADSFVIRGDEVRQIAPGQTGKIADYNYKLPDDFTGCVIAWNSNNLDSKVGGNYNYLYRLFRKSNLKPFERDISTEIYQAGSTPCNGVEGFNCYFPLQSYGFQPTNGVGYQPYRVVVLSFELLHAPATVCGPKKSTNLVKNKCVNFNFNGLTGTGVLTESNKKFLPFQQFGRDIADTTDAVRDPQTLEILDITPCSFGGVSVITPGTNTSNQVAVLYQDVNCTEVPVAIHADQLTPTWRVYSTGSNVFQTRAGCLIGAEHVNNSYECDIPIGAGICASYQTQTNSPRRARSVASQSIIAYTMSLGAENSVAYSNNSIAIPTNFTISVTTEILPVSMTKTSVDCTMYICGDSTECSNLLLQYGSFCTQLNRALTGIAVEQDKNTQEVFAQVKQIYKTPPIKDFGGFNFSQILPDPSKPSKRSFIEDLLFNKVTLADAGFIKQYGDCLGDIAARDLICAQKFNGLTVLPPLLTDEMIAQYTSALLAGTITSGWTFGAGAALQIPFAMQMAYRFNGIGVTQCVLYENQKLIANQFNSAIGKIQDSLSSTASALGKLQDVVNQNAQALNTLVKQLSSNFGAISSVLNDILSRLDKVEAEVQIDRLITGRLQSLQTYVTQQLIRAAEIRASANLAATKMSECVLGQSKRVDFCGKGYHLMSFPQSAPHGVVFLHVTYVPAQEKNFTTAPAICHDGKAHFPREGVFVSNGTHWFVTQRNFYEPQIITTDNTFVCGNCDVVIGIVNNTVYDPLQPELDSFKEELDKYFKNHTSPDVDLGDISGINASVVNIQKEIDRLNEVAKNLNESLIDLQELGKYEQYIK

SEQ ID NO: 13433 - protein, 1211 aa, Artificial Sequence
  SARS-CoV-2/Iceland/319/2020__EPI_ISL_417648 spike protein (1-1211)(N914C_S1123C)
MFVFLVLLPLVSSQCVNLTTRTQLPPAYTNSFTRGVYYPDKVFRSSVLHSTQDLFLPFFSNVTWFHAIHVSGTNGTKRFDNPVLPFNDGVYFASTEKSNIIRGWIFGTTLDSKTQSLLIVNNATNVVIKVCEFQFCNDPFLGVYYHKNNKSWMESEFRVYSSANNCTFEYVSQPFLIDLEGKQGNFKNLREFVFKNIDGYFKIYSKHTPINLVRDLPQGFSALEPLVDLPIGINITRFQTLLALHRSYLTPGDSSSGWTAGAAAYYVGYLQPRTFLLKYNENGTITDAVDCALDPLSETKCTLKSFTVEKGIYQTSNFRVQPTESIVRFPNITNLCPFGEVFNATRFASVYAWNRKRISNCVADYSVLYNSASFSTFKCYGVSPTKLNDLCFTNVYADSFVIRGDEVRQIAPGQTGKIADYNYKLPDDFTGCVIAWNSNNLDSKVGGNYNYLYRLFRKSNLKPFERDISTEIYQAGSTPCNGVEGFNCYFPLQSYGFQPTNGVGYQPYRVVVLSFELLHAPATVCGPKKSTNLVKNKCVNFNFNGLTGTGVLTESNKKFLPFQQFGRDIADTTDAVRDPQTLEILDITPCSFGGVSVITPGTNTSNQVAVLYQGVNCTEVPVAIHADQLTPTWRVYSTGSNVFQTRAGCLIGAEHVNNSYECDIPIGAGICASYQTQTNSPRRARSVASQSIIAYTMSLGAENSVAYSNNSIAIPTNFTISVTTEILPVSMTKTSVDCTMYICGDSTECSNLLLQYGSFCTQLNRALTGIAVEQDKNTQEVFAQVKQIYKTPPIKDFGGFNFSQILPDPSKPSKRSFIEDLLFNKVTLADAGFIKQYGDCLGDIAARDLICAQKFNGLTVLPPLLTDEMIAQYTSALLAGTITSGWTFGAGAALQIPFAMQMAYRFNGIGVTQCVLYENQKLIANQFNSAIGKIQDSLSSTASALGKLQDVVNQNAQALNTLVKQLSSNFGAISSVLNDILSRLDKVEAEVQIDRLITGRLQSLQTYVTQQLIRAAEIRASANLAATKMSECVLGQSKRVDFCGKGYHLMSFPQSAPHGVVFLHVTYVPAQEKNFTTAPAICHDGKAHFPREGVFVSNGTHWFVTQRNFYEPQIITTDNTFVCGNCDVVIGIVNNTVYDPLQPELDSFKEELDKYFKNHTSPDVDLGDISGINASVVNIQKEIDRLNEVAKNLNESLIDLQELGKYEQYIK

SEQ ID NO: 13434 - protein, 1211 aa, Artificial Sequence
  SARS-CoV-2/Congo/94/2020__EPI_ISL_417947 spike protein (1-1211)(N914C_S1123C)
MFVFLVLLPLVSSQCVNLTTRTQLPPAYTNSFTRGVYYPDKVFRSSVLHSTQDLFLPFFSNVTWFHAIHVSGTNGTKRFDNPVLPFNDGVYFASTEKSNIIRGWIFGTTLDSKTQSLLIVNNATNVVIKVCEFQFCNDPFLGVYYHKNNKSWMESEFRVYSSANNCTFEYVSQPFLMDLEGKQGNFKNLREFVFKNIDGYFKIYSKHTPINLVRDLPQGFSALEPLVDLPIGINITRFQTLLALHRSYLTPGDSSSGWTAGAAAYYVGYLQPRTFLLKYNENGTITDAVDCALDPLSETKCTLKSFTVEKGIYQTSNFRVQPTESIVRFPNITNLCPFGEVFNATRFASVYAWNRKRISNCVADYSVLYNSASFSTFKCYGVSPTKLNDLCFTNVYADSFVIRGDEVRQIAPGQTGKIADYNYKLPDDFTGCVIAWNSNNLDSKVGGNYNYLYRLFRKSNLKPFERDISTEIYQAGSTPCNGVEGFNCYFPLQSYGFQPTNGVGYQPYRVVVLSFELLHAPATVCGPKKSTNLVKNKCVNFNFNGLTGTGVLTESNKKFLPFQQFGRDIADTTDAVRDPQTLEILDITPCSFGGVSVITPGTNTSNQVAVLYQGVNCTEVPVAIHADQLTPTWRVYSTGSNVFQTRAGCLIGAEHVNNSYECDIPIGAGICASYQTQTNSPRRARSVASQSIIAYTMSLGAENSVAYSNNSIAIPTNFTISVTTEILPVSMTKTSVDCTMYICGDSTECSNLLLQYGSFCTQLNRALTGIAVEQDKNTQEVFAQVKQIYKTPPIKDFGGFNFSQILPDPSKPSKRSFIEDILFNKVTLADAGFIKQYGDCLGDIAARDLICAQKFNGLTVLPPLLTDEMIAQYTSALLAGTITSGWTFGAGAALQIPFAMQMAYRFNGIGVTQCVLYENQKLIANQFNSAIGKIQDSLSSTASALGKLQDVVNQNAQALNTLVKQLSSNFGAISSVLNDILSRLDKVEAEVQIDRLITGRLQSLQTYVTQQLIRAAEIRASANLAATKMSECVLGQSKRVDFCGKGYHLMSFPQSAPHGVVFLHVTYVPAQEKNFTTAPAICHDGKAHFPREGVFVSNGTHWFVTQRNFYEPQIITTDNTFVCGNCDVVIGIVNNTVYDPLQPELDSFKEELDKYFKNHTSPDVDLGDISGINASVVNIQKEIDRLNEVAKNLNESLIDLQELGKYEQYIK

SEQ ID NO: 13435 - protein, 1211 aa, Artificial Sequence
  SARS-CoV-2/Congo/158/2020__EPI_ISL_417950 spike protein (1-1211)(N914C_S1123C)
MFVFLVLLPLVSSQCVNLTTRTQLPPAYTNSFTRGVYYPDKVFRSSVLHSTQDLFLPFFSNVTWFHAIHVSGTNGTKRFDNPVLPFNDGVYFASTEKSNIIRGWIFGTTLDSKTQSLLIVNNATNVVIKVCEFQFCNDPFLGVYYHKNNKSWMESEFRVYSSANNCTFEYVSQPFLMDLEGKQGNFKNLREFVFKNIDGYFKIYSKHTPINLVRDLPQGFSALEPLVDLPIGINITRFQTLLALHRSYLTPGDSSSGWTAGAAAYYVGYLQPRTFLLKYNENGTITDAVDCALDPLSETKCTLKSFTVEKGIYQTSNFRVQPTESIVRFPNITNLCPFGEVFNATRFASVYAWNRKRISNCVADYSVLYNSASFSTFKCYGVSPTKLNDLCFTNVYADSFVIRGDEVRQIAPGQTGKIADYNYKLPDDFTGCVIAWNSNNLDSKVGGNYNYLYRLFRKSNLKPFERDISTEIYQAGSTPCNGVEGFNCYFPLQSYGFQPTNGVGYQPYRVVVLSFELLHAPATVCGPKKSTNLVKNKCVNFNFNGLTGTGVLTESNKKFLPFQQFGRDIADTTDAVRDPQTLEILDITPCSFGGVSVITPGTNTSNQVAVLYQDVNCTEVPVAIHADQLTPTWRVYSTGSNVFQTRAGCLIGAEHVNNSYECDIPIGAGICASYQTQTNSPRRARSVASQSIIAYTMSLGAENSVAYSNNSIAIPTNFTISVTTEILPVSMTKTSVDCTMYICGDSTECSNLLLQYGSFCTQLNRALTGIAVEQDKNTQEVFAQVKQIYKTPPIKDFGGFNFSQILPDPSKPSKRSFIEDLLFNKVTLADAGFIKQYGDCLGDIAARDLICAQKFNGLTVLPPLLTDEMIAQYTSALLAGTITSGWTFGAGAALQIPFAMQMAYRFNGIGVTQCVLYENQKLIANQFNSAIGKIQDSLSSTASALGKLQDVVNQNAQALNTLVKQLSSNFGAISSVLNDILSRLDKVEAEVQIDRLITGRLQSLQTYVTQQLIRAAEIRASANLAATKMSECVLGQSKRVDFCGKGYHLMSFPQSAPHGVVFLHVTYVPAQEKNFTTAPAICHDGKAHFPREGVFVSNGTHWFVTQRNFYEPQIITTDNTFLCGNCDVVIGIVNNTVYDPLQPELDSFKEELDKYFKNHTSPDVDLGDISGINASVVNIQKEIDRLNEVAKNLNESLIDLQELGKYEQYIK

SEQ ID NO: 13436 - protein, 1211 aa, Artificial Sequence
  SARS-CoV-2/USA/UT-00034/2020__EPI_ISL_417977 spike protein (1-1211)(N914C_S1123C)
MFVFLVLLPLVSSQCVNLTTRTQLPPAYTNSFTRGVYYPDKVFRSSVLHSTQDLFLPFFSNVTWFHAIHVSGTNGTKRFDNPVLPFNDGVYFASTEKSNIIRGWIFGTTLDSKTQSLLIVNNATNVVIKVCEFQFCNDPFLGVYYYKNNKSWMESEFRVYSSANNCTFEYVSQPFLMDLEGKQGNFKNLREFVFKNIDGYFKIYSKHTPINLVRDLPQGFSALEPLVDLPIGINITRFQTLLALHRSYLTPGDSSSGWTAGAAAYYVGYLQPRTFLLKYNENGTITDAVDCALDPLSETKCTLKSFTVEKGIYQTSNFRVQPTESIVRFPNITNLCPFGEVFNATRFASVYAWNRKRISNCVADYSVLYNSASFSTFKCYGVSPTKLNDLCFTNVYADSFVIRGDEVRQIAPGQTGKIADYNYKLPDDFTGCVIAWNSNNLDSKVGGNYNYLYRLFRKSNLKPFERDISTEIYQAGSTPCNGVEGFNCYFPLQSYGFQPTNGVGYQPYRVVVLSFELLHAPATVCGPKKSTNLVKNKCVNFNFNGLTGTGVLTESNKKFLPFQQFGRDIADTTDAVRDPQTLEILDITPCSFGGVSVITPGTNTSNQVAVLYQGVNCTEVPVAIHADQLTPTWRVYSTGSNVFQTRAGCLIGAEHVNNSYECDIPIGAGICASYQTQTNSPRRARSVASQSIIAYTMSLGAENSVAYSNNSIAIPTNFTISVTTEILPVSMTKTSVDCTMYICGDSTECSNLLLQYGSFCTQLNRALTGIAVEQDKNTQEVFAQVKQIYKTPPIKDFGGFNFSQILPDPSKPSKRSFIEDLLFNKVTLADAGFIKQYGDCLGDIAARDLICAQKFNGLTVLPPLLTDEMIAQYTSALLAGTITSGWTFGAGAALQIPFAMQMAYRFNGIGVTQCVLYENQKLIANQFNSAIGKIQDSLSSTASALGKLQDVVNQNAQALNTLVKQLSSNFGAISSVLNDILSRLDKVEAEVQIDRLITGRLQSLQTYVTQQLIRAAEIRASANLAATKMSECVLGQSKRVDFCGKGYHLMSFPQSAPHGVVFLHVTYVPAQEKNFTTAPAICHDGKAHFPREGVFVSNGTHWFVTQRNFYEPQIITTDNTFVCGNCDVVIGIVNNTVYDPLQPELDSFKEELDKYFKNHTSPDVDLGDISGINASVVNIQKEIDRLNEVAKNLNESLIDLQELGKYEQYIK

SEQ ID NO: 13437 - protein, 1211 aa, Artificial Sequence
  SARS-CoV-2/USA/UT-00033/2020__EPI_ISL_417976 spike protein (1-1211)(N914C_S1123C)
MFVFLVLLPLVSSQCVNLTTRTQLPPAYTNSFTRGVYYPDKVFRSSVLHSTQDLFLPFFSNVTWFHAIHVSGTNGTKRFDNPVLPFNDGVYFASTEKSNIIRGWIFGTTLDSKTQSLLIVNNATNVVIKVCEFQFCNDPFLGVYYHKNNKSWMESEFRVYSSANNCTFEYVSQPFLMDLEGKQGNFKNLREFVFKNIDGYFKIYSKHTPINLVRDLPQGFSALEPLVDLPIGINITRFQTLLALHRSYLTPGDSSSGLTAGAAAYYVGYLQPRTFLLKYNENGTITDAVDCALDPLSETKCTLKSFTVEKGIYQTSNFRVQPTESIVRFPNITNLCPFGEVFNATRFASVYAWNRKRISNCVADYSVLYNSASFSTFKCYGVSPTKLNDLCFTNVYADSFVIRGDEVRQIAPGQTGKIADYNYKLPDDFTGCVIAWNSNNLDSKVGGNYNYLYRLFRKSNLKPFERDISTEIYQAGSTPCNGVEGFNCYFPLQSYGFQPTNGVGYQPYRVVVLSFELLHAPATVCGPKKSTNLVKNKCVNFNFNGLTGTGVLTESNKKFLPFQQFGRDIADTTDAVRDPQTLEILDITPCSFGGVSVITPGTNTSNQVAVLYQGVNCTEVPVAIHADQLTPTWRVYSTGSNVFQTRAGCLIGAEHVNNSYECDIPIGAGICASYQTQTNSPRRARSVASQSIIAYTMSLGAENSVAYSNNSIAIPTNFTISVTTEILPVSMTKTSVDCTMYICGDSTECSNLLLQYGSFCTQLNRALTGIAVEQDKNTQEVFAQVKQIYKTPPIKDFGGFNFSQILPDPSKPSKRSFIEDLLFNKVTLADAGFIKQYGDCLGDIAARDLICAQKFNGLTVLPPLLTDEMIAQYTSALLAGTITSGWTFGAGAALQIPFAMQMAYRFNGIGVTQCVLYENQKLIANQFNSAIGKIQDSLSSTASALGKLQDVVNQNAQALNTLVKQLSSNFGAISSVLNDILSRLDKVEAEVQIDRLITGRLQSLQTYVTQQLIRAAEIRASANLAATKMSECVLGQSKRVDFCGKGYHLMSFPQSAPHGVVFLHVTYVPAQEKNFTTAPAICHDGKAHFPREGVFVSNGTHWFVTQRNFYEPQIITTDNTFVCGNCDVVIGIVNNTVYDPLQPELDSFKEELDKYFKNHTSPDVDLGDISGINASVVNIQKEIDRLNEVAKNLNESLIDLQELGKYEQYIK

SEQ ID NO: 13438 - protein, 1211 aa, Artificial Sequence
  SARS-CoV-2/USA/WI-13/2020__EPI_ISL_417516 spike protein (1-1211)(N914C_S1123C)
MFVFLVLLPLVSSQCVNLTTRTQLPPAYTNSFTRGVYYPDKVFRSSVLHSTQDLFLPFFSNVTWFHAIHVSGTNGTKRFDNPVLPFNDGVYFASTEKSNIIRGWIFGTTLDSKTQSLLIVNNATNVVIKVCEFQFCNDPFLGVYYHKNNKSWMESEFRVYSSANNCTFEYVSQPFLMDLEGKQGNFKNLREFVFKNIDGYFKIYSKHTPINLVRDLPQGFSALEPLVDLPIGINITRFQTLLALHRSYLTPGDSSSGWTAGAAAYYVGYLQPRTFLLKYNENGTITDAVDCALDPLSETKCTLKSFTVEKGIYQTSNFRVLPTESIVRFPNITNLCPFGEVFNATRFASVYAWNRKRISNCVADYSVLYNSASFSTFKCYGVSPTKLNDLCFTNVYADSFVIRGDEVRQIAPGQTGKIADYNYKLPDDFTGCVIAWNSNNLDSKVGGNYNYLYRLFRKSNLKPFERDISTEIYQAGSTPCNGVEGFNCYFPLQSYGFQPTNGVGYQPYRVVVLSFELLHAPATVCGPKKSTNLVKNKCVNFNFNGLTGTGVLTESNKKFLPFQQFGRDIADTTDAVRDPQTLEILDITPCSFGGVSVITPGTNTSNQVAVLYQGVNCTEVPVAIHADQLTPTWRVYSTGSNVFQTRAGCLIGAEHVNNSYECDIPIGAGICASYQTQTNSPRRARSVASQSIIAYTMSLGAENSVAYSNNSIAIPTNFTISVTTEILPVSMTKTSVDCTMYICGDSTECSNLLLQYGSFCTQLNRALTGIAVEQDKNTQEVFAQVKQIYKTPPIKDFGGFNFSQILPDPSKPSKRSFIEDLLFNKVTLADAGFIKQYGDCLGDIAARDLICAQKFNGLTVLPPLLTDEMIAQYTSALLAGTITSGWTFGAGAALQIPFAMQMAYRFNGIGVTQCVLYENQKLIANQFNSAIGKIQDSLSSTASALGKLQDVVNQNAQALNTLVKQLSSNFGAISSVLNDILSRLDKVEAEVQIDRLITGRLQSLQTYVTQQLIRAAEIRASANLAATKMSECVLGQSKRVDFCGKGYHLMSFPQSAPHGVVFLHVTYVPAQEKNFTTAPAICHDGKAHFPREGVFVSNGTHWFVTQRNFYEPQIITTDNTFVCGNCDVVIGIVNNTVYDPLQPELDSFKEELDKYFKNHTSPDVDLGDISGINASVVNIQKEIDRLNEVAKNLNESLIDLQELGKYEQYIK

SEQ ID NO: 13439 - protein, 1210 aa, Artificial Sequence
  SARS-CoV-2/India/1-27/2020__EPI_ISL_413522 spike protein (1-1210)(N913C_S1122C)
MFVFLVLLPLVSSQCVNLTTRTQLPPAYTNSFTRGVYYPDKVFRSSVLHSTQDLFLPFFSNVTWFHAIHVSGTNGTKRFDNPVLPFNDGVYFASTEKSNIIRGWIFGTTLDSKTQSLLIVNNATNVVIKVCEFQFCNDPFLGVYHKNNKSWMESEFRVYSSANNCTFEYVSQPFLMDLEGKQGNFKNLREFVFKNIDGYFKIYSKHTPINLVRDLPQGFSALEPLVDLPIGINITRFQTLLALHRSYLTPGDSSSGWTAGAAAYYVGYLQPRTFLLKYNENGTITDAVDCALDPLSETKCTLKSFTVEKGIYQTSNFRVQPTESIVRFPNITNLCPFGEVFNATRFASVYAWNRKRISNCVADYSVLYNSASFSTFKCYGVSPTKLNDLCFTNVYADSFVIRGDEVIQIAPGQTGKIADYNYKLPDDFTGCVIAWNSNNLDSKVGGNYNYLYRLFRKSNLKPFERDISTEIYQAGSTPCNGVEGFNCYFPLQSYGFQPTNGVGYQPYRVVVLSFELLHAPATVCGPKKSTNLVKNKCVNFNFNGLTGTGVLTESNKKFLPFQQFGRDIADTTDAVRDPQTLEILDITPCSFGGVSVITPGTNTSNQVAVLYQDVNCTEVPVAIHADQLTPTWRVYSTGSNVFQTRAGCLIGAEHVNNSYECDIPIGAGICASYQTQTNSPRRARSVASQSIIAYTMSLGAENSVAYSNNSIAIPTNFTISVTTEILPVSMTKTSVDCTMYICGDSTECSNLLLQYGSFCTQLNRALTGIAVEQDKNTQEVFAQVKQIYKTPPIKDFGGFNFSQILPDPSKPSKRSFIEDLLFNKVTLADAGFIKQYGDCLGDIAARDLICAQKFNGLTVLPPLLTDEMIAQYTSALLAGTITSGWTFGAGAALQIPFAMQMAYRFNGIGVTQCVLYENQKLIANQFNSAIGKIQDSLSSTASALGKLQDVVNQNAQALNTLVKQLSSNFGAISSVLNDILSRLDKVEAEVQIDRLITGRLQSLQTYVTQQLIRAAEIRASANLAATKMSECVLGQSKRVDFCGKGYHLMSFPQSAPHGVVFLHVTYVPAQEKNFTTAPAICHDGKAHFPREGVFVSNGTHWFVTQRNFYEPQIITTDNTFVCGNCDVVIGIVNNTVYDPLQPELDSFKEELDKYFKNHTSPDVDLGDISGINASVVNIQKEIDRLNEVAKNLNESLIDLQELGKYEQYIK

SEQ ID NO: 13440 - protein, 1205 aa, Artificial Sequence
  SARS-CoV-2/pangolin/Guangxi/P4L/2017__EPI_ISL_410538 spike protein (1-1205)(N908C_S1117C)
MFVFLFVLPLVSSQCVNLTTRTGIPPGYTNSSTRGVYYPDKVFRSSILHLTQDLFLPFFSNVTWFNTINYQGGFKKFDNPVLPFNDGVYFASTEKSNIIRGWIFGTTLDARTQSLLIVNNATNVVIKVCEFQFCTDPFLGVYYHNNNKTWVENEFRVYSSANNCTFEYISQPFLMDLEGKQGNFKNLREFVFKNVDGYFKIYSKHTPIDLVRDLPRGFAALEPLVDLPIGINITRFQTLLALHRSYLTPGNLESGWTTGAAAYYVGYLQQRTFLLSYNQNGTITDAVDCSLDPLSETKCTLKSLTVEKGIYQTSNFRVQPTISIVRFPNITNLCPFGEVFNASKFASVYAWNRKRISNCVADYSVLYNSTSFSTFKCYGVSPTKLNDLCFTNVYADSFVVKGDEVRQIAPGQTGVIADYNYKLPDDFTGCVIAWNSVKQDALTGGNYGYLYRLFRKSKLKPFERDISTEIYQAGSTPCNGQVGLNCYYPLERYGFHPTTGVNYQPFRVVVLSFELLNGPATVCGPKLSTTLVKDKCVNFNFNGLTGTGVLTTSKKQFLPFQQFGRDISDTTDAVRDPQTLEILDITPCSFGGVSVITPGTNTSNQVAVLYQDVNCTEVPMAIHAEQLTPAWRVYSAGANVFQTRAGCLVGAEHVNNSYECDIPVGAGICASYHSMSSLRSVNQRSIIAYTMSLGAENSVAYSNNSIAIPTNFTISVTTEILPVSMTKTSVDCTMYICGDSIECSNLLLQYGSFCTQLNRALTGIAVEQDKNTQEVFAQVKQIYKTPPIKDFGGFNFSQILPDPSKPSKRSFIEDLLFNKVTLADAGFIKQYGDCLGDIAARDLICAQKFNGLTVLPPLLTDEMIAQYTSALLAGTITSGWTFGAGAALQIPFAMQMAYRFNGIGVTQCVLYENQKLIANQFNSAIGKIQDSLSSTASALGKLQDVVNQNAQALNTLVKQLSSNFGAISSVLNDILSRLDKVEAEVQIDRLITGRLQSLQTYVTQQLIRAAEIRASANLAATKMSECVLGQSKRVDFCGKGYHLMSFPQSAPHGVVFLHVTYVPAQEKNFTTAPAICHEGKAHFPREGVFVSNGTHWFITQRNFYEPQIITTDNTFVCGSCDVVIGIVNNTVYDPLQPELDSFKEELDKYFKNHTSPDVDLGDISGINASVVNIQKEIDRLNEVAKNLNESPIDLQELGKYEQYIK

SEQ ID NO: 13441 - protein, 1205 aa, Artificial Sequence
  SARS-CoV-2/pangolin/Guangxi/P5L/2017__EPI_ISL_410540 spike protein (1-1205)(N908C_S1117C)
MFVFLFVLPLVSSQCVNLTTRTGIPPGYTNSSTRGVYYPDKVFRSSILHLTQDLFLPFFSNVTWFNTINYQGGFKKFDNPVLPFNDGVYFASTEKSNIIRGWIFGTTLDARTQSLLIVNNATNVVIKVCEFQFCTDPFLGVYYHNNNKTWVENEFRVYSSANNCTFEYISQPFLMDLEGKQGNFKNLREFVFKNVDGYFKIYSKHTPIDLVRDLPRGFAALEPLVDLPIGINITRFQTLLALHRSYLTPGKLESGWTTGAAAYYVGYLQQRTFLLSYNQNGTITDAVDCSLDPLSETKCTLKSLTVEKGIYQTSNFRVQPTISIVRFPNITNLCPFGEVFNASKFASVYAWNRKRISNCVADYSVLYNSTSFSTFKCYGVSPTKLNDLCFTNVYADSFVVKGDEVRQIAPGQTGVIADYNYKLPDDFTGCVIAWNSVKQDALTGGNYGYLYRLFRKSKLKPFERDISTEIYQAGSTPCNGQVGLNCYYPLERYGFHPTTGVNYQPFRVVVLSFELLNGPATVCGPKLSTTLVKDKCVNFNFNGLTGTGVLTTSKKQFLPFQQFGRDISDTTDAVRDPQTLEILDITPCSFGGVSVITPGTNTSNQVAVLYQDVNCTEVPMAIHAEQLTPAWRVYSAGANVFQTRAGCLVGAEHVNNSYECDIPVGAGICASYHSMSSFRSVNQRSIIAYTMSLGAENSVAYSNNSIAIPTNFTISVTTEILPVSMTKTSVDCTMYICGDSIECSNLLLQYGSFCTQLNRALTGIAVEQDKNTQEVFAQVKQIYKTPPIKDFGGFNFSQILPDPSKPSKRSFIEDLLFNKVTLADAGFIKQYGDCLGDIAARDLICAQKFNGLTVLPPLLTDEMIAQYTSALLAGTITSGWTFGAGAALQIPFAMQMAYRFNGIGVTQCVLYENQKLIANQFNSAIGKIQDSLSSTASALGKLQDVVNQNAQALNTLVKQLSSNFGAISSVLNDILSRLDKVEAEVQIDRLITGRLQSLQTYVTQQLIRAAEIRASANLAATKMSECVLGQSKRVDFCGKGYHLMSFPQSAPHGVVFLHVTYVPAQEKNFTTAPAICHEGKAHFPREGVFVSNGTHWFITQRNFYEPQIITTDNTFVCGSCDVVIGIVNNTVYDPLQPELDSFKEELDKYFKNHTSPDVDLGDISGINASVVNIQKEIDRLNEVAKNLNESLIDLQELGKYEQYIK

SEQ ID NO: 13442 - protein, 1205 aa, Artificial Sequence
  SARS-CoV-2/pangolin/Guangxi/P5E/2017__EPI_ISL_410541 spike protein (1-1205)(N908C_S1117C)
MFVFLFVLPLVSSQCVNLTTRTGIPPGYTNSSTRGVYYPDKVFRSSILHLTQDLFLPFFSNVTWFNTITYQGGSKKFDNPVLPFNDGVYFASTEKSNIIRGWIFGTTLDARTQSLLIVNNATNVVIKVCEFQFCTDPFLGVYYHNNNKTWVENEFRVYSSANNCTFEYISQPFLMDLEGKQGNFKNLREFVFKNVDGYFKIYSKHTPIDLVRDLPRGFAALEPLVDLPIGINITRFQTLLALHRSYLTPGKLESGWTTGAAAYYVGYLQQRTFLLSYNQNGTITDAVDCSLDPLSETKCTLKSLTVEKGIYQTSNFRVQPTISIVRFPNITNLCPFGEVFNASKFASVYAWNRKRISNCVADYSVLYNSTSFSTFKCYGVSPTKLNDLCFTNVYADSFVVKGDEVRQIAPGQTGVIADYNYKLPDDFTGCVIAWNSVKQDALTGDNYGYLYRLFRKSKLKPFERDISTEIYQAGSTPCNGQVGLNCYYPLERYGFHPTTGVNYQPFRVVVLSFELLNGPATVCGPKLSTTLVKDKCVNFNFNGLTGTGVLTTSKKQFLPFQQFGRDISDTTDAVRDPQTLEILDITPCSFGGVSVITPGTNTSNQVAVLYQDVNCTEVPMAIHAEQLTPAWRVYSAGANVFQTRAGCLVGAEHVNNSYECDIPVGAGICASYHSMSSFRSVNQRSIIAYTMSLGAENSVAYSNNSIAIPTNFTISVTTEILPVSMTKTSVDCTMYICGDSIECSNLLLQYGSFCTQLNRALTGIAVEQDKNTQEVFAQVKQIYKTPPIKDFGGFNFSQILPDPSKPSKRSFIEDLLFNKVTLADAGFIKQYGDCLGDIAARDLICAQKFNGLTVLPPLLTDEMIAQYTSALLAGTITSGWTFGAGAALQIPFAMQMAYRFNGIGVTQCVLYENQKLIANQFNSAIGKIQDSLSSTASALGKLQDVVNQNAQALNTLVKQLSSNFGAISSVLNDILSRLDKVEAEVQIDRLITGRLQSLQTYVTQQLIRAAEIRASANLAATKMSECVLGQSKRVDFCGKGYHLMSFPQSAPHGVVFLHVTYVPAQEKNFTTAPAICHEGKAHFPREGVFVSNGTHWFITQRNFYEPQIITTDNTFVCGSCDVVIGIVNNTVYDPLQPELDSFKEELDKYFKNHTSPDVDLGDISGINASVVNIQKEIDRLNEVAKNLNESLIDLQELGKYEQYIK

SEQ ID NO: 13443 - protein, 1203 aa, Artificial Sequence
  SARS-CoV-2/pangolin/Guangxi/P1E/2017__EPI_ISL_410539 spike protein (1-1203)(N906C_S1115C)
MFVFLFVLPLVSSQCVNLTTRTGIQPGYTNSSTRGVYYPDKVFRSSILHLTQDLFLPFFSNVTWFNTINYQGGFKKFDNPVLPFNDGVYFASTEKSNIIRGWIFGTTLDARTQSLLIVNNATNVVIKVCEFQFCTDPFLGVYYHNNNKTWVENEFRVYSSANNCTFEYISQPFLMDLEGKQGNFKNLREFVFKNVDGYFKIYSKHTPIDLVRDLPRGFAALEPLVDLPIGINITRFQTLLALHRSYLTPGKLESGWTTGAAAYYVGYLQQRTFLLSYNQNGTITDAVDCSLDPLSETKCTLKSLTVEKGIYQTSNFRVQPTISIVRFPNITNLCPFGEVFNASKFASVYAWNRKRISNCVADYSVLYNSTSFSTFKCYGVSPTKLNDLCFTNVYADSFVVKGDEVRQIAPGQTGVIADYNYKLPDDFTGCVIAWNSVKQDALTGGNYLYRLFRKSKLKPFERDISTEIYQAGSTPCNGQVGLNCYYPLERYGFHPTTGVNYQPFRVVVLSFELLNGPATVCGPKLSTTLVKDKCVNFNFNGLTGTGVLTTSKKQFLPFQQFGRDISDTTDAVRDPQTLEILDITPCSFGGVSVITPGTNTSNQVAVLYQDVNCTEVPMAIHAEQLTPAWRVYSAGANVFQTRAGCLVGAEHVNNSYECDIPVGAGICASYHSMSSLRSVNQRSIIAYTMSLGAENSVAYSNNSIAIPTNFTISVTTEILPVSMTKTSVDCTMYICGDSIECSNLLLQYGSFCTQLNRALTGIAVEQDKNTQEVFAQVKQIYKTPPIKDFGGFNFSQILPDPSKPSKRSFIEDLLFNKVTLADAGFIKQYGDCLGDIAARDLICAQKFNGLTVLPPLLTDEMIAQYTSALLAGTITSGWTFGAGAALQIPFAMQMAYRFNGIGVTQCVLYENQKLIANQFNSAIGKIQDSLSSTASALGKLQDVVNQNAQALNTLVKQLSSNFGAISSVLNDILSRLDKVEAEVQIDRLITGRLQSLQTYVTQQLIRAAEIRASANLAATKMSECVLGQSKRVDFCGKGYHLMSFPQSAPHGVVFLHVTYVPAQEKNFTTAPAICHEGKAHFPREGVFVSNGTHWFITQRNFYEPQIITTDNTFVCGSCDVVIGIVNNTVYDPLQPELDSFKEELDKYFKNHTSPDVDLGDISGINASVVNIQKEIDRLNEVAKNLNESLIDLQELGKYEQYIK

SEQ ID NO: 13444 - protein, 1147 aa, Artificial Sequence
  SARS-CoV-2/Wuhan/WIV05/2019__EPI_ISL_402128 spike protein (1-1147)(N914C_S1123C)
MFVFLVLLPLVSSQCVNLTTRTQLPPAYTNSFTRGVYYPDKVFRSSVLHSTQDLFLPFFSNVTWFHAIHVSGTNGTKRFDNPVLPFNDGVYFASTEKSNIIRGWIFGTTLDSKTQSLLIVNNATNVVIKVCEFQFCNDPFLGVYYHKNNKSWMESEFRVYSSANNCTFEYVSQPFLMDLEGKQGNFKNLREFVFKNIDGYFKIYSKHTPINLVRDLPQGFSALEPLVDLPIGINITRFQTLLALHRSYLTPGDSSSGWTAGAAAYYVGYLQPRTFLLKYNENGTITDAVDCALDPLSETKCTLKSFTVEKGIYQTSNFRVQPTESIVRFPNITNLCPFGEVFNATRFASVYAWNRKRISNCVADYSVLYNSASFSTFKCYGVSPTKLNDLCFTNVYADSFVIRGDEVRQIAPGQTGKIADYNYKLPDDFTGCVIAWNSNNLDSKVGGNYNYLYRLFRKSNLKPFERDISTEIYQAGSTPCNGVEGFNCYFPLQSYGFQPTNGVGYQPYRVVVLSFELLHAPATVCGPKKSTNLVKNKCVNFNFNGLTGTGVLTESNKKFLPFQQFGRDIADTTDAVRDPQTLEILDITPCSFGGVSVITPGTNTSNQVAVLYQDVNCTEVPVAIHADQLTPTWRVYSTGSNVFQTRAGCLIGAEHVNNSYECDIPIGAGICASYQTQTNSPRRARSVASQSIIAYTMSLGAENSVAYSNNSIAIPTNFTISVTTEILPVSMTKTSVDCTMYICGDSTECSNLLLQYGSFCTQLNRALTGIAVEQDKNTQEVFAQVKQIYKTPPIKDFGGFNFSQILPDPSKPSKRSFIEDLLFNKVTLADAGFIKQYGDCLGDIAARDLICAQKFNGLTVLPPLLTDEMIAQYTSALLAGTITSGWTFGAGAALQIPFAMQMAYRFNGIGVTQCVLYENQKLIANQFNSAIGKIQDSLSSTASALGKLQDVVNQNAQALNTLVKQLSSNFGAISSVLNDILSRLDKVEAEVQIDRLITGRLQSLQTYVTQQLIRAAEIRASANLAATKMSECVLGQSKRVDFCGKGYHLMSFPQSAPHGVVFLHVTYVPAQEKNFTTAPAICHDGKAHFPREGVFVSNGTHWFVTQRNFYEPQIITTDNTFVCGNCDVVIGIVNNTVYDPLQPELDS

SEQ ID NO: 13445 - protein, 1143 aa, Artificial Sequence
  SARS-CoV-2/bat/Yunnan/RaTG13/2013__EPI_ISL_402131 spike protein (1-1143)(N910C_S1119C)
MFVFLVLLPLVSSQCVNLTTRTQLPPAYTNSSTRGVYYPDKVFRSSVLHLTQDLFLPFFSNVTWFHAIHVSGTNGIKRFDNPVLPFNDGVYFASTEKSNIIRGWIFGTTLDSKTQSLLIVNNATNVVIKVCEFQFCNDPFLGVYYHKNNKSWMESEFRVYSSANNCTFEYVSQPFLMDLEGKQGNFKNLREFVFKNIDGYFKIYSKHTPINLVRDLPPGFSALEPLVDLPIGINITRFQTLLALHRSYLTPGDSSSGWTAGAAAYYVGYLQPRTFLLKYNENGTITDAVDCALDPLSETKCTLKSFTVEKGIYQTSNFRVQPTDSIVRFPNITNLCPFGEVFNATTFASVYAWNRKRISNCVADYSVLYNSTSFSTFKCYGVSPTKLNDLCFTNVYADSFVITGDEVRQIAPGQTGKIADYNYKLPDDFTGCVIAWNSKHIDAKEGGNFNYLYRLFRKANLKPFERDISTEIYQAGSKPCNGQTGLNCYYPLYRYGFYPTDGVGHQPYRVVVLSFELLNAPATVCGPKKSTNLVKNKCVNFNFNGLTGTGVLTESNKKFLPFQQFGRDIADTTDAVRDPQTLEILDITPCSFGGVSVITPGTNASNQVAVLYQDVNCTEVPVAIHADQLTPTWRVYSTGSNVFQTRAGCLIGAEHVNNSYECDIPIGAGICASYQTQTNSRSVASQSIIAYTMSLGAENSVAYSNNSIAIPTNFTISVTTEILPVSMTKTSVDCTMYICGDSTECSNLLLQYGSFCTQLNRALTGIAVEQDKNTQEVFAQVKQIYKTPPIKDFGGFNFSQILPDPSKPSKRSFIEDLLFNKVTLADAGFIKQYGDCLGDIAARDLICAQKFNGLTVLPPLLTDEMIAQYTSALLAGTITSGWTFGAGAALQIPFAMQMAYRFNGIGVTQCVLYENQKLIANQFNSAIGKIQDSLSSTASALGKLQDVVNQNAQALNTLVKQLSSNFGAISSVLNDILSRLDKVEAEVQIDRLITGRLQSLQTYVTQQLIRAAEIRASANLAATKMSECVLGQSKRVDFCGKGYHLMSFPQSAPHGVVFLHVTYVPAQEKNFTTAPAICHDGKAHFPREGVFVSNGTHWFVTQRNFYEPQIITTDNTFVCGSCDVVIGIVNNTVYDPLQPELDS

SEQ ID NO: 13446 - protein, 1147 aa, Artificial Sequence
  SARS-CoV-2/Wuhan/HBCDC-HB-01/2019__EPI_ISL_402132 spike protein (1-1147)(N914C_S1123C)
MFVFLVLLPLVSSQCVNLTTRTQLPPAYTNSITRGVYYPDKVFRSSVLHSTQDLFLPFFSNVTWFHAIHVSGTNGTKRFDNPVLPFNDGVYFASTEKSNIIRGWIFGTTLDSKTQSLLIVNNATNVVIKVCEFQFCNDPFLGVYYHKNNKSWMESEFRVYSSANNCTFEYVSQPFLMDLEGKQGNFKNLREFVFKNIDGYFKIYSKHTPINLVRDLPQGFSALEPLVDLPIGINITRFQTLLALHRSYLTPGDSSSGWTAGAAAYYVGYLQPRTFLLKYNENGTITDAVDCALDPLSETKCTLKSFTVEKGIYQTSNFRVQPTESIVRFPNITNLCPFGEVFNATRFASVYAWNRKRISNCVADYSVLYNSASFSTFKCYGVSPTKLNDLCFTNVYADSFVIRGDEVRQIAPGQTGKIADYNYKLPDDFTGCVIAWNSNNLDSKVGGNYNYLYRLFRKSNLKPFERDISTEIYQAGSTPCNGVEGFNCYFPLQSYGFQPTNGVGYQPYRVVVLSFELLHAPATVCGPKKSTNLVKNKCVNFNFNGLTGTGVLTESNKKFLPFQQFGRDIADTTDAVRDPQTLEILDITPCSFGGVSVITPGTNTSNQVAVLYQDVNCTEVPVAIHADQLTPTWRVYSTGSNVFQTRAGCLIGAEHVNNSYECDIPIGAGICASYQTQTNSPRRARSVASQSIIAYTMSLGAENSVAYSNNSIAIPTNFTISVTTEILPVSMTKTSVDCTMYICGDSTECSNLLLQYGSFCTQLNRALTGIAVEQDKNTQEVFAQVKQIYKTPPIKDFGGFNFSQILPDPSKPSKRSFIEDLLFNKVTLADAGFIKQYGDCLGDIAARDLICAQKFNGLTVLPPLLTDEMIAQYTSALLAGTITSGWTFGAGAALQIPFAMQMAYRFNGIGVTQCVLYENQKLIANQFNSAIGKIQDSLSSTASALGKLQDVVNQNAQALNTLVKQLSSNFGAISSVLNDILSRLDKVEAEVQIDRLITGRLQSLQTYVTQQLIRAAEIRASANLAATKMSECVLGQSKRVDFCGKGYHLMSFPQSAPHGVVFLHVTYVPAQEKNFTTAPAICHDGKAHFPREGVFVSNGTHWFVTQRNFYEPQIITTDNTFVCGNCDVVIGIVNNTVYDPLQPELDS

SEQ ID NO: 13447 - protein, 1147 aa, Artificial Sequence
  SARS-CoV-2/Guangdong/20SF028/2020__EPI_ISL_403936 spike protein (1-1147)(N914C_S1123C)
MFVFLVLLPLVSSQCVNLTTRTQLPPAYTNSFTRGVYYPDKVFRSSVLYSTQDLFLPFFSNVTWFHAIHVSGTNGTKRFDNPVLPFNDGVYFASTEKSNIIRGWIFGTTLDSKTQSLLIVNNATNVVIKVCEFQFCNDPFLGVYYHKNNKSWMESEFRVYSSANNCTFEYVSQPFLMDLEGKQGNFKNLREFVFKNIDGYFKIYSKHTPINLVRDLPQGFSALEPLVDLPIGINITRFQTLLALHRSYLTPGDSSSGWTAGAAAYYVGYLQPRTFLLKYNENGTITDAVDCALDPLSETKCTLKSFTVEKGIYQTSNFRVQPTESIVRFPNITNLCPFGEVFNATRFASVYAWNRKRISNCVADYSVLYNSASFSTFKCYGVSPTKLNDLCFTNVYADSFVIRGDEVRQIAPGQTGKIADYNYKLPDDFTGCVIAWNSNNLDSKVGGNYNYLYRLFRKSNLKPFERDISTEIYQAGSTPCNGVEGFNCYFPLQSYGFQPTNGVGYQPYRVVVLSFELLHAPATVCGPKKSTNLVKNKCVNFNFNGLTGTGVLTESNKKFLPFQQFGRDIADTTDAVRDPQTLEILDITPCSFGGVSVITPGTNTSNQVAVLYQDVNCTEVPVAIHADQLTPTWRVYSTGSNVFQTRAGCLIGAEHVNNSYECDIPIGAGICASYQTQTNSPRRARSVASQSIIAYTMSLGAENSVAYSNNSIAIPTNFTISVTTEILPVSMTKTSVDCTMYICGDSTECSNLLLQYGSFCTQLNRALTGIAVEQDKNTQEVFAQVKQIYKTPPIKDFGGFNFSQILPDPSKPSKRSFIEDLLFNKVTLADAGFIKQYGDCLGDIAARDLICAQKFNGLTVLPPLLTDEMIAQYTSALLAGTITSGWTFGAGAALQIPFAMQMAYRFNGIGVTQCVLYENQKLIANQFNSAIGKIQDSLSSTASALGKLQDVVNQNAQALNTLVKQLSSNFGAISSVLNDILSRLDKVEAEVQIDRLITGRLQSLQTYVTQQLIRAAEIRASANLAATKMSECVLGQSKRVDFCGKGYHLMSFPQSAPHGVVFLHVTYVPAQEKNFTTAPAICHDGKAHFPREGVFVSNGTHWFVTQRNFYEPQIITTDNTFVCGNCDVVIGIVNNTVYDPLQPELDS

SEQ ID NO: 13448 - protein, 1147 aa, Artificial Sequence
  SARS-CoV-2/Shenzhen/SZTH-001/2020__EPI_ISL_406592 spike protein (1-1147)(N914C_S1123C)
MFVFLVLLPLVSSQCVNLTTRTQLPPAYTNSFTRGVYYPDKVFRSSVLHSTQDLFLPFFSNVTWFHAIHVSGTNGTKRFDNPVLPFNDGVYFASTEKSNIIRGWIFGTTLDSKTQSLLIVNNATNVVIKVCEFQFCNDPFLGVYYHKNNKSWMESEFRVYSSANNCTFEYVSQPFLMDLEGKQGNFKNLREFVFKNIDGYFKIYSKHTPINLVRDLPQGFSALEPLVDLPIGINITRFQTLLALHRSYLTPGDSSSGWTAGAAAYYVGYLQPRTFLLKYNENGTITDAVDCALDPLSETKCTLKSFTVEKGIYQTSNFRVQPTESIVRFPNITNLCPFGEVFNATRFASVYAWNRKRISNCVADYSVLYNSASFSTFKCYGVSPTKLNDLCFTNVYADSFVIRGDEVRQIAPGQTGKIADYNYKLPDDFTGCVIAWNSNNLDSKVGGNYNYLYRLFRKSNLKPFERDISTEIYQAGSTPCNGVEGFNCYFPLQSYGFQPTNGVGYQPYRVVVLSFELLHAPATVCGPKKSTNLVKNKCVNFNFNGLTGTGVLTESNKKFLPFQQFGRDIADTTDAVRDPQTLEILDITPCSFGGVSVITPGTNTSNQVAVLYQDVNCTEVPVAIHADQLTPTWRVYSTGSNVFQTRAGCLIGAEHVNNSYECDIPIGAGICASYQTQTNSPRRARSVASQSIIAYTMSLGAENSVAYSNNSIAIPTNFTISVTTEILPVSMTKTSVDCTMYICGDSTECSNLLLQYGSFCTQLNRALTGIAVEQDKNTQEVFAQVKQIYKTPPIKDFGGFNFSQILPDPSKPSKRSFIEDLLFNKVTLADAGFIKQYGDCLGDIAARDLICAQKFNGLTVLPPLLTDEMIAQYTSALLAGTITSGWTFGAGAALQIPFAMQMAYRFNGIGVTQCVLYENQKLIANQFNSAIGKIQDSLSSTASALGKLQDVVNQNAQALNTLVKQLSSNFGAISSVLNDILSRLDKVEAEVQIDRLITGRLQSLQTYVTQQLIRAAEIRASANLAATKMSECVLGQSKRVDFCGKGYHLMSFPQSAPHGVVFLHVTYVPAQEKNFTTAPAICHDGKAHFPREGVFVSNGTHWFVTQRNFYEPQIITTDNTFVCGNCDVLIGIVNNTVYDPLQPELDS

SEQ ID NO: 13449 - protein, 1147 aa, Artificial Sequence
  SARS-CoV-2/Shenzhen/SZTH-004/2020__EPI_ISL_406595 spike protein (1-1147)(N914C_S1123C)
MFVFLVLLPLVSSQCVNLTTRTQLPPAYTNSFTRGVYYPDKVFRSSVLHSTQDLFLPFFSNVTWFHAIHVSGTNGTKRFDNPVLPFNDGVYFASTEKSNIIRGWIFGTTLDSKTQSLLIVNNATNVVIKVCEFQFCNDPFLGVYYHKNNKSWMESEFRVYSSANNCTFEYVSQPFLMDLEGKQGNFKNLREFVFKNIDGYFKIYSKHTPINLVRDLPQGFSALEPLVDLPIGINITRFQTLLALHRSYLTPGDSSSGWTAGAAAYYVGYLQPRTFLLKYNENGTITDAVDCALDPLSETKCTLKSFTVEKGIYQTSNFRVQPTESIVRFPNITNLCPFGEVFNATRFASVYAWDRKRISNCVAYYSVLYNSASFSTFKCYGVSPTKLNDLCFTNVYADSFVIRGDEVRQIAPGQTGKIADYNYKLPDDFTGCVIAWNSNNLDSKVGGNYNYLYRLFRKSNLKPFERDISTEIYQAGSTPCNGVEGFNCYFPLQSYGFQPTNGVGYQPYRVVVLSFELLHAPATVCGPKKSTNLVKNKCVNFNFNGLTGTGVLTESNKKFLPFQQFGRDIADTTDAVRDPQTLEILDITPCSFGGVSVITPGTNTSNQVAVLYQDVNCTEVPVAIHADQLTPTWRVYSTGSNVFQTRAGCLIGAEHVNNSYECDIPIGAGICASYQTQTNSPRRARSVASQSIIAYTMSLGAENSVAYSNNSIAIPTNFTISVTTEILPVSMTKTSVDCTMYICGDSTECSNLLLQYGSFCTQLNRALTGIAVEQDKNTQEVFAQVKQIYKTPPIKDFGGFNFSQILPDPSKPSKRSFIEDLLFNKVTLADAGFIKQYGDCLGDIAARDLICAQKFNGLTVLPPLLTDEMIAQYTSALLAGTITSGWTFGAGAALQIPFAMQMAYRFNGIGVTQCVLYENQKLIANQFNSAIGKIQDSLSSTASALGKLQDVVNQNAQALNTLVKQLSSNFGAISSVLNDILSRLDKVEAEVQIDRLITGRLQSLQTYVTQQLIRAAEIRASANLAATKMSECVLGQSKRVDFCGKGYHLMSFPQSAPHGVVFLHVTYVPAQEKNFTTAPAICHDGKAHFPREGVFVSNGTHWFVTQRNFYEPQIITTDNTFVCGNCDVVIGIVNNTVYDPLQPELDS

SEQ ID NO: 13450 - protein, 1147 aa, Artificial Sequence
  SARS-CoV-2/France/IDF0372/2020__EPI_ISL_406596 spike protein (1-1147)(N914C_S1123C)
MFVFLVLLPLVSSQCVNLTTRTQLPPAYTNSFTRGVYYPDKVFRSSVLHSTQDLFLPFFSNVTWFHAIHVSGTNGTKRFDNPVLPFNDGVYFASTEKSNIIRGWIFGTTLDSKTQSLLIVNNATNVVIKVCEFQFCNDPFLGVYYHKNNKSWMESEFRVYSSANNCTFEYVSQPFLMDLEGKQGNFKNLREFVFKNIDGYFKIYSKHTPINLVRDLPQGFSALEPLVDLPIGINITRFQTLLALHRSYLTPGDSSSGWTAGAAAYYVGYLQPRTFLLKYNENGTITDAVDCALDPLSETKCTLKSFTVEKGIYQTSNFRVQPTESIVRFPNITNLCPFGEVFNATRFASVYAWNRKRISNCVADYSFLYNSASFSTFKCYGVSPTKLNDLCFTNVYADSFVIRGDEVRQIAPGQTGKIADYNYKLPDDFTGCVIAWNSNNLDSKVGGNYNYLYRLFRKSNLKPFERDISTEIYQAGSTPCNGVEGFNCYFPLQSYGFQPTNGVGYQPYRVVVLSFELLHAPATVCGPKKSTNLVKNKCVNFNFNGLTGTGVLTESNKKFLPFQQFGRDIADTTDAVRDPQTLEILDITPCSFGGVSVITPGTNTSNQVAVLYQDVNCTEVPVAIHADQLTPTWRVYSTGSNVFQTRAGCLIGAEHVNNSYECDIPIGAGICASYQTQTNSPRRARSVASQSIIAYTMSLGAENSVAYSNNSIAIPTNFTISVTTEILPVSMTKTSVDCTMYICGDSTECSNLLLQYGSFCTQLNRALTGIAVEQDKNTQEVFAQVKQIYKTPPIKDFGGFNFSQILPDPSKPSKRSFIEDLLFNKVTLADAGFIKQYGDCLGDIAARDLICAQKFNGLTVLPPLLTDEMIAQYTSALLAGTITSGWTFGAGAALQIPFAMQMAYRFNGIGVTQCVLYENQKLIANQFNSAIGKIQDSLSSTASALGKLQDVVNQNAQALNTLVKQLSSNFGAISSVLNDILSRLDKVEAEVQIDRLITGRLQSLQTYVTQQLIRAAEIRASANLAATKMSECVLGQSKRVDFCGKGYHLMSFPQSAPHGVVFLHVTYVPAQEKNFTTAPAICHDGKAHFPREGVFVSNGTHWFVTQRNFYEPQIITTDNTFVCGNCDVVIGIVNNTVYDPLQPELDS

SEQ ID NO: 13451 - protein, 1147 aa, Artificial Sequence
  SARS-CoV-2/Australia/VIC01/2020__EPI_ISL_406844 spike protein (1-1147)(N914C_S1123C)
MFVFLVLLPLVSSQCVNLTTRTQLPPAYTNSFTRGVYYPDKVFRSSVLHSTQDLFLPFFSNVTWFHAIHVSGTNGTKRFDNPVLPFNDGVYFASTEKSNIIRGWIFGTTLDSKTQSLLIVNNATNVVIKVCEFQFCNDPFLGVYYHKNNKSWMESEFRVYSSANNCTFEYVSQPFLMDLEGKQGNFKNLREFVFKNIDGYFKIYSKHTPINLVRDLPQGFSALEPLVDLPIGINITRFQTLLALHRRYLTPGDSSSGWTAGAAAYYVGYLQPRTFLLKYNENGTITDAVDCALDPLSETKCTLKSFTVEKGIYQTSNFRVQPTESIVRFPNITNLCPFGEVFNATRFASVYAWNRKRISNCVADYSVLYNSASFSTFKCYGVSPTKLNDLCFTNVYADSFVIRGDEVRQIAPGQTGKIADYNYKLPDDFTGCVIAWNSNNLDSKVGGNYNYLYRLFRKSNLKPFERDISTEIYQAGSTPCNGVEGFNCYFPLQSYGFQPTNGVGYQPYRVVVLSFELLHAPATVCGPKKSTNLVKNKCVNFNFNGLTGTGVLTESNKKFLPFQQFGRDIADTTDAVRDPQTLEILDITPCSFGGVSVITPGTNTSNQVAVLYQDVNCTEVPVAIHADQLTPTWRVYSTGSNVFQTRAGCLIGAEHVNNSYECDIPIGAGICASYQTQTNSPRRARSVASQSIIAYTMSLGAENSVAYSNNSIAIPTNFTISVTTEILPVSMTKTSVDCTMYICGDSTECSNLLLQYGSFCTQLNRALTGIAVEQDKNTQEVFAQVKQIYKTPPIKDFGGFNFSQILPDPSKPSKRSFIEDLLFNKVTLADAGFIKQYGDCLGDIAARDLICAQKFNGLTVLPPLLTDEMIAQYTSALLAGTITSGWTFGAGAALQIPFAMQMAYRFNGIGVTQCVLYENQKLIANQFNSAIGKIQDSLSSTASALGKLQDVVNQNAQALNTLVKQLSSNFGAISSVLNDILSRLDKVEAEVQIDRLITGRLQSLQTYVTQQLIRAAEIRASANLAATKMSECVLGQSKRVDFCGKGYHLMSFPQSAPHGVVFLHVTYVPAQEKNFTTAPAICHDGKAHFPREGVFVSNGTHWFVTQRNFYEPQIITTDNTFVCGNCDVVIGIVNNTVYDPLQPELDS

SEQ ID NO: 13452 - protein, 1147 aa, Artificial Sequence
  SARS-CoV-2/Germany/BavPat1/2020__EPI_ISL_406862 spike protein (1-1147)(N914C_S1123C)
MFVFLVLLPLVSSQCVNLTTRTQLPPAYTNSFTRGVYYPDKVFRSSVLHSTQDLFLPFFSNVTWFHAIHVSGTNGTKRFDNPVLPFNDGVYFASTEKSNIIRGWIFGTTLDSKTQSLLIVNNATNVVIKVCEFQFCNDPFLGVYYHKNNKSWMESEFRVYSSANNCTFEYVSQPFLMDLEGKQGNFKNLREFVFKNIDGYFKIYSKHTPINLVRDLPQGFSALEPLVDLPIGINITRFQTLLALHRSYLTPGDSSSGWTAGAAAYYVGYLQPRTFLLKYNENGTITDAVDCALDPLSETKCTLKSFTVEKGIYQTSNFRVQPTESIVRFPNITNLCPFGEVFNATRFASVYAWNRKRISNCVADYSVLYNSASFSTFKCYGVSPTKLNDLCFTNVYADSFVIRGDEVRQIAPGQTGKIADYNYKLPDDFTGCVIAWNSNNLDSKVGGNYNYLYRLFRKSNLKPFERDISTEIYQAGSTPCNGVEGFNCYFPLQSYGFQPTNGVGYQPYRVVVLSFELLHAPATVCGPKKSTNLVKNKCVNFNFNGLTGTGVLTESNKKFLPFQQFGRDIADTTDAVRDPQTLEILDITPCSFGGVSVITPGTNTSNQVAVLYQGVNCTEVPVAIHADQLTPTWRVYSTGSNVFQTRAGCLIGAEHVNNSYECDIPIGAGICASYQTQTNSPRRARSVASQSIIAYTMSLGAENSVAYSNNSIAIPTNFTISVTTEILPVSMTKTSVDCTMYICGDSTECSNLLLQYGSFCTQLNRALTGIAVEQDKNTQEVFAQVKQIYKTPPIKDFGGFNFSQILPDPSKPSKRSFIEDLLFNKVTLADAGFIKQYGDCLGDIAARDLICAQKFNGLTVLPPLLTDEMIAQYTSALLAGTITSGWTFGAGAALQIPFAMQMAYRFNGIGVTQCVLYENQKLIANQFNSAIGKIQDSLSSTASALGKLQDVVNQNAQALNTLVKQLSSNFGAISSVLNDILSRLDKVEAEVQIDRLITGRLQSLQTYVTQQLIRAAEIRASANLAATKMSECVLGQSKRVDFCGKGYHLMSFPQSAPHGVVFLHVTYVPAQEKNFTTAPAICHDGKAHFPREGVFVSNGTHWFVTQRNFYEPQIITTDNTFVCGNCDVVIGIVNNTVYDPLQPELDS

SEQ ID NO: 13453 - protein, 1147 aa, Artificial Sequence
  SARS-CoV-2/Wuhan/HBCDC-HB-02/2020__EPI_ISL_412978 spike protein (1-1147)(N914C_S1123C)
MFVFLVLLPLVSSQCVNLTTRTQLPPAYTNSFTRGVYYPDKVFRSSVLHSTQDLFLPFFSNVTWFHAIHVSGTNGTKRFDNPVLPFNDGVYFASTEKSNIIRGWIFGTTLDSKTQSLLIVNNATNVVIKVCEFQFCNDPFLGVYYHKNNKSWMESEFRVYSSANNCTFEYVSQPFLMDLEGKQGNFKNLREFVFKNIDGYFKIYSKHTPINLVRDLPQGFSALEPLVDLPIGINITRFQTLLALHRSYLTPGDSSSGWTAGAAAYYVGYLQPRTFLLKYNENGTITDAVDCALDPLSETKCTLKSFTVEKGIYQTSNFRVQPTESIVRFPNITNLCPFGEVFNATRFASVYAWNRKRISNCVADYSVLYNSASFSTFKCYGVSPTKLNDLCFTNVYADSFVIRGDEVRQIAPGQTGKIADYNYKLPDDFTGCVIAWNSNNLDSKVGGNYNYLYRLFRKSNLKPFERDISTEIYQAGSTPCNGVEGFNCYFPLQSYGFQPTNGVGYQPYRVVVLSFELLHAPATVCGPKKSTNLVKNKCVNFNFNGLTGTGVLTESNKKFLPFQQFGRDIADTTDAVRDPQTLEILDITPCSFGGVSVITPGTNTSNQVAVLYQDVNCTEVPVAIHADQLTPTWRVYSTGSNVFQTRAGCLIGAEHVNNSYECDIPIGAGICASYQTQTNSPRRARSVASQSIIAYTMSLGAENSVAYSNNSIAIPTNFTISVTTEILPVSMTKTSVDCTMYICGDSTECSNFLLQYGSFCTQLNRALTGIAVEQDKNTQEVFAQVKQIYKTPPIKDFGGFNFSQILPDPSKPSKRSFIEDLLFNKVTLADAGFIKQYGDCLGDIAARDLICAQKFNGLTVLPPLLTDEMIAQYTSALLAGTITSGWTFGAGAALQIPFAMQMAYRFNGIGVTQCVLYENQKLIANQFNSAIGKIQDSLSSTASALGKLQDVVNQNAQALNTLVKQLSSNFGAISSVLNDILSRLDKVEAEVQIDRLITGRLQSLQTYVTQQLIRAAEIRASANLAATKMSECVLGQSKRVDFCGKGYHLMSFPQSAPHGVVFLHVTYVPAQEKNFTTAPAICHDGKAHFPREGVFVSNGTHWFVTQRNFYEPQIITTDNTFVCGNCDVVIGIVNNTVYDPLQPELDS

SEQ ID NO: 13454 - protein, 1147 aa, Artificial Sequence
  SARS-CoV-2/Australia/QLD02/2020__EPI_ISL_407896 spike protein (1-1147)(N914C_S1123C)
MFVFLVLLPLVSSQCVNLTTRTQLPPAYTNSFTRGVYYPDKVFRSSVLHSTQDLFLPFFSNVTWFHAIHVSGTNGTKRFDNPVLPFNDGVYFASTEKSNIIRGWIFGTTLDSKTQSLLIVNNATNVVIKVCEFQFCNDPFLGVYYHKNNKSWMESEFRVYSSANNCTFEYVSQPFLMDLEGKQGNFKNLREFVFKNIDGYFKIYSKHTPINLVRDLPQGFSALEPLVDLPIGINITRFQTLLALHRSYLTPGDSSSGWTAGAAAYYVGYLQPRTFLLKYNENGTITDAVDCALDPLSETKCTLKSFTVEKGIYQTSNFRVQPTESIVRFPNITNLCPFGEVFNATRFASVYAWNRKRISNCVADYSVLYNSASFSTFKCYGVSPTKLNDLCFTNVYADSFVIRGDEVRQIAPGQTGKIADYNYKLPDDFTGCVIAWNSNNLDSKVGGNYNYLYRLFRKSNLKPFERDISTEIYQAGSTPCNGVEGFNCYFPLQSYGFQPTNGVGYQPYRVVVLSFELLHAPATVCGPKKSTNLVKNKCVNFNFNGLTGTGVLTESNKKFLPFQQFGRDIADTTDAVRDPQTLEILDITPCSFGGVSVITPGTNTSNQVAVLYQDVNCTEVPVAIHADQLTPTWRVYSTGSNVFQTRAGCLIGAEHVNNSYECDIPIGAGICASYQTQTNSPRRARSVASQSIIAYTMSLGAENSVAYSNNSIAIPTNFTISVTTEILPVSMTKTSVDCTMYICGDSTECSNLLLQYGSFCTQLNRALTGIAVEQDKNTQEVFAQVKQIYKTPPIKDFGGFNFSQILPDPSKPSKRSFIEDLLFNKVTLADAGFIKQYGDCLGDIAARDLICAQKFNGLTVLPPLLTDEMIAQYTSALLAGTITSGWTFGAGAALQIPFAMQMAYRFNGIGVTQCVLYENQKLIANQFNSAIGKIQDSLSSTASALGKLQDVVNQNAQALNTLVKQLSSNFGAISSVLNDILSRLDKVEAEVQIDRLITGRLQSLQTYVTQQLIRAAEIRASANLAATKMSECVLGQSKRVDFCGKGYHLMSFPQSAPHGVVFLHVTYVPAQEKNFTTAPAICHDGKAHFPREGVFVSNGTHWFVTQRNFYEPQIITTDNTFVCGNCDVVIGIVNNTVYDPLQLELDS

SEQ ID NO: 13455 - protein, 1147 aa, Artificial Sequence
  SARS-CoV-2/India/1-31/2020__EPI_ISL_413523 spike protein (1-1147)(N914C_S1123C)
MFVFLVLLPLVSSQCVNLTTRTQLPPAYTNSFTRGVYYPDKVFRSSVLHSTQDLFLPFFSNVTWFHAIHVSGTNGTKRFDNPVLPFNDGVYFASTEKSNIIRGWIFGTTLDSKTQSLLIVNNATNVVIKVCEFQFCNDPFLGVYYHKNNKSWMESEFRVYSSANNCTFEYVSQPFLMDLEGKQGNFKNLREFVFKNIDGYFKIYSKHTPINLVRDLPQGFSALEPLVDLPIGINITRFQTLLALHRSYLTPGDSSSGWTAGAAAYYVGYLQPRTFLLKYNENGTITDAVDCALDPLSETKCTLKSFTVEKGIYQTSNFRVQPTESIVRFPNITNLCPFGEVFNATRFASVYAWNRKRISNCVADYSVLYNSASFSTFKCYGVSPTKLNDLCFTNVYADSFVIRGDEVRQIAPGQTGKIADYNYKLPDDFTGCVIAWNSNNLDSKVGGNYNYLYRLFRKSNLKPFERDISTEIYQAGSTPCNGVEGFNCYFPLQSYGFQPTNGVGYQPYRVVVLSFELLHAPATVCGPKKSTNLVKNKCVNFNFNGLTGTGVLTESNKKFLPFQQFGRDIADTTDAVRDPQTLEILDITPCSFGGVSVITPGTNTSNQVAVLYQDVNCTEVPVAIHADQLTPTWRVYSTGSNVFQTRAGCLIGAEHVNNSYECDIPIGAGICASYQTQTNSPRRARSVASQSIIAYTMSLGAENSVAYSNNSIAIPTNFTISVTTEILPVSMTKTSVDCTMYICGDSTECSNLLLQYGSFCTQLNRALTGIAVEQDKNTQEVFAQVKQIYKTPPIKDFGGFNFSQILPDPSKPSKRSFIEDLLFNKVTLADAGFIKQYGDCLGDIAARDLICAQKFNGLTVLPPLLTDEMIAQYTSALLAGTITSGWTFGAGAALQIPFAMQMAYRFNGIGVTQCVLYENQKLIANQFNSVIGKIQDSLSSTASALGKLQDVVNQNAQALNTLVKQLSSNFGAISSVLNDILSRLDKVEAEVQIDRLITGRLQSLQTYVTQQLIRAAEIRASANLAATKMSECVLGQSKRVDFCGKGYHLMSFPQSAPHGVVFLHVTYVPAQEKNFTTAPAICHDGKAHFPREGVFVSNGTHWFVTQRNFYEPQIITTDNTFVCGNCDVVIGIVNNTVYDPLQPELDS

SEQ ID NO: 13456 - protein, 1147 aa, Artificial Sequence
  SARS-CoV-2/Guangdong/GD2020087-P0008/2020__EPI_ISL_413863 spike protein (1-1147)(N914C_S1123C)
MFVFLVLLPLVSSQCVNLTTRTQLPPAYTNSFTRGVYYPDKVFRSSVLHSTQDLFLPFFSNVTWFHAIHVSGTNGTKRFDNPVLPFNDGVYFASTEKSNIIRGWIFGTTLDSKTQSLLIVNNATNVVIKVCEFQFCNDPFLGVYYHKNNKSWMESEFRVYSSANNCTFEYVSQPFLMDLEGKQGNFKNLREFVFKNIDGYFKIYSKHTPINLVRDLPQGFSALEPLVDLPIGINITRFQTLLALHRSYLTPGDSSSGWTAGAAAYYVGYLQPRTFLLKYNENGTITDAVDCALDPLSETKCTLKSFTVEKGIYQTSNFRVQPTESIVRFPNITNLCPFGEVFNATRFASVYAWNRKRISNCVADYSVLYNSASFSTFKCYGVSPTKLNDLCFTNVYADSFVIRGDEVREIAPGQTGKIADYNYKLPDDFTGCVIAWNSNNLDSKVGGNYNYLYRLFRKSNLKPFERDISTEIYQAGSTPCNGVEGFNCYFPLQSYGFQPTNGVGYQPYRVVVLSFELLHAPATVCGPKKSTNLVKNKCVNFNFNGLTGTGVLTESNKKFLPFQQFGRDIADTTDAVRDPQTLEILDITPCSFGGVSVITPGTNTSNQVAVLYQDVNCTEVPVAIHADQLTPTWRVYSTGSNVFQTRAGCLIGAEHVNNSYECDIPIGAGICASYQTQTNSPRRARSVASQSIIAYTMSLGAENSVAYSNNSIAIPTNFTISVTTEILPVSMTKTSVDCTMYICGDSTECSNLLLQYGSFCTQLNRALTGIAVEQDKNTQEVFAQVKQIYKTPPIKDFGGFNFSQILPDPSKPSKRSFIEDLLFNKVTLADAGFIKQYGDCLGDIAARDLICAQKFNGLTVLPPLLTDEMIAQYTSALLAGTITSGWTFGAGAALQIPFAMQMAYRFNGIGVTQCVLYENQKLIANQFNSAIGKIQDSLSSTASALGKLQDVVNQNAQALNTLVKQLSSNFGAISSVLNDILSRLDKVEAEVQIDRLITGRLQSLQTYVTQQLIRAAEIRASANLAATKMSECVLGQSKRVDFCGKGYHLMSFPQSAPHGVVFLHVTYVPAQEKNFTTAPAICHDGKAHFPREGVFVSNGTHWFVTQRNFYEPQIITTDNTFVCGNCDVVIGIVNNTVYDPLQPELDS

SEQ ID NO: 13457 - protein, 1147 aa, Artificial Sequence
  SARS-CoV-2/Sweden/01/2020__EPI_ISL_411951 spike protein (1-1147)(N914C_S1123C)
MFVFLVLLPLVSSQCVNLTTRTQLPPAYTNSFTRGVYYPDKVFRSSVLHSTQDLFLPFFSNVTWFHAIHVSGTNGTKRFDNPVLPFNDGVYFASTEKSNIIRGWIFGTTLDSKTQSLLIVNNATNVVIKVCEFQFCNDPFLGVYYHKNNKSWMESEFRVYSSANNCTFEYVSQPFLMDLEGKQGNFKNLREFVFKNIDGYFKIYSKHTPINLVRDLPQGFSALEPLVDLPIGINITRFQTLLALHRSYLTPGDSSSGWTAGAAAYYVGYLQPRTFLLKYNENGTITDAVDCALDPLSETKCTLKSFTVEKGIYQTSNFRVQPTESIVRFPNITNLCPFGEVFNATRFASVYAWNRKRISNCVADYSVLYNSASFSTFKCYGVSPTKLNDLCFTNVYADSFVIRGDEVRQIAPGQTGKIADYNYKLPDDFTGCVIAWNSNNLDSKVGGNYNYLYRLFRKSNLKPFERDISTEIYQAGSTPCNGVEGFNCYFPLQSYGFQPTNGVGYQPYRVVVLSFELLHAPATVCGPKKSTNLVKNKCVNFNFNGLTGTGVLTESNKKFLPFQQFGRDIADTTDAVRDPQTLEILDITPCSFGGVSVITPGTNTSNQVAVLYQDVNCTEVPVAIHADQLTPTWRVYSTGSNVFQTRAGCLIGAEHVNNSYECDIPIGAGICASYQTQTNSPRRARSVASQSIIAYTMSLGAENSVAYSNNSIAIPTNFTISVTTEILPVSMTKTSVDCTMYICGDSTECSNLLLQYGSFCTQLNRALTGIAVEQDKNTQEVFAQVKQIYKTPPIKDCGGFNFSQILPDPSKPSKRSFIEDLLFNKVTLADAGFIKQYGDCLGDIAARDLICAQKFNGLTVLPPLLTDEMIAQYTSALLAGTITSGWTFGAGAALQIPFAMQMAYRFNGIGVTQCVLYENQKLIANQFNSAIGKIQDSLSSTASALGKLQDVVNQNAQALNTLVKQLSSNFGAISSVLNDILSRLDKVEAEVQIDRLITGRLQSLQTYVTQQLIRAAEIRASANLAATKMSECVLGQSKRVDFCGKGYHLMSFPQSAPHGVVFLHVTYVPAQEKNFTTAPAICHDGKAHFPREGVFVSNGTHWFVTQRNFYEPQIITTDNTFVCGNCDVVIGIVNNTVYDPLQPELDS

SEQ ID NO: 13458 - protein, 1147 aa, Artificial Sequence
  SARS-CoV-2/Tianmen/HBCDC-HB-07/2020__EPI_ISL_412983 spike protein (1-1147)(N914C_S1123C)
MFVFLVLLPLVSSQCVNLTTRTQLPPAYTNSFTRGVYYPDKVFRSSVLHSTQDLFLPFFSNVTWFHAIHVSGTNGTKRFDNPVLPFNDGVYFASTEKSNIIRGWIFGTTLDSKTQSLLIVNNATNVVIKVCEFQFCNDPFLGVYYHKNNKSWMESEFRVYSSANNCTFEYVSQPFLMDLEGKQGNFKNLREFVFKNIDGYFKIYSKHTPINLVRDLPQGFSALEPLVDLPIGINITRFQTLLALHRSYLTPGDSSSGWTAGAAAYYVGYLQPRTFLLKYNENGTITDAVDCALDPLSETKCTLKSFTVEKGIYQTSNFRVQPTESIVRFPNITNLCPFGEVFNATRFASVYAWNRKRISNCVADYSVLYNSASFSTFKCYGVSPTKLNDLCFTNVYADSFVIRGDEVRQIAPGQTGKIADYNYKLPDDFTGCVIAWNSNNLDSKVGGNYNYLYRLFRKSNLKPFERDISTEIYQAGSTPCNGVEGFNCYFPLQSYGFQPTNGVGYQPYRVVVLSFELLHAPATVCGPKKSTNLVKNKCVNFNFNGLTGTGVLTESNKKFLPFQQFGRDIADTTDAVRDPQTLEILDITPCSFGGVSVITPGTNTSNQVAVLYQDLNCTEVPVAIHADQLTPTWRVYSTGSNVFQTRAGCLIGAEHVNNSYECDIPIGAGICASYQTQTNSPRRARSVASQSIIAYTMSLGAENSVAYSNNSIAIPTNFTISVTTEILPVSMTKTSVDCTMYICGDSTECSNLLLQYGSFCTQLNRALTGIAVEQDKNTQEVFAQVKQIYKTPPIKDFGGFNFSQILPDPSKPSKRSFIEDLLFNKVTLADAGFIKQYGDCLGDIAARDLICAQKFNGLTVLPPLLTDEMIAQYTSALLAGTITSGWTFGAGAALQIPFAMQMAYRFNGIGVTQCVLYENQKLIANQFNSAIGKIQDSLSSTASALGKLQDVVNQNAQALNTLVKQLSSNFGAISSVLNDILSRLDKVEAEVQIDRLITGRLQSLQTYVTQQLIRAAEIRASANLAATKMSECVLGQSKRVDFCGKGYHLMSFPQSAPHGVVFLHVTYVPAQEKNFTTAPAICHDGKAHFPREGVFVSNGTHWFVTQRNFYEPQIITTDNTFVCGNCDVVIGIVNNTVYDPLQPELDS

SEQ ID NO: 13459 - protein, 1147 aa, Artificial Sequence
  SARS-CoV-2/Hong Kong/case42_VM20002493/2020__EPI_ISL_414527 spike protein (1-1147)(N914C_S1123C)
MFVFLVLLPLVSSQCVNLTTRTQLPPAYTNSFTRGVYYPDKVFRSSVLHSTQDLFLPFFSNVTWFHAIHVSGTNGTKRFDNPVLPFNDGVYFASTEKSNIIRGWIFGTTLDSKTQSLLIVNNATNVVIKVCEFQFCNDPFLGVYYHKNNKSWMESEFRVYSSANNCTFEYVSQPFLMDLEGKQGNFKNLREFVFKNIDGYFKIYSKHTPINLVRDLPQGFSALEPLVDLPIGINITRFQTLLALHRSYLTPGDSSSGWTAGAAAYYVGYLQPRTFLLKYNENGTITDAVDCALDPLSETKCTLKSFTVEKGIYQTSNFRVQPTESIVRFPNITNLCPFGEVFNATRFASVYAWNRKRISNCVADYSVLYNSASFSTFKCYGVSPTKLNDLCFTNVYADSFVIRGDEVRQIAPGQTGKIADYNYKLPDDFTGCVIAWNSNNLDSKVGGNYNYLYRLFRKSNLKPFERDISTEIYQAGSTPCNGVEGFNCYFPLQSYGFQPTNGVGYQPYRVVVLSFELLHAPATVCGPKKSTNLVKNKCVNFNFNGLTGTGVLTESNKKFLPFQQFGRDIADTTDAVRDPQTLEILDITPCSFGGVSVITPGTNTSNQVAVLYQDVNCTEVPVAIHADQLTPTWRVYSTGSNVFQTRAGCLIGAEHVNNSYECDIPIGAGICASYQTQTNSPRRARSVASQSIIAYTMSLGAENSVAYSNNSIAIPTNFAISVTTEILPVSMTKTSVDCTMYICGDSTECSNLLLQYGSFCTQLNRALTGIAVEQDKNTQEVFAQVKQIYKTPPIKDFGGFNFSQILPDPSKPSKRSFIEDLLFNKVTLADAGFIKQYGDCLGDIAARDLICAQKFNGLTVLPPLLTDEMIAQYTSALLAGTITSGWTFGAGAALQIPFAMQMAYRFNGIGVTQCVLYENQKLIANQFNSAIGKIQDSLSSTASALGKLQDVVNQNAQALNTLVKQLSSNFGAISSVLNDILSRLDKVEAEVQIDRLITGRLQSLQTYVTQQLIRAAEIRASANLAATKMSECVLGQSKRVDFCGKGYHLMSFPQSAPHGVVFLHVTYVPAQEKNFTTAPAICHDGKAHFPREGVFVSNGTHWFVTQRNFYEPQIITTDNTFVCGNCDVVIGIVNNTVYDPLQPELDS

SEQ ID NO: 13460 - protein, 1147 aa, Artificial Sequence
  SARS-CoV-2/USA/CruiseA-23/2020__EPI_ISL_414482 spike protein (1-1147)(N914C_S1123C)
MFVFLVLLPLVSSQCVNLTTRTQLPPAYTNSFTRGVYYPDKVFRSSVLHSTQDLFLPFFSNVTWFHAIHVSGTNGTKRFDNPVLPFNDGVYFASTEKSNIIRGWIFGTTLDSKTQSLLIVNNATNVVIKVCEFQFCNDPFLGVYYHKNNKSWMESEFRVYSSANNCTFEYVSQPFLMDLEVKQGNFKNLREFVFKNIDGYFKIYSKHTPINLVRDLPQGFSALEPLVDLPIGINITRFQTLLALHRSYLTPGDSSSGWTAGAAAYYVGYLQPRTFLLKYNENGTITDAVDCALDPLSETKCTLKSFTVEKGIYQTSNFRVQPTESIVRFPNITNLCPFGEVFNATRFASVYAWNRKRISNCVADYSVLYNSASFSTFKCYGVSPTKLNDLCFTNVYADSFVIRGDEVRQIAPGQTGKIADYNYKLPDDFTGCVIAWNSNNLDSKVGGNYNYLYRLFRKSNLKPFERDISTEIYQAGSTPCNGVEGFNCYFPLQSYGFQPTNGVGYQPYRVVVLSFELLHAPATVCGPKKSTNLVKNKCVNFNFNGLTGTGVLTESNKKFLPFQQFGRDIADTTDAVRDPQTLEILDITPCSFGGVSVITPGTNTSNQVAVLYQDVNCTEVPVAIHADQLTPTWRVYSTGSNVFQTRAGCLIGAEHVNNSYECDIPIGAGICASYQTQTNSPRRARSVASQSIIAYTMSLGAENSVAYSNNSIAIPTNFTISVTTEILPVSMTKTSVDCTMYICGDSTECSNLLLQYGSFCTQLNRALTGIAVEQDKNTQEVFAQVKQIYKTPPIKDFGGFNFSQILPDPSKPSKRSFIEDLLFNKVTLADAGFIKQYGDCLGDIAARDLICAQKFNGLTVLPPLLTDEMIAQYTSALLAGTITSGWTFGAGAALQIPFAMQMAYRFNGIGVTQCVLYENQKLIANQFNSAIGKIQDSLSSTASALGKLQDVVNQNAQALNTLVKQLSSNFGAISSVLNDILSRLDKVEAEVQIDRLITGRLQSLQTYVTQQLIRAAEIRASANLAATKMSECVLGQSKRVDFCGKGYHLMSFPQSAPHGVVFLHVTYVPAQEKNFTTAPAICHDGKAHFPREGVFVSNGTHWFVTQRNFYEPQIITTDNTFVCGNCDVVIGIVNNTVYDPLQPELDS

SEQ ID NO: 13461 - protein, 1147 aa, Artificial Sequence
  SARS-CoV-2/Hong Kong/case85_VM20002868/2020__EPI_ISL_414519 spike protein (1-1147)(N914C_S1123C)
MFVFLVLVPLVSSQCVNLTTRTQLPPAYTNSFTRGVYYPDKVFRSSVLHSTQDLFLPFFSNVTWFHAIHVSGTNGTKRFDNPVLPFNDGVYFASTEKSNIIRGWIFGTTLDSKTQSLLIVNNATNVVIKVCEFQFCNDPFLGVYYHKNNKSWMESEFRVYSSANNCTFEYVSQPFLMDLEGKQGNFKNLREFVFKNIDGYFKIYSKHTPINLVRDLPQGFSALEPLVDLPIGINITRFQTLLALHRSYLTPGDSSSGWTAGAAAYYVGYLQPRTFLLKYNENGTITDAVDCALDPLSETKCTLKSFTVEKGIYQTSNFRVQPTESIVRFPNITNLCPFGEVFNATRFASVYAWNRKRISNCVADYSVLYNSASFSTFKCYGVSPTKLNDLCFTNVYADSFVIRGDEVRQIAPGQTGKIADYNYKLPDDFTGCVIAWNSNNLDSKVGGNYNYLYRLFRKSNLKPFERDISTEIYQAGSTPCNGVEGFNCYFPLQSYGFQPTNGVGYQPYRVVVLSFELLHAPATVCGPKKSTNLVKNKCVNFNFNGLTGTGVLTESNKKFLPFQQFGRDIADTTDAVRDPQTLEILDITPCSFGGVSVITPGTNTSNQVAVLYQDVNCTEVPVAIHADQLTPTWRVYSTGSNVFQTRAGCLIGAEHVNNSYECDIPIGAGICASYQTQTNSPRRARSVASQSIIAYTMSLGAENSVAYSNNSIAIPTNFTISVTTEILPVSMTKTSVDCTMYICGDSTECSNLLLQYGSFCTQLNRALTGIAVEQDKNTQEVFAQVKQIYKTPPIKDFGGFNFSQILPDPSKPSKRSFIEDLLFNKVTLADAGFIKQYGDCLGDIAARDLICAQKFNGLTVLPPLLTDEMIAQYTSALLAGTITSGWTFGAGAALQIPFAMQMAYRFNGIGVTQCVLYENQKLIANQFNSAIGKIQDSLSSTASALGKLQDVVNQNAQALNTLVKQLSSNFGAISSVLNDILSRLDKVEAEVQIDRLITGRLQSLQTYVTQQLIRAAEIRASANLAATKMSECVLGQSKRVDFCGKGYHLMSFPQSAPHGVVFLHVTYVPAQEKNFTTAPAICHDGKAHFPREGVFVSNGTHWFVTQRNFYEPQIITTDNTFVCGNCDVVIGIVNNTVYDPLQPELDS

SEQ ID NO: 13462 - protein, 1147 aa, Artificial Sequence; identical to SEQ ID NO: 13452
  SARS-CoV-2/England/200990660/2020__EPI_ISL_414523 spike protein (1-1147)(N914C_S1123C)

SEQ ID NO: 13463 - protein, 1147 aa, Artificial Sequence
  SARS-CoV-2/Australia/NSW09/2020__EPI_ISL_413595 spike protein (1-1147)(N914C_S1123C)
MFVFLVLLPLVSSQCVNLTTRTQLPPAYTNSFTRGVYYPDKVFRSSVLHSTQDLFLPFFSNVTWFHAIHVSGTNGTKRFDNPVLPFNDGVYFASTEKSNIIRGWIFGTTLDSKTQSLLIVNNATNVVIKVCEFQFCNDPFLGVYYHKNNKSWMESEFRVYSSANNCTFEYVSQPFLMDLEGKQGNFKNLREFVFKNIDGYFKIYSKHTPINLVRDLPQGFSALEPLVDLPIGINITRFQTLLALHRSYLTPGDSSSGWTAGAAAYYVGYLQPRTFLLKYNENGTITDAVDCALDPLSETKCTLKSFTVEKGIYQTSNFRVQPTESIVRFPNITNLCPFGEVFNATRFASVYAWNRKRISNCVADYSVLYNSASFSTFKCYGVSPTKLNDLCFTNVYADSFVIRGDEVRQIAPGQTGKIADYNYKLPDDFTGCVIAWNSNNLDSKVGGNYNYLYRLFRKSNLKPFERDISTEIYQAGSTPCNGVEGFNCYFPLQSYGFQPTNGVGYQPYRVVVLSFELLHAPATVCGPKKSTNLVKNKCVNFNFNGLTGTGVLTESNKKFLPFQQFGRDIADTTDAVRDPQTLEILDITPCSFGGVSVITPGTNTSNQVAVLYQDVNCTEVPVAIHADQLTPTWRVYSTGSNVFQTRAGCLIGAEHVNNSYECDIPIGAGICASYQTQTNSPRRARSVASQSIIAYTMSLGAENSVAYSNNSIAIPTNFTISVTTEILPVSMTKTSVDCTMYICGDSTECSNLLLQYGSFCTQLNRALTGIAVEQDKNTQEVFAQVKQIYKTPPIKDFGGFNFSQILPDPSKPSKRSFIEDLLFNKVTLADAGFIKQYGDCLGDIAARDLICAQKFNGLTVLPPLLTDEMIAQYTSALLAGTITSGWTFGAGAALQIPFAMQMAYRFNGIGVTQCVLYENQKLIANQFNSAIGKIQDSLSFTASALGKLQDVVNQNAQALNTLVKQLSSNFGAISSVLNDILSRLDKVEAEVQIDRLITGRLQSLQTYVTQQLIRAAEIRASANLAATKMSECVLGQSKRVDFCGKGYHLMSFPQSAPHGVVFLHVTYVPAQEKNFTTAPAICHDGKAHFPREGVFVSNGTHWFVTQRNFYEPQIITTDNTFVCGNCDVVIGIVNNTVYDPLQPELDS

SEQ ID NO: 13464 - protein, 1147 aa, Artificial Sequence; identical to SEQ ID NO: 13444
  SARS-CoV-2/Australia/NSW10/2020__EPI_ISL_413596 spike protein (1-1147)(N914C_S1123C)

SEQ ID NO: 13465 - protein, 1147 aa, Artificial Sequence
  SARS-CoV-2/Switzerland/1000477797/2020__EPI_ISL_413023 spike protein (1-1147)(N914C_S1123C)
MFVFLVLLPLVSSQCVNLTTRTQLPPAYTNSFTRGVYYPDKVFRSSVLHSTQDLFLPFFSNVTWFHAIHVSGTNGTKRFDNPVLPFNDGVYFASTEKSNIIRGWIFGTTLDSKTQSLLIVNNATNVVIKVCEFQFCNDPFLGVYYHKNNKSWMESEFRVYSSANNCTFEYVSQPFLMDLEGKQGNFKNLREFVFKNIDGYFNIYSKHTPINLVRDLPQGFSALEPLVDLPIGINITRFQTLLALHRSYLTPGDSSSGWTAGAAAYYVGYLQPRTFLLKYNENGTITDAVDCALDPLSETKCTLKSFTVEKGIYQTSNFRVQPTESIVRFPNITNLCPFGEVFNATRFASVYAWNRKRISNCVADYSVLYNSASFSTFKCYGVSPTKLNDLCFTNVYADSFVIRGDEVRQIAPGQTGKIADYNYKLPDDFTGCVIAWNSNNLDSKVGGNYNYLYRLFRKSNLKPFERDISTEIYQAGSTPCNGVEGFNCYFPLQSYGFQPTNGVGYQPYRVVVLSFELLHAPATVCGPKKSTNLVKNKCVNFNFNGLTGTGVLTESNKKFLPFQQFGRDIADTTDAVRDPQTLEILDITPCSFGGVSVITPGTNTSNQVAVLYQGVNCTEVPVAIHADQLTPTWRVYSTGSNVFQTRAGCLIGAEHVNNSYECDIPIGAGICASYQTQTNSPRRARSVASQSIIAYTMSLGAENSVAYSNNSIAIPTNFTISVTTEILPVSMTKTSVDCTMYICGDSTECSNLLLQYGSFCTQLNRALTGIAVEQDKNTQEVFAQVKQIYKTPPIKDFGGFNFSQILPDPSKPSKRSFIEDLLFNKVTLADAGFIKQYGDCLGDIAARDLICAQKFNGLTVLPPLLTDEMIAQYTSALLAGTITSGWTFGAGAALQIPFAMQMAYRFNGIGVTQCVLYENQKLIANQFNSAIGKIQDSLSSTASALGKLQDVVNQNAQALNTLVKQLSSNFGAISSVLNDILSRLDKVEAEVQIDRLITGRLQSLQTYVTQQLIRAAEIRASANLAATKMSECVLGQSKRVDFCGKGYHLMSFPQSAPHGVVFLHVTYVPAQEKNFTTAPAICHDGKAHFPREGVFVSNGTHWFVTQRNFYEPQIITTDNTFVCGNCDVVIGIVNNTVYDPLQPELDS

SEQ ID NO: 13466 - protein, 1147 aa, Artificial Sequence
  SARS-CoV-2/Belgium/BA-02291/2020__EPI_ISL_415159 spike protein (1-1147)(N914C_S1123C)
MFVFLVLLPLVSSQCVNLTTRTQLPPAYTNSFTRGVYYPDKVFRSSVLHSTQDLFLPFFSNVTWFHAIHVSGTNGTKRFDNPVLPFNDGVYFASTEKSNIIRGWIFGTTLDSKTQSLLIVNNATNVVIKVCEFQFCNDPFLGVYYHKNNKSWMESEFRVYSSANNCTFEYVSQPFLMDLEGKQGNFKNLREFVFKNIDGYFKIYSKHTPINLVRDLPQGFSALEPLVDLPIGINITRFQTLLALHRSYLTPGDSSSGWTAGAAAYYVGYLQPRTFLLKYNENGTITDAVDCALDPLSETKCTLKSFTVEKGIYQTSNFRVQPTESIVRFPNITNLCPFGEVFNATRFASVYAWNRKRISNCVADYSVLYNSASFSTFKCYGVSPTKLNDLCFTNVYADSFVIRGDEVRQIAPGQTGKIADYNYKLPDDFTGCVIAWNSNNLDSKVGGNYNYLYRLFRRSNLKPFERDISTEIYQAGSTPCNGVEGFNCYFPLQSYGFQPTNGVGYQPYRVVVLSFELLPAPATVCGPKKSTNLVKNKCVNFNFNGLTGTGVLTESNKKFLPFQQFGRDIADTTDAVRDPQTLEILDITPCSFGGVSVITPGTNTSNQVAVLYQGVNCTEVPVAIHADQLTPTWRVYSTGSNVFQTRAGCLIGAEHVNNSYECDIPIGAGICASYQTQTNSPRRARSVASQSIIAYTMSLGAENSVAYSNNSIAIPTNFTISVTTEILPVSMTKTSVDCTMYICGDSTECSNLLLQYGSFCTQLNRALTGIAVEQDKNTQEVFAQVKQIYKTPPIKDFGGFNFSQILPDPSKPSKRSFIEDLLFNKVTLADAGFIKQYGDCLGDIAARDLICAQKFNGLTVLPPLLTDEMIAQYTSALLAGTITSGWTFGAGAALQIPFAMQMAYRFNGIGVTQCVLYENQKLIANQFNSAIGKIQDSLSSAAPALGKLQDVVNQNAQALNTLVKQLSSNFGAISSVLNDILSRLDKVEAEVQIDRLITGRLQSLQTYVTQQLIRAAEIRASANLAATKMSECVLGQSKRVDFCGKGYHLMSFPQSAPHGVVFLHVTYVPAQEKNFTTAPAICHDGKAHFPREGVFVSNGTHWFVTQRNFYEPQIITTDNTFVCGNCDVVIGIVNNTVYDPLQPELDS

SEQ ID NO: 13467 - protein, 1147 aa, Artificial Sequence
  SARS-CoV-2/USA/WA8-UW5/2020__EPI_ISL_413486 spike protein (1-1147)(N914C_S1123C)
MFVFLVLLPLVSSQCVNLTTRTQLPPAYTNSFTRGVYYPDKVFRSSVLHSTQDLFLPFFSNVTWFHAIHVSGTNGTKRFDNPVLPFNDGVYFASTEKSNIIRGWIFGTTLDSKTQSLLIVNNATNVVIKVCEFQFCNDPFLGVYYHKNNKSWMESEFRVYSSANNCTFEYVSQPFLMDLEGKQGNFKNLREFVFKNIDGYFKIYSKHTPINLVRDLPQGFSALEPLVDLPIGINITRFQTLLALHRSYLTPGDSSSGWTAGAAAYYVGYLQPRTFLLKYNENGTITDAVDCALDPLSETKCTLKSFTVEKGIYQTSNFRVQPTESIVRFPNITNLCPFGEVFNATRFASVYAWNRKRISNCVADYSVLYNSASFSTFKCYGVSPTKLNDLCFTNVYADSFVIRGDEVRQIAPGQTGKIADYNYKLPDDFTGCVIAWNSNNLDSKVGGNYNYLYRLFRKSNLKPFERDISTEIYQAGSTPCNGVEGFNCYFPLQSYGFQPTNGVGYQPYRVVVLSFELLHAPATVCGPKKSTNLVKNKCVNFNFNGLTGTGVLTESNKKFLPFQQFGRDIADTTDAVRDPQTLEILDITPCSFGGVSVITPGTNTSNQVAVLYQDVNCTEVPVAIHADQLTPTWRVYSTGSNVFQTRAGCLIGAEYVNNSYECDIPIGAGICASYQTQTNSPRRARSVASQSIIAYTMSLGAENSVAYSNNSIAIPTNFTISVTTEILPVSMTKTSVDCTMYICGDSTECSNLLLQYGSFCTQLNRALTGIAVEQDKNTQEVFAQVKQIYKTPPIKDFGGFNFSQILPDPSKPSKRSFIEDLLFNKVTLADAGFIKQYGDCLGDIAARDLICAQKFNGLTVLPPLLTDEMIAQYTSALLAGTITSGWTFGAGAALQIPFAMQMAYRFNGIGVTQCVLYENQKLIANQFNSAIGKIQDSLSSTASALGKLQDVVNQNAQALNTLVKQLSSNFGAISSVLNDILSRLDKVEAEVQIDRLITGRLQSLQTYVTQQLIRAAEIRASANLAATKMSECVLGQSKRVDFCGKGYHLMSFPQSAPHGVVFLHVTYVPAQEKNFTTAPAICHDGKAHFPREGVFVSNGTHWFVTQRNFYEPQIITTDNTFVCGNCDVVIGIVNNTVYDPLQPELDS

SEQ ID NO: 13468 - protein, 1147 aa, Artificial Sequence
  SARS-CoV-2/England/20102000506/2020__EPI_ISL_415147 spike protein (1-1147)(N914C_S1123C)
MFVFLVLLPLVSSQCVNLTTRTQLPPAYTNSFTRGVYYPDKVFRSSVLHSTQDLFLPFFSNVTWFHAIHVSGTNGTKRFDNPVLPFNDGVYFASTEKSNIIRGWIFGTTLDSKTQSLLIVNNATNVVIKVCEFQFCNDPFLGVYYHKNNKSWMESEFRVYSSANNCTFEYVSQPFLMDLEGKQGNFKNLREFVFKNIDGYFKIYSKHTPINLVRDLPQGFSALEPLVDLPIGINITRFQTLLALHRSYLTPGDSSSGWTAGAAAYYVGYLQPRTFLLKYNENGTITDAVDCALDPLSETKCTLKSFTVEKGIYQTSNFRVQPTESIVRFPNITNLCPFGEVFNATRFASVYAWNRKRISNCVADYSVLYNSASFSTFKCYGVSPTKLNDLCFTNVYADSFVIRGDEVRQIAPGQTGKIADYNYKLPDDFTGCVIAWNSNNLDSKVGGNYNYLYRLFRKSNLKPFERDISTEIYQAGSTPCNGVEGFNCYFPLQSYGFQPTNGVGYQPYRVVVLSFELLHAPATVCGPKKSTNLVKNKCVNFNFNGLTGTGVLTESNKKFLPFQQFGRDIADTTDAVRDPQTLEILDITPCSFGGVSVITPGTNTSNQVAVLYQGVNCTEVPVAIHADQLTPTWRVYSTGSNVFQTRAGCLIGAEHVNNSYECDIPIGAGICASYQTQTNSPRRARSVASQSIIAYTMSLGAENSVAYSNNSIAIPTNFTISVTTEILPVSMTKTSVDCTMYICGDSTECSNLLLQYGSFCTQLNRALTGIAVEQDKNTQEVFAQVKQIYKTPPIKDFGGFNFSQILPDPSKPSKRSFIEDLLFNKVTLADAGFIKQYGYCLGDIAARDLICAQKFNGLTVLPPLLTDEMIAQYTSALLAGTITSGWTFGAGAALQIPFAMQMAYRFNGIGVTQCVLYENQKLIANQFNSAIGKIQDSLSSTASALGKLQDVVNQNAQALNTLVKQLSSNFGAISSVLNDILSRLDKVEAEVQIDRLITGRLQSLQTYVTQQLIRAAEIRASANLAATKMSECVLGQSKRVDFCGKGYHLMSFPQSAPHGVVFLHVTYVPAQEKNFTTAPAICHDGKAHFPREGVFVSNGTHWFVTQRNFYEPQIITTDNTFVCGNCDVVIGIVNNTVYDPLQPELDS

SEQ ID NO: 13469 - protein, 1147 aa, Artificial Sequence
  SARS-CoV-2/Belgium/VAG-03013/2020__EPI_ISL_415155 spike protein (1-1147)(N914C_S1123C)
MFVFLVLLPLVSSQCVNLTTRTQLPPAYTNSFTRGVYYPDKVFRSSVLHSTQDLFLPFFSNVTWFHAIHVSGTNGTKRFDNPVLPFNDGVYFASTEKSNIIRGWIFGTTLDSKTQSLLIVNNATNVVIKVCEFQFCNDPFLGVYYHKNNKSWMESEFRVYSSANNCTFEYVSQPFLMDLEGKQGNFKNLREFVFKNIDGYFKIYSKHTPINLVRDLPQGFSALEPLVDLPIGINITRFQTLLALHRSYLTPGDSSSGWTAGAAAYYVGYLQPRTFLLKYNENGTITDAVDCALDPLSETKCTLKSFTVEKGIYQTSNFRVQPTESIVRFPNITNLCPFGEVFNATRFASVYAWNRKRISNCVADYSVLYNSASFSTFKCYGVSPTKLNDLCFTNVYADSFVIRGDEVRQIAPGQTGKIADYNYKLPDDFTGCVIAWNSNNLDSKVGGNYNYLYRLFRKSNLKPFERDISTEIYQAGSTPCNGVEGFNCYFPLQSYGFQPTNGVGYQPYRVVVLSFELLHAPATVCGPKKSTNLVKNKCVNFNFNGLTGTGVLTESNKKFLPFQQFGRDIADTTDAVRDPQTLEILDITPCSFGGVSVITPGTNTSNQVAVLYQGVNCTEVPVAIHADQLTPTWRVYSTGSNVFQTRAGCLIGAEHVNNSYECDIPIGAGICASYQTQTNSPRRARSVASQSIIAYTMSLGAENSVAYSNNSIAIPTNFTISVTTEILPVSMTKTSVDCTMYICGDSTECSNLLLQYGSFCTQLNRALTGIAVEQDKNTQEVFAQVKQIYKTPPIKDFGGFNFSQILPDPSKPSKRSFIEDLLFNKVTLADAGFIKQYGDCLGDIAARDLICAQKFNGLTVLPPLLTDEMIAQYTSALLAGTITSGWTFGAGAALQIPFAMQMAYRFNGIGVTQCVLYENQKLIANQFNSAIGKIQDSLSSTATALGKLQDVVNQNAQALNTLVKQLSSNFGAISSVLNDILSRLDKVEAEVQIDRLITGRLQSLQTYVTQQLIRAAEIRASANLAATKMSECVLGQSKRVDFCGKGYHLMSFPQSAPHGVVFLHVTYVPAQEKNFTTAPAICHDGKAHFPREGVFVSNGTHWFVTQRNFYEPQIITTDNTFVCGNCDVVIGIVNNTVYDPLQPELDS

SEQ ID NO: 13470 - protein, 1147 aa, Artificial Sequence
  SARS-CoV-2/Belgium/BC-03016/2020__EPI_ISL_415157 spike protein (1-1147)(N914C_S1123C)
MFVFLVLLPLVSSQCVNLTTRTQLPPAYTNSFTRGVYYPDKVFRSSVLHSTQDLFLPFFSNVTWFHAIHVSGTNGTKRFDNPVLPFNDGVYFASTEKSNIIRGWIFGTTLDSKTQSLLIVNNATNVVIKVCEFQFCNDPFLGVYYHKNNKSWMESEFRVYSSANNCTFEYVSQPFLMDLEGKQGNFKNLREFVFKNIDGYFKIYSKHTPINLVRDLPQGFSALEPLVDLPIGINITRFQTLLALHRSYLTPGDSSSGWTAGAAAYYVGYLQPRTFLLKYNENGTITDAVDCALDPLSETKCTLKSFTVEKGIYQTSNFRVQPTESIVRFPNITNLCPFGEVFNATRFASVYAWNRKRISNCVADYSVLYNSASFSTFKCYGVSPTKLNDLCFTNVYADSFVIRGDEVRQIAPGQTGKIADYNYKLPDDFTGCVIAWNSNNLDSKVGGNYNYLYRLFRKSNLKPFERDISTEIYQAGSTPCNGVEGFNCYFPLQSYGFQPTNGVGYQPYRVVVLSFELLHAPATVCGPKKSTNLVKNKCVNFNFNGLTGTGVLTESNKKFLPFQQFGRDIADTTDAVRDPQTLEILDITPCSFGGVSVITPGTNTSNQVAVLYQGVNCTEVPVAIHADQLTPTWRVYSTGSNVFQTRAGCLIGAEHVNNSYECDIPIGAGICASYQTQTNSPRRARSVASQSIIAYTMSLGAENSVAYSNNSIAIPTNFTISVTTEILPVSMTKTSVDCTMYICGDSTECSNLLLQYGSFCTQLNRALTGIAVEQDKNTQEVFAQVKQIYKTPPIKDFGGFNFSQILPDPSKPSKRSFIEDLLFNKVTLADAGFIKQYGDCLGDIAARDLICAQKFNGLTVLPPLLTDEMIAQYTSALLAGTITSGWTFGAGAALQIPFAMQMAYRFNGIGVTQCVLYENQKLIANQFNSAIGKIQDSLSSTAPALGKLQDVVNQNAQALNTLVKQLSSNFGAISSVLNDILSRLDKVEAEVQIDRLITGRLQSLQTYVTQQLIRAAEIRASANLAATKMSECVLGQSKRVDFCGKGYHLMSFPQSAPHGVVFLHVTYVPAQEKNFTTAPAICHDGKAHFPREGVFVSNGTHWFVTQRNFYEPQIITTDNTFVCGNCDVVIGIVNNTVYDPLQPELDS

SEQ ID NO: 13471 - protein, 1147 aa, Artificial Sequence
  SARS-CoV-2/Germany/BavPat3/2020__EPI_ISL_414521 spike protein (1-1147)(N914C_S1123C)
MFVFLVLLPLVSSQCVNLTTRTQLPPAYTNSFTRGVYYPDKVFRSSVLHSTQDLFLPFFSNVTWFHAIHVSGTNGTKRFDNPVLPFNDGVYFASTEKSNIIRGWIFGTTLDSKTQSLLIVNNATNVVIKVCEFQFCNDPFLGVYYHKNNKSWMESEFRVYSSANNCTFEYVSQPFLMDLEGKQGNFKNLREFVFKNIDGYFKIYSKHTPINLVRDLPQGFSALEPLVDLPIGINITRFQTLLALHRSYLTPGDSSSGWTAGAAAYYVGYLQPRTFLLKYNENGTITDAVDCALDPLSETKCTLKSFTVEKGIYQTSNFRVQPTESIVRFPNITNLCPFGEVFNATRFASVYAWNRKRISNCVADYSVLYNSASFSTFKCYGVSPTKLNDLCFTNVYADSFVIRGDEVRQIAPGQTGKIADYNYKLPDDFTGCVIAWNSNNLDSKVGGNYNYLYRLFRKSNLKPFERDISTEIYQAGSTPCNGVEGFNCYFPLQSYGFQPTNGVGYQPYRVVVLSFELLHAPATVCGPKKSTNLVKNKCVNFNFNGLTGTGVLTESNKKFLPFQQFGRDIADTTDAVRDPQTLEILDITPCSFGGVSVITPGTNTSNQVAVLYQDVNCTEVPVAIHADQLTPTWRVYSTGSNVFQTRAGCLIGAEHVNNSYECDIPIGAGICASYQTQTNSPRRARSVASQSIIAYTMSLGAENSVAYSNNSIAIPTNFTISVTTEILPVSMTKTSVDCTMYICGDSTECSNLLLQYGSFCTQLNRALTGIAVEQDKNTQQVFAQVKQIYKTPPIKDFGGFNFSQILPDPSKPSKRSFIEDLLFNKVTLADAGFIKQYGDCLGDIAARDLICAQKFNGLTVLPPLLTDEMIAQYTSALLAGTITSGWTFGAGAALQIPFAMQMAYRFNGIGVTQCVLYENQKLIANQFNSAIGKIQDSLSSTASALGKLQDVVNQNAQALNTLVKQLSSNFGAISSVLNDILSRLDKVEAEVQIDRLITGRLQSLQTYVTQQLIRAAEIRASANLAATKMSECVLGQSKRVDFCGKGYHLMSFPQSAPHGVVFLHVTYVPAQEKNFTTAPAICHDGKAHFPREGVFVSNGTHWFVTQRNFYEPQIITTDNTFVCGNCDVVIGIVNNTVYDPLQPELDS

SEQ ID NO: 13472 - protein, 1147 aa, Artificial Sequence
  SARS-CoV-2/France/HF1805/2020__EPI_ISL_414628 spike protein (1-1147)(N914C_S1123C)
MFVFLVLLPLVSSQCVNLTTRTQLPPAYTNSFTRGVYYPDKVFRSSVLHSTQDLFLPFFSNVTWFHAIHVSGTNGTKRFDNPVLPFNDGVYFASTEKSNIIRGWIFGTTLDSKTQSLLIVNNATNVVIKVCEFQFCNDPFLGVYYHKNNKSWMESEFRVYSSANNCTFEYVSQPFLMDLEGKQGNFKNLREFVFKNIDGYFKIYSKHTPINLVRDLPQGFSALEPLVDLPIGINITRFQTLLALHRSYLTPGDSSSGWTAGAAAYYVGYLQPRTFLLKYNENGTITDAVDCALDPLSETKCTLKSFTVEKGIYQTSNFRVQPTESIVRFPNITNLCPFGEVFNATRFASVYAWNRKRISNCVADYSVLYNSASFSTFKCYGVSPTKLNDLCFTNVYADSFVIRGDEVRQIAPGQTGKIADYNYKLPDDFTGCVIAWNSNNLDSKVGGNYNYLYRLFRKSNLKPFERDISTEIYQAGSTPCNGVEGFNCYFPLQSYGFQPTNGVGYQPYRVVVLSFELLHAPATVCGPKKSTNLVKNKCVNFNFNGLTGTGVLTESNKKFLPFQQFGRDIADTTDAVRDPQTLEILDITPCSFGGVSVITPGTNTSNQVAVLYQGVNCTEVPVAIHADQLTPTWRVYSTGSNVFQTRAGCLIGAEHVNNSYECDIPIGAGICASYQTQTNSPRRARSVASQSIIAYTMSLGAENSVAYSNNSIAIPTNFTISVTTEILPVSMTKTSVDCTMYICGDSTECSNLLLQYGSFCTQLNRALTGIAVEQDKNTQEVFAQVKQIYKTPPIKDFGGFNFSQILPDPSKPSKRSFIEDLLFNKVTLADAGFIKQYGDCLGDIAARDLICAQKFNGLTVLPPLLTDEMIAQYTSALLAGTITSGWTFGAGAALQIPFAMQMAYRFNGIGVTQCVLYENQKLIANQFNSAIGKIQDSLSSTASALGKLQDVVNQNAQALNTLVKQLSSNFGAISSVLNDILSRLDKVEAEVQIDRLITGRLQSLQTYVTQQLIRAAEIRASANLAATKMSECVLGQSKRVDFCGKGYHLMSFPQSAPHGVVFLHVTYVPAQEKNFTTAPAICHDGKAHFPREGVFVSNGTHWFVTQRNFYEPQIITTDNTFVCGNCDVVIGVVNNTVYDPLQPELDS

SEQ ID NO: 13473 - protein, 1147 aa, Artificial Sequence
  SARS-CoV-2/Netherlands/ZuidHolland_9/2020__EPI_ISL_414445 spike protein (1-1147)(N914C_S1123C)
MFVFLVLLPLVSSQCVNLTTRTQLPPAYTNSFTRGVYYPDKVFRSSVLHSTQDLFLPFFSNVTWFHAIHVSGTNGTKRFDNPVLPFNDGVYFASTEKSNIIRGWIFGTTLDSKTQSLLIVNNATNVVIKVCEFQFCNDPFLGVYYHKNNKSWMESEFRVYSSANNCTFEYVSQPFLMDLEGKQGNFKNLREFVFKNIDGYFKIYSKHTPINLVRDLPQGFSALEPLVDLPIGINITRFQTLLALHRSYLTPGDSSSGWTAGAAAYYVGYLQPRTFLLKYNENGTITDAVDCALDPLSETKCTLKSFTVEKGIYQTSNFRVQPTESIVRFPNITNLCPFGEVFNATRFASVYAWNRKRISNCVADYSVLYNSASFSTFKCYGVSPTKLNDLCFTNVYADSFVIRGDEVRQIAPGQTGKIADYNYKLPDDFTGCVIAWNSNNLDSKVGGNYNYLYRLFRKSNLKPFERDISTEIYQAGSTPCNGVEGFNCYFPLQSYGFQPTNGVGYQPYRVVVLSFELLHAPATVCGPKKSTNLVKNKCVNFNFNGLTGTGVLTESNKKFLPFQQFGRDIADTTDAVRDPQTLEILDITPCSFGGVSVITPGTNTSNQVAVLYQGVNCTEVPVAIHADQLTPTWRVYSTGSNVFQTRAGCLIGAEHVNNSYECDIPIGAGICASYQTQTNSPRRARSVASQSIIAYTMSLGAENSVAYSNNSIAIPTNFTISVTTEILPVSMTKTSVDCTMYICGDSTECSNLLLQYGSFCTQLNRALTGIAVEQDKNTQEVFAQVKQIYKTPPIKDFGGFNFSQILPDPSKPSKRSFIEDLLFNKVTLADAGFIKQYGDCLGDIAARDLICVQKFNGLTVLPPLLTDEMIAQYTSALLAGTITSGWTFGAGAALQIPFAMQMAYRFNGIGVTQCVLYENQKLIANQFNSAIGKIQDSLSSTASALGKLQDVVNQNAQALNTLVKQLSSNFGAISSVLNDILSRLDKVEAEVQIDRLITGRLQSLQTYVTQQLIRAAEIRASANLAATKMSECVLGQSKRVDFCGKGYHLMSFPQSAPHGVVFLHVTYVPAQEKNFTTAPAICHDGKAHFPREGVFVSNGTHWFVTQRNFYEPQIITTDNTFVCGNCDVVIGIVNNTVYDPLQPELDS

SEQ ID NO: 13474 - protein, 1147 aa, Artificial Sequence
  SARS-CoV-2/Finland/FIN03032020A/2020__EPI_ISL_413602 spike protein (1-1147)(N914C_S1123C)
MFVFLVLLPLVSSQCVNLTTRTQLPPAYTNSFTRGVYYPDKVFRSSVLHSTQDLFLPFFSNVTWFHAIHVSGTNGTKRFDNPVLPFNDGVYFASTEKSNIIRGWIFGTTLDSKTQSLLIVNNATNVVIKVCEFQFCNDPFLGVYYHKNNKSWMESEFRVYSSANNCTFEYVSQPFLMDLEGKQGNFKNLREFVFKNIDGYFKIYSKHTPINLVRDLPQGFSALEPLVDLPIGINITRFQTLLALHRSYLTPGDSSSGWTAGAAAYYVGYLQPRTFLLKYNENGTITDAVDCALDPLSETKCTLKSFTVEKGIYQTSNFRVQPTESIVRFPNITNLCPFGEVFNATRFASVYAWNRKRISNCVADYSVLYNSASFSTFKCYGVSPTKLNDLCFTNVYADSFVIRGDEVRQIAPGQTGKIADYNYKLPDDFTGCVISWNSNNLDSKVGGNYNYLYRLFRKSNLKPFERDISTEIYQAGSTPCNGVEGFNCYFPLQSYGFQPTNGVGYQPYRVVVLSFELLHAPATVCGPKKSTNLVKNKCVNFNFNGLTGTGVLTESNKKFLPFQQFGRDIADTTDAVRDPQTLEILDITPCSFGGVSVITPGTNTSNQVAVLYQGVNCTEVPVAIHADQLTPTWRVYSTGSNVFQTRAGCLIGAEHVNNSYECDIPIGAGICASYQTQTNSPRRARSVASQSIIAYTMSLGAENSVAYSNNSIAIPTNFTISVTTEILPVSMTKTSVDCTMYICGDSTECSNLLLQYGSFCTQLNRALTGIAVEQDKNTQEVFAQVKQIYKTPPIKDFGGFNFSQILPDPSKPSKRSFIEDLLFNKVTLADAGFIKQYGDCLGDIAARDLICAQKFNGLTVLPPLLTDEMIAQYTSALLAGTITSGWTFGAGAALQIPFAMQMAYRFNGIGVTQCVLYENQKLIANQFNSAIGKIQDSLSSTASALGKLQDVVNQNAQALNTLVKQLSSNFGAISSVLNDILSRLDKVEAEVQIDRLITGRLQSLQTYVTQQLIRAAEIRASANLAATKMSECVLGQSKRVDFCGKGYHLMSFPQSAPHGVVFLHVTYVPAQEKNFTTAPAICHDGKAHFPREGVFVSNGTHWFVTQRNFYEPQIITTDNTFVCGNCDVVIGIVNNTVYDPLQPELDS

SEQ ID NO: 13475 - protein, 1147 aa, Artificial Sequence
  SARS-CoV-2/France/GE1977/2020__EPI_ISL_414632 spike protein (1-1147)(N914C_S1123C)
MFVFLVLLPLVSSQCVNLTTRTQLPPAYTNSFTRGVYYPDKVFRSSVLHSTQDLFLPFFSNVTWFHAIHVSGTNGTKRFDNPVLPFNDGVYFASTEKSNIIRGWIFGTTLDSKTQSLLIVNNATNVVIKVCEFQFCNDPFLGVYYHKNNKSWMESEFRVYSSANNCTFEYVSQPFLMDLEGKQGNFKNLREFVFKNIDGYFKIYSKHTPINLVRDLPQGFSALEPLVDLPIGINITRFQTLLALHRSYLTPGDSSSGWTAGAAAYYVGYLQPRTFLLKYNENGTITDAVDCALDPLSETKCTLKSFTVEKGIYQTSNFRVQPTESIVRFPNITNLCPFGEVFNATRFASVYAWNRKRISNCVADYSVLYNSASFSTFKCYGVSPTKLNDLCFTNVYADSFVIRGDEVRQIAPGQTGKIADYNYKLPDDFTGCVIAWNSNNLDSKVGGNYNYLYRLFRKSNLKPFERDISTEIYQAGSTPCNGVEGFNCYFPLQSYGFQPTNGVGYQPYRVVVLSFELLHAPATVCGPKKSTNLVKNKCVNFNFNGLTGTGVLTESNKKFLPFQQFGRDIADTTDAVRDPQTLEILDITPCSFGGVSVITPGTNTSNQVAVLYQGVNCTEVPVAIHADQLTPTWRVYSTGSNVFQTRAGCLIGAEHVNNSYECDIPIGAGICASYQTQTNSPRRARSVASQSIIAYTMSLGAENSVAYSNNSIAIPTNFTISVTTEILPVSMTKTSVDCTMYICGDSTECSNLLLQYGSFCTQLNRALTGIAVEQDKNTQEVFAQVKQIYKTPPIKDFGGFNFSQILPDPSKPSKRSFIEDLLFNKVTLADAGFIKQYGDCLGDIAARDLICAQKFNGLTVLPPLLTDEMIAQYTSALLAGTITSGWTFGAGAALQIPFAMQMAYRFNGIGVTQCVLYENQKLIANQFNSAIGKIQDSLFSTASALGKLQDVVNQNAQALNTLVKQLSSNFGAISSVLNDILSRLDKVEAEVQIDRLITGRLQSLQTYVTQQLIRAAEIRASANLAATKMSECVLGQSKRVDFCGKGYHLMSFPQSAPHGVVFLHVTYVPAQEKNFTTAPAICHDGKAHFPREGVFVSNGTHWFVTQRNFYEPQIITTDNTFVCGNCDVVIGIVNNTVYDPLQPELDS

SEQ ID NO: 13476 - protein, 1147 aa, Artificial Sequence
  SARS-CoV-2/Finland/FIN-313/2020__EPI_ISL_414641 spike protein (1-1147)(N914C_S1123C)
MFVFLVLLPLVSSQCVNLTTRTQLPPAYTNSFTRGVYYPDKVFRSSVLHSTQDLFLPFFSNVTWFHAIHVSGTNGTKRFDNPVLPFNDGVYFASTEKSNIIRGWIFGTTLDSKTQSLLIVNNATNVVIKVCEFQFCNDPFLGVYYHKNNKSWMESEFRVYSSANNCTFEYVSQPFLMDLEGKQGNFKNLREFVFKNIDGYFKIYSKHTPINLVRDLPQGFSALEPLVDLPIGINITRFKTLLALHRSYLTPGDSSSGWTAGAAAYYVGYLQPRTFLLKYNENGTITDAVDCALDPLSETKCTLKSFTVEKGIYQTSNFRVQPTESIVRFPNITNLCPFGEVFNATRFASVYAWNRKRISNCVADYSVLYNSASFSTFKCYGVSPTKLNDLCFTNVYADSFVIRGDEVRQIAPGQTGKIADYNYKLPDDFTGCVIAWNSNNLDSKVGGNYNYLYRLFRKSNLKPFERDISTEIYQAGSTPCNGVEGFNCYFPLQSYGFQPTNGVGYQPYRVVVLSFELLHAPATVCGPKKSTNLVKNKCVNFNFNGLTGTGVLTESNKKFLPFQQFGRDIADTTDAVRDPQTLEILDITPCSFGGVSVITPGTNTSNQVAVLYQGVNCTEVPVAIHADQLTPTWRVYSTGSNVFQTRAGCLIGAEHVNNSYECDIPIGAGICASYQTQTNSPRRARSVASQSIIAYTMSLGAENSVAYSNNSIAIPTNFTISVTTEILPVSMTKTSVDCTMYICGDSTECSNLLLQYGSFCTQLNRALTGIAVEQDKNTQEVFAQVKQIYKTPPIKDFGGFNFSQILPDPSKPSKRSFIEDLLFNKVTLADAGFIKQYGDCLGDIAARDLICAQKFNGLTVLPPLLTDEMIAQYTSALLAGTITSGWTFGAGAALQIPFAMQMAYRFNGIGVTQCVLYENQKLIANQFNSAIGKIQDSLSSTASALGKLQDVVNQNAQALNTLVKQLSSNFGAISSVLNDILSRLDKVEAEVQIDRLITGRLQSLQTYVTQQLIRAAEIRASANLAATKMSECVLGQSKRVDFCGKGYHLMSFPQSAPHGVVFLHVTYVPAQEKNFTTAPAICHDGKAHFPREGVFVSNGTHWFVTQRNFYEPQIITTDNTFVCGNCDVVIGIVNNTVYDPLQPELDS

SEQ ID NO: 13477 - protein, 1147 aa, Artificial Sequence
  SARS-CoV-2/Netherlands/ZuidHolland_2/2020__EPI_ISL_414556 spike protein (1-1147)(N914C_S1123C)
MFVFLVLLPLVSSQCVNLTTRTQLPPAYTNSFTRGVYYPDKVFRSSVLHSTQDLFLPFFSNVTWFHAIHVSGTNGTKRFDNPVLPFNDGVYFASTEKSNIIRGWIFGTTLDSKTQSLLIVNNATNVVIKVCEFQFCNDPFLGVYYHKNNKSWMESEFRVYSSANNCTFEYVSQPFLMDLEGKQGNFKNLREFVFKNIDGYFKIYSKHTPINLVRDLPQGFSALEPLVDLPIGINITRFQTLLALHRSYLTPGDSSSGWTAGAAAYYVGYLQPRTFLLKYNENGTITDAVDCALDPLSETKCTLKSFTVEKGIYQTSNFRVQPTESIVRFPNITNLCPFGEVFNATRFASVYAWNRKRISNCVADYSVLYNSASFSTFKCYGVSPTKLNDLCFTNVYADSFVIRGDEVRQIAPGQTGKIADYNYKLPDDFTGCVIAWNSNNLDSKVGGNYNYLYRLFRKSNLKPFERDISTEIYQAGSTPCNGVEGFNCYFPLQSYGFQPTNGVGYQPYRVVVLSFELLHAPATVCGPKKSTNLVKNKCVNFNFNGLTGTGVLTESNKKFLPFQQFGRDIADTTDAVRDPQTLEILDITPCSFGGVSVITPGTNTSNQVAVLYQGVNCTEVPVAIHADQLTPTWRVYSTGSNVFQTRAGCLIGAEHVNNSYECDIPIGAGICASYQTQTNSPRRARSVASQSIIAYTMSLGAENSVAYSNNSIAIPTNFTISVTTEILPVSMTKTSVDCTMYICGDSTECSNLLLQYGSFCTQLNRALTGIALEQDKNTQEVFAQVKQIYKTPPIKDFGGFNFSQILPDPSKPSKRSFIEDLLFNKVTLADAGFIKQYGDCLGDIAARDLICAQKFNGLTVLPPLLTDEMIAQYTSALLAGTITSGWTFGAGAALQIPFAMQMAYRFNGIGVTQCVLYENQKLIANQFNSAIGKIQDSLSSTASALGKLQDVVNQNAQALNTLVKQLSSNFGAISSVLNDILSRLDKVEAEVQIDRLITGRLQSLQTYVTQQLIRAAEIRASANLAATKMSECVLGQSKRVDFCGKGYHLMSFPQSAPHGVVFLHVTYVPAQEKNFTTAPAICHDGKAHFPREGVFVSNGTHWFVTQRNFYEPQIITTDNTFVCGNCDVVIGIVNNTVYDPLQPELDS

SEQ ID NO: 13478 - protein, 1147 aa, Artificial Sequence
  SARS-CoV-2/USA/WA-UW31/2020__EPI_ISL_414618 spike protein (1-1147)(N914C_S1123C)
MFVFLVLLPLVSSQCVNLTTRTQLPPAYTNSFTRGVYYPDKVFRSSVLHSTQDLFLPFFSNVTWFHAIHVSGTNGTKRFDNPVLPFNDGVYFASTEKSNIIRGWIFGTTLDSKTQSLLIVNNATNVVIKVCEFQFCNDPFLGVYYHKNNKSWMESEFRVYSSANNCTFEYVSQPFLMDLEGKQGNFKNLREFVFKNIDGYFKIYSKHTPINLVRDLPQGFSALEPLVDLPIGINITRFQTLLALHRSYLTPGDSSSGWTAGAAAYYVGYLQPRTFLLKYNENGTITDAVDCALDPLSETKCTLKSFTVEKGIYQTSNFRVQPTESIVRFPNITNLCPFGEVFNATRFASVYAWNRKRISNCVADYSVLYNSASFSTFKCYGVSPTKLNDLCFTNVYADSFVIRGDEVRQIAPGQTGKIADYNYKLPDDFTGCVIAWNSNNLDSKVGGNYNYLYRLFRKSNLKPFERDISTEIYQAGSTPCNGAEGFNCYFPLQSYGFQPTNGVGYQPYRVVVLSFELLHAPATVCGPKKSTNLVKNKCVNFNFNGLTGTGVLTESNKKFLPFQQFGRDIADTTDAVRDPQTLEILDITPCSFGGVSVITPGTNTSNQVAVLYQDVNCTEVPVAIHADQLTPTWRVYSTGSNVFQTRAGCLIGAEHVNNSYECDIPIGAGICASYQTQTNSPRRARSVASQSIIAYTMSLGAENSVAYSNNSIAIPTNFTISVTTEILPVSMTKTSVDCTMYICGDSTECSNLLLQYGSFCTQLNRALTGIAVEQDKNTQEVFAQVKQIYKTPPIKDFGGFNFSQILPDPSKPSKRSFIEDLLFNKVTLADAGFIKQYGDCLGDIAARDLICAQKFNGLTVLPPLLTDEMIAQYTSALLAGTITSGWTFGAGAALQIPFAMQMAYRFNGIGVTQCVLYENQKLIANQFNSAIGKIQDSLSSTASALGKLQDVVNQNAQALNTLVKQLSSNFGAISSVLNDILSRLDKVEAEVQIDRLITGRLQSLQTYVTQQLIRAAEIRASANLAATKMSECVLGQSKRVDFCGKGYHLMSFPQSAPHGVVFLHVTYVPAQEKNFTTAPAICHDGKAHFPREGVFVSNGTHWFVTQRNFYEPQIITTDNTFVCGNCDVVIGIVNNTVYDPLQPELDS

SEQ ID NO: 13479 - protein, 1147 aa, Artificial Sequence
  SARS-CoV-2/South Korea/SNU01/2020__EPI_ISL_411929 spike protein (1-1147)(N914C_S1123C)
MFVFLVLLPLVSSQCVNLTTRTQLPPAYTNSFTRGVYYPDKVFRSSVLHSTQDLFLPFFSNVTWFHAIHVSGTNGTKRFDNPVLPFNDGVYFASTEKSNIIRGWIFGTTLDSKTQSLLIVNNATNVVIKVCEFQFCNDPFLGVYYHKNNKSWMESEFRVYSSANNCTFEYVSQPFLMDLEGKQGNFKNLREFVFKNIDGYFKIYSKHTPINLVRDLPQGFWALEPLVDLPIGINITRFQTLLALHRSYLTPGDSSSGWTAGAAAYYVGYLQPRTFLLKYNENGTITDAVDCALDPLSETKCTLKSFTVEKGIYQTSNFRVQPTESIVRFPNITNLCPFGEVFNATRFASVYAWNRKRISNCVADYSVLYNSASFSTFKCYGVSPTKLNDLCFTNVYADSFVIRGDEVRQIAPGQTGKIADYNYKLPDDFTGCVIAWNSNNLDSKVGGNYNYLYRLFRKSNLKPFERDISTEIYQAGSTPCNGVEGFNCYFPLQSYGFQPTNGVGYQPYRVVVLSFELLHAPATVCGPKKSTNLVKNKCVNFNFNGLTGTGVLTESNKKFLPFQQFGRDIADTTDAVRDPQTLEILDITPCSFGGVSVITPGTNTSNQVAVLYQDVNCTEVPVAIHADQLTPTWRVYSTGSNVFQTRAGCLIGAEHVNNSYECDIPIGAGICASYQTQTNSPRRARSVASQSIIAYTMSLGAENSVAYSNNSIAIPTNFTISVTTEILPVSMTKTSVDCTMYICGDSTECSNLLLQYGSFCTQLNRALTGIAVEQDKNTQEVFAQVKQIYKTPPIKDFGGFNFSQILPDPSKPSKRSFIEDLLFNKVTLADAGFIKQYGDCLGDIAARDLICAQKFNGLTVLPPLLTDEMIAQYTSALLAGTITSGWTFGAGAALQIPFAMQMAYRFNGIGVTQCVLYENQKLIANQFNSAIGKIQDSLSSTASALGKLQDVVNQNAQALNTLVKQLSSNFGAISSVLNDILSRLDKVEAEVQIDRLITGRLQSLQTYVTQQLIRAAEIRASANLAATKMSECVLGQSKRVDFCGKGYHLMSFPQSAPHGVVFLHVTYVPAQEKNFTTAPAICHDGKAHFPREGVFVSNGTHWFVTQRNFYEPQIITTDNTFVCGNCDVVIGIVNNTVYDPLQPELDS

SEQ ID NO: 13480 - protein, 1147 aa, Artificial Sequence
  SARS-CoV-2/China/WF0004/2020__EPI_ISL_413694 spike protein (1-1147)(N914C_S1123C)
MFVFLVLLPLVSSQCVNLTTRTQLPPAYTNSFTRGVYYPDKVFRSSVLHSTQDLFLPFFSNVTWFHAIHVSGTNGTKRFDNPVLPFNDGVYFASTEKSNIIRGWIFGTTLDSKTQSLLIVNNATNVVIKVCEFQFCNDPFLGVYYHKNNKSWTESEFRVYSSANNCTFEYVSQPFLMDLEGKQGNFKNLREFVFKNIDGYFKIYSKHTPINLVRDLPQGFSALEPLVDLPIGINITRFQTLLALHRSYLTPGDSSSGWTAGAAAYYVGYLQPRTFLLKYNENGTITDAVDCALDPLSETKCTLKSFTVEKGIYQTSNFRVQPTESIVRFPNITNLCPFGEVFNATRFASVYAWNRKRISNCVADYSVLYNSASFSTFKCYGVSPTKLNDLCFTNVYADSFVIRGDEVRQIAPGQTGKIADYNYKLPDDFTGCVIAWNSNNLDSKVGGNYNYLYRLFRKSNLKPFERDISTEIYQAGSTPCNGVEGFNCYFPLQSYGFQPTNGVGYQPYRVVVLSFELLHAPATVCGPKKSTNLVKNKCVNFNFNGLTGTGVLTESNKKFLPFQQFGRDIADTTDAVRDPQTLEILDITPCSFGGVSVITPGTNTSNQVAVLYQDVNCTEVPVAIHADQLTPTWRVYSTGSNVFQTRAGCLIGAEHVNNSYECDIPIGAGICASYQTQTNSPRRARSVASQSIIAYTMSLGAENSVAYSNNSIAIPTNFTISVTTEILPVSMTKTSVDCTMYICGDSTECSNLLLQYGSFCTQLNRALTGIAVEQDKNTQEVFAQVKQIYKTPPIKDFGGFNFSQILPDPSKPSKRSFIEDLLFNKVTLADAGFIKQYGDCLGDIAARDLICAQKFNGLTVLPPLLTDEMIAQYTSALLAGTITSGWTFGAGAALQIPFAMQMAYRFNGIGVTQCVLYENQKLIANQFNSAIGKIQDSLSSTASALGKLQDVVNQNAQALNTLVKQLSSNFGAISSVLNDILSRLDKVEAEVQIDRLITGRLQSLQTYVTQQLIRAAEIRASANLAATKMSECVLGQSKRFDFCGKGYHLMSFPQSAPHGVVFLHVTYVPAQEKNFTTAPAICHDGKAHFPREGVFVSNGTHWFVTQRNFYEPQIITTDNTFVCGNCDVVIGIVNNTVYDPLQPELDS

SEQ ID NO: 13481 - protein, 1147 aa, Artificial Sequence
  SARS-CoV-2/China/WF0028/2020__EPI_ISL_413791 spike protein (1-1147)(N914C_S1123C)
MFVFLVLLPLVSSQCVNLTTRTQLPPAYTNSFTRGVYYPDKVFRSSVLHSTQDLFLPFFSNVTWFHAIHVSGTNGTKRFDNPVLPFNDGVYFASTEKSNIIRGWIFGTTLDSKTQSLLIVNNATNVVIKVCEFQFCNDPFLGVYYHKNNKSWMESEFRVYSSANNCTFEYVSQPFLMDLEGKQGNFKNLREFVFKNIDGYFKIYSKHTPINLVRDLPQGFSALEPLVDLPIGINITRFQTLLALHRSYLTPGDSSSGWTAGAAAYYVGYLQPRTFLLKYNENGTITDAVDCALDPLSETKCTLKSFTVEKGIYQTSNFRVQPTESIVRFPNITNLCPFGEVFNATRFASVYAWNRKRISNCVADYSVLYNSASFSTFKCYGVSPTKLNDLCFTNVYADSFVIRGDEVRQIAPGQTGKIADYNYKLPDDFTGCVIAWNSNNLDSKVGGNYNYLYRLFRKSNLKPFERDISTEIYQAGSTPCNGVEGFNCYFPLQSYGFQPTNGVGYQPYRVVVLSFELLHAPATVCGPKKSTNLVKNKCVNFNFNGLTGTGVLTESNKKFLPFQQFGRDIADTTDAVRDPQTLEILDITPCSFGGVSVITPGTNTSNQVAVLYQDVNCTEVPVAIHADQLTPTWRVYSTGSNVFQTRAGCLIGAEHVNNSYECDIPIGAGICASYQTQTNSPRRARSVASQSIIAYTMSLGAENSVAYSNNSIAIPTNFTISVTTEILPVSMTKTSVDCTMYICGDSTECSNLLLQYGSFCTQLNRALTGIAVEQDKNTQEVFAQVKQIYKTPPIKDFGGFNFSQILPDPSKPSKRSFIEDLLFNKVTLADAGFIKQYGDCLGDIAARDLICAQKFNGLTVLPPLLTDEMIAQYTSALLAGTITSGWTFGAGAALQIPFAMQMAYRFNGIGVTQCVLYENQKLIANQFNSAIGKIQDSLSSTASALGKLQDVVNQNAQALNTLVKQLSSNFGAISSVLNDILSRLDKVEAEVQIDRLITGRLQSLQTYVTQQLIRAAEIRASANLAATKMSECVLGQSKRVDFCGKGYHLMSFPQSAPHGVVFLHVTYVPAQEKNFTTAPAICHDGKAHFPREGVFVSNGTHWFVTQRNFYEPQIITTDNTFVCGNCDVVIGIVNNTVYDPLQPELES

SEQ ID NO: 13482 - protein, 1147 aa, Artificial Sequence
  SARS-CoV-2/2019-nCoV/USA-CruiseA-18/2020__MT159716.1 spike protein (1-1147)(N914C_S1123C)
MFVFLVLLPLVSSQCVNLTTRTQLPPAYTNSFTRGVYYPDKVFRSSVLHSTQDLFLPFFSNVTWFHAIHVSGTNGTKRFDNPVLPFNDGVYFASTEKSNIIRGWIFGTTLDSKTQSLLIVNNATNVVIKVCEFQFCNDPFLGVYYHKNNKSWMESELRVYSSANNCTFEYVSQPFLMDLEGKQGNFKNLREFVFKNIDGYFKIYSKHTPINLVRDLPQGFSALEPLVDLPIGINITRFQTLLALHRSYLTPGDSSSGWTAGAAAYYVGYLQPRTFLLKYNENGTITDAVDCALDPLSETKCTLKSFTVEKGIYQTSNFRVQPTESIVRFPNITNLCPFGEVFNATRFASVYAWNRKRISNCVADYSVLYNSASFSTFKCYGVSPTKLNDLCFTNVYADSFVIRGDEVRQIAPGQTGKIADYNYKLPDDFTGCVIAWNSNNLDSKVGGNYNYLYRLFRKSNLKPFERDISTEIYQAGSTPCNGVEGFNCYFPLQSYGFQPTNGVGYQPYRVVVLSFELLHAPATVCGPKKSTNLVKNKCVNFNFNGLTGTGVLTESNKKFLPFQQFGRDIADTTDAVRDPQTLEILDITPCSFGGVSVITPGTNTSNQVAVLYQDVNCTEVPVAIHADQLTPTWRVYSTGSNVFQTRAGCLIGAEHVNNSYECDIPIGAGICASYQTQTNSPRRARSVASQSIIAYTMSLGAENSVAYSNNSIAIPTNFTISVTTEILPVSMTKTSVDCTMYICGDSTECSNLLLQYGSFCTQLNRALTGIAVEQDKNTQEVFAQVKQIYKTPPIKDFGGFNFSQILPDPSKPSKRSFIEDLLFNKVTLADAGFIKQYGDCLGDIAARDLICAQKFNGLTVLPPLLTDEMIAQYTSALLAGTITSGWTFGAGAALQIPFAMQMAYRFNGIGVTQCVLYENQKLIANQFNSAIGKIQDSLSSTASALGKLQDVVNQNAQALNTLVKQLSSNFGAISSVLNDILSRLDKVEAEVQIDRLITGRLQSLQTYVTQQLIRAAEIRASANLAATKMSECVLGQSKRVDFCGKGYHLMSFPQSAPHGVVFLHVTYVPAQEKNFTTAPAICHDGKAHFPREGVFVSNGTHWFVTQRNFYEPQIITTDNTFVCGNCDVVIGIVNNTVYDPLQPELDS

SEQ ID NO: 13483 - protein, 1147 aa, Artificial Sequence
  SARS-CoV-2/SARS-CoV-2/Yunnan-01/human/2020/CHN__MT049951.1 spike protein (1-1147)(N914C_S1123C)
MFVFLVLLPLVSSQCVNLTTRTQLPPANTNSFTRGVYYPDKVFRSSVLHSTQDLFLPFFSNVTWFHAIHVSGTNGTKRFDNPVLPFNDGVYFASTEKSNIIRGWIFGTTLDSKTQSLLIVNNATNVVIKVCEFQFCNDPFLGVYYHKNNKSWMESEFRVYSSANNCTFEYVSQPFLMDLEGKQGNFKNLREFVFKNIDGYFKIYSKHTPINLVRDLPQGFSALEPLVDLPIGINITRFQTLLALHRSYLTPGDSSSGWTAGAAAYYVGYLQPRTFLLKYNENGTITDAVDCALDPLSETKCTLKSFTVEKGIYQTSNFRVQPTESIVRFPNITNLCPFGEVFNATRFASVYAWNRKRISNCVADYSVLYNSASFSTFKCYGVSPTKLNDLCFTNVYADSFVIRGDEVRQIAPGQTGKIADYNYKLPDDFTGCVIAWNSNNLDSKVGGNYNYLYRLFRKSNLKPFERDISTEIYQAGSTPCNGVEGFNCYFPLQSYGFQPTNGVGYQPYRVVVLSFELLHAPATVCGPKKSTNLVKNKCVNFNFNGLTGTGVLTESNKKFLPFQQFGRDIADTTDAVRDPQTLEILDITPCSFGGVSVITPGTNTSNQVAVLYQDVNCTEVPVAIHADQLTPTWRVYSTGSNVFQTRAGCLIGAEHVNNSYECDIPIGAGICASYQTQTNSPRRARSVASQSIIAYTMSLGAENSVAYSNNSIAIPTNFTISVTTEILPVSMTKTSVDCTMYICGDSTECSNLLLQYGSFCTQLNRALTGIAVEQDKNTQEVFAQVKQIYKTPPIKDFGGFNFSQILPDPSKPSKRSFIEDLLFNKVTLADAGFIKQYGDCLGDIAARDLICAQKFNGLTVLPPLLTDEMIAQYTSALLAGTITSGWTFGAGAALQIPFAMQMAYRFNGIGVTQCVLYENQKLIANQFNSAIGKIQDSLSSTASALGKLQDVVNQNAQALNTLVKQLSSNFGAISSVLNDILSRLDKVEAEVQIDRLITGRLQSLQTYVTQQLIRAAEIRASANLAATKMSECVLGQSKRVDFCGKGYHLMSFPQSAPHGVVFLHVTYVPAQEKNFTTAPAICHDGKAHFPREGVFVSNGTHWFVTQRNFYEPQIITTDNTFVCGNCDVVIGIVNNTVYDPLQPELDS

SEQ ID NO: 13484 - protein, 1147 aa, Artificial Sequence
  SARS-CoV-2/USA/WA-UW292/2020__EPI_ISL_418077 spike protein (1-1147)(N914C_S1123C)
MFVFLVLLPLVSSQCVNLTTRTQLPPAYTNSFTRGVYYPDKVFRSSVLHSTQDLFLPFFSNVTWFHAIHVSGTNGTKRFDNPVLPFNDGVYFASTEKSNIIRGWIFGTTLDSKTQSLLIVNNATNVVIKVCEFQFCNDPFLGVYYHKNNKSWMESEFRVYSSANNCTFEYVSQPFLMDLEGKQGNFKNLREFVFKNIDGYFKIYSKHTPINLVRDLPQGFSALEPLVDLPIGINITRFQTLLALHRSYLTPGDSSSGWTAGAAAYYVGYLQPRTFLLKYNENGTITDAVDCALDPLSETKCTLKSFTVEKGIYQTSNFRVQPTESIVRFPNITNLCPFGEVFNATRFASVYAWNRKRISNCVADYSVLYNSASFSTFKCYGVSPTKLNDLCFTNVYADSFVIRGDEVRQIAPGQTGKIADYNYKLPDDFTGCVIAWNSNNLDSKVGGNYNYLYRLFRKSNLKPFERDISTEIYQASSTPCNGVEGFNCYFPLQSYGFQPTNGVGYQPYRVVVLSFELLHAPATVCGPKKSTNLVKNKCVNFNFNGLTGTGVLTESNKKFLPFQQFGRDIADTTDAVRDPQTLEILDITPCSFGGVSVITPGTNTSNQVAVLYQDVNCTEVPVAIHADQLTPTWRVYSTGSNVFQTRAGCLIGAEHVNNSYECDIPIGAGICASYQTQTNSPRRARSVASQSIIAYTMSLGAENSVAYSNNSIAIPTNFTISVTTEILPVSMTKTSVDCTMYICGDSTECSNLLLQYGSFCTQLNRALTGIAVEQDKNTQEVFAQVKQIYKTPPIKDFGGFNFSQILPDPSKPSKRSFIEDLLFNKVTLADAGFIKQYGDCLGDIAARDLICAQKFNGLTVLPPLLTDEMIAQYTSALLAGTITSGWTFGAGAALQIPFAMQMAYRFNGIGVTQCVLYENQKLIANQFNSAIGKIQDSLSSTASALGKLQDVVNQNAQALNTLVKQLSSNFGAISSVLNDILSRLDKVEAEVQIDRLITGRLQSLQTYVTQQLIRAAEIRASANLAATKMSECVLGQSKRVDFCGKGYHLMSFPQSAPHGVVFLHVTYVPAQEKNFTTAPAICHDGKAHFPREGVFVSNGTHWFVTQRNFYEPQIITTDNTFVCGNCDVVIGIVNNTVYDPLQPELDS

SEQ ID NO: 13485 - protein, 1147 aa, Artificial Sequence
  SARS-CoV-2/Iceland/192/2020__EPI_ISL_417819 spike protein (1-1147)(N914C_S1123C)
MFVFFVLLPLVSSQCVNLTTRTQLPPAYTNSFTRGVYYPDKVFRSSVLHSTQDLFLPFFSNVTWFHAIHVSGTNGTKRFDNPVLPFNDGVYFASTEKSNIIRGWIFGTTLDSKTQSLLIVNNATNVVIKVCEFQFCNDPFLGVYYHKNNKSWMESEFRVYSSANNCTFEYVSQPFLMDLEGKQGNFKNLREFVFKNIDGYFKIYSKHTPINLVRDLPQGFSALEPLVDLPIGINITRFQTLLALHRSYLTPGDSSSGWTAGAAAYYVGYLQPRTFLLKYNENGTITDAVDCALDPLSETKCTLKSFTVEKGIYQTSNFRVQPTESIVRFPNITNLCPFGEVFNATRFASVYAWNRKRISNCVADYSVLYNSASFSTFKCYGVSPTKLNDLCFTNVYADSFVIRGDEVRQIAPGQTGKIADYNYKLPDDFTGCVIAWNSNNLDSKVGGNYNYLYRLFRKSNLKPFERDISTEIYQAGSTPCNGVEGFNCYFPLQSYGFQPTNGVGYQPYRVVVLSFELLHAPATVCGPKKSTNLVKNKCVNFNFNGLTGTGVLTESNKKFLPFQQFGRDIADTTDAVRDPQTLEILDITPCSFGGVSVITPGTNTSNQVAVLYQGVNCTEVPVAIHADQLTPTWRVYSTGSNVFQTRAGCLIGAEHVNNSYECDIPIGAGICASYQTQTNSPRRARSVASQSIIAYTMSLGAENSVAYSNNSIAIPTNFTISVTTEILPVSMTKTSVDCTMYICGDSTECSNLLLQYGSFCTQLNRALTGIAVEQDKNTQEVFAQVKQIYKTPPIKDFGGFNFSQILPDPSKPSKRSFIEDLLFNKVTLADAGFIKQYGDCLGDIAARDLICAQKFNGLTVLPPLLTDEMIAQYTSALLAGTITSGWTFGAGAALQIPFAMQMAYRFNGIGVTQCVLYENQKLIANQFNSAIGKIQDSLSSTASALGKLQDVVNQNAQALNTLVKQLSSNFGAISSVLNDILSRLDKVEAEVQIDRLITGRLQSLQTYVTQQLIRAAEIRASANLAATKMSECVLGQSKRVDFCGKGYHLMSFPQSAPHGVVFLHVTYVPAQEKNFTTAPAICHDGKAHFPREGVFVSNGTHWFVTQRNFYEPQIITTDNTFVCGNCDVVIGIVNNTVYDPLQPELDS

SEQ ID NO: 13486 - protein, 1147 aa, Artificial Sequence
  SARS-CoV-2/Belgium/ULG-6939/2020__EPI_ISL_417020 spike protein (1-1147)(N914C_S1123C)
MFVFLVLLPLVSSQCVNLTTRTQLPPAYTNSFTRGVYYPDKVFRSSVLHSTQDLFLPFFSNVTWFHAIHVSGTNGTKRFDNPVLPFNDGVYFASTEKSNIIRGWIFGTTLDSKTQSLLIVNNATNVVIKVCEFQFCNDPFLGVYYHKNNKSWMESEFRVYSSANNCTFEYVSQPFLMDLEGKQGNFKNLREFVFKNIDGYFKIYSKHTPINLVRDLPQGFSALEPLVDLPIGINITRFQTLLALHRSYLTPGDSSSGWTAGAAAYYVGYLQPRTFLLKYNENGTITDAVDCALDPLSETKCTLKSFTVEKGIYQTSNFRVQPTESIVRFPNITNLCPFGEVFNATRFASVYAWNRKRISNCVADYSVLYNSASFSTFKCYGVSPTKLNDLCFTNVYADSFVIRGDEVRQIAPGQTGKIADYNYKLPDDFTGCVIAWNSNNLDSKVGGNYNYLYRLFRKSNLKPFERDISTEIYQAGSTPCNGVEGFNCYFPLQSYGFQPTNGVGYQPYRVVVLSFELLHAPATVCGPKKSTNLVKNKCVNFNFNGLTGTGVLTESNKKFLPFQQFGRDIADTTDAVRDPQTLEILDITPCSFGGVSVITPGTNTSNQVAVLYQGVNCTEVPVAIHADQLTPTWRVYSTGSNVFQTRAGCLIGAEHVNNSYECDIPIGAGICASYQTQTNSPRRARSVASQSIIAYTMSLGAENSVVYSNNSIAIPTNFTISVTTEILPVSMTKTSVDCTMYICGDSTECSNLLLQYGSFCTQLNRALTGIAVEQDKNTQEVFAQVKQIYKTPPIKDFGGFNFSQILPDPSKPSKRSFIEDLLFNKVTLADAGFIKQYGDCLGDIAARDLICAQKFNGLTVLPPLLTDEMIAQYTSALLAGTITSGWTFGAGAALQIPFAMQMAYRFNGIGVTQCVLYENQKLIANQFNSAIGKIQDSLSSTASALGKLQDVVNQNAQALNTLVKQLSSNFGAISSVLNDILSRLDKVEAEVQIDRLITGRLQSLQTYVTQQLIRAAEIRASANLAATKMSECVLGQSKRVDFCGKGYHLMSFPQSAPHGVVFLHVTYVPAQEKNFTTAPAICHDGKAHFPREGVFVSNGTHWFVTQRNFYEPQIITTDNTFVCGNCDVVIGIVNNTVYDPLQPELDS

SEQ ID NO: 13487 - protein, 1147 aa, Artificial Sequence
  SARS-CoV-2/France/HF2496/2020__EPI_ISL_418231 spike protein (1-1147)(N914C_S1123C)
MFVFLVLLPLVSSQCVNLTTRTQLPPAYTNSFTRGVYYPDKVFRSSVLHSTQDLFLPFFSNVTWFHAIHVSGTNGTKRFDNPVLPFNDGVYFASTEKSNIIRGWIFGTTLDSKTQSLLIVNNATNVVIKVCEFQFCNDPFLGVYYHKNNKSWMESEFRVYSSANNCTFEYVSQPFLMDLEGKQGNFKNLREFVFKNIDGYFKIYSKHTPINLVRDLPQGFSALEPLVDLPIGINITRFQTLLALHRSYLTPGDSSSGWTAGAAAYYVGYLQPRTFLLKYNENGTITDAVDCALDPLSETKCTLKSFTVEKGIYQTSNFRVQPTESIVRFPNITNLCPFGEVFNATRFASVYAWNRKRISNCVADYSVLYNSASFSTFKCYGVSPTKLNDLCFTNVYADSFVIRGDEVRQIAPGQTGKIADYNYKLPDDFTGCVIAWNSNNLDSKVGGNYNYLYRLFRKSNLKPFERDISTEIYQAGSTPCNGVEGFNCYFPLQSYGFQPTNGVGYQPYRVVVLSFELLHAPATVCGPKKSTNLVKNKCVNFNFNGLTGTGVLTESNKKFLPFQQFGRDIADTTDAVRDPQTLEILDITPCSFGGVSVITPGTNTSNQVAVLYQGVNCTEVPVAIHADQLTPTWRVYSTGSNVFQTRAGCLIGAEHVNNSYECDIPIGAGICASYQTQTNSPRRARSVASQSIIAYTMSLGAENSVAYSNNSIAIPTNFTISVTTEILPVSMTKTSVDCTMYICGDSTECSNLLLQYGSFCTQLNRALTGIAVEQDKNTQEVFAQVKQIYKTPPIKDFGGFNFSQILPDPSKPSKRSFIEDLLFNKVTLADAGFIKQYGDCLGDIVARDLICAQKFNGLTVLPPLLTDEMIAQYTSALLAGTITSGWTFGAGAALQIPFAMQMAYRFNGIGVTQCVLYENQKLIANQFNSAIGKIQDSLSSTASALGKLQDVVNQNAQALNTLVKQLSSNFGAISSVLNDILSRLDKVEAEVQIDRLITGRLQSLQTYVTQQLIRAAEIRASANLAATKMSECVLGQSKRVDFCGKGYHLMSFPQSAPHGVVFLHVTYVPAQEKNFTTAPAICHDGKAHFPREGVFVSNGTHWFVTQRNFYEPQIITTDNTFVCGNCDVVIGIVNNTVYDPLQPELDS

SEQ ID NO: 13488 - protein, 1147 aa, Artificial Sequence
  SARS-CoV-2/USA/WA-UW291/2020__EPI_ISL_418076 spike protein (1-1147)(N914C_S1123C)
MFVFLVLLPLVSSQCVNLTTRTQLPPAYTNSFTRGVYYPDKVFRSSVLHSTQDLFLPFFSNVTWFHAIHVSGTNGTKRFDNPVLPFNDGVYFASTEKSNIIRGWIFGTTLDSKTQSLLIVNNATNVVIKVCEFQFCNDPFLGVYYHKNNKSWMESEFRVYSSANNCTFEYVSQPFLMDLEGKQGNFKNLREFVFKNIDGYFKIYSKHTPINLVRDLPQGFSALEPLVDLPIGINITRFQTLLALHRSYLTPGDSSSGWTAGAAAYYVGYLQPRTFLLKYNENGTITDAVDCALDPLSETKCTLKSFTVEKGIYQTSNFRVQPTESIVRFPNITNLCPFGEVFNATRFASVYAWNRKRISNCVADYSVLYNSASFSTFKCYGVSPTKLNDLCFTNVYADSFVIRGDEVRQIAPGQTGKIADYNYKLPDDFTGCVIAWNSNNLDSKVGGNYNYLYRLFRKSNLKPFERDISTEIYQAGSTPCNGVEGFNCYFPLQSYGFQPTNGVGYQPYRVVVLSFELLHAPATVCGPKKSTNLVKNKCVNFNFNGLTGTGVLTESNKKFLPFQQFGRDIADTTDAVRDPQTLEILDITPCSFGGVSVITPGTNTSNQVAVLYQGVNCTEVPVAIHADQLTPTWRVYSTGSNVFQTRAGCLIGAEHVNNSYECDIPIGAGICASYQTQTNSPRRARSVASQSIIAYTMSLGAENSVAYSNNSIAIPTNFTISVTTEILPVSMTKTSVDCTMYICGDSTECSNLLLQYGSFCTQLNRALTGIAVEQDKNTQEVFAQVKQIYKTPPIKDFGGFNFSQILPDPSKPSKRSFIEDLLFNKVTLADAGFIKQYGDCLGDIAARDLICAQKFNGLTVLPPLLTDEMIAQYTSALLAGTITSGWTFGAGAALQIPFAMQMAYRFNGIGVTQCVLYENQKLIANQFNSAIGKIQYSLSSTASALGKLQDVVNQNAQALNTLVKQLSSNFGAISSVLNDILSRLDKVEAEVQIDRLITGRLQSLQTYVTQQLIRAAEIRASANLAATKMSECVLGQSKRVDFCGKGYHLMSFPQSAPHGVVFLHVTYVPAQEKNFTTAPAICHDGKAHFPREGVFVSNGTHWFVTQRNFYEPQIITTDNTFVCGNCDVVIGIVNNTVYDPLQPELDS

SEQ ID NO: 13489 - protein, 1147 aa, Artificial Sequence; identical to SEQ ID NO: 13452
  SARS-CoV-2/Portugal/PT0034/2020__EPI_ISL_418019 spike protein (1-1147)(N914C_S1123C)

SEQ ID NO: 13490 - protein, 1147 aa, Artificial Sequence; identical to SEQ ID NO: 13444
  SARS-CoV-2/Iceland/202/2020__EPI_ISL_417750 spike protein (1-1147)(N914C_S1123C)

SEQ ID NO: 13491 - protein, 1147 aa, Artificial Sequence
  SARS-CoV-2/USA/WA-UW261/2020__EPI_ISL_418046 spike protein (1-1147)(N914C_S1123C)
MFVFLVLLPLVSSQCVNLTTRTQLPPAYTNSFTRGVYYPDKVFRSSVLHSTQDLFLPFFSNVTWFHAIHVSGTNGTKRFDNPVLPFNDGVYFASTEKSNIIRGWIFGTTLDSKTQSLLIVNNATNVVIKVCEFQFCNDPFLGVYYHKNNKSWMESEFRVYSSANNCTFEYVSQPFLMDLEGKQGNFKNLREFVFKNIDGYFKIYSKHTPINLVRDLPQGFSALEPLVDLPIGINITRFQTLLALHRSYLTPGDSSSGWTAGAAAYYVGYLQPRTFLLKYNENGTITDAVDCALDPLSETKCTLKSFTVEKGIYQTSNFRVQPTESIVRFPNITNLCPFGEVFNATRFTSVYAWNRKRISNCVADYSVLYNSASFSTFKCYGVSPTKLNDLCFTNVYADSFVIRGDEVRQIAPGQTGKIADYNYKLPDDFTGCVIAWNSNNLDSKVGGNYNYLYRLFRKSNLKPFERDISTEIYQAGSTPCNGVEGFNCYFPLQSYGFQPTNGVGYQPYRVVVLSFELLHAPATVCGPKKSTNLVKNKCVNFNFNGLTGTGVLTESNKKFLPFQQFGRDIADTTDAVRDPQTLEILDITPCSFGGVSVITPGTNTSNQVAVLYQDVNCTEVPVAIHADQLTPTWRVYSTGSNVFQTRAGCLIGAEHVNNSYECDIPIGAGICASYQTQTNSPRRARSVASQSIIAYTMSLGAENSVAYSNNSIAIPTNFTISVTTEILPVSMTKTSVDCTMYICGDSTECSNLLLQYGSFCTQLNRALTGIAVEQDKNTQEVFAQVKQIYKTPPIKDFGGFNFSQILPDPSKPSKRSFIEDLLFNKVTLADAGFIKQYGDCLGDIAARDLICAQKFNGLTVLPPLLTDEMIAQYTSALLAGTITSGWTFGAGAALQIPFAMQMAYRFNGIGVTQCVLYENQKLIANQFNSAIGKIQDSLSSTASALGKLQDVVNQNAQALNTLVKQLSSNFGAISSVLNDILSRLDKVEAEVQIDRLITGRLQSLQTYVTQQLIRAAEIRASANLAATKMSECVLGQSKRVDFCGKGYHLMSFPQSAPHGVVFLHVTYVPAQEKNFTTAPAICHDGKAHFPREGVFVSNGTHWFVTQRNFYEPQIITTDNTFVCGNCDVVIGIVNNTVYDPLQPELDS

SEQ ID NO: 13492 - protein, 1147 aa, Artificial Sequence
  SARS-CoV-2/Portugal/PT0035/2020__EPI_ISL_418020 spike protein (1-1147)(N914C_S1123C)
MFVFLVLLPLVSSQCVNLTTRTQLPPAYTNSFTRGVYYPDKVFRSSVLHSTQDLFLPFFSNVTWFHAIHVSGTNGTKRFDNPVLPFNDGVYFASTEKSNIIRGWIFGTTLDSKTQSLLIVNNATNVVIKVCEFQFCNDPFLGVYYHKNNKSWMESEFRVYSSANNCTFEYVSQPFLMDLEGKQGNFKNLREFVFKNIDGYFKIYSKHTPINLVRDLPQGFSALEPLVDLPIGINITRFQTLLALHRSYLTPGDSSSGWTAGAAAYYVGYLQPRTFLLKYNENGTITDAVDCALDPLSETKCTLKSFTVEKGIYQTSNFRVQPTESIVRFPNITNLCPFGEVFNATRFASVYAWNRKRISNCVADYSVLYNSASFSTFKCYGVSPTKLNDLCFTNVYADSFVIRGDEVRQIAPGQTGKIADYNYKLPDDFTGCVIAWNSNNLDSKVGGNYNYLYRLFRKSNLKPFERDISTEIYQAGSTPCNGVEGFNCYFPLQSYGFQPTNGVGYQPYRVVVLSFELLHAPATVCGPKKSTNLVKNKCVNFNFNGLTGTGVLTESNKKFLPFQQFGRDIADTTDAVRDPQTLEILDITPCSFGGVSVITPGTNTSNQVAVLYQDVNCTEVPVAIHADQLTPTWRVYSTGSNVFQTRAGCLIGAEHVNNSYECDIPIGAGICASYQTQTNSPRRARSVASQSIIAYTMSLGAENSVAYSNNSIAIPTNFTISVTTEILPVSMTKTSVDCTMYICGDSTECSNLLLQYGSFCTQLNRALTGIAVEQDKNTQEVFAQVKQIYKTPPIKDFGGFNFSQILPDPSKPSKRSFIEDLLFNKVTLADAGFIKQYGDCLGDISARDLICAQKFNGLTVLPPLLTDEMIAQYTSALLAGTITSGWTFGAGAALQIPFAMQMAYRFNGIGVTQCVLYENQKLIANQFNSAIGKIQDSLSSTASALGKLQDVVNQNAQALNTLVKQLSSNFGAISSVLNDILSRLDKVEAEVQIDRLITGRLQSLQTYVTQQLIRAAEIRASANLAATKMSECVLGQSKRVDFCGKGYHLMSFPQSAPHGVVFLHVTYVPAQEKNFTTAPAICHDGKAHFPREGVFVSNGTHWFVTQRNFYEPQIITTDNTFVCGNCDVVIGIVNNTVYDPLQPELDS

SEQ ID NO: 13493 - protein, 1147 aa, Artificial Sequence
  SARS-CoV-2/USA/NY-NYUMC7/2020__EPI_ISL_418192 spike protein (1-1147)(N914C_S1123C)
MFVFLVLLPLVSSQCVNLTTRTQLPPAYTNSFTRGVYYPDKVFRSSVLHSTQDLFLPFFSNVTWFHAIHVSGTNGTKRFDNPVLPFNDGVYFASTEKSNIIRGWIFGTTLDSKTQSLLIVNNATNVVIKVCEFQFCNDPFLGVYHHKNNKSWMESEFRVYSSANNCTFEYVSQPFLMDLEGKQGNFKNLREFVFKNIDGYFKIYSKHTPINLVRDLPQGFSALEPLVDLPIGINITRFQTLLALHRSYLTPGDSSSGWTAGAAAYYVGYLQPRTFLLKYNENGTITDAVDCALDPLSETKCTLKSFTVEKGIYQTSNFRVQPTESIVRFPNITNLCPFGEVFNATRFASVYAWNRKRISNCVADYSVLYNSASFSTFKCYGVSPTKLNDLCFTNVYADSFVIRGDEVRQIAPGQTGKIADYNYKLPDDFTGCVIAWNSNNLDSKVGGNYNYLYRLFRKSNLKPFERDISTEIYQAGSTPCNGVEGFNCYFPLQSYGFQPTNGVGYQPYRVVVLSFELLHAPATVCGPKKSTNLVKNKCVNFNFNGLTGTGVLTESNKKFLPFQQFGRDIADTTDAVRDPQTLEILDITPCSFGGVSVITPGTNTSNQVAVLYQGVNCTEVPVAIHADQLTPTWRVYSTGSNVFQTRAGCLIGAEHVNNSYECDIPIGAGICASYQTQTNSPRRARSVASQSIIAYTMSLGAENSVAYSNNSIAIPTNFTISVTTEILPVSMTKTSVDCTMYICGDSTECSNLLLQYGSFCTQLNRALTGIAVEQDKNTQEVFAQVKQIYKTPPIKDFGGFNFSQILPDPSKPSKRSFIEDLLFNKVTLADAGFIKQYGDCLGDIAARDLICAQKFNGLTVLPPLLTDEMIAQYTSALLAGTITSGWTFGAGAALQIPFAMQMAYRFNGIGVTQCVLYENQKLIANQFNSAIGKIQDSLSSTASALGKLQDVVNQNAQALNTLVKQLSSNFGAISSVLNDILSRLDKVEAEVQIDRLITGRLQSLQTYVTQQLIRAAEIRASANLAATKMSECVLGQSKRVDFCGKGYHLMSFPQSAPHGVVFLHVTYVPAQEKNFTTAPAICHDGKAHFPREGVFVSNGTHWFVTQRNFYEPQIITTDNTFVCGNCDVVIGIVNNTVYDPLQPELDS

SEQ ID NO: 13494 - protein, 1147 aa, Artificial Sequence
  SARS-CoV-2/Iceland/189/2020__EPI_ISL_417709 spike protein (1-1147)(N914C_S1123C)
MFVFLVLLPLVSSQCVNLTTRTQLPPAYTNSFTRGVYYPDKVFRSSVLHSTQDLFLPFFSNVTWFHAIHVSGTNGTKRFDNPVLPFNDGVYFASTEKSNIIRGWIFGTTLDSKTQSLLIVNNATNVVIKVCEFQFCNDPFLGVYYHKNNKSWMESEFRVYSSANNCTFEYVSQPFLMDLEGKQGNFKNLREFVFKNIDGYFKIYSKHTPINLVRDLPQGFSALEPLVDLPIGINITRFQTLLALHRSYLTPGDSSSGWTAGAAAYYVGYLQPRTFLLKYNENGTITDAVDCALDPLSETKCTLKSFTVEKGIYQTSNFRVQPTESIVRFPNITNLCPFGEVFNATRFASVYAWNRKRISNCVADYSVLYNSASFSTFKCYGVSPTKLNDLCFTNVYADSFVIRGDEVRQIAPGQTGKIADYNYKLPDDFTGCVIAWNSNNLDSKVGGNYNYLYRLFRKSNLKPFERDISTEIYQAGSTPCNGVEGFNCYFPLQSYGFQPTNGVGYQPYRVVVLSFELLHAPATVCGPKKSTNLVKNKCVNFNFNGLTGTGVLTESNKKFLPFQQFGRDIADTTDAVRDPQTLEILDITPCSFGGVSVITPGTNTSNQVAVLYQGVNCTEVPVAIHADQLTPTWRVYSTGSNVFQTRAGCLIGAEHVNNSYECDIPIGAGICASYQTQTNSPRRARSVASQSIIAYTMSLGAENSVAYSNNSIAIPTNFTISVTTEILPVSMTKTSVDCTMYICGDSTECSNLLLQYGSFCTQLNRALTGIAVEQDKNTQEVFAQVKQIYKTPPIKDFGGFNFSQILPDPSKPSKRSFIEDLLFNKVTLADAGFTKQYGDCLGDIAARDLICAQKFNGLTVLPPLLTDEMIAQYTSALLAGTITSGWTFGAGAALQIPFAMQMAYRFNGIGVTQCVLYENQKLIANQFNSAIGKIQDSLSSTASALGKLQDVVNQNAQALNTLVKQLSSNFGAISSVLNDILSRLDKVEAEVQIDRLITGRLQSLQTYVTQQLIRAAEIRASANLAATKMSECVLGQSKRVDFCGKGYHLMSFPQSAPHGVVFLHVTYVPAQEKNFTTAPAICHDGKAHFPREGVFVSNGTHWFVTQRNFYEPQIITTDNTFVCGNCDVVIGIVNNTVYDPLQPELDS

SEQ ID NO: 13495 - protein, 1147 aa, Artificial Sequence
  SARS-CoV-2/Australia/NSW56/2020__EPI_ISL_417408 spike protein (1-1147)(N914C_S1123C)
MFVFLVLLPLVSSQCVNLTTRTQLPPAYTNSFTRGVYYPDKVFRSSVLHSTQDLFLPFFSNVTWFHAIHVSGTNGTKRFDNPVLPFNDGVYFASTEKSNIIRGWIFGTTLDSKTQSLLIVNNATNVVIKVCEFQFCNDPFLGVYYHKNNKSWMESEFRVYSSANNCTFEYVSQPFLMDLEGKQGNFKNLREFVFKNIDGYFKIYSKHTPINLVRDLPQGFSALEPLVDLPIGINITRFQTLLALHRSYLTPGDSSSGWTAGAAAYYVGYLQPRTFLLKYNENGTITDAVDCALDPLSETKCTLKSFTVEKGIYQTSNFRVQPTESIVRFPNITNLCPFGEVFNATRFASVYAWNRKRISNCVADYSVLYNSASFSTFKCYGVSPTKLNDLCFTNVYADSFVIRGDEVRQIAPGQTGKIADYNYKLPDDFTGCVIAWNSNNLDSKVGGNYNYLYRLFRKSNLKPFERDISTEIYQAGSTPCNGVEGFNCYFPLQSYGFQPTNGVGYQPYRVVVLSFELLHAPATVCGPKKSTNLVKNKCVNFNFNGLTGTGVLTESNKKFLPFQQFGRDIADTTDAVRDPQTLEILDITPCSFGGVSVITPGTNTSNQVAVLYQDVNCTEVPVAIHADQLTPTWRVYSTGSNVFQTRAGCLIGAEHVNNSYECDIPIGAGICASYQTQTNSPRRARSVASQSIIAYTMSLGAENSVAYSNNSIAIPTNFTISVTTEILPVSMTKTSVDCTMYICGDSTECSNLLLQYGSFCTQLNRALTGIAVEQDKNTQEVFAQVKQIYKTPPIKDFGGFNFSQILPDSSKPSKRSFIEDLLFNKVTLADAGFIKQYGDCLGDIAARDLICAQKFNGLTVLPPLLTDEMIAQYTSALLAGTITSGWTFGAGAALQIPFAMQMAYRFNGIGVTQCVLYENQKLIANQFNSAIGKIQDSLSSTASALGKLQDVVNQNAQALNTLVKQLSSNFGAISSVLNDILSRLDKVEAEVQIDRLITGRLQSLQTYVTQQLIRAAEIRASANLAATKMSECVLGQSKRVDFCGKGYHLMSFPQSAPHGVVFLHVTYVPAQEKNFTTAPAICHDGKAHFPREGVFVSNGTHWFVTQRNFYEPQIITTDNTFVCGNCDVVIGIVNNTVYDPLQPELDS

SEQ ID NO: 13496 - protein, 1147 aa, Artificial Sequence
  SARS-CoV-2/Iceland/280/2020__EPI_ISL_417608 spike protein (1-1147)(N914C_S1123C)
MFVFLVLLPLVSSQCVNLTTRTQLPPAYTNSFTRGVYYPDKVFRSSVLHSTQDLFLPFFSNVTWFHAIHVSGTNGTKRFDNPVLPFNDGVYFASTEKSNIIRGWIFGTTLDSKTQSLLIVNNATNVVIKVCEFQFCNDPFLGVYYHKNNKSWMESEFRVYSSANNCTFEYVSQPFLMDLEGKQGNFKNLREFVFKNIDGYFKIYSKHTPINLVRDLPQGFSALEPLVDLPIGINITRFQTLLALHRSYLTPGDSSSGWTAGAAAYYVGYLQPRTFLLKYNENGTITDAVDCALDPLSETKCTLKSFTVEKGIYQTSNFRVQPTESIVRFPNITNLCPFGEVFNATRFASVYAWNRKRISNCVADYSVLYNSASFSTFKCYGVSPTKLNDLCFTNVYADSFVIRGDEVRQIAPGQTGKIADYNYKLPDDFTGCVIAWNSNNLDSKVGGNYNYLYRLFRKSNLKPFERDISTEIYQAGSTPCNGVEGFNCYFPLQSYGFQPTNGVGYQPYRVVVLSFELLHAPATVCGPKKSTNLVKNKCVNFNFNGLTGTGVLTESNKKFLPFQQFGRDIADTTDAVRDPQTLEILDITPCSFGGVSVITPGTNTSNQVAVLYQGVNCTEVPVAIHADQLTPTWRVYSTGSNVFQTRAGCLIGAEHVNNSYECDIPIGAGICASYHTQTNSPRRARSVASQSIIAYTMSLGAENSVAYSNNSIAIPTNFTISVTTEILPVSMTKTSVDCTMYICGDSTECSNLLLQYGSFCTQLNRALTGIAVEQDKNTQEVFAQVKQIYKTPPIKDFGGFNFSQILPDPSKPSKRSFIEDLLFNKVTLADAGFIKQYGDCLGDIAARDLICAQKFNGLTVLPPLLTDEMIAQYTSALLAGTITSGWTFGAGAALQIPFAMQMAYRFNGIGVTQCVLYENQKLIANQFNSAIGKIQDSLSSTASALGKLQDVVNQNAQALNTLVKQLSSNFGAISSVLNDILSRLDKVEAEVQIDRLITGRLQSLQTYVTQQLIRAAEIRASANLAATKMSECVLGQSKRVDFCGKGYHLMSFPQSAPHGVVFLHVTYVPAQEKNFTTAPAICHDGKAHFPREGVFVSNGTHWFVTQRNFYEPQIITTDNTFVCGNCDVVIGIVNNTVYDPLQPELDS

SEQ ID NO: 13497 - protein, 1147 aa, Artificial Sequence; identical to SEQ ID NO: 13452
  SARS-CoV-2/Iceland/247/2020__EPI_ISL_417575 spike protein (1-1147)(N914C_S1123C)

SEQ ID NO: 13498 - protein, 1147 aa, Artificial Sequence
  SARS-CoV-2/Iceland/238/2020__EPI_ISL_417566 spike protein (1-1147)(N914C_S1123C)
MFVFLVLLPLVSSQCVNLTTRTQLPPAYTNSFTRGVYYPDKVFRSSVLHSTQDLFLPFFSNVTWFHAIHVSGTNGTKRFDNPVLPFNDGVYFASTEKSNIIRGWIFGTTLDSKTQSLLIVNNATNVVIKVCEFQFCNDPFLGVYYHKNNKSWMESEFRVYSSANNCTFEYVSQPFLMDLEGKQGNFKNLREFVFKNIDGYFKIYSKHTPINLVRDLPQGFSALEPLVDLPIGINITRFQTLLALHRSYLTPGDSSSGWTAGAAAYYVGYLQPRTFLLKYNENGTITDAVDCALDPLSETKCTLKSFTVEKGIYQTSNFRVQPTESIVRFPNITNLCPFGEVFNATRFASVYAWNRKRISNCVADYSVLYNSASFSTFKCYGVSPTKLNDLCFTNVYADSFVIRGDEVRQIAPGQTGKIADYNYKLPDDFTGCVIAWNSNNLDSKVGGNYNYLYRLFRKSNLKPFERDISTEIYQAGSTPCNGVEGFNCYFPLQSYGFQPTNGVGYQPYRVVVLSFELLHAPATVCGPKKSTNLVKNKCVNFNFNGLTGTGVLTESNKKFLPFQQFGRDIADTTDAVRDPQTLEILDITPCSFGGVSVITPGTNTSNQVAVLYQGVNCTEVPVAIHADQLTPTWRVYSTGSNVFQTRAGCLIGAEHVNNSYECDIPIGAGICASYQTQTNSPRRARSVASQSIIAYTMSLGAENSVAYSNNSIAIPTNFTISVTTEILPVSMTKTSVDCTMYICGDSTECSNLLLQYGSFCTQLNRALTGIAVEQDKNTQEVFAQVKQIYKTPPIKDFGGFNFSQILPDPSKPSKRSFIEDLLFNKVTLADVGFIKQYGDCLGDIAARDLICAQKFNGLTVLPPLLTDEMIAQYTSALLAGTITSGWTFGAGAALQIPFAMQMAYRFNGIGVTQCVLYENQKLIANQFNSAIGKIQDSLSSTASALGKLQDVVNQNAQALNTLVKQLSSNFGAISSVLNDILSRLDKVEAEVQIDRLITGRLQSLQTYVTQQLIRAAEIRASANLAATKMSECVLGQSKRVDFCGKGYHLMSFPQSAPHGVVFLHVTYVPAQEKNFTTAPAICHDGKAHFPREGVFVSNGTHWFVTQRNFYEPQIITTDNTFVCGNCDVVIGIVNNTVYDPLQPELDS

SEQ ID NO: 13499 - protein, 1147 aa, Artificial Sequence
  SARS-CoV-2/Greece/16/2020__EPI_ISL_418265 spike protein (1-1147)(N914C_S1123C)
MFVFLVLLPLVSSQCVNLTTRTQLPPAYTNSFTRGVYYPDKVFRSSVLHSTQDLFLPFFSNVTWFHAIHVSGTNGTKRFDNPVLPFNDGVYFASTEKSNIIRGWIFGTTLDSKTQSLLIVNNATNVVIKVCEFQFCNDPFLGVYYHKNNKSWMESEFRVYSSANNCTFEYVSQPFLMDLEGKQGNFKNLREFVFKNVDGYFKIYSKHTPINLVRDLPQGFSALEPLVDLPIGINITRFQTLLALHRSYLTPGDSSSGWTAGAAAYYVGYLQPRTFLLKYNENGTITDAVDCALDPLSETKCTLKSFTVEKGIYQTSNFRVQPTESIVRFPNITNLCPFGEVFNATRFASVYAWNRKRISNCVADYSVLYNSASFSTFKCYGVSPTKLNDLCFTNVYADSFVIRGDEVRQIAPGQTGKIADYNYKLPDDFTGCVIAWNSNNLDSKVGGNYNYLYRLFRKSNLKPFERDISTEIYQAGSTPCNGVEGFNCYFPLQSYGFQPTNGVGYQPYRVVVLSFELLHAPATVCGPKKSTNLVKNKCVNFNFNGLTGTGVLTESNKKFLPFQQFGRDIADTTDAVRDPQTLEILDITPCSFGGVSVITPGTNTSNQVAVLYQDVNCTEVPVAIHADQLTPTWRVYSTGSNVFQTRAGCLIGAEHVNNSYECDIPIGAGICASYQTQTNSPRRARSVASQSIIAYTMSLGAENSVAYSNNSIAIPTNFTISVTTEILPVSMTKTSVDCTMYICGDSTECSNLLLQYGSFCTQLNRALTGIAVEQDKNTQEVFAQVKQIYKTPPIKDFGGFNFSQILPDPSKPSKRSFIEDLLFNKVTLADAGFIKQYGDCLGDIAARDLICAQKFNGLTVLPPLLTDEMIAQYTSALLAGTITSGWTFGAGAALQIPFAMQMAYRFNGIGVTQCVLYENQKLIANQFNSAIGKIQDSLSSTASALGKLQDVVNQNAQALNTLVKQLSSNFGAISSVLNDILSRLDKVEAEVQIDRLITGRLQSLQTYVTQQLIRAAEIRASANLAATKMSECVLGQSKRVDFCGKGYHLMSFPQSAPHGVVFLHVTYVPAQEKNFTTAPAICHDGKAHFPREGVFVSNGTHWFVTQRNFYEPQIITTDNTFVCGNCDVVIGIVNNTVYDPLQPELDS

SEQ ID NO: 13500 - protein, 1147 aa, Artificial Sequence
  SARS-CoV-2/Iceland/319/2020__EPI_ISL_417648 spike protein (1-1147)(N914C_S1123C)
MFVFLVLLPLVSSQCVNLTTRTQLPPAYTNSFTRGVYYPDKVFRSSVLHSTQDLFLPFFSNVTWFHAIHVSGTNGTKRFDNPVLPFNDGVYFASTEKSNIIRGWIFGTTLDSKTQSLLIVNNATNVVIKVCEFQFCNDPFLGVYYHKNNKSWMESEFRVYSSANNCTFEYVSQPFLIDLEGKQGNFKNLREFVFKNIDGYFKIYSKHTPINLVRDLPQGFSALEPLVDLPIGINITRFQTLLALHRSYLTPGDSSSGWTAGAAAYYVGYLQPRTFLLKYNENGTITDAVDCALDPLSETKCTLKSFTVEKGIYQTSNFRVQPTESIVRFPNITNLCPFGEVFNATRFASVYAWNRKRISNCVADYSVLYNSASFSTFKCYGVSPTKLNDLCFTNVYADSFVIRGDEVRQIAPGQTGKIADYNYKLPDDFTGCVIAWNSNNLDSKVGGNYNYLYRLFRKSNLKPFERDISTEIYQAGSTPCNGVEGFNCYFPLQSYGFQPTNGVGYQPYRVVVLSFELLHAPATVCGPKKSTNLVKNKCVNFNFNGLTGTGVLTESNKKFLPFQQFGRDIADTTDAVRDPQTLEILDITPCSFGGVSVITPGTNTSNQVAVLYQGVNCTEVPVAIHADQLTPTWRVYSTGSNVFQTRAGCLIGAEHVNNSYECDIPIGAGICASYQTQTNSPRRARSVASQSIIAYTMSLGAENSVAYSNNSIAIPTNFTISVTTEILPVSMTKTSVDCTMYICGDSTECSNLLLQYGSFCTQLNRALTGIAVEQDKNTQEVFAQVKQIYKTPPIKDFGGFNFSQILPDPSKPSKRSFIEDLLFNKVTLADAGFIKQYGDCLGDIAARDLICAQKFNGLTVLPPLLTDEMIAQYTSALLAGTITSGWTFGAGAALQIPFAMQMAYRFNGIGVTQCVLYENQKLIANQFNSAIGKIQDSLSSTASALGKLQDVVNQNAQALNTLVKQLSSNFGAISSVLNDILSRLDKVEAEVQIDRLITGRLQSLQTYVTQQLIRAAEIRASANLAATKMSECVLGQSKRVDFCGKGYHLMSFPQSAPHGVVFLHVTYVPAQEKNFTTAPAICHDGKAHFPREGVFVSNGTHWFVTQRNFYEPQIITTDNTFVCGNCDVVIGIVNNTVYDPLQPELDS

SEQ ID NO: 13501 - protein, 1147 aa, Artificial Sequence
  SARS-CoV-2/Congo/94/2020__EPI_ISL_417947 spike protein (1-1147)(N914C_S1123C)
MFVFLVLLPLVSSQCVNLTTRTQLPPAYTNSFTRGVYYPDKVFRSSVLHSTQDLFLPFFSNVTWFHAIHVSGTNGTKRFDNPVLPFNDGVYFASTEKSNIIRGWIFGTTLDSKTQSLLIVNNATNVVIKVCEFQFCNDPFLGVYYHKNNKSWMESEFRVYSSANNCTFEYVSQPFLMDLEGKQGNFKNLREFVFKNIDGYFKIYSKHTPINLVRDLPQGFSALEPLVDLPIGINITRFQTLLALHRSYLTPGDSSSGWTAGAAAYYVGYLQPRTFLLKYNENGTITDAVDCALDPLSETKCTLKSFTVEKGIYQTSNFRVQPTESIVRFPNITNLCPFGEVFNATRFASVYAWNRKRISNCVADYSVLYNSASFSTFKCYGVSPTKLNDLCFTNVYADSFVIRGDEVRQIAPGQTGKIADYNYKLPDDFTGCVIAWNSNNLDSKVGGNYNYLYRLFRKSNLKPFERDISTEIYQAGSTPCNGVEGFNCYFPLQSYGFQPTNGVGYQPYRVVVLSFELLHAPATVCGPKKSTNLVKNKCVNFNFNGLTGTGVLTESNKKFLPFQQFGRDIADTTDAVRDPQTLEILDITPCSFGGVSVITPGTNTSNQVAVLYQGVNCTEVPVAIHADQLTPTWRVYSTGSNVFQTRAGCLIGAEHVNNSYECDIPIGAGICASYQTQTNSPRRARSVASQSIIAYTMSLGAENSVAYSNNSIAIPTNFTISVTTEILPVSMTKTSVDCTMYICGDSTECSNLLLQYGSFCTQLNRALTGIAVEQDKNTQEVFAQVKQIYKTPPIKDFGGFNFSQILPDPSKPSKRSFIEDILFNKVTLADAGFIKQYGDCLGDIAARDLICAQKFNGLTVLPPLLTDEMIAQYTSALLAGTITSGWTFGAGAALQIPFAMQMAYRFNGIGVTQCVLYENQKLIANQFNSAIGKIQDSLSSTASALGKLQDVVNQNAQALNTLVKQLSSNFGAISSVLNDILSRLDKVEAEVQIDRLITGRLQSLQTYVTQQLIRAAEIRASANLAATKMSECVLGQSKRVDFCGKGYHLMSFPQSAPHGVVFLHVTYVPAQEKNFTTAPAICHDGKAHFPREGVFVSNGTHWFVTQRNFYEPQIITTDNTFVCGNCDVVIGIVNNTVYDPLQPELDS

SEQ ID NO: 13502 - protein, 1147 aa, Artificial Sequence
  SARS-CoV-2/Congo/158/2020__EPI_ISL_417950 spike protein (1-1147)(N914C_S1123C)
MFVFLVLLPLVSSQCVNLTTRTQLPPAYTNSFTRGVYYPDKVFRSSVLHSTQDLFLPFFSNVTWFHAIHVSGTNGTKRFDNPVLPFNDGVYFASTEKSNIIRGWIFGTTLDSKTQSLLIVNNATNVVIKVCEFQFCNDPFLGVYYHKNNKSWMESEFRVYSSANNCTFEYVSQPFLMDLEGKQGNFKNLREFVFKNIDGYFKIYSKHTPINLVRDLPQGFSALEPLVDLPIGINITRFQTLLALHRSYLTPGDSSSGWTAGAAAYYVGYLQPRTFLLKYNENGTITDAVDCALDPLSETKCTLKSFTVEKGIYQTSNFRVQPTESIVRFPNITNLCPFGEVFNATRFASVYAWNRKRISNCVADYSVLYNSASFSTFKCYGVSPTKLNDLCFTNVYADSFVIRGDEVRQIAPGQTGKIADYNYKLPDDFTGCVIAWNSNNLDSKVGGNYNYLYRLFRKSNLKPFERDISTEIYQAGSTPCNGVEGFNCYFPLQSYGFQPTNGVGYQPYRVVVLSFELLHAPATVCGPKKSTNLVKNKCVNFNFNGLTGTGVLTESNKKFLPFQQFGRDIADTTDAVRDPQTLEILDITPCSFGGVSVITPGTNTSNQVAVLYQDVNCTEVPVAIHADQLTPTWRVYSTGSNVFQTRAGCLIGAEHVNNSYECDIPIGAGICASYQTQTNSPRRARSVASQSIIAYTMSLGAENSVAYSNNSIAIPTNFTISVTTEILPVSMTKTSVDCTMYICGDSTECSNLLLQYGSFCTQLNRALTGIAVEQDKNTQEVFAQVKQIYKTPPIKDFGGFNFSQILPDPSKPSKRSFIEDLLFNKVTLADAGFIKQYGDCLGDIAARDLICAQKFNGLTVLPPLLTDEMIAQYTSALLAGTITSGWTFGAGAALQIPFAMQMAYRFNGIGVTQCVLYENQKLIANQFNSAIGKIQDSLSSTASALGKLQDVVNQNAQALNTLVKQLSSNFGAISSVLNDILSRLDKVEAEVQIDRLITGRLQSLQTYVTQQLIRAAEIRASANLAATKMSECVLGQSKRVDFCGKGYHLMSFPQSAPHGVVFLHVTYVPAQEKNFTTAPAICHDGKAHFPREGVFVSNGTHWFVTQRNFYEPQIITTDNTFLCGNCDVVIGIVNNTVYDPLQPELDS

SEQ ID NO: 13503 - protein, 1147 aa, Artificial Sequence
  SARS-CoV-2/USA/UT-00034/2020__EPI_ISL_417977 spike protein (1-1147)(N914C_S1123C)
MFVFLVLLPLVSSQCVNLTTRTQLPPAYTNSFTRGVYYPDKVFRSSVLHSTQDLFLPFFSNVTWFHAIHVSGTNGTKRFDNPVLPFNDGVYFASTEKSNIIRGWIFGTTLDSKTQSLLIVNNATNVVIKVCEFQFCNDPFLGVYYYKNNKSWMESEFRVYSSANNCTFEYVSQPFLMDLEGKQGNFKNLREFVFKNIDGYFKIYSKHTPINLVRDLPQGFSALEPLVDLPIGINITRFQTLLALHRSYLTPGDSSSGWTAGAAAYYVGYLQPRTFLLKYNENGTITDAVDCALDPLSETKCTLKSFTVEKGIYQTSNFRVQPTESIVRFPNITNLCPFGEVFNATRFASVYAWNRKRISNCVADYSVLYNSASFSTFKCYGVSPTKLNDLCFTNVYADSFVIRGDEVRQIAPGQTGKIADYNYKLPDDFTGCVIAWNSNNLDSKVGGNYNYLYRLFRKSNLKPFERDISTEIYQAGSTPCNGVEGFNCYFPLQSYGFQPTNGVGYQPYRVVVLSFELLHAPATVCGPKKSTNLVKNKCVNFNFNGLTGTGVLTESNKKFLPFQQFGRDIADTTDAVRDPQTLEILDITPCSFGGVSVITPGTNTSNQVAVLYQGVNCTEVPVAIHADQLTPTWRVYSTGSNVFQTRAGCLIGAEHVNNSYECDIPIGAGICASYQTQTNSPRRARSVASQSIIAYTMSLGAENSVAYSNNSIAIPTNFTISVTTEILPVSMTKTSVDCTMYICGDSTECSNLLLQYGSFCTQLNRALTGIAVEQDKNTQEVFAQVKQIYKTPPIKDFGGFNFSQILPDPSKPSKRSFIEDLLFNKVTLADAGFIKQYGDCLGDIAARDLICAQKFNGLTVLPPLLTDEMIAQYTSALLAGTITSGWTFGAGAALQIPFAMQMAYRFNGIGVTQCVLYENQKLIANQFNSAIGKIQDSLSSTASALGKLQDVVNQNAQALNTLVKQLSSNFGAISSVLNDILSRLDKVEAEVQIDRLITGRLQSLQTYVTQQLIRAAEIRASANLAATKMSECVLGQSKRVDFCGKGYHLMSFPQSAPHGVVFLHVTYVPAQEKNFTTAPAICHDGKAHFPREGVFVSNGTHWFVTQRNFYEPQIITTDNTFVCGNCDVVIGIVNNTVYDPLQPELDS

SEQ ID NO: 13504 - protein, 1147 aa, Artificial Sequence
  SARS-CoV-2/USA/UT-00033/2020__EPI_ISL_417976 spike protein (1-1147)(N914C_S1123C)
MFVFLVLLPLVSSQCVNLTTRTQLPPAYTNSFTRGVYYPDKVFRSSVLHSTQDLFLPFFSNVTWFHAIHVSGTNGTKRFDNPVLPFNDGVYFASTEKSNIIRGWIFGTTLDSKTQSLLIVNNATNVVIKVCEFQFCNDPFLGVYYHKNNKSWMESEFRVYSSANNCTFEYVSQPFLMDLEGKQGNFKNLREFVFKNIDGYFKIYSKHTPINLVRDLPQGFSALEPLVDLPIGINITRFQTLLALHRSYLTPGDSSSGLTAGAAAYYVGYLQPRTFLLKYNENGTITDAVDCALDPLSETKCTLKSFTVEKGIYQTSNFRVQPTESIVRFPNITNLCPFGEVFNATRFASVYAWNRKRISNCVADYSVLYNSASFSTFKCYGVSPTKLNDLCFTNVYADSFVIRGDEVRQIAPGQTGKIADYNYKLPDDFTGCVIAWNSNNLDSKVGGNYNYLYRLFRKSNLKPFERDISTEIYQAGSTPCNGVEGFNCYFPLQSYGFQPTNGVGYQPYRVVVLSFELLHAPATVCGPKKSTNLVKNKCVNFNFNGLTGTGVLTESNKKFLPFQQFGRDIADTTDAVRDPQTLEILDITPCSFGGVSVITPGTNTSNQVAVLYQGVNCTEVPVAIHADQLTPTWRVYSTGSNVFQTRAGCLIGAEHVNNSYECDIPIGAGICASYQTQTNSPRRARSVASQSIIAYTMSLGAENSVAYSNNSIAIPTNFTISVTTEILPVSMTKTSVDCTMYICGDSTECSNLLLQYGSFCTQLNRALTGIAVEQDKNTQEVFAQVKQIYKTPPIKDFGGFNFSQILPDPSKPSKRSFIEDLLFNKVTLADAGFIKQYGDCLGDIAARDLICAQKFNGLTVLPPLLTDEMIAQYTSALLAGTITSGWTFGAGAALQIPFAMQMAYRFNGIGVTQCVLYENQKLIANQFNSAIGKIQDSLSSTASALGKLQDVVNQNAQALNTLVKQLSSNFGAISSVLNDILSRLDKVEAEVQIDRLITGRLQSLQTYVTQQLIRAAEIRASANLAATKMSECVLGQSKRVDFCGKGYHLMSFPQSAPHGVVFLHVTYVPAQEKNFTTAPAICHDGKAHFPREGVFVSNGTHWFVTQRNFYEPQIITTDNTFVCGNCDVVIGIVNNTVYDPLQPELDS

SEQ ID NO: 13505 - protein, 1147 aa, Artificial Sequence
  SARS-CoV-2/USA/WI-13/2020__EPI_ISL_417516 spike protein (1-1147)(N914C_S1123C)
MFVFLVLLPLVSSQCVNLTTRTQLPPAYTNSFTRGVYYPDKVFRSSVLHSTQDLFLPFFSNVTWFHAIHVSGTNGTKRFDNPVLPFNDGVYFASTEKSNIIRGWIFGTTLDSKTQSLLIVNNATNVVIKVCEFQFCNDPFLGVYYHKNNKSWMESEFRVYSSANNCTFEYVSQPFLMDLEGKQGNFKNLREFVFKNIDGYFKIYSKHTPINLVRDLPQGFSALEPLVDLPIGINITRFQTLLALHRSYLTPGDSSSGWTAGAAAYYVGYLQPRTFLLKYNENGTITDAVDCALDPLSETKCTLKSFTVEKGIYQTSNFRVLPTESIVRFPNITNLCPFGEVFNATRFASVYAWNRKRISNCVADYSVLYNSASFSTFKCYGVSPTKLNDLCFTNVYADSFVIRGDEVRQIAPGQTGKIADYNYKLPDDFTGCVIAWNSNNLDSKVGGNYNYLYRLFRKSNLKPFERDISTEIYQAGSTPCNGVEGFNCYFPLQSYGFQPTNGVGYQPYRVVVLSFELLHAPATVCGPKKSTNLVKNKCVNFNFNGLTGTGVLTESNKKFLPFQQFGRDIADTTDAVRDPQTLEILDITPCSFGGVSVITPGTNTSNQVAVLYQGVNCTEVPVAIHADQLTPTWRVYSTGSNVFQTRAGCLIGAEHVNNSYECDIPIGAGICASYQTQTNSPRRARSVASQSIIAYTMSLGAENSVAYSNNSIAIPTNFTISVTTEILPVSMTKTSVDCTMYICGDSTECSNLLLQYGSFCTQLNRALTGIAVEQDKNTQEVFAQVKQIYKTPPIKDFGGFNFSQILPDPSKPSKRSFIEDLLFNKVTLADAGFIKQYGDCLGDIAARDLICAQKFNGLTVLPPLLTDEMIAQYTSALLAGTITSGWTFGAGAALQIPFAMQMAYRFNGIGVTQCVLYENQKLIANQFNSAIGKIQDSLSSTASALGKLQDVVNQNAQALNTLVKQLSSNFGAISSVLNDILSRLDKVEAEVQIDRLITGRLQSLQTYVTQQLIRAAEIRASANLAATKMSECVLGQSKRVDFCGKGYHLMSFPQSAPHGVVFLHVTYVPAQEKNFTTAPAICHDGKAHFPREGVFVSNGTHWFVTQRNFYEPQIITTDNTFVCGNCDVVIGIVNNTVYDPLQPELDS

SEQ ID NO: 13506 - protein, 1146 aa, Artificial Sequence
  SARS-CoV-2/India/1-27/2020__EPI_ISL_413522 spike protein (1-1146)(N913C_S1122C)
MFVFLVLLPLVSSQCVNLTTRTQLPPAYTNSFTRGVYYPDKVFRSSVLHSTQDLFLPFFSNVTWFHAIHVSGTNGTKRFDNPVLPFNDGVYFASTEKSNIIRGWIFGTTLDSKTQSLLIVNNATNVVIKVCEFQFCNDPFLGVYHKNNKSWMESEFRVYSSANNCTFEYVSQPFLMDLEGKQGNFKNLREFVFKNIDGYFKIYSKHTPINLVRDLPQGFSALEPLVDLPIGINITRFQTLLALHRSYLTPGDSSSGWTAGAAAYYVGYLQPRTFLLKYNENGTITDAVDCALDPLSETKCTLKSFTVEKGIYQTSNFRVQPTESIVRFPNITNLCPFGEVFNATRFASVYAWNRKRISNCVADYSVLYNSASFSTFKCYGVSPTKLNDLCFTNVYADSFVIRGDEVIQIAPGQTGKIADYNYKLPDDFTGCVIAWNSNNLDSKVGGNYNYLYRLFRKSNLKPFERDISTEIYQAGSTPCNGVEGFNCYFPLQSYGFQPTNGVGYQPYRVVVLSFELLHAPATVCGPKKSTNLVKNKCVNFNFNGLTGTGVLTESNKKFLPFQQFGRDIADTTDAVRDPQTLEILDITPCSFGGVSVITPGTNTSNQVAVLYQDVNCTEVPVAIHADQLTPTWRVYSTGSNVFQTRAGCLIGAEHVNNSYECDIPIGAGICASYQTQTNSPRRARSVASQSIIAYTMSLGAENSVAYSNNSIAIPTNFTISVTTEILPVSMTKTSVDCTMYICGDSTECSNLLLQYGSFCTQLNRALTGIAVEQDKNTQEVFAQVKQIYKTPPIKDFGGFNFSQILPDPSKPSKRSFIEDLLFNKVTLADAGFIKQYGDCLGDIAARDLICAQKFNGLTVLPPLLTDEMIAQYTSALLAGTITSGWTFGAGAALQIPFAMQMAYRFNGIGVTQCVLYENQKLIANQFNSAIGKIQDSLSSTASALGKLQDVVNQNAQALNTLVKQLSSNFGAISSVLNDILSRLDKVEAEVQIDRLITGRLQSLQTYVTQQLIRAAEIRASANLAATKMSECVLGQSKRVDFCGKGYHLMSFPQSAPHGVVFLHVTYVPAQEKNFTTAPAICHDGKAHFPREGVFVSNGTHWFVTQRNFYEPQIITTDNTFVCGNCDVVIGIVNNTVYDPLQPELDS

SEQ ID NO: 13507 - protein, 1141 aa, Artificial Sequence
  SARS-CoV-2/pangolin/Guangxi/P4L/2017__EPI_ISL_410538 spike protein (1-1141)(N908C_S1117C)
MFVFLFVLPLVSSQCVNLTTRTGIPPGYTNSSTRGVYYPDKVFRSSILHLTQDLFLPFFSNVTWFNTINYQGGFKKFDNPVLPFNDGVYFASTEKSNIIRGWIFGTTLDARTQSLLIVNNATNVVIKVCEFQFCTDPFLGVYYHNNNKTWVENEFRVYSSANNCTFEYISQPFLMDLEGKQGNFKNLREFVFKNVDGYFKIYSKHTPIDLVRDLPRGFAALEPLVDLPIGINITRFQTLLALHRSYLTPGNLESGWTTGAAAYYVGYLQQRTFLLSYNQNGTITDAVDCSLDPLSETKCTLKSLTVEKGIYQTSNFRVQPTISIVRFPNITNLCPFGEVFNASKFASVYAWNRKRISNCVADYSVLYNSTSFSTFKCYGVSPTKLNDLCFTNVYADSFVVKGDEVRQIAPGQTGVIADYNYKLPDDFTGCVIAWNSVKQDALTGGNYGYLYRLFRKSKLKPFERDISTEIYQAGSTPCNGQVGLNCYYPLERYGFHPTTGVNYQPFRVVVLSFELLNGPATVCGPKLSTTLVKDKCVNFNFNGLTGTGVLTTSKKQFLPFQQFGRDISDTTDAVRDPQTLEILDITPCSFGGVSVITPGTNTSNQVAVLYQDVNCTEVPMAIHAEQLTPAWRVYSAGANVFQTRAGCLVGAEHVNNSYECDIPVGAGICASYHSMSSLRSVNQRSIIAYTMSLGAENSVAYSNNSIAIPTNFTISVTTEILPVSMTKTSVDCTMYICGDSIECSNLLLQYGSFCTQLNRALTGIAVEQDKNTQEVFAQVKQIYKTPPIKDFGGFNFSQILPDPSKPSKRSFIEDLLFNKVTLADAGFIKQYGDCLGDIAARDLICAQKFNGLTVLPPLLTDEMIAQYTSALLAGTITSGWTFGAGAALQIPFAMQMAYRFNGIGVTQCVLYENQKLIANQFNSAIGKIQDSLSSTASALGKLQDVVNQNAQALNTLVKQLSSNFGAISSVLNDILSRLDKVEAEVQIDRLITGRLQSLQTYVTQQLIRAAEIRASANLAATKMSECVLGQSKRVDFCGKGYHLMSFPQSAPHGVVFLHVTYVPAQEKNFTTAPAICHEGKAHFPREGVFVSNGTHWFITQRNFYEPQIITTDNTFVCGSCDVVIGIVNNTVYDPLQPELDS

SEQ ID NO: 13508 - protein, 1141 aa, Artificial Sequence
  SARS-CoV-2/pangolin/Guangxi/P5L/2017__EPI_ISL_410540 spike protein (1-1141)(N908C_S1117C)
MFVFLFVLPLVSSQCVNLTTRTGIPPGYTNSSTRGVYYPDKVFRSSILHLTQDLFLPFFSNVTWFNTINYQGGFKKFDNPVLPFNDGVYFASTEKSNIIRGWIFGTTLDARTQSLLIVNNATNVVIKVCEFQFCTDPFLGVYYHNNNKTWVENEFRVYSSANNCTFEYISQPFLMDLEGKQGNFKNLREFVFKNVDGYFKIYSKHTPIDLVRDLPRGFAALEPLVDLPIGINITRFQTLLALHRSYLTPGKLESGWTTGAAAYYVGYLQQRTFLLSYNQNGTITDAVDCSLDPLSETKCTLKSLTVEKGIYQTSNFRVQPTISIVRFPNITNLCPFGEVFNASKFASVYAWNRKRISNCVADYSVLYNSTSFSTFKCYGVSPTKLNDLCFTNVYADSFVVKGDEVRQIAPGQTGVIADYNYKLPDDFTGCVIAWNSVKQDALTGGNYGYLYRLFRKSKLKPFERDISTEIYQAGSTPCNGQVGLNCYYPLERYGFHPTTGVNYQPFRVVVLSFELLNGPATVCGPKLSTTLVKDKCVNFNFNGLTGTGVLTTSKKQFLPFQQFGRDISDTTDAVRDPQTLEILDITPCSFGGVSVITPGTNTSNQVAVLYQDVNCTEVPMAIHAEQLTPAWRVYSAGANVFQTRAGCLVGAEHVNNSYECDIPVGAGICASYHSMSSFRSVNQRSIIAYTMSLGAENSVAYSNNSIAIPTNFTISVTTEILPVSMTKTSVDCTMYICGDSIECSNLLLQYGSFCTQLNRALTGIAVEQDKNTQEVFAQVKQIYKTPPIKDFGGFNFSQILPDPSKPSKRSFIEDLLFNKVTLADAGFIKQYGDCLGDIAARDLICAQKFNGLTVLPPLLTDEMIAQYTSALLAGTITSGWTFGAGAALQIPFAMQMAYRFNGIGVTQCVLYENQKLIANQFNSAIGKIQDSLSSTASALGKLQDVVNQNAQALNTLVKQLSSNFGAISSVLNDILSRLDKVEAEVQIDRLITGRLQSLQTYVTQQLIRAAEIRASANLAATKMSECVLGQSKRVDFCGKGYHLMSFPQSAPHGVVFLHVTYVPAQEKNFTTAPAICHEGKAHFPREGVFVSNGTHWFITQRNFYEPQIITTDNTFVCGSCDVVIGIVNNTVYDPLQPELDS

SEQ ID NO: 13509 - protein, 1141 aa, Artificial Sequence
  SARS-CoV-2/pangolin/Guangxi/P5E/2017__EPI_ISL_410541 spike protein (1-1141)(N908C_S1117C)
MFVFLFVLPLVSSQCVNLTTRTGIPPGYTNSSTRGVYYPDKVFRSSILHLTQDLFLPFFSNVTWFNTITYQGGSKKFDNPVLPFNDGVYFASTEKSNIIRGWIFGTTLDARTQSLLIVNNATNVVIKVCEFQFCTDPFLGVYYHNNNKTWVENEFRVYSSANNCTFEYISQPFLMDLEGKQGNFKNLREFVFKNVDGYFKIYSKHTPIDLVRDLPRGFAALEPLVDLPIGINITRFQTLLALHRSYLTPGKLESGWTTGAAAYYVGYLQQRTFLLSYNQNGTITDAVDCSLDPLSETKCTLKSLTVEKGIYQTSNFRVQPTISIVRFPNITNLCPFGEVFNASKFASVYAWNRKRISNCVADYSVLYNSTSFSTFKCYGVSPTKLNDLCFTNVYADSFVVKGDEVRQIAPGQTGVIADYNYKLPDDFTGCVIAWNSVKQDALTGDNYGYLYRLFRKSKLKPFERDISTEIYQAGSTPCNGQVGLNCYYPLERYGFHPTTGVNYQPFRVVVLSFELLNGPATVCGPKLSTTLVKDKCVNFNFNGLTGTGVLTTSKKQFLPFQQFGRDISDTTDAVRDPQTLEILDITPCSFGGVSVITPGTNTSNQVAVLYQDVNCTEVPMAIHAEQLTPAWRVYSAGANVFQTRAGCLVGAEHVNNSYECDIPVGAGICASYHSMSSFRSVNQRSIIAYTMSLGAENSVAYSNNSIAIPTNFTISVTTEILPVSMTKTSVDCTMYICGDSIECSNLLLQYGSFCTQLNRALTGIAVEQDKNTQEVFAQVKQIYKTPPIKDFGGFNFSQILPDPSKPSKRSFIEDLLFNKVTLADAGFIKQYGDCLGDIAARDLICAQKFNGLTVLPPLLTDEMIAQYTSALLAGTITSGWTFGAGAALQIPFAMQMAYRFNGIGVTQCVLYENQKLIANQFNSAIGKIQDSLSSTASALGKLQDVVNQNAQALNTLVKQLSSNFGAISSVLNDILSRLDKVEAEVQIDRLITGRLQSLQTYVTQQLIRAAEIRASANLAATKMSECVLGQSKRVDFCGKGYHLMSFPQSAPHGVVFLHVTYVPAQEKNFTTAPAICHEGKAHFPREGVFVSNGTHWFITQRNFYEPQIITTDNTFVCGSCDVVIGIVNNTVYDPLQPELDS

SEQ ID NO: 13510 - protein, 1139 aa, Artificial Sequence
  SARS-CoV-2/pangolin/Guangxi/P1E/2017__EPI_ISL_410539 spike protein (1-1139)(N906C_S1115C)
MFVFLFVLPLVSSQCVNLTTRTGIQPGYTNSSTRGVYYPDKVFRSSILHLTQDLFLPFFSNVTWFNTINYQGGFKKFDNPVLPFNDGVYFASTEKSNIIRGWIFGTTLDARTQSLLIVNNATNVVIKVCEFQFCTDPFLGVYYHNNNKTWVENEFRVYSSANNCTFEYISQPFLMDLEGKQGNFKNLREFVFKNVDGYFKIYSKHTPIDLVRDLPRGFAALEPLVDLPIGINITRFQTLLALHRSYLTPGKLESGWTTGAAAYYVGYLQQRTFLLSYNQNGTITDAVDCSLDPLSETKCTLKSLTVEKGIYQTSNFRVQPTISIVRFPNITNLCPFGEVFNASKFASVYAWNRKRISNCVADYSVLYNSTSFSTFKCYGVSPTKLNDLCFTNVYADSFVVKGDEVRQIAPGQTGVIADYNYKLPDDFTGCVIAWNSVKQDALTGGNYLYRLFRKSKLKPFERDISTEIYQAGSTPCNGQVGLNCYYPLERYGFHPTTGVNYQPFRVVVLSFELLNGPATVCGPKLSTTLVKDKCVNFNFNGLTGTGVLTTSKKQFLPFQQFGRDISDTTDAVRDPQTLEILDITPCSFGGVSVITPGTNTSNQVAVLYQDVNCTEVPMAIHAEQLTPAWRVYSAGANVFQTRAGCLVGAEHVNNSYECDIPVGAGICASYHSMSSLRSVNQRSIIAYTMSLGAENSVAYSNNSIAIPTNFTISVTTEILPVSMTKTSVDCTMYICGDSIECSNLLLQYGSFCTQLNRALTGIAVEQDKNTQEVFAQVKQIYKTPPIKDFGGFNFSQILPDPSKPSKRSFIEDLLFNKVTLADAGFIKQYGDCLGDIAARDLICAQKFNGLTVLPPLLTDEMIAQYTSALLAGTITSGWTFGAGAALQIPFAMQMAYRFNGIGVTQCVLYENQKLIANQFNSAIGKIQDSLSSTASALGKLQDVVNQNAQALNTLVKQLSSNFGAISSVLNDILSRLDKVEAEVQIDRLITGRLQSLQTYVTQQLIRAAEIRASANLAATKMSECVLGQSKRVDFCGKGYHLMSFPQSAPHGVVFLHVTYVPAQEKNFTTAPAICHEGKAHFPREGVFVSNGTHWFITQRNFYEPQIITTDNTFVCGSCDVVIGIVNNTVYDPLQPELDS

SEQ ID NO: 13511 - RNA, 381 nt, Artificial Sequence
  SARS-CoV-2/Wuhan/WIV05/2019__EPI_ISL_402128 spike protein CDS gc (1148-1273)
uucaaggaggagcucgacaaguacuucaagaaccacaccagccccgacgucgaccugggggacaucuccggcaucaacgccagcguggugaacauccagaaggagaucgaccgccugaacgaggucgccaagaaccucaacgagucccugaucgaccugcaggagcucgggaaguacgagcaguacaucaaguggccgugguacaucuggcugggcuucaucgccggccugaucgcgaucgugauggugaccaucaugcucugcugcaugaccagcugcugcuccugccugaaggggugcugcagcugcggcuccugcugcaaguucgacgaggacgacagcgagcccguccugaagggggugaagcuccacuacacguga

SEQ ID NO: 13512 - RNA, 669 nt, Artificial Sequence
  SARS-CoV-2/Wuhan/WIV05/2019__EPI_ISL_402128 spike protein CDS gc (319-541)
cgggugcagcccaccgaguccaucguccgcuucccgaacaucaccaaccugugccccuucggcgagguguucaacgccacccgguucgccagcgucuacgccuggaaccgcaagcggaucuccaacugcguggcggacuacagcgugcuguacaacuccgccagcuucuccacguucaagugcuacggcgucagccccaccaagcucaacgaccugugcuucaccaacguguacgccgacuccuucgugauccgcggggacgagguccggcagaucgcccccggccagaccgggaagaucgccgacuacaacuacaagcugccggacgacuucacgggcugcgugaucgcguggaacagcaacaaccucgacuccaaggucgggggcaacuacaacuaccuguaccgccuguuccgcaagagcaaccucaagcccuucgagcgggacaucuccaccgagaucuaccaggccggcagcacccccugcaacgggguggagggcuucaacugcuacuucccccugcaguccuacggguuccagccgaccaacggcgugggguaccagcccuaccggguggucgugcugagcuucgagcuccugcacgcccccgccacggugugcggccccaagaaguccaccaaccuggucaagaacaagugcgugaacuuc

SEQ ID NO: 13513 - RNA, 603 nt, Artificial Sequence
  SARS-CoV-2/Wuhan/WIV05/2019__EPI_ISL_402128 spike protein CDS gc (329-529)
uucccgaacaucaccaaccugugccccuucggcgagguguucaacgccacccgguucgccagcgucuacgccuggaaccgcaagcggaucuccaacugcguggcggacuacagcgugcuguacaacuccgccagcuucuccacguucaagugcuacggcgucagccccaccaagcucaacgaccugugcuucaccaacguguacgccgacuccuucgugauccgcggggacgagguccggcagaucgcccccggccagaccgggaagaucgccgacuacaacuacaagcugccggacgacuucacgggcugcgugaucgcguggaacagcaacaaccucgacuccaaggucgggggcaacuacaacuaccuguaccgccuguuccgcaagagcaaccucaagcccuucgagcgggacaucuccaccgagaucuaccaggccggcagcacccccugcaacgggguggagggcuucaacugcuacuucccccugcaguccuacggguuccagccgaccaacggcgugggguaccagcccuaccggguggucgugcugagcuucgagcuccugcacgcccccgccacggugugcggccccaagaag

SEQ ID NO: 13514 - RNA, 3633 nt, Artificial Sequence
  SARS-CoV-2/Wuhan/WIV05/2019__EPI_ISL_402128 spike protein CDS gc (1-1211)(N914C_S1123C)
auguucguguuccugguccuccugccccuggugagcucccagugcgugaaccucaccacccgcacgcagcugccgcccgccuacaccaacagcuucacccggggcgucuacuaccccgacaagguguuccgcuccagcgugcugcacuccacccaggaccucuuccugcccuucuucagcaacgucacgugguuccacgccauccacguguccgggaccaacggcaccaagcgguucgacaacccggugcugcccuucaacgacggggucuacuucgcgagcaccgagaaguccaacaucauccgcggcuggaucuucgggacgacccucgacagcaagacccagucccugcugaucgugaacaacgccaccaacguggucaucaaggugugcgaguuccaguucugcaacgaccccuuccucggcguguacuaccacaagaacaacaagagcuggauggaguccgaguuccgggucuacagcuccgccaacaacugcacguucgaguacgugagccagcccuuccugauggaccuggagggcaagcaggggaacuucaagaaccuccgcgaguucguguucaagaacaucgacggcuacuucaagaucuacuccaagcacaccccgaucaaccugguccgggaccugccccagggguucagcgcccucgagccccugguggaccugcccaucggcaucaacaucacccgcuuccagacccuccuggcccugcaccgguccuaccucacgccgggggacagcagcuccggcuggaccgcgggcgccgccgccuacuacgugggguaccugcagccccgcaccuuccugcucaaguacaacgagaacggcaccaucacggacgcggucgacugcgcccuggacccccugagcgagaccaagugcacccucaaguccuucaccguggagaaggggaucuaccagacgagcaacuuccgggugcagcccaccgaguccaucguccgcuucccgaacaucaccaaccugugccccuucggcgagguguucaacgccacccgguucgccagcgucuacgccuggaaccgcaagcggaucuccaacugcguggcggacuacagcgugcuguacaacuccgccagcuucuccacguucaagugcuacggcgucagccccaccaagcucaacgaccugugcuucaccaacguguacgccgacuccuucgugauccgcggggacgagguccggcagaucgcccccggccagaccgggaagaucgccgacuacaacuacaagcugccggacgacuucacgggcugcgugaucgcguggaacagcaacaaccucgacuccaaggucgggggcaacuacaacuaccuguaccgccuguuccgcaagagcaaccucaagcccuucgagcgggacaucuccaccgagaucuaccaggccggcagcacccccugcaacgggguggagggcuucaacugcuacuucccccugcaguccuacggguuccagccgaccaacggcgugggguaccagcccuaccggguggucgugcugagcuucgagcuccugcacgcccccgccacggugugcggccccaagaaguccaccaaccuggucaagaacaagugcgugaacuucaacuucaacggccucaccgggaccggcgugcugaccgagagcaacaagaaguuccugccguuccagcaguucgggcgcgacaucgccgacacgaccgacgcgguccgcgacccccagacccuggagauccucgacaucacccccugcagcuucggcgggguguccgugaucacgccgggcaccaacaccagcaaccaggucgccgugcuguaccaggacgugaacugcaccgagguccccguggccauccacgccgaccagcugacgcccaccuggcggguguacuccaccggcagcaacgucuuccagacccgcgccgggugccucaucggcgcggagcacgugaacaacuccuacgagugcgacauccccaucggggccggcaucugcgccagcuaccagacgcagaccaacuccccgcggcgcgcccggagcguggcgucccagagcaucaucgccuacaccaugucccugggcgccgagaacagcgucgccuacuccaacaacagcaucgccauccccaccaacuucacgaucuccgugaccaccgagauccugcccgugagcaugaccaagacgagcgucgacugcaccauguacaucugcggggacuccaccgagugcagcaaccuccugcugcaguacggcuccuucugcacccagcucaaccgcgcgcugacggggaucgccguggagcaggacaagaacacccaggagguguucgcccaggucaagcagaucuacaagacgcccccgaucaaggacuucggcggguucaacuucagccagauccugcccgaccccuccaagcccagcaagcgguccuucaucgaggaccuccuguucaacaaggugacccuggccgacgccggcuucaucaagcaguacggcgacugccucggggacaucgcggcccgcgaccugaucugcgcccagaaguucaacggccugaccgugcucccgccccugcugaccgacgagaugaucgcccaguacaccagcgcccuccuggcggggaccaucacguccggcuggaccuucggggccggcgccgcccugcagauccccuucgcgaugcagauggccuaccgguucaacggcaucggggucacccagugcgugcucuacgagaaccagaagcugaucgccaaccaguucaacagcgccaucggcaagauccaggacucccugagcuccaccgccagcgcgcucgggaagcugcaggacguggucaaccagaacgcccaggcccugaacacgcucgugaagcagcuguccagcaacuucggcgccaucuccagcgugcugaacgacauccucucccgccuggacaaggucgaggccgaggugcagaucgaccggcugaucaccgggcgccuccagagccugcagaccuacgugacccagcagcugauccgggcggccgagauccgcgccagcgccaaccucgccgcgaccaagauguccgagugcguccugggccagagcaagcggguggacuucugcggcaagggguaccaccugauguccuucccccagagcgccccgcacggcguggucuuccuccacgugacguacguccccgcccaggagaagaacuucaccaccgcccccgcgaucugccacgacgggaaggcccacuucccccgcgagggcguguucguguccaacgggacccacugguucgucacgcagcggaacuucuacgagccgcagaucaucaccaccgacaacaccuucgugugcggcaacugcgacguggucaucggcaucgugaacaacacgguguacgacccccugcagcccgagcuggacuccuucaaggaggagcucgacaaguacuucaagaaccacaccagccccgacgucgaccugggggacaucuccggcaucaacgccagcguggugaacauccagaaggagaucgaccgccugaacgaggucgccaagaaccucaacgagucccugaucgaccugcaggagcucgggaaguacgagcaguacaucaag

SEQ ID NO: 13515 - RNA, 3441 nt, Artificial Sequence
  SARS-CoV-2/Wuhan/WIV05/2019__EPI_ISL_402128 spike protein CDS gc (1-1147)(N914C_S1123C)
auguucguguuccugguccuccugccccuggugagcucccagugcgugaaccucaccacccgcacgcagcugccgcccgccuacaccaacagcuucacccggggcgucuacuaccccgacaagguguuccgcuccagcgugcugcacuccacccaggaccucuuccugcccuucuucagcaacgucacgugguuccacgccauccacguguccgggaccaacggcaccaagcgguucgacaacccggugcugcccuucaacgacggggucuacuucgcgagcaccgagaaguccaacaucauccgcggcuggaucuucgggacgacccucgacagcaagacccagucccugcugaucgugaacaacgccaccaacguggucaucaaggugugcgaguuccaguucugcaacgaccccuuccucggcguguacuaccacaagaacaacaagagcuggauggaguccgaguuccgggucuacagcuccgccaacaacugcacguucgaguacgugagccagcccuuccugauggaccuggagggcaagcaggggaacuucaagaaccuccgcgaguucguguucaagaacaucgacggcuacuucaagaucuacuccaagcacaccccgaucaaccugguccgggaccugccccagggguucagcgcccucgagccccugguggaccugcccaucggcaucaacaucacccgcuuccagacccuccuggcccugcaccgguccuaccucacgccgggggacagcagcuccggcuggaccgcgggcgccgccgccuacuacgugggguaccugcagccccgcaccuuccugcucaaguacaacgagaacggcaccaucacggacgcggucgacugcgcccuggacccccugagcgagaccaagugcacccucaaguccuucaccguggagaaggggaucuaccagacgagcaacuuccgggugcagcccaccgaguccaucguccgcuucccgaacaucaccaaccugugccccuucggcgagguguucaacgccacccgguucgccagcgucuacgccuggaaccgcaagcggaucuccaacugcguggcggacuacagcgugcuguacaacuccgccagcuucuccacguucaagugcuacggcgucagccccaccaagcucaacgaccugugcuucaccaacguguacgccgacuccuucgugauccgcggggacgagguccggcagaucgcccccggccagaccgggaagaucgccgacuacaacuacaagcugccggacgacuucacgggcugcgugaucgcguggaacagcaacaaccucgacuccaaggucgggggcaacuacaacuaccuguaccgccuguuccgcaagagcaaccucaagcccuucgagcgggacaucuccaccgagaucuaccaggccggcagcacccccugcaacgggguggagggcuucaacugcuacuucccccugcaguccuacggguuccagccgaccaacggcgugggguaccagcccuaccggguggucgugcugagcuucgagcuccugcacgcccccgccacggugugcggccccaagaaguccaccaaccuggucaagaacaagugcgugaacuucaacuucaacggccucaccgggaccggcgugcugaccgagagcaacaagaaguuccugccguuccagcaguucgggcgcgacaucgccgacacgaccgacgcgguccgcgacccccagacccuggagauccucgacaucacccccugcagcuucggcgggguguccgugaucacgccgggcaccaacaccagcaaccaggucgccgugcuguaccaggacgugaacugcaccgagguccccguggccauccacgccgaccagcugacgcccaccuggcggguguacuccaccggcagcaacgucuuccagacccgcgccgggugccucaucggcgcggagcacgugaacaacuccuacgagugcgacauccccaucggggccggcaucugcgccagcuaccagacgcagaccaacuccccgcggcgcgcccggagcguggcgucccagagcaucaucgccuacaccaugucccugggcgccgagaacagcgucgccuacuccaacaacagcaucgccauccccaccaacuucacgaucuccgugaccaccgagauccugcccgugagcaugaccaagacgagcgucgacugcaccauguacaucugcggggacuccaccgagugcagcaaccuccugcugcaguacggcuccuucugcacccagcucaaccgcgcgcugacggggaucgccguggagcaggacaagaacacccaggagguguucgcccaggucaagcagaucuacaagacgcccccgaucaaggacuucggcggguucaacuucagccagauccugcccgaccccuccaagcccagcaagcgguccuucaucgaggaccuccuguucaacaaggugacccuggccgacgccggcuucaucaagcaguacggcgacugccucggggacaucgcggcccgcgaccugaucugcgcccagaaguucaacggccugaccgugcucccgccccugcugaccgacgagaugaucgcccaguacaccagcgcccuccuggcggggaccaucacguccggcuggaccuucggggccggcgccgcccugcagauccccuucgcgaugcagauggccuaccgguucaacggcaucggggucacccagugcgugcucuacgagaaccagaagcugaucgccaaccaguucaacagcgccaucggcaagauccaggacucccugagcuccaccgccagcgcgcucgggaagcugcaggacguggucaaccagaacgcccaggcccugaacacgcucgugaagcagcuguccagcaacuucggcgccaucuccagcgugcugaacgacauccucucccgccuggacaaggucgaggccgaggugcagaucgaccggcugaucaccgggcgccuccagagccugcagaccuacgugacccagcagcugauccgggcggccgagauccgcgccagcgccaaccucgccgcgaccaagauguccgagugcguccugggccagagcaagcggguggacuucugcggcaagggguaccaccugauguccuucccccagagcgccccgcacggcguggucuuccuccacgugacguacguccccgcccaggagaagaacuucaccaccgcccccgcgaucugccacgacgggaaggcccacuucccccgcgagggcguguucguguccaacgggacccacugguucgucacgcagcggaacuucuacgagccgcagaucaucaccaccgacaacaccuucgugugcggcaacugcgacguggucaucggcaucgugaacaacacgguguacgacccccugcagcccgagcuggacucc

SEQ ID NO: 13516 - RNA, 381 nt, Artificial Sequence
  SARS-CoV-2/Wuhan/WIV05/2019__EPI_ISL_402128 spike protein CDS gc mod (1148-1273)
uucaaagaggaacuggacaaguacuuuaagaaccacacaagccccgacguggaccugggcgauaucagcggaaucaaugccagcgucgugaacauccagaaagagaucgaccggcugaacgagguggccaagaaucugaacgagagccugaucgaccugcaagaacuggggaaguacgagcaguacaucaaguggcccugguacaucuggcugggcuuuaucgccggacugauugccaucgugauggucacaaucaugcuguguugcaugaccagcugcuguagcugccugaagggcuguuguagcuguggcagcugcugcaaguucgacgaggacgauucugagcccgugcugaagggcgugaaacugcacuacaccuga

SEQ ID NO: 13517 - RNA, 669 nt, Artificial Sequence
  SARS-CoV-2/Wuhan/WIV05/2019__EPI_ISL_402128 spike protein CDS gc mod (319-541)
cgggugcagcccaccgaauccaucgugcgguuccccaauaucaccaaucugugccccuucggcgagguguucaaugccaccagauucgccucuguguacgccuggaaccggaagcggaucagcaauugcguggccgacuacuccgugcuguacaacuccgccagcuucagcaccuucaagugcuacggcguguccccuaccaagcugaacgaccugugcuucacaaacguguacgccgacagcuucgugauccggggagaugaagugcggcagauugccccuggacagacaggcaagaucgccgacuacaacuacaagcugcccgacgacuucaccggcugugugauugccuggaacagcaacaaccuggacuccaaagucggcggcaacuacaauuaccuguaccggcuguuccggaaguccaaucugaagcccuucgagcgggacaucagcaccgaaaucuaucaggccggcagcaccccuugcaacggcguggaaggcuucaacugcuacuucccacugcaguccuacggcuuucagcccacaaauggcgugggcuaucagcccuacagagugguggugcugagcuucgaacugcugcaugcuccugccacagugugcggcccuaagaaaagcaccaaucucgugaagaacaaaugcgugaacuuc

SEQ ID NO: 13518 - RNA, 603 nt, Artificial Sequence
  SARS-CoV-2/Wuhan/WIV05/2019__EPI_ISL_402128 spike protein CDS gc mod (329-529)
uuccccaauaucaccaaucugugccccuucggcgagguguucaaugccaccagauucgccucuguguacgccuggaaccggaagcggaucagcaauugcguggccgacuacuccgugcuguacaacuccgccagcuucagcaccuucaagugcuacggcguguccccuaccaagcugaacgaccugugcuucacaaacguguacgccgacagcuucgugauccggggagaugaagugcggcagauugccccuggacagacaggcaagaucgccgacuacaacuacaagcugcccgacgacuucaccggcugugugauugccuggaacagcaacaaccuggacuccaaagucggcggcaacuacaauuaccuguaccggcuguuccggaaguccaaucugaagcccuucgagcgggacaucagcaccgaaaucuaucaggccggcagcaccccuugcaacggcguggaaggcuucaacugcuacuucccacugcaguccuacggcuuucagcccacaaauggcgugggcuaucagcccuacagagugguggugcugagcuucgaacugcugcaugcuccugccacagugugcggcccuaagaaa

SEQ ID NO: 13519 - RNA, 3633 nt, Artificial Sequence
  SARS-CoV-2/Wuhan/WIV05/2019__EPI_ISL_402128 spike protein CDS gc mod (1-1211)(N914C_S1123C)
auguucguguuucuggugcugcugccccugguguccagccagugugugaaccugaccaccagaacacagcugccuccagccuacaccaacagcuucaccagaggcguguacuaccccgacaagguguucagauccagcgugcugcacucuacccaggaccuguuccugccuuucuucagcaacgugaccugguuccacgccauccacguguccggcaccaauggcaccaagagauucgacaaccccgugcugcccuucaacgacgggguguacuuugccagcaccgagaaguccaacaucaucagaggcuggaucuucggcaccacacuggacagcaagacccagagccugcugaucgugaacaacgccaccaacguggucaucaaagugugcgaguuccaguucugcaacgaccccuuccugggcgucuacuaccacaagaacaacaagagcuggauggaaagcgaguuccggguguacagcagcgccaacaacugcaccuucgaguacgugucccagccuuuccugauggaccuggaaggcaagcagggcaacuucaagaaccugcgcgaguucguguucaagaacaucgacggcuacuucaaaaucuacagcaagcacaccccuaucaaccucgugcgggaucugccucagggcuucucugcucuggaaccccugguggaucugcccaucggcaucaacaucacccgguuucagacacugcuggcccugcacagaagcuaccugacaccuggcgauagcagcagcggauggacagcuggugccgccgcuuacuaugugggcuaccugcagccuagaaccuuccugcugaaguacaacgagaacggcaccaucaccgacgccguggauugugcucuggauccucugagcgagacaaagugcacccugaaguccuucaccguggaaaagggcaucuaccagaccagcaacuuccgggugcagcccaccgaauccaucgugcgguuccccaauaucaccaaucugugccccuucggcgagguguucaaugccaccagauucgccucuguguacgccuggaaccggaagcggaucagcaauugcguggccgacuacuccgugcuguacaacuccgccagcuucagcaccuucaagugcuacggcguguccccuaccaagcugaacgaccugugcuucacaaacguguacgccgacagcuucgugauccggggagaugaagugcggcagauugccccuggacagacaggcaagaucgccgacuacaacuacaagcugcccgacgacuucaccggcugugugauugccuggaacagcaacaaccuggacuccaaagucggcggcaacuacaauuaccuguaccggcuguuccggaaguccaaucugaagcccuucgagcgggacaucagcaccgaaaucuaucaggccggcagcaccccuugcaacggcguggaaggcuucaacugcuacuucccacugcaguccuacggcuuucagcccacaaauggcgugggcuaucagcccuacagagugguggugcugagcuucgaacugcugcaugcuccugccacagugugcggcccuaagaaaagcaccaaucucgugaagaacaaaugcgugaacuucaacuucaacggccugaccggcaccggcgugcugacagagagcaacaagaaguuccugccauuccagcaguuuggccgggauaucgccgauaccacagacgccguuagagauccccagacacuggaaauccuggacaucaccccaugcagcuucggcggagugucugugaucaccccuggcaccaacaccagcaaucagguggcagugcuguaccaggacgugaacuguaccgaagugcccguggccauucacgccgaucagcugacaccuacauggcggguguacuccaccggcagcaauguguuucagaccagagccggcugucugaucggagccgagcacgugaacaauagcuacgagugcgacauccccaucggcgcuggcaucugugccagcuaccagacacagacaaacagccccagacgggcuagaagcguggccagccagagcaucauugccuacacaaugucucugggcgccgagaacagcguggccuacuccaacaacucuaucgcuauccccaccaacuucaccaucagcgugaccaccgagauccugccuguguccaugaccaagaccagcguggacugcaccauguacaucugcggcgauuccaccgagugcuccaaccugcugcugcaguacggcagcuucugcacccagcugaauagagcccugacagggaucgccguggaacaggacaagaacacccaagagguguucgcccaagugaagcaaaucuacaagaccccuccuaucaaggacuucggcggcuucaauuucagccagauucugcccgauccuagcaagcccagcaagcggagcuucaucgaggaccugcuguucaacaaagugacacuggccgacgccggcuucaucaagcaguauggcgauugucugggcgacauugccgccagggaucugauuugcgcccagaaguuuaacggacugacagugcugccuccucugcugaccgaugagaugaucgcccaguacacaucugcccugcuggccggcacaaucacaagcggcuggacauuuggagcuggcgccgcucugcagauccccuuugcuaugcagauggccuaccgguucaacggcaucggagugacccagugcgugcuguacgagaaccagaagcugaucgccaaccaguucaacagcgccaucggcaagauccaggacagccugagcagcacagcaagcgcccugggaaagcugcaggacguggucaaccagaaugcccaggcacugaacacccuggucaagcagcuguccuccaacuucggcgccaucagcucugugcugaacgauauccugagcagacuggacaaggucgaggccgaggugcagaucgacagacugaucacaggcagacugcagagccuccagacauacgugacccagcagcugaucagagccgccgagauuagagccucugccaaucuggccgccaccaagaugucugagugugugcugggccagagcaagagaguggacuuuugcggcaagggcuaccaccugaugagcuucccucagucugccccucacggcgugguguuucugcacgugacauaugugcccgcucaagagaagaauuucaccaccgcuccagccaucugccacgacggcaaagcccacuuuccuagagaaggcguguucguguccaacggcacccauugguucgugacacagcggaacuucuacgagccccagaucaucaccaccgacaacaccuucguguguggcaacugcgacguugugaucggcauugugaacaauaccguguacgacccucugcagcccgagcuggacagcuucaaagaggaacuggacaaguacuuuaagaaccacacaagccccgacguggaccugggcgauaucagcggaaucaaugccagcgucgugaacauccagaaagagaucgaccggcugaacgagguggccaagaaucugaacgagagccugaucgaccugcaagaacuggggaaguacgagcaguacaucaag

SEQ ID NO: 13520 - RNA, 3441 nt, Artificial Sequence
  SARS-CoV-2/Wuhan/WIV05/2019__EPI_ISL_402128 spike protein CDS gc mod (1-1147)(N914C_S1123C)
auguucguguuucuggugcugcugccccugguguccagccagugugugaaccugaccaccagaacacagcugccuccagccuacaccaacagcuucaccagaggcguguacuaccccgacaagguguucagauccagcgugcugcacucuacccaggaccuguuccugccuuucuucagcaacgugaccugguuccacgccauccacguguccggcaccaauggcaccaagagauucgacaaccccgugcugcccuucaacgacgggguguacuuugccagcaccgagaaguccaacaucaucagaggcuggaucuucggcaccacacuggacagcaagacccagagccugcugaucgugaacaacgccaccaacguggucaucaaagugugcgaguuccaguucugcaacgaccccuuccugggcgucuacuaccacaagaacaacaagagcuggauggaaagcgaguuccggguguacagcagcgccaacaacugcaccuucgaguacgugucccagccuuuccugauggaccuggaaggcaagcagggcaacuucaagaaccugcgcgaguucguguucaagaacaucgacggcuacuucaaaaucuacagcaagcacaccccuaucaaccucgugcgggaucugccucagggcuucucugcucuggaaccccugguggaucugcccaucggcaucaacaucacccgguuucagacacugcuggcccugcacagaagcuaccugacaccuggcgauagcagcagcggauggacagcuggugccgccgcuuacuaugugggcuaccugcagccuagaaccuuccugcugaaguacaacgagaacggcaccaucaccgacgccguggauugugcucuggauccucugagcgagacaaagugcacccugaaguccuucaccguggaaaagggcaucuaccagaccagcaacuuccgggugcagcccaccgaauccaucgugcgguuccccaauaucaccaaucugugccccuucggcgagguguucaaugccaccagauucgccucuguguacgccuggaaccggaagcggaucagcaauugcguggccgacuacuccgugcuguacaacuccgccagcuucagcaccuucaagugcuacggcguguccccuaccaagcugaacgaccugugcuucacaaacguguacgccgacagcuucgugauccggggagaugaagugcggcagauugccccuggacagacaggcaagaucgccgacuacaacuacaagcugcccgacgacuucaccggcugugugauugccuggaacagcaacaaccuggacuccaaagucggcggcaacuacaauuaccuguaccggcuguuccggaaguccaaucugaagcccuucgagcgggacaucagcaccgaaaucuaucaggccggcagcaccccuugcaacggcguggaaggcuucaacugcuacuucccacugcaguccuacggcuuucagcccacaaauggcgugggcuaucagcccuacagagugguggugcugagcuucgaacugcugcaugcuccugccacagugugcggcccuaagaaaagcaccaaucucgugaagaacaaaugcgugaacuucaacuucaacggccugaccggcaccggcgugcugacagagagcaacaagaaguuccugccauuccagcaguuuggccgggauaucgccgauaccacagacgccguuagagauccccagacacuggaaauccuggacaucaccccaugcagcuucggcggagugucugugaucaccccuggcaccaacaccagcaaucagguggcagugcuguaccaggacgugaacuguaccgaagugcccguggccauucacgccgaucagcugacaccuacauggcggguguacuccaccggcagcaauguguuucagaccagagccggcugucugaucggagccgagcacgugaacaauagcuacgagugcgacauccccaucggcgcuggcaucugugccagcuaccagacacagacaaacagccccagacgggcuagaagcguggccagccagagcaucauugccuacacaaugucucugggcgccgagaacagcguggccuacuccaacaacucuaucgcuauccccaccaacuucaccaucagcgugaccaccgagauccugccuguguccaugaccaagaccagcguggacugcaccauguacaucugcggcgauuccaccgagugcuccaaccugcugcugcaguacggcagcuucugcacccagcugaauagagcccugacagggaucgccguggaacaggacaagaacacccaagagguguucgcccaagugaagcaaaucuacaagaccccuccuaucaaggacuucggcggcuucaauuucagccagauucugcccgauccuagcaagcccagcaagcggagcuucaucgaggaccugcuguucaacaaagugacacuggccgacgccggcuucaucaagcaguauggcgauugucugggcgacauugccgccagggaucugauuugcgcccagaaguuuaacggacugacagugcugccuccucugcugaccgaugagaugaucgcccaguacacaucugcccugcuggccggcacaaucacaagcggcuggacauuuggagcuggcgccgcucugcagauccccuuugcuaugcagauggccuaccgguucaacggcaucggagugacccagugcgugcuguacgagaaccagaagcugaucgccaaccaguucaacagcgccaucggcaagauccaggacagccugagcagcacagcaagcgcccugggaaagcugcaggacguggucaaccagaaugcccaggcacugaacacccuggucaagcagcuguccuccaacuucggcgccaucagcucugugcugaacgauauccugagcagacuggacaaggucgaggccgaggugcagaucgacagacugaucacaggcagacugcagagccuccagacauacgugacccagcagcugaucagagccgccgagauuagagccucugccaaucuggccgccaccaagaugucugagugugugcugggccagagcaagagaguggacuuuugcggcaagggcuaccaccugaugagcuucccucagucugccccucacggcgugguguuucugcacgugacauaugugcccgcucaagagaagaauuucaccaccgcuccagccaucugccacgacggcaaagcccacuuuccuagagaaggcguguucguguccaacggcacccauugguucgugacacagcggaacuucuacgagccccagaucaucaccaccgacaacaccuucguguguggcaacugcgacguugugaucggcauugugaacaauaccguguacgacccucugcagcccgagcuggacagc

SEQ ID NO: 13521 - protein, 1273 aa, Artificial Sequence
  SARS-CoV-2/Wuhan/WIV05/2019__EPI_ISL_402128 spike protein (1-1273)(N914C_S1123C)
MFVFLVLLPLVSSQCVNLTTRTQLPPAYTNSFTRGVYYPDKVFRSSVLHSTQDLFLPFFSNVTWFHAIHVSGTNGTKRFDNPVLPFNDGVYFASTEKSNIIRGWIFGTTLDSKTQSLLIVNNATNVVIKVCEFQFCNDPFLGVYYHKNNKSWMESEFRVYSSANNCTFEYVSQPFLMDLEGKQGNFKNLREFVFKNIDGYFKIYSKHTPINLVRDLPQGFSALEPLVDLPIGINITRFQTLLALHRSYLTPGDSSSGWTAGAAAYYVGYLQPRTFLLKYNENGTITDAVDCALDPLSETKCTLKSFTVEKGIYQTSNFRVQPTESIVRFPNITNLCPFGEVFNATRFASVYAWNRKRISNCVADYSVLYNSASFSTFKCYGVSPTKLNDLCFTNVYADSFVIRGDEVRQIAPGQTGKIADYNYKLPDDFTGCVIAWNSNNLDSKVGGNYNYLYRLFRKSNLKPFERDISTEIYQAGSTPCNGVEGFNCYFPLQSYGFQPTNGVGYQPYRVVVLSFELLHAPATVCGPKKSTNLVKNKCVNFNFNGLTGTGVLTESNKKFLPFQQFGRDIADTTDAVRDPQTLEILDITPCSFGGVSVITPGTNTSNQVAVLYQDVNCTEVPVAIHADQLTPTWRVYSTGSNVFQTRAGCLIGAEHVNNSYECDIPIGAGICASYQTQTNSPRRARSVASQSIIAYTMSLGAENSVAYSNNSIAIPTNFTISVTTEILPVSMTKTSVDCTMYICGDSTECSNLLLQYGSFCTQLNRALTGIAVEQDKNTQEVFAQVKQIYKTPPIKDFGGFNFSQILPDPSKPSKRSFIEDLLFNKVTLADAGFIKQYGDCLGDIAARDLICAQKFNGLTVLPPLLTDEMIAQYTSALLAGTITSGWTFGAGAALQIPFAMQMAYRFNGIGVTQCVLYENQKLIANQFNSAIGKIQDSLSSTASALGKLQDVVNQNAQALNTLVKQLSSNFGAISSVLNDILSRLDKVEAEVQIDRLITGRLQSLQTYVTQQLIRAAEIRASANLAATKMSECVLGQSKRVDFCGKGYHLMSFPQSAPHGVVFLHVTYVPAQEKNFTTAPAICHDGKAHFPREGVFVSNGTHWFVTQRNFYEPQIITTDNTFVCGNCDVVIGIVNNTVYDPLQPELDSFKEELDKYFKNHTSPDVDLGDISGINASVVNIQKEIDRLNEVAKNLNESLIDLQELGKYEQYIKWPWYIWLGFIAGLIAIVMVTIMLCCMTSCCSCLKGCCSCGSCCKFDEDDSEPVLKGVKLHYT

SEQ ID NO: 13522 - protein, 1269 aa, Artificial Sequence
  SARS-CoV-2/bat/Yunnan/RaTG13/2013__EPI_ISL_402131 spike protein (1-1273)(N910C_S1119C)
MFVFLVLLPLVSSQCVNLTTRTQLPPAYTNSSTRGVYYPDKVFRSSVLHLTQDLFLPFFSNVTWFHAIHVSGTNGIKRFDNPVLPFNDGVYFASTEKSNIIRGWIFGTTLDSKTQSLLIVNNATNVVIKVCEFQFCNDPFLGVYYHKNNKSWMESEFRVYSSANNCTFEYVSQPFLMDLEGKQGNFKNLREFVFKNIDGYFKIYSKHTPINLVRDLPPGFSALEPLVDLPIGINITRFQTLLALHRSYLTPGDSSSGWTAGAAAYYVGYLQPRTFLLKYNENGTITDAVDCALDPLSETKCTLKSFTVEKGIYQTSNFRVQPTDSIVRFPNITNLCPFGEVFNATTFASVYAWNRKRISNCVADYSVLYNSTSFSTFKCYGVSPTKLNDLCFTNVYADSFVITGDEVRQIAPGQTGKIADYNYKLPDDFTGCVIAWNSKHIDAKEGGNFNYLYRLFRKANLKPFERDISTEIYQAGSKPCNGQTGLNCYYPLYRYGFYPTDGVGHQPYRVVVLSFELLNAPATVCGPKKSTNLVKNKCVNFNFNGLTGTGVLTESNKKFLPFQQFGRDIADTTDAVRDPQTLEILDITPCSFGGVSVITPGTNASNQVAVLYQDVNCTEVPVAIHADQLTPTWRVYSTGSNVFQTRAGCLIGAEHVNNSYECDIPIGAGICASYQTQTNSRSVASQSIIAYTMSLGAENSVAYSNNSIAIPTNFTISVTTEILPVSMTKTSVDCTMYICGDSTECSNLLLQYGSFCTQLNRALTGIAVEQDKNTQEVFAQVKQIYKTPPIKDFGGFNFSQILPDPSKPSKRSFIEDLLFNKVTLADAGFIKQYGDCLGDIAARDLICAQKFNGLTVLPPLLTDEMIAQYTSALLAGTITSGWTFGAGAALQIPFAMQMAYRFNGIGVTQCVLYENQKLIANQFNSAIGKIQDSLSSTASALGKLQDVVNQNAQALNTLVKQLSSNFGAISSVLNDILSRLDKVEAEVQIDRLITGRLQSLQTYVTQQLIRAAEIRASANLAATKMSECVLGQSKRVDFCGKGYHLMSFPQSAPHGVVFLHVTYVPAQEKNFTTAPAICHDGKAHFPREGVFVSNGTHWFVTQRNFYEPQIITTDNTFVCGSCDVVIGIVNNTVYDPLQPELDSFKEELDKYFKNHTSPDVDLGDISGINASVVNIQKEIDRLNEVAKNLNESLIDLQELGKYEQYIKWPWYIWLGFIAGLIAIIMVTIMLCCMTSCCSCLKGCCSCGSCCKFDEDDSEPVLKGVKLHYT

SEQ ID NO: 13523 - protein, 1273 aa, Artificial Sequence
  SARS-CoV-2/Wuhan/HBCDC-HB-01/2019__EPI_ISL_402132 spike protein (1-1273)(N914C_S1123C)
MFVFLVLLPLVSSQCVNLTTRTQLPPAYTNSITRGVYYPDKVFRSSVLHSTQDLFLPFFSNVTWFHAIHVSGTNGTKRFDNPVLPFNDGVYFASTEKSNIIRGWIFGTTLDSKTQSLLIVNNATNVVIKVCEFQFCNDPFLGVYYHKNNKSWMESEFRVYSSANNCTFEYVSQPFLMDLEGKQGNFKNLREFVFKNIDGYFKIYSKHTPINLVRDLPQGFSALEPLVDLPIGINITRFQTLLALHRSYLTPGDSSSGWTAGAAAYYVGYLQPRTFLLKYNENGTITDAVDCALDPLSETKCTLKSFTVEKGIYQTSNFRVQPTESIVRFPNITNLCPFGEVFNATRFASVYAWNRKRISNCVADYSVLYNSASFSTFKCYGVSPTKLNDLCFTNVYADSFVIRGDEVRQIAPGQTGKIADYNYKLPDDFTGCVIAWNSNNLDSKVGGNYNYLYRLFRKSNLKPFERDISTEIYQAGSTPCNGVEGFNCYFPLQSYGFQPTNGVGYQPYRVVVLSFELLHAPATVCGPKKSTNLVKNKCVNFNFNGLTGTGVLTESNKKFLPFQQFGRDIADTTDAVRDPQTLEILDITPCSFGGVSVITPGTNTSNQVAVLYQDVNCTEVPVAIHADQLTPTWRVYSTGSNVFQTRAGCLIGAEHVNNSYECDIPIGAGICASYQTQTNSPRRARSVASQSIIAYTMSLGAENSVAYSNNSIAIPTNFTISVTTEILPVSMTKTSVDCTMYICGDSTECSNLLLQYGSFCTQLNRALTGIAVEQDKNTQEVFAQVKQIYKTPPIKDFGGFNFSQILPDPSKPSKRSFIEDLLFNKVTLADAGFIKQYGDCLGDIAARDLICAQKFNGLTVLPPLLTDEMIAQYTSALLAGTITSGWTFGAGAALQIPFAMQMAYRFNGIGVTQCVLYENQKLIANQFNSAIGKIQDSLSSTASALGKLQDVVNQNAQALNTLVKQLSSNFGAISSVLNDILSRLDKVEAEVQIDRLITGRLQSLQTYVTQQLIRAAEIRASANLAATKMSECVLGQSKRVDFCGKGYHLMSFPQSAPHGVVFLHVTYVPAQEKNFTTAPAICHDGKAHFPREGVFVSNGTHWFVTQRNFYEPQIITTDNTFVCGNCDVVIGIVNNTVYDPLQPELDSFKEELDKYFKNHTSPDVDLGDISGINASVVNIQKEIDRLNEVAKNLNESLIDLQELGKYEQYIKWPWYIWLGFIAGLIAIVMVTIMLCCMTSCCSCLKGCCSCGSCCKFDEDDSEPVLKGVKLHYT

SEQ ID NO: 13524 - protein, 1273 aa, Artificial Sequence
  SARS-CoV-2/Guangdong/20SF028/2020__EPI_ISL_403936 spike protein (1-1273)(N914C_S1123C)
MFVFLVLLPLVSSQCVNLTTRTQLPPAYTNSFTRGVYYPDKVFRSSVLYSTQDLFLPFFSNVTWFHAIHVSGTNGTKRFDNPVLPFNDGVYFASTEKSNIIRGWIFGTTLDSKTQSLLIVNNATNVVIKVCEFQFCNDPFLGVYYHKNNKSWMESEFRVYSSANNCTFEYVSQPFLMDLEGKQGNFKNLREFVFKNIDGYFKIYSKHTPINLVRDLPQGFSALEPLVDLPIGINITRFQTLLALHRSYLTPGDSSSGWTAGAAAYYVGYLQPRTFLLKYNENGTITDAVDCALDPLSETKCTLKSFTVEKGIYQTSNFRVQPTESIVRFPNITNLCPFGEVFNATRFASVYAWNRKRISNCVADYSVLYNSASFSTFKCYGVSPTKLNDLCFTNVYADSFVIRGDEVRQIAPGQTGKIADYNYKLPDDFTGCVIAWNSNNLDSKVGGNYNYLYRLFRKSNLKPFERDISTEIYQAGSTPCNGVEGFNCYFPLQSYGFQPTNGVGYQPYRVVVLSFELLHAPATVCGPKKSTNLVKNKCVNFNFNGLTGTGVLTESNKKFLPFQQFGRDIADTTDAVRDPQTLEILDITPCSFGGVSVITPGTNTSNQVAVLYQDVNCTEVPVAIHADQLTPTWRVYSTGSNVFQTRAGCLIGAEHVNNSYECDIPIGAGICASYQTQTNSPRRARSVASQSIIAYTMSLGAENSVAYSNNSIAIPTNFTISVTTEILPVSMTKTSVDCTMYICGDSTECSNLLLQYGSFCTQLNRALTGIAVEQDKNTQEVFAQVKQIYKTPPIKDFGGFNFSQILPDPSKPSKRSFIEDLLFNKVTLADAGFIKQYGDCLGDIAARDLICAQKFNGLTVLPPLLTDEMIAQYTSALLAGTITSGWTFGAGAALQIPFAMQMAYRFNGIGVTQCVLYENQKLIANQFNSAIGKIQDSLSSTASALGKLQDVVNQNAQALNTLVKQLSSNFGAISSVLNDILSRLDKVEAEVQIDRLITGRLQSLQTYVTQQLIRAAEIRASANLAATKMSECVLGQSKRVDFCGKGYHLMSFPQSAPHGVVFLHVTYVPAQEKNFTTAPAICHDGKAHFPREGVFVSNGTHWFVTQRNFYEPQIITTDNTFVCGNCDVVIGIVNNTVYDPLQPELDSFKEELDKYFKNHTSPDVDLGDISGINASVVNIQKEIDRLNEVAKNLNESLIDLQELGKYEQYIKWPWYIWLGFIAGLIAIVMVTIMLCCMTSCCSCLKGCCSCGSCCKFDEDDSEPVLKGVKLHYT

SEQ ID NO: 13525 - protein, 1273 aa, Artificial Sequence
  SARS-CoV-2/Shenzhen/SZTH-001/2020__EPI_ISL_406592 spike protein (1-1273)(N914C_S1123C)
MFVFLVLLPLVSSQCVNLTTRTQLPPAYTNSFTRGVYYPDKVFRSSVLHSTQDLFLPFFSNVTWFHAIHVSGTNGTKRFDNPVLPFNDGVYFASTEKSNIIRGWIFGTTLDSKTQSLLIVNNATNVVIKVCEFQFCNDPFLGVYYHKNNKSWMESEFRVYSSANNCTFEYVSQPFLMDLEGKQGNFKNLREFVFKNIDGYFKIYSKHTPINLVRDLPQGFSALEPLVDLPIGINITRFQTLLALHRSYLTPGDSSSGWTAGAAAYYVGYLQPRTFLLKYNENGTITDAVDCALDPLSETKCTLKSFTVEKGIYQTSNFRVQPTESIVRFPNITNLCPFGEVFNATRFASVYAWNRKRISNCVADYSVLYNSASFSTFKCYGVSPTKLNDLCFTNVYADSFVIRGDEVRQIAPGQTGKIADYNYKLPDDFTGCVIAWNSNNLDSKVGGNYNYLYRLFRKSNLKPFERDISTEIYQAGSTPCNGVEGFNCYFPLQSYGFQPTNGVGYQPYRVVVLSFELLHAPATVCGPKKSTNLVKNKCVNFNFNGLTGTGVLTESNKKFLPFQQFGRDIADTTDAVRDPQTLEILDITPCSFGGVSVITPGTNTSNQVAVLYQDVNCTEVPVAIHADQLTPTWRVYSTGSNVFQTRAGCLIGAEHVNNSYECDIPIGAGICASYQTQTNSPRRARSVASQSIIAYTMSLGAENSVAYSNNSIAIPTNFTISVTTEILPVSMTKTSVDCTMYICGDSTECSNLLLQYGSFCTQLNRALTGIAVEQDKNTQEVFAQVKQIYKTPPIKDFGGFNFSQILPDPSKPSKRSFIEDLLFNKVTLADAGFIKQYGDCLGDIAARDLICAQKFNGLTVLPPLLTDEMIAQYTSALLAGTITSGWTFGAGAALQIPFAMQMAYRFNGIGVTQCVLYENQKLIANQFNSAIGKIQDSLSSTASALGKLQDVVNQNAQALNTLVKQLSSNFGAISSVLNDILSRLDKVEAEVQIDRLITGRLQSLQTYVTQQLIRAAEIRASANLAATKMSECVLGQSKRVDFCGKGYHLMSFPQSAPHGVVFLHVTYVPAQEKNFTTAPAICHDGKAHFPREGVFVSNGTHWFVTQRNFYEPQIITTDNTFVCGNCDVLIGIVNNTVYDPLQPELDSFKEELDKYFKNHTSPDVDLGDISGINASVVNIQKEIDRLNEVAKNLNESLIDLQELGKYEQYIKWPWYIWLGFIAGLIAIVMVTIMLCCMTSCCSCLKGCCSCGSCCKFDEDDSGPVLKGVKLHYT

SEQ ID NO: 13526 - protein, 1273 aa, Artificial Sequence
  SARS-CoV-2/Shenzhen/SZTH-004/2020__EPI_ISL_406595 spike protein (1-1273)(N914C_S1123C)
MFVFLVLLPLVSSQCVNLTTRTQLPPAYTNSFTRGVYYPDKVFRSSVLHSTQDLFLPFFSNVTWFHAIHVSGTNGTKRFDNPVLPFNDGVYFASTEKSNIIRGWIFGTTLDSKTQSLLIVNNATNVVIKVCEFQFCNDPFLGVYYHKNNKSWMESEFRVYSSANNCTFEYVSQPFLMDLEGKQGNFKNLREFVFKNIDGYFKIYSKHTPINLVRDLPQGFSALEPLVDLPIGINITRFQTLLALHRSYLTPGDSSSGWTAGAAAYYVGYLQPRTFLLKYNENGTITDAVDCALDPLSETKCTLKSFTVEKGIYQTSNFRVQPTESIVRFPNITNLCPFGEVFNATRFASVYAWDRKRISNCVAYYSVLYNSASFSTFKCYGVSPTKLNDLCFTNVYADSFVIRGDEVRQIAPGQTGKIADYNYKLPDDFTGCVIAWNSNNLDSKVGGNYNYLYRLFRKSNLKPFERDISTEIYQAGSTPCNGVEGFNCYFPLQSYGFQPTNGVGYQPYRVVVLSFELLHAPATVCGPKKSTNLVKNKCVNFNFNGLTGTGVLTESNKKFLPFQQFGRDIADTTDAVRDPQTLEILDITPCSFGGVSVITPGTNTSNQVAVLYQDVNCTEVPVAIHADQLTPTWRVYSTGSNVFQTRAGCLIGAEHVNNSYECDIPIGAGICASYQTQTNSPRRARSVASQSIIAYTMSLGAENSVAYSNNSIAIPTNFTISVTTEILPVSMTKTSVDCTMYICGDSTECSNLLLQYGSFCTQLNRALTGIAVEQDKNTQEVFAQVKQIYKTPPIKDFGGFNFSQILPDPSKPSKRSFIEDLLFNKVTLADAGFIKQYGDCLGDIAARDLICAQKFNGLTVLPPLLTDEMIAQYTSALLAGTITSGWTFGAGAALQIPFAMQMAYRFNGIGVTQCVLYENQKLIANQFNSAIGKIQDSLSSTASALGKLQDVVNQNAQALNTLVKQLSSNFGAISSVLNDILSRLDKVEAEVQIDRLITGRLQSLQTYVTQQLIRAAEIRASANLAATKMSECVLGQSKRVDFCGKGYHLMSFPQSAPHGVVFLHVTYVPAQEKNFTTAPAICHDGKAHFPREGVFVSNGTHWFVTQRNFYEPQIITTDNTFVCGNCDVVIGIVNNTVYDPLQPELDSFKEELDKYFKNHTSPDVDLGDISGINASVVNIQKEIDRLNEVAKNLNESLIDLQELGKYEQYIKWPWYIWLGFIAGLIAIVMVTIMLCCMTSCCSCLKGCCSCGSCCKFDEDDSEPVLKGVKLHYT

SEQ ID NO: 13527 - protein, 1273 aa, Artificial Sequence
  SARS-CoV-2/France/IDF0372/2020__EPI_ISL_406596 spike protein (1-1273)(N914C_S1123C)
MFVFLVLLPLVSSQCVNLTTRTQLPPAYTNSFTRGVYYPDKVFRSSVLHSTQDLFLPFFSNVTWFHAIHVSGTNGTKRFDNPVLPFNDGVYFASTEKSNIIRGWIFGTTLDSKTQSLLIVNNATNVVIKVCEFQFCNDPFLGVYYHKNNKSWMESEFRVYSSANNCTFEYVSQPFLMDLEGKQGNFKNLREFVFKNIDGYFKIYSKHTPINLVRDLPQGFSALEPLVDLPIGINITRFQTLLALHRSYLTPGDSSSGWTAGAAAYYVGYLQPRTFLLKYNENGTITDAVDCALDPLSETKCTLKSFTVEKGIYQTSNFRVQPTESIVRFPNITNLCPFGEVFNATRFASVYAWNRKRISNCVADYSFLYNSASFSTFKCYGVSPTKLNDLCFTNVYADSFVIRGDEVRQIAPGQTGKIADYNYKLPDDFTGCVIAWNSNNLDSKVGGNYNYLYRLFRKSNLKPFERDISTEIYQAGSTPCNGVEGFNCYFPLQSYGFQPTNGVGYQPYRVVVLSFELLHAPATVCGPKKSTNLVKNKCVNFNFNGLTGTGVLTESNKKFLPFQQFGRDIADTTDAVRDPQTLEILDITPCSFGGVSVITPGTNTSNQVAVLYQDVNCTEVPVAIHADQLTPTWRVYSTGSNVFQTRAGCLIGAEHVNNSYECDIPIGAGICASYQTQTNSPRRARSVASQSIIAYTMSLGAENSVAYSNNSIAIPTNFTISVTTEILPVSMTKTSVDCTMYICGDSTECSNLLLQYGSFCTQLNRALTGIAVEQDKNTQEVFAQVKQIYKTPPIKDFGGFNFSQILPDPSKPSKRSFIEDLLFNKVTLADAGFIKQYGDCLGDIAARDLICAQKFNGLTVLPPLLTDEMIAQYTSALLAGTITSGWTFGAGAALQIPFAMQMAYRFNGIGVTQCVLYENQKLIANQFNSAIGKIQDSLSSTASALGKLQDVVNQNAQALNTLVKQLSSNFGAISSVLNDILSRLDKVEAEVQIDRLITGRLQSLQTYVTQQLIRAAEIRASANLAATKMSECVLGQSKRVDFCGKGYHLMSFPQSAPHGVVFLHVTYVPAQEKNFTTAPAICHDGKAHFPREGVFVSNGTHWFVTQRNFYEPQIITTDNTFVCGNCDVVIGIVNNTVYDPLQPELDSFKEELDKYFKNHTSPDVDLGDISGINASVVNIQKEIDRLNEVAKNLNESLIDLQELGKYEQYIKWPWYIWLGFIAGLIAIVMVTIMLCCMTSCCSCLKGCCSCGSCCKFDEDDSEPVLKGVKLHYT

SEQ ID NO: 13528 - protein, 1273 aa, Artificial Sequence
  SARS-CoV-2/Australia/VIC01/2020__EPI_ISL_406844 spike protein (1-1273)(N914C_S1123C)
MFVFLVLLPLVSSQCVNLTTRTQLPPAYTNSFTRGVYYPDKVFRSSVLHSTQDLFLPFFSNVTWFHAIHVSGTNGTKRFDNPVLPFNDGVYFASTEKSNIIRGWIFGTTLDSKTQSLLIVNNATNVVIKVCEFQFCNDPFLGVYYHKNNKSWMESEFRVYSSANNCTFEYVSQPFLMDLEGKQGNFKNLREFVFKNIDGYFKIYSKHTPINLVRDLPQGFSALEPLVDLPIGINITRFQTLLALHRRYLTPGDSSSGWTAGAAAYYVGYLQPRTFLLKYNENGTITDAVDCALDPLSETKCTLKSFTVEKGIYQTSNFRVQPTESIVRFPNITNLCPFGEVFNATRFASVYAWNRKRISNCVADYSVLYNSASFSTFKCYGVSPTKLNDLCFTNVYADSFVIRGDEVRQIAPGQTGKIADYNYKLPDDFTGCVIAWNSNNLDSKVGGNYNYLYRLFRKSNLKPFERDISTEIYQAGSTPCNGVEGFNCYFPLQSYGFQPTNGVGYQPYRVVVLSFELLHAPATVCGPKKSTNLVKNKCVNFNFNGLTGTGVLTESNKKFLPFQQFGRDIADTTDAVRDPQTLEILDITPCSFGGVSVITPGTNTSNQVAVLYQDVNCTEVPVAIHADQLTPTWRVYSTGSNVFQTRAGCLIGAEHVNNSYECDIPIGAGICASYQTQTNSPRRARSVASQSIIAYTMSLGAENSVAYSNNSIAIPTNFTISVTTEILPVSMTKTSVDCTMYICGDSTECSNLLLQYGSFCTQLNRALTGIAVEQDKNTQEVFAQVKQIYKTPPIKDFGGFNFSQILPDPSKPSKRSFIEDLLFNKVTLADAGFIKQYGDCLGDIAARDLICAQKFNGLTVLPPLLTDEMIAQYTSALLAGTITSGWTFGAGAALQIPFAMQMAYRFNGIGVTQCVLYENQKLIANQFNSAIGKIQDSLSSTASALGKLQDVVNQNAQALNTLVKQLSSNFGAISSVLNDILSRLDKVEAEVQIDRLITGRLQSLQTYVTQQLIRAAEIRASANLAATKMSECVLGQSKRVDFCGKGYHLMSFPQSAPHGVVFLHVTYVPAQEKNFTTAPAICHDGKAHFPREGVFVSNGTHWFVTQRNFYEPQIITTDNTFVCGNCDVVIGIVNNTVYDPLQPELDSFKEELDKYFKNHTSPDVDLGDISGINASVVNIQKEIDRLNEVAKNLNESLIDLQELGKYEQYIKWPWYIWLGFIAGLIAIVMVTIMLCCMTSCCSCLKGCCSCGSCCKFDEDDSEPVLKGVKLHYT

SEQ ID NO: 13529 - protein, 1273 aa, Artificial Sequence
  SARS-CoV-2/Germany/BavPat1/2020__EPI_ISL_406862 spike protein (1-1273)(N914C_S1123C)
MFVFLVLLPLVSSQCVNLTTRTQLPPAYTNSFTRGVYYPDKVFRSSVLHSTQDLFLPFFSNVTWFHAIHVSGTNGTKRFDNPVLPFNDGVYFASTEKSNIIRGWIFGTTLDSKTQSLLIVNNATNVVIKVCEFQFCNDPFLGVYYHKNNKSWMESEFRVYSSANNCTFEYVSQPFLMDLEGKQGNFKNLREFVFKNIDGYFKIYSKHTPINLVRDLPQGFSALEPLVDLPIGINITRFQTLLALHRSYLTPGDSSSGWTAGAAAYYVGYLQPRTFLLKYNENGTITDAVDCALDPLSETKCTLKSFTVEKGIYQTSNFRVQPTESIVRFPNITNLCPFGEVFNATRFASVYAWNRKRISNCVADYSVLYNSASFSTFKCYGVSPTKLNDLCFTNVYADSFVIRGDEVRQIAPGQTGKIADYNYKLPDDFTGCVIAWNSNNLDSKVGGNYNYLYRLFRKSNLKPFERDISTEIYQAGSTPCNGVEGFNCYFPLQSYGFQPTNGVGYQPYRVVVLSFELLHAPATVCGPKKSTNLVKNKCVNFNFNGLTGTGVLTESNKKFLPFQQFGRDIADTTDAVRDPQTLEILDITPCSFGGVSVITPGTNTSNQVAVLYQGVNCTEVPVAIHADQLTPTWRVYSTGSNVFQTRAGCLIGAEHVNNSYECDIPIGAGICASYQTQTNSPRRARSVASQSIIAYTMSLGAENSVAYSNNSIAIPTNFTISVTTEILPVSMTKTSVDCTMYICGDSTECSNLLLQYGSFCTQLNRALTGIAVEQDKNTQEVFAQVKQIYKTPPIKDFGGFNFSQILPDPSKPSKRSFIEDLLFNKVTLADAGFIKQYGDCLGDIAARDLICAQKFNGLTVLPPLLTDEMIAQYTSALLAGTITSGWTFGAGAALQIPFAMQMAYRFNGIGVTQCVLYENQKLIANQFNSAIGKIQDSLSSTASALGKLQDVVNQNAQALNTLVKQLSSNFGAISSVLNDILSRLDKVEAEVQIDRLITGRLQSLQTYVTQQLIRAAEIRASANLAATKMSECVLGQSKRVDFCGKGYHLMSFPQSAPHGVVFLHVTYVPAQEKNFTTAPAICHDGKAHFPREGVFVSNGTHWFVTQRNFYEPQIITTDNTFVCGNCDVVIGIVNNTVYDPLQPELDSFKEELDKYFKNHTSPDVDLGDISGINASVVNIQKEIDRLNEVAKNLNESLIDLQELGKYEQYIKWPWYIWLGFIAGLIAIVMVTIMLCCMTSCCSCLKGCCSCGSCCKFDEDDSEPVLKGVKLHYT

SEQ ID NO: 13530 - protein, 1273 aa, Artificial Sequence
  SARS-CoV-2/Wuhan/HBCDC-HB-02/2020__EPI_ISL_412978 spike protein (1-1273)(N914C_S1123C)
MFVFLVLLPLVSSQCVNLTTRTQLPPAYTNSFTRGVYYPDKVFRSSVLHSTQDLFLPFFSNVTWFHAIHVSGTNGTKRFDNPVLPFNDGVYFASTEKSNIIRGWIFGTTLDSKTQSLLIVNNATNVVIKVCEFQFCNDPFLGVYYHKNNKSWMESEFRVYSSANNCTFEYVSQPFLMDLEGKQGNFKNLREFVFKNIDGYFKIYSKHTPINLVRDLPQGFSALEPLVDLPIGINITRFQTLLALHRSYLTPGDSSSGWTAGAAAYYVGYLQPRTFLLKYNENGTITDAVDCALDPLSETKCTLKSFTVEKGIYQTSNFRVQPTESIVRFPNITNLCPFGEVFNATRFASVYAWNRKRISNCVADYSVLYNSASFSTFKCYGVSPTKLNDLCFTNVYADSFVIRGDEVRQIAPGQTGKIADYNYKLPDDFTGCVIAWNSNNLDSKVGGNYNYLYRLFRKSNLKPFERDISTEIYQAGSTPCNGVEGFNCYFPLQSYGFQPTNGVGYQPYRVVVLSFELLHAPATVCGPKKSTNLVKNKCVNFNFNGLTGTGVLTESNKKFLPFQQFGRDIADTTDAVRDPQTLEILDITPCSFGGVSVITPGTNTSNQVAVLYQDVNCTEVPVAIHADQLTPTWRVYSTGSNVFQTRAGCLIGAEHVNNSYECDIPIGAGICASYQTQTNSPRRARSVASQSIIAYTMSLGAENSVAYSNNSIAIPTNFTISVTTEILPVSMTKTSVDCTMYICGDSTECSNFLLQYGSFCTQLNRALTGIAVEQDKNTQEVFAQVKQIYKTPPIKDFGGFNFSQILPDPSKPSKRSFIEDLLFNKVTLADAGFIKQYGDCLGDIAARDLICAQKFNGLTVLPPLLTDEMIAQYTSALLAGTITSGWTFGAGAALQIPFAMQMAYRFNGIGVTQCVLYENQKLIANQFNSAIGKIQDSLSSTASALGKLQDVVNQNAQALNTLVKQLSSNFGAISSVLNDILSRLDKVEAEVQIDRLITGRLQSLQTYVTQQLIRAAEIRASANLAATKMSECVLGQSKRVDFCGKGYHLMSFPQSAPHGVVFLHVTYVPAQEKNFTTAPAICHDGKAHFPREGVFVSNGTHWFVTQRNFYEPQIITTDNTFVCGNCDVVIGIVNNTVYDPLQPELDSFKEELDKYFKNHTSPDVDLGDISGINASVVNIQKEIDRLNEVAKNLNESLIDLQELGKYEQYIKWPWYIWLGFIAGLIAIVMVTIMLCCMTSCCSCLKGCCSCGSCCKFDEDDSEPVLKGVKLHYT

SEQ ID NO: 13531 - protein, 1273 aa, Artificial Sequence
  SARS-CoV-2/Australia/QLD02/2020__EPI_ISL_407896 spike protein (1-1273)(N914C_S1123C)
MFVFLVLLPLVSSQCVNLTTRTQLPPAYTNSFTRGVYYPDKVFRSSVLHSTQDLFLPFFSNVTWFHAIHVSGTNGTKRFDNPVLPFNDGVYFASTEKSNIIRGWIFGTTLDSKTQSLLIVNNATNVVIKVCEFQFCNDPFLGVYYHKNNKSWMESEFRVYSSANNCTFEYVSQPFLMDLEGKQGNFKNLREFVFKNIDGYFKIYSKHTPINLVRDLPQGFSALEPLVDLPIGINITRFQTLLALHRSYLTPGDSSSGWTAGAAAYYVGYLQPRTFLLKYNENGTITDAVDCALDPLSETKCTLKSFTVEKGIYQTSNFRVQPTESIVRFPNITNLCPFGEVFNATRFASVYAWNRKRISNCVADYSVLYNSASFSTFKCYGVSPTKLNDLCFTNVYADSFVIRGDEVRQIAPGQTGKIADYNYKLPDDFTGCVIAWNSNNLDSKVGGNYNYLYRLFRKSNLKPFERDISTEIYQAGSTPCNGVEGFNCYFPLQSYGFQPTNGVGYQPYRVVVLSFELLHAPATVCGPKKSTNLVKNKCVNFNFNGLTGTGVLTESNKKFLPFQQFGRDIADTTDAVRDPQTLEILDITPCSFGGVSVITPGTNTSNQVAVLYQDVNCTEVPVAIHADQLTPTWRVYSTGSNVFQTRAGCLIGAEHVNNSYECDIPIGAGICASYQTQTNSPRRARSVASQSIIAYTMSLGAENSVAYSNNSIAIPTNFTISVTTEILPVSMTKTSVDCTMYICGDSTECSNLLLQYGSFCTQLNRALTGIAVEQDKNTQEVFAQVKQIYKTPPIKDFGGFNFSQILPDPSKPSKRSFIEDLLFNKVTLADAGFIKQYGDCLGDIAARDLICAQKFNGLTVLPPLLTDEMIAQYTSALLAGTITSGWTFGAGAALQIPFAMQMAYRFNGIGVTQCVLYENQKLIANQFNSAIGKIQDSLSSTASALGKLQDVVNQNAQALNTLVKQLSSNFGAISSVLNDILSRLDKVEAEVQIDRLITGRLQSLQTYVTQQLIRAAEIRASANLAATKMSECVLGQSKRVDFCGKGYHLMSFPQSAPHGVVFLHVTYVPAQEKNFTTAPAICHDGKAHFPREGVFVSNGTHWFVTQRNFYEPQIITTDNTFVCGNCDVVIGIVNNTVYDPLQLELDSFKEELDKYFKNHTSPDVDLGDISGINASVVNIQKEIDRLNEVAKNLNESLIDLQELGKYEQYIKWPWYIWLGFIAGLIAIVMVTIMLCCMTSCCSCLKGCCSCGSCCKFDEDDSEPVLKGVKLHYT

SEQ ID NO: 13532 - protein, 1273 aa, Artificial Sequence
  SARS-CoV-2/India/1-31/2020__EPI_ISL_413523 spike protein (1-1273)(N914C_S1123C)
MFVFLVLLPLVSSQCVNLTTRTQLPPAYTNSFTRGVYYPDKVFRSSVLHSTQDLFLPFFSNVTWFHAIHVSGTNGTKRFDNPVLPFNDGVYFASTEKSNIIRGWIFGTTLDSKTQSLLIVNNATNVVIKVCEFQFCNDPFLGVYYHKNNKSWMESEFRVYSSANNCTFEYVSQPFLMDLEGKQGNFKNLREFVFKNIDGYFKIYSKHTPINLVRDLPQGFSALEPLVDLPIGINITRFQTLLALHRSYLTPGDSSSGWTAGAAAYYVGYLQPRTFLLKYNENGTITDAVDCALDPLSETKCTLKSFTVEKGIYQTSNFRVQPTESIVRFPNITNLCPFGEVFNATRFASVYAWNRKRISNCVADYSVLYNSASFSTFKCYGVSPTKLNDLCFTNVYADSFVIRGDEVRQIAPGQTGKIADYNYKLPDDFTGCVIAWNSNNLDSKVGGNYNYLYRLFRKSNLKPFERDISTEIYQAGSTPCNGVEGFNCYFPLQSYGFQPTNGVGYQPYRVVVLSFELLHAPATVCGPKKSTNLVKNKCVNFNFNGLTGTGVLTESNKKFLPFQQFGRDIADTTDAVRDPQTLEILDITPCSFGGVSVITPGTNTSNQVAVLYQDVNCTEVPVAIHADQLTPTWRVYSTGSNVFQTRAGCLIGAEHVNNSYECDIPIGAGICASYQTQTNSPRRARSVASQSIIAYTMSLGAENSVAYSNNSIAIPTNFTISVTTEILPVSMTKTSVDCTMYICGDSTECSNLLLQYGSFCTQLNRALTGIAVEQDKNTQEVFAQVKQIYKTPPIKDFGGFNFSQILPDPSKPSKRSFIEDLLFNKVTLADAGFIKQYGDCLGDIAARDLICAQKFNGLTVLPPLLTDEMIAQYTSALLAGTITSGWTFGAGAALQIPFAMQMAYRFNGIGVTQCVLYENQKLIANQFNSVIGKIQDSLSSTASALGKLQDVVNQNAQALNTLVKQLSSNFGAISSVLNDILSRLDKVEAEVQIDRLITGRLQSLQTYVTQQLIRAAEIRASANLAATKMSECVLGQSKRVDFCGKGYHLMSFPQSAPHGVVFLHVTYVPAQEKNFTTAPAICHDGKAHFPREGVFVSNGTHWFVTQRNFYEPQIITTDNTFVCGNCDVVIGIVNNTVYDPLQPELDSFKEELDKYFKNHTSPDVDLGDISGINASVVNIQKEIDRLNEVAKNLNESLIDLQELGKYEQYIKWPWYIWLGFIAGLIAIVMVTIMLCCMTSCCSCLKGCCSCGSCCKFDEDDSEPVLKGVKLHYT

SEQ ID NO: 13533 - protein, 1273 aa, Artificial Sequence
  SARS-CoV-2/Guangdong/GD2020087-P0008/2020__EPI_ISL_413863 spike protein (1-1273)(N914C_S1123C)
MFVFLVLLPLVSSQCVNLTTRTQLPPAYTNSFTRGVYYPDKVFRSSVLHSTQDLFLPFFSNVTWFHAIHVSGTNGTKRFDNPVLPFNDGVYFASTEKSNIIRGWIFGTTLDSKTQSLLIVNNATNVVIKVCEFQFCNDPFLGVYYHKNNKSWMESEFRVYSSANNCTFEYVSQPFLMDLEGKQGNFKNLREFVFKNIDGYFKIYSKHTPINLVRDLPQGFSALEPLVDLPIGINITRFQTLLALHRSYLTPGDSSSGWTAGAAAYYVGYLQPRTFLLKYNENGTITDAVDCALDPLSETKCTLKSFTVEKGIYQTSNFRVQPTESIVRFPNITNLCPFGEVFNATRFASVYAWNRKRISNCVADYSVLYNSASFSTFKCYGVSPTKLNDLCFTNVYADSFVIRGDEVREIAPGQTGKIADYNYKLPDDFTGCVIAWNSNNLDSKVGGNYNYLYRLFRKSNLKPFERDISTEIYQAGSTPCNGVEGFNCYFPLQSYGFQPTNGVGYQPYRVVVLSFELLHAPATVCGPKKSTNLVKNKCVNFNFNGLTGTGVLTESNKKFLPFQQFGRDIADTTDAVRDPQTLEILDITPCSFGGVSVITPGTNTSNQVAVLYQDVNCTEVPVAIHADQLTPTWRVYSTGSNVFQTRAGCLIGAEHVNNSYECDIPIGAGICASYQTQTNSPRRARSVASQSIIAYTMSLGAENSVAYSNNSIAIPTNFTISVTTEILPVSMTKTSVDCTMYICGDSTECSNLLLQYGSFCTQLNRALTGIAVEQDKNTQEVFAQVKQIYKTPPIKDFGGFNFSQILPDPSKPSKRSFIEDLLFNKVTLADAGFIKQYGDCLGDIAARDLICAQKFNGLTVLPPLLTDEMIAQYTSALLAGTITSGWTFGAGAALQIPFAMQMAYRFNGIGVTQCVLYENQKLIANQFNSAIGKIQDSLSSTASALGKLQDVVNQNAQALNTLVKQLSSNFGAISSVLNDILSRLDKVEAEVQIDRLITGRLQSLQTYVTQQLIRAAEIRASANLAATKMSECVLGQSKRVDFCGKGYHLMSFPQSAPHGVVFLHVTYVPAQEKNFTTAPAICHDGKAHFPREGVFVSNGTHWFVTQRNFYEPQIITTDNTFVCGNCDVVIGIVNNTVYDPLQPELDSFKEELDKYFKNHTSPDVDLGDISGINASVVNIQKEIDRLNEVAKNLNESLIDLQELGKYEQYIKWPWYIWLGFIAGLIAIVMVTIMLCCMTSCCSCLKGCCSCGSCCKFDEDDSEPVLKGVKLHYT

SEQ ID NO: 13534 - protein, 1273 aa, Artificial Sequence
  SARS-CoV-2/Sweden/01/2020__EPI_ISL_411951 spike protein (1-1273)(N914C_S1123C)
MFVFLVLLPLVSSQCVNLTTRTQLPPAYTNSFTRGVYYPDKVFRSSVLHSTQDLFLPFFSNVTWFHAIHVSGTNGTKRFDNPVLPFNDGVYFASTEKSNIIRGWIFGTTLDSKTQSLLIVNNATNVVIKVCEFQFCNDPFLGVYYHKNNKSWMESEFRVYSSANNCTFEYVSQPFLMDLEGKQGNFKNLREFVFKNIDGYFKIYSKHTPINLVRDLPQGFSALEPLVDLPIGINITRFQTLLALHRSYLTPGDSSSGWTAGAAAYYVGYLQPRTFLLKYNENGTITDAVDCALDPLSETKCTLKSFTVEKGIYQTSNFRVQPTESIVRFPNITNLCPFGEVFNATRFASVYAWNRKRISNCVADYSVLYNSASFSTFKCYGVSPTKLNDLCFTNVYADSFVIRGDEVRQIAPGQTGKIADYNYKLPDDFTGCVIAWNSNNLDSKVGGNYNYLYRLFRKSNLKPFERDISTEIYQAGSTPCNGVEGFNCYFPLQSYGFQPTNGVGYQPYRVVVLSFELLHAPATVCGPKKSTNLVKNKCVNFNFNGLTGTGVLTESNKKFLPFQQFGRDIADTTDAVRDPQTLEILDITPCSFGGVSVITPGTNTSNQVAVLYQDVNCTEVPVAIHADQLTPTWRVYSTGSNVFQTRAGCLIGAEHVNNSYECDIPIGAGICASYQTQTNSPRRARSVASQSIIAYTMSLGAENSVAYSNNSIAIPTNFTISVTTEILPVSMTKTSVDCTMYICGDSTECSNLLLQYGSFCTQLNRALTGIAVEQDKNTQEVFAQVKQIYKTPPIKDCGGFNFSQILPDPSKPSKRSFIEDLLFNKVTLADAGFIKQYGDCLGDIAARDLICAQKFNGLTVLPPLLTDEMIAQYTSALLAGTITSGWTFGAGAALQIPFAMQMAYRFNGIGVTQCVLYENQKLIANQFNSAIGKIQDSLSSTASALGKLQDVVNQNAQALNTLVKQLSSNFGAISSVLNDILSRLDKVEAEVQIDRLITGRLQSLQTYVTQQLIRAAEIRASANLAATKMSECVLGQSKRVDFCGKGYHLMSFPQSAPHGVVFLHVTYVPAQEKNFTTAPAICHDGKAHFPREGVFVSNGTHWFVTQRNFYEPQIITTDNTFVCGNCDVVIGIVNNTVYDPLQPELDSFKEELDKYFKNHTSPDVDLGDISGINASVVNIQKEIDRLNEVAKNLNESLIDLQELGKYEQYIKWPWYIWLGFIAGLIAIVMVTIMLCCMTSCCSCLKGCCSCGSCCKFDEDDSEPVLKGVKLHYT

SEQ ID NO: 13535 - protein, 1273 aa, Artificial Sequence
  SARS-CoV-2/Tianmen/HBCDC-HB-07/2020__EPI_ISL_412983 spike protein (1-1273)(N914C_S1123C)
MFVFLVLLPLVSSQCVNLTTRTQLPPAYTNSFTRGVYYPDKVFRSSVLHSTQDLFLPFFSNVTWFHAIHVSGTNGTKRFDNPVLPFNDGVYFASTEKSNIIRGWIFGTTLDSKTQSLLIVNNATNVVIKVCEFQFCNDPFLGVYYHKNNKSWMESEFRVYSSANNCTFEYVSQPFLMDLEGKQGNFKNLREFVFKNIDGYFKIYSKHTPINLVRDLPQGFSALEPLVDLPIGINITRFQTLLALHRSYLTPGDSSSGWTAGAAAYYVGYLQPRTFLLKYNENGTITDAVDCALDPLSETKCTLKSFTVEKGIYQTSNFRVQPTESIVRFPNITNLCPFGEVFNATRFASVYAWNRKRISNCVADYSVLYNSASFSTFKCYGVSPTKLNDLCFTNVYADSFVIRGDEVRQIAPGQTGKIADYNYKLPDDFTGCVIAWNSNNLDSKVGGNYNYLYRLFRKSNLKPFERDISTEIYQAGSTPCNGVEGFNCYFPLQSYGFQPTNGVGYQPYRVVVLSFELLHAPATVCGPKKSTNLVKNKCVNFNFNGLTGTGVLTESNKKFLPFQQFGRDIADTTDAVRDPQTLEILDITPCSFGGVSVITPGTNTSNQVAVLYQDLNCTEVPVAIHADQLTPTWRVYSTGSNVFQTRAGCLIGAEHVNNSYECDIPIGAGICASYQTQTNSPRRARSVASQSIIAYTMSLGAENSVAYSNNSIAIPTNFTISVTTEILPVSMTKTSVDCTMYICGDSTECSNLLLQYGSFCTQLNRALTGIAVEQDKNTQEVFAQVKQIYKTPPIKDFGGFNFSQILPDPSKPSKRSFIEDLLFNKVTLADAGFIKQYGDCLGDIAARDLICAQKFNGLTVLPPLLTDEMIAQYTSALLAGTITSGWTFGAGAALQIPFAMQMAYRFNGIGVTQCVLYENQKLIANQFNSAIGKIQDSLSSTASALGKLQDVVNQNAQALNTLVKQLSSNFGAISSVLNDILSRLDKVEAEVQIDRLITGRLQSLQTYVTQQLIRAAEIRASANLAATKMSECVLGQSKRVDFCGKGYHLMSFPQSAPHGVVFLHVTYVPAQEKNFTTAPAICHDGKAHFPREGVFVSNGTHWFVTQRNFYEPQIITTDNTFVCGNCDVVIGIVNNTVYDPLQPELDSFKEELDKYFKNHTSPDVDLGDISGINASVVNIQKEIDRLNEVAKNLNESLIDLQELGKYEQYIKWPWYIWLGFIAGLIAIVMVTIMLCCMTSCCSCLKGCCSCGSCCKFDEDDSEPVLKGVKLHYT

SEQ ID NO: 13536 - protein, 1273 aa, Artificial Sequence
  SARS-CoV-2/Hong Kong/case42_VM20002493/2020__EPI_ISL_414527 spike protein (1-1273)(N914C_S1123C)
MFVFLVLLPLVSSQCVNLTTRTQLPPAYTNSFTRGVYYPDKVFRSSVLHSTQDLFLPFFSNVTWFHAIHVSGTNGTKRFDNPVLPFNDGVYFASTEKSNIIRGWIFGTTLDSKTQSLLIVNNATNVVIKVCEFQFCNDPFLGVYYHKNNKSWMESEFRVYSSANNCTFEYVSQPFLMDLEGKQGNFKNLREFVFKNIDGYFKIYSKHTPINLVRDLPQGFSALEPLVDLPIGINITRFQTLLALHRSYLTPGDSSSGWTAGAAAYYVGYLQPRTFLLKYNENGTITDAVDCALDPLSETKCTLKSFTVEKGIYQTSNFRVQPTESIVRFPNITNLCPFGEVFNATRFASVYAWNRKRISNCVADYSVLYNSASFSTFKCYGVSPTKLNDLCFTNVYADSFVIRGDEVRQIAPGQTGKIADYNYKLPDDFTGCVIAWNSNNLDSKVGGNYNYLYRLFRKSNLKPFERDISTEIYQAGSTPCNGVEGFNCYFPLQSYGFQPTNGVGYQPYRVVVLSFELLHAPATVCGPKKSTNLVKNKCVNFNFNGLTGTGVLTESNKKFLPFQQFGRDIADTTDAVRDPQTLEILDITPCSFGGVSVITPGTNTSNQVAVLYQDVNCTEVPVAIHADQLTPTWRVYSTGSNVFQTRAGCLIGAEHVNNSYECDIPIGAGICASYQTQTNSPRRARSVASQSIIAYTMSLGAENSVAYSNNSIAIPTNFAISVTTEILPVSMTKTSVDCTMYICGDSTECSNLLLQYGSFCTQLNRALTGIAVEQDKNTQEVFAQVKQIYKTPPIKDFGGFNFSQILPDPSKPSKRSFIEDLLFNKVTLADAGFIKQYGDCLGDIAARDLICAQKFNGLTVLPPLLTDEMIAQYTSALLAGTITSGWTFGAGAALQIPFAMQMAYRFNGIGVTQCVLYENQKLIANQFNSAIGKIQDSLSSTASALGKLQDVVNQNAQALNTLVKQLSSNFGAISSVLNDILSRLDKVEAEVQIDRLITGRLQSLQTYVTQQLIRAAEIRASANLAATKMSECVLGQSKRVDFCGKGYHLMSFPQSAPHGVVFLHVTYVPAQEKNFTTAPAICHDGKAHFPREGVFVSNGTHWFVTQRNFYEPQIITTDNTFVCGNCDVVIGIVNNTVYDPLQPELDSFKEELDKYFKNHTSPDVDLGDISGINASVVNIQKEIDRLNEVAKNLNESLIDLQELGKYEQYIKWPWYIWLGFIAGLIAIVMVTIMLCCMTSCCSCLKGCCSCGSCCKFDEDDSEPVLKGVKLHYT

SEQ ID NO: 13537 - protein, 1273 aa, Artificial Sequence
  SARS-CoV-2/USA/CruiseA-23/2020__EPI_ISL_414482 spike protein (1-1273)(N914C_S1123C)
MFVFLVLLPLVSSQCVNLTTRTQLPPAYTNSFTRGVYYPDKVFRSSVLHSTQDLFLPFFSNVTWFHAIHVSGTNGTKRFDNPVLPFNDGVYFASTEKSNIIRGWIFGTTLDSKTQSLLIVNNATNVVIKVCEFQFCNDPFLGVYYHKNNKSWMESEFRVYSSANNCTFEYVSQPFLMDLEVKQGNFKNLREFVFKNIDGYFKIYSKHTPINLVRDLPQGFSALEPLVDLPIGINITRFQTLLALHRSYLTPGDSSSGWTAGAAAYYVGYLQPRTFLLKYNENGTITDAVDCALDPLSETKCTLKSFTVEKGIYQTSNFRVQPTESIVRFPNITNLCPFGEVFNATRFASVYAWNRKRISNCVADYSVLYNSASFSTFKCYGVSPTKLNDLCFTNVYADSFVIRGDEVRQIAPGQTGKIADYNYKLPDDFTGCVIAWNSNNLDSKVGGNYNYLYRLFRKSNLKPFERDISTEIYQAGSTPCNGVEGFNCYFPLQSYGFQPTNGVGYQPYRVVVLSFELLHAPATVCGPKKSTNLVKNKCVNFNFNGLTGTGVLTESNKKFLPFQQFGRDIADTTDAVRDPQTLEILDITPCSFGGVSVITPGTNTSNQVAVLYQDVNCTEVPVAIHADQLTPTWRVYSTGSNVFQTRAGCLIGAEHVNNSYECDIPIGAGICASYQTQTNSPRRARSVASQSIIAYTMSLGAENSVAYSNNSIAIPTNFTISVTTEILPVSMTKTSVDCTMYICGDSTECSNLLLQYGSFCTQLNRALTGIAVEQDKNTQEVFAQVKQIYKTPPIKDFGGFNFSQILPDPSKPSKRSFIEDLLFNKVTLADAGFIKQYGDCLGDIAARDLICAQKFNGLTVLPPLLTDEMIAQYTSALLAGTITSGWTFGAGAALQIPFAMQMAYRFNGIGVTQCVLYENQKLIANQFNSAIGKIQDSLSSTASALGKLQDVVNQNAQALNTLVKQLSSNFGAISSVLNDILSRLDKVEAEVQIDRLITGRLQSLQTYVTQQLIRAAEIRASANLAATKMSECVLGQSKRVDFCGKGYHLMSFPQSAPHGVVFLHVTYVPAQEKNFTTAPAICHDGKAHFPREGVFVSNGTHWFVTQRNFYEPQIITTDNTFVCGNCDVVIGIVNNTVYDPLQPELDSFKEELDKYFKNHTSPDVDLGDISGINASVVNIQKEIDRLNEVAKNLNESLIDLQELGKYEQYIKWPWYIWLGFIAGLIAIVMVTIMLCCMTSCCSCLKGCCSCGSCCKFDEDDSEPVLKGVKLHYT

SEQ ID NO: 13538 - protein, 1273 aa, Artificial Sequence
  SARS-CoV-2/Hong Kong/case85_VM20002868/2020__EPI_ISL_414519 spike protein (1-1273)(N914C_S1123C)
MFVFLVLVPLVSSQCVNLTTRTQLPPAYTNSFTRGVYYPDKVFRSSVLHSTQDLFLPFFSNVTWFHAIHVSGTNGTKRFDNPVLPFNDGVYFASTEKSNIIRGWIFGTTLDSKTQSLLIVNNATNVVIKVCEFQFCNDPFLGVYYHKNNKSWMESEFRVYSSANNCTFEYVSQPFLMDLEGKQGNFKNLREFVFKNIDGYFKIYSKHTPINLVRDLPQGFSALEPLVDLPIGINITRFQTLLALHRSYLTPGDSSSGWTAGAAAYYVGYLQPRTFLLKYNENGTITDAVDCALDPLSETKCTLKSFTVEKGIYQTSNFRVQPTESIVRFPNITNLCPFGEVFNATRFASVYAWNRKRISNCVADYSVLYNSASFSTFKCYGVSPTKLNDLCFTNVYADSFVIRGDEVRQIAPGQTGKIADYNYKLPDDFTGCVIAWNSNNLDSKVGGNYNYLYRLFRKSNLKPFERDISTEIYQAGSTPCNGVEGFNCYFPLQSYGFQPTNGVGYQPYRVVVLSFELLHAPATVCGPKKSTNLVKNKCVNFNFNGLTGTGVLTESNKKFLPFQQFGRDIADTTDAVRDPQTLEILDITPCSFGGVSVITPGTNTSNQVAVLYQDVNCTEVPVAIHADQLTPTWRVYSTGSNVFQTRAGCLIGAEHVNNSYECDIPIGAGICASYQTQTNSPRRARSVASQSIIAYTMSLGAENSVAYSNNSIAIPTNFTISVTTEILPVSMTKTSVDCTMYICGDSTECSNLLLQYGSFCTQLNRALTGIAVEQDKNTQEVFAQVKQIYKTPPIKDFGGFNFSQILPDPSKPSKRSFIEDLLFNKVTLADAGFIKQYGDCLGDIAARDLICAQKFNGLTVLPPLLTDEMIAQYTSALLAGTITSGWTFGAGAALQIPFAMQMAYRFNGIGVTQCVLYENQKLIANQFNSAIGKIQDSLSSTASALGKLQDVVNQNAQALNTLVKQLSSNFGAISSVLNDILSRLDKVEAEVQIDRLITGRLQSLQTYVTQQLIRAAEIRASANLAATKMSECVLGQSKRVDFCGKGYHLMSFPQSAPHGVVFLHVTYVPAQEKNFTTAPAICHDGKAHFPREGVFVSNGTHWFVTQRNFYEPQIITTDNTFVCGNCDVVIGIVNNTVYDPLQPELDSFKEELDKYFKNHTSPDVDLGDISGINASVVNIQKEIDRLNEVAKNLNESLIDLQELGKYEQYIKWPWYIWLGFIAGLIAIVMVTIMLCCMTSCCSCLKGCCSCGSCCKFDEDDSEPVLKGVKLHYT

SEQ ID NO: 13539 - protein, 1273 aa, Artificial Sequence
  SARS-CoV-2/England/200990660/2020__EPI_ISL_414523 spike protein (1-1273)(N914C_S1123C)
MFVFLVLLPLVSSQCVNLTTRTQLPPAYTNSFTRGVYYPDKVFRSSVLHSTQDLFLPFFSNVTWFHAIHVSGTNGTKRFDNPVLPFNDGVYFASTEKSNIIRGWIFGTTLDSKTQSLLIVNNATNVVIKVCEFQFCNDPFLGVYYHKNNKSWMESEFRVYSSANNCTFEYVSQPFLMDLEGKQGNFKNLREFVFKNIDGYFKIYSKHTPINLVRDLPQGFSALEPLVDLPIGINITRFQTLLALHRSYLTPGDSSSGWTAGAAAYYVGYLQPRTFLLKYNENGTITDAVDCALDPLSETKCTLKSFTVEKGIYQTSNFRVQPTESIVRFPNITNLCPFGEVFNATRFASVYAWNRKRISNCVADYSVLYNSASFSTFKCYGVSPTKLNDLCFTNVYADSFVIRGDEVRQIAPGQTGKIADYNYKLPDDFTGCVIAWNSNNLDSKVGGNYNYLYRLFRKSNLKPFERDISTEIYQAGSTPCNGVEGFNCYFPLQSYGFQPTNGVGYQPYRVVVLSFELLHAPATVCGPKKSTNLVKNKCVNFNFNGLTGTGVLTESNKKFLPFQQFGRDIADTTDAVRDPQTLEILDITPCSFGGVSVITPGTNTSNQVAVLYQGVNCTEVPVAIHADQLTPTWRVYSTGSNVFQTRAGCLIGAEHVNNSYECDIPIGAGICASYQTQTNSPRRARSVASQSIIAYTMSLGAENSVAYSNNSIAIPTNFTISVTTEILPVSMTKTSVDCTMYICGDSTECSNLLLQYGSFCTQLNRALTGIAVEQDKNTQEVFAQVKQIYKTPPIKDFGGFNFSQILPDPSKPSKRSFIEDLLFNKVTLADAGFIKQYGDCLGDIAARDLICAQKFNGLTVLPPLLTDEMIAQYTSALLAGTITSGWTFGAGAALQIPFAMQMAYRFNGIGVTQCVLYENQKLIANQFNSAIGKIQDSLSSTASALGKLQDVVNQNAQALNTLVKQLSSNFGAISSVLNDILSRLDKVEAEVQIDRLITGRLQSLQTYVTQQLIRAAEIRASANLAATKMSECVLGQSKRVDFCGKGYHLMSFPQSAPHGVVFLHVTYVPAQEKNFTTAPAICHDGKAHFPREGVFVSNGTHWFVTQRNFYEPQIITTDNTFVCGNCDVVIGIVNNTVYDPLQPELDSFKEELDKYFKNHTSPDVDLGDISGINASVVNIQKEIDRLNEVAKNLNESLIDLQELGKYEQYIKWPWYIWLGFIAGLIAIVMVTIMLCCMTSCCSCLKGCCSCGSCCKFDEDDSELVLKGVKLHYT

SEQ ID NO: 13540 - protein, 1273 aa, Artificial Sequence
  SARS-CoV-2/Australia/NSW09/2020__EPI_ISL_413595 spike protein (1-1273)(N914C_S1123C)
MFVFLVLLPLVSSQCVNLTTRTQLPPAYTNSFTRGVYYPDKVFRSSVLHSTQDLFLPFFSNVTWFHAIHVSGTNGTKRFDNPVLPFNDGVYFASTEKSNIIRGWIFGTTLDSKTQSLLIVNNATNVVIKVCEFQFCNDPFLGVYYHKNNKSWMESEFRVYSSANNCTFEYVSQPFLMDLEGKQGNFKNLREFVFKNIDGYFKIYSKHTPINLVRDLPQGFSALEPLVDLPIGINITRFQTLLALHRSYLTPGDSSSGWTAGAAAYYVGYLQPRTFLLKYNENGTITDAVDCALDPLSETKCTLKSFTVEKGIYQTSNFRVQPTESIVRFPNITNLCPFGEVFNATRFASVYAWNRKRISNCVADYSVLYNSASFSTFKCYGVSPTKLNDLCFTNVYADSFVIRGDEVRQIAPGQTGKIADYNYKLPDDFTGCVIAWNSNNLDSKVGGNYNYLYRLFRKSNLKPFERDISTEIYQAGSTPCNGVEGFNCYFPLQSYGFQPTNGVGYQPYRVVVLSFELLHAPATVCGPKKSTNLVKNKCVNFNFNGLTGTGVLTESNKKFLPFQQFGRDIADTTDAVRDPQTLEILDITPCSFGGVSVITPGTNTSNQVAVLYQDVNCTEVPVAIHADQLTPTWRVYSTGSNVFQTRAGCLIGAEHVNNSYECDIPIGAGICASYQTQTNSPRRARSVASQSIIAYTMSLGAENSVAYSNNSIAIPTNFTISVTTEILPVSMTKTSVDCTMYICGDSTECSNLLLQYGSFCTQLNRALTGIAVEQDKNTQEVFAQVKQIYKTPPIKDFGGFNFSQILPDPSKPSKRSFIEDLLFNKVTLADAGFIKQYGDCLGDIAARDLICAQKFNGLTVLPPLLTDEMIAQYTSALLAGTITSGWTFGAGAALQIPFAMQMAYRFNGIGVTQCVLYENQKLIANQFNSAIGKIQDSLSFTASALGKLQDVVNQNAQALNTLVKQLSSNFGAISSVLNDILSRLDKVEAEVQIDRLITGRLQSLQTYVTQQLIRAAEIRASANLAATKMSECVLGQSKRVDFCGKGYHLMSFPQSAPHGVVFLHVTYVPAQEKNFTTAPAICHDGKAHFPREGVFVSNGTHWFVTQRNFYEPQIITTDNTFVCGNCDVVIGIVNNTVYDPLQPELDSFKEELDKYFKNHTSPDVDLGDISGINASVVNIQKEIDRLNEVAKNLNESLIDLQELGKYEQYIKWPWYIWLGFIAGLIAIVMVTIMLCCMTSCCSCLKGCCSCGSCCKFDEDDSEPVLKGVKLHYT

SEQ ID NO: 13541 - protein, 1273 aa, Artificial Sequence
  SARS-CoV-2/Australia/NSW10/2020__EPI_ISL_413596 spike protein (1-1273)(N914C_S1123C)
MFVFLVLLPLVSSQCVNLTTRTQLPPAYTNSFTRGVYYPDKVFRSSVLHSTQDLFLPFFSNVTWFHAIHVSGTNGTKRFDNPVLPFNDGVYFASTEKSNIIRGWIFGTTLDSKTQSLLIVNNATNVVIKVCEFQFCNDPFLGVYYHKNNKSWMESEFRVYSSANNCTFEYVSQPFLMDLEGKQGNFKNLREFVFKNIDGYFKIYSKHTPINLVRDLPQGFSALEPLVDLPIGINITRFQTLLALHRSYLTPGDSSSGWTAGAAAYYVGYLQPRTFLLKYNENGTITDAVDCALDPLSETKCTLKSFTVEKGIYQTSNFRVQPTESIVRFPNITNLCPFGEVFNATRFASVYAWNRKRISNCVADYSVLYNSASFSTFKCYGVSPTKLNDLCFTNVYADSFVIRGDEVRQIAPGQTGKIADYNYKLPDDFTGCVIAWNSNNLDSKVGGNYNYLYRLFRKSNLKPFERDISTEIYQAGSTPCNGVEGFNCYFPLQSYGFQPTNGVGYQPYRVVVLSFELLHAPATVCGPKKSTNLVKNKCVNFNFNGLTGTGVLTESNKKFLPFQQFGRDIADTTDAVRDPQTLEILDITPCSFGGVSVITPGTNTSNQVAVLYQDVNCTEVPVAIHADQLTPTWRVYSTGSNVFQTRAGCLIGAEHVNNSYECDIPIGAGICASYQTQTNSPRRARSVASQSIIAYTMSLGAENSVAYSNNSIAIPTNFTISVTTEILPVSMTKTSVDCTMYICGDSTECSNLLLQYGSFCTQLNRALTGIAVEQDKNTQEVFAQVKQIYKTPPIKDFGGFNFSQILPDPSKPSKRSFIEDLLFNKVTLADAGFIKQYGDCLGDIAARDLICAQKFNGLTVLPPLLTDEMIAQYTSALLAGTITSGWTFGAGAALQIPFAMQMAYRFNGIGVTQCVLYENQKLIANQFNSAIGKIQDSLSSTASALGKLQDVVNQNAQALNTLVKQLSSNFGAISSVLNDILSRLDKVEAEVQIDRLITGRLQSLQTYVTQQLIRAAEIRASANLAATKMSECVLGQSKRVDFCGKGYHLMSFPQSAPHGVVFLHVTYVPAQEKNFTTAPAICHDGKAHFPREGVFVSNGTHWFVTQRNFYEPQIITTDNTFVCGNCDVVIGIVNNTVYDPLQPELDSFKEELDKYFKNHTSPDVDLGDISGINASVVNIQKEIDRLNEVAKNLNESLIDLQELGKYEQYIKWPWYIWLGFIAGLIAIVMVTIMLCCMTSCCSCLKGCCSCGSCFKFDEDDSEPVLKGVKLHYT

SEQ ID NO: 13542 - protein, 1273 aa, Artificial Sequence
  SARS-CoV-2/Switzerland/1000477797/2020__EPI_ISL_413023 spike protein (1-1273)(N914C_S1123C)
MFVFLVLLPLVSSQCVNLTTRTQLPPAYTNSFTRGVYYPDKVFRSSVLHSTQDLFLPFFSNVTWFHAIHVSGTNGTKRFDNPVLPFNDGVYFASTEKSNIIRGWIFGTTLDSKTQSLLIVNNATNVVIKVCEFQFCNDPFLGVYYHKNNKSWMESEFRVYSSANNCTFEYVSQPFLMDLEGKQGNFKNLREFVFKNIDGYFNIYSKHTPINLVRDLPQGFSALEPLVDLPIGINITRFQTLLALHRSYLTPGDSSSGWTAGAAAYYVGYLQPRTFLLKYNENGTITDAVDCALDPLSETKCTLKSFTVEKGIYQTSNFRVQPTESIVRFPNITNLCPFGEVFNATRFASVYAWNRKRISNCVADYSVLYNSASFSTFKCYGVSPTKLNDLCFTNVYADSFVIRGDEVRQIAPGQTGKIADYNYKLPDDFTGCVIAWNSNNLDSKVGGNYNYLYRLFRKSNLKPFERDISTEIYQAGSTPCNGVEGFNCYFPLQSYGFQPTNGVGYQPYRVVVLSFELLHAPATVCGPKKSTNLVKNKCVNFNFNGLTGTGVLTESNKKFLPFQQFGRDIADTTDAVRDPQTLEILDITPCSFGGVSVITPGTNTSNQVAVLYQGVNCTEVPVAIHADQLTPTWRVYSTGSNVFQTRAGCLIGAEHVNNSYECDIPIGAGICASYQTQTNSPRRARSVASQSIIAYTMSLGAENSVAYSNNSIAIPTNFTISVTTEILPVSMTKTSVDCTMYICGDSTECSNLLLQYGSFCTQLNRALTGIAVEQDKNTQEVFAQVKQIYKTPPIKDFGGFNFSQILPDPSKPSKRSFIEDLLFNKVTLADAGFIKQYGDCLGDIAARDLICAQKFNGLTVLPPLLTDEMIAQYTSALLAGTITSGWTFGAGAALQIPFAMQMAYRFNGIGVTQCVLYENQKLIANQFNSAIGKIQDSLSSTASALGKLQDVVNQNAQALNTLVKQLSSNFGAISSVLNDILSRLDKVEAEVQIDRLITGRLQSLQTYVTQQLIRAAEIRASANLAATKMSECVLGQSKRVDFCGKGYHLMSFPQSAPHGVVFLHVTYVPAQEKNFTTAPAICHDGKAHFPREGVFVSNGTHWFVTQRNFYEPQIITTDNTFVCGNCDVVIGIVNNTVYDPLQPELDSFKEELDKYFKNHTSPDVDLGDISGINASVVNIQKEIDRLNEVAKNLNESLIDLQELGKYEQYIKWPWYIWLGFIAGLIAIVMVTIMLCCMTSCCSCLKGCCSCGSCCKFDEDDSEPVLKGVKLHYT

SEQ ID NO: 13543 - protein, 1273 aa, Artificial Sequence
  SARS-CoV-2/Belgium/BA-02291/2020__EPI_ISL_415159 spike protein (1-1273)(N914C_S1123C)
MFVFLVLLPLVSSQCVNLTTRTQLPPAYTNSFTRGVYYPDKVFRSSVLHSTQDLFLPFFSNVTWFHAIHVSGTNGTKRFDNPVLPFNDGVYFASTEKSNIIRGWIFGTTLDSKTQSLLIVNNATNVVIKVCEFQFCNDPFLGVYYHKNNKSWMESEFRVYSSANNCTFEYVSQPFLMDLEGKQGNFKNLREFVFKNIDGYFKIYSKHTPINLVRDLPQGFSALEPLVDLPIGINITRFQTLLALHRSYLTPGDSSSGWTAGAAAYYVGYLQPRTFLLKYNENGTITDAVDCALDPLSETKCTLKSFTVEKGIYQTSNFRVQPTESIVRFPNITNLCPFGEVFNATRFASVYAWNRKRISNCVADYSVLYNSASFSTFKCYGVSPTKLNDLCFTNVYADSFVIRGDEVRQIAPGQTGKIADYNYKLPDDFTGCVIAWNSNNLDSKVGGNYNYLYRLFRRSNLKPFERDISTEIYQAGSTPCNGVEGFNCYFPLQSYGFQPTNGVGYQPYRVVVLSFELLPAPATVCGPKKSTNLVKNKCVNFNFNGLTGTGVLTESNKKFLPFQQFGRDIADTTDAVRDPQTLEILDITPCSFGGVSVITPGTNTSNQVAVLYQGVNCTEVPVAIHADQLTPTWRVYSTGSNVFQTRAGCLIGAEHVNNSYECDIPIGAGICASYQTQTNSPRRARSVASQSIIAYTMSLGAENSVAYSNNSIAIPTNFTISVTTEILPVSMTKTSVDCTMYICGDSTECSNLLLQYGSFCTQLNRALTGIAVEQDKNTQEVFAQVKQIYKTPPIKDFGGFNFSQILPDPSKPSKRSFIEDLLFNKVTLADAGFIKQYGDCLGDIAARDLICAQKFNGLTVLPPLLTDEMIAQYTSALLAGTITSGWTFGAGAALQIPFAMQMAYRFNGIGVTQCVLYENQKLIANQFNSAIGKIQDSLSSAAPALGKLQDVVNQNAQALNTLVKQLSSNFGAISSVLNDILSRLDKVEAEVQIDRLITGRLQSLQTYVTQQLIRAAEIRASANLAATKMSECVLGQSKRVDFCGKGYHLMSFPQSAPHGVVFLHVTYVPAQEKNFTTAPAICHDGKAHFPREGVFVSNGTHWFVTQRNFYEPQIITTDNTFVCGNCDVVIGIVNNTVYDPLQPELDSFKEELDKYFKNHTSPDVDLGDISGINASVVNIQKEIDRLNEVAKNLNESLIDLQELGKYEQYIKWPWYIWLGFIAGLIAIVMVTIMLCCMTSCCSCLKGCCSCGSCCKFDEDDSEPVLKGVKLHYT

SEQ ID NO: 13544 - protein, 1273 aa, Artificial Sequence
  SARS-CoV-2/USA/WA8-UW5/2020__EPI_ISL_413486 spike protein (1-1273)(N914C_S1123C)
MFVFLVLLPLVSSQCVNLTTRTQLPPAYTNSFTRGVYYPDKVFRSSVLHSTQDLFLPFFSNVTWFHAIHVSGTNGTKRFDNPVLPFNDGVYFASTEKSNIIRGWIFGTTLDSKTQSLLIVNNATNVVIKVCEFQFCNDPFLGVYYHKNNKSWMESEFRVYSSANNCTFEYVSQPFLMDLEGKQGNFKNLREFVFKNIDGYFKIYSKHTPINLVRDLPQGFSALEPLVDLPIGINITRFQTLLALHRSYLTPGDSSSGWTAGAAAYYVGYLQPRTFLLKYNENGTITDAVDCALDPLSETKCTLKSFTVEKGIYQTSNFRVQPTESIVRFPNITNLCPFGEVFNATRFASVYAWNRKRISNCVADYSVLYNSASFSTFKCYGVSPTKLNDLCFTNVYADSFVIRGDEVRQIAPGQTGKIADYNYKLPDDFTGCVIAWNSNNLDSKVGGNYNYLYRLFRKSNLKPFERDISTEIYQAGSTPCNGVEGFNCYFPLQSYGFQPTNGVGYQPYRVVVLSFELLHAPATVCGPKKSTNLVKNKCVNFNFNGLTGTGVLTESNKKFLPFQQFGRDIADTTDAVRDPQTLEILDITPCSFGGVSVITPGTNTSNQVAVLYQDVNCTEVPVAIHADQLTPTWRVYSTGSNVFQTRAGCLIGAEYVNNSYECDIPIGAGICASYQTQTNSPRRARSVASQSIIAYTMSLGAENSVAYSNNSIAIPTNFTISVTTEILPVSMTKTSVDCTMYICGDSTECSNLLLQYGSFCTQLNRALTGIAVEQDKNTQEVFAQVKQIYKTPPIKDFGGFNFSQILPDPSKPSKRSFIEDLLFNKVTLADAGFIKQYGDCLGDIAARDLICAQKFNGLTVLPPLLTDEMIAQYTSALLAGTITSGWTFGAGAALQIPFAMQMAYRFNGIGVTQCVLYENQKLIANQFNSAIGKIQDSLSSTASALGKLQDVVNQNAQALNTLVKQLSSNFGAISSVLNDILSRLDKVEAEVQIDRLITGRLQSLQTYVTQQLIRAAEIRASANLAATKMSECVLGQSKRVDFCGKGYHLMSFPQSAPHGVVFLHVTYVPAQEKNFTTAPAICHDGKAHFPREGVFVSNGTHWFVTQRNFYEPQIITTDNTFVCGNCDVVIGIVNNTVYDPLQPELDSFKEELDKYFKNHTSPDVDLGDISGINASVVNIQKEIDRLNEVAKNLNESLIDLQELGKYEQYIKWPWYIWLGFIAGLIAIVMVTIMLCCMTSCCSCLKGCCSCGSCCKFDEDDSEPVLKGVKLHYT

SEQ ID NO: 13545 - protein, 1273 aa, Artificial Sequence
  SARS-CoV-2/England/20102000506/2020__EPI_ISL_415147 spike protein (1-1273)(N914C_S1123C)
MFVFLVLLPLVSSQCVNLTTRTQLPPAYTNSFTRGVYYPDKVFRSSVLHSTQDLFLPFFSNVTWFHAIHVSGTNGTKRFDNPVLPFNDGVYFASTEKSNIIRGWIFGTTLDSKTQSLLIVNNATNVVIKVCEFQFCNDPFLGVYYHKNNKSWMESEFRVYSSANNCTFEYVSQPFLMDLEGKQGNFKNLREFVFKNIDGYFKIYSKHTPINLVRDLPQGFSALEPLVDLPIGINITRFQTLLALHRSYLTPGDSSSGWTAGAAAYYVGYLQPRTFLLKYNENGTITDAVDCALDPLSETKCTLKSFTVEKGIYQTSNFRVQPTESIVRFPNITNLCPFGEVFNATRFASVYAWNRKRISNCVADYSVLYNSASFSTFKCYGVSPTKLNDLCFTNVYADSFVIRGDEVRQIAPGQTGKIADYNYKLPDDFTGCVIAWNSNNLDSKVGGNYNYLYRLFRKSNLKPFERDISTEIYQAGSTPCNGVEGFNCYFPLQSYGFQPTNGVGYQPYRVVVLSFELLHAPATVCGPKKSTNLVKNKCVNFNFNGLTGTGVLTESNKKFLPFQQFGRDIADTTDAVRDPQTLEILDITPCSFGGVSVITPGTNTSNQVAVLYQGVNCTEVPVAIHADQLTPTWRVYSTGSNVFQTRAGCLIGAEHVNNSYECDIPIGAGICASYQTQTNSPRRARSVASQSIIAYTMSLGAENSVAYSNNSIAIPTNFTISVTTEILPVSMTKTSVDCTMYICGDSTECSNLLLQYGSFCTQLNRALTGIAVEQDKNTQEVFAQVKQIYKTPPIKDFGGFNFSQILPDPSKPSKRSFIEDLLFNKVTLADAGFIKQYGYCLGDIAARDLICAQKFNGLTVLPPLLTDEMIAQYTSALLAGTITSGWTFGAGAALQIPFAMQMAYRFNGIGVTQCVLYENQKLIANQFNSAIGKIQDSLSSTASALGKLQDVVNQNAQALNTLVKQLSSNFGAISSVLNDILSRLDKVEAEVQIDRLITGRLQSLQTYVTQQLIRAAEIRASANLAATKMSECVLGQSKRVDFCGKGYHLMSFPQSAPHGVVFLHVTYVPAQEKNFTTAPAICHDGKAHFPREGVFVSNGTHWFVTQRNFYEPQIITTDNTFVCGNCDVVIGIVNNTVYDPLQPELDSFKEELDKYFKNHTSPDVDLGDISGINASVVNIQKEIDRLNEVAKNLNESLIDLQELGKYEQYIKWPWYIWLGFIAGLIAIVMVTIMLCCMTSCCSCLKGCCSCGSCCKFDEDDSEPVLKGVKLHYT

SEQ ID NO: 13546 - protein, 1273 aa, Artificial Sequence
  SARS-CoV-2/Belgium/VAG-03013/2020__EPI_ISL_415155 spike protein (1-1273)(N914C_S1123C)
MFVFLVLLPLVSSQCVNLTTRTQLPPAYTNSFTRGVYYPDKVFRSSVLHSTQDLFLPFFSNVTWFHAIHVSGTNGTKRFDNPVLPFNDGVYFASTEKSNIIRGWIFGTTLDSKTQSLLIVNNATNVVIKVCEFQFCNDPFLGVYYHKNNKSWMESEFRVYSSANNCTFEYVSQPFLMDLEGKQGNFKNLREFVFKNIDGYFKIYSKHTPINLVRDLPQGFSALEPLVDLPIGINITRFQTLLALHRSYLTPGDSSSGWTAGAAAYYVGYLQPRTFLLKYNENGTITDAVDCALDPLSETKCTLKSFTVEKGIYQTSNFRVQPTESIVRFPNITNLCPFGEVFNATRFASVYAWNRKRISNCVADYSVLYNSASFSTFKCYGVSPTKLNDLCFTNVYADSFVIRGDEVRQIAPGQTGKIADYNYKLPDDFTGCVIAWNSNNLDSKVGGNYNYLYRLFRKSNLKPFERDISTEIYQAGSTPCNGVEGFNCYFPLQSYGFQPTNGVGYQPYRVVVLSFELLHAPATVCGPKKSTNLVKNKCVNFNFNGLTGTGVLTESNKKFLPFQQFGRDIADTTDAVRDPQTLEILDITPCSFGGVSVITPGTNTSNQVAVLYQGVNCTEVPVAIHADQLTPTWRVYSTGSNVFQTRAGCLIGAEHVNNSYECDIPIGAGICASYQTQTNSPRRARSVASQSIIAYTMSLGAENSVAYSNNSIAIPTNFTISVTTEILPVSMTKTSVDCTMYICGDSTECSNLLLQYGSFCTQLNRALTGIAVEQDKNTQEVFAQVKQIYKTPPIKDFGGFNFSQILPDPSKPSKRSFIEDLLFNKVTLADAGFIKQYGDCLGDIAARDLICAQKFNGLTVLPPLLTDEMIAQYTSALLAGTITSGWTFGAGAALQIPFAMQMAYRFNGIGVTQCVLYENQKLIANQFNSAIGKIQDSLSSTATALGKLQDVVNQNAQALNTLVKQLSSNFGAISSVLNDILSRLDKVEAEVQIDRLITGRLQSLQTYVTQQLIRAAEIRASANLAATKMSECVLGQSKRVDFCGKGYHLMSFPQSAPHGVVFLHVTYVPAQEKNFTTAPAICHDGKAHFPREGVFVSNGTHWFVTQRNFYEPQIITTDNTFVCGNCDVVIGIVNNTVYDPLQPELDSFKEELDKYFKNHTSPDVDLGDISGINASVVNIQKEIDRLNEVAKNLNESLIDLQELGKYEQYIKWPWYIWLGFIAGLIAIVMVTIMLCCMTSCCSCLKGCCSCGSCCKFDEDDSEPVLKGVKLHYT

SEQ ID NO: 13547 - protein, 1273 aa, Artificial Sequence
  SARS-CoV-2/Belgium/BC-03016/2020__EPI_ISL_415157 spike protein (1-1273)(N914C_S1123C)
MFVFLVLLPLVSSQCVNLTTRTQLPPAYTNSFTRGVYYPDKVFRSSVLHSTQDLFLPFFSNVTWFHAIHVSGTNGTKRFDNPVLPFNDGVYFASTEKSNIIRGWIFGTTLDSKTQSLLIVNNATNVVIKVCEFQFCNDPFLGVYYHKNNKSWMESEFRVYSSANNCTFEYVSQPFLMDLEGKQGNFKNLREFVFKNIDGYFKIYSKHTPINLVRDLPQGFSALEPLVDLPIGINITRFQTLLALHRSYLTPGDSSSGWTAGAAAYYVGYLQPRTFLLKYNENGTITDAVDCALDPLSETKCTLKSFTVEKGIYQTSNFRVQPTESIVRFPNITNLCPFGEVFNATRFASVYAWNRKRISNCVADYSVLYNSASFSTFKCYGVSPTKLNDLCFTNVYADSFVIRGDEVRQIAPGQTGKIADYNYKLPDDFTGCVIAWNSNNLDSKVGGNYNYLYRLFRKSNLKPFERDISTEIYQAGSTPCNGVEGFNCYFPLQSYGFQPTNGVGYQPYRVVVLSFELLHAPATVCGPKKSTNLVKNKCVNFNFNGLTGTGVLTESNKKFLPFQQFGRDIADTTDAVRDPQTLEILDITPCSFGGVSVITPGTNTSNQVAVLYQGVNCTEVPVAIHADQLTPTWRVYSTGSNVFQTRAGCLIGAEHVNNSYECDIPIGAGICASYQTQTNSPRRARSVASQSIIAYTMSLGAENSVAYSNNSIAIPTNFTISVTTEILPVSMTKTSVDCTMYICGDSTECSNLLLQYGSFCTQLNRALTGIAVEQDKNTQEVFAQVKQIYKTPPIKDFGGFNFSQILPDPSKPSKRSFIEDLLFNKVTLADAGFIKQYGDCLGDIAARDLICAQKFNGLTVLPPLLTDEMIAQYTSALLAGTITSGWTFGAGAALQIPFAMQMAYRFNGIGVTQCVLYENQKLIANQFNSAIGKIQDSLSSTAPALGKLQDVVNQNAQALNTLVKQLSSNFGAISSVLNDILSRLDKVEAEVQIDRLITGRLQSLQTYVTQQLIRAAEIRASANLAATKMSECVLGQSKRVDFCGKGYHLMSFPQSAPHGVVFLHVTYVPAQEKNFTTAPAICHDGKAHFPREGVFVSNGTHWFVTQRNFYEPQIITTDNTFVCGNCDVVIGIVNNTVYDPLQPELDSFKEELDKYFKNHTSPDVDLGDISGINASVVNIQKEIDRLNEVAKNLNESLIDLQELGKYEQYIKWPWYIWLGFIAGLIAIVMVTIMLCCMTSCCSCLKGCCSCGSCCKFDEDDSEPVLKGVKLHYT

SEQ ID NO: 13548 - protein, 1273 aa, Artificial Sequence
  SARS-CoV-2/Germany/BavPat3/2020__EPI_ISL_414521 spike protein (1-1273)(N914C_S1123C)
MFVFLVLLPLVSSQCVNLTTRTQLPPAYTNSFTRGVYYPDKVFRSSVLHSTQDLFLPFFSNVTWFHAIHVSGTNGTKRFDNPVLPFNDGVYFASTEKSNIIRGWIFGTTLDSKTQSLLIVNNATNVVIKVCEFQFCNDPFLGVYYHKNNKSWMESEFRVYSSANNCTFEYVSQPFLMDLEGKQGNFKNLREFVFKNIDGYFKIYSKHTPINLVRDLPQGFSALEPLVDLPIGINITRFQTLLALHRSYLTPGDSSSGWTAGAAAYYVGYLQPRTFLLKYNENGTITDAVDCALDPLSETKCTLKSFTVEKGIYQTSNFRVQPTESIVRFPNITNLCPFGEVFNATRFASVYAWNRKRISNCVADYSVLYNSASFSTFKCYGVSPTKLNDLCFTNVYADSFVIRGDEVRQIAPGQTGKIADYNYKLPDDFTGCVIAWNSNNLDSKVGGNYNYLYRLFRKSNLKPFERDISTEIYQAGSTPCNGVEGFNCYFPLQSYGFQPTNGVGYQPYRVVVLSFELLHAPATVCGPKKSTNLVKNKCVNFNFNGLTGTGVLTESNKKFLPFQQFGRDIADTTDAVRDPQTLEILDITPCSFGGVSVITPGTNTSNQVAVLYQDVNCTEVPVAIHADQLTPTWRVYSTGSNVFQTRAGCLIGAEHVNNSYECDIPIGAGICASYQTQTNSPRRARSVASQSIIAYTMSLGAENSVAYSNNSIAIPTNFTISVTTEILPVSMTKTSVDCTMYICGDSTECSNLLLQYGSFCTQLNRALTGIAVEQDKNTQQVFAQVKQIYKTPPIKDFGGFNFSQILPDPSKPSKRSFIEDLLFNKVTLADAGFIKQYGDCLGDIAARDLICAQKFNGLTVLPPLLTDEMIAQYTSALLAGTITSGWTFGAGAALQIPFAMQMAYRFNGIGVTQCVLYENQKLIANQFNSAIGKIQDSLSSTASALGKLQDVVNQNAQALNTLVKQLSSNFGAISSVLNDILSRLDKVEAEVQIDRLITGRLQSLQTYVTQQLIRAAEIRASANLAATKMSECVLGQSKRVDFCGKGYHLMSFPQSAPHGVVFLHVTYVPAQEKNFTTAPAICHDGKAHFPREGVFVSNGTHWFVTQRNFYEPQIITTDNTFVCGNCDVVIGIVNNTVYDPLQPELDSFKEELDKYFKNHTSPDVDLGDISGINASVVNIQKEIDRLNEVAKNLNESLIDLQELGKYEQYIKWPWYIWLGFIAGLIAIVMVTIMLCCMTSCCSCLKGCCSCGSCCKFDEDDSEPVLKGVKLHYT

SEQ ID NO: 13549 - protein, 1273 aa, Artificial Sequence
  SARS-CoV-2/France/HF1805/2020__EPI_ISL_414628 spike protein (1-1273)(N914C_S1123C)
MFVFLVLLPLVSSQCVNLTTRTQLPPAYTNSFTRGVYYPDKVFRSSVLHSTQDLFLPFFSNVTWFHAIHVSGTNGTKRFDNPVLPFNDGVYFASTEKSNIIRGWIFGTTLDSKTQSLLIVNNATNVVIKVCEFQFCNDPFLGVYYHKNNKSWMESEFRVYSSANNCTFEYVSQPFLMDLEGKQGNFKNLREFVFKNIDGYFKIYSKHTPINLVRDLPQGFSALEPLVDLPIGINITRFQTLLALHRSYLTPGDSSSGWTAGAAAYYVGYLQPRTFLLKYNENGTITDAVDCALDPLSETKCTLKSFTVEKGIYQTSNFRVQPTESIVRFPNITNLCPFGEVFNATRFASVYAWNRKRISNCVADYSVLYNSASFSTFKCYGVSPTKLNDLCFTNVYADSFVIRGDEVRQIAPGQTGKIADYNYKLPDDFTGCVIAWNSNNLDSKVGGNYNYLYRLFRKSNLKPFERDISTEIYQAGSTPCNGVEGFNCYFPLQSYGFQPTNGVGYQPYRVVVLSFELLHAPATVCGPKKSTNLVKNKCVNFNFNGLTGTGVLTESNKKFLPFQQFGRDIADTTDAVRDPQTLEILDITPCSFGGVSVITPGTNTSNQVAVLYQGVNCTEVPVAIHADQLTPTWRVYSTGSNVFQTRAGCLIGAEHVNNSYECDIPIGAGICASYQTQTNSPRRARSVASQSIIAYTMSLGAENSVAYSNNSIAIPTNFTISVTTEILPVSMTKTSVDCTMYICGDSTECSNLLLQYGSFCTQLNRALTGIAVEQDKNTQEVFAQVKQIYKTPPIKDFGGFNFSQILPDPSKPSKRSFIEDLLFNKVTLADAGFIKQYGDCLGDIAARDLICAQKFNGLTVLPPLLTDEMIAQYTSALLAGTITSGWTFGAGAALQIPFAMQMAYRFNGIGVTQCVLYENQKLIANQFNSAIGKIQDSLSSTASALGKLQDVVNQNAQALNTLVKQLSSNFGAISSVLNDILSRLDKVEAEVQIDRLITGRLQSLQTYVTQQLIRAAEIRASANLAATKMSECVLGQSKRVDFCGKGYHLMSFPQSAPHGVVFLHVTYVPAQEKNFTTAPAICHDGKAHFPREGVFVSNGTHWFVTQRNFYEPQIITTDNTFVCGNCDVVIGVVNNTVYDPLQPELDSFKEELDKYFKNHTSPDVDLGDISGINASVVNIQKEIDRLNEVAKNLNESLIDLQELGKYEQYIKWPWYIWLGFIAGLIAIVMVTIMLCCMTSCCSCLKGCCSCGSCCKFDEDDSEPVLKGVKLHYT

SEQ ID NO: 13550 - protein, 1273 aa, Artificial Sequence
  SARS-CoV-2/Netherlands/ZuidHolland_9/2020__EPI_ISL_414445 spike protein (1-1273)(N914C_S1123C)
MFVFLVLLPLVSSQCVNLTTRTQLPPAYTNSFTRGVYYPDKVFRSSVLHSTQDLFLPFFSNVTWFHAIHVSGTNGTKRFDNPVLPFNDGVYFASTEKSNIIRGWIFGTTLDSKTQSLLIVNNATNVVIKVCEFQFCNDPFLGVYYHKNNKSWMESEFRVYSSANNCTFEYVSQPFLMDLEGKQGNFKNLREFVFKNIDGYFKIYSKHTPINLVRDLPQGFSALEPLVDLPIGINITRFQTLLALHRSYLTPGDSSSGWTAGAAAYYVGYLQPRTFLLKYNENGTITDAVDCALDPLSETKCTLKSFTVEKGIYQTSNFRVQPTESIVRFPNITNLCPFGEVFNATRFASVYAWNRKRISNCVADYSVLYNSASFSTFKCYGVSPTKLNDLCFTNVYADSFVIRGDEVRQIAPGQTGKIADYNYKLPDDFTGCVIAWNSNNLDSKVGGNYNYLYRLFRKSNLKPFERDISTEIYQAGSTPCNGVEGFNCYFPLQSYGFQPTNGVGYQPYRVVVLSFELLHAPATVCGPKKSTNLVKNKCVNFNFNGLTGTGVLTESNKKFLPFQQFGRDIADTTDAVRDPQTLEILDITPCSFGGVSVITPGTNTSNQVAVLYQGVNCTEVPVAIHADQLTPTWRVYSTGSNVFQTRAGCLIGAEHVNNSYECDIPIGAGICASYQTQTNSPRRARSVASQSIIAYTMSLGAENSVAYSNNSIAIPTNFTISVTTEILPVSMTKTSVDCTMYICGDSTECSNLLLQYGSFCTQLNRALTGIAVEQDKNTQEVFAQVKQIYKTPPIKDFGGFNFSQILPDPSKPSKRSFIEDLLFNKVTLADAGFIKQYGDCLGDIAARDLICVQKFNGLTVLPPLLTDEMIAQYTSALLAGTITSGWTFGAGAALQIPFAMQMAYRFNGIGVTQCVLYENQKLIANQFNSAIGKIQDSLSSTASALGKLQDVVNQNAQALNTLVKQLSSNFGAISSVLNDILSRLDKVEAEVQIDRLITGRLQSLQTYVTQQLIRAAEIRASANLAATKMSECVLGQSKRVDFCGKGYHLMSFPQSAPHGVVFLHVTYVPAQEKNFTTAPAICHDGKAHFPREGVFVSNGTHWFVTQRNFYEPQIITTDNTFVCGNCDVVIGIVNNTVYDPLQPELDSFKEELDKYFKNHTSPDVDLGDISGINASVVNIQKEIDRLNEVAKNLNESLIDLQELGKYEQYIKWPWYIWLGFIAGLIAIVMVTIMLCCMTSCCSCLKGCCSCGSCCKFDEDDSEPVLKGVKLHYT

SEQ ID NO: 13551 - protein, 1273 aa, Artificial Sequence
  SARS-CoV-2/Finland/FIN03032020A/2020__EPI_ISL_413602 spike protein (1-1273)(N914C_S1123C)
MFVFLVLLPLVSSQCVNLTTRTQLPPAYTNSFTRGVYYPDKVFRSSVLHSTQDLFLPFFSNVTWFHAIHVSGTNGTKRFDNPVLPFNDGVYFASTEKSNIIRGWIFGTTLDSKTQSLLIVNNATNVVIKVCEFQFCNDPFLGVYYHKNNKSWMESEFRVYSSANNCTFEYVSQPFLMDLEGKQGNFKNLREFVFKNIDGYFKIYSKHTPINLVRDLPQGFSALEPLVDLPIGINITRFQTLLALHRSYLTPGDSSSGWTAGAAAYYVGYLQPRTFLLKYNENGTITDAVDCALDPLSETKCTLKSFTVEKGIYQTSNFRVQPTESIVRFPNITNLCPFGEVFNATRFASVYAWNRKRISNCVADYSVLYNSASFSTFKCYGVSPTKLNDLCFTNVYADSFVIRGDEVRQIAPGQTGKIADYNYKLPDDFTGCVISWNSNNLDSKVGGNYNYLYRLFRKSNLKPFERDISTEIYQAGSTPCNGVEGFNCYFPLQSYGFQPTNGVGYQPYRVVVLSFELLHAPATVCGPKKSTNLVKNKCVNFNFNGLTGTGVLTESNKKFLPFQQFGRDIADTTDAVRDPQTLEILDITPCSFGGVSVITPGTNTSNQVAVLYQGVNCTEVPVAIHADQLTPTWRVYSTGSNVFQTRAGCLIGAEHVNNSYECDIPIGAGICASYQTQTNSPRRARSVASQSIIAYTMSLGAENSVAYSNNSIAIPTNFTISVTTEILPVSMTKTSVDCTMYICGDSTECSNLLLQYGSFCTQLNRALTGIAVEQDKNTQEVFAQVKQIYKTPPIKDFGGFNFSQILPDPSKPSKRSFIEDLLFNKVTLADAGFIKQYGDCLGDIAARDLICAQKFNGLTVLPPLLTDEMIAQYTSALLAGTITSGWTFGAGAALQIPFAMQMAYRFNGIGVTQCVLYENQKLIANQFNSAIGKIQDSLSSTASALGKLQDVVNQNAQALNTLVKQLSSNFGAISSVLNDILSRLDKVEAEVQIDRLITGRLQSLQTYVTQQLIRAAEIRASANLAATKMSECVLGQSKRVDFCGKGYHLMSFPQSAPHGVVFLHVTYVPAQEKNFTTAPAICHDGKAHFPREGVFVSNGTHWFVTQRNFYEPQIITTDNTFVCGNCDVVIGIVNNTVYDPLQPELDSFKEELDKYFKNHTSPDVDLGDISGINASVVNIQKEIDRLNEVAKNLNESLIDLQELGKYEQYIKWPWYIWLGFIAGLIAIVMVTIMLCCMTSCCSCLKGCCSCGSCCKFDEDDSEPVLKGVKLHYT

SEQ ID NO: 13552 - protein, 1273 aa, Artificial Sequence
  SARS-CoV-2/France/GE1977/2020__EPI_ISL_414632 spike protein (1-1273)(N914C_S1123C)
MFVFLVLLPLVSSQCVNLTTRTQLPPAYTNSFTRGVYYPDKVFRSSVLHSTQDLFLPFFSNVTWFHAIHVSGTNGTKRFDNPVLPFNDGVYFASTEKSNIIRGWIFGTTLDSKTQSLLIVNNATNVVIKVCEFQFCNDPFLGVYYHKNNKSWMESEFRVYSSANNCTFEYVSQPFLMDLEGKQGNFKNLREFVFKNIDGYFKIYSKHTPINLVRDLPQGFSALEPLVDLPIGINITRFQTLLALHRSYLTPGDSSSGWTAGAAAYYVGYLQPRTFLLKYNENGTITDAVDCALDPLSETKCTLKSFTVEKGIYQTSNFRVQPTESIVRFPNITNLCPFGEVFNATRFASVYAWNRKRISNCVADYSVLYNSASFSTFKCYGVSPTKLNDLCFTNVYADSFVIRGDEVRQIAPGQTGKIADYNYKLPDDFTGCVIAWNSNNLDSKVGGNYNYLYRLFRKSNLKPFERDISTEIYQAGSTPCNGVEGFNCYFPLQSYGFQPTNGVGYQPYRVVVLSFELLHAPATVCGPKKSTNLVKNKCVNFNFNGLTGTGVLTESNKKFLPFQQFGRDIADTTDAVRDPQTLEILDITPCSFGGVSVITPGTNTSNQVAVLYQGVNCTEVPVAIHADQLTPTWRVYSTGSNVFQTRAGCLIGAEHVNNSYECDIPIGAGICASYQTQTNSPRRARSVASQSIIAYTMSLGAENSVAYSNNSIAIPTNFTISVTTEILPVSMTKTSVDCTMYICGDSTECSNLLLQYGSFCTQLNRALTGIAVEQDKNTQEVFAQVKQIYKTPPIKDFGGFNFSQILPDPSKPSKRSFIEDLLFNKVTLADAGFIKQYGDCLGDIAARDLICAQKFNGLTVLPPLLTDEMIAQYTSALLAGTITSGWTFGAGAALQIPFAMQMAYRFNGIGVTQCVLYENQKLIANQFNSAIGKIQDSLFSTASALGKLQDVVNQNAQALNTLVKQLSSNFGAISSVLNDILSRLDKVEAEVQIDRLITGRLQSLQTYVTQQLIRAAEIRASANLAATKMSECVLGQSKRVDFCGKGYHLMSFPQSAPHGVVFLHVTYVPAQEKNFTTAPAICHDGKAHFPREGVFVSNGTHWFVTQRNFYEPQIITTDNTFVCGNCDVVIGIVNNTVYDPLQPELDSFKEELDKYFKNHTSPDVDLGDISGINASVVNIQKEIDRLNEVAKNLNESLIDLQELGKYEQYIKWPWYIWLGFIAGLIAIVMVTIMLCCMTSCCSCLKGCCSCGSCCKFDEDDSEPVLKGVKLHYT

SEQ ID NO: 13553 - protein, 1273 aa, Artificial Sequence
  SARS-CoV-2/Finland/FIN-313/2020__EPI_ISL_414641 spike protein (1-1273)(N914C_S1123C)
MFVFLVLLPLVSSQCVNLTTRTQLPPAYTNSFTRGVYYPDKVFRSSVLHSTQDLFLPFFSNVTWFHAIHVSGTNGTKRFDNPVLPFNDGVYFASTEKSNIIRGWIFGTTLDSKTQSLLIVNNATNVVIKVCEFQFCNDPFLGVYYHKNNKSWMESEFRVYSSANNCTFEYVSQPFLMDLEGKQGNFKNLREFVFKNIDGYFKIYSKHTPINLVRDLPQGFSALEPLVDLPIGINITRFKTLLALHRSYLTPGDSSSGWTAGAAAYYVGYLQPRTFLLKYNENGTITDAVDCALDPLSETKCTLKSFTVEKGIYQTSNFRVQPTESIVRFPNITNLCPFGEVFNATRFASVYAWNRKRISNCVADYSVLYNSASFSTFKCYGVSPTKLNDLCFTNVYADSFVIRGDEVRQIAPGQTGKIADYNYKLPDDFTGCVIAWNSNNLDSKVGGNYNYLYRLFRKSNLKPFERDISTEIYQAGSTPCNGVEGFNCYFPLQSYGFQPTNGVGYQPYRVVVLSFELLHAPATVCGPKKSTNLVKNKCVNFNFNGLTGTGVLTESNKKFLPFQQFGRDIADTTDAVRDPQTLEILDITPCSFGGVSVITPGTNTSNQVAVLYQGVNCTEVPVAIHADQLTPTWRVYSTGSNVFQTRAGCLIGAEHVNNSYECDIPIGAGICASYQTQTNSPRRARSVASQSIIAYTMSLGAENSVAYSNNSIAIPTNFTISVTTEILPVSMTKTSVDCTMYICGDSTECSNLLLQYGSFCTQLNRALTGIAVEQDKNTQEVFAQVKQIYKTPPIKDFGGFNFSQILPDPSKPSKRSFIEDLLFNKVTLADAGFIKQYGDCLGDIAARDLICAQKFNGLTVLPPLLTDEMIAQYTSALLAGTITSGWTFGAGAALQIPFAMQMAYRFNGIGVTQCVLYENQKLIANQFNSAIGKIQDSLSSTASALGKLQDVVNQNAQALNTLVKQLSSNFGAISSVLNDILSRLDKVEAEVQIDRLITGRLQSLQTYVTQQLIRAAEIRASANLAATKMSECVLGQSKRVDFCGKGYHLMSFPQSAPHGVVFLHVTYVPAQEKNFTTAPAICHDGKAHFPREGVFVSNGTHWFVTQRNFYEPQIITTDNTFVCGNCDVVIGIVNNTVYDPLQPELDSFKEELDKYFKNHTSPDVDLGDISGINASVVNIQKEIDRLNEVAKNLNESLIDLQELGKYEQYIKWPWYIWLGFIAGLIAIVMVTIMLCCMTSCCSCLKGCCSCGSCCKFDEDDSEPVLKGVKLHYT

SEQ ID NO: 13554 - protein, 1273 aa, Artificial Sequence
  SARS-CoV-2/Netherlands/ZuidHolland_2/2020__EPI_ISL_414556 spike protein (1-1273)(N914C_S1123C)
MFVFLVLLPLVSSQCVNLTTRTQLPPAYTNSFTRGVYYPDKVFRSSVLHSTQDLFLPFFSNVTWFHAIHVSGTNGTKRFDNPVLPFNDGVYFASTEKSNIIRGWIFGTTLDSKTQSLLIVNNATNVVIKVCEFQFCNDPFLGVYYHKNNKSWMESEFRVYSSANNCTFEYVSQPFLMDLEGKQGNFKNLREFVFKNIDGYFKIYSKHTPINLVRDLPQGFSALEPLVDLPIGINITRFQTLLALHRSYLTPGDSSSGWTAGAAAYYVGYLQPRTFLLKYNENGTITDAVDCALDPLSETKCTLKSFTVEKGIYQTSNFRVQPTESIVRFPNITNLCPFGEVFNATRFASVYAWNRKRISNCVADYSVLYNSASFSTFKCYGVSPTKLNDLCFTNVYADSFVIRGDEVRQIAPGQTGKIADYNYKLPDDFTGCVIAWNSNNLDSKVGGNYNYLYRLFRKSNLKPFERDISTEIYQAGSTPCNGVEGFNCYFPLQSYGFQPTNGVGYQPYRVVVLSFELLHAPATVCGPKKSTNLVKNKCVNFNFNGLTGTGVLTESNKKFLPFQQFGRDIADTTDAVRDPQTLEILDITPCSFGGVSVITPGTNTSNQVAVLYQGVNCTEVPVAIHADQLTPTWRVYSTGSNVFQTRAGCLIGAEHVNNSYECDIPIGAGICASYQTQTNSPRRARSVASQSIIAYTMSLGAENSVAYSNNSIAIPTNFTISVTTEILPVSMTKTSVDCTMYICGDSTECSNLLLQYGSFCTQLNRALTGIALEQDKNTQEVFAQVKQIYKTPPIKDFGGFNFSQILPDPSKPSKRSFIEDLLFNKVTLADAGFIKQYGDCLGDIAARDLICAQKFNGLTVLPPLLTDEMIAQYTSALLAGTITSGWTFGAGAALQIPFAMQMAYRFNGIGVTQCVLYENQKLIANQFNSAIGKIQDSLSSTASALGKLQDVVNQNAQALNTLVKQLSSNFGAISSVLNDILSRLDKVEAEVQIDRLITGRLQSLQTYVTQQLIRAAEIRASANLAATKMSECVLGQSKRVDFCGKGYHLMSFPQSAPHGVVFLHVTYVPAQEKNFTTAPAICHDGKAHFPREGVFVSNGTHWFVTQRNFYEPQIITTDNTFVCGNCDVVIGIVNNTVYDPLQPELDSFKEELDKYFKNHTSPDVDLGDISGINASVVNIQKEIDRLNEVAKNLNESLIDLQELGKYEQYIKWPWYIWLGFIAGLIAIVMVTIMLCCMTSCCSCLKGCCSCGSCCKFDEDDSEPVLKGVKLHYT

SEQ ID NO: 13555 - protein, 1273 aa, Artificial Sequence
  SARS-CoV-2/USA/WA-UW31/2020__EPI_ISL_414618 spike protein (1-1273)(N914C_S1123C)
MFVFLVLLPLVSSQCVNLTTRTQLPPAYTNSFTRGVYYPDKVFRSSVLHSTQDLFLPFFSNVTWFHAIHVSGTNGTKRFDNPVLPFNDGVYFASTEKSNIIRGWIFGTTLDSKTQSLLIVNNATNVVIKVCEFQFCNDPFLGVYYHKNNKSWMESEFRVYSSANNCTFEYVSQPFLMDLEGKQGNFKNLREFVFKNIDGYFKIYSKHTPINLVRDLPQGFSALEPLVDLPIGINITRFQTLLALHRSYLTPGDSSSGWTAGAAAYYVGYLQPRTFLLKYNENGTITDAVDCALDPLSETKCTLKSFTVEKGIYQTSNFRVQPTESIVRFPNITNLCPFGEVFNATRFASVYAWNRKRISNCVADYSVLYNSASFSTFKCYGVSPTKLNDLCFTNVYADSFVIRGDEVRQIAPGQTGKIADYNYKLPDDFTGCVIAWNSNNLDSKVGGNYNYLYRLFRKSNLKPFERDISTEIYQAGSTPCNGAEGFNCYFPLQSYGFQPTNGVGYQPYRVVVLSFELLHAPATVCGPKKSTNLVKNKCVNFNFNGLTGTGVLTESNKKFLPFQQFGRDIADTTDAVRDPQTLEILDITPCSFGGVSVITPGTNTSNQVAVLYQDVNCTEVPVAIHADQLTPTWRVYSTGSNVFQTRAGCLIGAEHVNNSYECDIPIGAGICASYQTQTNSPRRARSVASQSIIAYTMSLGAENSVAYSNNSIAIPTNFTISVTTEILPVSMTKTSVDCTMYICGDSTECSNLLLQYGSFCTQLNRALTGIAVEQDKNTQEVFAQVKQIYKTPPIKDFGGFNFSQILPDPSKPSKRSFIEDLLFNKVTLADAGFIKQYGDCLGDIAARDLICAQKFNGLTVLPPLLTDEMIAQYTSALLAGTITSGWTFGAGAALQIPFAMQMAYRFNGIGVTQCVLYENQKLIANQFNSAIGKIQDSLSSTASALGKLQDVVNQNAQALNTLVKQLSSNFGAISSVLNDILSRLDKVEAEVQIDRLITGRLQSLQTYVTQQLIRAAEIRASANLAATKMSECVLGQSKRVDFCGKGYHLMSFPQSAPHGVVFLHVTYVPAQEKNFTTAPAICHDGKAHFPREGVFVSNGTHWFVTQRNFYEPQIITTDNTFVCGNCDVVIGIVNNTVYDPLQPELDSFKEELDKYFKNHTSPDVDLGDISGINASVVNIQKEIDRLNEVAKNLNESLIDLQELGKYEQYIKWPWYIWLGFIAGLIAIVMVTIMLCCMTSCCSCLKGCCSCGSCCKFDEDDSEPVLKGVKLHYT

SEQ ID NO: 13556 - protein, 1273 aa, Artificial Sequence
  SARS-CoV-2/South Korea/SNU01/2020__EPI_ISL_411929 spike protein (1-1273)(N914C_S1123C)
MFVFLVLLPLVSSQCVNLTTRTQLPPAYTNSFTRGVYYPDKVFRSSVLHSTQDLFLPFFSNVTWFHAIHVSGTNGTKRFDNPVLPFNDGVYFASTEKSNIIRGWIFGTTLDSKTQSLLIVNNATNVVIKVCEFQFCNDPFLGVYYHKNNKSWMESEFRVYSSANNCTFEYVSQPFLMDLEGKQGNFKNLREFVFKNIDGYFKIYSKHTPINLVRDLPQGFWALEPLVDLPIGINITRFQTLLALHRSYLTPGDSSSGWTAGAAAYYVGYLQPRTFLLKYNENGTITDAVDCALDPLSETKCTLKSFTVEKGIYQTSNFRVQPTESIVRFPNITNLCPFGEVFNATRFASVYAWNRKRISNCVADYSVLYNSASFSTFKCYGVSPTKLNDLCFTNVYADSFVIRGDEVRQIAPGQTGKIADYNYKLPDDFTGCVIAWNSNNLDSKVGGNYNYLYRLFRKSNLKPFERDISTEIYQAGSTPCNGVEGFNCYFPLQSYGFQPTNGVGYQPYRVVVLSFELLHAPATVCGPKKSTNLVKNKCVNFNFNGLTGTGVLTESNKKFLPFQQFGRDIADTTDAVRDPQTLEILDITPCSFGGVSVITPGTNTSNQVAVLYQDVNCTEVPVAIHADQLTPTWRVYSTGSNVFQTRAGCLIGAEHVNNSYECDIPIGAGICASYQTQTNSPRRARSVASQSIIAYTMSLGAENSVAYSNNSIAIPTNFTISVTTEILPVSMTKTSVDCTMYICGDSTECSNLLLQYGSFCTQLNRALTGIAVEQDKNTQEVFAQVKQIYKTPPIKDFGGFNFSQILPDPSKPSKRSFIEDLLFNKVTLADAGFIKQYGDCLGDIAARDLICAQKFNGLTVLPPLLTDEMIAQYTSALLAGTITSGWTFGAGAALQIPFAMQMAYRFNGIGVTQCVLYENQKLIANQFNSAIGKIQDSLSSTASALGKLQDVVNQNAQALNTLVKQLSSNFGAISSVLNDILSRLDKVEAEVQIDRLITGRLQSLQTYVTQQLIRAAEIRASANLAATKMSECVLGQSKRVDFCGKGYHLMSFPQSAPHGVVFLHVTYVPAQEKNFTTAPAICHDGKAHFPREGVFVSNGTHWFVTQRNFYEPQIITTDNTFVCGNCDVVIGIVNNTVYDPLQPELDSFKEELDKYFKNHTSPDVDLGDISGINASVVNIQKEIDRLNEVAKNLNESLIDLQELGKYEQYIKWPWYIWLGFIAGLIAIVMVTIMLCCMTSCCSCLKGCCSCGSCCKFDEDDSEPVLKGVKLHYT

SEQ ID NO: 13557 - protein, 1273 aa, Artificial Sequence
  SARS-CoV-2/China/WF0004/2020__EPI_ISL_413694 spike protein (1-1273)(N914C_S1123C)
MFVFLVLLPLVSSQCVNLTTRTQLPPAYTNSFTRGVYYPDKVFRSSVLHSTQDLFLPFFSNVTWFHAIHVSGTNGTKRFDNPVLPFNDGVYFASTEKSNIIRGWIFGTTLDSKTQSLLIVNNATNVVIKVCEFQFCNDPFLGVYYHKNNKSWTESEFRVYSSANNCTFEYVSQPFLMDLEGKQGNFKNLREFVFKNIDGYFKIYSKHTPINLVRDLPQGFSALEPLVDLPIGINITRFQTLLALHRSYLTPGDSSSGWTAGAAAYYVGYLQPRTFLLKYNENGTITDAVDCALDPLSETKCTLKSFTVEKGIYQTSNFRVQPTESIVRFPNITNLCPFGEVFNATRFASVYAWNRKRISNCVADYSVLYNSASFSTFKCYGVSPTKLNDLCFTNVYADSFVIRGDEVRQIAPGQTGKIADYNYKLPDDFTGCVIAWNSNNLDSKVGGNYNYLYRLFRKSNLKPFERDISTEIYQAGSTPCNGVEGFNCYFPLQSYGFQPTNGVGYQPYRVVVLSFELLHAPATVCGPKKSTNLVKNKCVNFNFNGLTGTGVLTESNKKFLPFQQFGRDIADTTDAVRDPQTLEILDITPCSFGGVSVITPGTNTSNQVAVLYQDVNCTEVPVAIHADQLTPTWRVYSTGSNVFQTRAGCLIGAEHVNNSYECDIPIGAGICASYQTQTNSPRRARSVASQSIIAYTMSLGAENSVAYSNNSIAIPTNFTISVTTEILPVSMTKTSVDCTMYICGDSTECSNLLLQYGSFCTQLNRALTGIAVEQDKNTQEVFAQVKQIYKTPPIKDFGGFNFSQILPDPSKPSKRSFIEDLLFNKVTLADAGFIKQYGDCLGDIAARDLICAQKFNGLTVLPPLLTDEMIAQYTSALLAGTITSGWTFGAGAALQIPFAMQMAYRFNGIGVTQCVLYENQKLIANQFNSAIGKIQDSLSSTASALGKLQDVVNQNAQALNTLVKQLSSNFGAISSVLNDILSRLDKVEAEVQIDRLITGRLQSLQTYVTQQLIRAAEIRASANLAATKMSECVLGQSKRFDFCGKGYHLMSFPQSAPHGVVFLHVTYVPAQEKNFTTAPAICHDGKAHFPREGVFVSNGTHWFVTQRNFYEPQIITTDNTFVCGNCDVVIGIVNNTVYDPLQPELDSFKEELDKYFKNHTSPDVDLGDISGINASVVNIQKEIDRLNEVAKNLNESLIDLQELGKYEQYIKWPWYIWLGFIAGLIAIVMVTIMLCCMTSCCSCLKGCCSCGSCCKFDEDDSEPVLKGVKLHYT

SEQ ID NO: 13558 - protein, 1273 aa, Artificial Sequence
  SARS-CoV-2/China/WF0028/2020__EPI_ISL_413791 spike protein (1-1273)(N914C_S1123C)
MFVFLVLLPLVSSQCVNLTTRTQLPPAYTNSFTRGVYYPDKVFRSSVLHSTQDLFLPFFSNVTWFHAIHVSGTNGTKRFDNPVLPFNDGVYFASTEKSNIIRGWIFGTTLDSKTQSLLIVNNATNVVIKVCEFQFCNDPFLGVYYHKNNKSWMESEFRVYSSANNCTFEYVSQPFLMDLEGKQGNFKNLREFVFKNIDGYFKIYSKHTPINLVRDLPQGFSALEPLVDLPIGINITRFQTLLALHRSYLTPGDSSSGWTAGAAAYYVGYLQPRTFLLKYNENGTITDAVDCALDPLSETKCTLKSFTVEKGIYQTSNFRVQPTESIVRFPNITNLCPFGEVFNATRFASVYAWNRKRISNCVADYSVLYNSASFSTFKCYGVSPTKLNDLCFTNVYADSFVIRGDEVRQIAPGQTGKIADYNYKLPDDFTGCVIAWNSNNLDSKVGGNYNYLYRLFRKSNLKPFERDISTEIYQAGSTPCNGVEGFNCYFPLQSYGFQPTNGVGYQPYRVVVLSFELLHAPATVCGPKKSTNLVKNKCVNFNFNGLTGTGVLTESNKKFLPFQQFGRDIADTTDAVRDPQTLEILDITPCSFGGVSVITPGTNTSNQVAVLYQDVNCTEVPVAIHADQLTPTWRVYSTGSNVFQTRAGCLIGAEHVNNSYECDIPIGAGICASYQTQTNSPRRARSVASQSIIAYTMSLGAENSVAYSNNSIAIPTNFTISVTTEILPVSMTKTSVDCTMYICGDSTECSNLLLQYGSFCTQLNRALTGIAVEQDKNTQEVFAQVKQIYKTPPIKDFGGFNFSQILPDPSKPSKRSFIEDLLFNKVTLADAGFIKQYGDCLGDIAARDLICAQKFNGLTVLPPLLTDEMIAQYTSALLAGTITSGWTFGAGAALQIPFAMQMAYRFNGIGVTQCVLYENQKLIANQFNSAIGKIQDSLSSTASALGKLQDVVNQNAQALNTLVKQLSSNFGAISSVLNDILSRLDKVEAEVQIDRLITGRLQSLQTYVTQQLIRAAEIRASANLAATKMSECVLGQSKRVDFCGKGYHLMSFPQSAPHGVVFLHVTYVPAQEKNFTTAPAICHDGKAHFPREGVFVSNGTHWFVTQRNFYEPQIITTDNTFVCGNCDVVIGIVNNTVYDPLQPELESFKEELDKYFKNHTSPDVDLGDISGINASVVNIQKEIDRLNEVAKNLNESLIDLQELGKYEQYIKWPWYIWLGFIAGLIAIVMVTIMLCCMTSCCSCLKGCCSCGSCCKFDEDDSEPVLKGVKLHYT

SEQ ID NO: 13559 - protein, 1273 aa, Artificial Sequence
  SARS-CoV-2/2019-nCoV/USA-CruiseA-18/2020__MT159716.1 spike protein (1-1273)(N914C_S1123C)
MFVFLVLLPLVSSQCVNLTTRTQLPPAYTNSFTRGVYYPDKVFRSSVLHSTQDLFLPFFSNVTWFHAIHVSGTNGTKRFDNPVLPFNDGVYFASTEKSNIIRGWIFGTTLDSKTQSLLIVNNATNVVIKVCEFQFCNDPFLGVYYHKNNKSWMESELRVYSSANNCTFEYVSQPFLMDLEGKQGNFKNLREFVFKNIDGYFKIYSKHTPINLVRDLPQGFSALEPLVDLPIGINITRFQTLLALHRSYLTPGDSSSGWTAGAAAYYVGYLQPRTFLLKYNENGTITDAVDCALDPLSETKCTLKSFTVEKGIYQTSNFRVQPTESIVRFPNITNLCPFGEVFNATRFASVYAWNRKRISNCVADYSVLYNSASFSTFKCYGVSPTKLNDLCFTNVYADSFVIRGDEVRQIAPGQTGKIADYNYKLPDDFTGCVIAWNSNNLDSKVGGNYNYLYRLFRKSNLKPFERDISTEIYQAGSTPCNGVEGFNCYFPLQSYGFQPTNGVGYQPYRVVVLSFELLHAPATVCGPKKSTNLVKNKCVNFNFNGLTGTGVLTESNKKFLPFQQFGRDIADTTDAVRDPQTLEILDITPCSFGGVSVITPGTNTSNQVAVLYQDVNCTEVPVAIHADQLTPTWRVYSTGSNVFQTRAGCLIGAEHVNNSYECDIPIGAGICASYQTQTNSPRRARSVASQSIIAYTMSLGAENSVAYSNNSIAIPTNFTISVTTEILPVSMTKTSVDCTMYICGDSTECSNLLLQYGSFCTQLNRALTGIAVEQDKNTQEVFAQVKQIYKTPPIKDFGGFNFSQILPDPSKPSKRSFIEDLLFNKVTLADAGFIKQYGDCLGDIAARDLICAQKFNGLTVLPPLLTDEMIAQYTSALLAGTITSGWTFGAGAALQIPFAMQMAYRFNGIGVTQCVLYENQKLIANQFNSAIGKIQDSLSSTASALGKLQDVVNQNAQALNTLVKQLSSNFGAISSVLNDILSRLDKVEAEVQIDRLITGRLQSLQTYVTQQLIRAAEIRASANLAATKMSECVLGQSKRVDFCGKGYHLMSFPQSAPHGVVFLHVTYVPAQEKNFTTAPAICHDGKAHFPREGVFVSNGTHWFVTQRNFYEPQIITTDNTFVCGNCDVVIGIVNNTVYDPLQPELDSFKEELDKYFKNHTSPDVDLGDISGINASVVNIQKEIDRLNEVAKNLNESLIDLQELGKYEQYIKWPWYIWLGFIAGLIAIVMVTIMLCCMTSCCSCLKGCCSCGSCCKFDEDDSEPVLKGVKLHYT

SEQ ID NO: 13560 - protein, 1273 aa, Artificial Sequence
  SARS-CoV-2/SARS-CoV-2/Yunnan-01/human/2020/CHN__MT049951.1 spike protein (1-1273)(N914C_S1123C)
MFVFLVLLPLVSSQCVNLTTRTQLPPANTNSFTRGVYYPDKVFRSSVLHSTQDLFLPFFSNVTWFHAIHVSGTNGTKRFDNPVLPFNDGVYFASTEKSNIIRGWIFGTTLDSKTQSLLIVNNATNVVIKVCEFQFCNDPFLGVYYHKNNKSWMESEFRVYSSANNCTFEYVSQPFLMDLEGKQGNFKNLREFVFKNIDGYFKIYSKHTPINLVRDLPQGFSALEPLVDLPIGINITRFQTLLALHRSYLTPGDSSSGWTAGAAAYYVGYLQPRTFLLKYNENGTITDAVDCALDPLSETKCTLKSFTVEKGIYQTSNFRVQPTESIVRFPNITNLCPFGEVFNATRFASVYAWNRKRISNCVADYSVLYNSASFSTFKCYGVSPTKLNDLCFTNVYADSFVIRGDEVRQIAPGQTGKIADYNYKLPDDFTGCVIAWNSNNLDSKVGGNYNYLYRLFRKSNLKPFERDISTEIYQAGSTPCNGVEGFNCYFPLQSYGFQPTNGVGYQPYRVVVLSFELLHAPATVCGPKKSTNLVKNKCVNFNFNGLTGTGVLTESNKKFLPFQQFGRDIADTTDAVRDPQTLEILDITPCSFGGVSVITPGTNTSNQVAVLYQDVNCTEVPVAIHADQLTPTWRVYSTGSNVFQTRAGCLIGAEHVNNSYECDIPIGAGICASYQTQTNSPRRARSVASQSIIAYTMSLGAENSVAYSNNSIAIPTNFTISVTTEILPVSMTKTSVDCTMYICGDSTECSNLLLQYGSFCTQLNRALTGIAVEQDKNTQEVFAQVKQIYKTPPIKDFGGFNFSQILPDPSKPSKRSFIEDLLFNKVTLADAGFIKQYGDCLGDIAARDLICAQKFNGLTVLPPLLTDEMIAQYTSALLAGTITSGWTFGAGAALQIPFAMQMAYRFNGIGVTQCVLYENQKLIANQFNSAIGKIQDSLSSTASALGKLQDVVNQNAQALNTLVKQLSSNFGAISSVLNDILSRLDKVEAEVQIDRLITGRLQSLQTYVTQQLIRAAEIRASANLAATKMSECVLGQSKRVDFCGKGYHLMSFPQSAPHGVVFLHVTYVPAQEKNFTTAPAICHDGKAHFPREGVFVSNGTHWFVTQRNFYEPQIITTDNTFVCGNCDVVIGIVNNTVYDPLQPELDSFKEELDKYFKNHTSPDVDLGDISGINASVVNIQKEIDRLNEVAKNLNESLIDLQELGKYEQYIKWPWYIWLGFIAGLIAIVMVTIMLCCMTSCCSCLKGCCSCGSCCKFDEDDSEPVLKGVKLHYT

SEQ ID NO: 13561 - protein, 1273 aa, Artificial Sequence
  SARS-CoV-2/USA/WA-UW292/2020__EPI_ISL_418077 spike protein (1-1273)(N914C_S1123C)
MFVFLVLLPLVSSQCVNLTTRTQLPPAYTNSFTRGVYYPDKVFRSSVLHSTQDLFLPFFSNVTWFHAIHVSGTNGTKRFDNPVLPFNDGVYFASTEKSNIIRGWIFGTTLDSKTQSLLIVNNATNVVIKVCEFQFCNDPFLGVYYHKNNKSWMESEFRVYSSANNCTFEYVSQPFLMDLEGKQGNFKNLREFVFKNIDGYFKIYSKHTPINLVRDLPQGFSALEPLVDLPIGINITRFQTLLALHRSYLTPGDSSSGWTAGAAAYYVGYLQPRTFLLKYNENGTITDAVDCALDPLSETKCTLKSFTVEKGIYQTSNFRVQPTESIVRFPNITNLCPFGEVFNATRFASVYAWNRKRISNCVADYSVLYNSASFSTFKCYGVSPTKLNDLCFTNVYADSFVIRGDEVRQIAPGQTGKIADYNYKLPDDFTGCVIAWNSNNLDSKVGGNYNYLYRLFRKSNLKPFERDISTEIYQASSTPCNGVEGFNCYFPLQSYGFQPTNGVGYQPYRVVVLSFELLHAPATVCGPKKSTNLVKNKCVNFNFNGLTGTGVLTESNKKFLPFQQFGRDIADTTDAVRDPQTLEILDITPCSFGGVSVITPGTNTSNQVAVLYQDVNCTEVPVAIHADQLTPTWRVYSTGSNVFQTRAGCLIGAEHVNNSYECDIPIGAGICASYQTQTNSPRRARSVASQSIIAYTMSLGAENSVAYSNNSIAIPTNFTISVTTEILPVSMTKTSVDCTMYICGDSTECSNLLLQYGSFCTQLNRALTGIAVEQDKNTQEVFAQVKQIYKTPPIKDFGGFNFSQILPDPSKPSKRSFIEDLLFNKVTLADAGFIKQYGDCLGDIAARDLICAQKFNGLTVLPPLLTDEMIAQYTSALLAGTITSGWTFGAGAALQIPFAMQMAYRFNGIGVTQCVLYENQKLIANQFNSAIGKIQDSLSSTASALGKLQDVVNQNAQALNTLVKQLSSNFGAISSVLNDILSRLDKVEAEVQIDRLITGRLQSLQTYVTQQLIRAAEIRASANLAATKMSECVLGQSKRVDFCGKGYHLMSFPQSAPHGVVFLHVTYVPAQEKNFTTAPAICHDGKAHFPREGVFVSNGTHWFVTQRNFYEPQIITTDNTFVCGNCDVVIGIVNNTVYDPLQPELDSFKEELDKYFKNHTSPDVDLGDISGINASVVNIQKEIDRLNEVAKNLNESLIDLQELGKYEQYIKWPWYIWLGFIAGLIAIVMVTIMLCCMTSCCSCLKGCCSCGSCCKFDEDDSEPVLKGVKLHYT

SEQ ID NO: 13562 - protein, 1273 aa, Artificial Sequence
  SARS-CoV-2/Iceland/192/2020__EPI_ISL_417819 spike protein (1-1273)(N914C_S1123C)
MFVFFVLLPLVSSQCVNLTTRTQLPPAYTNSFTRGVYYPDKVFRSSVLHSTQDLFLPFFSNVTWFHAIHVSGTNGTKRFDNPVLPFNDGVYFASTEKSNIIRGWIFGTTLDSKTQSLLIVNNATNVVIKVCEFQFCNDPFLGVYYHKNNKSWMESEFRVYSSANNCTFEYVSQPFLMDLEGKQGNFKNLREFVFKNIDGYFKIYSKHTPINLVRDLPQGFSALEPLVDLPIGINITRFQTLLALHRSYLTPGDSSSGWTAGAAAYYVGYLQPRTFLLKYNENGTITDAVDCALDPLSETKCTLKSFTVEKGIYQTSNFRVQPTESIVRFPNITNLCPFGEVFNATRFASVYAWNRKRISNCVADYSVLYNSASFSTFKCYGVSPTKLNDLCFTNVYADSFVIRGDEVRQIAPGQTGKIADYNYKLPDDFTGCVIAWNSNNLDSKVGGNYNYLYRLFRKSNLKPFERDISTEIYQAGSTPCNGVEGFNCYFPLQSYGFQPTNGVGYQPYRVVVLSFELLHAPATVCGPKKSTNLVKNKCVNFNFNGLTGTGVLTESNKKFLPFQQFGRDIADTTDAVRDPQTLEILDITPCSFGGVSVITPGTNTSNQVAVLYQGVNCTEVPVAIHADQLTPTWRVYSTGSNVFQTRAGCLIGAEHVNNSYECDIPIGAGICASYQTQTNSPRRARSVASQSIIAYTMSLGAENSVAYSNNSIAIPTNFTISVTTEILPVSMTKTSVDCTMYICGDSTECSNLLLQYGSFCTQLNRALTGIAVEQDKNTQEVFAQVKQIYKTPPIKDFGGFNFSQILPDPSKPSKRSFIEDLLFNKVTLADAGFIKQYGDCLGDIAARDLICAQKFNGLTVLPPLLTDEMIAQYTSALLAGTITSGWTFGAGAALQIPFAMQMAYRFNGIGVTQCVLYENQKLIANQFNSAIGKIQDSLSSTASALGKLQDVVNQNAQALNTLVKQLSSNFGAISSVLNDILSRLDKVEAEVQIDRLITGRLQSLQTYVTQQLIRAAEIRASANLAATKMSECVLGQSKRVDFCGKGYHLMSFPQSAPHGVVFLHVTYVPAQEKNFTTAPAICHDGKAHFPREGVFVSNGTHWFVTQRNFYEPQIITTDNTFVCGNCDVVIGIVNNTVYDPLQPELDSFKEELDKYFKNHTSPDVDLGDISGINASVVNIQKEIDRLNEVAKNLNESLIDLQELGKYEQYIKWPWYIWLGFIAGLIAIVMVTIMLCCMTSCCSCLKGCCSCGSCCKFDEDDSEPVLKGVKLHYT

SEQ ID NO: 13563 - protein, 1273 aa, Artificial Sequence
  SARS-CoV-2/Belgium/ULG-6939/2020__EPI_ISL_417020 spike protein (1-1273)(N914C_S1123C)
MFVFLVLLPLVSSQCVNLTTRTQLPPAYTNSFTRGVYYPDKVFRSSVLHSTQDLFLPFFSNVTWFHAIHVSGTNGTKRFDNPVLPFNDGVYFASTEKSNIIRGWIFGTTLDSKTQSLLIVNNATNVVIKVCEFQFCNDPFLGVYYHKNNKSWMESEFRVYSSANNCTFEYVSQPFLMDLEGKQGNFKNLREFVFKNIDGYFKIYSKHTPINLVRDLPQGFSALEPLVDLPIGINITRFQTLLALHRSYLTPGDSSSGWTAGAAAYYVGYLQPRTFLLKYNENGTITDAVDCALDPLSETKCTLKSFTVEKGIYQTSNFRVQPTESIVRFPNITNLCPFGEVFNATRFASVYAWNRKRISNCVADYSVLYNSASFSTFKCYGVSPTKLNDLCFTNVYADSFVIRGDEVRQIAPGQTGKIADYNYKLPDDFTGCVIAWNSNNLDSKVGGNYNYLYRLFRKSNLKPFERDISTEIYQAGSTPCNGVEGFNCYFPLQSYGFQPTNGVGYQPYRVVVLSFELLHAPATVCGPKKSTNLVKNKCVNFNFNGLTGTGVLTESNKKFLPFQQFGRDIADTTDAVRDPQTLEILDITPCSFGGVSVITPGTNTSNQVAVLYQGVNCTEVPVAIHADQLTPTWRVYSTGSNVFQTRAGCLIGAEHVNNSYECDIPIGAGICASYQTQTNSPRRARSVASQSIIAYTMSLGAENSVVYSNNSIAIPTNFTISVTTEILPVSMTKTSVDCTMYICGDSTECSNLLLQYGSFCTQLNRALTGIAVEQDKNTQEVFAQVKQIYKTPPIKDFGGFNFSQILPDPSKPSKRSFIEDLLFNKVTLADAGFIKQYGDCLGDIAARDLICAQKFNGLTVLPPLLTDEMIAQYTSALLAGTITSGWTFGAGAALQIPFAMQMAYRFNGIGVTQCVLYENQKLIANQFNSAIGKIQDSLSSTASALGKLQDVVNQNAQALNTLVKQLSSNFGAISSVLNDILSRLDKVEAEVQIDRLITGRLQSLQTYVTQQLIRAAEIRASANLAATKMSECVLGQSKRVDFCGKGYHLMSFPQSAPHGVVFLHVTYVPAQEKNFTTAPAICHDGKAHFPREGVFVSNGTHWFVTQRNFYEPQIITTDNTFVCGNCDVVIGIVNNTVYDPLQPELDSFKEELDKYFKNHTSPDVDLGDISGINASVVNIQKEIDRLNEVAKNLNESLIDLQELGKYEQYIKWPWYIWLGFIAGLIAIVMVTIMLCCMTSCCSCLKGCCSCGSCCKFDEDDSEPVLKGVKLHYT

SEQ ID NO: 13564 - protein, 1273 aa, Artificial Sequence
  SARS-CoV-2/France/HF2496/2020__EPI_ISL_418231 spike protein (1-1273)(N914C_S1123C)
MFVFLVLLPLVSSQCVNLTTRTQLPPAYTNSFTRGVYYPDKVFRSSVLHSTQDLFLPFFSNVTWFHAIHVSGTNGTKRFDNPVLPFNDGVYFASTEKSNIIRGWIFGTTLDSKTQSLLIVNNATNVVIKVCEFQFCNDPFLGVYYHKNNKSWMESEFRVYSSANNCTFEYVSQPFLMDLEGKQGNFKNLREFVFKNIDGYFKIYSKHTPINLVRDLPQGFSALEPLVDLPIGINITRFQTLLALHRSYLTPGDSSSGWTAGAAAYYVGYLQPRTFLLKYNENGTITDAVDCALDPLSETKCTLKSFTVEKGIYQTSNFRVQPTESIVRFPNITNLCPFGEVFNATRFASVYAWNRKRISNCVADYSVLYNSASFSTFKCYGVSPTKLNDLCFTNVYADSFVIRGDEVRQIAPGQTGKIADYNYKLPDDFTGCVIAWNSNNLDSKVGGNYNYLYRLFRKSNLKPFERDISTEIYQAGSTPCNGVEGFNCYFPLQSYGFQPTNGVGYQPYRVVVLSFELLHAPATVCGPKKSTNLVKNKCVNFNFNGLTGTGVLTESNKKFLPFQQFGRDIADTTDAVRDPQTLEILDITPCSFGGVSVITPGTNTSNQVAVLYQGVNCTEVPVAIHADQLTPTWRVYSTGSNVFQTRAGCLIGAEHVNNSYECDIPIGAGICASYQTQTNSPRRARSVASQSIIAYTMSLGAENSVAYSNNSIAIPTNFTISVTTEILPVSMTKTSVDCTMYICGDSTECSNLLLQYGSFCTQLNRALTGIAVEQDKNTQEVFAQVKQIYKTPPIKDFGGFNFSQILPDPSKPSKRSFIEDLLFNKVTLADAGFIKQYGDCLGDIVARDLICAQKFNGLTVLPPLLTDEMIAQYTSALLAGTITSGWTFGAGAALQIPFAMQMAYRFNGIGVTQCVLYENQKLIANQFNSAIGKIQDSLSSTASALGKLQDVVNQNAQALNTLVKQLSSNFGAISSVLNDILSRLDKVEAEVQIDRLITGRLQSLQTYVTQQLIRAAEIRASANLAATKMSECVLGQSKRVDFCGKGYHLMSFPQSAPHGVVFLHVTYVPAQEKNFTTAPAICHDGKAHFPREGVFVSNGTHWFVTQRNFYEPQIITTDNTFVCGNCDVVIGIVNNTVYDPLQPELDSFKEELDKYFKNHTSPDVDLGDISGINASVVNIQKEIDRLNEVAKNLNESLIDLQELGKYEQYIKWPWYIWLGFIAGLIAIVMVTIMLCCMTSCCSCLKGCCSCGSCCKFDEDDSEPVLKGVKLHYT

SEQ ID NO: 13565 - protein, 1273 aa, Artificial Sequence
  SARS-CoV-2/USA/WA-UW291/2020__EPI_ISL_418076 spike protein (1-1273)(N914C_S1123C)
MFVFLVLLPLVSSQCVNLTTRTQLPPAYTNSFTRGVYYPDKVFRSSVLHSTQDLFLPFFSNVTWFHAIHVSGTNGTKRFDNPVLPFNDGVYFASTEKSNIIRGWIFGTTLDSKTQSLLIVNNATNVVIKVCEFQFCNDPFLGVYYHKNNKSWMESEFRVYSSANNCTFEYVSQPFLMDLEGKQGNFKNLREFVFKNIDGYFKIYSKHTPINLVRDLPQGFSALEPLVDLPIGINITRFQTLLALHRSYLTPGDSSSGWTAGAAAYYVGYLQPRTFLLKYNENGTITDAVDCALDPLSETKCTLKSFTVEKGIYQTSNFRVQPTESIVRFPNITNLCPFGEVFNATRFASVYAWNRKRISNCVADYSVLYNSASFSTFKCYGVSPTKLNDLCFTNVYADSFVIRGDEVRQIAPGQTGKIADYNYKLPDDFTGCVIAWNSNNLDSKVGGNYNYLYRLFRKSNLKPFERDISTEIYQAGSTPCNGVEGFNCYFPLQSYGFQPTNGVGYQPYRVVVLSFELLHAPATVCGPKKSTNLVKNKCVNFNFNGLTGTGVLTESNKKFLPFQQFGRDIADTTDAVRDPQTLEILDITPCSFGGVSVITPGTNTSNQVAVLYQGVNCTEVPVAIHADQLTPTWRVYSTGSNVFQTRAGCLIGAEHVNNSYECDIPIGAGICASYQTQTNSPRRARSVASQSIIAYTMSLGAENSVAYSNNSIAIPTNFTISVTTEILPVSMTKTSVDCTMYICGDSTECSNLLLQYGSFCTQLNRALTGIAVEQDKNTQEVFAQVKQIYKTPPIKDFGGFNFSQILPDPSKPSKRSFIEDLLFNKVTLADAGFIKQYGDCLGDIAARDLICAQKFNGLTVLPPLLTDEMIAQYTSALLAGTITSGWTFGAGAALQIPFAMQMAYRFNGIGVTQCVLYENQKLIANQFNSAIGKIQYSLSSTASALGKLQDVVNQNAQALNTLVKQLSSNFGAISSVLNDILSRLDKVEAEVQIDRLITGRLQSLQTYVTQQLIRAAEIRASANLAATKMSECVLGQSKRVDFCGKGYHLMSFPQSAPHGVVFLHVTYVPAQEKNFTTAPAICHDGKAHFPREGVFVSNGTHWFVTQRNFYEPQIITTDNTFVCGNCDVVIGIVNNTVYDPLQPELDSFKEELDKYFKNHTSPDVDLGDISGINASVVNIQKEIDRLNEVAKNLNESLIDLQELGKYEQYIKWPWYIWLGFIAGLIAIVMVTIMLCCMTSCCSCLKGCCSCGSCCKFDEDDSEPVLKGVKLHYT

SEQ ID NO: 13566 - protein, 1273 aa, Artificial Sequence
  SARS-CoV-2/Portugal/PT0034/2020__EPI_ISL_418019 spike protein (1-1273)(N914C_S1123C)
MFVFLVLLPLVSSQCVNLTTRTQLPPAYTNSFTRGVYYPDKVFRSSVLHSTQDLFLPFFSNVTWFHAIHVSGTNGTKRFDNPVLPFNDGVYFASTEKSNIIRGWIFGTTLDSKTQSLLIVNNATNVVIKVCEFQFCNDPFLGVYYHKNNKSWMESEFRVYSSANNCTFEYVSQPFLMDLEGKQGNFKNLREFVFKNIDGYFKIYSKHTPINLVRDLPQGFSALEPLVDLPIGINITRFQTLLALHRSYLTPGDSSSGWTAGAAAYYVGYLQPRTFLLKYNENGTITDAVDCALDPLSETKCTLKSFTVEKGIYQTSNFRVQPTESIVRFPNITNLCPFGEVFNATRFASVYAWNRKRISNCVADYSVLYNSASFSTFKCYGVSPTKLNDLCFTNVYADSFVIRGDEVRQIAPGQTGKIADYNYKLPDDFTGCVIAWNSNNLDSKVGGNYNYLYRLFRKSNLKPFERDISTEIYQAGSTPCNGVEGFNCYFPLQSYGFQPTNGVGYQPYRVVVLSFELLHAPATVCGPKKSTNLVKNKCVNFNFNGLTGTGVLTESNKKFLPFQQFGRDIADTTDAVRDPQTLEILDITPCSFGGVSVITPGTNTSNQVAVLYQGVNCTEVPVAIHADQLTPTWRVYSTGSNVFQTRAGCLIGAEHVNNSYECDIPIGAGICASYQTQTNSPRRARSVASQSIIAYTMSLGAENSVAYSNNSIAIPTNFTISVTTEILPVSMTKTSVDCTMYICGDSTECSNLLLQYGSFCTQLNRALTGIAVEQDKNTQEVFAQVKQIYKTPPIKDFGGFNFSQILPDPSKPSKRSFIEDLLFNKVTLADAGFIKQYGDCLGDIAARDLICAQKFNGLTVLPPLLTDEMIAQYTSALLAGTITSGWTFGAGAALQIPFAMQMAYRFNGIGVTQCVLYENQKLIANQFNSAIGKIQDSLSSTASALGKLQDVVNQNAQALNTLVKQLSSNFGAISSVLNDILSRLDKVEAEVQIDRLITGRLQSLQTYVTQQLIRAAEIRASANLAATKMSECVLGQSKRVDFCGKGYHLMSFPQSAPHGVVFLHVTYVPAQEKNFTTAPAICHDGKAHFPREGVFVSNGTHWFVTQRNFYEPQIITTDNTFVCGNCDVVIGIVNNTVYDPLQPELDSFKEELDKYFKNHTSPDVDLGDISGINASVVNIQKEIDRLNEVAKNLNESLIDLQELGKYEQYIKWPWYIWLGFIAGLIAIVMVTIMLCCITSCCSCLKGCCSCGSCCKFDEDDSEPVLKGVKLHYT

SEQ ID NO: 13567 - protein, 1273 aa, Artificial Sequence
  SARS-CoV-2/Iceland/202/2020__EPI_ISL_417750 spike protein (1-1273)(N914C_S1123C)
MFVFLVLLPLVSSQCVNLTTRTQLPPAYTNSFTRGVYYPDKVFRSSVLHSTQDLFLPFFSNVTWFHAIHVSGTNGTKRFDNPVLPFNDGVYFASTEKSNIIRGWIFGTTLDSKTQSLLIVNNATNVVIKVCEFQFCNDPFLGVYYHKNNKSWMESEFRVYSSANNCTFEYVSQPFLMDLEGKQGNFKNLREFVFKNIDGYFKIYSKHTPINLVRDLPQGFSALEPLVDLPIGINITRFQTLLALHRSYLTPGDSSSGWTAGAAAYYVGYLQPRTFLLKYNENGTITDAVDCALDPLSETKCTLKSFTVEKGIYQTSNFRVQPTESIVRFPNITNLCPFGEVFNATRFASVYAWNRKRISNCVADYSVLYNSASFSTFKCYGVSPTKLNDLCFTNVYADSFVIRGDEVRQIAPGQTGKIADYNYKLPDDFTGCVIAWNSNNLDSKVGGNYNYLYRLFRKSNLKPFERDISTEIYQAGSTPCNGVEGFNCYFPLQSYGFQPTNGVGYQPYRVVVLSFELLHAPATVCGPKKSTNLVKNKCVNFNFNGLTGTGVLTESNKKFLPFQQFGRDIADTTDAVRDPQTLEILDITPCSFGGVSVITPGTNTSNQVAVLYQDVNCTEVPVAIHADQLTPTWRVYSTGSNVFQTRAGCLIGAEHVNNSYECDIPIGAGICASYQTQTNSPRRARSVASQSIIAYTMSLGAENSVAYSNNSIAIPTNFTISVTTEILPVSMTKTSVDCTMYICGDSTECSNLLLQYGSFCTQLNRALTGIAVEQDKNTQEVFAQVKQIYKTPPIKDFGGFNFSQILPDPSKPSKRSFIEDLLFNKVTLADAGFIKQYGDCLGDIAARDLICAQKFNGLTVLPPLLTDEMIAQYTSALLAGTITSGWTFGAGAALQIPFAMQMAYRFNGIGVTQCVLYENQKLIANQFNSAIGKIQDSLSSTASALGKLQDVVNQNAQALNTLVKQLSSNFGAISSVLNDILSRLDKVEAEVQIDRLITGRLQSLQTYVTQQLIRAAEIRASANLAATKMSECVLGQSKRVDFCGKGYHLMSFPQSAPHGVVFLHVTYVPAQEKNFTTAPAICHDGKAHFPREGVFVSNGTHWFVTQRNFYEPQIITTDNTFVCGNCDVVIGIVNNTVYDPLQPELDSFKEELDKYFKNHTSPDVDLGDIPGINASVVNIQKEIDRLNEVAKNLNESLIDLQELGKYEQYIKWPWYIWLGFIAGLIAIVMVTIMLCCMTSCCSCLKGCCSCGSCCKFDEDDSEPVLKGVKLHYT

SEQ ID NO: 13568 - protein, 1273 aa, Artificial Sequence
  SARS-CoV-2/USA/WA-UW261/2020__EPI_ISL_418046 spike protein (1-1273)(N914C_S1123C)
MFVFLVLLPLVSSQCVNLTTRTQLPPAYTNSFTRGVYYPDKVFRSSVLHSTQDLFLPFFSNVTWFHAIHVSGTNGTKRFDNPVLPFNDGVYFASTEKSNIIRGWIFGTTLDSKTQSLLIVNNATNVVIKVCEFQFCNDPFLGVYYHKNNKSWMESEFRVYSSANNCTFEYVSQPFLMDLEGKQGNFKNLREFVFKNIDGYFKIYSKHTPINLVRDLPQGFSALEPLVDLPIGINITRFQTLLALHRSYLTPGDSSSGWTAGAAAYYVGYLQPRTFLLKYNENGTITDAVDCALDPLSETKCTLKSFTVEKGIYQTSNFRVQPTESIVRFPNITNLCPFGEVFNATRFTSVYAWNRKRISNCVADYSVLYNSASFSTFKCYGVSPTKLNDLCFTNVYADSFVIRGDEVRQIAPGQTGKIADYNYKLPDDFTGCVIAWNSNNLDSKVGGNYNYLYRLFRKSNLKPFERDISTEIYQAGSTPCNGVEGFNCYFPLQSYGFQPTNGVGYQPYRVVVLSFELLHAPATVCGPKKSTNLVKNKCVNFNFNGLTGTGVLTESNKKFLPFQQFGRDIADTTDAVRDPQTLEILDITPCSFGGVSVITPGTNTSNQVAVLYQDVNCTEVPVAIHADQLTPTWRVYSTGSNVFQTRAGCLIGAEHVNNSYECDIPIGAGICASYQTQTNSPRRARSVASQSIIAYTMSLGAENSVAYSNNSIAIPTNFTISVTTEILPVSMTKTSVDCTMYICGDSTECSNLLLQYGSFCTQLNRALTGIAVEQDKNTQEVFAQVKQIYKTPPIKDFGGFNFSQILPDPSKPSKRSFIEDLLFNKVTLADAGFIKQYGDCLGDIAARDLICAQKFNGLTVLPPLLTDEMIAQYTSALLAGTITSGWTFGAGAALQIPFAMQMAYRFNGIGVTQCVLYENQKLIANQFNSAIGKIQDSLSSTASALGKLQDVVNQNAQALNTLVKQLSSNFGAISSVLNDILSRLDKVEAEVQIDRLITGRLQSLQTYVTQQLIRAAEIRASANLAATKMSECVLGQSKRVDFCGKGYHLMSFPQSAPHGVVFLHVTYVPAQEKNFTTAPAICHDGKAHFPREGVFVSNGTHWFVTQRNFYEPQIITTDNTFVCGNCDVVIGIVNNTVYDPLQPELDSFKEELDKYFKNHTSPDVDLGDISGINASVVNIQKEIDRLNEVAKNLNESLIDLQELGKYEQYIKWPWYIWLGFIAGLIAIVMVTIMLCCMTSCCSCLKGCCSCGSCCKFDEDDSEPVLKGVKLHYT

SEQ ID NO: 13569 - protein, 1273 aa, Artificial Sequence
  SARS-CoV-2/Portugal/PT0035/2020__EPI_ISL_418020 spike protein (1-1273)(N914C_S1123C)
MFVFLVLLPLVSSQCVNLTTRTQLPPAYTNSFTRGVYYPDKVFRSSVLHSTQDLFLPFFSNVTWFHAIHVSGTNGTKRFDNPVLPFNDGVYFASTEKSNIIRGWIFGTTLDSKTQSLLIVNNATNVVIKVCEFQFCNDPFLGVYYHKNNKSWMESEFRVYSSANNCTFEYVSQPFLMDLEGKQGNFKNLREFVFKNIDGYFKIYSKHTPINLVRDLPQGFSALEPLVDLPIGINITRFQTLLALHRSYLTPGDSSSGWTAGAAAYYVGYLQPRTFLLKYNENGTITDAVDCALDPLSETKCTLKSFTVEKGIYQTSNFRVQPTESIVRFPNITNLCPFGEVFNATRFASVYAWNRKRISNCVADYSVLYNSASFSTFKCYGVSPTKLNDLCFTNVYADSFVIRGDEVRQIAPGQTGKIADYNYKLPDDFTGCVIAWNSNNLDSKVGGNYNYLYRLFRKSNLKPFERDISTEIYQAGSTPCNGVEGFNCYFPLQSYGFQPTNGVGYQPYRVVVLSFELLHAPATVCGPKKSTNLVKNKCVNFNFNGLTGTGVLTESNKKFLPFQQFGRDIADTTDAVRDPQTLEILDITPCSFGGVSVITPGTNTSNQVAVLYQDVNCTEVPVAIHADQLTPTWRVYSTGSNVFQTRAGCLIGAEHVNNSYECDIPIGAGICASYQTQTNSPRRARSVASQSIIAYTMSLGAENSVAYSNNSIAIPTNFTISVTTEILPVSMTKTSVDCTMYICGDSTECSNLLLQYGSFCTQLNRALTGIAVEQDKNTQEVFAQVKQIYKTPPIKDFGGFNFSQILPDPSKPSKRSFIEDLLFNKVTLADAGFIKQYGDCLGDISARDLICAQKFNGLTVLPPLLTDEMIAQYTSALLAGTITSGWTFGAGAALQIPFAMQMAYRFNGIGVTQCVLYENQKLIANQFNSAIGKIQDSLSSTASALGKLQDVVNQNAQALNTLVKQLSSNFGAISSVLNDILSRLDKVEAEVQIDRLITGRLQSLQTYVTQQLIRAAEIRASANLAATKMSECVLGQSKRVDFCGKGYHLMSFPQSAPHGVVFLHVTYVPAQEKNFTTAPAICHDGKAHFPREGVFVSNGTHWFVTQRNFYEPQIITTDNTFVCGNCDVVIGIVNNTVYDPLQPELDSFKEELDKYFKNHTSPDVDLGDISGINASVVNIQKEIDRLNEVAKNLNESLIDLQELGKYEQYIKWPWYIWLGFIAGLIAIVMVTIMLCCMTSCCSCLKGCCSCGSCCKFDEDDSEPVLKGVKLHYT

SEQ ID NO: 13570 - protein, 1273 aa, Artificial Sequence
  SARS-CoV-2/USA/NY-NYUMC7/2020__EPI_ISL_418192 spike protein (1-1273)(N914C_S1123C)
MFVFLVLLPLVSSQCVNLTTRTQLPPAYTNSFTRGVYYPDKVFRSSVLHSTQDLFLPFFSNVTWFHAIHVSGTNGTKRFDNPVLPFNDGVYFASTEKSNIIRGWIFGTTLDSKTQSLLIVNNATNVVIKVCEFQFCNDPFLGVYHHKNNKSWMESEFRVYSSANNCTFEYVSQPFLMDLEGKQGNFKNLREFVFKNIDGYFKIYSKHTPINLVRDLPQGFSALEPLVDLPIGINITRFQTLLALHRSYLTPGDSSSGWTAGAAAYYVGYLQPRTFLLKYNENGTITDAVDCALDPLSETKCTLKSFTVEKGIYQTSNFRVQPTESIVRFPNITNLCPFGEVFNATRFASVYAWNRKRISNCVADYSVLYNSASFSTFKCYGVSPTKLNDLCFTNVYADSFVIRGDEVRQIAPGQTGKIADYNYKLPDDFTGCVIAWNSNNLDSKVGGNYNYLYRLFRKSNLKPFERDISTEIYQAGSTPCNGVEGFNCYFPLQSYGFQPTNGVGYQPYRVVVLSFELLHAPATVCGPKKSTNLVKNKCVNFNFNGLTGTGVLTESNKKFLPFQQFGRDIADTTDAVRDPQTLEILDITPCSFGGVSVITPGTNTSNQVAVLYQGVNCTEVPVAIHADQLTPTWRVYSTGSNVFQTRAGCLIGAEHVNNSYECDIPIGAGICASYQTQTNSPRRARSVASQSIIAYTMSLGAENSVAYSNNSIAIPTNFTISVTTEILPVSMTKTSVDCTMYICGDSTECSNLLLQYGSFCTQLNRALTGIAVEQDKNTQEVFAQVKQIYKTPPIKDFGGFNFSQILPDPSKPSKRSFIEDLLFNKVTLADAGFIKQYGDCLGDIAARDLICAQKFNGLTVLPPLLTDEMIAQYTSALLAGTITSGWTFGAGAALQIPFAMQMAYRFNGIGVTQCVLYENQKLIANQFNSAIGKIQDSLSSTASALGKLQDVVNQNAQALNTLVKQLSSNFGAISSVLNDILSRLDKVEAEVQIDRLITGRLQSLQTYVTQQLIRAAEIRASANLAATKMSECVLGQSKRVDFCGKGYHLMSFPQSAPHGVVFLHVTYVPAQEKNFTTAPAICHDGKAHFPREGVFVSNGTHWFVTQRNFYEPQIITTDNTFVCGNCDVVIGIVNNTVYDPLQPELDSFKEELDKYFKNHTSPDVDLGDISGINASVVNIQKEIDRLNEVAKNLNESLIDLQELGKYEQYIKWPWYIWLGFIAGLIAIVMVTIMLCCMTSCCSCLKGCCSCGSCCKFDEDDSEPVLKGVKLHYT

SEQ ID NO: 13571 - protein, 1273 aa, Artificial Sequence
  SARS-CoV-2/Iceland/189/2020__EPI_ISL_417709 spike protein (1-1273)(N914C_S1123C)
MFVFLVLLPLVSSQCVNLTTRTQLPPAYTNSFTRGVYYPDKVFRSSVLHSTQDLFLPFFSNVTWFHAIHVSGTNGTKRFDNPVLPFNDGVYFASTEKSNIIRGWIFGTTLDSKTQSLLIVNNATNVVIKVCEFQFCNDPFLGVYYHKNNKSWMESEFRVYSSANNCTFEYVSQPFLMDLEGKQGNFKNLREFVFKNIDGYFKIYSKHTPINLVRDLPQGFSALEPLVDLPIGINITRFQTLLALHRSYLTPGDSSSGWTAGAAAYYVGYLQPRTFLLKYNENGTITDAVDCALDPLSETKCTLKSFTVEKGIYQTSNFRVQPTESIVRFPNITNLCPFGEVFNATRFASVYAWNRKRISNCVADYSVLYNSASFSTFKCYGVSPTKLNDLCFTNVYADSFVIRGDEVRQIAPGQTGKIADYNYKLPDDFTGCVIAWNSNNLDSKVGGNYNYLYRLFRKSNLKPFERDISTEIYQAGSTPCNGVEGFNCYFPLQSYGFQPTNGVGYQPYRVVVLSFELLHAPATVCGPKKSTNLVKNKCVNFNFNGLTGTGVLTESNKKFLPFQQFGRDIADTTDAVRDPQTLEILDITPCSFGGVSVITPGTNTSNQVAVLYQGVNCTEVPVAIHADQLTPTWRVYSTGSNVFQTRAGCLIGAEHVNNSYECDIPIGAGICASYQTQTNSPRRARSVASQSIIAYTMSLGAENSVAYSNNSIAIPTNFTISVTTEILPVSMTKTSVDCTMYICGDSTECSNLLLQYGSFCTQLNRALTGIAVEQDKNTQEVFAQVKQIYKTPPIKDFGGFNFSQILPDPSKPSKRSFIEDLLFNKVTLADAGFTKQYGDCLGDIAARDLICAQKFNGLTVLPPLLTDEMIAQYTSALLAGTITSGWTFGAGAALQIPFAMQMAYRFNGIGVTQCVLYENQKLIANQFNSAIGKIQDSLSSTASALGKLQDVVNQNAQALNTLVKQLSSNFGAISSVLNDILSRLDKVEAEVQIDRLITGRLQSLQTYVTQQLIRAAEIRASANLAATKMSECVLGQSKRVDFCGKGYHLMSFPQSAPHGVVFLHVTYVPAQEKNFTTAPAICHDGKAHFPREGVFVSNGTHWFVTQRNFYEPQIITTDNTFVCGNCDVVIGIVNNTVYDPLQPELDSFKEELDKYFKNHTSPDVDLGDISGINASVVNIQKEIDRLNEVAKNLNESLIDLQELGKYEQYIKWPWYIWLGFIAGLIAIVMVTIMLCCMTSCCSCLKGCCSCGSCCKFDEDDSEPVLKGVKLHYT

SEQ ID NO: 13572 - protein, 1273 aa, Artificial Sequence
  SARS-CoV-2/Australia/NSW56/2020__EPI_ISL_417408 spike protein (1-1273)(N914C_S1123C)
MFVFLVLLPLVSSQCVNLTTRTQLPPAYTNSFTRGVYYPDKVFRSSVLHSTQDLFLPFFSNVTWFHAIHVSGTNGTKRFDNPVLPFNDGVYFASTEKSNIIRGWIFGTTLDSKTQSLLIVNNATNVVIKVCEFQFCNDPFLGVYYHKNNKSWMESEFRVYSSANNCTFEYVSQPFLMDLEGKQGNFKNLREFVFKNIDGYFKIYSKHTPINLVRDLPQGFSALEPLVDLPIGINITRFQTLLALHRSYLTPGDSSSGWTAGAAAYYVGYLQPRTFLLKYNENGTITDAVDCALDPLSETKCTLKSFTVEKGIYQTSNFRVQPTESIVRFPNITNLCPFGEVFNATRFASVYAWNRKRISNCVADYSVLYNSASFSTFKCYGVSPTKLNDLCFTNVYADSFVIRGDEVRQIAPGQTGKIADYNYKLPDDFTGCVIAWNSNNLDSKVGGNYNYLYRLFRKSNLKPFERDISTEIYQAGSTPCNGVEGFNCYFPLQSYGFQPTNGVGYQPYRVVVLSFELLHAPATVCGPKKSTNLVKNKCVNFNFNGLTGTGVLTESNKKFLPFQQFGRDIADTTDAVRDPQTLEILDITPCSFGGVSVITPGTNTSNQVAVLYQDVNCTEVPVAIHADQLTPTWRVYSTGSNVFQTRAGCLIGAEHVNNSYECDIPIGAGICASYQTQTNSPRRARSVASQSIIAYTMSLGAENSVAYSNNSIAIPTNFTISVTTEILPVSMTKTSVDCTMYICGDSTECSNLLLQYGSFCTQLNRALTGIAVEQDKNTQEVFAQVKQIYKTPPIKDFGGFNFSQILPDSSKPSKRSFIEDLLFNKVTLADAGFIKQYGDCLGDIAARDLICAQKFNGLTVLPPLLTDEMIAQYTSALLAGTITSGWTFGAGAALQIPFAMQMAYRFNGIGVTQCVLYENQKLIANQFNSAIGKIQDSLSSTASALGKLQDVVNQNAQALNTLVKQLSSNFGAISSVLNDILSRLDKVEAEVQIDRLITGRLQSLQTYVTQQLIRAAEIRASANLAATKMSECVLGQSKRVDFCGKGYHLMSFPQSAPHGVVFLHVTYVPAQEKNFTTAPAICHDGKAHFPREGVFVSNGTHWFVTQRNFYEPQIITTDNTFVCGNCDVVIGIVNNTVYDPLQPELDSFKEELDKYFKNHTSPDVDLGDISGINASVVNIQKEIDRLNEVAKNLNESLIDLQELGKYEQYIKWPWYIWLGFIAGLIAIVMVTIMLCCMTSCCSCLKGCCSCGSCCKFDEDDSEPVLKGVKLHYT

SEQ ID NO: 13573 - protein, 1273 aa, Artificial Sequence
  SARS-CoV-2/Iceland/280/2020__EPI_ISL_417608 spike protein (1-1273)(N914C_S1123C)
MFVFLVLLPLVSSQCVNLTTRTQLPPAYTNSFTRGVYYPDKVFRSSVLHSTQDLFLPFFSNVTWFHAIHVSGTNGTKRFDNPVLPFNDGVYFASTEKSNIIRGWIFGTTLDSKTQSLLIVNNATNVVIKVCEFQFCNDPFLGVYYHKNNKSWMESEFRVYSSANNCTFEYVSQPFLMDLEGKQGNFKNLREFVFKNIDGYFKIYSKHTPINLVRDLPQGFSALEPLVDLPIGINITRFQTLLALHRSYLTPGDSSSGWTAGAAAYYVGYLQPRTFLLKYNENGTITDAVDCALDPLSETKCTLKSFTVEKGIYQTSNFRVQPTESIVRFPNITNLCPFGEVFNATRFASVYAWNRKRISNCVADYSVLYNSASFSTFKCYGVSPTKLNDLCFTNVYADSFVIRGDEVRQIAPGQTGKIADYNYKLPDDFTGCVIAWNSNNLDSKVGGNYNYLYRLFRKSNLKPFERDISTEIYQAGSTPCNGVEGFNCYFPLQSYGFQPTNGVGYQPYRVVVLSFELLHAPATVCGPKKSTNLVKNKCVNFNFNGLTGTGVLTESNKKFLPFQQFGRDIADTTDAVRDPQTLEILDITPCSFGGVSVITPGTNTSNQVAVLYQGVNCTEVPVAIHADQLTPTWRVYSTGSNVFQTRAGCLIGAEHVNNSYECDIPIGAGICASYHTQTNSPRRARSVASQSIIAYTMSLGAENSVAYSNNSIAIPTNFTISVTTEILPVSMTKTSVDCTMYICGDSTECSNLLLQYGSFCTQLNRALTGIAVEQDKNTQEVFAQVKQIYKTPPIKDFGGFNFSQILPDPSKPSKRSFIEDLLFNKVTLADAGFIKQYGDCLGDIAARDLICAQKFNGLTVLPPLLTDEMIAQYTSALLAGTITSGWTFGAGAALQIPFAMQMAYRFNGIGVTQCVLYENQKLIANQFNSAIGKIQDSLSSTASALGKLQDVVNQNAQALNTLVKQLSSNFGAISSVLNDILSRLDKVEAEVQIDRLITGRLQSLQTYVTQQLIRAAEIRASANLAATKMSECVLGQSKRVDFCGKGYHLMSFPQSAPHGVVFLHVTYVPAQEKNFTTAPAICHDGKAHFPREGVFVSNGTHWFVTQRNFYEPQIITTDNTFVCGNCDVVIGIVNNTVYDPLQPELDSFKEELDKYFKNHTSPDVDLGDISGINASVVNIQKEIDRLNEVAKNLNESLIDLQELGKYEQYIKWPWYIWLGFIAGLIAIVMVTIMLCCMTSCCSCLKGCCSCGSCCKFDEDDSEPVLKGVKLHYT

SEQ ID NO: 13574 - protein, 1273 aa, Artificial Sequence
  SARS-CoV-2/Iceland/247/2020__EPI_ISL_417575 spike protein (1-1273)(N914C_S1123C)
MFVFLVLLPLVSSQCVNLTTRTQLPPAYTNSFTRGVYYPDKVFRSSVLHSTQDLFLPFFSNVTWFHAIHVSGTNGTKRFDNPVLPFNDGVYFASTEKSNIIRGWIFGTTLDSKTQSLLIVNNATNVVIKVCEFQFCNDPFLGVYYHKNNKSWMESEFRVYSSANNCTFEYVSQPFLMDLEGKQGNFKNLREFVFKNIDGYFKIYSKHTPINLVRDLPQGFSALEPLVDLPIGINITRFQTLLALHRSYLTPGDSSSGWTAGAAAYYVGYLQPRTFLLKYNENGTITDAVDCALDPLSETKCTLKSFTVEKGIYQTSNFRVQPTESIVRFPNITNLCPFGEVFNATRFASVYAWNRKRISNCVADYSVLYNSASFSTFKCYGVSPTKLNDLCFTNVYADSFVIRGDEVRQIAPGQTGKIADYNYKLPDDFTGCVIAWNSNNLDSKVGGNYNYLYRLFRKSNLKPFERDISTEIYQAGSTPCNGVEGFNCYFPLQSYGFQPTNGVGYQPYRVVVLSFELLHAPATVCGPKKSTNLVKNKCVNFNFNGLTGTGVLTESNKKFLPFQQFGRDIADTTDAVRDPQTLEILDITPCSFGGVSVITPGTNTSNQVAVLYQGVNCTEVPVAIHADQLTPTWRVYSTGSNVFQTRAGCLIGAEHVNNSYECDIPIGAGICASYQTQTNSPRRARSVASQSIIAYTMSLGAENSVAYSNNSIAIPTNFTISVTTEILPVSMTKTSVDCTMYICGDSTECSNLLLQYGSFCTQLNRALTGIAVEQDKNTQEVFAQVKQIYKTPPIKDFGGFNFSQILPDPSKPSKRSFIEDLLFNKVTLADAGFIKQYGDCLGDIAARDLICAQKFNGLTVLPPLLTDEMIAQYTSALLAGTITSGWTFGAGAALQIPFAMQMAYRFNGIGVTQCVLYENQKLIANQFNSAIGKIQDSLSSTASALGKLQDVVNQNAQALNTLVKQLSSNFGAISSVLNDILSRLDKVEAEVQIDRLITGRLQSLQTYVTQQLIRAAEIRASANLAATKMSECVLGQSKRVDFCGKGYHLMSFPQSAPHGVVFLHVTYVPAQEKNFTTAPAICHDGKAHFPREGVFVSNGTHWFVTQRNFYEPQIITTDNTFVCGNCDVVIGIVNNTVYDPLQPELDSFKEELDKYFKNHTSPDVDLGDISGINASVVNIQKEIDRLNEVAKNLNESLIDLQELGKYEQYIKWPWYIWLGFIAGLIAIVIVTIMLCCMTSCCSCLKGCCSCGSCCKFDEDDSEPVLKGVKLHYT

SEQ ID NO: 13575 - protein, 1273 aa, Artificial Sequence
  SARS-CoV-2/Iceland/238/2020__EPI_ISL_417566 spike protein (1-1273)(N914C_S1123C)
MFVFLVLLPLVSSQCVNLTTRTQLPPAYTNSFTRGVYYPDKVFRSSVLHSTQDLFLPFFSNVTWFHAIHVSGTNGTKRFDNPVLPFNDGVYFASTEKSNIIRGWIFGTTLDSKTQSLLIVNNATNVVIKVCEFQFCNDPFLGVYYHKNNKSWMESEFRVYSSANNCTFEYVSQPFLMDLEGKQGNFKNLREFVFKNIDGYFKIYSKHTPINLVRDLPQGFSALEPLVDLPIGINITRFQTLLALHRSYLTPGDSSSGWTAGAAAYYVGYLQPRTFLLKYNENGTITDAVDCALDPLSETKCTLKSFTVEKGIYQTSNFRVQPTESIVRFPNITNLCPFGEVFNATRFASVYAWNRKRISNCVADYSVLYNSASFSTFKCYGVSPTKLNDLCFTNVYADSFVIRGDEVRQIAPGQTGKIADYNYKLPDDFTGCVIAWNSNNLDSKVGGNYNYLYRLFRKSNLKPFERDISTEIYQAGSTPCNGVEGFNCYFPLQSYGFQPTNGVGYQPYRVVVLSFELLHAPATVCGPKKSTNLVKNKCVNFNFNGLTGTGVLTESNKKFLPFQQFGRDIADTTDAVRDPQTLEILDITPCSFGGVSVITPGTNTSNQVAVLYQGVNCTEVPVAIHADQLTPTWRVYSTGSNVFQTRAGCLIGAEHVNNSYECDIPIGAGICASYQTQTNSPRRARSVASQSIIAYTMSLGAENSVAYSNNSIAIPTNFTISVTTEILPVSMTKTSVDCTMYICGDSTECSNLLLQYGSFCTQLNRALTGIAVEQDKNTQEVFAQVKQIYKTPPIKDFGGFNFSQILPDPSKPSKRSFIEDLLFNKVTLADVGFIKQYGDCLGDIAARDLICAQKFNGLTVLPPLLTDEMIAQYTSALLAGTITSGWTFGAGAALQIPFAMQMAYRFNGIGVTQCVLYENQKLIANQFNSAIGKIQDSLSSTASALGKLQDVVNQNAQALNTLVKQLSSNFGAISSVLNDILSRLDKVEAEVQIDRLITGRLQSLQTYVTQQLIRAAEIRASANLAATKMSECVLGQSKRVDFCGKGYHLMSFPQSAPHGVVFLHVTYVPAQEKNFTTAPAICHDGKAHFPREGVFVSNGTHWFVTQRNFYEPQIITTDNTFVCGNCDVVIGIVNNTVYDPLQPELDSFKEELDKYFKNHTSPDVDLGDISGINASVVNIQKEIDRLNEVAKNLNESLIDLQELGKYEQYIKWPWYIWLGFIAGLIAIVMVTIMLCCMTSCCSCLKGCCSCGSCCKFDEDDSEPVLKGVKLHYT

SEQ ID NO: 13576 - protein, 1273 aa, Artificial Sequence
  SARS-CoV-2/Greece/16/2020__EPI_ISL_418265 spike protein (1-1273)(N914C_S1123C)
MFVFLVLLPLVSSQCVNLTTRTQLPPAYTNSFTRGVYYPDKVFRSSVLHSTQDLFLPFFSNVTWFHAIHVSGTNGTKRFDNPVLPFNDGVYFASTEKSNIIRGWIFGTTLDSKTQSLLIVNNATNVVIKVCEFQFCNDPFLGVYYHKNNKSWMESEFRVYSSANNCTFEYVSQPFLMDLEGKQGNFKNLREFVFKNVDGYFKIYSKHTPINLVRDLPQGFSALEPLVDLPIGINITRFQTLLALHRSYLTPGDSSSGWTAGAAAYYVGYLQPRTFLLKYNENGTITDAVDCALDPLSETKCTLKSFTVEKGIYQTSNFRVQPTESIVRFPNITNLCPFGEVFNATRFASVYAWNRKRISNCVADYSVLYNSASFSTFKCYGVSPTKLNDLCFTNVYADSFVIRGDEVRQIAPGQTGKIADYNYKLPDDFTGCVIAWNSNNLDSKVGGNYNYLYRLFRKSNLKPFERDISTEIYQAGSTPCNGVEGFNCYFPLQSYGFQPTNGVGYQPYRVVVLSFELLHAPATVCGPKKSTNLVKNKCVNFNFNGLTGTGVLTESNKKFLPFQQFGRDIADTTDAVRDPQTLEILDITPCSFGGVSVITPGTNTSNQVAVLYQDVNCTEVPVAIHADQLTPTWRVYSTGSNVFQTRAGCLIGAEHVNNSYECDIPIGAGICASYQTQTNSPRRARSVASQSIIAYTMSLGAENSVAYSNNSIAIPTNFTISVTTEILPVSMTKTSVDCTMYICGDSTECSNLLLQYGSFCTQLNRALTGIAVEQDKNTQEVFAQVKQIYKTPPIKDFGGFNFSQILPDPSKPSKRSFIEDLLFNKVTLADAGFIKQYGDCLGDIAARDLICAQKFNGLTVLPPLLTDEMIAQYTSALLAGTITSGWTFGAGAALQIPFAMQMAYRFNGIGVTQCVLYENQKLIANQFNSAIGKIQDSLSSTASALGKLQDVVNQNAQALNTLVKQLSSNFGAISSVLNDILSRLDKVEAEVQIDRLITGRLQSLQTYVTQQLIRAAEIRASANLAATKMSECVLGQSKRVDFCGKGYHLMSFPQSAPHGVVFLHVTYVPAQEKNFTTAPAICHDGKAHFPREGVFVSNGTHWFVTQRNFYEPQIITTDNTFVCGNCDVVIGIVNNTVYDPLQPELDSFKEELDKYFKNHTSPDVDLGDISGINASVVNIQKEIDRLNEVAKNLNESLIDLQELGKYEQYIKWPWYIWLGFIAGLIAIVMVTIMLCCMTSCCSCLKGCCSCGSCCKFDEDDSEPVLKGVKLHYT

SEQ ID NO: 13577 - protein, 1273 aa, Artificial Sequence
  SARS-CoV-2/Iceland/319/2020__EPI_ISL_417648 spike protein (1-1273)(N914C_S1123C)
MFVFLVLLPLVSSQCVNLTTRTQLPPAYTNSFTRGVYYPDKVFRSSVLHSTQDLFLPFFSNVTWFHAIHVSGTNGTKRFDNPVLPFNDGVYFASTEKSNIIRGWIFGTTLDSKTQSLLIVNNATNVVIKVCEFQFCNDPFLGVYYHKNNKSWMESEFRVYSSANNCTFEYVSQPFLIDLEGKQGNFKNLREFVFKNIDGYFKIYSKHTPINLVRDLPQGFSALEPLVDLPIGINITRFQTLLALHRSYLTPGDSSSGWTAGAAAYYVGYLQPRTFLLKYNENGTITDAVDCALDPLSETKCTLKSFTVEKGIYQTSNFRVQPTESIVRFPNITNLCPFGEVFNATRFASVYAWNRKRISNCVADYSVLYNSASFSTFKCYGVSPTKLNDLCFTNVYADSFVIRGDEVRQIAPGQTGKIADYNYKLPDDFTGCVIAWNSNNLDSKVGGNYNYLYRLFRKSNLKPFERDISTEIYQAGSTPCNGVEGFNCYFPLQSYGFQPTNGVGYQPYRVVVLSFELLHAPATVCGPKKSTNLVKNKCVNFNFNGLTGTGVLTESNKKFLPFQQFGRDIADTTDAVRDPQTLEILDITPCSFGGVSVITPGTNTSNQVAVLYQGVNCTEVPVAIHADQLTPTWRVYSTGSNVFQTRAGCLIGAEHVNNSYECDIPIGAGICASYQTQTNSPRRARSVASQSIIAYTMSLGAENSVAYSNNSIAIPTNFTISVTTEILPVSMTKTSVDCTMYICGDSTECSNLLLQYGSFCTQLNRALTGIAVEQDKNTQEVFAQVKQIYKTPPIKDFGGFNFSQILPDPSKPSKRSFIEDLLFNKVTLADAGFIKQYGDCLGDIAARDLICAQKFNGLTVLPPLLTDEMIAQYTSALLAGTITSGWTFGAGAALQIPFAMQMAYRFNGIGVTQCVLYENQKLIANQFNSAIGKIQDSLSSTASALGKLQDVVNQNAQALNTLVKQLSSNFGAISSVLNDILSRLDKVEAEVQIDRLITGRLQSLQTYVTQQLIRAAEIRASANLAATKMSECVLGQSKRVDFCGKGYHLMSFPQSAPHGVVFLHVTYVPAQEKNFTTAPAICHDGKAHFPREGVFVSNGTHWFVTQRNFYEPQIITTDNTFVCGNCDVVIGIVNNTVYDPLQPELDSFKEELDKYFKNHTSPDVDLGDISGINASVVNIQKEIDRLNEVAKNLNESLIDLQELGKYEQYIKWPWYIWLGFIAGLIAIVMVTIMLCCMTSCCSCLKGCCSCGSCCKFDEDDSEPVLKGVKLHYT

SEQ ID NO: 13578 - protein, 1273 aa, Artificial Sequence
  SARS-CoV-2/Congo/94/2020__EPI_ISL_417947 spike protein (1-1273)(N914C_S1123C)
MFVFLVLLPLVSSQCVNLTTRTQLPPAYTNSFTRGVYYPDKVFRSSVLHSTQDLFLPFFSNVTWFHAIHVSGTNGTKRFDNPVLPFNDGVYFASTEKSNIIRGWIFGTTLDSKTQSLLIVNNATNVVIKVCEFQFCNDPFLGVYYHKNNKSWMESEFRVYSSANNCTFEYVSQPFLMDLEGKQGNFKNLREFVFKNIDGYFKIYSKHTPINLVRDLPQGFSALEPLVDLPIGINITRFQTLLALHRSYLTPGDSSSGWTAGAAAYYVGYLQPRTFLLKYNENGTITDAVDCALDPLSETKCTLKSFTVEKGIYQTSNFRVQPTESIVRFPNITNLCPFGEVFNATRFASVYAWNRKRISNCVADYSVLYNSASFSTFKCYGVSPTKLNDLCFTNVYADSFVIRGDEVRQIAPGQTGKIADYNYKLPDDFTGCVIAWNSNNLDSKVGGNYNYLYRLFRKSNLKPFERDISTEIYQAGSTPCNGVEGFNCYFPLQSYGFQPTNGVGYQPYRVVVLSFELLHAPATVCGPKKSTNLVKNKCVNFNFNGLTGTGVLTESNKKFLPFQQFGRDIADTTDAVRDPQTLEILDITPCSFGGVSVITPGTNTSNQVAVLYQGVNCTEVPVAIHADQLTPTWRVYSTGSNVFQTRAGCLIGAEHVNNSYECDIPIGAGICASYQTQTNSPRRARSVASQSIIAYTMSLGAENSVAYSNNSIAIPTNFTISVTTEILPVSMTKTSVDCTMYICGDSTECSNLLLQYGSFCTQLNRALTGIAVEQDKNTQEVFAQVKQIYKTPPIKDFGGFNFSQILPDPSKPSKRSFIEDILFNKVTLADAGFIKQYGDCLGDIAARDLICAQKFNGLTVLPPLLTDEMIAQYTSALLAGTITSGWTFGAGAALQIPFAMQMAYRFNGIGVTQCVLYENQKLIANQFNSAIGKIQDSLSSTASALGKLQDVVNQNAQALNTLVKQLSSNFGAISSVLNDILSRLDKVEAEVQIDRLITGRLQSLQTYVTQQLIRAAEIRASANLAATKMSECVLGQSKRVDFCGKGYHLMSFPQSAPHGVVFLHVTYVPAQEKNFTTAPAICHDGKAHFPREGVFVSNGTHWFVTQRNFYEPQIITTDNTFVCGNCDVVIGIVNNTVYDPLQPELDSFKEELDKYFKNHTSPDVDLGDISGINASVVNIQKEIDRLNEVAKNLNESLIDLQELGKYEQYIKWPWYIWLGFIAGLIAIVMVTIMLCCMTSCCSCLKGCCSCGSCCKFDEDDSEPVLKGVKLHYT

SEQ ID NO: 13579 - protein, 1273 aa, Artificial Sequence
  SARS-CoV-2/Congo/158/2020__EPI_ISL_417950 spike protein (1-1273)(N914C_S1123C)
MFVFLVLLPLVSSQCVNLTTRTQLPPAYTNSFTRGVYYPDKVFRSSVLHSTQDLFLPFFSNVTWFHAIHVSGTNGTKRFDNPVLPFNDGVYFASTEKSNIIRGWIFGTTLDSKTQSLLIVNNATNVVIKVCEFQFCNDPFLGVYYHKNNKSWMESEFRVYSSANNCTFEYVSQPFLMDLEGKQGNFKNLREFVFKNIDGYFKIYSKHTPINLVRDLPQGFSALEPLVDLPIGINITRFQTLLALHRSYLTPGDSSSGWTAGAAAYYVGYLQPRTFLLKYNENGTITDAVDCALDPLSETKCTLKSFTVEKGIYQTSNFRVQPTESIVRFPNITNLCPFGEVFNATRFASVYAWNRKRISNCVADYSVLYNSASFSTFKCYGVSPTKLNDLCFTNVYADSFVIRGDEVRQIAPGQTGKIADYNYKLPDDFTGCVIAWNSNNLDSKVGGNYNYLYRLFRKSNLKPFERDISTEIYQAGSTPCNGVEGFNCYFPLQSYGFQPTNGVGYQPYRVVVLSFELLHAPATVCGPKKSTNLVKNKCVNFNFNGLTGTGVLTESNKKFLPFQQFGRDIADTTDAVRDPQTLEILDITPCSFGGVSVITPGTNTSNQVAVLYQDVNCTEVPVAIHADQLTPTWRVYSTGSNVFQTRAGCLIGAEHVNNSYECDIPIGAGICASYQTQTNSPRRARSVASQSIIAYTMSLGAENSVAYSNNSIAIPTNFTISVTTEILPVSMTKTSVDCTMYICGDSTECSNLLLQYGSFCTQLNRALTGIAVEQDKNTQEVFAQVKQIYKTPPIKDFGGFNFSQILPDPSKPSKRSFIEDLLFNKVTLADAGFIKQYGDCLGDIAARDLICAQKFNGLTVLPPLLTDEMIAQYTSALLAGTITSGWTFGAGAALQIPFAMQMAYRFNGIGVTQCVLYENQKLIANQFNSAIGKIQDSLSSTASALGKLQDVVNQNAQALNTLVKQLSSNFGAISSVLNDILSRLDKVEAEVQIDRLITGRLQSLQTYVTQQLIRAAEIRASANLAATKMSECVLGQSKRVDFCGKGYHLMSFPQSAPHGVVFLHVTYVPAQEKNFTTAPAICHDGKAHFPREGVFVSNGTHWFVTQRNFYEPQIITTDNTFLCGNCDVVIGIVNNTVYDPLQPELDSFKEELDKYFKNHTSPDVDLGDISGINASVVNIQKEIDRLNEVAKNLNESLIDLQELGKYEQYIKWPWYIWLGFIAGLIAIVMVTIMLCCMTSCCSCLKGCCSCGSCCKFDEDDSEPVLKGVKLHYT

SEQ ID NO: 13580 - protein, 1273 aa, Artificial Sequence
  SARS-CoV-2/USA/UT-00034/2020__EPI_ISL_417977 spike protein (1-1273)(N914C_S1123C)
MFVFLVLLPLVSSQCVNLTTRTQLPPAYTNSFTRGVYYPDKVFRSSVLHSTQDLFLPFFSNVTWFHAIHVSGTNGTKRFDNPVLPFNDGVYFASTEKSNIIRGWIFGTTLDSKTQSLLIVNNATNVVIKVCEFQFCNDPFLGVYYYKNNKSWMESEFRVYSSANNCTFEYVSQPFLMDLEGKQGNFKNLREFVFKNIDGYFKIYSKHTPINLVRDLPQGFSALEPLVDLPIGINITRFQTLLALHRSYLTPGDSSSGWTAGAAAYYVGYLQPRTFLLKYNENGTITDAVDCALDPLSETKCTLKSFTVEKGIYQTSNFRVQPTESIVRFPNITNLCPFGEVFNATRFASVYAWNRKRISNCVADYSVLYNSASFSTFKCYGVSPTKLNDLCFTNVYADSFVIRGDEVRQIAPGQTGKIADYNYKLPDDFTGCVIAWNSNNLDSKVGGNYNYLYRLFRKSNLKPFERDISTEIYQAGSTPCNGVEGFNCYFPLQSYGFQPTNGVGYQPYRVVVLSFELLHAPATVCGPKKSTNLVKNKCVNFNFNGLTGTGVLTESNKKFLPFQQFGRDIADTTDAVRDPQTLEILDITPCSFGGVSVITPGTNTSNQVAVLYQGVNCTEVPVAIHADQLTPTWRVYSTGSNVFQTRAGCLIGAEHVNNSYECDIPIGAGICASYQTQTNSPRRARSVASQSIIAYTMSLGAENSVAYSNNSIAIPTNFTISVTTEILPVSMTKTSVDCTMYICGDSTECSNLLLQYGSFCTQLNRALTGIAVEQDKNTQEVFAQVKQIYKTPPIKDFGGFNFSQILPDPSKPSKRSFIEDLLFNKVTLADAGFIKQYGDCLGDIAARDLICAQKFNGLTVLPPLLTDEMIAQYTSALLAGTITSGWTFGAGAALQIPFAMQMAYRFNGIGVTQCVLYENQKLIANQFNSAIGKIQDSLSSTASALGKLQDVVNQNAQALNTLVKQLSSNFGAISSVLNDILSRLDKVEAEVQIDRLITGRLQSLQTYVTQQLIRAAEIRASANLAATKMSECVLGQSKRVDFCGKGYHLMSFPQSAPHGVVFLHVTYVPAQEKNFTTAPAICHDGKAHFPREGVFVSNGTHWFVTQRNFYEPQIITTDNTFVCGNCDVVIGIVNNTVYDPLQPELDSFKEELDKYFKNHTSPDVDLGDISGINASVVNIQKEIDRLNEVAKNLNESLIDLQELGKYEQYIKWPWYIWLGFIAGLIAIVMVTIMLCCMTSCCSCLKGCCSCGSCCKFDEDDSEPVLKGVKLHYT

SEQ ID NO: 13581 - protein, 1273 aa, Artificial Sequence
  SARS-CoV-2/USA/UT-00033/2020__EPI_ISL_417976 spike protein (1-1273)(N914C_S1123C)
MFVFLVLLPLVSSQCVNLTTRTQLPPAYTNSFTRGVYYPDKVFRSSVLHSTQDLFLPFFSNVTWFHAIHVSGTNGTKRFDNPVLPFNDGVYFASTEKSNIIRGWIFGTTLDSKTQSLLIVNNATNVVIKVCEFQFCNDPFLGVYYHKNNKSWMESEFRVYSSANNCTFEYVSQPFLMDLEGKQGNFKNLREFVFKNIDGYFKIYSKHTPINLVRDLPQGFSALEPLVDLPIGINITRFQTLLALHRSYLTPGDSSSGLTAGAAAYYVGYLQPRTFLLKYNENGTITDAVDCALDPLSETKCTLKSFTVEKGIYQTSNFRVQPTESIVRFPNITNLCPFGEVFNATRFASVYAWNRKRISNCVADYSVLYNSASFSTFKCYGVSPTKLNDLCFTNVYADSFVIRGDEVRQIAPGQTGKIADYNYKLPDDFTGCVIAWNSNNLDSKVGGNYNYLYRLFRKSNLKPFERDISTEIYQAGSTPCNGVEGFNCYFPLQSYGFQPTNGVGYQPYRVVVLSFELLHAPATVCGPKKSTNLVKNKCVNFNFNGLTGTGVLTESNKKFLPFQQFGRDIADTTDAVRDPQTLEILDITPCSFGGVSVITPGTNTSNQVAVLYQGVNCTEVPVAIHADQLTPTWRVYSTGSNVFQTRAGCLIGAEHVNNSYECDIPIGAGICASYQTQTNSPRRARSVASQSIIAYTMSLGAENSVAYSNNSIAIPTNFTISVTTEILPVSMTKTSVDCTMYICGDSTECSNLLLQYGSFCTQLNRALTGIAVEQDKNTQEVFAQVKQIYKTPPIKDFGGFNFSQILPDPSKPSKRSFIEDLLFNKVTLADAGFIKQYGDCLGDIAARDLICAQKFNGLTVLPPLLTDEMIAQYTSALLAGTITSGWTFGAGAALQIPFAMQMAYRFNGIGVTQCVLYENQKLIANQFNSAIGKIQDSLSSTASALGKLQDVVNQNAQALNTLVKQLSSNFGAISSVLNDILSRLDKVEAEVQIDRLITGRLQSLQTYVTQQLIRAAEIRASANLAATKMSECVLGQSKRVDFCGKGYHLMSFPQSAPHGVVFLHVTYVPAQEKNFTTAPAICHDGKAHFPREGVFVSNGTHWFVTQRNFYEPQIITTDNTFVCGNCDVVIGIVNNTVYDPLQPELDSFKEELDKYFKNHTSPDVDLGDISGINASVVNIQKEIDRLNEVAKNLNESLIDLQELGKYEQYIKWPWYIWLGFIAGLIAIVMVTIMLCCMTSCCSCLKGCCSCGSCCKFDEDDSEPVLKGVKLHYT

SEQ ID NO: 13582 - protein, 1273 aa, Artificial Sequence
  SARS-CoV-2/USA/WI-13/2020__EPI_ISL_417516 spike protein (1-1273)(N914C_S1123C)
MFVFLVLLPLVSSQCVNLTTRTQLPPAYTNSFTRGVYYPDKVFRSSVLHSTQDLFLPFFSNVTWFHAIHVSGTNGTKRFDNPVLPFNDGVYFASTEKSNIIRGWIFGTTLDSKTQSLLIVNNATNVVIKVCEFQFCNDPFLGVYYHKNNKSWMESEFRVYSSANNCTFEYVSQPFLMDLEGKQGNFKNLREFVFKNIDGYFKIYSKHTPINLVRDLPQGFSALEPLVDLPIGINITRFQTLLALHRSYLTPGDSSSGWTAGAAAYYVGYLQPRTFLLKYNENGTITDAVDCALDPLSETKCTLKSFTVEKGIYQTSNFRVLPTESIVRFPNITNLCPFGEVFNATRFASVYAWNRKRISNCVADYSVLYNSASFSTFKCYGVSPTKLNDLCFTNVYADSFVIRGDEVRQIAPGQTGKIADYNYKLPDDFTGCVIAWNSNNLDSKVGGNYNYLYRLFRKSNLKPFERDISTEIYQAGSTPCNGVEGFNCYFPLQSYGFQPTNGVGYQPYRVVVLSFELLHAPATVCGPKKSTNLVKNKCVNFNFNGLTGTGVLTESNKKFLPFQQFGRDIADTTDAVRDPQTLEILDITPCSFGGVSVITPGTNTSNQVAVLYQGVNCTEVPVAIHADQLTPTWRVYSTGSNVFQTRAGCLIGAEHVNNSYECDIPIGAGICASYQTQTNSPRRARSVASQSIIAYTMSLGAENSVAYSNNSIAIPTNFTISVTTEILPVSMTKTSVDCTMYICGDSTECSNLLLQYGSFCTQLNRALTGIAVEQDKNTQEVFAQVKQIYKTPPIKDFGGFNFSQILPDPSKPSKRSFIEDLLFNKVTLADAGFIKQYGDCLGDIAARDLICAQKFNGLTVLPPLLTDEMIAQYTSALLAGTITSGWTFGAGAALQIPFAMQMAYRFNGIGVTQCVLYENQKLIANQFNSAIGKIQDSLSSTASALGKLQDVVNQNAQALNTLVKQLSSNFGAISSVLNDILSRLDKVEAEVQIDRLITGRLQSLQTYVTQQLIRAAEIRASANLAATKMSECVLGQSKRVDFCGKGYHLMSFPQSAPHGVVFLHVTYVPAQEKNFTTAPAICHDGKAHFPREGVFVSNGTHWFVTQRNFYEPQIITTDNTFVCGNCDVVIGIVNNTVYDPLQPELDSFKEELDKYFKNHTSPDVDLGDISGINASVVNIQKEIDRLNEVAKNLNESLIDLQELGKYEQYIKWPWYIWLGFIAGLIAIVMVTIMLCCMTSCCSCLKGCCSCGSCCKFDEDDSEPVLKGVKLHYT

SEQ ID NO: 13583 - protein, 1272 aa, Artificial Sequence
  SARS-CoV-2/India/1-27/2020__EPI_ISL_413522 spike protein (1-1273)(N913C_S1122C)
MFVFLVLLPLVSSQCVNLTTRTQLPPAYTNSFTRGVYYPDKVFRSSVLHSTQDLFLPFFSNVTWFHAIHVSGTNGTKRFDNPVLPFNDGVYFASTEKSNIIRGWIFGTTLDSKTQSLLIVNNATNVVIKVCEFQFCNDPFLGVYHKNNKSWMESEFRVYSSANNCTFEYVSQPFLMDLEGKQGNFKNLREFVFKNIDGYFKIYSKHTPINLVRDLPQGFSALEPLVDLPIGINITRFQTLLALHRSYLTPGDSSSGWTAGAAAYYVGYLQPRTFLLKYNENGTITDAVDCALDPLSETKCTLKSFTVEKGIYQTSNFRVQPTESIVRFPNITNLCPFGEVFNATRFASVYAWNRKRISNCVADYSVLYNSASFSTFKCYGVSPTKLNDLCFTNVYADSFVIRGDEVIQIAPGQTGKIADYNYKLPDDFTGCVIAWNSNNLDSKVGGNYNYLYRLFRKSNLKPFERDISTEIYQAGSTPCNGVEGFNCYFPLQSYGFQPTNGVGYQPYRVVVLSFELLHAPATVCGPKKSTNLVKNKCVNFNFNGLTGTGVLTESNKKFLPFQQFGRDIADTTDAVRDPQTLEILDITPCSFGGVSVITPGTNTSNQVAVLYQDVNCTEVPVAIHADQLTPTWRVYSTGSNVFQTRAGCLIGAEHVNNSYECDIPIGAGICASYQTQTNSPRRARSVASQSIIAYTMSLGAENSVAYSNNSIAIPTNFTISVTTEILPVSMTKTSVDCTMYICGDSTECSNLLLQYGSFCTQLNRALTGIAVEQDKNTQEVFAQVKQIYKTPPIKDFGGFNFSQILPDPSKPSKRSFIEDLLFNKVTLADAGFIKQYGDCLGDIAARDLICAQKFNGLTVLPPLLTDEMIAQYTSALLAGTITSGWTFGAGAALQIPFAMQMAYRFNGIGVTQCVLYENQKLIANQFNSAIGKIQDSLSSTASALGKLQDVVNQNAQALNTLVKQLSSNFGAISSVLNDILSRLDKVEAEVQIDRLITGRLQSLQTYVTQQLIRAAEIRASANLAATKMSECVLGQSKRVDFCGKGYHLMSFPQSAPHGVVFLHVTYVPAQEKNFTTAPAICHDGKAHFPREGVFVSNGTHWFVTQRNFYEPQIITTDNTFVCGNCDVVIGIVNNTVYDPLQPELDSFKEELDKYFKNHTSPDVDLGDISGINASVVNIQKEIDRLNEVAKNLNESLIDLQELGKYEQYIKWPWYIWLGFIAGLIAIVMVTIMLCCMTSCCSCLKGCCSCGSCCKFDEDDSEPVLKGVKLHYT

SEQ ID NO: 13584 - protein, 1267 aa, Artificial Sequence
  SARS-CoV-2/pangolin/Guangxi/P4L/2017__EPI_ISL_410538 spike protein (1-1273)(N908C_S1117C)
MFVFLFVLPLVSSQCVNLTTRTGIPPGYTNSSTRGVYYPDKVFRSSILHLTQDLFLPFFSNVTWFNTINYQGGFKKFDNPVLPFNDGVYFASTEKSNIIRGWIFGTTLDARTQSLLIVNNATNVVIKVCEFQFCTDPFLGVYYHNNNKTWVENEFRVYSSANNCTFEYISQPFLMDLEGKQGNFKNLREFVFKNVDGYFKIYSKHTPIDLVRDLPRGFAALEPLVDLPIGINITRFQTLLALHRSYLTPGNLESGWTTGAAAYYVGYLQQRTFLLSYNQNGTITDAVDCSLDPLSETKCTLKSLTVEKGIYQTSNFRVQPTISIVRFPNITNLCPFGEVFNASKFASVYAWNRKRISNCVADYSVLYNSTSFSTFKCYGVSPTKLNDLCFTNVYADSFVVKGDEVRQIAPGQTGVIADYNYKLPDDFTGCVIAWNSVKQDALTGGNYGYLYRLFRKSKLKPFERDISTEIYQAGSTPCNGQVGLNCYYPLERYGFHPTTGVNYQPFRVVVLSFELLNGPATVCGPKLSTTLVKDKCVNFNFNGLTGTGVLTTSKKQFLPFQQFGRDISDTTDAVRDPQTLEILDITPCSFGGVSVITPGTNTSNQVAVLYQDVNCTEVPMAIHAEQLTPAWRVYSAGANVFQTRAGCLVGAEHVNNSYECDIPVGAGICASYHSMSSLRSVNQRSIIAYTMSLGAENSVAYSNNSIAIPTNFTISVTTEILPVSMTKTSVDCTMYICGDSIECSNLLLQYGSFCTQLNRALTGIAVEQDKNTQEVFAQVKQIYKTPPIKDFGGFNFSQILPDPSKPSKRSFIEDLLFNKVTLADAGFIKQYGDCLGDIAARDLICAQKFNGLTVLPPLLTDEMIAQYTSALLAGTITSGWTFGAGAALQIPFAMQMAYRFNGIGVTQCVLYENQKLIANQFNSAIGKIQDSLSSTASALGKLQDVVNQNAQALNTLVKQLSSNFGAISSVLNDILSRLDKVEAEVQIDRLITGRLQSLQTYVTQQLIRAAEIRASANLAATKMSECVLGQSKRVDFCGKGYHLMSFPQSAPHGVVFLHVTYVPAQEKNFTTAPAICHEGKAHFPREGVFVSNGTHWFITQRNFYEPQIITTDNTFVCGSCDVVIGIVNNTVYDPLQPELDSFKEELDKYFKNHTSPDVDLGDISGINASVVNIQKEIDRLNEVAKNLNESPIDLQELGKYEQYIKWPWYIWLGFIAGLIAIIMVTIMLCCMTSCCSCLKGCCSCGSCCKFDEDDSEPVLKGVKLHYT

SEQ ID NO: 13585 - protein, 1267 aa, Artificial Sequence
  SARS-CoV-2/pangolin/Guangxi/P5L/2017__EPI_ISL_410540 spike protein (1-1273)(N908C_S1117C)
MFVFLFVLPLVSSQCVNLTTRTGIPPGYTNSSTRGVYYPDKVFRSSILHLTQDLFLPFFSNVTWFNTINYQGGFKKFDNPVLPFNDGVYFASTEKSNIIRGWIFGTTLDARTQSLLIVNNATNVVIKVCEFQFCTDPFLGVYYHNNNKTWVENEFRVYSSANNCTFEYISQPFLMDLEGKQGNFKNLREFVFKNVDGYFKIYSKHTPIDLVRDLPRGFAALEPLVDLPIGINITRFQTLLALHRSYLTPGKLESGWTTGAAAYYVGYLQQRTFLLSYNQNGTITDAVDCSLDPLSETKCTLKSLTVEKGIYQTSNFRVQPTISIVRFPNITNLCPFGEVFNASKFASVYAWNRKRISNCVADYSVLYNSTSFSTFKCYGVSPTKLNDLCFTNVYADSFVVKGDEVRQIAPGQTGVIADYNYKLPDDFTGCVIAWNSVKQDALTGGNYGYLYRLFRKSKLKPFERDISTEIYQAGSTPCNGQVGLNCYYPLERYGFHPTTGVNYQPFRVVVLSFELLNGPATVCGPKLSTTLVKDKCVNFNFNGLTGTGVLTTSKKQFLPFQQFGRDISDTTDAVRDPQTLEILDITPCSFGGVSVITPGTNTSNQVAVLYQDVNCTEVPMAIHAEQLTPAWRVYSAGANVFQTRAGCLVGAEHVNNSYECDIPVGAGICASYHSMSSFRSVNQRSIIAYTMSLGAENSVAYSNNSIAIPTNFTISVTTEILPVSMTKTSVDCTMYICGDSIECSNLLLQYGSFCTQLNRALTGIAVEQDKNTQEVFAQVKQIYKTPPIKDFGGFNFSQILPDPSKPSKRSFIEDLLFNKVTLADAGFIKQYGDCLGDIAARDLICAQKFNGLTVLPPLLTDEMIAQYTSALLAGTITSGWTFGAGAALQIPFAMQMAYRFNGIGVTQCVLYENQKLIANQFNSAIGKIQDSLSSTASALGKLQDVVNQNAQALNTLVKQLSSNFGAISSVLNDILSRLDKVEAEVQIDRLITGRLQSLQTYVTQQLIRAAEIRASANLAATKMSECVLGQSKRVDFCGKGYHLMSFPQSAPHGVVFLHVTYVPAQEKNFTTAPAICHEGKAHFPREGVFVSNGTHWFITQRNFYEPQIITTDNTFVCGSCDVVIGIVNNTVYDPLQPELDSFKEELDKYFKNHTSPDVDLGDISGINASVVNIQKEIDRLNEVAKNLNESLIDLQELGKYEQYIKWPWYIWLGFIAGLIAIIMVTIMLCCMTSCCSCLKGCCSCGSCCKFDEDDSEPVLKGVKLHYT

SEQ ID NO: 13586 - protein, 1267 aa, Artificial Sequence
  SARS-CoV-2/pangolin/Guangxi/P5E/2017__EPI_ISL_410541 spike protein (1-1273)(N908C_S1117C)
MFVFLFVLPLVSSQCVNLTTRTGIPPGYTNSSTRGVYYPDKVFRSSILHLTQDLFLPFFSNVTWFNTITYQGGSKKFDNPVLPFNDGVYFASTEKSNIIRGWIFGTTLDARTQSLLIVNNATNVVIKVCEFQFCTDPFLGVYYHNNNKTWVENEFRVYSSANNCTFEYISQPFLMDLEGKQGNFKNLREFVFKNVDGYFKIYSKHTPIDLVRDLPRGFAALEPLVDLPIGINITRFQTLLALHRSYLTPGKLESGWTTGAAAYYVGYLQQRTFLLSYNQNGTITDAVDCSLDPLSETKCTLKSLTVEKGIYQTSNFRVQPTISIVRFPNITNLCPFGEVFNASKFASVYAWNRKRISNCVADYSVLYNSTSFSTFKCYGVSPTKLNDLCFTNVYADSFVVKGDEVRQIAPGQTGVIADYNYKLPDDFTGCVIAWNSVKQDALTGDNYGYLYRLFRKSKLKPFERDISTEIYQAGSTPCNGQVGLNCYYPLERYGFHPTTGVNYQPFRVVVLSFELLNGPATVCGPKLSTTLVKDKCVNFNFNGLTGTGVLTTSKKQFLPFQQFGRDISDTTDAVRDPQTLEILDITPCSFGGVSVITPGTNTSNQVAVLYQDVNCTEVPMAIHAEQLTPAWRVYSAGANVFQTRAGCLVGAEHVNNSYECDIPVGAGICASYHSMSSFRSVNQRSIIAYTMSLGAENSVAYSNNSIAIPTNFTISVTTEILPVSMTKTSVDCTMYICGDSIECSNLLLQYGSFCTQLNRALTGIAVEQDKNTQEVFAQVKQIYKTPPIKDFGGFNFSQILPDPSKPSKRSFIEDLLFNKVTLADAGFIKQYGDCLGDIAARDLICAQKFNGLTVLPPLLTDEMIAQYTSALLAGTITSGWTFGAGAALQIPFAMQMAYRFNGIGVTQCVLYENQKLIANQFNSAIGKIQDSLSSTASALGKLQDVVNQNAQALNTLVKQLSSNFGAISSVLNDILSRLDKVEAEVQIDRLITGRLQSLQTYVTQQLIRAAEIRASANLAATKMSECVLGQSKRVDFCGKGYHLMSFPQSAPHGVVFLHVTYVPAQEKNFTTAPAICHEGKAHFPREGVFVSNGTHWFITQRNFYEPQIITTDNTFVCGSCDVVIGIVNNTVYDPLQPELDSFKEELDKYFKNHTSPDVDLGDISGINASVVNIQKEIDRLNEVAKNLNESLIDLQELGKYEQYIKWPWYIWLGFIAGLIAIIMVTIMLCCMTSCCSCLKGCCSCGSCCKFDEDDSEPVLKGVKLHYT

SEQ ID NO: 13587 - protein, 1265 aa, Artificial Sequence
  SARS-CoV-2/pangolin/Guangxi/P1E/2017__EPI_ISL_410539 spike protein (1-1273)(N906C_S1115C)
MFVFLFVLPLVSSQCVNLTTRTGIQPGYTNSSTRGVYYPDKVFRSSILHLTQDLFLPFFSNVTWFNTINYQGGFKKFDNPVLPFNDGVYFASTEKSNIIRGWIFGTTLDARTQSLLIVNNATNVVIKVCEFQFCTDPFLGVYYHNNNKTWVENEFRVYSSANNCTFEYISQPFLMDLEGKQGNFKNLREFVFKNVDGYFKIYSKHTPIDLVRDLPRGFAALEPLVDLPIGINITRFQTLLALHRSYLTPGKLESGWTTGAAAYYVGYLQQRTFLLSYNQNGTITDAVDCSLDPLSETKCTLKSLTVEKGIYQTSNFRVQPTISIVRFPNITNLCPFGEVFNASKFASVYAWNRKRISNCVADYSVLYNSTSFSTFKCYGVSPTKLNDLCFTNVYADSFVVKGDEVRQIAPGQTGVIADYNYKLPDDFTGCVIAWNSVKQDALTGGNYLYRLFRKSKLKPFERDISTEIYQAGSTPCNGQVGLNCYYPLERYGFHPTTGVNYQPFRVVVLSFELLNGPATVCGPKLSTTLVKDKCVNFNFNGLTGTGVLTTSKKQFLPFQQFGRDISDTTDAVRDPQTLEILDITPCSFGGVSVITPGTNTSNQVAVLYQDVNCTEVPMAIHAEQLTPAWRVYSAGANVFQTRAGCLVGAEHVNNSYECDIPVGAGICASYHSMSSLRSVNQRSIIAYTMSLGAENSVAYSNNSIAIPTNFTISVTTEILPVSMTKTSVDCTMYICGDSIECSNLLLQYGSFCTQLNRALTGIAVEQDKNTQEVFAQVKQIYKTPPIKDFGGFNFSQILPDPSKPSKRSFIEDLLFNKVTLADAGFIKQYGDCLGDIAARDLICAQKFNGLTVLPPLLTDEMIAQYTSALLAGTITSGWTFGAGAALQIPFAMQMAYRFNGIGVTQCVLYENQKLIANQFNSAIGKIQDSLSSTASALGKLQDVVNQNAQALNTLVKQLSSNFGAISSVLNDILSRLDKVEAEVQIDRLITGRLQSLQTYVTQQLIRAAEIRASANLAATKMSECVLGQSKRVDFCGKGYHLMSFPQSAPHGVVFLHVTYVPAQEKNFTTAPAICHEGKAHFPREGVFVSNGTHWFITQRNFYEPQIITTDNTFVCGSCDVVIGIVNNTVYDPLQPELDSFKEELDKYFKNHTSPDVDLGDISGINASVVNIQKEIDRLNEVAKNLNESLIDLQELGKYEQYIKWPWYIWLGFIAGLIAIIMVTIMLCCMTSCCSCLKGCCSCGSCCKFDEDDSEPVLKGVKLHYT

SEQ ID NO: 13588 - protein, 1371 aa, Artificial Sequence
  SARS-CoV-2/Wuhan/WIV05/2019__EPI_ISL_402128 spike protein (1-1211)(N914C_S1123C) LumSynth construct
MFVFLVLLPLVSSQCVNLTTRTQLPPAYTNSFTRGVYYPDKVFRSSVLHSTQDLFLPFFSNVTWFHAIHVSGTNGTKRFDNPVLPFNDGVYFASTEKSNIIRGWIFGTTLDSKTQSLLIVNNATNVVIKVCEFQFCNDPFLGVYYHKNNKSWMESEFRVYSSANNCTFEYVSQPFLMDLEGKQGNFKNLREFVFKNIDGYFKIYSKHTPINLVRDLPQGFSALEPLVDLPIGINITRFQTLLALHRSYLTPGDSSSGWTAGAAAYYVGYLQPRTFLLKYNENGTITDAVDCALDPLSETKCTLKSFTVEKGIYQTSNFRVQPTESIVRFPNITNLCPFGEVFNATRFASVYAWNRKRISNCVADYSVLYNSASFSTFKCYGVSPTKLNDLCFTNVYADSFVIRGDEVRQIAPGQTGKIADYNYKLPDDFTGCVIAWNSNNLDSKVGGNYNYLYRLFRKSNLKPFERDISTEIYQAGSTPCNGVEGFNCYFPLQSYGFQPTNGVGYQPYRVVVLSFELLHAPATVCGPKKSTNLVKNKCVNFNFNGLTGTGVLTESNKKFLPFQQFGRDIADTTDAVRDPQTLEILDITPCSFGGVSVITPGTNTSNQVAVLYQDVNCTEVPVAIHADQLTPTWRVYSTGSNVFQTRAGCLIGAEHVNNSYECDIPIGAGICASYQTQTNSPRRARSVASQSIIAYTMSLGAENSVAYSNNSIAIPTNFTISVTTEILPVSMTKTSVDCTMYICGDSTECSNLLLQYGSFCTQLNRALTGIAVEQDKNTQEVFAQVKQIYKTPPIKDFGGFNFSQILPDPSKPSKRSFIEDLLFNKVTLADAGFIKQYGDCLGDIAARDLICAQKFNGLTVLPPLLTDEMIAQYTSALLAGTITSGWTFGAGAALQIPFAMQMAYRFNGIGVTQCVLYENQKLIANQFNSAIGKIQDSLSSTASALGKLQDVVNQNAQALNTLVKQLSSNFGAISSVLNDILSRLDKVEAEVQIDRLITGRLQSLQTYVTQQLIRAAEIRASANLAATKMSECVLGQSKRVDFCGKGYHLMSFPQSAPHGVVFLHVTYVPAQEKNFTTAPAICHDGKAHFPREGVFVSNGTHWFVTQRNFYEPQIITTDNTFVCGNCDVVIGIVNNTVYDPLQPELDSFKEELDKYFKNHTSPDVDLGDISGINASVVNIQKEIDRLNEVAKNLNESLIDLQELGKYEQYIKGGGSGGGQIYEGKLTAEGLRFGIVASRFNHALVDRLVEGAIDAIVRHGGREEDITLVRVPGSWEIPVAAGELARKEDIDAVIAIGVLIRGATPHFDYIASEVSKGLADLSLELRKPITFGVITADTLEQAIERAGTKHGNKGWEAALSAIEMANLFKSLR

SEQ ID NO: 13589 - protein, 1367 aa, Artificial Sequence
  SARS-CoV-2/bat/Yunnan/RaTG13/2013__EPI_ISL_402131 spike protein (1-1207)(N910C_S1119C) LumSynth construct
MFVFLVLLPLVSSQCVNLTTRTQLPPAYTNSSTRGVYYPDKVFRSSVLHLTQDLFLPFFSNVTWFHAIHVSGTNGIKRFDNPVLPFNDGVYFASTEKSNIIRGWIFGTTLDSKTQSLLIVNNATNVVIKVCEFQFCNDPFLGVYYHKNNKSWMESEFRVYSSANNCTFEYVSQPFLMDLEGKQGNFKNLREFVFKNIDGYFKIYSKHTPINLVRDLPPGFSALEPLVDLPIGINITRFQTLLALHRSYLTPGDSSSGWTAGAAAYYVGYLQPRTFLLKYNENGTITDAVDCALDPLSETKCTLKSFTVEKGIYQTSNFRVQPTDSIVRFPNITNLCPFGEVFNATTFASVYAWNRKRISNCVADYSVLYNSTSFSTFKCYGVSPTKLNDLCFTNVYADSFVITGDEVRQIAPGQTGKIADYNYKLPDDFTGCVIAWNSKHIDAKEGGNFNYLYRLFRKANLKPFERDISTEIYQAGSKPCNGQTGLNCYYPLYRYGFYPTDGVGHQPYRVVVLSFELLNAPATVCGPKKSTNLVKNKCVNFNFNGLTGTGVLTESNKKFLPFQQFGRDIADTTDAVRDPQTLEILDITPCSFGGVSVITPGTNASNQVAVLYQDVNCTEVPVAIHADQLTPTWRVYSTGSNVFQTRAGCLIGAEHVNNSYECDIPIGAGICASYQTQTNSRSVASQSIIAYTMSLGAENSVAYSNNSIAIPTNFTISVTTEILPVSMTKTSVDCTMYICGDSTECSNLLLQYGSFCTQLNRALTGIAVEQDKNTQEVFAQVKQIYKTPPIKDFGGFNFSQILPDPSKPSKRSFIEDLLFNKVTLADAGFIKQYGDCLGDIAARDLICAQKFNGLTVLPPLLTDEMIAQYTSALLAGTITSGWTFGAGAALQIPFAMQMAYRFNGIGVTQCVLYENQKLIANQFNSAIGKIQDSLSSTASALGKLQDVVNQNAQALNTLVKQLSSNFGAISSVLNDILSRLDKVEAEVQIDRLITGRLQSLQTYVTQQLIRAAEIRASANLAATKMSECVLGQSKRVDFCGKGYHLMSFPQSAPHGVVFLHVTYVPAQEKNFTTAPAICHDGKAHFPREGVFVSNGTHWFVTQRNFYEPQIITTDNTFVCGSCDVVIGIVNNTVYDPLQPELDSFKEELDKYFKNHTSPDVDLGDISGINASVVNIQKEIDRLNEVAKNLNESLIDLQELGKYEQYIKGGGSGGGQIYEGKLTAEGLRFGIVASRFNHALVDRLVEGAIDAIVRHGGREEDITLVRVPGSWEIPVAAGELARKEDIDAVIAIGVLIRGATPHFDYIASEVSKGLADLSLELRKPITFGVITADTLEQAIERAGTKHGNKGWEAALSAIEMANLFKSLR

SEQ ID NO: 13590 - protein, 1371 aa, Artificial Sequence
  SARS-CoV-2/Wuhan/HBCDC-HB-01/2019__EPI_ISL_402132 spike protein (1-1211)(N914C_S1123C) LumSynth construct
MFVFLVLLPLVSSQCVNLTTRTQLPPAYTNSITRGVYYPDKVFRSSVLHSTQDLFLPFFSNVTWFHAIHVSGTNGTKRFDNPVLPFNDGVYFASTEKSNIIRGWIFGTTLDSKTQSLLIVNNATNVVIKVCEFQFCNDPFLGVYYHKNNKSWMESEFRVYSSANNCTFEYVSQPFLMDLEGKQGNFKNLREFVFKNIDGYFKIYSKHTPINLVRDLPQGFSALEPLVDLPIGINITRFQTLLALHRSYLTPGDSSSGWTAGAAAYYVGYLQPRTFLLKYNENGTITDAVDCALDPLSETKCTLKSFTVEKGIYQTSNFRVQPTESIVRFPNITNLCPFGEVFNATRFASVYAWNRKRISNCVADYSVLYNSASFSTFKCYGVSPTKLNDLCFTNVYADSFVIRGDEVRQIAPGQTGKIADYNYKLPDDFTGCVIAWNSNNLDSKVGGNYNYLYRLFRKSNLKPFERDISTEIYQAGSTPCNGVEGFNCYFPLQSYGFQPTNGVGYQPYRVVVLSFELLHAPATVCGPKKSTNLVKNKCVNFNFNGLTGTGVLTESNKKFLPFQQFGRDIADTTDAVRDPQTLEILDITPCSFGGVSVITPGTNTSNQVAVLYQDVNCTEVPVAIHADQLTPTWRVYSTGSNVFQTRAGCLIGAEHVNNSYECDIPIGAGICASYQTQTNSPRRARSVASQSIIAYTMSLGAENSVAYSNNSIAIPTNFTISVTTEILPVSMTKTSVDCTMYICGDSTECSNLLLQYGSFCTQLNRALTGIAVEQDKNTQEVFAQVKQIYKTPPIKDFGGFNFSQILPDPSKPSKRSFIEDLLFNKVTLADAGFIKQYGDCLGDIAARDLICAQKFNGLTVLPPLLTDEMIAQYTSALLAGTITSGWTFGAGAALQIPFAMQMAYRFNGIGVTQCVLYENQKLIANQFNSAIGKIQDSLSSTASALGKLQDVVNQNAQALNTLVKQLSSNFGAISSVLNDILSRLDKVEAEVQIDRLITGRLQSLQTYVTQQLIRAAEIRASANLAATKMSECVLGQSKRVDFCGKGYHLMSFPQSAPHGVVFLHVTYVPAQEKNFTTAPAICHDGKAHFPREGVFVSNGTHWFVTQRNFYEPQIITTDNTFVCGNCDVVIGIVNNTVYDPLQPELDSFKEELDKYFKNHTSPDVDLGDISGINASVVNIQKEIDRLNEVAKNLNESLIDLQELGKYEQYIKGGGSGGGQIYEGKLTAEGLRFGIVASRFNHALVDRLVEGAIDAIVRHGGREEDITLVRVPGSWEIPVAAGELARKEDIDAVIAIGVLIRGATPHFDYIASEVSKGLADLSLELRKPITFGVITADTLEQAIERAGTKHGNKGWEAALSAIEMANLFKSLR

SEQ ID NO: 13591 - protein, 1371 aa, Artificial Sequence
  SARS-CoV-2/Guangdong/20SF028/2020__EPI_ISL_403936 spike protein (1-1211)(N914C_S1123C) LumSynth construct
MFVFLVLLPLVSSQCVNLTTRTQLPPAYTNSFTRGVYYPDKVFRSSVLYSTQDLFLPFFSNVTWFHAIHVSGTNGTKRFDNPVLPFNDGVYFASTEKSNIIRGWIFGTTLDSKTQSLLIVNNATNVVIKVCEFQFCNDPFLGVYYHKNNKSWMESEFRVYSSANNCTFEYVSQPFLMDLEGKQGNFKNLREFVFKNIDGYFKIYSKHTPINLVRDLPQGFSALEPLVDLPIGINITRFQTLLALHRSYLTPGDSSSGWTAGAAAYYVGYLQPRTFLLKYNENGTITDAVDCALDPLSETKCTLKSFTVEKGIYQTSNFRVQPTESIVRFPNITNLCPFGEVFNATRFASVYAWNRKRISNCVADYSVLYNSASFSTFKCYGVSPTKLNDLCFTNVYADSFVIRGDEVRQIAPGQTGKIADYNYKLPDDFTGCVIAWNSNNLDSKVGGNYNYLYRLFRKSNLKPFERDISTEIYQAGSTPCNGVEGFNCYFPLQSYGFQPTNGVGYQPYRVVVLSFELLHAPATVCGPKKSTNLVKNKCVNFNFNGLTGTGVLTESNKKFLPFQQFGRDIADTTDAVRDPQTLEILDITPCSFGGVSVITPGTNTSNQVAVLYQDVNCTEVPVAIHADQLTPTWRVYSTGSNVFQTRAGCLIGAEHVNNSYECDIPIGAGICASYQTQTNSPRRARSVASQSIIAYTMSLGAENSVAYSNNSIAIPTNFTISVTTEILPVSMTKTSVDCTMYICGDSTECSNLLLQYGSFCTQLNRALTGIAVEQDKNTQEVFAQVKQIYKTPPIKDFGGFNFSQILPDPSKPSKRSFIEDLLFNKVTLADAGFIKQYGDCLGDIAARDLICAQKFNGLTVLPPLLTDEMIAQYTSALLAGTITSGWTFGAGAALQIPFAMQMAYRFNGIGVTQCVLYENQKLIANQFNSAIGKIQDSLSSTASALGKLQDVVNQNAQALNTLVKQLSSNFGAISSVLNDILSRLDKVEAEVQIDRLITGRLQSLQTYVTQQLIRAAEIRASANLAATKMSECVLGQSKRVDFCGKGYHLMSFPQSAPHGVVFLHVTYVPAQEKNFTTAPAICHDGKAHFPREGVFVSNGTHWFVTQRNFYEPQIITTDNTFVCGNCDVVIGIVNNTVYDPLQPELDSFKEELDKYFKNHTSPDVDLGDISGINASVVNIQKEIDRLNEVAKNLNESLIDLQELGKYEQYIKGGGSGGGQIYEGKLTAEGLRFGIVASRFNHALVDRLVEGAIDAIVRHGGREEDITLVRVPGSWEIPVAAGELARKEDIDAVIAIGVLIRGATPHFDYIASEVSKGLADLSLELRKPITFGVITADTLEQAIERAGTKHGNKGWEAALSAIEMANLFKSLR

SEQ ID NO: 13592 - protein, 1371 aa, Artificial Sequence
  SARS-CoV-2/Shenzhen/SZTH-001/2020__EPI_ISL_406592 spike protein (1-1211)(N914C_S1123C) LumSynth construct
MFVFLVLLPLVSSQCVNLTTRTQLPPAYTNSFTRGVYYPDKVFRSSVLHSTQDLFLPFFSNVTWFHAIHVSGTNGTKRFDNPVLPFNDGVYFASTEKSNIIRGWIFGTTLDSKTQSLLIVNNATNVVIKVCEFQFCNDPFLGVYYHKNNKSWMESEFRVYSSANNCTFEYVSQPFLMDLEGKQGNFKNLREFVFKNIDGYFKIYSKHTPINLVRDLPQGFSALEPLVDLPIGINITRFQTLLALHRSYLTPGDSSSGWTAGAAAYYVGYLQPRTFLLKYNENGTITDAVDCALDPLSETKCTLKSFTVEKGIYQTSNFRVQPTESIVRFPNITNLCPFGEVFNATRFASVYAWNRKRISNCVADYSVLYNSASFSTFKCYGVSPTKLNDLCFTNVYADSFVIRGDEVRQIAPGQTGKIADYNYKLPDDFTGCVIAWNSNNLDSKVGGNYNYLYRLFRKSNLKPFERDISTEIYQAGSTPCNGVEGFNCYFPLQSYGFQPTNGVGYQPYRVVVLSFELLHAPATVCGPKKSTNLVKNKCVNFNFNGLTGTGVLTESNKKFLPFQQFGRDIADTTDAVRDPQTLEILDITPCSFGGVSVITPGTNTSNQVAVLYQDVNCTEVPVAIHADQLTPTWRVYSTGSNVFQTRAGCLIGAEHVNNSYECDIPIGAGICASYQTQTNSPRRARSVASQSIIAYTMSLGAENSVAYSNNSIAIPTNFTISVTTEILPVSMTKTSVDCTMYICGDSTECSNLLLQYGSFCTQLNRALTGIAVEQDKNTQEVFAQVKQIYKTPPIKDFGGFNFSQILPDPSKPSKRSFIEDLLFNKVTLADAGFIKQYGDCLGDIAARDLICAQKFNGLTVLPPLLTDEMIAQYTSALLAGTITSGWTFGAGAALQIPFAMQMAYRFNGIGVTQCVLYENQKLIANQFNSAIGKIQDSLSSTASALGKLQDVVNQNAQALNTLVKQLSSNFGAISSVLNDILSRLDKVEAEVQIDRLITGRLQSLQTYVTQQLIRAAEIRASANLAATKMSECVLGQSKRVDFCGKGYHLMSFPQSAPHGVVFLHVTYVPAQEKNFTTAPAICHDGKAHFPREGVFVSNGTHWFVTQRNFYEPQIITTDNTFVCGNCDVLIGIVNNTVYDPLQPELDSFKEELDKYFKNHTSPDVDLGDISGINASVVNIQKEIDRLNEVAKNLNESLIDLQELGKYEQYIKGGGSGGGQIYEGKLTAEGLRFGIVASRFNHALVDRLVEGAIDAIVRHGGREEDITLVRVPGSWEIPVAAGELARKEDIDAVIAIGVLIRGATPHFDYIASEVSKGLADLSLELRKPITFGVITADTLEQAIERAGTKHGNKGWEAALSAIEMANLFKSLR

SEQ ID NO: 13593 - protein, 1371 aa, Artificial Sequence
  SARS-CoV-2/Shenzhen/SZTH-004/2020__EPI_ISL_406595 spike protein (1-1211)(N914C_S1123C) LumSynth construct
MFVFLVLLPLVSSQCVNLTTRTQLPPAYTNSFTRGVYYPDKVFRSSVLHSTQDLFLPFFSNVTWFHAIHVSGTNGTKRFDNPVLPFNDGVYFASTEKSNIIRGWIFGTTLDSKTQSLLIVNNATNVVIKVCEFQFCNDPFLGVYYHKNNKSWMESEFRVYSSANNCTFEYVSQPFLMDLEGKQGNFKNLREFVFKNIDGYFKIYSKHTPINLVRDLPQGFSALEPLVDLPIGINITRFQTLLALHRSYLTPGDSSSGWTAGAAAYYVGYLQPRTFLLKYNENGTITDAVDCALDPLSETKCTLKSFTVEKGIYQTSNFRVQPTESIVRFPNITNLCPFGEVFNATRFASVYAWDRKRISNCVAYYSVLYNSASFSTFKCYGVSPTKLNDLCFTNVYADSFVIRGDEVRQIAPGQTGKIADYNYKLPDDFTGCVIAWNSNNLDSKVGGNYNYLYRLFRKSNLKPFERDISTEIYQAGSTPCNGVEGFNCYFPLQSYGFQPTNGVGYQPYRVVVLSFELLHAPATVCGPKKSTNLVKNKCVNFNFNGLTGTGVLTESNKKFLPFQQFGRDIADTTDAVRDPQTLEILDITPCSFGGVSVITPGTNTSNQVAVLYQDVNCTEVPVAIHADQLTPTWRVYSTGSNVFQTRAGCLIGAEHVNNSYECDIPIGAGICASYQTQTNSPRRARSVASQSIIAYTMSLGAENSVAYSNNSIAIPTNFTISVTTEILPVSMTKTSVDCTMYICGDSTECSNLLLQYGSFCTQLNRALTGIAVEQDKNTQEVFAQVKQIYKTPPIKDFGGFNFSQILPDPSKPSKRSFIEDLLFNKVTLADAGFIKQYGDCLGDIAARDLICAQKFNGLTVLPPLLTDEMIAQYTSALLAGTITSGWTFGAGAALQIPFAMQMAYRFNGIGVTQCVLYENQKLIANQFNSAIGKIQDSLSSTASALGKLQDVVNQNAQALNTLVKQLSSNFGAISSVLNDILSRLDKVEAEVQIDRLITGRLQSLQTYVTQQLIRAAEIRASANLAATKMSECVLGQSKRVDFCGKGYHLMSFPQSAPHGVVFLHVTYVPAQEKNFTTAPAICHDGKAHFPREGVFVSNGTHWFVTQRNFYEPQIITTDNTFVCGNCDVVIGIVNNTVYDPLQPELDSFKEELDKYFKNHTSPDVDLGDISGINASVVNIQKEIDRLNEVAKNLNESLIDLQELGKYEQYIKGGGSGGGQIYEGKLTAEGLRFGIVASRFNHALVDRLVEGAIDAIVRHGGREEDITLVRVPGSWEIPVAAGELARKEDIDAVIAIGVLIRGATPHFDYIASEVSKGLADLSLELRKPITFGVITADTLEQAIERAGTKHGNKGWEAALSAIEMANLFKSLR

SEQ ID NO: 13594 - protein, 1371 aa, Artificial Sequence
  SARS-CoV-2/France/IDF0372/2020__EPI_ISL_406596 spike protein (1-1211)(N914C_S1123C) LumSynth construct
MFVFLVLLPLVSSQCVNLTTRTQLPPAYTNSFTRGVYYPDKVFRSSVLHSTQDLFLPFFSNVTWFHAIHVSGTNGTKRFDNPVLPFNDGVYFASTEKSNIIRGWIFGTTLDSKTQSLLIVNNATNVVIKVCEFQFCNDPFLGVYYHKNNKSWMESEFRVYSSANNCTFEYVSQPFLMDLEGKQGNFKNLREFVFKNIDGYFKIYSKHTPINLVRDLPQGFSALEPLVDLPIGINITRFQTLLALHRSYLTPGDSSSGWTAGAAAYYVGYLQPRTFLLKYNENGTITDAVDCALDPLSETKCTLKSFTVEKGIYQTSNFRVQPTESIVRFPNITNLCPFGEVFNATRFASVYAWNRKRISNCVADYSFLYNSASFSTFKCYGVSPTKLNDLCFTNVYADSFVIRGDEVRQIAPGQTGKIADYNYKLPDDFTGCVIAWNSNNLDSKVGGNYNYLYRLFRKSNLKPFERDISTEIYQAGSTPCNGVEGFNCYFPLQSYGFQPTNGVGYQPYRVVVLSFELLHAPATVCGPKKSTNLVKNKCVNFNFNGLTGTGVLTESNKKFLPFQQFGRDIADTTDAVRDPQTLEILDITPCSFGGVSVITPGTNTSNQVAVLYQDVNCTEVPVAIHADQLTPTWRVYSTGSNVFQTRAGCLIGAEHVNNSYECDIPIGAGICASYQTQTNSPRRARSVASQSIIAYTMSLGAENSVAYSNNSIAIPTNFTISVTTEILPVSMTKTSVDCTMYICGDSTECSNLLLQYGSFCTQLNRALTGIAVEQDKNTQEVFAQVKQIYKTPPIKDFGGFNFSQILPDPSKPSKRSFIEDLLFNKVTLADAGFIKQYGDCLGDIAARDLICAQKFNGLTVLPPLLTDEMIAQYTSALLAGTITSGWTFGAGAALQIPFAMQMAYRFNGIGVTQCVLYENQKLIANQFNSAIGKIQDSLSSTASALGKLQDVVNQNAQALNTLVKQLSSNFGAISSVLNDILSRLDKVEAEVQIDRLITGRLQSLQTYVTQQLIRAAEIRASANLAATKMSECVLGQSKRVDFCGKGYHLMSFPQSAPHGVVFLHVTYVPAQEKNFTTAPAICHDGKAHFPREGVFVSNGTHWFVTQRNFYEPQIITTDNTFVCGNCDVVIGIVNNTVYDPLQPELDSFKEELDKYFKNHTSPDVDLGDISGINASVVNIQKEIDRLNEVAKNLNESLIDLQELGKYEQYIKGGGSGGGQIYEGKLTAEGLRFGIVASRFNHALVDRLVEGAIDAIVRHGGREEDITLVRVPGSWEIPVAAGELARKEDIDAVIAIGVLIRGATPHFDYIASEVSKGLADLSLELRKPITFGVITADTLEQAIERAGTKHGNKGWEAALSAIEMANLFKSLR

SEQ ID NO: 13595 - protein, 1371 aa, Artificial Sequence
  SARS-CoV-2/Australia/VIC01/2020__EPI_ISL_406844 spike protein (1-1211)(N914C_S1123C) LumSynth construct
MFVFLVLLPLVSSQCVNLTTRTQLPPAYTNSFTRGVYYPDKVFRSSVLHSTQDLFLPFFSNVTWFHAIHVSGTNGTKRFDNPVLPFNDGVYFASTEKSNIIRGWIFGTTLDSKTQSLLIVNNATNVVIKVCEFQFCNDPFLGVYYHKNNKSWMESEFRVYSSANNCTFEYVSQPFLMDLEGKQGNFKNLREFVFKNIDGYFKIYSKHTPINLVRDLPQGFSALEPLVDLPIGINITRFQTLLALHRRYLTPGDSSSGWTAGAAAYYVGYLQPRTFLLKYNENGTITDAVDCALDPLSETKCTLKSFTVEKGIYQTSNFRVQPTESIVRFPNITNLCPFGEVFNATRFASVYAWNRKRISNCVADYSVLYNSASFSTFKCYGVSPTKLNDLCFTNVYADSFVIRGDEVRQIAPGQTGKIADYNYKLPDDFTGCVIAWNSNNLDSKVGGNYNYLYRLFRKSNLKPFERDISTEIYQAGSTPCNGVEGFNCYFPLQSYGFQPTNGVGYQPYRVVVLSFELLHAPATVCGPKKSTNLVKNKCVNFNFNGLTGTGVLTESNKKFLPFQQFGRDIADTTDAVRDPQTLEILDITPCSFGGVSVITPGTNTSNQVAVLYQDVNCTEVPVAIHADQLTPTWRVYSTGSNVFQTRAGCLIGAEHVNNSYECDIPIGAGICASYQTQTNSPRRARSVASQSIIAYTMSLGAENSVAYSNNSIAIPTNFTISVTTEILPVSMTKTSVDCTMYICGDSTECSNLLLQYGSFCTQLNRALTGIAVEQDKNTQEVFAQVKQIYKTPPIKDFGGFNFSQILPDPSKPSKRSFIEDLLFNKVTLADAGFIKQYGDCLGDIAARDLICAQKFNGLTVLPPLLTDEMIAQYTSALLAGTITSGWTFGAGAALQIPFAMQMAYRFNGIGVTQCVLYENQKLIANQFNSAIGKIQDSLSSTASALGKLQDVVNQNAQALNTLVKQLSSNFGAISSVLNDILSRLDKVEAEVQIDRLITGRLQSLQTYVTQQLIRAAEIRASANLAATKMSECVLGQSKRVDFCGKGYHLMSFPQSAPHGVVFLHVTYVPAQEKNFTTAPAICHDGKAHFPREGVFVSNGTHWFVTQRNFYEPQIITTDNTFVCGNCDVVIGIVNNTVYDPLQPELDSFKEELDKYFKNHTSPDVDLGDISGINASVVNIQKEIDRLNEVAKNLNESLIDLQELGKYEQYIKGGGSGGGQIYEGKLTAEGLRFGIVASRFNHALVDRLVEGAIDAIVRHGGREEDITLVRVPGSWEIPVAAGELARKEDIDAVIAIGVLIRGATPHFDYIASEVSKGLADLSLELRKPITFGVITADTLEQAIERAGTKHGNKGWEAALSAIEMANLFKSLR

SEQ ID NO: 13596 - protein, 1371 aa, Artificial Sequence
  SARS-CoV-2/Germany/BavPat1/2020__EPI_ISL_406862 spike protein (1-1211)(N914C_S1123C) LumSynth construct
MFVFLVLLPLVSSQCVNLTTRTQLPPAYTNSFTRGVYYPDKVFRSSVLHSTQDLFLPFFSNVTWFHAIHVSGTNGTKRFDNPVLPFNDGVYFASTEKSNIIRGWIFGTTLDSKTQSLLIVNNATNVVIKVCEFQFCNDPFLGVYYHKNNKSWMESEFRVYSSANNCTFEYVSQPFLMDLEGKQGNFKNLREFVFKNIDGYFKIYSKHTPINLVRDLPQGFSALEPLVDLPIGINITRFQTLLALHRSYLTPGDSSSGWTAGAAAYYVGYLQPRTFLLKYNENGTITDAVDCALDPLSETKCTLKSFTVEKGIYQTSNFRVQPTESIVRFPNITNLCPFGEVFNATRFASVYAWNRKRISNCVADYSVLYNSASFSTFKCYGVSPTKLNDLCFTNVYADSFVIRGDEVRQIAPGQTGKIADYNYKLPDDFTGCVIAWNSNNLDSKVGGNYNYLYRLFRKSNLKPFERDISTEIYQAGSTPCNGVEGFNCYFPLQSYGFQPTNGVGYQPYRVVVLSFELLHAPATVCGPKKSTNLVKNKCVNFNFNGLTGTGVLTESNKKFLPFQQFGRDIADTTDAVRDPQTLEILDITPCSFGGVSVITPGTNTSNQVAVLYQGVNCTEVPVAIHADQLTPTWRVYSTGSNVFQTRAGCLIGAEHVNNSYECDIPIGAGICASYQTQTNSPRRARSVASQSIIAYTMSLGAENSVAYSNNSIAIPTNFTISVTTEILPVSMTKTSVDCTMYICGDSTECSNLLLQYGSFCTQLNRALTGIAVEQDKNTQEVFAQVKQIYKTPPIKDFGGFNFSQILPDPSKPSKRSFIEDLLFNKVTLADAGFIKQYGDCLGDIAARDLICAQKFNGLTVLPPLLTDEMIAQYTSALLAGTITSGWTFGAGAALQIPFAMQMAYRFNGIGVTQCVLYENQKLIANQFNSAIGKIQDSLSSTASALGKLQDVVNQNAQALNTLVKQLSSNFGAISSVLNDILSRLDKVEAEVQIDRLITGRLQSLQTYVTQQLIRAAEIRASANLAATKMSECVLGQSKRVDFCGKGYHLMSFPQSAPHGVVFLHVTYVPAQEKNFTTAPAICHDGKAHFPREGVFVSNGTHWFVTQRNFYEPQIITTDNTFVCGNCDVVIGIVNNTVYDPLQPELDSFKEELDKYFKNHTSPDVDLGDISGINASVVNIQKEIDRLNEVAKNLNESLIDLQELGKYEQYIKGGGSGGGQIYEGKLTAEGLRFGIVASRFNHALVDRLVEGAIDAIVRHGGREEDITLVRVPGSWEIPVAAGELARKEDIDAVIAIGVLIRGATPHFDYIASEVSKGLADLSLELRKPITFGVITADTLEQAIERAGTKHGNKGWEAALSAIEMANLFKSLR

SEQ ID NO: 13597 - protein, 1371 aa, Artificial Sequence
  SARS-CoV-2/Wuhan/HBCDC-HB-02/2020__EPI_ISL_412978 spike protein (1-1211)(N914C_S1123C) LumSynth construct
MFVFLVLLPLVSSQCVNLTTRTQLPPAYTNSFTRGVYYPDKVFRSSVLHSTQDLFLPFFSNVTWFHAIHVSGTNGTKRFDNPVLPFNDGVYFASTEKSNIIRGWIFGTTLDSKTQSLLIVNNATNVVIKVCEFQFCNDPFLGVYYHKNNKSWMESEFRVYSSANNCTFEYVSQPFLMDLEGKQGNFKNLREFVFKNIDGYFKIYSKHTPINLVRDLPQGFSALEPLVDLPIGINITRFQTLLALHRSYLTPGDSSSGWTAGAAAYYVGYLQPRTFLLKYNENGTITDAVDCALDPLSETKCTLKSFTVEKGIYQTSNFRVQPTESIVRFPNITNLCPFGEVFNATRFASVYAWNRKRISNCVADYSVLYNSASFSTFKCYGVSPTKLNDLCFTNVYADSFVIRGDEVRQIAPGQTGKIADYNYKLPDDFTGCVIAWNSNNLDSKVGGNYNYLYRLFRKSNLKPFERDISTEIYQAGSTPCNGVEGFNCYFPLQSYGFQPTNGVGYQPYRVVVLSFELLHAPATVCGPKKSTNLVKNKCVNFNFNGLTGTGVLTESNKKFLPFQQFGRDIADTTDAVRDPQTLEILDITPCSFGGVSVITPGTNTSNQVAVLYQDVNCTEVPVAIHADQLTPTWRVYSTGSNVFQTRAGCLIGAEHVNNSYECDIPIGAGICASYQTQTNSPRRARSVASQSIIAYTMSLGAENSVAYSNNSIAIPTNFTISVTTEILPVSMTKTSVDCTMYICGDSTECSNFLLQYGSFCTQLNRALTGIAVEQDKNTQEVFAQVKQIYKTPPIKDFGGFNFSQILPDPSKPSKRSFIEDLLFNKVTLADAGFIKQYGDCLGDIAARDLICAQKFNGLTVLPPLLTDEMIAQYTSALLAGTITSGWTFGAGAALQIPFAMQMAYRFNGIGVTQCVLYENQKLIANQFNSAIGKIQDSLSSTASALGKLQDVVNQNAQALNTLVKQLSSNFGAISSVLNDILSRLDKVEAEVQIDRLITGRLQSLQTYVTQQLIRAAEIRASANLAATKMSECVLGQSKRVDFCGKGYHLMSFPQSAPHGVVFLHVTYVPAQEKNFTTAPAICHDGKAHFPREGVFVSNGTHWFVTQRNFYEPQIITTDNTFVCGNCDVVIGIVNNTVYDPLQPELDSFKEELDKYFKNHTSPDVDLGDISGINASVVNIQKEIDRLNEVAKNLNESLIDLQELGKYEQYIKGGGSGGGQIYEGKLTAEGLRFGIVASRFNHALVDRLVEGAIDAIVRHGGREEDITLVRVPGSWEIPVAAGELARKEDIDAVIAIGVLIRGATPHFDYIASEVSKGLADLSLELRKPITFGVITADTLEQAIERAGTKHGNKGWEAALSAIEMANLFKSLR

SEQ ID NO: 13598 - protein, 1371 aa, Artificial Sequence
  SARS-CoV-2/Australia/QLD02/2020__EPI_ISL_407896 spike protein (1-1211)(N914C_S1123C) LumSynth construct
MFVFLVLLPLVSSQCVNLTTRTQLPPAYTNSFTRGVYYPDKVFRSSVLHSTQDLFLPFFSNVTWFHAIHVSGTNGTKRFDNPVLPFNDGVYFASTEKSNIIRGWIFGTTLDSKTQSLLIVNNATNVVIKVCEFQFCNDPFLGVYYHKNNKSWMESEFRVYSSANNCTFEYVSQPFLMDLEGKQGNFKNLREFVFKNIDGYFKIYSKHTPINLVRDLPQGFSALEPLVDLPIGINITRFQTLLALHRSYLTPGDSSSGWTAGAAAYYVGYLQPRTFLLKYNENGTITDAVDCALDPLSETKCTLKSFTVEKGIYQTSNFRVQPTESIVRFPNITNLCPFGEVFNATRFASVYAWNRKRISNCVADYSVLYNSASFSTFKCYGVSPTKLNDLCFTNVYADSFVIRGDEVRQIAPGQTGKIADYNYKLPDDFTGCVIAWNSNNLDSKVGGNYNYLYRLFRKSNLKPFERDISTEIYQAGSTPCNGVEGFNCYFPLQSYGFQPTNGVGYQPYRVVVLSFELLHAPATVCGPKKSTNLVKNKCVNFNFNGLTGTGVLTESNKKFLPFQQFGRDIADTTDAVRDPQTLEILDITPCSFGGVSVITPGTNTSNQVAVLYQDVNCTEVPVAIHADQLTPTWRVYSTGSNVFQTRAGCLIGAEHVNNSYECDIPIGAGICASYQTQTNSPRRARSVASQSIIAYTMSLGAENSVAYSNNSIAIPTNFTISVTTEILPVSMTKTSVDCTMYICGDSTECSNLLLQYGSFCTQLNRALTGIAVEQDKNTQEVFAQVKQIYKTPPIKDFGGFNFSQILPDPSKPSKRSFIEDLLFNKVTLADAGFIKQYGDCLGDIAARDLICAQKFNGLTVLPPLLTDEMIAQYTSALLAGTITSGWTFGAGAALQIPFAMQMAYRFNGIGVTQCVLYENQKLIANQFNSAIGKIQDSLSSTASALGKLQDVVNQNAQALNTLVKQLSSNFGAISSVLNDILSRLDKVEAEVQIDRLITGRLQSLQTYVTQQLIRAAEIRASANLAATKMSECVLGQSKRVDFCGKGYHLMSFPQSAPHGVVFLHVTYVPAQEKNFTTAPAICHDGKAHFPREGVFVSNGTHWFVTQRNFYEPQIITTDNTFVCGNCDVVIGIVNNTVYDPLQLELDSFKEELDKYFKNHTSPDVDLGDISGINASVVNIQKEIDRLNEVAKNLNESLIDLQELGKYEQYIKGGGSGGGQIYEGKLTAEGLRFGIVASRFNHALVDRLVEGAIDAIVRHGGREEDITLVRVPGSWEIPVAAGELARKEDIDAVIAIGVLIRGATPHFDYIASEVSKGLADLSLELRKPITFGVITADTLEQAIERAGTKHGNKGWEAALSAIEMANLFKSLR

SEQ ID NO: 13599 - protein, 1371 aa, Artificial Sequence
  SARS-CoV-2/India/1-31/2020__EPI_ISL_413523 spike protein (1-1211)(N914C_S1123C) LumSynth construct
MFVFLVLLPLVSSQCVNLTTRTQLPPAYTNSFTRGVYYPDKVFRSSVLHSTQDLFLPFFSNVTWFHAIHVSGTNGTKRFDNPVLPFNDGVYFASTEKSNIIRGWIFGTTLDSKTQSLLIVNNATNVVIKVCEFQFCNDPFLGVYYHKNNKSWMESEFRVYSSANNCTFEYVSQPFLMDLEGKQGNFKNLREFVFKNIDGYFKIYSKHTPINLVRDLPQGFSALEPLVDLPIGINITRFQTLLALHRSYLTPGDSSSGWTAGAAAYYVGYLQPRTFLLKYNENGTITDAVDCALDPLSETKCTLKSFTVEKGIYQTSNFRVQPTESIVRFPNITNLCPFGEVFNATRFASVYAWNRKRISNCVADYSVLYNSASFSTFKCYGVSPTKLNDLCFTNVYADSFVIRGDEVRQIAPGQTGKIADYNYKLPDDFTGCVIAWNSNNLDSKVGGNYNYLYRLFRKSNLKPFERDISTEIYQAGSTPCNGVEGFNCYFPLQSYGFQPTNGVGYQPYRVVVLSFELLHAPATVCGPKKSTNLVKNKCVNFNFNGLTGTGVLTESNKKFLPFQQFGRDIADTTDAVRDPQTLEILDITPCSFGGVSVITPGTNTSNQVAVLYQDVNCTEVPVAIHADQLTPTWRVYSTGSNVFQTRAGCLIGAEHVNNSYECDIPIGAGICASYQTQTNSPRRARSVASQSIIAYTMSLGAENSVAYSNNSIAIPTNFTISVTTEILPVSMTKTSVDCTMYICGDSTECSNLLLQYGSFCTQLNRALTGIAVEQDKNTQEVFAQVKQIYKTPPIKDFGGFNFSQILPDPSKPSKRSFIEDLLFNKVTLADAGFIKQYGDCLGDIAARDLICAQKFNGLTVLPPLLTDEMIAQYTSALLAGTITSGWTFGAGAALQIPFAMQMAYRFNGIGVTQCVLYENQKLIANQFNSVIGKIQDSLSSTASALGKLQDVVNQNAQALNTLVKQLSSNFGAISSVLNDILSRLDKVEAEVQIDRLITGRLQSLQTYVTQQLIRAAEIRASANLAATKMSECVLGQSKRVDFCGKGYHLMSFPQSAPHGVVFLHVTYVPAQEKNFTTAPAICHDGKAHFPREGVFVSNGTHWFVTQRNFYEPQIITTDNTFVCGNCDVVIGIVNNTVYDPLQPELDSFKEELDKYFKNHTSPDVDLGDISGINASVVNIQKEIDRLNEVAKNLNESLIDLQELGKYEQYIKGGGSGGGQIYEGKLTAEGLRFGIVASRFNHALVDRLVEGAIDAIVRHGGREEDITLVRVPGSWEIPVAAGELARKEDIDAVIAIGVLIRGATPHFDYIASEVSKGLADLSLELRKPITFGVITADTLEQAIERAGTKHGNKGWEAALSAIEMANLFKSLR

SEQ ID NO: 13600 - protein, 1371 aa, Artificial Sequence
  SARS-CoV-2/Guangdong/GD2020087-P0008/2020__EPI_ISL_413863 spike protein (1-1211)(N914C_S1123C) LumSynth construct
MFVFLVLLPLVSSQCVNLTTRTQLPPAYTNSFTRGVYYPDKVFRSSVLHSTQDLFLPFFSNVTWFHAIHVSGTNGTKRFDNPVLPFNDGVYFASTEKSNIIRGWIFGTTLDSKTQSLLIVNNATNVVIKVCEFQFCNDPFLGVYYHKNNKSWMESEFRVYSSANNCTFEYVSQPFLMDLEGKQGNFKNLREFVFKNIDGYFKIYSKHTPINLVRDLPQGFSALEPLVDLPIGINITRFQTLLALHRSYLTPGDSSSGWTAGAAAYYVGYLQPRTFLLKYNENGTITDAVDCALDPLSETKCTLKSFTVEKGIYQTSNFRVQPTESIVRFPNITNLCPFGEVFNATRFASVYAWNRKRISNCVADYSVLYNSASFSTFKCYGVSPTKLNDLCFTNVYADSFVIRGDEVREIAPGQTGKIADYNYKLPDDFTGCVIAWNSNNLDSKVGGNYNYLYRLFRKSNLKPFERDISTEIYQAGSTPCNGVEGFNCYFPLQSYGFQPTNGVGYQPYRVVVLSFELLHAPATVCGPKKSTNLVKNKCVNFNFNGLTGTGVLTESNKKFLPFQQFGRDIADTTDAVRDPQTLEILDITPCSFGGVSVITPGTNTSNQVAVLYQDVNCTEVPVAIHADQLTPTWRVYSTGSNVFQTRAGCLIGAEHVNNSYECDIPIGAGICASYQTQTNSPRRARSVASQSIIAYTMSLGAENSVAYSNNSIAIPTNFTISVTTEILPVSMTKTSVDCTMYICGDSTECSNLLLQYGSFCTQLNRALTGIAVEQDKNTQEVFAQVKQIYKTPPIKDFGGFNFSQILPDPSKPSKRSFIEDLLFNKVTLADAGFIKQYGDCLGDIAARDLICAQKFNGLTVLPPLLTDEMIAQYTSALLAGTITSGWTFGAGAALQIPFAMQMAYRFNGIGVTQCVLYENQKLIANQFNSAIGKIQDSLSSTASALGKLQDVVNQNAQALNTLVKQLSSNFGAISSVLNDILSRLDKVEAEVQIDRLITGRLQSLQTYVTQQLIRAAEIRASANLAATKMSECVLGQSKRVDFCGKGYHLMSFPQSAPHGVVFLHVTYVPAQEKNFTTAPAICHDGKAHFPREGVFVSNGTHWFVTQRNFYEPQIITTDNTFVCGNCDVVIGIVNNTVYDPLQPELDSFKEELDKYFKNHTSPDVDLGDISGINASVVNIQKEIDRLNEVAKNLNESLIDLQELGKYEQYIKGGGSGGGQIYEGKLTAEGLRFGIVASRFNHALVDRLVEGAIDAIVRHGGREEDITLVRVPGSWEIPVAAGELARKEDIDAVIAIGVLIRGATPHFDYIASEVSKGLADLSLELRKPITFGVITADTLEQAIERAGTKHGNKGWEAALSAIEMANLFKSLR

SEQ ID NO: 13601 - protein, 1371 aa, Artificial Sequence
  SARS-CoV-2/Sweden/01/2020__EPI_ISL_411951 spike protein (1-1211)(N914C_S1123C) LumSynth construct
MFVFLVLLPLVSSQCVNLTTRTQLPPAYTNSFTRGVYYPDKVFRSSVLHSTQDLFLPFFSNVTWFHAIHVSGTNGTKRFDNPVLPFNDGVYFASTEKSNIIRGWIFGTTLDSKTQSLLIVNNATNVVIKVCEFQFCNDPFLGVYYHKNNKSWMESEFRVYSSANNCTFEYVSQPFLMDLEGKQGNFKNLREFVFKNIDGYFKIYSKHTPINLVRDLPQGFSALEPLVDLPIGINITRFQTLLALHRSYLTPGDSSSGWTAGAAAYYVGYLQPRTFLLKYNENGTITDAVDCALDPLSETKCTLKSFTVEKGIYQTSNFRVQPTESIVRFPNITNLCPFGEVFNATRFASVYAWNRKRISNCVADYSVLYNSASFSTFKCYGVSPTKLNDLCFTNVYADSFVIRGDEVRQIAPGQTGKIADYNYKLPDDFTGCVIAWNSNNLDSKVGGNYNYLYRLFRKSNLKPFERDISTEIYQAGSTPCNGVEGFNCYFPLQSYGFQPTNGVGYQPYRVVVLSFELLHAPATVCGPKKSTNLVKNKCVNFNFNGLTGTGVLTESNKKFLPFQQFGRDIADTTDAVRDPQTLEILDITPCSFGGVSVITPGTNTSNQVAVLYQDVNCTEVPVAIHADQLTPTWRVYSTGSNVFQTRAGCLIGAEHVNNSYECDIPIGAGICASYQTQTNSPRRARSVASQSIIAYTMSLGAENSVAYSNNSIAIPTNFTISVTTEILPVSMTKTSVDCTMYICGDSTECSNLLLQYGSFCTQLNRALTGIAVEQDKNTQEVFAQVKQIYKTPPIKDCGGFNFSQILPDPSKPSKRSFIEDLLFNKVTLADAGFIKQYGDCLGDIAARDLICAQKFNGLTVLPPLLTDEMIAQYTSALLAGTITSGWTFGAGAALQIPFAMQMAYRFNGIGVTQCVLYENQKLIANQFNSAIGKIQDSLSSTASALGKLQDVVNQNAQALNTLVKQLSSNFGAISSVLNDILSRLDKVEAEVQIDRLITGRLQSLQTYVTQQLIRAAEIRASANLAATKMSECVLGQSKRVDFCGKGYHLMSFPQSAPHGVVFLHVTYVPAQEKNFTTAPAICHDGKAHFPREGVFVSNGTHWFVTQRNFYEPQIITTDNTFVCGNCDVVIGIVNNTVYDPLQPELDSFKEELDKYFKNHTSPDVDLGDISGINASVVNIQKEIDRLNEVAKNLNESLIDLQELGKYEQYIKGGGSGGGQIYEGKLTAEGLRFGIVASRFNHALVDRLVEGAIDAIVRHGGREEDITLVRVPGSWEIPVAAGELARKEDIDAVIAIGVLIRGATPHFDYIASEVSKGLADLSLELRKPITFGVITADTLEQAIERAGTKHGNKGWEAALSAIEMANLFKSLR

SEQ ID NO: 13602 - protein, 1371 aa, Artificial Sequence
  SARS-CoV-2/Tianmen/HBCDC-HB-07/2020__EPI_ISL_412983 spike protein (1-1211)(N914C_S1123C) LumSynth construct
MFVFLVLLPLVSSQCVNLTTRTQLPPAYTNSFTRGVYYPDKVFRSSVLHSTQDLFLPFFSNVTWFHAIHVSGTNGTKRFDNPVLPFNDGVYFASTEKSNIIRGWIFGTTLDSKTQSLLIVNNATNVVIKVCEFQFCNDPFLGVYYHKNNKSWMESEFRVYSSANNCTFEYVSQPFLMDLEGKQGNFKNLREFVFKNIDGYFKIYSKHTPINLVRDLPQGFSALEPLVDLPIGINITRFQTLLALHRSYLTPGDSSSGWTAGAAAYYVGYLQPRTFLLKYNENGTITDAVDCALDPLSETKCTLKSFTVEKGIYQTSNFRVQPTESIVRFPNITNLCPFGEVFNATRFASVYAWNRKRISNCVADYSVLYNSASFSTFKCYGVSPTKLNDLCFTNVYADSFVIRGDEVRQIAPGQTGKIADYNYKLPDDFTGCVIAWNSNNLDSKVGGNYNYLYRLFRKSNLKPFERDISTEIYQAGSTPCNGVEGFNCYFPLQSYGFQPTNGVGYQPYRVVVLSFELLHAPATVCGPKKSTNLVKNKCVNFNFNGLTGTGVLTESNKKFLPFQQFGRDIADTTDAVRDPQTLEILDITPCSFGGVSVITPGTNTSNQVAVLYQDLNCTEVPVAIHADQLTPTWRVYSTGSNVFQTRAGCLIGAEHVNNSYECDIPIGAGICASYQTQTNSPRRARSVASQSIIAYTMSLGAENSVAYSNNSIAIPTNFTISVTTEILPVSMTKTSVDCTMYICGDSTECSNLLLQYGSFCTQLNRALTGIAVEQDKNTQEVFAQVKQIYKTPPIKDFGGFNFSQILPDPSKPSKRSFIEDLLFNKVTLADAGFIKQYGDCLGDIAARDLICAQKFNGLTVLPPLLTDEMIAQYTSALLAGTITSGWTFGAGAALQIPFAMQMAYRFNGIGVTQCVLYENQKLIANQFNSAIGKIQDSLSSTASALGKLQDVVNQNAQALNTLVKQLSSNFGAISSVLNDILSRLDKVEAEVQIDRLITGRLQSLQTYVTQQLIRAAEIRASANLAATKMSECVLGQSKRVDFCGKGYHLMSFPQSAPHGVVFLHVTYVPAQEKNFTTAPAICHDGKAHFPREGVFVSNGTHWFVTQRNFYEPQIITTDNTFVCGNCDVVIGIVNNTVYDPLQPELDSFKEELDKYFKNHTSPDVDLGDISGINASVVNIQKEIDRLNEVAKNLNESLIDLQELGKYEQYIKGGGSGGGQIYEGKLTAEGLRFGIVASRFNHALVDRLVEGAIDAIVRHGGREEDITLVRVPGSWEIPVAAGELARKEDIDAVIAIGVLIRGATPHFDYIASEVSKGLADLSLELRKPITFGVITADTLEQAIERAGTKHGNKGWEAALSAIEMANLFKSLR

SEQ ID NO: 13603 - protein, 1371 aa, Artificial Sequence
  SARS-CoV-2/Hong Kong/case42_VM20002493/2020__EPI_ISL_414527 spike protein (1-1211)(N914C_S1123C) LumSynth construct
MFVFLVLLPLVSSQCVNLTTRTQLPPAYTNSFTRGVYYPDKVFRSSVLHSTQDLFLPFFSNVTWFHAIHVSGTNGTKRFDNPVLPFNDGVYFASTEKSNIIRGWIFGTTLDSKTQSLLIVNNATNVVIKVCEFQFCNDPFLGVYYHKNNKSWMESEFRVYSSANNCTFEYVSQPFLMDLEGKQGNFKNLREFVFKNIDGYFKIYSKHTPINLVRDLPQGFSALEPLVDLPIGINITRFQTLLALHRSYLTPGDSSSGWTAGAAAYYVGYLQPRTFLLKYNENGTITDAVDCALDPLSETKCTLKSFTVEKGIYQTSNFRVQPTESIVRFPNITNLCPFGEVFNATRFASVYAWNRKRISNCVADYSVLYNSASFSTFKCYGVSPTKLNDLCFTNVYADSFVIRGDEVRQIAPGQTGKIADYNYKLPDDFTGCVIAWNSNNLDSKVGGNYNYLYRLFRKSNLKPFERDISTEIYQAGSTPCNGVEGFNCYFPLQSYGFQPTNGVGYQPYRVVVLSFELLHAPATVCGPKKSTNLVKNKCVNFNFNGLTGTGVLTESNKKFLPFQQFGRDIADTTDAVRDPQTLEILDITPCSFGGVSVITPGTNTSNQVAVLYQDVNCTEVPVAIHADQLTPTWRVYSTGSNVFQTRAGCLIGAEHVNNSYECDIPIGAGICASYQTQTNSPRRARSVASQSIIAYTMSLGAENSVAYSNNSIAIPTNFAISVTTEILPVSMTKTSVDCTMYICGDSTECSNLLLQYGSFCTQLNRALTGIAVEQDKNTQEVFAQVKQIYKTPPIKDFGGFNFSQILPDPSKPSKRSFIEDLLFNKVTLADAGFIKQYGDCLGDIAARDLICAQKFNGLTVLPPLLTDEMIAQYTSALLAGTITSGWTFGAGAALQIPFAMQMAYRFNGIGVTQCVLYENQKLIANQFNSAIGKIQDSLSSTASALGKLQDVVNQNAQALNTLVKQLSSNFGAISSVLNDILSRLDKVEAEVQIDRLITGRLQSLQTYVTQQLIRAAEIRASANLAATKMSECVLGQSKRVDFCGKGYHLMSFPQSAPHGVVFLHVTYVPAQEKNFTTAPAICHDGKAHFPREGVFVSNGTHWFVTQRNFYEPQIITTDNTFVCGNCDVVIGIVNNTVYDPLQPELDSFKEELDKYFKNHTSPDVDLGDISGINASVVNIQKEIDRLNEVAKNLNESLIDLQELGKYEQYIKGGGSGGGQIYEGKLTAEGLRFGIVASRFNHALVDRLVEGAIDAIVRHGGREEDITLVRVPGSWEIPVAAGELARKEDIDAVIAIGVLIRGATPHFDYIASEVSKGLADLSLELRKPITFGVITADTLEQAIERAGTKHGNKGWEAALSAIEMANLFKSLR

SEQ ID NO: 13604 - protein, 1371 aa, Artificial Sequence
  SARS-CoV-2/USA/CruiseA-23/2020__EPI_ISL_414482 spike protein (1-1211)(N914C_S1123C) LumSynth construct
MFVFLVLLPLVSSQCVNLTTRTQLPPAYTNSFTRGVYYPDKVFRSSVLHSTQDLFLPFFSNVTWFHAIHVSGTNGTKRFDNPVLPFNDGVYFASTEKSNIIRGWIFGTTLDSKTQSLLIVNNATNVVIKVCEFQFCNDPFLGVYYHKNNKSWMESEFRVYSSANNCTFEYVSQPFLMDLEVKQGNFKNLREFVFKNIDGYFKIYSKHTPINLVRDLPQGFSALEPLVDLPIGINITRFQTLLALHRSYLTPGDSSSGWTAGAAAYYVGYLQPRTFLLKYNENGTITDAVDCALDPLSETKCTLKSFTVEKGIYQTSNFRVQPTESIVRFPNITNLCPFGEVFNATRFASVYAWNRKRISNCVADYSVLYNSASFSTFKCYGVSPTKLNDLCFTNVYADSFVIRGDEVRQIAPGQTGKIADYNYKLPDDFTGCVIAWNSNNLDSKVGGNYNYLYRLFRKSNLKPFERDISTEIYQAGSTPCNGVEGFNCYFPLQSYGFQPTNGVGYQPYRVVVLSFELLHAPATVCGPKKSTNLVKNKCVNFNFNGLTGTGVLTESNKKFLPFQQFGRDIADTTDAVRDPQTLEILDITPCSFGGVSVITPGTNTSNQVAVLYQDVNCTEVPVAIHADQLTPTWRVYSTGSNVFQTRAGCLIGAEHVNNSYECDIPIGAGICASYQTQTNSPRRARSVASQSIIAYTMSLGAENSVAYSNNSIAIPTNFTISVTTEILPVSMTKTSVDCTMYICGDSTECSNLLLQYGSFCTQLNRALTGIAVEQDKNTQEVFAQVKQIYKTPPIKDFGGFNFSQILPDPSKPSKRSFIEDLLFNKVTLADAGFIKQYGDCLGDIAARDLICAQKFNGLTVLPPLLTDEMIAQYTSALLAGTITSGWTFGAGAALQIPFAMQMAYRFNGIGVTQCVLYENQKLIANQFNSAIGKIQDSLSSTASALGKLQDVVNQNAQALNTLVKQLSSNFGAISSVLNDILSRLDKVEAEVQIDRLITGRLQSLQTYVTQQLIRAAEIRASANLAATKMSECVLGQSKRVDFCGKGYHLMSFPQSAPHGVVFLHVTYVPAQEKNFTTAPAICHDGKAHFPREGVFVSNGTHWFVTQRNFYEPQIITTDNTFVCGNCDVVIGIVNNTVYDPLQPELDSFKEELDKYFKNHTSPDVDLGDISGINASVVNIQKEIDRLNEVAKNLNESLIDLQELGKYEQYIKGGGSGGGQIYEGKLTAEGLRFGIVASRFNHALVDRLVEGAIDAIVRHGGREEDITLVRVPGSWEIPVAAGELARKEDIDAVIAIGVLIRGATPHFDYIASEVSKGLADLSLELRKPITFGVITADTLEQAIERAGTKHGNKGWEAALSAIEMANLFKSLR

SEQ ID NO: 13605 - protein, 1371 aa, Artificial Sequence
  SARS-CoV-2/Hong Kong/case85_VM20002868/2020__EPI_ISL_414519 spike protein (1-1211)(N914C_S1123C) LumSynth construct
MFVFLVLVPLVSSQCVNLTTRTQLPPAYTNSFTRGVYYPDKVFRSSVLHSTQDLFLPFFSNVTWFHAIHVSGTNGTKRFDNPVLPFNDGVYFASTEKSNIIRGWIFGTTLDSKTQSLLIVNNATNVVIKVCEFQFCNDPFLGVYYHKNNKSWMESEFRVYSSANNCTFEYVSQPFLMDLEGKQGNFKNLREFVFKNIDGYFKIYSKHTPINLVRDLPQGFSALEPLVDLPIGINITRFQTLLALHRSYLTPGDSSSGWTAGAAAYYVGYLQPRTFLLKYNENGTITDAVDCALDPLSETKCTLKSFTVEKGIYQTSNFRVQPTESIVRFPNITNLCPFGEVFNATRFASVYAWNRKRISNCVADYSVLYNSASFSTFKCYGVSPTKLNDLCFTNVYADSFVIRGDEVRQIAPGQTGKIADYNYKLPDDFTGCVIAWNSNNLDSKVGGNYNYLYRLFRKSNLKPFERDISTEIYQAGSTPCNGVEGFNCYFPLQSYGFQPTNGVGYQPYRVVVLSFELLHAPATVCGPKKSTNLVKNKCVNFNFNGLTGTGVLTESNKKFLPFQQFGRDIADTTDAVRDPQTLEILDITPCSFGGVSVITPGTNTSNQVAVLYQDVNCTEVPVAIHADQLTPTWRVYSTGSNVFQTRAGCLIGAEHVNNSYECDIPIGAGICASYQTQTNSPRRARSVASQSIIAYTMSLGAENSVAYSNNSIAIPTNFTISVTTEILPVSMTKTSVDCTMYICGDSTECSNLLLQYGSFCTQLNRALTGIAVEQDKNTQEVFAQVKQIYKTPPIKDFGGFNFSQILPDPSKPSKRSFIEDLLFNKVTLADAGFIKQYGDCLGDIAARDLICAQKFNGLTVLPPLLTDEMIAQYTSALLAGTITSGWTFGAGAALQIPFAMQMAYRFNGIGVTQCVLYENQKLIANQFNSAIGKIQDSLSSTASALGKLQDVVNQNAQALNTLVKQLSSNFGAISSVLNDILSRLDKVEAEVQIDRLITGRLQSLQTYVTQQLIRAAEIRASANLAATKMSECVLGQSKRVDFCGKGYHLMSFPQSAPHGVVFLHVTYVPAQEKNFTTAPAICHDGKAHFPREGVFVSNGTHWFVTQRNFYEPQIITTDNTFVCGNCDVVIGIVNNTVYDPLQPELDSFKEELDKYFKNHTSPDVDLGDISGINASVVNIQKEIDRLNEVAKNLNESLIDLQELGKYEQYIKGGGSGGGQIYEGKLTAEGLRFGIVASRFNHALVDRLVEGAIDAIVRHGGREEDITLVRVPGSWEIPVAAGELARKEDIDAVIAIGVLIRGATPHFDYIASEVSKGLADLSLELRKPITFGVITADTLEQAIERAGTKHGNKGWEAALSAIEMANLFKSLR

SEQ ID NO: 13606 - protein, 1371 aa, Artificial Sequence; identical to SEQ ID NO: 13596
  SARS-CoV-2/England/200990660/2020__EPI_ISL_414523 spike protein (1-1211)(N914C_S1123C) LumSynth construct

SEQ ID NO: 13607 - protein, 1371 aa, Artificial Sequence
  SARS-CoV-2/Australia/NSW09/2020__EPI_ISL_413595 spike protein (1-1211)(N914C_S1123C) LumSynth construct
MFVFLVLLPLVSSQCVNLTTRTQLPPAYTNSFTRGVYYPDKVFRSSVLHSTQDLFLPFFSNVTWFHAIHVSGTNGTKRFDNPVLPFNDGVYFASTEKSNIIRGWIFGTTLDSKTQSLLIVNNATNVVIKVCEFQFCNDPFLGVYYHKNNKSWMESEFRVYSSANNCTFEYVSQPFLMDLEGKQGNFKNLREFVFKNIDGYFKIYSKHTPINLVRDLPQGFSALEPLVDLPIGINITRFQTLLALHRSYLTPGDSSSGWTAGAAAYYVGYLQPRTFLLKYNENGTITDAVDCALDPLSETKCTLKSFTVEKGIYQTSNFRVQPTESIVRFPNITNLCPFGEVFNATRFASVYAWNRKRISNCVADYSVLYNSASFSTFKCYGVSPTKLNDLCFTNVYADSFVIRGDEVRQIAPGQTGKIADYNYKLPDDFTGCVIAWNSNNLDSKVGGNYNYLYRLFRKSNLKPFERDISTEIYQAGSTPCNGVEGFNCYFPLQSYGFQPTNGVGYQPYRVVVLSFELLHAPATVCGPKKSTNLVKNKCVNFNFNGLTGTGVLTESNKKFLPFQQFGRDIADTTDAVRDPQTLEILDITPCSFGGVSVITPGTNTSNQVAVLYQDVNCTEVPVAIHADQLTPTWRVYSTGSNVFQTRAGCLIGAEHVNNSYECDIPIGAGICASYQTQTNSPRRARSVASQSIIAYTMSLGAENSVAYSNNSIAIPTNFTISVTTEILPVSMTKTSVDCTMYICGDSTECSNLLLQYGSFCTQLNRALTGIAVEQDKNTQEVFAQVKQIYKTPPIKDFGGFNFSQILPDPSKPSKRSFIEDLLFNKVTLADAGFIKQYGDCLGDIAARDLICAQKFNGLTVLPPLLTDEMIAQYTSALLAGTITSGWTFGAGAALQIPFAMQMAYRFNGIGVTQCVLYENQKLIANQFNSAIGKIQDSLSFTASALGKLQDVVNQNAQALNTLVKQLSSNFGAISSVLNDILSRLDKVEAEVQIDRLITGRLQSLQTYVTQQLIRAAEIRASANLAATKMSECVLGQSKRVDFCGKGYHLMSFPQSAPHGVVFLHVTYVPAQEKNFTTAPAICHDGKAHFPREGVFVSNGTHWFVTQRNFYEPQIITTDNTFVCGNCDVVIGIVNNTVYDPLQPELDSFKEELDKYFKNHTSPDVDLGDISGINASVVNIQKEIDRLNEVAKNLNESLIDLQELGKYEQYIKGGGSGGGQIYEGKLTAEGLRFGIVASRFNHALVDRLVEGAIDAIVRHGGREEDITLVRVPGSWEIPVAAGELARKEDIDAVIAIGVLIRGATPHFDYIASEVSKGLADLSLELRKPITFGVITADTLEQAIERAGTKHGNKGWEAALSAIEMANLFKSLR

SEQ ID NO: 13608 - protein, 1371 aa, Artificial Sequence; identical to SEQ ID NO: 13588
  SARS-CoV-2/Australia/NSW10/2020__EPI_ISL_413596 spike protein (1-1211)(N914C_S1123C) LumSynth construct

SEQ ID NO: 13609 - protein, 1371 aa, Artificial Sequence
  SARS-CoV-2/Switzerland/1000477797/2020__EPI_ISL_413023 spike protein (1-1211)(N914C_S1123C) LumSynth construct
MFVFLVLLPLVSSQCVNLTTRTQLPPAYTNSFTRGVYYPDKVFRSSVLHSTQDLFLPFFSNVTWFHAIHVSGTNGTKRFDNPVLPFNDGVYFASTEKSNIIRGWIFGTTLDSKTQSLLIVNNATNVVIKVCEFQFCNDPFLGVYYHKNNKSWMESEFRVYSSANNCTFEYVSQPFLMDLEGKQGNFKNLREFVFKNIDGYFNIYSKHTPINLVRDLPQGFSALEPLVDLPIGINITRFQTLLALHRSYLTPGDSSSGWTAGAAAYYVGYLQPRTFLLKYNENGTITDAVDCALDPLSETKCTLKSFTVEKGIYQTSNFRVQPTESIVRFPNITNLCPFGEVFNATRFASVYAWNRKRISNCVADYSVLYNSASFSTFKCYGVSPTKLNDLCFTNVYADSFVIRGDEVRQIAPGQTGKIADYNYKLPDDFTGCVIAWNSNNLDSKVGGNYNYLYRLFRKSNLKPFERDISTEIYQAGSTPCNGVEGFNCYFPLQSYGFQPTNGVGYQPYRVVVLSFELLHAPATVCGPKKSTNLVKNKCVNFNFNGLTGTGVLTESNKKFLPFQQFGRDIADTTDAVRDPQTLEILDITPCSFGGVSVITPGTNTSNQVAVLYQGVNCTEVPVAIHADQLTPTWRVYSTGSNVFQTRAGCLIGAEHVNNSYECDIPIGAGICASYQTQTNSPRRARSVASQSIIAYTMSLGAENSVAYSNNSIAIPTNFTISVTTEILPVSMTKTSVDCTMYICGDSTECSNLLLQYGSFCTQLNRALTGIAVEQDKNTQEVFAQVKQIYKTPPIKDFGGFNFSQILPDPSKPSKRSFIEDLLFNKVTLADAGFIKQYGDCLGDIAARDLICAQKFNGLTVLPPLLTDEMIAQYTSALLAGTITSGWTFGAGAALQIPFAMQMAYRFNGIGVTQCVLYENQKLIANQFNSAIGKIQDSLSSTASALGKLQDVVNQNAQALNTLVKQLSSNFGAISSVLNDILSRLDKVEAEVQIDRLITGRLQSLQTYVTQQLIRAAEIRASANLAATKMSECVLGQSKRVDFCGKGYHLMSFPQSAPHGVVFLHVTYVPAQEKNFTTAPAICHDGKAHFPREGVFVSNGTHWFVTQRNFYEPQIITTDNTFVCGNCDVVIGIVNNTVYDPLQPELDSFKEELDKYFKNHTSPDVDLGDISGINASVVNIQKEIDRLNEVAKNLNESLIDLQELGKYEQYIKGGGSGGGQIYEGKLTAEGLRFGIVASRFNHALVDRLVEGAIDAIVRHGGREEDITLVRVPGSWEIPVAAGELARKEDIDAVIAIGVLIRGATPHFDYIASEVSKGLADLSLELRKPITFGVITADTLEQAIERAGTKHGNKGWEAALSAIEMANLFKSLR

SEQ ID NO: 13610 - protein, 1371 aa, Artificial Sequence
  SARS-CoV-2/Belgium/BA-02291/2020__EPI_ISL_415159 spike protein (1-1211)(N914C_S1123C) LumSynth construct
MFVFLVLLPLVSSQCVNLTTRTQLPPAYTNSFTRGVYYPDKVFRSSVLHSTQDLFLPFFSNVTWFHAIHVSGTNGTKRFDNPVLPFNDGVYFASTEKSNIIRGWIFGTTLDSKTQSLLIVNNATNVVIKVCEFQFCNDPFLGVYYHKNNKSWMESEFRVYSSANNCTFEYVSQPFLMDLEGKQGNFKNLREFVFKNIDGYFKIYSKHTPINLVRDLPQGFSALEPLVDLPIGINITRFQTLLALHRSYLTPGDSSSGWTAGAAAYYVGYLQPRTFLLKYNENGTITDAVDCALDPLSETKCTLKSFTVEKGIYQTSNFRVQPTESIVRFPNITNLCPFGEVFNATRFASVYAWNRKRISNCVADYSVLYNSASFSTFKCYGVSPTKLNDLCFTNVYADSFVIRGDEVRQIAPGQTGKIADYNYKLPDDFTGCVIAWNSNNLDSKVGGNYNYLYRLFRRSNLKPFERDISTEIYQAGSTPCNGVEGFNCYFPLQSYGFQPTNGVGYQPYRVVVLSFELLPAPATVCGPKKSTNLVKNKCVNFNFNGLTGTGVLTESNKKFLPFQQFGRDIADTTDAVRDPQTLEILDITPCSFGGVSVITPGTNTSNQVAVLYQGVNCTEVPVAIHADQLTPTWRVYSTGSNVFQTRAGCLIGAEHVNNSYECDIPIGAGICASYQTQTNSPRRARSVASQSIIAYTMSLGAENSVAYSNNSIAIPTNFTISVTTEILPVSMTKTSVDCTMYICGDSTECSNLLLQYGSFCTQLNRALTGIAVEQDKNTQEVFAQVKQIYKTPPIKDFGGFNFSQILPDPSKPSKRSFIEDLLFNKVTLADAGFIKQYGDCLGDIAARDLICAQKFNGLTVLPPLLTDEMIAQYTSALLAGTITSGWTFGAGAALQIPFAMQMAYRFNGIGVTQCVLYENQKLIANQFNSAIGKIQDSLSSAAPALGKLQDVVNQNAQALNTLVKQLSSNFGAISSVLNDILSRLDKVEAEVQIDRLITGRLQSLQTYVTQQLIRAAEIRASANLAATKMSECVLGQSKRVDFCGKGYHLMSFPQSAPHGVVFLHVTYVPAQEKNFTTAPAICHDGKAHFPREGVFVSNGTHWFVTQRNFYEPQIITTDNTFVCGNCDVVIGIVNNTVYDPLQPELDSFKEELDKYFKNHTSPDVDLGDISGINASVVNIQKEIDRLNEVAKNLNESLIDLQELGKYEQYIKGGGSGGGQIYEGKLTAEGLRFGIVASRFNHALVDRLVEGAIDAIVRHGGREEDITLVRVPGSWEIPVAAGELARKEDIDAVIAIGVLIRGATPHFDYIASEVSKGLADLSLELRKPITFGVITADTLEQAIERAGTKHGNKGWEAALSAIEMANLFKSLR

SEQ ID NO: 13611 - protein, 1371 aa, Artificial Sequence
  SARS-CoV-2/USA/WA8-UW5/2020__EPI_ISL_413486 spike protein (1-1211)(N914C_S1123C) LumSynth construct
MFVFLVLLPLVSSQCVNLTTRTQLPPAYTNSFTRGVYYPDKVFRSSVLHSTQDLFLPFFSNVTWFHAIHVSGTNGTKRFDNPVLPFNDGVYFASTEKSNIIRGWIFGTTLDSKTQSLLIVNNATNVVIKVCEFQFCNDPFLGVYYHKNNKSWMESEFRVYSSANNCTFEYVSQPFLMDLEGKQGNFKNLREFVFKNIDGYFKIYSKHTPINLVRDLPQGFSALEPLVDLPIGINITRFQTLLALHRSYLTPGDSSSGWTAGAAAYYVGYLQPRTFLLKYNENGTITDAVDCALDPLSETKCTLKSFTVEKGIYQTSNFRVQPTESIVRFPNITNLCPFGEVFNATRFASVYAWNRKRISNCVADYSVLYNSASFSTFKCYGVSPTKLNDLCFTNVYADSFVIRGDEVRQIAPGQTGKIADYNYKLPDDFTGCVIAWNSNNLDSKVGGNYNYLYRLFRKSNLKPFERDISTEIYQAGSTPCNGVEGFNCYFPLQSYGFQPTNGVGYQPYRVVVLSFELLHAPATVCGPKKSTNLVKNKCVNFNFNGLTGTGVLTESNKKFLPFQQFGRDIADTTDAVRDPQTLEILDITPCSFGGVSVITPGTNTSNQVAVLYQDVNCTEVPVAIHADQLTPTWRVYSTGSNVFQTRAGCLIGAEYVNNSYECDIPIGAGICASYQTQTNSPRRARSVASQSIIAYTMSLGAENSVAYSNNSIAIPTNFTISVTTEILPVSMTKTSVDCTMYICGDSTECSNLLLQYGSFCTQLNRALTGIAVEQDKNTQEVFAQVKQIYKTPPIKDFGGFNFSQILPDPSKPSKRSFIEDLLFNKVTLADAGFIKQYGDCLGDIAARDLICAQKFNGLTVLPPLLTDEMIAQYTSALLAGTITSGWTFGAGAALQIPFAMQMAYRFNGIGVTQCVLYENQKLIANQFNSAIGKIQDSLSSTASALGKLQDVVNQNAQALNTLVKQLSSNFGAISSVLNDILSRLDKVEAEVQIDRLITGRLQSLQTYVTQQLIRAAEIRASANLAATKMSECVLGQSKRVDFCGKGYHLMSFPQSAPHGVVFLHVTYVPAQEKNFTTAPAICHDGKAHFPREGVFVSNGTHWFVTQRNFYEPQIITTDNTFVCGNCDVVIGIVNNTVYDPLQPELDSFKEELDKYFKNHTSPDVDLGDISGINASVVNIQKEIDRLNEVAKNLNESLIDLQELGKYEQYIKGGGSGGGQIYEGKLTAEGLRFGIVASRFNHALVDRLVEGAIDAIVRHGGREEDITLVRVPGSWEIPVAAGELARKEDIDAVIAIGVLIRGATPHFDYIASEVSKGLADLSLELRKPITFGVITADTLEQAIERAGTKHGNKGWEAALSAIEMANLFKSLR

SEQ ID NO: 13612 - protein, 1371 aa, Artificial Sequence
  SARS-CoV-2/England/20102000506/2020__EPI_ISL_415147 spike protein (1-1211)(N914C_S1123C) LumSynth construct
MFVFLVLLPLVSSQCVNLTTRTQLPPAYTNSFTRGVYYPDKVFRSSVLHSTQDLFLPFFSNVTWFHAIHVSGTNGTKRFDNPVLPFNDGVYFASTEKSNIIRGWIFGTTLDSKTQSLLIVNNATNVVIKVCEFQFCNDPFLGVYYHKNNKSWMESEFRVYSSANNCTFEYVSQPFLMDLEGKQGNFKNLREFVFKNIDGYFKIYSKHTPINLVRDLPQGFSALEPLVDLPIGINITRFQTLLALHRSYLTPGDSSSGWTAGAAAYYVGYLQPRTFLLKYNENGTITDAVDCALDPLSETKCTLKSFTVEKGIYQTSNFRVQPTESIVRFPNITNLCPFGEVFNATRFASVYAWNRKRISNCVADYSVLYNSASFSTFKCYGVSPTKLNDLCFTNVYADSFVIRGDEVRQIAPGQTGKIADYNYKLPDDFTGCVIAWNSNNLDSKVGGNYNYLYRLFRKSNLKPFERDISTEIYQAGSTPCNGVEGFNCYFPLQSYGFQPTNGVGYQPYRVVVLSFELLHAPATVCGPKKSTNLVKNKCVNFNFNGLTGTGVLTESNKKFLPFQQFGRDIADTTDAVRDPQTLEILDITPCSFGGVSVITPGTNTSNQVAVLYQGVNCTEVPVAIHADQLTPTWRVYSTGSNVFQTRAGCLIGAEHVNNSYECDIPIGAGICASYQTQTNSPRRARSVASQSIIAYTMSLGAENSVAYSNNSIAIPTNFTISVTTEILPVSMTKTSVDCTMYICGDSTECSNLLLQYGSFCTQLNRALTGIAVEQDKNTQEVFAQVKQIYKTPPIKDFGGFNFSQILPDPSKPSKRSFIEDLLFNKVTLADAGFIKQYGYCLGDIAARDLICAQKFNGLTVLPPLLTDEMIAQYTSALLAGTITSGWTFGAGAALQIPFAMQMAYRFNGIGVTQCVLYENQKLIANQFNSAIGKIQDSLSSTASALGKLQDVVNQNAQALNTLVKQLSSNFGAISSVLNDILSRLDKVEAEVQIDRLITGRLQSLQTYVTQQLIRAAEIRASANLAATKMSECVLGQSKRVDFCGKGYHLMSFPQSAPHGVVFLHVTYVPAQEKNFTTAPAICHDGKAHFPREGVFVSNGTHWFVTQRNFYEPQIITTDNTFVCGNCDVVIGIVNNTVYDPLQPELDSFKEELDKYFKNHTSPDVDLGDISGINASVVNIQKEIDRLNEVAKNLNESLIDLQELGKYEQYIKGGGSGGGQIYEGKLTAEGLRFGIVASRFNHALVDRLVEGAIDAIVRHGGREEDITLVRVPGSWEIPVAAGELARKEDIDAVIAIGVLIRGATPHFDYIASEVSKGLADLSLELRKPITFGVITADTLEQAIERAGTKHGNKGWEAALSAIEMANLFKSLR

SEQ ID NO: 13613 - protein, 1371 aa, Artificial Sequence
  SARS-CoV-2/Belgium/VAG-03013/2020__EPI_ISL_415155 spike protein (1-1211)(N914C_S1123C) LumSynth construct
MFVFLVLLPLVSSQCVNLTTRTQLPPAYTNSFTRGVYYPDKVFRSSVLHSTQDLFLPFFSNVTWFHAIHVSGTNGTKRFDNPVLPFNDGVYFASTEKSNIIRGWIFGTTLDSKTQSLLIVNNATNVVIKVCEFQFCNDPFLGVYYHKNNKSWMESEFRVYSSANNCTFEYVSQPFLMDLEGKQGNFKNLREFVFKNIDGYFKIYSKHTPINLVRDLPQGFSALEPLVDLPIGINITRFQTLLALHRSYLTPGDSSSGWTAGAAAYYVGYLQPRTFLLKYNENGTITDAVDCALDPLSETKCTLKSFTVEKGIYQTSNFRVQPTESIVRFPNITNLCPFGEVFNATRFASVYAWNRKRISNCVADYSVLYNSASFSTFKCYGVSPTKLNDLCFTNVYADSFVIRGDEVRQIAPGQTGKIADYNYKLPDDFTGCVIAWNSNNLDSKVGGNYNYLYRLFRKSNLKPFERDISTEIYQAGSTPCNGVEGFNCYFPLQSYGFQPTNGVGYQPYRVVVLSFELLHAPATVCGPKKSTNLVKNKCVNFNFNGLTGTGVLTESNKKFLPFQQFGRDIADTTDAVRDPQTLEILDITPCSFGGVSVITPGTNTSNQVAVLYQGVNCTEVPVAIHADQLTPTWRVYSTGSNVFQTRAGCLIGAEHVNNSYECDIPIGAGICASYQTQTNSPRRARSVASQSIIAYTMSLGAENSVAYSNNSIAIPTNFTISVTTEILPVSMTKTSVDCTMYICGDSTECSNLLLQYGSFCTQLNRALTGIAVEQDKNTQEVFAQVKQIYKTPPIKDFGGFNFSQILPDPSKPSKRSFIEDLLFNKVTLADAGFIKQYGDCLGDIAARDLICAQKFNGLTVLPPLLTDEMIAQYTSALLAGTITSGWTFGAGAALQIPFAMQMAYRFNGIGVTQCVLYENQKLIANQFNSAIGKIQDSLSSTATALGKLQDVVNQNAQALNTLVKQLSSNFGAISSVLNDILSRLDKVEAEVQIDRLITGRLQSLQTYVTQQLIRAAEIRASANLAATKMSECVLGQSKRVDFCGKGYHLMSFPQSAPHGVVFLHVTYVPAQEKNFTTAPAICHDGKAHFPREGVFVSNGTHWFVTQRNFYEPQIITTDNTFVCGNCDVVIGIVNNTVYDPLQPELDSFKEELDKYFKNHTSPDVDLGDISGINASVVNIQKEIDRLNEVAKNLNESLIDLQELGKYEQYIKGGGSGGGQIYEGKLTAEGLRFGIVASRFNHALVDRLVEGAIDAIVRHGGREEDITLVRVPGSWEIPVAAGELARKEDIDAVIAIGVLIRGATPHFDYIASEVSKGLADLSLELRKPITFGVITADTLEQAIERAGTKHGNKGWEAALSAIEMANLFKSLR

SEQ ID NO: 13614 - protein, 1371 aa, Artificial Sequence
  SARS-CoV-2/Belgium/BC-03016/2020__EPI_ISL_415157 spike protein (1-1211)(N914C_S1123C) LumSynth construct
MFVFLVLLPLVSSQCVNLTTRTQLPPAYTNSFTRGVYYPDKVFRSSVLHSTQDLFLPFFSNVTWFHAIHVSGTNGTKRFDNPVLPFNDGVYFASTEKSNIIRGWIFGTTLDSKTQSLLIVNNATNVVIKVCEFQFCNDPFLGVYYHKNNKSWMESEFRVYSSANNCTFEYVSQPFLMDLEGKQGNFKNLREFVFKNIDGYFKIYSKHTPINLVRDLPQGFSALEPLVDLPIGINITRFQTLLALHRSYLTPGDSSSGWTAGAAAYYVGYLQPRTFLLKYNENGTITDAVDCALDPLSETKCTLKSFTVEKGIYQTSNFRVQPTESIVRFPNITNLCPFGEVFNATRFASVYAWNRKRISNCVADYSVLYNSASFSTFKCYGVSPTKLNDLCFTNVYADSFVIRGDEVRQIAPGQTGKIADYNYKLPDDFTGCVIAWNSNNLDSKVGGNYNYLYRLFRKSNLKPFERDISTEIYQAGSTPCNGVEGFNCYFPLQSYGFQPTNGVGYQPYRVVVLSFELLHAPATVCGPKKSTNLVKNKCVNFNFNGLTGTGVLTESNKKFLPFQQFGRDIADTTDAVRDPQTLEILDITPCSFGGVSVITPGTNTSNQVAVLYQGVNCTEVPVAIHADQLTPTWRVYSTGSNVFQTRAGCLIGAEHVNNSYECDIPIGAGICASYQTQTNSPRRARSVASQSIIAYTMSLGAENSVAYSNNSIAIPTNFTISVTTEILPVSMTKTSVDCTMYICGDSTECSNLLLQYGSFCTQLNRALTGIAVEQDKNTQEVFAQVKQIYKTPPIKDFGGFNFSQILPDPSKPSKRSFIEDLLFNKVTLADAGFIKQYGDCLGDIAARDLICAQKFNGLTVLPPLLTDEMIAQYTSALLAGTITSGWTFGAGAALQIPFAMQMAYRFNGIGVTQCVLYENQKLIANQFNSAIGKIQDSLSSTAPALGKLQDVVNQNAQALNTLVKQLSSNFGAISSVLNDILSRLDKVEAEVQIDRLITGRLQSLQTYVTQQLIRAAEIRASANLAATKMSECVLGQSKRVDFCGKGYHLMSFPQSAPHGVVFLHVTYVPAQEKNFTTAPAICHDGKAHFPREGVFVSNGTHWFVTQRNFYEPQIITTDNTFVCGNCDVVIGIVNNTVYDPLQPELDSFKEELDKYFKNHTSPDVDLGDISGINASVVNIQKEIDRLNEVAKNLNESLIDLQELGKYEQYIKGGGSGGGQIYEGKLTAEGLRFGIVASRFNHALVDRLVEGAIDAIVRHGGREEDITLVRVPGSWEIPVAAGELARKEDIDAVIAIGVLIRGATPHFDYIASEVSKGLADLSLELRKPITFGVITADTLEQAIERAGTKHGNKGWEAALSAIEMANLFKSLR

SEQ ID NO: 13615 - protein, 1371 aa, Artificial Sequence
  SARS-CoV-2/Germany/BavPat3/2020__EPI_ISL_414521 spike protein (1-1211)(N914C_S1123C) LumSynth construct
MFVFLVLLPLVSSQCVNLTTRTQLPPAYTNSFTRGVYYPDKVFRSSVLHSTQDLFLPFFSNVTWFHAIHVSGTNGTKRFDNPVLPFNDGVYFASTEKSNIIRGWIFGTTLDSKTQSLLIVNNATNVVIKVCEFQFCNDPFLGVYYHKNNKSWMESEFRVYSSANNCTFEYVSQPFLMDLEGKQGNFKNLREFVFKNIDGYFKIYSKHTPINLVRDLPQGFSALEPLVDLPIGINITRFQTLLALHRSYLTPGDSSSGWTAGAAAYYVGYLQPRTFLLKYNENGTITDAVDCALDPLSETKCTLKSFTVEKGIYQTSNFRVQPTESIVRFPNITNLCPFGEVFNATRFASVYAWNRKRISNCVADYSVLYNSASFSTFKCYGVSPTKLNDLCFTNVYADSFVIRGDEVRQIAPGQTGKIADYNYKLPDDFTGCVIAWNSNNLDSKVGGNYNYLYRLFRKSNLKPFERDISTEIYQAGSTPCNGVEGFNCYFPLQSYGFQPTNGVGYQPYRVVVLSFELLHAPATVCGPKKSTNLVKNKCVNFNFNGLTGTGVLTESNKKFLPFQQFGRDIADTTDAVRDPQTLEILDITPCSFGGVSVITPGTNTSNQVAVLYQDVNCTEVPVAIHADQLTPTWRVYSTGSNVFQTRAGCLIGAEHVNNSYECDIPIGAGICASYQTQTNSPRRARSVASQSIIAYTMSLGAENSVAYSNNSIAIPTNFTISVTTEILPVSMTKTSVDCTMYICGDSTECSNLLLQYGSFCTQLNRALTGIAVEQDKNTQQVFAQVKQIYKTPPIKDFGGFNFSQILPDPSKPSKRSFIEDLLFNKVTLADAGFIKQYGDCLGDIAARDLICAQKFNGLTVLPPLLTDEMIAQYTSALLAGTITSGWTFGAGAALQIPFAMQMAYRFNGIGVTQCVLYENQKLIANQFNSAIGKIQDSLSSTASALGKLQDVVNQNAQALNTLVKQLSSNFGAISSVLNDILSRLDKVEAEVQIDRLITGRLQSLQTYVTQQLIRAAEIRASANLAATKMSECVLGQSKRVDFCGKGYHLMSFPQSAPHGVVFLHVTYVPAQEKNFTTAPAICHDGKAHFPREGVFVSNGTHWFVTQRNFYEPQIITTDNTFVCGNCDVVIGIVNNTVYDPLQPELDSFKEELDKYFKNHTSPDVDLGDISGINASVVNIQKEIDRLNEVAKNLNESLIDLQELGKYEQYIKGGGSGGGQIYEGKLTAEGLRFGIVASRFNHALVDRLVEGAIDAIVRHGGREEDITLVRVPGSWEIPVAAGELARKEDIDAVIAIGVLIRGATPHFDYIASEVSKGLADLSLELRKPITFGVITADTLEQAIERAGTKHGNKGWEAALSAIEMANLFKSLR

SEQ ID NO: 13616 - protein, 1371 aa, Artificial Sequence
  SARS-CoV-2/France/HF1805/2020__EPI_ISL_414628 spike protein (1-1211)(N914C_S1123C) LumSynth construct
MFVFLVLLPLVSSQCVNLTTRTQLPPAYTNSFTRGVYYPDKVFRSSVLHSTQDLFLPFFSNVTWFHAIHVSGTNGTKRFDNPVLPFNDGVYFASTEKSNIIRGWIFGTTLDSKTQSLLIVNNATNVVIKVCEFQFCNDPFLGVYYHKNNKSWMESEFRVYSSANNCTFEYVSQPFLMDLEGKQGNFKNLREFVFKNIDGYFKIYSKHTPINLVRDLPQGFSALEPLVDLPIGINITRFQTLLALHRSYLTPGDSSSGWTAGAAAYYVGYLQPRTFLLKYNENGTITDAVDCALDPLSETKCTLKSFTVEKGIYQTSNFRVQPTESIVRFPNITNLCPFGEVFNATRFASVYAWNRKRISNCVADYSVLYNSASFSTFKCYGVSPTKLNDLCFTNVYADSFVIRGDEVRQIAPGQTGKIADYNYKLPDDFTGCVIAWNSNNLDSKVGGNYNYLYRLFRKSNLKPFERDISTEIYQAGSTPCNGVEGFNCYFPLQSYGFQPTNGVGYQPYRVVVLSFELLHAPATVCGPKKSTNLVKNKCVNFNFNGLTGTGVLTESNKKFLPFQQFGRDIADTTDAVRDPQTLEILDITPCSFGGVSVITPGTNTSNQVAVLYQGVNCTEVPVAIHADQLTPTWRVYSTGSNVFQTRAGCLIGAEHVNNSYECDIPIGAGICASYQTQTNSPRRARSVASQSIIAYTMSLGAENSVAYSNNSIAIPTNFTISVTTEILPVSMTKTSVDCTMYICGDSTECSNLLLQYGSFCTQLNRALTGIAVEQDKNTQEVFAQVKQIYKTPPIKDFGGFNFSQILPDPSKPSKRSFIEDLLFNKVTLADAGFIKQYGDCLGDIAARDLICAQKFNGLTVLPPLLTDEMIAQYTSALLAGTITSGWTFGAGAALQIPFAMQMAYRFNGIGVTQCVLYENQKLIANQFNSAIGKIQDSLSSTASALGKLQDVVNQNAQALNTLVKQLSSNFGAISSVLNDILSRLDKVEAEVQIDRLITGRLQSLQTYVTQQLIRAAEIRASANLAATKMSECVLGQSKRVDFCGKGYHLMSFPQSAPHGVVFLHVTYVPAQEKNFTTAPAICHDGKAHFPREGVFVSNGTHWFVTQRNFYEPQIITTDNTFVCGNCDVVIGVVNNTVYDPLQPELDSFKEELDKYFKNHTSPDVDLGDISGINASVVNIQKEIDRLNEVAKNLNESLIDLQELGKYEQYIKGGGSGGGQIYEGKLTAEGLRFGIVASRFNHALVDRLVEGAIDAIVRHGGREEDITLVRVPGSWEIPVAAGELARKEDIDAVIAIGVLIRGATPHFDYIASEVSKGLADLSLELRKPITFGVITADTLEQAIERAGTKHGNKGWEAALSAIEMANLFKSLR

SEQ ID NO: 13617 - protein, 1371 aa, Artificial Sequence
  SARS-CoV-2/Netherlands/ZuidHolland_9/2020__EPI_ISL_414445 spike protein (1-1211)(N914C_S1123C) LumSynth construct
MFVFLVLLPLVSSQCVNLTTRTQLPPAYTNSFTRGVYYPDKVFRSSVLHSTQDLFLPFFSNVTWFHAIHVSGTNGTKRFDNPVLPFNDGVYFASTEKSNIIRGWIFGTTLDSKTQSLLIVNNATNVVIKVCEFQFCNDPFLGVYYHKNNKSWMESEFRVYSSANNCTFEYVSQPFLMDLEGKQGNFKNLREFVFKNIDGYFKIYSKHTPINLVRDLPQGFSALEPLVDLPIGINITRFQTLLALHRSYLTPGDSSSGWTAGAAAYYVGYLQPRTFLLKYNENGTITDAVDCALDPLSETKCTLKSFTVEKGIYQTSNFRVQPTESIVRFPNITNLCPFGEVFNATRFASVYAWNRKRISNCVADYSVLYNSASFSTFKCYGVSPTKLNDLCFTNVYADSFVIRGDEVRQIAPGQTGKIADYNYKLPDDFTGCVIAWNSNNLDSKVGGNYNYLYRLFRKSNLKPFERDISTEIYQAGSTPCNGVEGFNCYFPLQSYGFQPTNGVGYQPYRVVVLSFELLHAPATVCGPKKSTNLVKNKCVNFNFNGLTGTGVLTESNKKFLPFQQFGRDIADTTDAVRDPQTLEILDITPCSFGGVSVITPGTNTSNQVAVLYQGVNCTEVPVAIHADQLTPTWRVYSTGSNVFQTRAGCLIGAEHVNNSYECDIPIGAGICASYQTQTNSPRRARSVASQSIIAYTMSLGAENSVAYSNNSIAIPTNFTISVTTEILPVSMTKTSVDCTMYICGDSTECSNLLLQYGSFCTQLNRALTGIAVEQDKNTQEVFAQVKQIYKTPPIKDFGGFNFSQILPDPSKPSKRSFIEDLLFNKVTLADAGFIKQYGDCLGDIAARDLICVQKFNGLTVLPPLLTDEMIAQYTSALLAGTITSGWTFGAGAALQIPFAMQMAYRFNGIGVTQCVLYENQKLIANQFNSAIGKIQDSLSSTASALGKLQDVVNQNAQALNTLVKQLSSNFGAISSVLNDILSRLDKVEAEVQIDRLITGRLQSLQTYVTQQLIRAAEIRASANLAATKMSECVLGQSKRVDFCGKGYHLMSFPQSAPHGVVFLHVTYVPAQEKNFTTAPAICHDGKAHFPREGVFVSNGTHWFVTQRNFYEPQIITTDNTFVCGNCDVVIGIVNNTVYDPLQPELDSFKEELDKYFKNHTSPDVDLGDISGINASVVNIQKEIDRLNEVAKNLNESLIDLQELGKYEQYIKGGGSGGGQIYEGKLTAEGLRFGIVASRFNHALVDRLVEGAIDAIVRHGGREEDITLVRVPGSWEIPVAAGELARKEDIDAVIAIGVLIRGATPHFDYIASEVSKGLADLSLELRKPITFGVITADTLEQAIERAGTKHGNKGWEAALSAIEMANLFKSLR

SEQ ID NO: 13618 - protein, 1371 aa, Artificial Sequence
  SARS-CoV-2/Finland/FIN03032020A/2020__EPI_ISL_413602 spike protein (1-1211)(N914C_S1123C) LumSynth construct
MFVFLVLLPLVSSQCVNLTTRTQLPPAYTNSFTRGVYYPDKVFRSSVLHSTQDLFLPFFSNVTWFHAIHVSGTNGTKRFDNPVLPFNDGVYFASTEKSNIIRGWIFGTTLDSKTQSLLIVNNATNVVIKVCEFQFCNDPFLGVYYHKNNKSWMESEFRVYSSANNCTFEYVSQPFLMDLEGKQGNFKNLREFVFKNIDGYFKIYSKHTPINLVRDLPQGFSALEPLVDLPIGINITRFQTLLALHRSYLTPGDSSSGWTAGAAAYYVGYLQPRTFLLKYNENGTITDAVDCALDPLSETKCTLKSFTVEKGIYQTSNFRVQPTESIVRFPNITNLCPFGEVFNATRFASVYAWNRKRISNCVADYSVLYNSASFSTFKCYGVSPTKLNDLCFTNVYADSFVIRGDEVRQIAPGQTGKIADYNYKLPDDFTGCVISWNSNNLDSKVGGNYNYLYRLFRKSNLKPFERDISTEIYQAGSTPCNGVEGFNCYFPLQSYGFQPTNGVGYQPYRVVVLSFELLHAPATVCGPKKSTNLVKNKCVNFNFNGLTGTGVLTESNKKFLPFQQFGRDIADTTDAVRDPQTLEILDITPCSFGGVSVITPGTNTSNQVAVLYQGVNCTEVPVAIHADQLTPTWRVYSTGSNVFQTRAGCLIGAEHVNNSYECDIPIGAGICASYQTQTNSPRRARSVASQSIIAYTMSLGAENSVAYSNNSIAIPTNFTISVTTEILPVSMTKTSVDCTMYICGDSTECSNLLLQYGSFCTQLNRALTGIAVEQDKNTQEVFAQVKQIYKTPPIKDFGGFNFSQILPDPSKPSKRSFIEDLLFNKVTLADAGFIKQYGDCLGDIAARDLICAQKFNGLTVLPPLLTDEMIAQYTSALLAGTITSGWTFGAGAALQIPFAMQMAYRFNGIGVTQCVLYENQKLIANQFNSAIGKIQDSLSSTASALGKLQDVVNQNAQALNTLVKQLSSNFGAISSVLNDILSRLDKVEAEVQIDRLITGRLQSLQTYVTQQLIRAAEIRASANLAATKMSECVLGQSKRVDFCGKGYHLMSFPQSAPHGVVFLHVTYVPAQEKNFTTAPAICHDGKAHFPREGVFVSNGTHWFVTQRNFYEPQIITTDNTFVCGNCDVVIGIVNNTVYDPLQPELDSFKEELDKYFKNHTSPDVDLGDISGINASVVNIQKEIDRLNEVAKNLNESLIDLQELGKYEQYIKGGGSGGGQIYEGKLTAEGLRFGIVASRFNHALVDRLVEGAIDAIVRHGGREEDITLVRVPGSWEIPVAAGELARKEDIDAVIAIGVLIRGATPHFDYIASEVSKGLADLSLELRKPITFGVITADTLEQAIERAGTKHGNKGWEAALSAIEMANLFKSLR

SEQ ID NO: 13619 - protein, 1371 aa, Artificial Sequence
  SARS-CoV-2/France/GE1977/2020__EPI_ISL_414632 spike protein (1-1211)(N914C_S1123C) LumSynth construct
MFVFLVLLPLVSSQCVNLTTRTQLPPAYTNSFTRGVYYPDKVFRSSVLHSTQDLFLPFFSNVTWFHAIHVSGTNGTKRFDNPVLPFNDGVYFASTEKSNIIRGWIFGTTLDSKTQSLLIVNNATNVVIKVCEFQFCNDPFLGVYYHKNNKSWMESEFRVYSSANNCTFEYVSQPFLMDLEGKQGNFKNLREFVFKNIDGYFKIYSKHTPINLVRDLPQGFSALEPLVDLPIGINITRFQTLLALHRSYLTPGDSSSGWTAGAAAYYVGYLQPRTFLLKYNENGTITDAVDCALDPLSETKCTLKSFTVEKGIYQTSNFRVQPTESIVRFPNITNLCPFGEVFNATRFASVYAWNRKRISNCVADYSVLYNSASFSTFKCYGVSPTKLNDLCFTNVYADSFVIRGDEVRQIAPGQTGKIADYNYKLPDDFTGCVIAWNSNNLDSKVGGNYNYLYRLFRKSNLKPFERDISTEIYQAGSTPCNGVEGFNCYFPLQSYGFQPTNGVGYQPYRVVVLSFELLHAPATVCGPKKSTNLVKNKCVNFNFNGLTGTGVLTESNKKFLPFQQFGRDIADTTDAVRDPQTLEILDITPCSFGGVSVITPGTNTSNQVAVLYQGVNCTEVPVAIHADQLTPTWRVYSTGSNVFQTRAGCLIGAEHVNNSYECDIPIGAGICASYQTQTNSPRRARSVASQSIIAYTMSLGAENSVAYSNNSIAIPTNFTISVTTEILPVSMTKTSVDCTMYICGDSTECSNLLLQYGSFCTQLNRALTGIAVEQDKNTQEVFAQVKQIYKTPPIKDFGGFNFSQILPDPSKPSKRSFIEDLLFNKVTLADAGFIKQYGDCLGDIAARDLICAQKFNGLTVLPPLLTDEMIAQYTSALLAGTITSGWTFGAGAALQIPFAMQMAYRFNGIGVTQCVLYENQKLIANQFNSAIGKIQDSLFSTASALGKLQDVVNQNAQALNTLVKQLSSNFGAISSVLNDILSRLDKVEAEVQIDRLITGRLQSLQTYVTQQLIRAAEIRASANLAATKMSECVLGQSKRVDFCGKGYHLMSFPQSAPHGVVFLHVTYVPAQEKNFTTAPAICHDGKAHFPREGVFVSNGTHWFVTQRNFYEPQIITTDNTFVCGNCDVVIGIVNNTVYDPLQPELDSFKEELDKYFKNHTSPDVDLGDISGINASVVNIQKEIDRLNEVAKNLNESLIDLQELGKYEQYIKGGGSGGGQIYEGKLTAEGLRFGIVASRFNHALVDRLVEGAIDAIVRHGGREEDITLVRVPGSWEIPVAAGELARKEDIDAVIAIGVLIRGATPHFDYIASEVSKGLADLSLELRKPITFGVITADTLEQAIERAGTKHGNKGWEAALSAIEMANLFKSLR

SEQ ID NO: 13620 - protein, 1371 aa, Artificial Sequence
  SARS-CoV-2/Finland/FIN-313/2020__EPI_ISL_414641 spike protein (1-1211)(N914C_S1123C) LumSynth construct
MFVFLVLLPLVSSQCVNLTTRTQLPPAYTNSFTRGVYYPDKVFRSSVLHSTQDLFLPFFSNVTWFHAIHVSGTNGTKRFDNPVLPFNDGVYFASTEKSNIIRGWIFGTTLDSKTQSLLIVNNATNVVIKVCEFQFCNDPFLGVYYHKNNKSWMESEFRVYSSANNCTFEYVSQPFLMDLEGKQGNFKNLREFVFKNIDGYFKIYSKHTPINLVRDLPQGFSALEPLVDLPIGINITRFKTLLALHRSYLTPGDSSSGWTAGAAAYYVGYLQPRTFLLKYNENGTITDAVDCALDPLSETKCTLKSFTVEKGIYQTSNFRVQPTESIVRFPNITNLCPFGEVFNATRFASVYAWNRKRISNCVADYSVLYNSASFSTFKCYGVSPTKLNDLCFTNVYADSFVIRGDEVRQIAPGQTGKIADYNYKLPDDFTGCVIAWNSNNLDSKVGGNYNYLYRLFRKSNLKPFERDISTEIYQAGSTPCNGVEGFNCYFPLQSYGFQPTNGVGYQPYRVVVLSFELLHAPATVCGPKKSTNLVKNKCVNFNFNGLTGTGVLTESNKKFLPFQQFGRDIADTTDAVRDPQTLEILDITPCSFGGVSVITPGTNTSNQVAVLYQGVNCTEVPVAIHADQLTPTWRVYSTGSNVFQTRAGCLIGAEHVNNSYECDIPIGAGICASYQTQTNSPRRARSVASQSIIAYTMSLGAENSVAYSNNSIAIPTNFTISVTTEILPVSMTKTSVDCTMYICGDSTECSNLLLQYGSFCTQLNRALTGIAVEQDKNTQEVFAQVKQIYKTPPIKDFGGFNFSQILPDPSKPSKRSFIEDLLFNKVTLADAGFIKQYGDCLGDIAARDLICAQKFNGLTVLPPLLTDEMIAQYTSALLAGTITSGWTFGAGAALQIPFAMQMAYRFNGIGVTQCVLYENQKLIANQFNSAIGKIQDSLSSTASALGKLQDVVNQNAQALNTLVKQLSSNFGAISSVLNDILSRLDKVEAEVQIDRLITGRLQSLQTYVTQQLIRAAEIRASANLAATKMSECVLGQSKRVDFCGKGYHLMSFPQSAPHGVVFLHVTYVPAQEKNFTTAPAICHDGKAHFPREGVFVSNGTHWFVTQRNFYEPQIITTDNTFVCGNCDVVIGIVNNTVYDPLQPELDSFKEELDKYFKNHTSPDVDLGDISGINASVVNIQKEIDRLNEVAKNLNESLIDLQELGKYEQYIKGGGSGGGQIYEGKLTAEGLRFGIVASRFNHALVDRLVEGAIDAIVRHGGREEDITLVRVPGSWEIPVAAGELARKEDIDAVIAIGVLIRGATPHFDYIASEVSKGLADLSLELRKPITFGVITADTLEQAIERAGTKHGNKGWEAALSAIEMANLFKSLR

SEQ ID NO: 13621 - protein, 1371 aa, Artificial Sequence
  SARS-CoV-2/Netherlands/ZuidHolland_2/2020__EPI_ISL_414556 spike protein (1-1211)(N914C_S1123C) LumSynth construct
MFVFLVLLPLVSSQCVNLTTRTQLPPAYTNSFTRGVYYPDKVFRSSVLHSTQDLFLPFFSNVTWFHAIHVSGTNGTKRFDNPVLPFNDGVYFASTEKSNIIRGWIFGTTLDSKTQSLLIVNNATNVVIKVCEFQFCNDPFLGVYYHKNNKSWMESEFRVYSSANNCTFEYVSQPFLMDLEGKQGNFKNLREFVFKNIDGYFKIYSKHTPINLVRDLPQGFSALEPLVDLPIGINITRFQTLLALHRSYLTPGDSSSGWTAGAAAYYVGYLQPRTFLLKYNENGTITDAVDCALDPLSETKCTLKSFTVEKGIYQTSNFRVQPTESIVRFPNITNLCPFGEVFNATRFASVYAWNRKRISNCVADYSVLYNSASFSTFKCYGVSPTKLNDLCFTNVYADSFVIRGDEVRQIAPGQTGKIADYNYKLPDDFTGCVIAWNSNNLDSKVGGNYNYLYRLFRKSNLKPFERDISTEIYQAGSTPCNGVEGFNCYFPLQSYGFQPTNGVGYQPYRVVVLSFELLHAPATVCGPKKSTNLVKNKCVNFNFNGLTGTGVLTESNKKFLPFQQFGRDIADTTDAVRDPQTLEILDITPCSFGGVSVITPGTNTSNQVAVLYQGVNCTEVPVAIHADQLTPTWRVYSTGSNVFQTRAGCLIGAEHVNNSYECDIPIGAGICASYQTQTNSPRRARSVASQSIIAYTMSLGAENSVAYSNNSIAIPTNFTISVTTEILPVSMTKTSVDCTMYICGDSTECSNLLLQYGSFCTQLNRALTGIALEQDKNTQEVFAQVKQIYKTPPIKDFGGFNFSQILPDPSKPSKRSFIEDLLFNKVTLADAGFIKQYGDCLGDIAARDLICAQKFNGLTVLPPLLTDEMIAQYTSALLAGTITSGWTFGAGAALQIPFAMQMAYRFNGIGVTQCVLYENQKLIANQFNSAIGKIQDSLSSTASALGKLQDVVNQNAQALNTLVKQLSSNFGAISSVLNDILSRLDKVEAEVQIDRLITGRLQSLQTYVTQQLIRAAEIRASANLAATKMSECVLGQSKRVDFCGKGYHLMSFPQSAPHGVVFLHVTYVPAQEKNFTTAPAICHDGKAHFPREGVFVSNGTHWFVTQRNFYEPQIITTDNTFVCGNCDVVIGIVNNTVYDPLQPELDSFKEELDKYFKNHTSPDVDLGDISGINASVVNIQKEIDRLNEVAKNLNESLIDLQELGKYEQYIKGGGSGGGQIYEGKLTAEGLRFGIVASRFNHALVDRLVEGAIDAIVRHGGREEDITLVRVPGSWEIPVAAGELARKEDIDAVIAIGVLIRGATPHFDYIASEVSKGLADLSLELRKPITFGVITADTLEQAIERAGTKHGNKGWEAALSAIEMANLFKSLR

SEQ ID NO: 13622 - protein, 1371 aa, Artificial Sequence
  SARS-CoV-2/USA/WA-UW31/2020__EPI_ISL_414618 spike protein (1-1211)(N914C_S1123C) LumSynth construct
MFVFLVLLPLVSSQCVNLTTRTQLPPAYTNSFTRGVYYPDKVFRSSVLHSTQDLFLPFFSNVTWFHAIHVSGTNGTKRFDNPVLPFNDGVYFASTEKSNIIRGWIFGTTLDSKTQSLLIVNNATNVVIKVCEFQFCNDPFLGVYYHKNNKSWMESEFRVYSSANNCTFEYVSQPFLMDLEGKQGNFKNLREFVFKNIDGYFKIYSKHTPINLVRDLPQGFSALEPLVDLPIGINITRFQTLLALHRSYLTPGDSSSGWTAGAAAYYVGYLQPRTFLLKYNENGTITDAVDCALDPLSETKCTLKSFTVEKGIYQTSNFRVQPTESIVRFPNITNLCPFGEVFNATRFASVYAWNRKRISNCVADYSVLYNSASFSTFKCYGVSPTKLNDLCFTNVYADSFVIRGDEVRQIAPGQTGKIADYNYKLPDDFTGCVIAWNSNNLDSKVGGNYNYLYRLFRKSNLKPFERDISTEIYQAGSTPCNGAEGFNCYFPLQSYGFQPTNGVGYQPYRVVVLSFELLHAPATVCGPKKSTNLVKNKCVNFNFNGLTGTGVLTESNKKFLPFQQFGRDIADTTDAVRDPQTLEILDITPCSFGGVSVITPGTNTSNQVAVLYQDVNCTEVPVAIHADQLTPTWRVYSTGSNVFQTRAGCLIGAEHVNNSYECDIPIGAGICASYQTQTNSPRRARSVASQSIIAYTMSLGAENSVAYSNNSIAIPTNFTISVTTEILPVSMTKTSVDCTMYICGDSTECSNLLLQYGSFCTQLNRALTGIAVEQDKNTQEVFAQVKQIYKTPPIKDFGGFNFSQILPDPSKPSKRSFIEDLLFNKVTLADAGFIKQYGDCLGDIAARDLICAQKFNGLTVLPPLLTDEMIAQYTSALLAGTITSGWTFGAGAALQIPFAMQMAYRFNGIGVTQCVLYENQKLIANQFNSAIGKIQDSLSSTASALGKLQDVVNQNAQALNTLVKQLSSNFGAISSVLNDILSRLDKVEAEVQIDRLITGRLQSLQTYVTQQLIRAAEIRASANLAATKMSECVLGQSKRVDFCGKGYHLMSFPQSAPHGVVFLHVTYVPAQEKNFTTAPAICHDGKAHFPREGVFVSNGTHWFVTQRNFYEPQIITTDNTFVCGNCDVVIGIVNNTVYDPLQPELDSFKEELDKYFKNHTSPDVDLGDISGINASVVNIQKEIDRLNEVAKNLNESLIDLQELGKYEQYIKGGGSGGGQIYEGKLTAEGLRFGIVASRFNHALVDRLVEGAIDAIVRHGGREEDITLVRVPGSWEIPVAAGELARKEDIDAVIAIGVLIRGATPHFDYIASEVSKGLADLSLELRKPITFGVITADTLEQAIERAGTKHGNKGWEAALSAIEMANLFKSLR

SEQ ID NO: 13623 - protein, 1371 aa, Artificial Sequence
  SARS-CoV-2/South Korea/SNU01/2020__EPI_ISL_411929 spike protein (1-1211)(N914C_S1123C) LumSynth construct
MFVFLVLLPLVSSQCVNLTTRTQLPPAYTNSFTRGVYYPDKVFRSSVLHSTQDLFLPFFSNVTWFHAIHVSGTNGTKRFDNPVLPFNDGVYFASTEKSNIIRGWIFGTTLDSKTQSLLIVNNATNVVIKVCEFQFCNDPFLGVYYHKNNKSWMESEFRVYSSANNCTFEYVSQPFLMDLEGKQGNFKNLREFVFKNIDGYFKIYSKHTPINLVRDLPQGFWALEPLVDLPIGINITRFQTLLALHRSYLTPGDSSSGWTAGAAAYYVGYLQPRTFLLKYNENGTITDAVDCALDPLSETKCTLKSFTVEKGIYQTSNFRVQPTESIVRFPNITNLCPFGEVFNATRFASVYAWNRKRISNCVADYSVLYNSASFSTFKCYGVSPTKLNDLCFTNVYADSFVIRGDEVRQIAPGQTGKIADYNYKLPDDFTGCVIAWNSNNLDSKVGGNYNYLYRLFRKSNLKPFERDISTEIYQAGSTPCNGVEGFNCYFPLQSYGFQPTNGVGYQPYRVVVLSFELLHAPATVCGPKKSTNLVKNKCVNFNFNGLTGTGVLTESNKKFLPFQQFGRDIADTTDAVRDPQTLEILDITPCSFGGVSVITPGTNTSNQVAVLYQDVNCTEVPVAIHADQLTPTWRVYSTGSNVFQTRAGCLIGAEHVNNSYECDIPIGAGICASYQTQTNSPRRARSVASQSIIAYTMSLGAENSVAYSNNSIAIPTNFTISVTTEILPVSMTKTSVDCTMYICGDSTECSNLLLQYGSFCTQLNRALTGIAVEQDKNTQEVFAQVKQIYKTPPIKDFGGFNFSQILPDPSKPSKRSFIEDLLFNKVTLADAGFIKQYGDCLGDIAARDLICAQKFNGLTVLPPLLTDEMIAQYTSALLAGTITSGWTFGAGAALQIPFAMQMAYRFNGIGVTQCVLYENQKLIANQFNSAIGKIQDSLSSTASALGKLQDVVNQNAQALNTLVKQLSSNFGAISSVLNDILSRLDKVEAEVQIDRLITGRLQSLQTYVTQQLIRAAEIRASANLAATKMSECVLGQSKRVDFCGKGYHLMSFPQSAPHGVVFLHVTYVPAQEKNFTTAPAICHDGKAHFPREGVFVSNGTHWFVTQRNFYEPQIITTDNTFVCGNCDVVIGIVNNTVYDPLQPELDSFKEELDKYFKNHTSPDVDLGDISGINASVVNIQKEIDRLNEVAKNLNESLIDLQELGKYEQYIKGGGSGGGQIYEGKLTAEGLRFGIVASRFNHALVDRLVEGAIDAIVRHGGREEDITLVRVPGSWEIPVAAGELARKEDIDAVIAIGVLIRGATPHFDYIASEVSKGLADLSLELRKPITFGVITADTLEQAIERAGTKHGNKGWEAALSAIEMANLFKSLR

SEQ ID NO: 13624 - protein, 1371 aa, Artificial Sequence
  SARS-CoV-2/China/WF0004/2020__EPI_ISL_413694 spike protein (1-1211)(N914C_S1123C) LumSynth construct
MFVFLVLLPLVSSQCVNLTTRTQLPPAYTNSFTRGVYYPDKVFRSSVLHSTQDLFLPFFSNVTWFHAIHVSGTNGTKRFDNPVLPFNDGVYFASTEKSNIIRGWIFGTTLDSKTQSLLIVNNATNVVIKVCEFQFCNDPFLGVYYHKNNKSWTESEFRVYSSANNCTFEYVSQPFLMDLEGKQGNFKNLREFVFKNIDGYFKIYSKHTPINLVRDLPQGFSALEPLVDLPIGINITRFQTLLALHRSYLTPGDSSSGWTAGAAAYYVGYLQPRTFLLKYNENGTITDAVDCALDPLSETKCTLKSFTVEKGIYQTSNFRVQPTESIVRFPNITNLCPFGEVFNATRFASVYAWNRKRISNCVADYSVLYNSASFSTFKCYGVSPTKLNDLCFTNVYADSFVIRGDEVRQIAPGQTGKIADYNYKLPDDFTGCVIAWNSNNLDSKVGGNYNYLYRLFRKSNLKPFERDISTEIYQAGSTPCNGVEGFNCYFPLQSYGFQPTNGVGYQPYRVVVLSFELLHAPATVCGPKKSTNLVKNKCVNFNFNGLTGTGVLTESNKKFLPFQQFGRDIADTTDAVRDPQTLEILDITPCSFGGVSVITPGTNTSNQVAVLYQDVNCTEVPVAIHADQLTPTWRVYSTGSNVFQTRAGCLIGAEHVNNSYECDIPIGAGICASYQTQTNSPRRARSVASQSIIAYTMSLGAENSVAYSNNSIAIPTNFTISVTTEILPVSMTKTSVDCTMYICGDSTECSNLLLQYGSFCTQLNRALTGIAVEQDKNTQEVFAQVKQIYKTPPIKDFGGFNFSQILPDPSKPSKRSFIEDLLFNKVTLADAGFIKQYGDCLGDIAARDLICAQKFNGLTVLPPLLTDEMIAQYTSALLAGTITSGWTFGAGAALQIPFAMQMAYRFNGIGVTQCVLYENQKLIANQFNSAIGKIQDSLSSTASALGKLQDVVNQNAQALNTLVKQLSSNFGAISSVLNDILSRLDKVEAEVQIDRLITGRLQSLQTYVTQQLIRAAEIRASANLAATKMSECVLGQSKRFDFCGKGYHLMSFPQSAPHGVVFLHVTYVPAQEKNFTTAPAICHDGKAHFPREGVFVSNGTHWFVTQRNFYEPQIITTDNTFVCGNCDVVIGIVNNTVYDPLQPELDSFKEELDKYFKNHTSPDVDLGDISGINASVVNIQKEIDRLNEVAKNLNESLIDLQELGKYEQYIKGGGSGGGQIYEGKLTAEGLRFGIVASRFNHALVDRLVEGAIDAIVRHGGREEDITLVRVPGSWEIPVAAGELARKEDIDAVIAIGVLIRGATPHFDYIASEVSKGLADLSLELRKPITFGVITADTLEQAIERAGTKHGNKGWEAALSAIEMANLFKSLR

SEQ ID NO: 13625 - protein, 1371 aa, Artificial Sequence
  SARS-CoV-2/China/WF0028/2020__EPI_ISL_413791 spike protein (1-1211)(N914C_S1123C) LumSynth construct
MFVFLVLLPLVSSQCVNLTTRTQLPPAYTNSFTRGVYYPDKVFRSSVLHSTQDLFLPFFSNVTWFHAIHVSGTNGTKRFDNPVLPFNDGVYFASTEKSNIIRGWIFGTTLDSKTQSLLIVNNATNVVIKVCEFQFCNDPFLGVYYHKNNKSWMESEFRVYSSANNCTFEYVSQPFLMDLEGKQGNFKNLREFVFKNIDGYFKIYSKHTPINLVRDLPQGFSALEPLVDLPIGINITRFQTLLALHRSYLTPGDSSSGWTAGAAAYYVGYLQPRTFLLKYNENGTITDAVDCALDPLSETKCTLKSFTVEKGIYQTSNFRVQPTESIVRFPNITNLCPFGEVFNATRFASVYAWNRKRISNCVADYSVLYNSASFSTFKCYGVSPTKLNDLCFTNVYADSFVIRGDEVRQIAPGQTGKIADYNYKLPDDFTGCVIAWNSNNLDSKVGGNYNYLYRLFRKSNLKPFERDISTEIYQAGSTPCNGVEGFNCYFPLQSYGFQPTNGVGYQPYRVVVLSFELLHAPATVCGPKKSTNLVKNKCVNFNFNGLTGTGVLTESNKKFLPFQQFGRDIADTTDAVRDPQTLEILDITPCSFGGVSVITPGTNTSNQVAVLYQDVNCTEVPVAIHADQLTPTWRVYSTGSNVFQTRAGCLIGAEHVNNSYECDIPIGAGICASYQTQTNSPRRARSVASQSIIAYTMSLGAENSVAYSNNSIAIPTNFTISVTTEILPVSMTKTSVDCTMYICGDSTECSNLLLQYGSFCTQLNRALTGIAVEQDKNTQEVFAQVKQIYKTPPIKDFGGFNFSQILPDPSKPSKRSFIEDLLFNKVTLADAGFIKQYGDCLGDIAARDLICAQKFNGLTVLPPLLTDEMIAQYTSALLAGTITSGWTFGAGAALQIPFAMQMAYRFNGIGVTQCVLYENQKLIANQFNSAIGKIQDSLSSTASALGKLQDVVNQNAQALNTLVKQLSSNFGAISSVLNDILSRLDKVEAEVQIDRLITGRLQSLQTYVTQQLIRAAEIRASANLAATKMSECVLGQSKRVDFCGKGYHLMSFPQSAPHGVVFLHVTYVPAQEKNFTTAPAICHDGKAHFPREGVFVSNGTHWFVTQRNFYEPQIITTDNTFVCGNCDVVIGIVNNTVYDPLQPELESFKEELDKYFKNHTSPDVDLGDISGINASVVNIQKEIDRLNEVAKNLNESLIDLQELGKYEQYIKGGGSGGGQIYEGKLTAEGLRFGIVASRFNHALVDRLVEGAIDAIVRHGGREEDITLVRVPGSWEIPVAAGELARKEDIDAVIAIGVLIRGATPHFDYIASEVSKGLADLSLELRKPITFGVITADTLEQAIERAGTKHGNKGWEAALSAIEMANLFKSLR

SEQ ID NO: 13626 - protein, 1371 aa, Artificial Sequence
  SARS-CoV-2/2019-nCoV/USA-CruiseA-18/2020__MT159716.1 spike protein (1-1211)(N914C_S1123C) LumSynth construct
MFVFLVLLPLVSSQCVNLTTRTQLPPAYTNSFTRGVYYPDKVFRSSVLHSTQDLFLPFFSNVTWFHAIHVSGTNGTKRFDNPVLPFNDGVYFASTEKSNIIRGWIFGTTLDSKTQSLLIVNNATNVVIKVCEFQFCNDPFLGVYYHKNNKSWMESELRVYSSANNCTFEYVSQPFLMDLEGKQGNFKNLREFVFKNIDGYFKIYSKHTPINLVRDLPQGFSALEPLVDLPIGINITRFQTLLALHRSYLTPGDSSSGWTAGAAAYYVGYLQPRTFLLKYNENGTITDAVDCALDPLSETKCTLKSFTVEKGIYQTSNFRVQPTESIVRFPNITNLCPFGEVFNATRFASVYAWNRKRISNCVADYSVLYNSASFSTFKCYGVSPTKLNDLCFTNVYADSFVIRGDEVRQIAPGQTGKIADYNYKLPDDFTGCVIAWNSNNLDSKVGGNYNYLYRLFRKSNLKPFERDISTEIYQAGSTPCNGVEGFNCYFPLQSYGFQPTNGVGYQPYRVVVLSFELLHAPATVCGPKKSTNLVKNKCVNFNFNGLTGTGVLTESNKKFLPFQQFGRDIADTTDAVRDPQTLEILDITPCSFGGVSVITPGTNTSNQVAVLYQDVNCTEVPVAIHADQLTPTWRVYSTGSNVFQTRAGCLIGAEHVNNSYECDIPIGAGICASYQTQTNSPRRARSVASQSIIAYTMSLGAENSVAYSNNSIAIPTNFTISVTTEILPVSMTKTSVDCTMYICGDSTECSNLLLQYGSFCTQLNRALTGIAVEQDKNTQEVFAQVKQIYKTPPIKDFGGFNFSQILPDPSKPSKRSFIEDLLFNKVTLADAGFIKQYGDCLGDIAARDLICAQKFNGLTVLPPLLTDEMIAQYTSALLAGTITSGWTFGAGAALQIPFAMQMAYRFNGIGVTQCVLYENQKLIANQFNSAIGKIQDSLSSTASALGKLQDVVNQNAQALNTLVKQLSSNFGAISSVLNDILSRLDKVEAEVQIDRLITGRLQSLQTYVTQQLIRAAEIRASANLAATKMSECVLGQSKRVDFCGKGYHLMSFPQSAPHGVVFLHVTYVPAQEKNFTTAPAICHDGKAHFPREGVFVSNGTHWFVTQRNFYEPQIITTDNTFVCGNCDVVIGIVNNTVYDPLQPELDSFKEELDKYFKNHTSPDVDLGDISGINASVVNIQKEIDRLNEVAKNLNESLIDLQELGKYEQYIKGGGSGGGQIYEGKLTAEGLRFGIVASRFNHALVDRLVEGAIDAIVRHGGREEDITLVRVPGSWEIPVAAGELARKEDIDAVIAIGVLIRGATPHFDYIASEVSKGLADLSLELRKPITFGVITADTLEQAIERAGTKHGNKGWEAALSAIEMANLFKSLR

SEQ ID NO: 13627 - protein, 1371 aa, Artificial Sequence
  SARS-CoV-2/SARS-CoV-2/Yunnan-01/human/2020/CHN__MT049951.1 spike protein (1-1211)(N914C_S1123C) LumSynth construct
MFVFLVLLPLVSSQCVNLTTRTQLPPANTNSFTRGVYYPDKVFRSSVLHSTQDLFLPFFSNVTWFHAIHVSGTNGTKRFDNPVLPFNDGVYFASTEKSNIIRGWIFGTTLDSKTQSLLIVNNATNVVIKVCEFQFCNDPFLGVYYHKNNKSWMESEFRVYSSANNCTFEYVSQPFLMDLEGKQGNFKNLREFVFKNIDGYFKIYSKHTPINLVRDLPQGFSALEPLVDLPIGINITRFQTLLALHRSYLTPGDSSSGWTAGAAAYYVGYLQPRTFLLKYNENGTITDAVDCALDPLSETKCTLKSFTVEKGIYQTSNFRVQPTESIVRFPNITNLCPFGEVFNATRFASVYAWNRKRISNCVADYSVLYNSASFSTFKCYGVSPTKLNDLCFTNVYADSFVIRGDEVRQIAPGQTGKIADYNYKLPDDFTGCVIAWNSNNLDSKVGGNYNYLYRLFRKSNLKPFERDISTEIYQAGSTPCNGVEGFNCYFPLQSYGFQPTNGVGYQPYRVVVLSFELLHAPATVCGPKKSTNLVKNKCVNFNFNGLTGTGVLTESNKKFLPFQQFGRDIADTTDAVRDPQTLEILDITPCSFGGVSVITPGTNTSNQVAVLYQDVNCTEVPVAIHADQLTPTWRVYSTGSNVFQTRAGCLIGAEHVNNSYECDIPIGAGICASYQTQTNSPRRARSVASQSIIAYTMSLGAENSVAYSNNSIAIPTNFTISVTTEILPVSMTKTSVDCTMYICGDSTECSNLLLQYGSFCTQLNRALTGIAVEQDKNTQEVFAQVKQIYKTPPIKDFGGFNFSQILPDPSKPSKRSFIEDLLFNKVTLADAGFIKQYGDCLGDIAARDLICAQKFNGLTVLPPLLTDEMIAQYTSALLAGTITSGWTFGAGAALQIPFAMQMAYRFNGIGVTQCVLYENQKLIANQFNSAIGKIQDSLSSTASALGKLQDVVNQNAQALNTLVKQLSSNFGAISSVLNDILSRLDKVEAEVQIDRLITGRLQSLQTYVTQQLIRAAEIRASANLAATKMSECVLGQSKRVDFCGKGYHLMSFPQSAPHGVVFLHVTYVPAQEKNFTTAPAICHDGKAHFPREGVFVSNGTHWFVTQRNFYEPQIITTDNTFVCGNCDVVIGIVNNTVYDPLQPELDSFKEELDKYFKNHTSPDVDLGDISGINASVVNIQKEIDRLNEVAKNLNESLIDLQELGKYEQYIKGGGSGGGQIYEGKLTAEGLRFGIVASRFNHALVDRLVEGAIDAIVRHGGREEDITLVRVPGSWEIPVAAGELARKEDIDAVIAIGVLIRGATPHFDYIASEVSKGLADLSLELRKPITFGVITADTLEQAIERAGTKHGNKGWEAALSAIEMANLFKSLR

SEQ ID NO: 13628 - protein, 1371 aa, Artificial Sequence
  SARS-CoV-2/USA/WA-UW292/2020__EPI_ISL_418077 spike protein (1-1211)(N914C_S1123C) LumSynth construct
MFVFLVLLPLVSSQCVNLTTRTQLPPAYTNSFTRGVYYPDKVFRSSVLHSTQDLFLPFFSNVTWFHAIHVSGTNGTKRFDNPVLPFNDGVYFASTEKSNIIRGWIFGTTLDSKTQSLLIVNNATNVVIKVCEFQFCNDPFLGVYYHKNNKSWMESEFRVYSSANNCTFEYVSQPFLMDLEGKQGNFKNLREFVFKNIDGYFKIYSKHTPINLVRDLPQGFSALEPLVDLPIGINITRFQTLLALHRSYLTPGDSSSGWTAGAAAYYVGYLQPRTFLLKYNENGTITDAVDCALDPLSETKCTLKSFTVEKGIYQTSNFRVQPTESIVRFPNITNLCPFGEVFNATRFASVYAWNRKRISNCVADYSVLYNSASFSTFKCYGVSPTKLNDLCFTNVYADSFVIRGDEVRQIAPGQTGKIADYNYKLPDDFTGCVIAWNSNNLDSKVGGNYNYLYRLFRKSNLKPFERDISTEIYQASSTPCNGVEGFNCYFPLQSYGFQPTNGVGYQPYRVVVLSFELLHAPATVCGPKKSTNLVKNKCVNFNFNGLTGTGVLTESNKKFLPFQQFGRDIADTTDAVRDPQTLEILDITPCSFGGVSVITPGTNTSNQVAVLYQDVNCTEVPVAIHADQLTPTWRVYSTGSNVFQTRAGCLIGAEHVNNSYECDIPIGAGICASYQTQTNSPRRARSVASQSIIAYTMSLGAENSVAYSNNSIAIPTNFTISVTTEILPVSMTKTSVDCTMYICGDSTECSNLLLQYGSFCTQLNRALTGIAVEQDKNTQEVFAQVKQIYKTPPIKDFGGFNFSQILPDPSKPSKRSFIEDLLFNKVTLADAGFIKQYGDCLGDIAARDLICAQKFNGLTVLPPLLTDEMIAQYTSALLAGTITSGWTFGAGAALQIPFAMQMAYRFNGIGVTQCVLYENQKLIANQFNSAIGKIQDSLSSTASALGKLQDVVNQNAQALNTLVKQLSSNFGAISSVLNDILSRLDKVEAEVQIDRLITGRLQSLQTYVTQQLIRAAEIRASANLAATKMSECVLGQSKRVDFCGKGYHLMSFPQSAPHGVVFLHVTYVPAQEKNFTTAPAICHDGKAHFPREGVFVSNGTHWFVTQRNFYEPQIITTDNTFVCGNCDVVIGIVNNTVYDPLQPELDSFKEELDKYFKNHTSPDVDLGDISGINASVVNIQKEIDRLNEVAKNLNESLIDLQELGKYEQYIKGGGSGGGQIYEGKLTAEGLRFGIVASRFNHALVDRLVEGAIDAIVRHGGREEDITLVRVPGSWEIPVAAGELARKEDIDAVIAIGVLIRGATPHFDYIASEVSKGLADLSLELRKPITFGVITADTLEQAIERAGTKHGNKGWEAALSAIEMANLFKSLR

SEQ ID NO: 13629 - protein, 1371 aa, Artificial Sequence
  SARS-CoV-2/Iceland/192/2020__EPI_ISL_417819 spike protein (1-1211)(N914C_S1123C) LumSynth construct
MFVFFVLLPLVSSQCVNLTTRTQLPPAYTNSFTRGVYYPDKVFRSSVLHSTQDLFLPFFSNVTWFHAIHVSGTNGTKRFDNPVLPFNDGVYFASTEKSNIIRGWIFGTTLDSKTQSLLIVNNATNVVIKVCEFQFCNDPFLGVYYHKNNKSWMESEFRVYSSANNCTFEYVSQPFLMDLEGKQGNFKNLREFVFKNIDGYFKIYSKHTPINLVRDLPQGFSALEPLVDLPIGINITRFQTLLALHRSYLTPGDSSSGWTAGAAAYYVGYLQPRTFLLKYNENGTITDAVDCALDPLSETKCTLKSFTVEKGIYQTSNFRVQPTESIVRFPNITNLCPFGEVFNATRFASVYAWNRKRISNCVADYSVLYNSASFSTFKCYGVSPTKLNDLCFTNVYADSFVIRGDEVRQIAPGQTGKIADYNYKLPDDFTGCVIAWNSNNLDSKVGGNYNYLYRLFRKSNLKPFERDISTEIYQAGSTPCNGVEGFNCYFPLQSYGFQPTNGVGYQPYRVVVLSFELLHAPATVCGPKKSTNLVKNKCVNFNFNGLTGTGVLTESNKKFLPFQQFGRDIADTTDAVRDPQTLEILDITPCSFGGVSVITPGTNTSNQVAVLYQGVNCTEVPVAIHADQLTPTWRVYSTGSNVFQTRAGCLIGAEHVNNSYECDIPIGAGICASYQTQTNSPRRARSVASQSIIAYTMSLGAENSVAYSNNSIAIPTNFTISVTTEILPVSMTKTSVDCTMYICGDSTECSNLLLQYGSFCTQLNRALTGIAVEQDKNTQEVFAQVKQIYKTPPIKDFGGFNFSQILPDPSKPSKRSFIEDLLFNKVTLADAGFIKQYGDCLGDIAARDLICAQKFNGLTVLPPLLTDEMIAQYTSALLAGTITSGWTFGAGAALQIPFAMQMAYRFNGIGVTQCVLYENQKLIANQFNSAIGKIQDSLSSTASALGKLQDVVNQNAQALNTLVKQLSSNFGAISSVLNDILSRLDKVEAEVQIDRLITGRLQSLQTYVTQQLIRAAEIRASANLAATKMSECVLGQSKRVDFCGKGYHLMSFPQSAPHGVVFLHVTYVPAQEKNFTTAPAICHDGKAHFPREGVFVSNGTHWFVTQRNFYEPQIITTDNTFVCGNCDVVIGIVNNTVYDPLQPELDSFKEELDKYFKNHTSPDVDLGDISGINASVVNIQKEIDRLNEVAKNLNESLIDLQELGKYEQYIKGGGSGGGQIYEGKLTAEGLRFGIVASRFNHALVDRLVEGAIDAIVRHGGREEDITLVRVPGSWEIPVAAGELARKEDIDAVIAIGVLIRGATPHFDYIASEVSKGLADLSLELRKPITFGVITADTLEQAIERAGTKHGNKGWEAALSAIEMANLFKSLR

SEQ ID NO: 13630 - protein, 1371 aa, Artificial Sequence
  SARS-CoV-2/Belgium/ULG-6939/2020__EPI_ISL_417020 spike protein (1-1211)(N914C_S1123C) LumSynth construct
MFVFLVLLPLVSSQCVNLTTRTQLPPAYTNSFTRGVYYPDKVFRSSVLHSTQDLFLPFFSNVTWFHAIHVSGTNGTKRFDNPVLPFNDGVYFASTEKSNIIRGWIFGTTLDSKTQSLLIVNNATNVVIKVCEFQFCNDPFLGVYYHKNNKSWMESEFRVYSSANNCTFEYVSQPFLMDLEGKQGNFKNLREFVFKNIDGYFKIYSKHTPINLVRDLPQGFSALEPLVDLPIGINITRFQTLLALHRSYLTPGDSSSGWTAGAAAYYVGYLQPRTFLLKYNENGTITDAVDCALDPLSETKCTLKSFTVEKGIYQTSNFRVQPTESIVRFPNITNLCPFGEVFNATRFASVYAWNRKRISNCVADYSVLYNSASFSTFKCYGVSPTKLNDLCFTNVYADSFVIRGDEVRQIAPGQTGKIADYNYKLPDDFTGCVIAWNSNNLDSKVGGNYNYLYRLFRKSNLKPFERDISTEIYQAGSTPCNGVEGFNCYFPLQSYGFQPTNGVGYQPYRVVVLSFELLHAPATVCGPKKSTNLVKNKCVNFNFNGLTGTGVLTESNKKFLPFQQFGRDIADTTDAVRDPQTLEILDITPCSFGGVSVITPGTNTSNQVAVLYQGVNCTEVPVAIHADQLTPTWRVYSTGSNVFQTRAGCLIGAEHVNNSYECDIPIGAGICASYQTQTNSPRRARSVASQSIIAYTMSLGAENSVVYSNNSIAIPTNFTISVTTEILPVSMTKTSVDCTMYICGDSTECSNLLLQYGSFCTQLNRALTGIAVEQDKNTQEVFAQVKQIYKTPPIKDFGGFNFSQILPDPSKPSKRSFIEDLLFNKVTLADAGFIKQYGDCLGDIAARDLICAQKFNGLTVLPPLLTDEMIAQYTSALLAGTITSGWTFGAGAALQIPFAMQMAYRFNGIGVTQCVLYENQKLIANQFNSAIGKIQDSLSSTASALGKLQDVVNQNAQALNTLVKQLSSNFGAISSVLNDILSRLDKVEAEVQIDRLITGRLQSLQTYVTQQLIRAAEIRASANLAATKMSECVLGQSKRVDFCGKGYHLMSFPQSAPHGVVFLHVTYVPAQEKNFTTAPAICHDGKAHFPREGVFVSNGTHWFVTQRNFYEPQIITTDNTFVCGNCDVVIGIVNNTVYDPLQPELDSFKEELDKYFKNHTSPDVDLGDISGINASVVNIQKEIDRLNEVAKNLNESLIDLQELGKYEQYIKGGGSGGGQIYEGKLTAEGLRFGIVASRFNHALVDRLVEGAIDAIVRHGGREEDITLVRVPGSWEIPVAAGELARKEDIDAVIAIGVLIRGATPHFDYIASEVSKGLADLSLELRKPITFGVITADTLEQAIERAGTKHGNKGWEAALSAIEMANLFKSLR

SEQ ID NO: 13631 - protein, 1371 aa, Artificial Sequence
  SARS-CoV-2/France/HF2496/2020__EPI_ISL_418231 spike protein (1-1211)(N914C_S1123C) LumSynth construct
MFVFLVLLPLVSSQCVNLTTRTQLPPAYTNSFTRGVYYPDKVFRSSVLHSTQDLFLPFFSNVTWFHAIHVSGTNGTKRFDNPVLPFNDGVYFASTEKSNIIRGWIFGTTLDSKTQSLLIVNNATNVVIKVCEFQFCNDPFLGVYYHKNNKSWMESEFRVYSSANNCTFEYVSQPFLMDLEGKQGNFKNLREFVFKNIDGYFKIYSKHTPINLVRDLPQGFSALEPLVDLPIGINITRFQTLLALHRSYLTPGDSSSGWTAGAAAYYVGYLQPRTFLLKYNENGTITDAVDCALDPLSETKCTLKSFTVEKGIYQTSNFRVQPTESIVRFPNITNLCPFGEVFNATRFASVYAWNRKRISNCVADYSVLYNSASFSTFKCYGVSPTKLNDLCFTNVYADSFVIRGDEVRQIAPGQTGKIADYNYKLPDDFTGCVIAWNSNNLDSKVGGNYNYLYRLFRKSNLKPFERDISTEIYQAGSTPCNGVEGFNCYFPLQSYGFQPTNGVGYQPYRVVVLSFELLHAPATVCGPKKSTNLVKNKCVNFNFNGLTGTGVLTESNKKFLPFQQFGRDIADTTDAVRDPQTLEILDITPCSFGGVSVITPGTNTSNQVAVLYQGVNCTEVPVAIHADQLTPTWRVYSTGSNVFQTRAGCLIGAEHVNNSYECDIPIGAGICASYQTQTNSPRRARSVASQSIIAYTMSLGAENSVAYSNNSIAIPTNFTISVTTEILPVSMTKTSVDCTMYICGDSTECSNLLLQYGSFCTQLNRALTGIAVEQDKNTQEVFAQVKQIYKTPPIKDFGGFNFSQILPDPSKPSKRSFIEDLLFNKVTLADAGFIKQYGDCLGDIVARDLICAQKFNGLTVLPPLLTDEMIAQYTSALLAGTITSGWTFGAGAALQIPFAMQMAYRFNGIGVTQCVLYENQKLIANQFNSAIGKIQDSLSSTASALGKLQDVVNQNAQALNTLVKQLSSNFGAISSVLNDILSRLDKVEAEVQIDRLITGRLQSLQTYVTQQLIRAAEIRASANLAATKMSECVLGQSKRVDFCGKGYHLMSFPQSAPHGVVFLHVTYVPAQEKNFTTAPAICHDGKAHFPREGVFVSNGTHWFVTQRNFYEPQIITTDNTFVCGNCDVVIGIVNNTVYDPLQPELDSFKEELDKYFKNHTSPDVDLGDISGINASVVNIQKEIDRLNEVAKNLNESLIDLQELGKYEQYIKGGGSGGGQIYEGKLTAEGLRFGIVASRFNHALVDRLVEGAIDAIVRHGGREEDITLVRVPGSWEIPVAAGELARKEDIDAVIAIGVLIRGATPHFDYIASEVSKGLADLSLELRKPITFGVITADTLEQAIERAGTKHGNKGWEAALSAIEMANLFKSLR

SEQ ID NO: 13632 - protein, 1371 aa, Artificial Sequence
  SARS-CoV-2/USA/WA-UW291/2020__EPI_ISL_418076 spike protein (1-1211)(N914C_S1123C) LumSynth construct
MFVFLVLLPLVSSQCVNLTTRTQLPPAYTNSFTRGVYYPDKVFRSSVLHSTQDLFLPFFSNVTWFHAIHVSGTNGTKRFDNPVLPFNDGVYFASTEKSNIIRGWIFGTTLDSKTQSLLIVNNATNVVIKVCEFQFCNDPFLGVYYHKNNKSWMESEFRVYSSANNCTFEYVSQPFLMDLEGKQGNFKNLREFVFKNIDGYFKIYSKHTPINLVRDLPQGFSALEPLVDLPIGINITRFQTLLALHRSYLTPGDSSSGWTAGAAAYYVGYLQPRTFLLKYNENGTITDAVDCALDPLSETKCTLKSFTVEKGIYQTSNFRVQPTESIVRFPNITNLCPFGEVFNATRFASVYAWNRKRISNCVADYSVLYNSASFSTFKCYGVSPTKLNDLCFTNVYADSFVIRGDEVRQIAPGQTGKIADYNYKLPDDFTGCVIAWNSNNLDSKVGGNYNYLYRLFRKSNLKPFERDISTEIYQAGSTPCNGVEGFNCYFPLQSYGFQPTNGVGYQPYRVVVLSFELLHAPATVCGPKKSTNLVKNKCVNFNFNGLTGTGVLTESNKKFLPFQQFGRDIADTTDAVRDPQTLEILDITPCSFGGVSVITPGTNTSNQVAVLYQGVNCTEVPVAIHADQLTPTWRVYSTGSNVFQTRAGCLIGAEHVNNSYECDIPIGAGICASYQTQTNSPRRARSVASQSIIAYTMSLGAENSVAYSNNSIAIPTNFTISVTTEILPVSMTKTSVDCTMYICGDSTECSNLLLQYGSFCTQLNRALTGIAVEQDKNTQEVFAQVKQIYKTPPIKDFGGFNFSQILPDPSKPSKRSFIEDLLFNKVTLADAGFIKQYGDCLGDIAARDLICAQKFNGLTVLPPLLTDEMIAQYTSALLAGTITSGWTFGAGAALQIPFAMQMAYRFNGIGVTQCVLYENQKLIANQFNSAIGKIQYSLSSTASALGKLQDVVNQNAQALNTLVKQLSSNFGAISSVLNDILSRLDKVEAEVQIDRLITGRLQSLQTYVTQQLIRAAEIRASANLAATKMSECVLGQSKRVDFCGKGYHLMSFPQSAPHGVVFLHVTYVPAQEKNFTTAPAICHDGKAHFPREGVFVSNGTHWFVTQRNFYEPQIITTDNTFVCGNCDVVIGIVNNTVYDPLQPELDSFKEELDKYFKNHTSPDVDLGDISGINASVVNIQKEIDRLNEVAKNLNESLIDLQELGKYEQYIKGGGSGGGQIYEGKLTAEGLRFGIVASRFNHALVDRLVEGAIDAIVRHGGREEDITLVRVPGSWEIPVAAGELARKEDIDAVIAIGVLIRGATPHFDYIASEVSKGLADLSLELRKPITFGVITADTLEQAIERAGTKHGNKGWEAALSAIEMANLFKSLR

SEQ ID NO: 13633 - protein, 1371 aa, Artificial Sequence; identical to SEQ ID NO: 13596
  SARS-CoV-2/Portugal/PT0034/2020__EPI_ISL_418019 spike protein (1-1211)(N914C_S1123C) LumSynth construct

SEQ ID NO: 13634 - protein, 1371 aa, Artificial Sequence
  SARS-CoV-2/Iceland/202/2020__EPI_ISL_417750 spike protein (1-1211)(N914C_S1123C) LumSynth construct
MFVFLVLLPLVSSQCVNLTTRTQLPPAYTNSFTRGVYYPDKVFRSSVLHSTQDLFLPFFSNVTWFHAIHVSGTNGTKRFDNPVLPFNDGVYFASTEKSNIIRGWIFGTTLDSKTQSLLIVNNATNVVIKVCEFQFCNDPFLGVYYHKNNKSWMESEFRVYSSANNCTFEYVSQPFLMDLEGKQGNFKNLREFVFKNIDGYFKIYSKHTPINLVRDLPQGFSALEPLVDLPIGINITRFQTLLALHRSYLTPGDSSSGWTAGAAAYYVGYLQPRTFLLKYNENGTITDAVDCALDPLSETKCTLKSFTVEKGIYQTSNFRVQPTESIVRFPNITNLCPFGEVFNATRFASVYAWNRKRISNCVADYSVLYNSASFSTFKCYGVSPTKLNDLCFTNVYADSFVIRGDEVRQIAPGQTGKIADYNYKLPDDFTGCVIAWNSNNLDSKVGGNYNYLYRLFRKSNLKPFERDISTEIYQAGSTPCNGVEGFNCYFPLQSYGFQPTNGVGYQPYRVVVLSFELLHAPATVCGPKKSTNLVKNKCVNFNFNGLTGTGVLTESNKKFLPFQQFGRDIADTTDAVRDPQTLEILDITPCSFGGVSVITPGTNTSNQVAVLYQDVNCTEVPVAIHADQLTPTWRVYSTGSNVFQTRAGCLIGAEHVNNSYECDIPIGAGICASYQTQTNSPRRARSVASQSIIAYTMSLGAENSVAYSNNSIAIPTNFTISVTTEILPVSMTKTSVDCTMYICGDSTECSNLLLQYGSFCTQLNRALTGIAVEQDKNTQEVFAQVKQIYKTPPIKDFGGFNFSQILPDPSKPSKRSFIEDLLFNKVTLADAGFIKQYGDCLGDIAARDLICAQKFNGLTVLPPLLTDEMIAQYTSALLAGTITSGWTFGAGAALQIPFAMQMAYRFNGIGVTQCVLYENQKLIANQFNSAIGKIQDSLSSTASALGKLQDVVNQNAQALNTLVKQLSSNFGAISSVLNDILSRLDKVEAEVQIDRLITGRLQSLQTYVTQQLIRAAEIRASANLAATKMSECVLGQSKRVDFCGKGYHLMSFPQSAPHGVVFLHVTYVPAQEKNFTTAPAICHDGKAHFPREGVFVSNGTHWFVTQRNFYEPQIITTDNTFVCGNCDVVIGIVNNTVYDPLQPELDSFKEELDKYFKNHTSPDVDLGDIPGINASVVNIQKEIDRLNEVAKNLNESLIDLQELGKYEQYIKGGGSGGGQIYEGKLTAEGLRFGIVASRFNHALVDRLVEGAIDAIVRHGGREEDITLVRVPGSWEIPVAAGELARKEDIDAVIAIGVLIRGATPHFDYIASEVSKGLADLSLELRKPITFGVITADTLEQAIERAGTKHGNKGWEAALSAIEMANLFKSLR

SEQ ID NO: 13635 - protein, 1371 aa, Artificial Sequence
  SARS-CoV-2/USA/WA-UW261/2020__EPI_ISL_418046 spike protein (1-1211)(N914C_S1123C) LumSynth construct
MFVFLVLLPLVSSQCVNLTTRTQLPPAYTNSFTRGVYYPDKVFRSSVLHSTQDLFLPFFSNVTWFHAIHVSGTNGTKRFDNPVLPFNDGVYFASTEKSNIIRGWIFGTTLDSKTQSLLIVNNATNVVIKVCEFQFCNDPFLGVYYHKNNKSWMESEFRVYSSANNCTFEYVSQPFLMDLEGKQGNFKNLREFVFKNIDGYFKIYSKHTPINLVRDLPQGFSALEPLVDLPIGINITRFQTLLALHRSYLTPGDSSSGWTAGAAAYYVGYLQPRTFLLKYNENGTITDAVDCALDPLSETKCTLKSFTVEKGIYQTSNFRVQPTESIVRFPNITNLCPFGEVFNATRFTSVYAWNRKRISNCVADYSVLYNSASFSTFKCYGVSPTKLNDLCFTNVYADSFVIRGDEVRQIAPGQTGKIADYNYKLPDDFTGCVIAWNSNNLDSKVGGNYNYLYRLFRKSNLKPFERDISTEIYQAGSTPCNGVEGFNCYFPLQSYGFQPTNGVGYQPYRVVVLSFELLHAPATVCGPKKSTNLVKNKCVNFNFNGLTGTGVLTESNKKFLPFQQFGRDIADTTDAVRDPQTLEILDITPCSFGGVSVITPGTNTSNQVAVLYQDVNCTEVPVAIHADQLTPTWRVYSTGSNVFQTRAGCLIGAEHVNNSYECDIPIGAGICASYQTQTNSPRRARSVASQSIIAYTMSLGAENSVAYSNNSIAIPTNFTISVTTEILPVSMTKTSVDCTMYICGDSTECSNLLLQYGSFCTQLNRALTGIAVEQDKNTQEVFAQVKQIYKTPPIKDFGGFNFSQILPDPSKPSKRSFIEDLLFNKVTLADAGFIKQYGDCLGDIAARDLICAQKFNGLTVLPPLLTDEMIAQYTSALLAGTITSGWTFGAGAALQIPFAMQMAYRFNGIGVTQCVLYENQKLIANQFNSAIGKIQDSLSSTASALGKLQDVVNQNAQALNTLVKQLSSNFGAISSVLNDILSRLDKVEAEVQIDRLITGRLQSLQTYVTQQLIRAAEIRASANLAATKMSECVLGQSKRVDFCGKGYHLMSFPQSAPHGVVFLHVTYVPAQEKNFTTAPAICHDGKAHFPREGVFVSNGTHWFVTQRNFYEPQIITTDNTFVCGNCDVVIGIVNNTVYDPLQPELDSFKEELDKYFKNHTSPDVDLGDISGINASVVNIQKEIDRLNEVAKNLNESLIDLQELGKYEQYIKGGGSGGGQIYEGKLTAEGLRFGIVASRFNHALVDRLVEGAIDAIVRHGGREEDITLVRVPGSWEIPVAAGELARKEDIDAVIAIGVLIRGATPHFDYIASEVSKGLADLSLELRKPITFGVITADTLEQAIERAGTKHGNKGWEAALSAIEMANLFKSLR

SEQ ID NO: 13636 - protein, 1371 aa, Artificial Sequence
  SARS-CoV-2/Portugal/PT0035/2020__EPI_ISL_418020 spike protein (1-1211)(N914C_S1123C) LumSynth construct
MFVFLVLLPLVSSQCVNLTTRTQLPPAYTNSFTRGVYYPDKVFRSSVLHSTQDLFLPFFSNVTWFHAIHVSGTNGTKRFDNPVLPFNDGVYFASTEKSNIIRGWIFGTTLDSKTQSLLIVNNATNVVIKVCEFQFCNDPFLGVYYHKNNKSWMESEFRVYSSANNCTFEYVSQPFLMDLEGKQGNFKNLREFVFKNIDGYFKIYSKHTPINLVRDLPQGFSALEPLVDLPIGINITRFQTLLALHRSYLTPGDSSSGWTAGAAAYYVGYLQPRTFLLKYNENGTITDAVDCALDPLSETKCTLKSFTVEKGIYQTSNFRVQPTESIVRFPNITNLCPFGEVFNATRFASVYAWNRKRISNCVADYSVLYNSASFSTFKCYGVSPTKLNDLCFTNVYADSFVIRGDEVRQIAPGQTGKIADYNYKLPDDFTGCVIAWNSNNLDSKVGGNYNYLYRLFRKSNLKPFERDISTEIYQAGSTPCNGVEGFNCYFPLQSYGFQPTNGVGYQPYRVVVLSFELLHAPATVCGPKKSTNLVKNKCVNFNFNGLTGTGVLTESNKKFLPFQQFGRDIADTTDAVRDPQTLEILDITPCSFGGVSVITPGTNTSNQVAVLYQDVNCTEVPVAIHADQLTPTWRVYSTGSNVFQTRAGCLIGAEHVNNSYECDIPIGAGICASYQTQTNSPRRARSVASQSIIAYTMSLGAENSVAYSNNSIAIPTNFTISVTTEILPVSMTKTSVDCTMYICGDSTECSNLLLQYGSFCTQLNRALTGIAVEQDKNTQEVFAQVKQIYKTPPIKDFGGFNFSQILPDPSKPSKRSFIEDLLFNKVTLADAGFIKQYGDCLGDISARDLICAQKFNGLTVLPPLLTDEMIAQYTSALLAGTITSGWTFGAGAALQIPFAMQMAYRFNGIGVTQCVLYENQKLIANQFNSAIGKIQDSLSSTASALGKLQDVVNQNAQALNTLVKQLSSNFGAISSVLNDILSRLDKVEAEVQIDRLITGRLQSLQTYVTQQLIRAAEIRASANLAATKMSECVLGQSKRVDFCGKGYHLMSFPQSAPHGVVFLHVTYVPAQEKNFTTAPAICHDGKAHFPREGVFVSNGTHWFVTQRNFYEPQIITTDNTFVCGNCDVVIGIVNNTVYDPLQPELDSFKEELDKYFKNHTSPDVDLGDISGINASVVNIQKEIDRLNEVAKNLNESLIDLQELGKYEQYIKGGGSGGGQIYEGKLTAEGLRFGIVASRFNHALVDRLVEGAIDAIVRHGGREEDITLVRVPGSWEIPVAAGELARKEDIDAVIAIGVLIRGATPHFDYIASEVSKGLADLSLELRKPITFGVITADTLEQAIERAGTKHGNKGWEAALSAIEMANLFKSLR

SEQ ID NO: 13637 - protein, 1371 aa, Artificial Sequence
  SARS-CoV-2/USA/NY-NYUMC7/2020__EPI_ISL_418192 spike protein (1-1211)(N914C_S1123C) LumSynth construct
MFVFLVLLPLVSSQCVNLTTRTQLPPAYTNSFTRGVYYPDKVFRSSVLHSTQDLFLPFFSNVTWFHAIHVSGTNGTKRFDNPVLPFNDGVYFASTEKSNIIRGWIFGTTLDSKTQSLLIVNNATNVVIKVCEFQFCNDPFLGVYHHKNNKSWMESEFRVYSSANNCTFEYVSQPFLMDLEGKQGNFKNLREFVFKNIDGYFKIYSKHTPINLVRDLPQGFSALEPLVDLPIGINITRFQTLLALHRSYLTPGDSSSGWTAGAAAYYVGYLQPRTFLLKYNENGTITDAVDCALDPLSETKCTLKSFTVEKGIYQTSNFRVQPTESIVRFPNITNLCPFGEVFNATRFASVYAWNRKRISNCVADYSVLYNSASFSTFKCYGVSPTKLNDLCFTNVYADSFVIRGDEVRQIAPGQTGKIADYNYKLPDDFTGCVIAWNSNNLDSKVGGNYNYLYRLFRKSNLKPFERDISTEIYQAGSTPCNGVEGFNCYFPLQSYGFQPTNGVGYQPYRVVVLSFELLHAPATVCGPKKSTNLVKNKCVNFNFNGLTGTGVLTESNKKFLPFQQFGRDIADTTDAVRDPQTLEILDITPCSFGGVSVITPGTNTSNQVAVLYQGVNCTEVPVAIHADQLTPTWRVYSTGSNVFQTRAGCLIGAEHVNNSYECDIPIGAGICASYQTQTNSPRRARSVASQSIIAYTMSLGAENSVAYSNNSIAIPTNFTISVTTEILPVSMTKTSVDCTMYICGDSTECSNLLLQYGSFCTQLNRALTGIAVEQDKNTQEVFAQVKQIYKTPPIKDFGGFNFSQILPDPSKPSKRSFIEDLLFNKVTLADAGFIKQYGDCLGDIAARDLICAQKFNGLTVLPPLLTDEMIAQYTSALLAGTITSGWTFGAGAALQIPFAMQMAYRFNGIGVTQCVLYENQKLIANQFNSAIGKIQDSLSSTASALGKLQDVVNQNAQALNTLVKQLSSNFGAISSVLNDILSRLDKVEAEVQIDRLITGRLQSLQTYVTQQLIRAAEIRASANLAATKMSECVLGQSKRVDFCGKGYHLMSFPQSAPHGVVFLHVTYVPAQEKNFTTAPAICHDGKAHFPREGVFVSNGTHWFVTQRNFYEPQIITTDNTFVCGNCDVVIGIVNNTVYDPLQPELDSFKEELDKYFKNHTSPDVDLGDISGINASVVNIQKEIDRLNEVAKNLNESLIDLQELGKYEQYIKGGGSGGGQIYEGKLTAEGLRFGIVASRFNHALVDRLVEGAIDAIVRHGGREEDITLVRVPGSWEIPVAAGELARKEDIDAVIAIGVLIRGATPHFDYIASEVSKGLADLSLELRKPITFGVITADTLEQAIERAGTKHGNKGWEAALSAIEMANLFKSLR

SEQ ID NO: 13638 - protein, 1371 aa, Artificial Sequence
  SARS-CoV-2/Iceland/189/2020__EPI_ISL_417709 spike protein (1-1211)(N914C_S1123C) LumSynth construct
MFVFLVLLPLVSSQCVNLTTRTQLPPAYTNSFTRGVYYPDKVFRSSVLHSTQDLFLPFFSNVTWFHAIHVSGTNGTKRFDNPVLPFNDGVYFASTEKSNIIRGWIFGTTLDSKTQSLLIVNNATNVVIKVCEFQFCNDPFLGVYYHKNNKSWMESEFRVYSSANNCTFEYVSQPFLMDLEGKQGNFKNLREFVFKNIDGYFKIYSKHTPINLVRDLPQGFSALEPLVDLPIGINITRFQTLLALHRSYLTPGDSSSGWTAGAAAYYVGYLQPRTFLLKYNENGTITDAVDCALDPLSETKCTLKSFTVEKGIYQTSNFRVQPTESIVRFPNITNLCPFGEVFNATRFASVYAWNRKRISNCVADYSVLYNSASFSTFKCYGVSPTKLNDLCFTNVYADSFVIRGDEVRQIAPGQTGKIADYNYKLPDDFTGCVIAWNSNNLDSKVGGNYNYLYRLFRKSNLKPFERDISTEIYQAGSTPCNGVEGFNCYFPLQSYGFQPTNGVGYQPYRVVVLSFELLHAPATVCGPKKSTNLVKNKCVNFNFNGLTGTGVLTESNKKFLPFQQFGRDIADTTDAVRDPQTLEILDITPCSFGGVSVITPGTNTSNQVAVLYQGVNCTEVPVAIHADQLTPTWRVYSTGSNVFQTRAGCLIGAEHVNNSYECDIPIGAGICASYQTQTNSPRRARSVASQSIIAYTMSLGAENSVAYSNNSIAIPTNFTISVTTEILPVSMTKTSVDCTMYICGDSTECSNLLLQYGSFCTQLNRALTGIAVEQDKNTQEVFAQVKQIYKTPPIKDFGGFNFSQILPDPSKPSKRSFIEDLLFNKVTLADAGFTKQYGDCLGDIAARDLICAQKFNGLTVLPPLLTDEMIAQYTSALLAGTITSGWTFGAGAALQIPFAMQMAYRFNGIGVTQCVLYENQKLIANQFNSAIGKIQDSLSSTASALGKLQDVVNQNAQALNTLVKQLSSNFGAISSVLNDILSRLDKVEAEVQIDRLITGRLQSLQTYVTQQLIRAAEIRASANLAATKMSECVLGQSKRVDFCGKGYHLMSFPQSAPHGVVFLHVTYVPAQEKNFTTAPAICHDGKAHFPREGVFVSNGTHWFVTQRNFYEPQIITTDNTFVCGNCDVVIGIVNNTVYDPLQPELDSFKEELDKYFKNHTSPDVDLGDISGINASVVNIQKEIDRLNEVAKNLNESLIDLQELGKYEQYIKGGGSGGGQIYEGKLTAEGLRFGIVASRFNHALVDRLVEGAIDAIVRHGGREEDITLVRVPGSWEIPVAAGELARKEDIDAVIAIGVLIRGATPHFDYIASEVSKGLADLSLELRKPITFGVITADTLEQAIERAGTKHGNKGWEAALSAIEMANLFKSLR

SEQ ID NO: 13639 - protein, 1371 aa, Artificial Sequence
  SARS-CoV-2/Australia/NSW56/2020__EPI_ISL_417408 spike protein (1-1211)(N914C_S1123C) LumSynth construct
MFVFLVLLPLVSSQCVNLTTRTQLPPAYTNSFTRGVYYPDKVFRSSVLHSTQDLFLPFFSNVTWFHAIHVSGTNGTKRFDNPVLPFNDGVYFASTEKSNIIRGWIFGTTLDSKTQSLLIVNNATNVVIKVCEFQFCNDPFLGVYYHKNNKSWMESEFRVYSSANNCTFEYVSQPFLMDLEGKQGNFKNLREFVFKNIDGYFKIYSKHTPINLVRDLPQGFSALEPLVDLPIGINITRFQTLLALHRSYLTPGDSSSGWTAGAAAYYVGYLQPRTFLLKYNENGTITDAVDCALDPLSETKCTLKSFTVEKGIYQTSNFRVQPTESIVRFPNITNLCPFGEVFNATRFASVYAWNRKRISNCVADYSVLYNSASFSTFKCYGVSPTKLNDLCFTNVYADSFVIRGDEVRQIAPGQTGKIADYNYKLPDDFTGCVIAWNSNNLDSKVGGNYNYLYRLFRKSNLKPFERDISTEIYQAGSTPCNGVEGFNCYFPLQSYGFQPTNGVGYQPYRVVVLSFELLHAPATVCGPKKSTNLVKNKCVNFNFNGLTGTGVLTESNKKFLPFQQFGRDIADTTDAVRDPQTLEILDITPCSFGGVSVITPGTNTSNQVAVLYQDVNCTEVPVAIHADQLTPTWRVYSTGSNVFQTRAGCLIGAEHVNNSYECDIPIGAGICASYQTQTNSPRRARSVASQSIIAYTMSLGAENSVAYSNNSIAIPTNFTISVTTEILPVSMTKTSVDCTMYICGDSTECSNLLLQYGSFCTQLNRALTGIAVEQDKNTQEVFAQVKQIYKTPPIKDFGGFNFSQILPDSSKPSKRSFIEDLLFNKVTLADAGFIKQYGDCLGDIAARDLICAQKFNGLTVLPPLLTDEMIAQYTSALLAGTITSGWTFGAGAALQIPFAMQMAYRFNGIGVTQCVLYENQKLIANQFNSAIGKIQDSLSSTASALGKLQDVVNQNAQALNTLVKQLSSNFGAISSVLNDILSRLDKVEAEVQIDRLITGRLQSLQTYVTQQLIRAAEIRASANLAATKMSECVLGQSKRVDFCGKGYHLMSFPQSAPHGVVFLHVTYVPAQEKNFTTAPAICHDGKAHFPREGVFVSNGTHWFVTQRNFYEPQIITTDNTFVCGNCDVVIGIVNNTVYDPLQPELDSFKEELDKYFKNHTSPDVDLGDISGINASVVNIQKEIDRLNEVAKNLNESLIDLQELGKYEQYIKGGGSGGGQIYEGKLTAEGLRFGIVASRFNHALVDRLVEGAIDAIVRHGGREEDITLVRVPGSWEIPVAAGELARKEDIDAVIAIGVLIRGATPHFDYIASEVSKGLADLSLELRKPITFGVITADTLEQAIERAGTKHGNKGWEAALSAIEMANLFKSLR

SEQ ID NO: 13640 - protein, 1371 aa, Artificial Sequence
  SARS-CoV-2/Iceland/280/2020__EPI_ISL_417608 spike protein (1-1211)(N914C_S1123C) LumSynth construct
MFVFLVLLPLVSSQCVNLTTRTQLPPAYTNSFTRGVYYPDKVFRSSVLHSTQDLFLPFFSNVTWFHAIHVSGTNGTKRFDNPVLPFNDGVYFASTEKSNIIRGWIFGTTLDSKTQSLLIVNNATNVVIKVCEFQFCNDPFLGVYYHKNNKSWMESEFRVYSSANNCTFEYVSQPFLMDLEGKQGNFKNLREFVFKNIDGYFKIYSKHTPINLVRDLPQGFSALEPLVDLPIGINITRFQTLLALHRSYLTPGDSSSGWTAGAAAYYVGYLQPRTFLLKYNENGTITDAVDCALDPLSETKCTLKSFTVEKGIYQTSNFRVQPTESIVRFPNITNLCPFGEVFNATRFASVYAWNRKRISNCVADYSVLYNSASFSTFKCYGVSPTKLNDLCFTNVYADSFVIRGDEVRQIAPGQTGKIADYNYKLPDDFTGCVIAWNSNNLDSKVGGNYNYLYRLFRKSNLKPFERDISTEIYQAGSTPCNGVEGFNCYFPLQSYGFQPTNGVGYQPYRVVVLSFELLHAPATVCGPKKSTNLVKNKCVNFNFNGLTGTGVLTESNKKFLPFQQFGRDIADTTDAVRDPQTLEILDITPCSFGGVSVITPGTNTSNQVAVLYQGVNCTEVPVAIHADQLTPTWRVYSTGSNVFQTRAGCLIGAEHVNNSYECDIPIGAGICASYHTQTNSPRRARSVASQSIIAYTMSLGAENSVAYSNNSIAIPTNFTISVTTEILPVSMTKTSVDCTMYICGDSTECSNLLLQYGSFCTQLNRALTGIAVEQDKNTQEVFAQVKQIYKTPPIKDFGGFNFSQILPDPSKPSKRSFIEDLLFNKVTLADAGFIKQYGDCLGDIAARDLICAQKFNGLTVLPPLLTDEMIAQYTSALLAGTITSGWTFGAGAALQIPFAMQMAYRFNGIGVTQCVLYENQKLIANQFNSAIGKIQDSLSSTASALGKLQDVVNQNAQALNTLVKQLSSNFGAISSVLNDILSRLDKVEAEVQIDRLITGRLQSLQTYVTQQLIRAAEIRASANLAATKMSECVLGQSKRVDFCGKGYHLMSFPQSAPHGVVFLHVTYVPAQEKNFTTAPAICHDGKAHFPREGVFVSNGTHWFVTQRNFYEPQIITTDNTFVCGNCDVVIGIVNNTVYDPLQPELDSFKEELDKYFKNHTSPDVDLGDISGINASVVNIQKEIDRLNEVAKNLNESLIDLQELGKYEQYIKGGGSGGGQIYEGKLTAEGLRFGIVASRFNHALVDRLVEGAIDAIVRHGGREEDITLVRVPGSWEIPVAAGELARKEDIDAVIAIGVLIRGATPHFDYIASEVSKGLADLSLELRKPITFGVITADTLEQAIERAGTKHGNKGWEAALSAIEMANLFKSLR

SEQ ID NO: 13641 - protein, 1371 aa, Artificial Sequence; identical to SEQ ID NO: 13596
  SARS-CoV-2/Iceland/247/2020__EPI_ISL_417575 spike protein (1-1211)(N914C_S1123C) LumSynth construct

SEQ ID NO: 13642 - protein, 1371 aa, Artificial Sequence
  SARS-CoV-2/Iceland/238/2020__EPI_ISL_417566 spike protein (1-1211)(N914C_S1123C) LumSynth construct
MFVFLVLLPLVSSQCVNLTTRTQLPPAYTNSFTRGVYYPDKVFRSSVLHSTQDLFLPFFSNVTWFHAIHVSGTNGTKRFDNPVLPFNDGVYFASTEKSNIIRGWIFGTTLDSKTQSLLIVNNATNVVIKVCEFQFCNDPFLGVYYHKNNKSWMESEFRVYSSANNCTFEYVSQPFLMDLEGKQGNFKNLREFVFKNIDGYFKIYSKHTPINLVRDLPQGFSALEPLVDLPIGINITRFQTLLALHRSYLTPGDSSSGWTAGAAAYYVGYLQPRTFLLKYNENGTITDAVDCALDPLSETKCTLKSFTVEKGIYQTSNFRVQPTESIVRFPNITNLCPFGEVFNATRFASVYAWNRKRISNCVADYSVLYNSASFSTFKCYGVSPTKLNDLCFTNVYADSFVIRGDEVRQIAPGQTGKIADYNYKLPDDFTGCVIAWNSNNLDSKVGGNYNYLYRLFRKSNLKPFERDISTEIYQAGSTPCNGVEGFNCYFPLQSYGFQPTNGVGYQPYRVVVLSFELLHAPATVCGPKKSTNLVKNKCVNFNFNGLTGTGVLTESNKKFLPFQQFGRDIADTTDAVRDPQTLEILDITPCSFGGVSVITPGTNTSNQVAVLYQGVNCTEVPVAIHADQLTPTWRVYSTGSNVFQTRAGCLIGAEHVNNSYECDIPIGAGICASYQTQTNSPRRARSVASQSIIAYTMSLGAENSVAYSNNSIAIPTNFTISVTTEILPVSMTKTSVDCTMYICGDSTECSNLLLQYGSFCTQLNRALTGIAVEQDKNTQEVFAQVKQIYKTPPIKDFGGFNFSQILPDPSKPSKRSFIEDLLFNKVTLADVGFIKQYGDCLGDIAARDLICAQKFNGLTVLPPLLTDEMIAQYTSALLAGTITSGWTFGAGAALQIPFAMQMAYRFNGIGVTQCVLYENQKLIANQFNSAIGKIQDSLSSTASALGKLQDVVNQNAQALNTLVKQLSSNFGAISSVLNDILSRLDKVEAEVQIDRLITGRLQSLQTYVTQQLIRAAEIRASANLAATKMSECVLGQSKRVDFCGKGYHLMSFPQSAPHGVVFLHVTYVPAQEKNFTTAPAICHDGKAHFPREGVFVSNGTHWFVTQRNFYEPQIITTDNTFVCGNCDVVIGIVNNTVYDPLQPELDSFKEELDKYFKNHTSPDVDLGDISGINASVVNIQKEIDRLNEVAKNLNESLIDLQELGKYEQYIKGGGSGGGQIYEGKLTAEGLRFGIVASRFNHALVDRLVEGAIDAIVRHGGREEDITLVRVPGSWEIPVAAGELARKEDIDAVIAIGVLIRGATPHFDYIASEVSKGLADLSLELRKPITFGVITADTLEQAIERAGTKHGNKGWEAALSAIEMANLFKSLR

SEQ ID NO: 13643 - protein, 1371 aa, Artificial Sequence
  SARS-CoV-2/Greece/16/2020__EPI_ISL_418265 spike protein (1-1211)(N914C_S1123C) LumSynth construct
MFVFLVLLPLVSSQCVNLTTRTQLPPAYTNSFTRGVYYPDKVFRSSVLHSTQDLFLPFFSNVTWFHAIHVSGTNGTKRFDNPVLPFNDGVYFASTEKSNIIRGWIFGTTLDSKTQSLLIVNNATNVVIKVCEFQFCNDPFLGVYYHKNNKSWMESEFRVYSSANNCTFEYVSQPFLMDLEGKQGNFKNLREFVFKNVDGYFKIYSKHTPINLVRDLPQGFSALEPLVDLPIGINITRFQTLLALHRSYLTPGDSSSGWTAGAAAYYVGYLQPRTFLLKYNENGTITDAVDCALDPLSETKCTLKSFTVEKGIYQTSNFRVQPTESIVRFPNITNLCPFGEVFNATRFASVYAWNRKRISNCVADYSVLYNSASFSTFKCYGVSPTKLNDLCFTNVYADSFVIRGDEVRQIAPGQTGKIADYNYKLPDDFTGCVIAWNSNNLDSKVGGNYNYLYRLFRKSNLKPFERDISTEIYQAGSTPCNGVEGFNCYFPLQSYGFQPTNGVGYQPYRVVVLSFELLHAPATVCGPKKSTNLVKNKCVNFNFNGLTGTGVLTESNKKFLPFQQFGRDIADTTDAVRDPQTLEILDITPCSFGGVSVITPGTNTSNQVAVLYQDVNCTEVPVAIHADQLTPTWRVYSTGSNVFQTRAGCLIGAEHVNNSYECDIPIGAGICASYQTQTNSPRRARSVASQSIIAYTMSLGAENSVAYSNNSIAIPTNFTISVTTEILPVSMTKTSVDCTMYICGDSTECSNLLLQYGSFCTQLNRALTGIAVEQDKNTQEVFAQVKQIYKTPPIKDFGGFNFSQILPDPSKPSKRSFIEDLLFNKVTLADAGFIKQYGDCLGDIAARDLICAQKFNGLTVLPPLLTDEMIAQYTSALLAGTITSGWTFGAGAALQIPFAMQMAYRFNGIGVTQCVLYENQKLIANQFNSAIGKIQDSLSSTASALGKLQDVVNQNAQALNTLVKQLSSNFGAISSVLNDILSRLDKVEAEVQIDRLITGRLQSLQTYVTQQLIRAAEIRASANLAATKMSECVLGQSKRVDFCGKGYHLMSFPQSAPHGVVFLHVTYVPAQEKNFTTAPAICHDGKAHFPREGVFVSNGTHWFVTQRNFYEPQIITTDNTFVCGNCDVVIGIVNNTVYDPLQPELDSFKEELDKYFKNHTSPDVDLGDISGINASVVNIQKEIDRLNEVAKNLNESLIDLQELGKYEQYIKGGGSGGGQIYEGKLTAEGLRFGIVASRFNHALVDRLVEGAIDAIVRHGGREEDITLVRVPGSWEIPVAAGELARKEDIDAVIAIGVLIRGATPHFDYIASEVSKGLADLSLELRKPITFGVITADTLEQAIERAGTKHGNKGWEAALSAIEMANLFKSLR

SEQ ID NO: 13644 - protein, 1371 aa, Artificial Sequence
  SARS-CoV-2/Iceland/319/2020__EPI_ISL_417648 spike protein (1-1211)(N914C_S1123C) LumSynth construct
MFVFLVLLPLVSSQCVNLTTRTQLPPAYTNSFTRGVYYPDKVFRSSVLHSTQDLFLPFFSNVTWFHAIHVSGTNGTKRFDNPVLPFNDGVYFASTEKSNIIRGWIFGTTLDSKTQSLLIVNNATNVVIKVCEFQFCNDPFLGVYYHKNNKSWMESEFRVYSSANNCTFEYVSQPFLIDLEGKQGNFKNLREFVFKNIDGYFKIYSKHTPINLVRDLPQGFSALEPLVDLPIGINITRFQTLLALHRSYLTPGDSSSGWTAGAAAYYVGYLQPRTFLLKYNENGTITDAVDCALDPLSETKCTLKSFTVEKGIYQTSNFRVQPTESIVRFPNITNLCPFGEVFNATRFASVYAWNRKRISNCVADYSVLYNSASFSTFKCYGVSPTKLNDLCFTNVYADSFVIRGDEVRQIAPGQTGKIADYNYKLPDDFTGCVIAWNSNNLDSKVGGNYNYLYRLFRKSNLKPFERDISTEIYQAGSTPCNGVEGFNCYFPLQSYGFQPTNGVGYQPYRVVVLSFELLHAPATVCGPKKSTNLVKNKCVNFNFNGLTGTGVLTESNKKFLPFQQFGRDIADTTDAVRDPQTLEILDITPCSFGGVSVITPGTNTSNQVAVLYQGVNCTEVPVAIHADQLTPTWRVYSTGSNVFQTRAGCLIGAEHVNNSYECDIPIGAGICASYQTQTNSPRRARSVASQSIIAYTMSLGAENSVAYSNNSIAIPTNFTISVTTEILPVSMTKTSVDCTMYICGDSTECSNLLLQYGSFCTQLNRALTGIAVEQDKNTQEVFAQVKQIYKTPPIKDFGGFNFSQILPDPSKPSKRSFIEDLLFNKVTLADAGFIKQYGDCLGDIAARDLICAQKFNGLTVLPPLLTDEMIAQYTSALLAGTITSGWTFGAGAALQIPFAMQMAYRFNGIGVTQCVLYENQKLIANQFNSAIGKIQDSLSSTASALGKLQDVVNQNAQALNTLVKQLSSNFGAISSVLNDILSRLDKVEAEVQIDRLITGRLQSLQTYVTQQLIRAAEIRASANLAATKMSECVLGQSKRVDFCGKGYHLMSFPQSAPHGVVFLHVTYVPAQEKNFTTAPAICHDGKAHFPREGVFVSNGTHWFVTQRNFYEPQIITTDNTFVCGNCDVVIGIVNNTVYDPLQPELDSFKEELDKYFKNHTSPDVDLGDISGINASVVNIQKEIDRLNEVAKNLNESLIDLQELGKYEQYIKGGGSGGGQIYEGKLTAEGLRFGIVASRFNHALVDRLVEGAIDAIVRHGGREEDITLVRVPGSWEIPVAAGELARKEDIDAVIAIGVLIRGATPHFDYIASEVSKGLADLSLELRKPITFGVITADTLEQAIERAGTKHGNKGWEAALSAIEMANLFKSLR

SEQ ID NO: 13645 - protein, 1371 aa, Artificial Sequence
  SARS-CoV-2/Congo/94/2020__EPI_ISL_417947 spike protein (1-1211)(N914C_S1123C) LumSynth construct
MFVFLVLLPLVSSQCVNLTTRTQLPPAYTNSFTRGVYYPDKVFRSSVLHSTQDLFLPFFSNVTWFHAIHVSGTNGTKRFDNPVLPFNDGVYFASTEKSNIIRGWIFGTTLDSKTQSLLIVNNATNVVIKVCEFQFCNDPFLGVYYHKNNKSWMESEFRVYSSANNCTFEYVSQPFLMDLEGKQGNFKNLREFVFKNIDGYFKIYSKHTPINLVRDLPQGFSALEPLVDLPIGINITRFQTLLALHRSYLTPGDSSSGWTAGAAAYYVGYLQPRTFLLKYNENGTITDAVDCALDPLSETKCTLKSFTVEKGIYQTSNFRVQPTESIVRFPNITNLCPFGEVFNATRFASVYAWNRKRISNCVADYSVLYNSASFSTFKCYGVSPTKLNDLCFTNVYADSFVIRGDEVRQIAPGQTGKIADYNYKLPDDFTGCVIAWNSNNLDSKVGGNYNYLYRLFRKSNLKPFERDISTEIYQAGSTPCNGVEGFNCYFPLQSYGFQPTNGVGYQPYRVVVLSFELLHAPATVCGPKKSTNLVKNKCVNFNFNGLTGTGVLTESNKKFLPFQQFGRDIADTTDAVRDPQTLEILDITPCSFGGVSVITPGTNTSNQVAVLYQGVNCTEVPVAIHADQLTPTWRVYSTGSNVFQTRAGCLIGAEHVNNSYECDIPIGAGICASYQTQTNSPRRARSVASQSIIAYTMSLGAENSVAYSNNSIAIPTNFTISVTTEILPVSMTKTSVDCTMYICGDSTECSNLLLQYGSFCTQLNRALTGIAVEQDKNTQEVFAQVKQIYKTPPIKDFGGFNFSQILPDPSKPSKRSFIEDILFNKVTLADAGFIKQYGDCLGDIAARDLICAQKFNGLTVLPPLLTDEMIAQYTSALLAGTITSGWTFGAGAALQIPFAMQMAYRFNGIGVTQCVLYENQKLIANQFNSAIGKIQDSLSSTASALGKLQDVVNQNAQALNTLVKQLSSNFGAISSVLNDILSRLDKVEAEVQIDRLITGRLQSLQTYVTQQLIRAAEIRASANLAATKMSECVLGQSKRVDFCGKGYHLMSFPQSAPHGVVFLHVTYVPAQEKNFTTAPAICHDGKAHFPREGVFVSNGTHWFVTQRNFYEPQIITTDNTFVCGNCDVVIGIVNNTVYDPLQPELDSFKEELDKYFKNHTSPDVDLGDISGINASVVNIQKEIDRLNEVAKNLNESLIDLQELGKYEQYIKGGGSGGGQIYEGKLTAEGLRFGIVASRFNHALVDRLVEGAIDAIVRHGGREEDITLVRVPGSWEIPVAAGELARKEDIDAVIAIGVLIRGATPHFDYIASEVSKGLADLSLELRKPITFGVITADTLEQAIERAGTKHGNKGWEAALSAIEMANLFKSLR

SEQ ID NO: 13646 - protein, 1371 aa, Artificial Sequence
  SARS-CoV-2/Congo/158/2020__EPI_ISL_417950 spike protein (1-1211)(N914C_S1123C) LumSynth construct
MFVFLVLLPLVSSQCVNLTTRTQLPPAYTNSFTRGVYYPDKVFRSSVLHSTQDLFLPFFSNVTWFHAIHVSGTNGTKRFDNPVLPFNDGVYFASTEKSNIIRGWIFGTTLDSKTQSLLIVNNATNVVIKVCEFQFCNDPFLGVYYHKNNKSWMESEFRVYSSANNCTFEYVSQPFLMDLEGKQGNFKNLREFVFKNIDGYFKIYSKHTPINLVRDLPQGFSALEPLVDLPIGINITRFQTLLALHRSYLTPGDSSSGWTAGAAAYYVGYLQPRTFLLKYNENGTITDAVDCALDPLSETKCTLKSFTVEKGIYQTSNFRVQPTESIVRFPNITNLCPFGEVFNATRFASVYAWNRKRISNCVADYSVLYNSASFSTFKCYGVSPTKLNDLCFTNVYADSFVIRGDEVRQIAPGQTGKIADYNYKLPDDFTGCVIAWNSNNLDSKVGGNYNYLYRLFRKSNLKPFERDISTEIYQAGSTPCNGVEGFNCYFPLQSYGFQPTNGVGYQPYRVVVLSFELLHAPATVCGPKKSTNLVKNKCVNFNFNGLTGTGVLTESNKKFLPFQQFGRDIADTTDAVRDPQTLEILDITPCSFGGVSVITPGTNTSNQVAVLYQDVNCTEVPVAIHADQLTPTWRVYSTGSNVFQTRAGCLIGAEHVNNSYECDIPIGAGICASYQTQTNSPRRARSVASQSIIAYTMSLGAENSVAYSNNSIAIPTNFTISVTTEILPVSMTKTSVDCTMYICGDSTECSNLLLQYGSFCTQLNRALTGIAVEQDKNTQEVFAQVKQIYKTPPIKDFGGFNFSQILPDPSKPSKRSFIEDLLFNKVTLADAGFIKQYGDCLGDIAARDLICAQKFNGLTVLPPLLTDEMIAQYTSALLAGTITSGWTFGAGAALQIPFAMQMAYRFNGIGVTQCVLYENQKLIANQFNSAIGKIQDSLSSTASALGKLQDVVNQNAQALNTLVKQLSSNFGAISSVLNDILSRLDKVEAEVQIDRLITGRLQSLQTYVTQQLIRAAEIRASANLAATKMSECVLGQSKRVDFCGKGYHLMSFPQSAPHGVVFLHVTYVPAQEKNFTTAPAICHDGKAHFPREGVFVSNGTHWFVTQRNFYEPQIITTDNTFLCGNCDVVIGIVNNTVYDPLQPELDSFKEELDKYFKNHTSPDVDLGDISGINASVVNIQKEIDRLNEVAKNLNESLIDLQELGKYEQYIKGGGSGGGQIYEGKLTAEGLRFGIVASRFNHALVDRLVEGAIDAIVRHGGREEDITLVRVPGSWEIPVAAGELARKEDIDAVIAIGVLIRGATPHFDYIASEVSKGLADLSLELRKPITFGVITADTLEQAIERAGTKHGNKGWEAALSAIEMANLFKSLR

SEQ ID NO: 13647 - protein, 1371 aa, Artificial Sequence
  SARS-CoV-2/USA/UT-00034/2020__EPI_ISL_417977 spike protein (1-1211)(N914C_S1123C) LumSynth construct
MFVFLVLLPLVSSQCVNLTTRTQLPPAYTNSFTRGVYYPDKVFRSSVLHSTQDLFLPFFSNVTWFHAIHVSGTNGTKRFDNPVLPFNDGVYFASTEKSNIIRGWIFGTTLDSKTQSLLIVNNATNVVIKVCEFQFCNDPFLGVYYYKNNKSWMESEFRVYSSANNCTFEYVSQPFLMDLEGKQGNFKNLREFVFKNIDGYFKIYSKHTPINLVRDLPQGFSALEPLVDLPIGINITRFQTLLALHRSYLTPGDSSSGWTAGAAAYYVGYLQPRTFLLKYNENGTITDAVDCALDPLSETKCTLKSFTVEKGIYQTSNFRVQPTESIVRFPNITNLCPFGEVFNATRFASVYAWNRKRISNCVADYSVLYNSASFSTFKCYGVSPTKLNDLCFTNVYADSFVIRGDEVRQIAPGQTGKIADYNYKLPDDFTGCVIAWNSNNLDSKVGGNYNYLYRLFRKSNLKPFERDISTEIYQAGSTPCNGVEGFNCYFPLQSYGFQPTNGVGYQPYRVVVLSFELLHAPATVCGPKKSTNLVKNKCVNFNFNGLTGTGVLTESNKKFLPFQQFGRDIADTTDAVRDPQTLEILDITPCSFGGVSVITPGTNTSNQVAVLYQGVNCTEVPVAIHADQLTPTWRVYSTGSNVFQTRAGCLIGAEHVNNSYECDIPIGAGICASYQTQTNSPRRARSVASQSIIAYTMSLGAENSVAYSNNSIAIPTNFTISVTTEILPVSMTKTSVDCTMYICGDSTECSNLLLQYGSFCTQLNRALTGIAVEQDKNTQEVFAQVKQIYKTPPIKDFGGFNFSQILPDPSKPSKRSFIEDLLFNKVTLADAGFIKQYGDCLGDIAARDLICAQKFNGLTVLPPLLTDEMIAQYTSALLAGTITSGWTFGAGAALQIPFAMQMAYRFNGIGVTQCVLYENQKLIANQFNSAIGKIQDSLSSTASALGKLQDVVNQNAQALNTLVKQLSSNFGAISSVLNDILSRLDKVEAEVQIDRLITGRLQSLQTYVTQQLIRAAEIRASANLAATKMSECVLGQSKRVDFCGKGYHLMSFPQSAPHGVVFLHVTYVPAQEKNFTTAPAICHDGKAHFPREGVFVSNGTHWFVTQRNFYEPQIITTDNTFVCGNCDVVIGIVNNTVYDPLQPELDSFKEELDKYFKNHTSPDVDLGDISGINASVVNIQKEIDRLNEVAKNLNESLIDLQELGKYEQYIKGGGSGGGQIYEGKLTAEGLRFGIVASRFNHALVDRLVEGAIDAIVRHGGREEDITLVRVPGSWEIPVAAGELARKEDIDAVIAIGVLIRGATPHFDYIASEVSKGLADLSLELRKPITFGVITADTLEQAIERAGTKHGNKGWEAALSAIEMANLFKSLR

SEQ ID NO: 13648 - protein, 1371 aa, Artificial Sequence
  SARS-CoV-2/USA/UT-00033/2020__EPI_ISL_417976 spike protein (1-1211)(N914C_S1123C) LumSynth construct
MFVFLVLLPLVSSQCVNLTTRTQLPPAYTNSFTRGVYYPDKVFRSSVLHSTQDLFLPFFSNVTWFHAIHVSGTNGTKRFDNPVLPFNDGVYFASTEKSNIIRGWIFGTTLDSKTQSLLIVNNATNVVIKVCEFQFCNDPFLGVYYHKNNKSWMESEFRVYSSANNCTFEYVSQPFLMDLEGKQGNFKNLREFVFKNIDGYFKIYSKHTPINLVRDLPQGFSALEPLVDLPIGINITRFQTLLALHRSYLTPGDSSSGLTAGAAAYYVGYLQPRTFLLKYNENGTITDAVDCALDPLSETKCTLKSFTVEKGIYQTSNFRVQPTESIVRFPNITNLCPFGEVFNATRFASVYAWNRKRISNCVADYSVLYNSASFSTFKCYGVSPTKLNDLCFTNVYADSFVIRGDEVRQIAPGQTGKIADYNYKLPDDFTGCVIAWNSNNLDSKVGGNYNYLYRLFRKSNLKPFERDISTEIYQAGSTPCNGVEGFNCYFPLQSYGFQPTNGVGYQPYRVVVLSFELLHAPATVCGPKKSTNLVKNKCVNFNFNGLTGTGVLTESNKKFLPFQQFGRDIADTTDAVRDPQTLEILDITPCSFGGVSVITPGTNTSNQVAVLYQGVNCTEVPVAIHADQLTPTWRVYSTGSNVFQTRAGCLIGAEHVNNSYECDIPIGAGICASYQTQTNSPRRARSVASQSIIAYTMSLGAENSVAYSNNSIAIPTNFTISVTTEILPVSMTKTSVDCTMYICGDSTECSNLLLQYGSFCTQLNRALTGIAVEQDKNTQEVFAQVKQIYKTPPIKDFGGFNFSQILPDPSKPSKRSFIEDLLFNKVTLADAGFIKQYGDCLGDIAARDLICAQKFNGLTVLPPLLTDEMIAQYTSALLAGTITSGWTFGAGAALQIPFAMQMAYRFNGIGVTQCVLYENQKLIANQFNSAIGKIQDSLSSTASALGKLQDVVNQNAQALNTLVKQLSSNFGAISSVLNDILSRLDKVEAEVQIDRLITGRLQSLQTYVTQQLIRAAEIRASANLAATKMSECVLGQSKRVDFCGKGYHLMSFPQSAPHGVVFLHVTYVPAQEKNFTTAPAICHDGKAHFPREGVFVSNGTHWFVTQRNFYEPQIITTDNTFVCGNCDVVIGIVNNTVYDPLQPELDSFKEELDKYFKNHTSPDVDLGDISGINASVVNIQKEIDRLNEVAKNLNESLIDLQELGKYEQYIKGGGSGGGQIYEGKLTAEGLRFGIVASRFNHALVDRLVEGAIDAIVRHGGREEDITLVRVPGSWEIPVAAGELARKEDIDAVIAIGVLIRGATPHFDYIASEVSKGLADLSLELRKPITFGVITADTLEQAIERAGTKHGNKGWEAALSAIEMANLFKSLR

SEQ ID NO: 13649 - protein, 1371 aa, Artificial Sequence
  SARS-CoV-2/USA/WI-13/2020__EPI_ISL_417516 spike protein (1-1211)(N914C_S1123C) LumSynth construct
MFVFLVLLPLVSSQCVNLTTRTQLPPAYTNSFTRGVYYPDKVFRSSVLHSTQDLFLPFFSNVTWFHAIHVSGTNGTKRFDNPVLPFNDGVYFASTEKSNIIRGWIFGTTLDSKTQSLLIVNNATNVVIKVCEFQFCNDPFLGVYYHKNNKSWMESEFRVYSSANNCTFEYVSQPFLMDLEGKQGNFKNLREFVFKNIDGYFKIYSKHTPINLVRDLPQGFSALEPLVDLPIGINITRFQTLLALHRSYLTPGDSSSGWTAGAAAYYVGYLQPRTFLLKYNENGTITDAVDCALDPLSETKCTLKSFTVEKGIYQTSNFRVLPTESIVRFPNITNLCPFGEVFNATRFASVYAWNRKRISNCVADYSVLYNSASFSTFKCYGVSPTKLNDLCFTNVYADSFVIRGDEVRQIAPGQTGKIADYNYKLPDDFTGCVIAWNSNNLDSKVGGNYNYLYRLFRKSNLKPFERDISTEIYQAGSTPCNGVEGFNCYFPLQSYGFQPTNGVGYQPYRVVVLSFELLHAPATVCGPKKSTNLVKNKCVNFNFNGLTGTGVLTESNKKFLPFQQFGRDIADTTDAVRDPQTLEILDITPCSFGGVSVITPGTNTSNQVAVLYQGVNCTEVPVAIHADQLTPTWRVYSTGSNVFQTRAGCLIGAEHVNNSYECDIPIGAGICASYQTQTNSPRRARSVASQSIIAYTMSLGAENSVAYSNNSIAIPTNFTISVTTEILPVSMTKTSVDCTMYICGDSTECSNLLLQYGSFCTQLNRALTGIAVEQDKNTQEVFAQVKQIYKTPPIKDFGGFNFSQILPDPSKPSKRSFIEDLLFNKVTLADAGFIKQYGDCLGDIAARDLICAQKFNGLTVLPPLLTDEMIAQYTSALLAGTITSGWTFGAGAALQIPFAMQMAYRFNGIGVTQCVLYENQKLIANQFNSAIGKIQDSLSSTASALGKLQDVVNQNAQALNTLVKQLSSNFGAISSVLNDILSRLDKVEAEVQIDRLITGRLQSLQTYVTQQLIRAAEIRASANLAATKMSECVLGQSKRVDFCGKGYHLMSFPQSAPHGVVFLHVTYVPAQEKNFTTAPAICHDGKAHFPREGVFVSNGTHWFVTQRNFYEPQIITTDNTFVCGNCDVVIGIVNNTVYDPLQPELDSFKEELDKYFKNHTSPDVDLGDISGINASVVNIQKEIDRLNEVAKNLNESLIDLQELGKYEQYIKGGGSGGGQIYEGKLTAEGLRFGIVASRFNHALVDRLVEGAIDAIVRHGGREEDITLVRVPGSWEIPVAAGELARKEDIDAVIAIGVLIRGATPHFDYIASEVSKGLADLSLELRKPITFGVITADTLEQAIERAGTKHGNKGWEAALSAIEMANLFKSLR

SEQ ID NO: 13650 - protein, 1370 aa, Artificial Sequence
  SARS-CoV-2/India/1-27/2020__EPI_ISL_413522 spike protein (1-1210)(N913C_S1122C) LumSynth construct
MFVFLVLLPLVSSQCVNLTTRTQLPPAYTNSFTRGVYYPDKVFRSSVLHSTQDLFLPFFSNVTWFHAIHVSGTNGTKRFDNPVLPFNDGVYFASTEKSNIIRGWIFGTTLDSKTQSLLIVNNATNVVIKVCEFQFCNDPFLGVYHKNNKSWMESEFRVYSSANNCTFEYVSQPFLMDLEGKQGNFKNLREFVFKNIDGYFKIYSKHTPINLVRDLPQGFSALEPLVDLPIGINITRFQTLLALHRSYLTPGDSSSGWTAGAAAYYVGYLQPRTFLLKYNENGTITDAVDCALDPLSETKCTLKSFTVEKGIYQTSNFRVQPTESIVRFPNITNLCPFGEVFNATRFASVYAWNRKRISNCVADYSVLYNSASFSTFKCYGVSPTKLNDLCFTNVYADSFVIRGDEVIQIAPGQTGKIADYNYKLPDDFTGCVIAWNSNNLDSKVGGNYNYLYRLFRKSNLKPFERDISTEIYQAGSTPCNGVEGFNCYFPLQSYGFQPTNGVGYQPYRVVVLSFELLHAPATVCGPKKSTNLVKNKCVNFNFNGLTGTGVLTESNKKFLPFQQFGRDIADTTDAVRDPQTLEILDITPCSFGGVSVITPGTNTSNQVAVLYQDVNCTEVPVAIHADQLTPTWRVYSTGSNVFQTRAGCLIGAEHVNNSYECDIPIGAGICASYQTQTNSPRRARSVASQSIIAYTMSLGAENSVAYSNNSIAIPTNFTISVTTEILPVSMTKTSVDCTMYICGDSTECSNLLLQYGSFCTQLNRALTGIAVEQDKNTQEVFAQVKQIYKTPPIKDFGGFNFSQILPDPSKPSKRSFIEDLLFNKVTLADAGFIKQYGDCLGDIAARDLICAQKFNGLTVLPPLLTDEMIAQYTSALLAGTITSGWTFGAGAALQIPFAMQMAYRFNGIGVTQCVLYENQKLIANQFNSAIGKIQDSLSSTASALGKLQDVVNQNAQALNTLVKQLSSNFGAISSVLNDILSRLDKVEAEVQIDRLITGRLQSLQTYVTQQLIRAAEIRASANLAATKMSECVLGQSKRVDFCGKGYHLMSFPQSAPHGVVFLHVTYVPAQEKNFTTAPAICHDGKAHFPREGVFVSNGTHWFVTQRNFYEPQIITTDNTFVCGNCDVVIGIVNNTVYDPLQPELDSFKEELDKYFKNHTSPDVDLGDISGINASVVNIQKEIDRLNEVAKNLNESLIDLQELGKYEQYIKGGGSGGGQIYEGKLTAEGLRFGIVASRFNHALVDRLVEGAIDAIVRHGGREEDITLVRVPGSWEIPVAAGELARKEDIDAVIAIGVLIRGATPHFDYIASEVSKGLADLSLELRKPITFGVITADTLEQAIERAGTKHGNKGWEAALSAIEMANLFKSLR

SEQ ID NO: 13651 - protein, 1365 aa, Artificial Sequence
  SARS-CoV-2/pangolin/Guangxi/P4L/2017__EPI_ISL_410538 spike protein (1-1205)(N908C_S1117C) LumSynth construct
MFVFLFVLPLVSSQCVNLTTRTGIPPGYTNSSTRGVYYPDKVFRSSILHLTQDLFLPFFSNVTWFNTINYQGGFKKFDNPVLPFNDGVYFASTEKSNIIRGWIFGTTLDARTQSLLIVNNATNVVIKVCEFQFCTDPFLGVYYHNNNKTWVENEFRVYSSANNCTFEYISQPFLMDLEGKQGNFKNLREFVFKNVDGYFKIYSKHTPIDLVRDLPRGFAALEPLVDLPIGINITRFQTLLALHRSYLTPGNLESGWTTGAAAYYVGYLQQRTFLLSYNQNGTITDAVDCSLDPLSETKCTLKSLTVEKGIYQTSNFRVQPTISIVRFPNITNLCPFGEVFNASKFASVYAWNRKRISNCVADYSVLYNSTSFSTFKCYGVSPTKLNDLCFTNVYADSFVVKGDEVRQIAPGQTGVIADYNYKLPDDFTGCVIAWNSVKQDALTGGNYGYLYRLFRKSKLKPFERDISTEIYQAGSTPCNGQVGLNCYYPLERYGFHPTTGVNYQPFRVVVLSFELLNGPATVCGPKLSTTLVKDKCVNFNFNGLTGTGVLTTSKKQFLPFQQFGRDISDTTDAVRDPQTLEILDITPCSFGGVSVITPGTNTSNQVAVLYQDVNCTEVPMAIHAEQLTPAWRVYSAGANVFQTRAGCLVGAEHVNNSYECDIPVGAGICASYHSMSSLRSVNQRSIIAYTMSLGAENSVAYSNNSIAIPTNFTISVTTEILPVSMTKTSVDCTMYICGDSIECSNLLLQYGSFCTQLNRALTGIAVEQDKNTQEVFAQVKQIYKTPPIKDFGGFNFSQILPDPSKPSKRSFIEDLLFNKVTLADAGFIKQYGDCLGDIAARDLICAQKFNGLTVLPPLLTDEMIAQYTSALLAGTITSGWTFGAGAALQIPFAMQMAYRFNGIGVTQCVLYENQKLIANQFNSAIGKIQDSLSSTASALGKLQDVVNQNAQALNTLVKQLSSNFGAISSVLNDILSRLDKVEAEVQIDRLITGRLQSLQTYVTQQLIRAAEIRASANLAATKMSECVLGQSKRVDFCGKGYHLMSFPQSAPHGVVFLHVTYVPAQEKNFTTAPAICHEGKAHFPREGVFVSNGTHWFITQRNFYEPQIITTDNTFVCGSCDVVIGIVNNTVYDPLQPELDSFKEELDKYFKNHTSPDVDLGDISGINASVVNIQKEIDRLNEVAKNLNESPIDLQELGKYEQYIKGGGSGGGQIYEGKLTAEGLRFGIVASRFNHALVDRLVEGAIDAIVRHGGREEDITLVRVPGSWEIPVAAGELARKEDIDAVIAIGVLIRGATPHFDYIASEVSKGLADLSLELRKPITFGVITADTLEQAIERAGTKHGNKGWEAALSAIEMANLFKSLR

SEQ ID NO: 13652 - protein, 1365 aa, Artificial Sequence
  SARS-CoV-2/pangolin/Guangxi/P5L/2017__EPI_ISL_410540 spike protein (1-1205)(N908C_S1117C) LumSynth construct
MFVFLFVLPLVSSQCVNLTTRTGIPPGYTNSSTRGVYYPDKVFRSSILHLTQDLFLPFFSNVTWFNTINYQGGFKKFDNPVLPFNDGVYFASTEKSNIIRGWIFGTTLDARTQSLLIVNNATNVVIKVCEFQFCTDPFLGVYYHNNNKTWVENEFRVYSSANNCTFEYISQPFLMDLEGKQGNFKNLREFVFKNVDGYFKIYSKHTPIDLVRDLPRGFAALEPLVDLPIGINITRFQTLLALHRSYLTPGKLESGWTTGAAAYYVGYLQQRTFLLSYNQNGTITDAVDCSLDPLSETKCTLKSLTVEKGIYQTSNFRVQPTISIVRFPNITNLCPFGEVFNASKFASVYAWNRKRISNCVADYSVLYNSTSFSTFKCYGVSPTKLNDLCFTNVYADSFVVKGDEVRQIAPGQTGVIADYNYKLPDDFTGCVIAWNSVKQDALTGGNYGYLYRLFRKSKLKPFERDISTEIYQAGSTPCNGQVGLNCYYPLERYGFHPTTGVNYQPFRVVVLSFELLNGPATVCGPKLSTTLVKDKCVNFNFNGLTGTGVLTTSKKQFLPFQQFGRDISDTTDAVRDPQTLEILDITPCSFGGVSVITPGTNTSNQVAVLYQDVNCTEVPMAIHAEQLTPAWRVYSAGANVFQTRAGCLVGAEHVNNSYECDIPVGAGICASYHSMSSFRSVNQRSIIAYTMSLGAENSVAYSNNSIAIPTNFTISVTTEILPVSMTKTSVDCTMYICGDSIECSNLLLQYGSFCTQLNRALTGIAVEQDKNTQEVFAQVKQIYKTPPIKDFGGFNFSQILPDPSKPSKRSFIEDLLFNKVTLADAGFIKQYGDCLGDIAARDLICAQKFNGLTVLPPLLTDEMIAQYTSALLAGTITSGWTFGAGAALQIPFAMQMAYRFNGIGVTQCVLYENQKLIANQFNSAIGKIQDSLSSTASALGKLQDVVNQNAQALNTLVKQLSSNFGAISSVLNDILSRLDKVEAEVQIDRLITGRLQSLQTYVTQQLIRAAEIRASANLAATKMSECVLGQSKRVDFCGKGYHLMSFPQSAPHGVVFLHVTYVPAQEKNFTTAPAICHEGKAHFPREGVFVSNGTHWFITQRNFYEPQIITTDNTFVCGSCDVVIGIVNNTVYDPLQPELDSFKEELDKYFKNHTSPDVDLGDISGINASVVNIQKEIDRLNEVAKNLNESLIDLQELGKYEQYIKGGGSGGGQIYEGKLTAEGLRFGIVASRFNHALVDRLVEGAIDAIVRHGGREEDITLVRVPGSWEIPVAAGELARKEDIDAVIAIGVLIRGATPHFDYIASEVSKGLADLSLELRKPITFGVITADTLEQAIERAGTKHGNKGWEAALSAIEMANLFKSLR

SEQ ID NO: 13653 - protein, 1365 aa, Artificial Sequence
  SARS-CoV-2/pangolin/Guangxi/P5E/2017__EPI_ISL_410541 spike protein (1-1205)(N908C_S1117C) LumSynth construct
MFVFLFVLPLVSSQCVNLTTRTGIPPGYTNSSTRGVYYPDKVFRSSILHLTQDLFLPFFSNVTWFNTITYQGGSKKFDNPVLPFNDGVYFASTEKSNIIRGWIFGTTLDARTQSLLIVNNATNVVIKVCEFQFCTDPFLGVYYHNNNKTWVENEFRVYSSANNCTFEYISQPFLMDLEGKQGNFKNLREFVFKNVDGYFKIYSKHTPIDLVRDLPRGFAALEPLVDLPIGINITRFQTLLALHRSYLTPGKLESGWTTGAAAYYVGYLQQRTFLLSYNQNGTITDAVDCSLDPLSETKCTLKSLTVEKGIYQTSNFRVQPTISIVRFPNITNLCPFGEVFNASKFASVYAWNRKRISNCVADYSVLYNSTSFSTFKCYGVSPTKLNDLCFTNVYADSFVVKGDEVRQIAPGQTGVIADYNYKLPDDFTGCVIAWNSVKQDALTGDNYGYLYRLFRKSKLKPFERDISTEIYQAGSTPCNGQVGLNCYYPLERYGFHPTTGVNYQPFRVVVLSFELLNGPATVCGPKLSTTLVKDKCVNFNFNGLTGTGVLTTSKKQFLPFQQFGRDISDTTDAVRDPQTLEILDITPCSFGGVSVITPGTNTSNQVAVLYQDVNCTEVPMAIHAEQLTPAWRVYSAGANVFQTRAGCLVGAEHVNNSYECDIPVGAGICASYHSMSSFRSVNQRSIIAYTMSLGAENSVAYSNNSIAIPTNFTISVTTEILPVSMTKTSVDCTMYICGDSIECSNLLLQYGSFCTQLNRALTGIAVEQDKNTQEVFAQVKQIYKTPPIKDFGGFNFSQILPDPSKPSKRSFIEDLLFNKVTLADAGFIKQYGDCLGDIAARDLICAQKFNGLTVLPPLLTDEMIAQYTSALLAGTITSGWTFGAGAALQIPFAMQMAYRFNGIGVTQCVLYENQKLIANQFNSAIGKIQDSLSSTASALGKLQDVVNQNAQALNTLVKQLSSNFGAISSVLNDILSRLDKVEAEVQIDRLITGRLQSLQTYVTQQLIRAAEIRASANLAATKMSECVLGQSKRVDFCGKGYHLMSFPQSAPHGVVFLHVTYVPAQEKNFTTAPAICHEGKAHFPREGVFVSNGTHWFITQRNFYEPQIITTDNTFVCGSCDVVIGIVNNTVYDPLQPELDSFKEELDKYFKNHTSPDVDLGDISGINASVVNIQKEIDRLNEVAKNLNESLIDLQELGKYEQYIKGGGSGGGQIYEGKLTAEGLRFGIVASRFNHALVDRLVEGAIDAIVRHGGREEDITLVRVPGSWEIPVAAGELARKEDIDAVIAIGVLIRGATPHFDYIASEVSKGLADLSLELRKPITFGVITADTLEQAIERAGTKHGNKGWEAALSAIEMANLFKSLR

SEQ ID NO: 13654 - protein, 1363 aa, Artificial Sequence
  SARS-CoV-2/pangolin/Guangxi/P1E/2017__EPI_ISL_410539 spike protein (1-1203)(N906C_S1115C) LumSynth construct
MFVFLFVLPLVSSQCVNLTTRTGIQPGYTNSSTRGVYYPDKVFRSSILHLTQDLFLPFFSNVTWFNTINYQGGFKKFDNPVLPFNDGVYFASTEKSNIIRGWIFGTTLDARTQSLLIVNNATNVVIKVCEFQFCTDPFLGVYYHNNNKTWVENEFRVYSSANNCTFEYISQPFLMDLEGKQGNFKNLREFVFKNVDGYFKIYSKHTPIDLVRDLPRGFAALEPLVDLPIGINITRFQTLLALHRSYLTPGKLESGWTTGAAAYYVGYLQQRTFLLSYNQNGTITDAVDCSLDPLSETKCTLKSLTVEKGIYQTSNFRVQPTISIVRFPNITNLCPFGEVFNASKFASVYAWNRKRISNCVADYSVLYNSTSFSTFKCYGVSPTKLNDLCFTNVYADSFVVKGDEVRQIAPGQTGVIADYNYKLPDDFTGCVIAWNSVKQDALTGGNYLYRLFRKSKLKPFERDISTEIYQAGSTPCNGQVGLNCYYPLERYGFHPTTGVNYQPFRVVVLSFELLNGPATVCGPKLSTTLVKDKCVNFNFNGLTGTGVLTTSKKQFLPFQQFGRDISDTTDAVRDPQTLEILDITPCSFGGVSVITPGTNTSNQVAVLYQDVNCTEVPMAIHAEQLTPAWRVYSAGANVFQTRAGCLVGAEHVNNSYECDIPVGAGICASYHSMSSLRSVNQRSIIAYTMSLGAENSVAYSNNSIAIPTNFTISVTTEILPVSMTKTSVDCTMYICGDSIECSNLLLQYGSFCTQLNRALTGIAVEQDKNTQEVFAQVKQIYKTPPIKDFGGFNFSQILPDPSKPSKRSFIEDLLFNKVTLADAGFIKQYGDCLGDIAARDLICAQKFNGLTVLPPLLTDEMIAQYTSALLAGTITSGWTFGAGAALQIPFAMQMAYRFNGIGVTQCVLYENQKLIANQFNSAIGKIQDSLSSTASALGKLQDVVNQNAQALNTLVKQLSSNFGAISSVLNDILSRLDKVEAEVQIDRLITGRLQSLQTYVTQQLIRAAEIRASANLAATKMSECVLGQSKRVDFCGKGYHLMSFPQSAPHGVVFLHVTYVPAQEKNFTTAPAICHEGKAHFPREGVFVSNGTHWFITQRNFYEPQIITTDNTFVCGSCDVVIGIVNNTVYDPLQPELDSFKEELDKYFKNHTSPDVDLGDISGINASVVNIQKEIDRLNEVAKNLNESLIDLQELGKYEQYIKGGGSGGGQIYEGKLTAEGLRFGIVASRFNHALVDRLVEGAIDAIVRHGGREEDITLVRVPGSWEIPVAAGELARKEDIDAVIAIGVLIRGATPHFDYIASEVSKGLADLSLELRKPITFGVITADTLEQAIERAGTKHGNKGWEAALSAIEMANLFKSLR

SEQ ID NO: 13655 - protein, 1379 aa, Artificial Sequence
  SARS-CoV-2/Wuhan/WIV05/2019__EPI_ISL_402128 spike protein (1-1211)(N914C_S1123C) Ferritin construct
MFVFLVLLPLVSSQCVNLTTRTQLPPAYTNSFTRGVYYPDKVFRSSVLHSTQDLFLPFFSNVTWFHAIHVSGTNGTKRFDNPVLPFNDGVYFASTEKSNIIRGWIFGTTLDSKTQSLLIVNNATNVVIKVCEFQFCNDPFLGVYYHKNNKSWMESEFRVYSSANNCTFEYVSQPFLMDLEGKQGNFKNLREFVFKNIDGYFKIYSKHTPINLVRDLPQGFSALEPLVDLPIGINITRFQTLLALHRSYLTPGDSSSGWTAGAAAYYVGYLQPRTFLLKYNENGTITDAVDCALDPLSETKCTLKSFTVEKGIYQTSNFRVQPTESIVRFPNITNLCPFGEVFNATRFASVYAWNRKRISNCVADYSVLYNSASFSTFKCYGVSPTKLNDLCFTNVYADSFVIRGDEVRQIAPGQTGKIADYNYKLPDDFTGCVIAWNSNNLDSKVGGNYNYLYRLFRKSNLKPFERDISTEIYQAGSTPCNGVEGFNCYFPLQSYGFQPTNGVGYQPYRVVVLSFELLHAPATVCGPKKSTNLVKNKCVNFNFNGLTGTGVLTESNKKFLPFQQFGRDIADTTDAVRDPQTLEILDITPCSFGGVSVITPGTNTSNQVAVLYQDVNCTEVPVAIHADQLTPTWRVYSTGSNVFQTRAGCLIGAEHVNNSYECDIPIGAGICASYQTQTNSPRRARSVASQSIIAYTMSLGAENSVAYSNNSIAIPTNFTISVTTEILPVSMTKTSVDCTMYICGDSTECSNLLLQYGSFCTQLNRALTGIAVEQDKNTQEVFAQVKQIYKTPPIKDFGGFNFSQILPDPSKPSKRSFIEDLLFNKVTLADAGFIKQYGDCLGDIAARDLICAQKFNGLTVLPPLLTDEMIAQYTSALLAGTITSGWTFGAGAALQIPFAMQMAYRFNGIGVTQCVLYENQKLIANQFNSAIGKIQDSLSSTASALGKLQDVVNQNAQALNTLVKQLSSNFGAISSVLNDILSRLDKVEAEVQIDRLITGRLQSLQTYVTQQLIRAAEIRASANLAATKMSECVLGQSKRVDFCGKGYHLMSFPQSAPHGVVFLHVTYVPAQEKNFTTAPAICHDGKAHFPREGVFVSNGTHWFVTQRNFYEPQIITTDNTFVCGNCDVVIGIVNNTVYDPLQPELDSFKEELDKYFKNHTSPDVDLGDISGINASVVNIQKEIDRLNEVAKNLNESLIDLQELGKYEQYIKGGGGSDIIKLLNEQVNKEMQSSNLYMSMSSWCYTHSLDGAGLFLFDHAAEEYEHAKKLIIFLNENNVPVQLTSISAPEHKFEGLTQIFQKAYEHEQHISESINNIVDHAIKSKDHATFNFLQWYVAEQHEEEVLFKDILDKIELIGNENHGLYLADQYVKGIAKSRKS

SEQ ID NO: 13656 - protein, 1375 aa, Artificial Sequence
  SARS-CoV-2/bat/Yunnan/RaTG13/2013__EPI_ISL_402131 spike protein (1-1207)(N910C_S1119C) Ferritin construct
MFVFLVLLPLVSSQCVNLTTRTQLPPAYTNSSTRGVYYPDKVFRSSVLHLTQDLFLPFFSNVTWFHAIHVSGTNGIKRFDNPVLPFNDGVYFASTEKSNIIRGWIFGTTLDSKTQSLLIVNNATNVVIKVCEFQFCNDPFLGVYYHKNNKSWMESEFRVYSSANNCTFEYVSQPFLMDLEGKQGNFKNLREFVFKNIDGYFKIYSKHTPINLVRDLPPGFSALEPLVDLPIGINITRFQTLLALHRSYLTPGDSSSGWTAGAAAYYVGYLQPRTFLLKYNENGTITDAVDCALDPLSETKCTLKSFTVEKGIYQTSNFRVQPTDSIVRFPNITNLCPFGEVFNATTFASVYAWNRKRISNCVADYSVLYNSTSFSTFKCYGVSPTKLNDLCFTNVYADSFVITGDEVRQIAPGQTGKIADYNYKLPDDFTGCVIAWNSKHIDAKEGGNFNYLYRLFRKANLKPFERDISTEIYQAGSKPCNGQTGLNCYYPLYRYGFYPTDGVGHQPYRVVVLSFELLNAPATVCGPKKSTNLVKNKCVNFNFNGLTGTGVLTESNKKFLPFQQFGRDIADTTDAVRDPQTLEILDITPCSFGGVSVITPGTNASNQVAVLYQDVNCTEVPVAIHADQLTPTWRVYSTGSNVFQTRAGCLIGAEHVNNSYECDIPIGAGICASYQTQTNSRSVASQSIIAYTMSLGAENSVAYSNNSIAIPTNFTISVTTEILPVSMTKTSVDCTMYICGDSTECSNLLLQYGSFCTQLNRALTGIAVEQDKNTQEVFAQVKQIYKTPPIKDFGGFNFSQILPDPSKPSKRSFIEDLLFNKVTLADAGFIKQYGDCLGDIAARDLICAQKFNGLTVLPPLLTDEMIAQYTSALLAGTITSGWTFGAGAALQIPFAMQMAYRFNGIGVTQCVLYENQKLIANQFNSAIGKIQDSLSSTASALGKLQDVVNQNAQALNTLVKQLSSNFGAISSVLNDILSRLDKVEAEVQIDRLITGRLQSLQTYVTQQLIRAAEIRASANLAATKMSECVLGQSKRVDFCGKGYHLMSFPQSAPHGVVFLHVTYVPAQEKNFTTAPAICHDGKAHFPREGVFVSNGTHWFVTQRNFYEPQIITTDNTFVCGSCDVVIGIVNNTVYDPLQPELDSFKEELDKYFKNHTSPDVDLGDISGINASVVNIQKEIDRLNEVAKNLNESLIDLQELGKYEQYIKGGGGSDIIKLLNEQVNKEMQSSNLYMSMSSWCYTHSLDGAGLFLFDHAAEEYEHAKKLIIFLNENNVPVQLTSISAPEHKFEGLTQIFQKAYEHEQHISESINNIVDHAIKSKDHATFNFLQWYVAEQHEEEVLFKDILDKIELIGNENHGLYLADQYVKGIAKSRKS

SEQ ID NO: 13657 - protein, 1379 aa, Artificial Sequence
  SARS-CoV-2/Wuhan/HBCDC-HB-01/2019__EPI_ISL_402132 spike protein (1-1211)(N914C_S1123C) Ferritin construct
MFVFLVLLPLVSSQCVNLTTRTQLPPAYTNSITRGVYYPDKVFRSSVLHSTQDLFLPFFSNVTWFHAIHVSGTNGTKRFDNPVLPFNDGVYFASTEKSNIIRGWIFGTTLDSKTQSLLIVNNATNVVIKVCEFQFCNDPFLGVYYHKNNKSWMESEFRVYSSANNCTFEYVSQPFLMDLEGKQGNFKNLREFVFKNIDGYFKIYSKHTPINLVRDLPQGFSALEPLVDLPIGINITRFQTLLALHRSYLTPGDSSSGWTAGAAAYYVGYLQPRTFLLKYNENGTITDAVDCALDPLSETKCTLKSFTVEKGIYQTSNFRVQPTESIVRFPNITNLCPFGEVFNATRFASVYAWNRKRISNCVADYSVLYNSASFSTFKCYGVSPTKLNDLCFTNVYADSFVIRGDEVRQIAPGQTGKIADYNYKLPDDFTGCVIAWNSNNLDSKVGGNYNYLYRLFRKSNLKPFERDISTEIYQAGSTPCNGVEGFNCYFPLQSYGFQPTNGVGYQPYRVVVLSFELLHAPATVCGPKKSTNLVKNKCVNFNFNGLTGTGVLTESNKKFLPFQQFGRDIADTTDAVRDPQTLEILDITPCSFGGVSVITPGTNTSNQVAVLYQDVNCTEVPVAIHADQLTPTWRVYSTGSNVFQTRAGCLIGAEHVNNSYECDIPIGAGICASYQTQTNSPRRARSVASQSIIAYTMSLGAENSVAYSNNSIAIPTNFTISVTTEILPVSMTKTSVDCTMYICGDSTECSNLLLQYGSFCTQLNRALTGIAVEQDKNTQEVFAQVKQIYKTPPIKDFGGFNFSQILPDPSKPSKRSFIEDLLFNKVTLADAGFIKQYGDCLGDIAARDLICAQKFNGLTVLPPLLTDEMIAQYTSALLAGTITSGWTFGAGAALQIPFAMQMAYRFNGIGVTQCVLYENQKLIANQFNSAIGKIQDSLSSTASALGKLQDVVNQNAQALNTLVKQLSSNFGAISSVLNDILSRLDKVEAEVQIDRLITGRLQSLQTYVTQQLIRAAEIRASANLAATKMSECVLGQSKRVDFCGKGYHLMSFPQSAPHGVVFLHVTYVPAQEKNFTTAPAICHDGKAHFPREGVFVSNGTHWFVTQRNFYEPQIITTDNTFVCGNCDVVIGIVNNTVYDPLQPELDSFKEELDKYFKNHTSPDVDLGDISGINASVVNIQKEIDRLNEVAKNLNESLIDLQELGKYEQYIKGGGGSDIIKLLNEQVNKEMQSSNLYMSMSSWCYTHSLDGAGLFLFDHAAEEYEHAKKLIIFLNENNVPVQLTSISAPEHKFEGLTQIFQKAYEHEQHISESINNIVDHAIKSKDHATFNFLQWYVAEQHEEEVLFKDILDKIELIGNENHGLYLADQYVKGIAKSRKS

SEQ ID NO: 13658 - protein, 1379 aa, Artificial Sequence
  SARS-CoV-2/Guangdong/20SF028/2020__EPI_ISL_403936 spike protein (1-1211)(N914C_S1123C) Ferritin construct
MFVFLVLLPLVSSQCVNLTTRTQLPPAYTNSFTRGVYYPDKVFRSSVLYSTQDLFLPFFSNVTWFHAIHVSGTNGTKRFDNPVLPFNDGVYFASTEKSNIIRGWIFGTTLDSKTQSLLIVNNATNVVIKVCEFQFCNDPFLGVYYHKNNKSWMESEFRVYSSANNCTFEYVSQPFLMDLEGKQGNFKNLREFVFKNIDGYFKIYSKHTPINLVRDLPQGFSALEPLVDLPIGINITRFQTLLALHRSYLTPGDSSSGWTAGAAAYYVGYLQPRTFLLKYNENGTITDAVDCALDPLSETKCTLKSFTVEKGIYQTSNFRVQPTESIVRFPNITNLCPFGEVFNATRFASVYAWNRKRISNCVADYSVLYNSASFSTFKCYGVSPTKLNDLCFTNVYADSFVIRGDEVRQIAPGQTGKIADYNYKLPDDFTGCVIAWNSNNLDSKVGGNYNYLYRLFRKSNLKPFERDISTEIYQAGSTPCNGVEGFNCYFPLQSYGFQPTNGVGYQPYRVVVLSFELLHAPATVCGPKKSTNLVKNKCVNFNFNGLTGTGVLTESNKKFLPFQQFGRDIADTTDAVRDPQTLEILDITPCSFGGVSVITPGTNTSNQVAVLYQDVNCTEVPVAIHADQLTPTWRVYSTGSNVFQTRAGCLIGAEHVNNSYECDIPIGAGICASYQTQTNSPRRARSVASQSIIAYTMSLGAENSVAYSNNSIAIPTNFTISVTTEILPVSMTKTSVDCTMYICGDSTECSNLLLQYGSFCTQLNRALTGIAVEQDKNTQEVFAQVKQIYKTPPIKDFGGFNFSQILPDPSKPSKRSFIEDLLFNKVTLADAGFIKQYGDCLGDIAARDLICAQKFNGLTVLPPLLTDEMIAQYTSALLAGTITSGWTFGAGAALQIPFAMQMAYRFNGIGVTQCVLYENQKLIANQFNSAIGKIQDSLSSTASALGKLQDVVNQNAQALNTLVKQLSSNFGAISSVLNDILSRLDKVEAEVQIDRLITGRLQSLQTYVTQQLIRAAEIRASANLAATKMSECVLGQSKRVDFCGKGYHLMSFPQSAPHGVVFLHVTYVPAQEKNFTTAPAICHDGKAHFPREGVFVSNGTHWFVTQRNFYEPQIITTDNTFVCGNCDVVIGIVNNTVYDPLQPELDSFKEELDKYFKNHTSPDVDLGDISGINASVVNIQKEIDRLNEVAKNLNESLIDLQELGKYEQYIKGGGGSDIIKLLNEQVNKEMQSSNLYMSMSSWCYTHSLDGAGLFLFDHAAEEYEHAKKLIIFLNENNVPVQLTSISAPEHKFEGLTQIFQKAYEHEQHISESINNIVDHAIKSKDHATFNFLQWYVAEQHEEEVLFKDILDKIELIGNENHGLYLADQYVKGIAKSRKS

SEQ ID NO: 13659 - protein, 1379 aa, Artificial Sequence
  SARS-CoV-2/Shenzhen/SZTH-001/2020__EPI_ISL_406592 spike protein (1-1211)(N914C_S1123C) Ferritin construct
MFVFLVLLPLVSSQCVNLTTRTQLPPAYTNSFTRGVYYPDKVFRSSVLHSTQDLFLPFFSNVTWFHAIHVSGTNGTKRFDNPVLPFNDGVYFASTEKSNIIRGWIFGTTLDSKTQSLLIVNNATNVVIKVCEFQFCNDPFLGVYYHKNNKSWMESEFRVYSSANNCTFEYVSQPFLMDLEGKQGNFKNLREFVFKNIDGYFKIYSKHTPINLVRDLPQGFSALEPLVDLPIGINITRFQTLLALHRSYLTPGDSSSGWTAGAAAYYVGYLQPRTFLLKYNENGTITDAVDCALDPLSETKCTLKSFTVEKGIYQTSNFRVQPTESIVRFPNITNLCPFGEVFNATRFASVYAWNRKRISNCVADYSVLYNSASFSTFKCYGVSPTKLNDLCFTNVYADSFVIRGDEVRQIAPGQTGKIADYNYKLPDDFTGCVIAWNSNNLDSKVGGNYNYLYRLFRKSNLKPFERDISTEIYQAGSTPCNGVEGFNCYFPLQSYGFQPTNGVGYQPYRVVVLSFELLHAPATVCGPKKSTNLVKNKCVNFNFNGLTGTGVLTESNKKFLPFQQFGRDIADTTDAVRDPQTLEILDITPCSFGGVSVITPGTNTSNQVAVLYQDVNCTEVPVAIHADQLTPTWRVYSTGSNVFQTRAGCLIGAEHVNNSYECDIPIGAGICASYQTQTNSPRRARSVASQSIIAYTMSLGAENSVAYSNNSIAIPTNFTISVTTEILPVSMTKTSVDCTMYICGDSTECSNLLLQYGSFCTQLNRALTGIAVEQDKNTQEVFAQVKQIYKTPPIKDFGGFNFSQILPDPSKPSKRSFIEDLLFNKVTLADAGFIKQYGDCLGDIAARDLICAQKFNGLTVLPPLLTDEMIAQYTSALLAGTITSGWTFGAGAALQIPFAMQMAYRFNGIGVTQCVLYENQKLIANQFNSAIGKIQDSLSSTASALGKLQDVVNQNAQALNTLVKQLSSNFGAISSVLNDILSRLDKVEAEVQIDRLITGRLQSLQTYVTQQLIRAAEIRASANLAATKMSECVLGQSKRVDFCGKGYHLMSFPQSAPHGVVFLHVTYVPAQEKNFTTAPAICHDGKAHFPREGVFVSNGTHWFVTQRNFYEPQIITTDNTFVCGNCDVLIGIVNNTVYDPLQPELDSFKEELDKYFKNHTSPDVDLGDISGINASVVNIQKEIDRLNEVAKNLNESLIDLQELGKYEQYIKGGGGSDIIKLLNEQVNKEMQSSNLYMSMSSWCYTHSLDGAGLFLFDHAAEEYEHAKKLIIFLNENNVPVQLTSISAPEHKFEGLTQIFQKAYEHEQHISESINNIVDHAIKSKDHATFNFLQWYVAEQHEEEVLFKDILDKIELIGNENHGLYLADQYVKGIAKSRKS

SEQ ID NO: 13660 - protein, 1379 aa, Artificial Sequence
  SARS-CoV-2/Shenzhen/SZTH-004/2020__EPI_ISL_406595 spike protein (1-1211)(N914C_S1123C) Ferritin construct
MFVFLVLLPLVSSQCVNLTTRTQLPPAYTNSFTRGVYYPDKVFRSSVLHSTQDLFLPFFSNVTWFHAIHVSGTNGTKRFDNPVLPFNDGVYFASTEKSNIIRGWIFGTTLDSKTQSLLIVNNATNVVIKVCEFQFCNDPFLGVYYHKNNKSWMESEFRVYSSANNCTFEYVSQPFLMDLEGKQGNFKNLREFVFKNIDGYFKIYSKHTPINLVRDLPQGFSALEPLVDLPIGINITRFQTLLALHRSYLTPGDSSSGWTAGAAAYYVGYLQPRTFLLKYNENGTITDAVDCALDPLSETKCTLKSFTVEKGIYQTSNFRVQPTESIVRFPNITNLCPFGEVFNATRFASVYAWDRKRISNCVAYYSVLYNSASFSTFKCYGVSPTKLNDLCFTNVYADSFVIRGDEVRQIAPGQTGKIADYNYKLPDDFTGCVIAWNSNNLDSKVGGNYNYLYRLFRKSNLKPFERDISTEIYQAGSTPCNGVEGFNCYFPLQSYGFQPTNGVGYQPYRVVVLSFELLHAPATVCGPKKSTNLVKNKCVNFNFNGLTGTGVLTESNKKFLPFQQFGRDIADTTDAVRDPQTLEILDITPCSFGGVSVITPGTNTSNQVAVLYQDVNCTEVPVAIHADQLTPTWRVYSTGSNVFQTRAGCLIGAEHVNNSYECDIPIGAGICASYQTQTNSPRRARSVASQSIIAYTMSLGAENSVAYSNNSIAIPTNFTISVTTEILPVSMTKTSVDCTMYICGDSTECSNLLLQYGSFCTQLNRALTGIAVEQDKNTQEVFAQVKQIYKTPPIKDFGGFNFSQILPDPSKPSKRSFIEDLLFNKVTLADAGFIKQYGDCLGDIAARDLICAQKFNGLTVLPPLLTDEMIAQYTSALLAGTITSGWTFGAGAALQIPFAMQMAYRFNGIGVTQCVLYENQKLIANQFNSAIGKIQDSLSSTASALGKLQDVVNQNAQALNTLVKQLSSNFGAISSVLNDILSRLDKVEAEVQIDRLITGRLQSLQTYVTQQLIRAAEIRASANLAATKMSECVLGQSKRVDFCGKGYHLMSFPQSAPHGVVFLHVTYVPAQEKNFTTAPAICHDGKAHFPREGVFVSNGTHWFVTQRNFYEPQIITTDNTFVCGNCDVVIGIVNNTVYDPLQPELDSFKEELDKYFKNHTSPDVDLGDISGINASVVNIQKEIDRLNEVAKNLNESLIDLQELGKYEQYIKGGGGSDIIKLLNEQVNKEMQSSNLYMSMSSWCYTHSLDGAGLFLFDHAAEEYEHAKKLIIFLNENNVPVQLTSISAPEHKFEGLTQIFQKAYEHEQHISESINNIVDHAIKSKDHATFNFLQWYVAEQHEEEVLFKDILDKIELIGNENHGLYLADQYVKGIAKSRKS

SEQ ID NO: 13661 - protein, 1379 aa, Artificial Sequence
  SARS-CoV-2/France/IDF0372/2020__EPI_ISL_406596 spike protein (1-1211)(N914C_S1123C) Ferritin construct
MFVFLVLLPLVSSQCVNLTTRTQLPPAYTNSFTRGVYYPDKVFRSSVLHSTQDLFLPFFSNVTWFHAIHVSGTNGTKRFDNPVLPFNDGVYFASTEKSNIIRGWIFGTTLDSKTQSLLIVNNATNVVIKVCEFQFCNDPFLGVYYHKNNKSWMESEFRVYSSANNCTFEYVSQPFLMDLEGKQGNFKNLREFVFKNIDGYFKIYSKHTPINLVRDLPQGFSALEPLVDLPIGINITRFQTLLALHRSYLTPGDSSSGWTAGAAAYYVGYLQPRTFLLKYNENGTITDAVDCALDPLSETKCTLKSFTVEKGIYQTSNFRVQPTESIVRFPNITNLCPFGEVFNATRFASVYAWNRKRISNCVADYSFLYNSASFSTFKCYGVSPTKLNDLCFTNVYADSFVIRGDEVRQIAPGQTGKIADYNYKLPDDFTGCVIAWNSNNLDSKVGGNYNYLYRLFRKSNLKPFERDISTEIYQAGSTPCNGVEGFNCYFPLQSYGFQPTNGVGYQPYRVVVLSFELLHAPATVCGPKKSTNLVKNKCVNFNFNGLTGTGVLTESNKKFLPFQQFGRDIADTTDAVRDPQTLEILDITPCSFGGVSVITPGTNTSNQVAVLYQDVNCTEVPVAIHADQLTPTWRVYSTGSNVFQTRAGCLIGAEHVNNSYECDIPIGAGICASYQTQTNSPRRARSVASQSIIAYTMSLGAENSVAYSNNSIAIPTNFTISVTTEILPVSMTKTSVDCTMYICGDSTECSNLLLQYGSFCTQLNRALTGIAVEQDKNTQEVFAQVKQIYKTPPIKDFGGFNFSQILPDPSKPSKRSFIEDLLFNKVTLADAGFIKQYGDCLGDIAARDLICAQKFNGLTVLPPLLTDEMIAQYTSALLAGTITSGWTFGAGAALQIPFAMQMAYRFNGIGVTQCVLYENQKLIANQFNSAIGKIQDSLSSTASALGKLQDVVNQNAQALNTLVKQLSSNFGAISSVLNDILSRLDKVEAEVQIDRLITGRLQSLQTYVTQQLIRAAEIRASANLAATKMSECVLGQSKRVDFCGKGYHLMSFPQSAPHGVVFLHVTYVPAQEKNFTTAPAICHDGKAHFPREGVFVSNGTHWFVTQRNFYEPQIITTDNTFVCGNCDVVIGIVNNTVYDPLQPELDSFKEELDKYFKNHTSPDVDLGDISGINASVVNIQKEIDRLNEVAKNLNESLIDLQELGKYEQYIKGGGGSDIIKLLNEQVNKEMQSSNLYMSMSSWCYTHSLDGAGLFLFDHAAEEYEHAKKLIIFLNENNVPVQLTSISAPEHKFEGLTQIFQKAYEHEQHISESINNIVDHAIKSKDHATFNFLQWYVAEQHEEEVLFKDILDKIELIGNENHGLYLADQYVKGIAKSRKS

SEQ ID NO: 13662 - protein, 1379 aa, Artificial Sequence
  SARS-CoV-2/Australia/VIC01/2020__EPI_ISL_406844 spike protein (1-1211)(N914C_S1123C) Ferritin construct
MFVFLVLLPLVSSQCVNLTTRTQLPPAYTNSFTRGVYYPDKVFRSSVLHSTQDLFLPFFSNVTWFHAIHVSGTNGTKRFDNPVLPFNDGVYFASTEKSNIIRGWIFGTTLDSKTQSLLIVNNATNVVIKVCEFQFCNDPFLGVYYHKNNKSWMESEFRVYSSANNCTFEYVSQPFLMDLEGKQGNFKNLREFVFKNIDGYFKIYSKHTPINLVRDLPQGFSALEPLVDLPIGINITRFQTLLALHRRYLTPGDSSSGWTAGAAAYYVGYLQPRTFLLKYNENGTITDAVDCALDPLSETKCTLKSFTVEKGIYQTSNFRVQPTESIVRFPNITNLCPFGEVFNATRFASVYAWNRKRISNCVADYSVLYNSASFSTFKCYGVSPTKLNDLCFTNVYADSFVIRGDEVRQIAPGQTGKIADYNYKLPDDFTGCVIAWNSNNLDSKVGGNYNYLYRLFRKSNLKPFERDISTEIYQAGSTPCNGVEGFNCYFPLQSYGFQPTNGVGYQPYRVVVLSFELLHAPATVCGPKKSTNLVKNKCVNFNFNGLTGTGVLTESNKKFLPFQQFGRDIADTTDAVRDPQTLEILDITPCSFGGVSVITPGTNTSNQVAVLYQDVNCTEVPVAIHADQLTPTWRVYSTGSNVFQTRAGCLIGAEHVNNSYECDIPIGAGICASYQTQTNSPRRARSVASQSIIAYTMSLGAENSVAYSNNSIAIPTNFTISVTTEILPVSMTKTSVDCTMYICGDSTECSNLLLQYGSFCTQLNRALTGIAVEQDKNTQEVFAQVKQIYKTPPIKDFGGFNFSQILPDPSKPSKRSFIEDLLFNKVTLADAGFIKQYGDCLGDIAARDLICAQKFNGLTVLPPLLTDEMIAQYTSALLAGTITSGWTFGAGAALQIPFAMQMAYRFNGIGVTQCVLYENQKLIANQFNSAIGKIQDSLSSTASALGKLQDVVNQNAQALNTLVKQLSSNFGAISSVLNDILSRLDKVEAEVQIDRLITGRLQSLQTYVTQQLIRAAEIRASANLAATKMSECVLGQSKRVDFCGKGYHLMSFPQSAPHGVVFLHVTYVPAQEKNFTTAPAICHDGKAHFPREGVFVSNGTHWFVTQRNFYEPQIITTDNTFVCGNCDVVIGIVNNTVYDPLQPELDSFKEELDKYFKNHTSPDVDLGDISGINASVVNIQKEIDRLNEVAKNLNESLIDLQELGKYEQYIKGGGGSDIIKLLNEQVNKEMQSSNLYMSMSSWCYTHSLDGAGLFLFDHAAEEYEHAKKLIIFLNENNVPVQLTSISAPEHKFEGLTQIFQKAYEHEQHISESINNIVDHAIKSKDHATFNFLQWYVAEQHEEEVLFKDILDKIELIGNENHGLYLADQYVKGIAKSRKS

SEQ ID NO: 13663 - protein, 1379 aa, Artificial Sequence
  SARS-CoV-2/Germany/BavPat1/2020__EPI_ISL_406862 spike protein (1-1211)(N914C_S1123C) Ferritin construct
MFVFLVLLPLVSSQCVNLTTRTQLPPAYTNSFTRGVYYPDKVFRSSVLHSTQDLFLPFFSNVTWFHAIHVSGTNGTKRFDNPVLPFNDGVYFASTEKSNIIRGWIFGTTLDSKTQSLLIVNNATNVVIKVCEFQFCNDPFLGVYYHKNNKSWMESEFRVYSSANNCTFEYVSQPFLMDLEGKQGNFKNLREFVFKNIDGYFKIYSKHTPINLVRDLPQGFSALEPLVDLPIGINITRFQTLLALHRSYLTPGDSSSGWTAGAAAYYVGYLQPRTFLLKYNENGTITDAVDCALDPLSETKCTLKSFTVEKGIYQTSNFRVQPTESIVRFPNITNLCPFGEVFNATRFASVYAWNRKRISNCVADYSVLYNSASFSTFKCYGVSPTKLNDLCFTNVYADSFVIRGDEVRQIAPGQTGKIADYNYKLPDDFTGCVIAWNSNNLDSKVGGNYNYLYRLFRKSNLKPFERDISTEIYQAGSTPCNGVEGFNCYFPLQSYGFQPTNGVGYQPYRVVVLSFELLHAPATVCGPKKSTNLVKNKCVNFNFNGLTGTGVLTESNKKFLPFQQFGRDIADTTDAVRDPQTLEILDITPCSFGGVSVITPGTNTSNQVAVLYQGVNCTEVPVAIHADQLTPTWRVYSTGSNVFQTRAGCLIGAEHVNNSYECDIPIGAGICASYQTQTNSPRRARSVASQSIIAYTMSLGAENSVAYSNNSIAIPTNFTISVTTEILPVSMTKTSVDCTMYICGDSTECSNLLLQYGSFCTQLNRALTGIAVEQDKNTQEVFAQVKQIYKTPPIKDFGGFNFSQILPDPSKPSKRSFIEDLLFNKVTLADAGFIKQYGDCLGDIAARDLICAQKFNGLTVLPPLLTDEMIAQYTSALLAGTITSGWTFGAGAALQIPFAMQMAYRFNGIGVTQCVLYENQKLIANQFNSAIGKIQDSLSSTASALGKLQDVVNQNAQALNTLVKQLSSNFGAISSVLNDILSRLDKVEAEVQIDRLITGRLQSLQTYVTQQLIRAAEIRASANLAATKMSECVLGQSKRVDFCGKGYHLMSFPQSAPHGVVFLHVTYVPAQEKNFTTAPAICHDGKAHFPREGVFVSNGTHWFVTQRNFYEPQIITTDNTFVCGNCDVVIGIVNNTVYDPLQPELDSFKEELDKYFKNHTSPDVDLGDISGINASVVNIQKEIDRLNEVAKNLNESLIDLQELGKYEQYIKGGGGSDIIKLLNEQVNKEMQSSNLYMSMSSWCYTHSLDGAGLFLFDHAAEEYEHAKKLIIFLNENNVPVQLTSISAPEHKFEGLTQIFQKAYEHEQHISESINNIVDHAIKSKDHATFNFLQWYVAEQHEEEVLFKDILDKIELIGNENHGLYLADQYVKGIAKSRKS

SEQ ID NO: 13664 - protein, 1379 aa, Artificial Sequence
  SARS-CoV-2/Wuhan/HBCDC-HB-02/2020__EPI_ISL_412978 spike protein (1-1211)(N914C_S1123C) Ferritin construct
MFVFLVLLPLVSSQCVNLTTRTQLPPAYTNSFTRGVYYPDKVFRSSVLHSTQDLFLPFFSNVTWFHAIHVSGTNGTKRFDNPVLPFNDGVYFASTEKSNIIRGWIFGTTLDSKTQSLLIVNNATNVVIKVCEFQFCNDPFLGVYYHKNNKSWMESEFRVYSSANNCTFEYVSQPFLMDLEGKQGNFKNLREFVFKNIDGYFKIYSKHTPINLVRDLPQGFSALEPLVDLPIGINITRFQTLLALHRSYLTPGDSSSGWTAGAAAYYVGYLQPRTFLLKYNENGTITDAVDCALDPLSETKCTLKSFTVEKGIYQTSNFRVQPTESIVRFPNITNLCPFGEVFNATRFASVYAWNRKRISNCVADYSVLYNSASFSTFKCYGVSPTKLNDLCFTNVYADSFVIRGDEVRQIAPGQTGKIADYNYKLPDDFTGCVIAWNSNNLDSKVGGNYNYLYRLFRKSNLKPFERDISTEIYQAGSTPCNGVEGFNCYFPLQSYGFQPTNGVGYQPYRVVVLSFELLHAPATVCGPKKSTNLVKNKCVNFNFNGLTGTGVLTESNKKFLPFQQFGRDIADTTDAVRDPQTLEILDITPCSFGGVSVITPGTNTSNQVAVLYQDVNCTEVPVAIHADQLTPTWRVYSTGSNVFQTRAGCLIGAEHVNNSYECDIPIGAGICASYQTQTNSPRRARSVASQSIIAYTMSLGAENSVAYSNNSIAIPTNFTISVTTEILPVSMTKTSVDCTMYICGDSTECSNFLLQYGSFCTQLNRALTGIAVEQDKNTQEVFAQVKQIYKTPPIKDFGGFNFSQILPDPSKPSKRSFIEDLLFNKVTLADAGFIKQYGDCLGDIAARDLICAQKFNGLTVLPPLLTDEMIAQYTSALLAGTITSGWTFGAGAALQIPFAMQMAYRFNGIGVTQCVLYENQKLIANQFNSAIGKIQDSLSSTASALGKLQDVVNQNAQALNTLVKQLSSNFGAISSVLNDILSRLDKVEAEVQIDRLITGRLQSLQTYVTQQLIRAAEIRASANLAATKMSECVLGQSKRVDFCGKGYHLMSFPQSAPHGVVFLHVTYVPAQEKNFTTAPAICHDGKAHFPREGVFVSNGTHWFVTQRNFYEPQIITTDNTFVCGNCDVVIGIVNNTVYDPLQPELDSFKEELDKYFKNHTSPDVDLGDISGINASVVNIQKEIDRLNEVAKNLNESLIDLQELGKYEQYIKGGGGSDIIKLLNEQVNKEMQSSNLYMSMSSWCYTHSLDGAGLFLFDHAAEEYEHAKKLIIFLNENNVPVQLTSISAPEHKFEGLTQIFQKAYEHEQHISESINNIVDHAIKSKDHATFNFLQWYVAEQHEEEVLFKDILDKIELIGNENHGLYLADQYVKGIAKSRKS

SEQ ID NO: 13665 - protein, 1379 aa, Artificial Sequence
  SARS-CoV-2/Australia/QLD02/2020__EPI_ISL_407896 spike protein (1-1211)(N914C_S1123C) Ferritin construct
MFVFLVLLPLVSSQCVNLTTRTQLPPAYTNSFTRGVYYPDKVFRSSVLHSTQDLFLPFFSNVTWFHAIHVSGTNGTKRFDNPVLPFNDGVYFASTEKSNIIRGWIFGTTLDSKTQSLLIVNNATNVVIKVCEFQFCNDPFLGVYYHKNNKSWMESEFRVYSSANNCTFEYVSQPFLMDLEGKQGNFKNLREFVFKNIDGYFKIYSKHTPINLVRDLPQGFSALEPLVDLPIGINITRFQTLLALHRSYLTPGDSSSGWTAGAAAYYVGYLQPRTFLLKYNENGTITDAVDCALDPLSETKCTLKSFTVEKGIYQTSNFRVQPTESIVRFPNITNLCPFGEVFNATRFASVYAWNRKRISNCVADYSVLYNSASFSTFKCYGVSPTKLNDLCFTNVYADSFVIRGDEVRQIAPGQTGKIADYNYKLPDDFTGCVIAWNSNNLDSKVGGNYNYLYRLFRKSNLKPFERDISTEIYQAGSTPCNGVEGFNCYFPLQSYGFQPTNGVGYQPYRVVVLSFELLHAPATVCGPKKSTNLVKNKCVNFNFNGLTGTGVLTESNKKFLPFQQFGRDIADTTDAVRDPQTLEILDITPCSFGGVSVITPGTNTSNQVAVLYQDVNCTEVPVAIHADQLTPTWRVYSTGSNVFQTRAGCLIGAEHVNNSYECDIPIGAGICASYQTQTNSPRRARSVASQSIIAYTMSLGAENSVAYSNNSIAIPTNFTISVTTEILPVSMTKTSVDCTMYICGDSTECSNLLLQYGSFCTQLNRALTGIAVEQDKNTQEVFAQVKQIYKTPPIKDFGGFNFSQILPDPSKPSKRSFIEDLLFNKVTLADAGFIKQYGDCLGDIAARDLICAQKFNGLTVLPPLLTDEMIAQYTSALLAGTITSGWTFGAGAALQIPFAMQMAYRFNGIGVTQCVLYENQKLIANQFNSAIGKIQDSLSSTASALGKLQDVVNQNAQALNTLVKQLSSNFGAISSVLNDILSRLDKVEAEVQIDRLITGRLQSLQTYVTQQLIRAAEIRASANLAATKMSECVLGQSKRVDFCGKGYHLMSFPQSAPHGVVFLHVTYVPAQEKNFTTAPAICHDGKAHFPREGVFVSNGTHWFVTQRNFYEPQIITTDNTFVCGNCDVVIGIVNNTVYDPLQLELDSFKEELDKYFKNHTSPDVDLGDISGINASVVNIQKEIDRLNEVAKNLNESLIDLQELGKYEQYIKGGGGSDIIKLLNEQVNKEMQSSNLYMSMSSWCYTHSLDGAGLFLFDHAAEEYEHAKKLIIFLNENNVPVQLTSISAPEHKFEGLTQIFQKAYEHEQHISESINNIVDHAIKSKDHATFNFLQWYVAEQHEEEVLFKDILDKIELIGNENHGLYLADQYVKGIAKSRKS

SEQ ID NO: 13666 - protein, 1379 aa, Artificial Sequence
  SARS-CoV-2/India/1-31/2020__EPI_ISL_413523 spike protein (1-1211)(N914C_S1123C) Ferritin construct
MFVFLVLLPLVSSQCVNLTTRTQLPPAYTNSFTRGVYYPDKVFRSSVLHSTQDLFLPFFSNVTWFHAIHVSGTNGTKRFDNPVLPFNDGVYFASTEKSNIIRGWIFGTTLDSKTQSLLIVNNATNVVIKVCEFQFCNDPFLGVYYHKNNKSWMESEFRVYSSANNCTFEYVSQPFLMDLEGKQGNFKNLREFVFKNIDGYFKIYSKHTPINLVRDLPQGFSALEPLVDLPIGINITRFQTLLALHRSYLTPGDSSSGWTAGAAAYYVGYLQPRTFLLKYNENGTITDAVDCALDPLSETKCTLKSFTVEKGIYQTSNFRVQPTESIVRFPNITNLCPFGEVFNATRFASVYAWNRKRISNCVADYSVLYNSASFSTFKCYGVSPTKLNDLCFTNVYADSFVIRGDEVRQIAPGQTGKIADYNYKLPDDFTGCVIAWNSNNLDSKVGGNYNYLYRLFRKSNLKPFERDISTEIYQAGSTPCNGVEGFNCYFPLQSYGFQPTNGVGYQPYRVVVLSFELLHAPATVCGPKKSTNLVKNKCVNFNFNGLTGTGVLTESNKKFLPFQQFGRDIADTTDAVRDPQTLEILDITPCSFGGVSVITPGTNTSNQVAVLYQDVNCTEVPVAIHADQLTPTWRVYSTGSNVFQTRAGCLIGAEHVNNSYECDIPIGAGICASYQTQTNSPRRARSVASQSIIAYTMSLGAENSVAYSNNSIAIPTNFTISVTTEILPVSMTKTSVDCTMYICGDSTECSNLLLQYGSFCTQLNRALTGIAVEQDKNTQEVFAQVKQIYKTPPIKDFGGFNFSQILPDPSKPSKRSFIEDLLFNKVTLADAGFIKQYGDCLGDIAARDLICAQKFNGLTVLPPLLTDEMIAQYTSALLAGTITSGWTFGAGAALQIPFAMQMAYRFNGIGVTQCVLYENQKLIANQFNSVIGKIQDSLSSTASALGKLQDVVNQNAQALNTLVKQLSSNFGAISSVLNDILSRLDKVEAEVQIDRLITGRLQSLQTYVTQQLIRAAEIRASANLAATKMSECVLGQSKRVDFCGKGYHLMSFPQSAPHGVVFLHVTYVPAQEKNFTTAPAICHDGKAHFPREGVFVSNGTHWFVTQRNFYEPQIITTDNTFVCGNCDVVIGIVNNTVYDPLQPELDSFKEELDKYFKNHTSPDVDLGDISGINASVVNIQKEIDRLNEVAKNLNESLIDLQELGKYEQYIKGGGGSDIIKLLNEQVNKEMQSSNLYMSMSSWCYTHSLDGAGLFLFDHAAEEYEHAKKLIIFLNENNVPVQLTSISAPEHKFEGLTQIFQKAYEHEQHISESINNIVDHAIKSKDHATFNFLQWYVAEQHEEEVLFKDILDKIELIGNENHGLYLADQYVKGIAKSRKS

SEQ ID NO: 13667 - protein, 1379 aa, Artificial Sequence
  SARS-CoV-2/Guangdong/GD2020087-P0008/2020__EPI_ISL_413863 spike protein (1-1211)(N914C_S1123C) Ferritin construct
MFVFLVLLPLVSSQCVNLTTRTQLPPAYTNSFTRGVYYPDKVFRSSVLHSTQDLFLPFFSNVTWFHAIHVSGTNGTKRFDNPVLPFNDGVYFASTEKSNIIRGWIFGTTLDSKTQSLLIVNNATNVVIKVCEFQFCNDPFLGVYYHKNNKSWMESEFRVYSSANNCTFEYVSQPFLMDLEGKQGNFKNLREFVFKNIDGYFKIYSKHTPINLVRDLPQGFSALEPLVDLPIGINITRFQTLLALHRSYLTPGDSSSGWTAGAAAYYVGYLQPRTFLLKYNENGTITDAVDCALDPLSETKCTLKSFTVEKGIYQTSNFRVQPTESIVRFPNITNLCPFGEVFNATRFASVYAWNRKRISNCVADYSVLYNSASFSTFKCYGVSPTKLNDLCFTNVYADSFVIRGDEVREIAPGQTGKIADYNYKLPDDFTGCVIAWNSNNLDSKVGGNYNYLYRLFRKSNLKPFERDISTEIYQAGSTPCNGVEGFNCYFPLQSYGFQPTNGVGYQPYRVVVLSFELLHAPATVCGPKKSTNLVKNKCVNFNFNGLTGTGVLTESNKKFLPFQQFGRDIADTTDAVRDPQTLEILDITPCSFGGVSVITPGTNTSNQVAVLYQDVNCTEVPVAIHADQLTPTWRVYSTGSNVFQTRAGCLIGAEHVNNSYECDIPIGAGICASYQTQTNSPRRARSVASQSIIAYTMSLGAENSVAYSNNSIAIPTNFTISVTTEILPVSMTKTSVDCTMYICGDSTECSNLLLQYGSFCTQLNRALTGIAVEQDKNTQEVFAQVKQIYKTPPIKDFGGFNFSQILPDPSKPSKRSFIEDLLFNKVTLADAGFIKQYGDCLGDIAARDLICAQKFNGLTVLPPLLTDEMIAQYTSALLAGTITSGWTFGAGAALQIPFAMQMAYRFNGIGVTQCVLYENQKLIANQFNSAIGKIQDSLSSTASALGKLQDVVNQNAQALNTLVKQLSSNFGAISSVLNDILSRLDKVEAEVQIDRLITGRLQSLQTYVTQQLIRAAEIRASANLAATKMSECVLGQSKRVDFCGKGYHLMSFPQSAPHGVVFLHVTYVPAQEKNFTTAPAICHDGKAHFPREGVFVSNGTHWFVTQRNFYEPQIITTDNTFVCGNCDVVIGIVNNTVYDPLQPELDSFKEELDKYFKNHTSPDVDLGDISGINASVVNIQKEIDRLNEVAKNLNESLIDLQELGKYEQYIKGGGGSDIIKLLNEQVNKEMQSSNLYMSMSSWCYTHSLDGAGLFLFDHAAEEYEHAKKLIIFLNENNVPVQLTSISAPEHKFEGLTQIFQKAYEHEQHISESINNIVDHAIKSKDHATFNFLQWYVAEQHEEEVLFKDILDKIELIGNENHGLYLADQYVKGIAKSRKS

SEQ ID NO: 13668 - protein, 1379 aa, Artificial Sequence
  SARS-CoV-2/Sweden/01/2020__EPI_ISL_411951 spike protein (1-1211)(N914C_S1123C) Ferritin construct
MFVFLVLLPLVSSQCVNLTTRTQLPPAYTNSFTRGVYYPDKVFRSSVLHSTQDLFLPFFSNVTWFHAIHVSGTNGTKRFDNPVLPFNDGVYFASTEKSNIIRGWIFGTTLDSKTQSLLIVNNATNVVIKVCEFQFCNDPFLGVYYHKNNKSWMESEFRVYSSANNCTFEYVSQPFLMDLEGKQGNFKNLREFVFKNIDGYFKIYSKHTPINLVRDLPQGFSALEPLVDLPIGINITRFQTLLALHRSYLTPGDSSSGWTAGAAAYYVGYLQPRTFLLKYNENGTITDAVDCALDPLSETKCTLKSFTVEKGIYQTSNFRVQPTESIVRFPNITNLCPFGEVFNATRFASVYAWNRKRISNCVADYSVLYNSASFSTFKCYGVSPTKLNDLCFTNVYADSFVIRGDEVRQIAPGQTGKIADYNYKLPDDFTGCVIAWNSNNLDSKVGGNYNYLYRLFRKSNLKPFERDISTEIYQAGSTPCNGVEGFNCYFPLQSYGFQPTNGVGYQPYRVVVLSFELLHAPATVCGPKKSTNLVKNKCVNFNFNGLTGTGVLTESNKKFLPFQQFGRDIADTTDAVRDPQTLEILDITPCSFGGVSVITPGTNTSNQVAVLYQDVNCTEVPVAIHADQLTPTWRVYSTGSNVFQTRAGCLIGAEHVNNSYECDIPIGAGICASYQTQTNSPRRARSVASQSIIAYTMSLGAENSVAYSNNSIAIPTNFTISVTTEILPVSMTKTSVDCTMYICGDSTECSNLLLQYGSFCTQLNRALTGIAVEQDKNTQEVFAQVKQIYKTPPIKDCGGFNFSQILPDPSKPSKRSFIEDLLFNKVTLADAGFIKQYGDCLGDIAARDLICAQKFNGLTVLPPLLTDEMIAQYTSALLAGTITSGWTFGAGAALQIPFAMQMAYRFNGIGVTQCVLYENQKLIANQFNSAIGKIQDSLSSTASALGKLQDVVNQNAQALNTLVKQLSSNFGAISSVLNDILSRLDKVEAEVQIDRLITGRLQSLQTYVTQQLIRAAEIRASANLAATKMSECVLGQSKRVDFCGKGYHLMSFPQSAPHGVVFLHVTYVPAQEKNFTTAPAICHDGKAHFPREGVFVSNGTHWFVTQRNFYEPQIITTDNTFVCGNCDVVIGIVNNTVYDPLQPELDSFKEELDKYFKNHTSPDVDLGDISGINASVVNIQKEIDRLNEVAKNLNESLIDLQELGKYEQYIKGGGGSDIIKLLNEQVNKEMQSSNLYMSMSSWCYTHSLDGAGLFLFDHAAEEYEHAKKLIIFLNENNVPVQLTSISAPEHKFEGLTQIFQKAYEHEQHISESINNIVDHAIKSKDHATFNFLQWYVAEQHEEEVLFKDILDKIELIGNENHGLYLADQYVKGIAKSRKS

SEQ ID NO: 13669 - protein, 1379 aa, Artificial Sequence
  SARS-CoV-2/Tianmen/HBCDC-HB-07/2020__EPI_ISL_412983 spike protein (1-1211)(N914C_S1123C) Ferritin construct
MFVFLVLLPLVSSQCVNLTTRTQLPPAYTNSFTRGVYYPDKVFRSSVLHSTQDLFLPFFSNVTWFHAIHVSGTNGTKRFDNPVLPFNDGVYFASTEKSNIIRGWIFGTTLDSKTQSLLIVNNATNVVIKVCEFQFCNDPFLGVYYHKNNKSWMESEFRVYSSANNCTFEYVSQPFLMDLEGKQGNFKNLREFVFKNIDGYFKIYSKHTPINLVRDLPQGFSALEPLVDLPIGINITRFQTLLALHRSYLTPGDSSSGWTAGAAAYYVGYLQPRTFLLKYNENGTITDAVDCALDPLSETKCTLKSFTVEKGIYQTSNFRVQPTESIVRFPNITNLCPFGEVFNATRFASVYAWNRKRISNCVADYSVLYNSASFSTFKCYGVSPTKLNDLCFTNVYADSFVIRGDEVRQIAPGQTGKIADYNYKLPDDFTGCVIAWNSNNLDSKVGGNYNYLYRLFRKSNLKPFERDISTEIYQAGSTPCNGVEGFNCYFPLQSYGFQPTNGVGYQPYRVVVLSFELLHAPATVCGPKKSTNLVKNKCVNFNFNGLTGTGVLTESNKKFLPFQQFGRDIADTTDAVRDPQTLEILDITPCSFGGVSVITPGTNTSNQVAVLYQDLNCTEVPVAIHADQLTPTWRVYSTGSNVFQTRAGCLIGAEHVNNSYECDIPIGAGICASYQTQTNSPRRARSVASQSIIAYTMSLGAENSVAYSNNSIAIPTNFTISVTTEILPVSMTKTSVDCTMYICGDSTECSNLLLQYGSFCTQLNRALTGIAVEQDKNTQEVFAQVKQIYKTPPIKDFGGFNFSQILPDPSKPSKRSFIEDLLFNKVTLADAGFIKQYGDCLGDIAARDLICAQKFNGLTVLPPLLTDEMIAQYTSALLAGTITSGWTFGAGAALQIPFAMQMAYRFNGIGVTQCVLYENQKLIANQFNSAIGKIQDSLSSTASALGKLQDVVNQNAQALNTLVKQLSSNFGAISSVLNDILSRLDKVEAEVQIDRLITGRLQSLQTYVTQQLIRAAEIRASANLAATKMSECVLGQSKRVDFCGKGYHLMSFPQSAPHGVVFLHVTYVPAQEKNFTTAPAICHDGKAHFPREGVFVSNGTHWFVTQRNFYEPQIITTDNTFVCGNCDVVIGIVNNTVYDPLQPELDSFKEELDKYFKNHTSPDVDLGDISGINASVVNIQKEIDRLNEVAKNLNESLIDLQELGKYEQYIKGGGGSDIIKLLNEQVNKEMQSSNLYMSMSSWCYTHSLDGAGLFLFDHAAEEYEHAKKLIIFLNENNVPVQLTSISAPEHKFEGLTQIFQKAYEHEQHISESINNIVDHAIKSKDHATFNFLQWYVAEQHEEEVLFKDILDKIELIGNENHGLYLADQYVKGIAKSRKS

SEQ ID NO: 13670 - protein, 1379 aa, Artificial Sequence
  SARS-CoV-2/Hong Kong/case42_VM20002493/2020__EPI_ISL_414527 spike protein (1-1211)(N914C_S1123C) Ferritin construct
MFVFLVLLPLVSSQCVNLTTRTQLPPAYTNSFTRGVYYPDKVFRSSVLHSTQDLFLPFFSNVTWFHAIHVSGTNGTKRFDNPVLPFNDGVYFASTEKSNIIRGWIFGTTLDSKTQSLLIVNNATNVVIKVCEFQFCNDPFLGVYYHKNNKSWMESEFRVYSSANNCTFEYVSQPFLMDLEGKQGNFKNLREFVFKNIDGYFKIYSKHTPINLVRDLPQGFSALEPLVDLPIGINITRFQTLLALHRSYLTPGDSSSGWTAGAAAYYVGYLQPRTFLLKYNENGTITDAVDCALDPLSETKCTLKSFTVEKGIYQTSNFRVQPTESIVRFPNITNLCPFGEVFNATRFASVYAWNRKRISNCVADYSVLYNSASFSTFKCYGVSPTKLNDLCFTNVYADSFVIRGDEVRQIAPGQTGKIADYNYKLPDDFTGCVIAWNSNNLDSKVGGNYNYLYRLFRKSNLKPFERDISTEIYQAGSTPCNGVEGFNCYFPLQSYGFQPTNGVGYQPYRVVVLSFELLHAPATVCGPKKSTNLVKNKCVNFNFNGLTGTGVLTESNKKFLPFQQFGRDIADTTDAVRDPQTLEILDITPCSFGGVSVITPGTNTSNQVAVLYQDVNCTEVPVAIHADQLTPTWRVYSTGSNVFQTRAGCLIGAEHVNNSYECDIPIGAGICASYQTQTNSPRRARSVASQSIIAYTMSLGAENSVAYSNNSIAIPTNFAISVTTEILPVSMTKTSVDCTMYICGDSTECSNLLLQYGSFCTQLNRALTGIAVEQDKNTQEVFAQVKQIYKTPPIKDFGGFNFSQILPDPSKPSKRSFIEDLLFNKVTLADAGFIKQYGDCLGDIAARDLICAQKFNGLTVLPPLLTDEMIAQYTSALLAGTITSGWTFGAGAALQIPFAMQMAYRFNGIGVTQCVLYENQKLIANQFNSAIGKIQDSLSSTASALGKLQDVVNQNAQALNTLVKQLSSNFGAISSVLNDILSRLDKVEAEVQIDRLITGRLQSLQTYVTQQLIRAAEIRASANLAATKMSECVLGQSKRVDFCGKGYHLMSFPQSAPHGVVFLHVTYVPAQEKNFTTAPAICHDGKAHFPREGVFVSNGTHWFVTQRNFYEPQIITTDNTFVCGNCDVVIGIVNNTVYDPLQPELDSFKEELDKYFKNHTSPDVDLGDISGINASVVNIQKEIDRLNEVAKNLNESLIDLQELGKYEQYIKGGGGSDIIKLLNEQVNKEMQSSNLYMSMSSWCYTHSLDGAGLFLFDHAAEEYEHAKKLIIFLNENNVPVQLTSISAPEHKFEGLTQIFQKAYEHEQHISESINNIVDHAIKSKDHATFNFLQWYVAEQHEEEVLFKDILDKIELIGNENHGLYLADQYVKGIAKSRKS

SEQ ID NO: 13671 - protein, 1379 aa, Artificial Sequence
  SARS-CoV-2/USA/CruiseA-23/2020__EPI_ISL_414482 spike protein (1-1211)(N914C_S1123C) Ferritin construct
MFVFLVLLPLVSSQCVNLTTRTQLPPAYTNSFTRGVYYPDKVFRSSVLHSTQDLFLPFFSNVTWFHAIHVSGTNGTKRFDNPVLPFNDGVYFASTEKSNIIRGWIFGTTLDSKTQSLLIVNNATNVVIKVCEFQFCNDPFLGVYYHKNNKSWMESEFRVYSSANNCTFEYVSQPFLMDLEVKQGNFKNLREFVFKNIDGYFKIYSKHTPINLVRDLPQGFSALEPLVDLPIGINITRFQTLLALHRSYLTPGDSSSGWTAGAAAYYVGYLQPRTFLLKYNENGTITDAVDCALDPLSETKCTLKSFTVEKGIYQTSNFRVQPTESIVRFPNITNLCPFGEVFNATRFASVYAWNRKRISNCVADYSVLYNSASFSTFKCYGVSPTKLNDLCFTNVYADSFVIRGDEVRQIAPGQTGKIADYNYKLPDDFTGCVIAWNSNNLDSKVGGNYNYLYRLFRKSNLKPFERDISTEIYQAGSTPCNGVEGFNCYFPLQSYGFQPTNGVGYQPYRVVVLSFELLHAPATVCGPKKSTNLVKNKCVNFNFNGLTGTGVLTESNKKFLPFQQFGRDIADTTDAVRDPQTLEILDITPCSFGGVSVITPGTNTSNQVAVLYQDVNCTEVPVAIHADQLTPTWRVYSTGSNVFQTRAGCLIGAEHVNNSYECDIPIGAGICASYQTQTNSPRRARSVASQSIIAYTMSLGAENSVAYSNNSIAIPTNFTISVTTEILPVSMTKTSVDCTMYICGDSTECSNLLLQYGSFCTQLNRALTGIAVEQDKNTQEVFAQVKQIYKTPPIKDFGGFNFSQILPDPSKPSKRSFIEDLLFNKVTLADAGFIKQYGDCLGDIAARDLICAQKFNGLTVLPPLLTDEMIAQYTSALLAGTITSGWTFGAGAALQIPFAMQMAYRFNGIGVTQCVLYENQKLIANQFNSAIGKIQDSLSSTASALGKLQDVVNQNAQALNTLVKQLSSNFGAISSVLNDILSRLDKVEAEVQIDRLITGRLQSLQTYVTQQLIRAAEIRASANLAATKMSECVLGQSKRVDFCGKGYHLMSFPQSAPHGVVFLHVTYVPAQEKNFTTAPAICHDGKAHFPREGVFVSNGTHWFVTQRNFYEPQIITTDNTFVCGNCDVVIGIVNNTVYDPLQPELDSFKEELDKYFKNHTSPDVDLGDISGINASVVNIQKEIDRLNEVAKNLNESLIDLQELGKYEQYIKGGGGSDIIKLLNEQVNKEMQSSNLYMSMSSWCYTHSLDGAGLFLFDHAAEEYEHAKKLIIFLNENNVPVQLTSISAPEHKFEGLTQIFQKAYEHEQHISESINNIVDHAIKSKDHATFNFLQWYVAEQHEEEVLFKDILDKIELIGNENHGLYLADQYVKGIAKSRKS

SEQ ID NO: 13672 - protein, 1379 aa, Artificial Sequence
  SARS-CoV-2/Hong Kong/case85_VM20002868/2020__EPI_ISL_414519 spike protein (1-1211)(N914C_S1123C) Ferritin construct
MFVFLVLVPLVSSQCVNLTTRTQLPPAYTNSFTRGVYYPDKVFRSSVLHSTQDLFLPFFSNVTWFHAIHVSGTNGTKRFDNPVLPFNDGVYFASTEKSNIIRGWIFGTTLDSKTQSLLIVNNATNVVIKVCEFQFCNDPFLGVYYHKNNKSWMESEFRVYSSANNCTFEYVSQPFLMDLEGKQGNFKNLREFVFKNIDGYFKIYSKHTPINLVRDLPQGFSALEPLVDLPIGINITRFQTLLALHRSYLTPGDSSSGWTAGAAAYYVGYLQPRTFLLKYNENGTITDAVDCALDPLSETKCTLKSFTVEKGIYQTSNFRVQPTESIVRFPNITNLCPFGEVFNATRFASVYAWNRKRISNCVADYSVLYNSASFSTFKCYGVSPTKLNDLCFTNVYADSFVIRGDEVRQIAPGQTGKIADYNYKLPDDFTGCVIAWNSNNLDSKVGGNYNYLYRLFRKSNLKPFERDISTEIYQAGSTPCNGVEGFNCYFPLQSYGFQPTNGVGYQPYRVVVLSFELLHAPATVCGPKKSTNLVKNKCVNFNFNGLTGTGVLTESNKKFLPFQQFGRDIADTTDAVRDPQTLEILDITPCSFGGVSVITPGTNTSNQVAVLYQDVNCTEVPVAIHADQLTPTWRVYSTGSNVFQTRAGCLIGAEHVNNSYECDIPIGAGICASYQTQTNSPRRARSVASQSIIAYTMSLGAENSVAYSNNSIAIPTNFTISVTTEILPVSMTKTSVDCTMYICGDSTECSNLLLQYGSFCTQLNRALTGIAVEQDKNTQEVFAQVKQIYKTPPIKDFGGFNFSQILPDPSKPSKRSFIEDLLFNKVTLADAGFIKQYGDCLGDIAARDLICAQKFNGLTVLPPLLTDEMIAQYTSALLAGTITSGWTFGAGAALQIPFAMQMAYRFNGIGVTQCVLYENQKLIANQFNSAIGKIQDSLSSTASALGKLQDVVNQNAQALNTLVKQLSSNFGAISSVLNDILSRLDKVEAEVQIDRLITGRLQSLQTYVTQQLIRAAEIRASANLAATKMSECVLGQSKRVDFCGKGYHLMSFPQSAPHGVVFLHVTYVPAQEKNFTTAPAICHDGKAHFPREGVFVSNGTHWFVTQRNFYEPQIITTDNTFVCGNCDVVIGIVNNTVYDPLQPELDSFKEELDKYFKNHTSPDVDLGDISGINASVVNIQKEIDRLNEVAKNLNESLIDLQELGKYEQYIKGGGGSDIIKLLNEQVNKEMQSSNLYMSMSSWCYTHSLDGAGLFLFDHAAEEYEHAKKLIIFLNENNVPVQLTSISAPEHKFEGLTQIFQKAYEHEQHISESINNIVDHAIKSKDHATFNFLQWYVAEQHEEEVLFKDILDKIELIGNENHGLYLADQYVKGIAKSRKS

SEQ ID NO: 13673 - protein, 1379 aa, Artificial Sequence; identical to SEQ ID NO: 13663
  SARS-CoV-2/England/200990660/2020__EPI_ISL_414523 spike protein (1-1211)(N914C_S1123C) Ferritin construct

SEQ ID NO: 13674 - protein, 1379 aa, Artificial Sequence
  SARS-CoV-2/Australia/NSW09/2020__EPI_ISL_413595 spike protein (1-1211)(N914C_S1123C) Ferritin construct
MFVFLVLLPLVSSQCVNLTTRTQLPPAYTNSFTRGVYYPDKVFRSSVLHSTQDLFLPFFSNVTWFHAIHVSGTNGTKRFDNPVLPFNDGVYFASTEKSNIIRGWIFGTTLDSKTQSLLIVNNATNVVIKVCEFQFCNDPFLGVYYHKNNKSWMESEFRVYSSANNCTFEYVSQPFLMDLEGKQGNFKNLREFVFKNIDGYFKIYSKHTPINLVRDLPQGFSALEPLVDLPIGINITRFQTLLALHRSYLTPGDSSSGWTAGAAAYYVGYLQPRTFLLKYNENGTITDAVDCALDPLSETKCTLKSFTVEKGIYQTSNFRVQPTESIVRFPNITNLCPFGEVFNATRFASVYAWNRKRISNCVADYSVLYNSASFSTFKCYGVSPTKLNDLCFTNVYADSFVIRGDEVRQIAPGQTGKIADYNYKLPDDFTGCVIAWNSNNLDSKVGGNYNYLYRLFRKSNLKPFERDISTEIYQAGSTPCNGVEGFNCYFPLQSYGFQPTNGVGYQPYRVVVLSFELLHAPATVCGPKKSTNLVKNKCVNFNFNGLTGTGVLTESNKKFLPFQQFGRDIADTTDAVRDPQTLEILDITPCSFGGVSVITPGTNTSNQVAVLYQDVNCTEVPVAIHADQLTPTWRVYSTGSNVFQTRAGCLIGAEHVNNSYECDIPIGAGICASYQTQTNSPRRARSVASQSIIAYTMSLGAENSVAYSNNSIAIPTNFTISVTTEILPVSMTKTSVDCTMYICGDSTECSNLLLQYGSFCTQLNRALTGIAVEQDKNTQEVFAQVKQIYKTPPIKDFGGFNFSQILPDPSKPSKRSFIEDLLFNKVTLADAGFIKQYGDCLGDIAARDLICAQKFNGLTVLPPLLTDEMIAQYTSALLAGTITSGWTFGAGAALQIPFAMQMAYRFNGIGVTQCVLYENQKLIANQFNSAIGKIQDSLSFTASALGKLQDVVNQNAQALNTLVKQLSSNFGAISSVLNDILSRLDKVEAEVQIDRLITGRLQSLQTYVTQQLIRAAEIRASANLAATKMSECVLGQSKRVDFCGKGYHLMSFPQSAPHGVVFLHVTYVPAQEKNFTTAPAICHDGKAHFPREGVFVSNGTHWFVTQRNFYEPQIITTDNTFVCGNCDVVIGIVNNTVYDPLQPELDSFKEELDKYFKNHTSPDVDLGDISGINASVVNIQKEIDRLNEVAKNLNESLIDLQELGKYEQYIKGGGGSDIIKLLNEQVNKEMQSSNLYMSMSSWCYTHSLDGAGLFLFDHAAEEYEHAKKLIIFLNENNVPVQLTSISAPEHKFEGLTQIFQKAYEHEQHISESINNIVDHAIKSKDHATFNFLQWYVAEQHEEEVLFKDILDKIELIGNENHGLYLADQYVKGIAKSRKS

SEQ ID NO: 13675 - protein, 1379 aa, Artificial Sequence; identical to SEQ ID NO: 13655
  SARS-CoV-2/Australia/NSW10/2020__EPI_ISL_413596 spike protein (1-1211)(N914C_S1123C) Ferritin construct

SEQ ID NO: 13676 - protein, 1379 aa, Artificial Sequence
  SARS-CoV-2/Switzerland/1000477797/2020__EPI_ISL_413023 spike protein (1-1211)(N914C_S1123C) Ferritin construct
MFVFLVLLPLVSSQCVNLTTRTQLPPAYTNSFTRGVYYPDKVFRSSVLHSTQDLFLPFFSNVTWFHAIHVSGTNGTKRFDNPVLPFNDGVYFASTEKSNIIRGWIFGTTLDSKTQSLLIVNNATNVVIKVCEFQFCNDPFLGVYYHKNNKSWMESEFRVYSSANNCTFEYVSQPFLMDLEGKQGNFKNLREFVFKNIDGYFNIYSKHTPINLVRDLPQGFSALEPLVDLPIGINITRFQTLLALHRSYLTPGDSSSGWTAGAAAYYVGYLQPRTFLLKYNENGTITDAVDCALDPLSETKCTLKSFTVEKGIYQTSNFRVQPTESIVRFPNITNLCPFGEVFNATRFASVYAWNRKRISNCVADYSVLYNSASFSTFKCYGVSPTKLNDLCFTNVYADSFVIRGDEVRQIAPGQTGKIADYNYKLPDDFTGCVIAWNSNNLDSKVGGNYNYLYRLFRKSNLKPFERDISTEIYQAGSTPCNGVEGFNCYFPLQSYGFQPTNGVGYQPYRVVVLSFELLHAPATVCGPKKSTNLVKNKCVNFNFNGLTGTGVLTESNKKFLPFQQFGRDIADTTDAVRDPQTLEILDITPCSFGGVSVITPGTNTSNQVAVLYQGVNCTEVPVAIHADQLTPTWRVYSTGSNVFQTRAGCLIGAEHVNNSYECDIPIGAGICASYQTQTNSPRRARSVASQSIIAYTMSLGAENSVAYSNNSIAIPTNFTISVTTEILPVSMTKTSVDCTMYICGDSTECSNLLLQYGSFCTQLNRALTGIAVEQDKNTQEVFAQVKQIYKTPPIKDFGGFNFSQILPDPSKPSKRSFIEDLLFNKVTLADAGFIKQYGDCLGDIAARDLICAQKFNGLTVLPPLLTDEMIAQYTSALLAGTITSGWTFGAGAALQIPFAMQMAYRFNGIGVTQCVLYENQKLIANQFNSAIGKIQDSLSSTASALGKLQDVVNQNAQALNTLVKQLSSNFGAISSVLNDILSRLDKVEAEVQIDRLITGRLQSLQTYVTQQLIRAAEIRASANLAATKMSECVLGQSKRVDFCGKGYHLMSFPQSAPHGVVFLHVTYVPAQEKNFTTAPAICHDGKAHFPREGVFVSNGTHWFVTQRNFYEPQIITTDNTFVCGNCDVVIGIVNNTVYDPLQPELDSFKEELDKYFKNHTSPDVDLGDISGINASVVNIQKEIDRLNEVAKNLNESLIDLQELGKYEQYIKGGGGSDIIKLLNEQVNKEMQSSNLYMSMSSWCYTHSLDGAGLFLFDHAAEEYEHAKKLIIFLNENNVPVQLTSISAPEHKFEGLTQIFQKAYEHEQHISESINNIVDHAIKSKDHATFNFLQWYVAEQHEEEVLFKDILDKIELIGNENHGLYLADQYVKGIAKSRKS

SEQ ID NO: 13677 - protein, 1379 aa, Artificial Sequence
  SARS-CoV-2/Belgium/BA-02291/2020__EPI_ISL_415159 spike protein (1-1211)(N914C_S1123C) Ferritin construct
MFVFLVLLPLVSSQCVNLTTRTQLPPAYTNSFTRGVYYPDKVFRSSVLHSTQDLFLPFFSNVTWFHAIHVSGTNGTKRFDNPVLPFNDGVYFASTEKSNIIRGWIFGTTLDSKTQSLLIVNNATNVVIKVCEFQFCNDPFLGVYYHKNNKSWMESEFRVYSSANNCTFEYVSQPFLMDLEGKQGNFKNLREFVFKNIDGYFKIYSKHTPINLVRDLPQGFSALEPLVDLPIGINITRFQTLLALHRSYLTPGDSSSGWTAGAAAYYVGYLQPRTFLLKYNENGTITDAVDCALDPLSETKCTLKSFTVEKGIYQTSNFRVQPTESIVRFPNITNLCPFGEVFNATRFASVYAWNRKRISNCVADYSVLYNSASFSTFKCYGVSPTKLNDLCFTNVYADSFVIRGDEVRQIAPGQTGKIADYNYKLPDDFTGCVIAWNSNNLDSKVGGNYNYLYRLFRRSNLKPFERDISTEIYQAGSTPCNGVEGFNCYFPLQSYGFQPTNGVGYQPYRVVVLSFELLPAPATVCGPKKSTNLVKNKCVNFNFNGLTGTGVLTESNKKFLPFQQFGRDIADTTDAVRDPQTLEILDITPCSFGGVSVITPGTNTSNQVAVLYQGVNCTEVPVAIHADQLTPTWRVYSTGSNVFQTRAGCLIGAEHVNNSYECDIPIGAGICASYQTQTNSPRRARSVASQSIIAYTMSLGAENSVAYSNNSIAIPTNFTISVTTEILPVSMTKTSVDCTMYICGDSTECSNLLLQYGSFCTQLNRALTGIAVEQDKNTQEVFAQVKQIYKTPPIKDFGGFNFSQILPDPSKPSKRSFIEDLLFNKVTLADAGFIKQYGDCLGDIAARDLICAQKFNGLTVLPPLLTDEMIAQYTSALLAGTITSGWTFGAGAALQIPFAMQMAYRFNGIGVTQCVLYENQKLIANQFNSAIGKIQDSLSSAAPALGKLQDVVNQNAQALNTLVKQLSSNFGAISSVLNDILSRLDKVEAEVQIDRLITGRLQSLQTYVTQQLIRAAEIRASANLAATKMSECVLGQSKRVDFCGKGYHLMSFPQSAPHGVVFLHVTYVPAQEKNFTTAPAICHDGKAHFPREGVFVSNGTHWFVTQRNFYEPQIITTDNTFVCGNCDVVIGIVNNTVYDPLQPELDSFKEELDKYFKNHTSPDVDLGDISGINASVVNIQKEIDRLNEVAKNLNESLIDLQELGKYEQYIKGGGGSDIIKLLNEQVNKEMQSSNLYMSMSSWCYTHSLDGAGLFLFDHAAEEYEHAKKLIIFLNENNVPVQLTSISAPEHKFEGLTQIFQKAYEHEQHISESINNIVDHAIKSKDHATFNFLQWYVAEQHEEEVLFKDILDKIELIGNENHGLYLADQYVKGIAKSRKS

SEQ ID NO: 13678 - protein, 1379 aa, Artificial Sequence
  SARS-CoV-2/USA/WA8-UW5/2020__EPI_ISL_413486 spike protein (1-1211)(N914C_S1123C) Ferritin construct
MFVFLVLLPLVSSQCVNLTTRTQLPPAYTNSFTRGVYYPDKVFRSSVLHSTQDLFLPFFSNVTWFHAIHVSGTNGTKRFDNPVLPFNDGVYFASTEKSNIIRGWIFGTTLDSKTQSLLIVNNATNVVIKVCEFQFCNDPFLGVYYHKNNKSWMESEFRVYSSANNCTFEYVSQPFLMDLEGKQGNFKNLREFVFKNIDGYFKIYSKHTPINLVRDLPQGFSALEPLVDLPIGINITRFQTLLALHRSYLTPGDSSSGWTAGAAAYYVGYLQPRTFLLKYNENGTITDAVDCALDPLSETKCTLKSFTVEKGIYQTSNFRVQPTESIVRFPNITNLCPFGEVFNATRFASVYAWNRKRISNCVADYSVLYNSASFSTFKCYGVSPTKLNDLCFTNVYADSFVIRGDEVRQIAPGQTGKIADYNYKLPDDFTGCVIAWNSNNLDSKVGGNYNYLYRLFRKSNLKPFERDISTEIYQAGSTPCNGVEGFNCYFPLQSYGFQPTNGVGYQPYRVVVLSFELLHAPATVCGPKKSTNLVKNKCVNFNFNGLTGTGVLTESNKKFLPFQQFGRDIADTTDAVRDPQTLEILDITPCSFGGVSVITPGTNTSNQVAVLYQDVNCTEVPVAIHADQLTPTWRVYSTGSNVFQTRAGCLIGAEYVNNSYECDIPIGAGICASYQTQTNSPRRARSVASQSIIAYTMSLGAENSVAYSNNSIAIPTNFTISVTTEILPVSMTKTSVDCTMYICGDSTECSNLLLQYGSFCTQLNRALTGIAVEQDKNTQEVFAQVKQIYKTPPIKDFGGFNFSQILPDPSKPSKRSFIEDLLFNKVTLADAGFIKQYGDCLGDIAARDLICAQKFNGLTVLPPLLTDEMIAQYTSALLAGTITSGWTFGAGAALQIPFAMQMAYRFNGIGVTQCVLYENQKLIANQFNSAIGKIQDSLSSTASALGKLQDVVNQNAQALNTLVKQLSSNFGAISSVLNDILSRLDKVEAEVQIDRLITGRLQSLQTYVTQQLIRAAEIRASANLAATKMSECVLGQSKRVDFCGKGYHLMSFPQSAPHGVVFLHVTYVPAQEKNFTTAPAICHDGKAHFPREGVFVSNGTHWFVTQRNFYEPQIITTDNTFVCGNCDVVIGIVNNTVYDPLQPELDSFKEELDKYFKNHTSPDVDLGDISGINASVVNIQKEIDRLNEVAKNLNESLIDLQELGKYEQYIKGGGGSDIIKLLNEQVNKEMQSSNLYMSMSSWCYTHSLDGAGLFLFDHAAEEYEHAKKLIIFLNENNVPVQLTSISAPEHKFEGLTQIFQKAYEHEQHISESINNIVDHAIKSKDHATFNFLQWYVAEQHEEEVLFKDILDKIELIGNENHGLYLADQYVKGIAKSRKS

SEQ ID NO: 13679 - protein, 1379 aa, Artificial Sequence
  SARS-CoV-2/England/20102000506/2020__EPI_ISL_415147 spike protein (1-1211)(N914C_S1123C) Ferritin construct
MFVFLVLLPLVSSQCVNLTTRTQLPPAYTNSFTRGVYYPDKVFRSSVLHSTQDLFLPFFSNVTWFHAIHVSGTNGTKRFDNPVLPFNDGVYFASTEKSNIIRGWIFGTTLDSKTQSLLIVNNATNVVIKVCEFQFCNDPFLGVYYHKNNKSWMESEFRVYSSANNCTFEYVSQPFLMDLEGKQGNFKNLREFVFKNIDGYFKIYSKHTPINLVRDLPQGFSALEPLVDLPIGINITRFQTLLALHRSYLTPGDSSSGWTAGAAAYYVGYLQPRTFLLKYNENGTITDAVDCALDPLSETKCTLKSFTVEKGIYQTSNFRVQPTESIVRFPNITNLCPFGEVFNATRFASVYAWNRKRISNCVADYSVLYNSASFSTFKCYGVSPTKLNDLCFTNVYADSFVIRGDEVRQIAPGQTGKIADYNYKLPDDFTGCVIAWNSNNLDSKVGGNYNYLYRLFRKSNLKPFERDISTEIYQAGSTPCNGVEGFNCYFPLQSYGFQPTNGVGYQPYRVVVLSFELLHAPATVCGPKKSTNLVKNKCVNFNFNGLTGTGVLTESNKKFLPFQQFGRDIADTTDAVRDPQTLEILDITPCSFGGVSVITPGTNTSNQVAVLYQGVNCTEVPVAIHADQLTPTWRVYSTGSNVFQTRAGCLIGAEHVNNSYECDIPIGAGICASYQTQTNSPRRARSVASQSIIAYTMSLGAENSVAYSNNSIAIPTNFTISVTTEILPVSMTKTSVDCTMYICGDSTECSNLLLQYGSFCTQLNRALTGIAVEQDKNTQEVFAQVKQIYKTPPIKDFGGFNFSQILPDPSKPSKRSFIEDLLFNKVTLADAGFIKQYGYCLGDIAARDLICAQKFNGLTVLPPLLTDEMIAQYTSALLAGTITSGWTFGAGAALQIPFAMQMAYRFNGIGVTQCVLYENQKLIANQFNSAIGKIQDSLSSTASALGKLQDVVNQNAQALNTLVKQLSSNFGAISSVLNDILSRLDKVEAEVQIDRLITGRLQSLQTYVTQQLIRAAEIRASANLAATKMSECVLGQSKRVDFCGKGYHLMSFPQSAPHGVVFLHVTYVPAQEKNFTTAPAICHDGKAHFPREGVFVSNGTHWFVTQRNFYEPQIITTDNTFVCGNCDVVIGIVNNTVYDPLQPELDSFKEELDKYFKNHTSPDVDLGDISGINASVVNIQKEIDRLNEVAKNLNESLIDLQELGKYEQYIKGGGGSDIIKLLNEQVNKEMQSSNLYMSMSSWCYTHSLDGAGLFLFDHAAEEYEHAKKLIIFLNENNVPVQLTSISAPEHKFEGLTQIFQKAYEHEQHISESINNIVDHAIKSKDHATFNFLQWYVAEQHEEEVLFKDILDKIELIGNENHGLYLADQYVKGIAKSRKS

SEQ ID NO: 13680 - protein, 1379 aa, Artificial Sequence
  SARS-CoV-2/Belgium/VAG-03013/2020__EPI_ISL_415155 spike protein (1-1211)(N914C_S1123C) Ferritin construct
MFVFLVLLPLVSSQCVNLTTRTQLPPAYTNSFTRGVYYPDKVFRSSVLHSTQDLFLPFFSNVTWFHAIHVSGTNGTKRFDNPVLPFNDGVYFASTEKSNIIRGWIFGTTLDSKTQSLLIVNNATNVVIKVCEFQFCNDPFLGVYYHKNNKSWMESEFRVYSSANNCTFEYVSQPFLMDLEGKQGNFKNLREFVFKNIDGYFKIYSKHTPINLVRDLPQGFSALEPLVDLPIGINITRFQTLLALHRSYLTPGDSSSGWTAGAAAYYVGYLQPRTFLLKYNENGTITDAVDCALDPLSETKCTLKSFTVEKGIYQTSNFRVQPTESIVRFPNITNLCPFGEVFNATRFASVYAWNRKRISNCVADYSVLYNSASFSTFKCYGVSPTKLNDLCFTNVYADSFVIRGDEVRQIAPGQTGKIADYNYKLPDDFTGCVIAWNSNNLDSKVGGNYNYLYRLFRKSNLKPFERDISTEIYQAGSTPCNGVEGFNCYFPLQSYGFQPTNGVGYQPYRVVVLSFELLHAPATVCGPKKSTNLVKNKCVNFNFNGLTGTGVLTESNKKFLPFQQFGRDIADTTDAVRDPQTLEILDITPCSFGGVSVITPGTNTSNQVAVLYQGVNCTEVPVAIHADQLTPTWRVYSTGSNVFQTRAGCLIGAEHVNNSYECDIPIGAGICASYQTQTNSPRRARSVASQSIIAYTMSLGAENSVAYSNNSIAIPTNFTISVTTEILPVSMTKTSVDCTMYICGDSTECSNLLLQYGSFCTQLNRALTGIAVEQDKNTQEVFAQVKQIYKTPPIKDFGGFNFSQILPDPSKPSKRSFIEDLLFNKVTLADAGFIKQYGDCLGDIAARDLICAQKFNGLTVLPPLLTDEMIAQYTSALLAGTITSGWTFGAGAALQIPFAMQMAYRFNGIGVTQCVLYENQKLIANQFNSAIGKIQDSLSSTATALGKLQDVVNQNAQALNTLVKQLSSNFGAISSVLNDILSRLDKVEAEVQIDRLITGRLQSLQTYVTQQLIRAAEIRASANLAATKMSECVLGQSKRVDFCGKGYHLMSFPQSAPHGVVFLHVTYVPAQEKNFTTAPAICHDGKAHFPREGVFVSNGTHWFVTQRNFYEPQIITTDNTFVCGNCDVVIGIVNNTVYDPLQPELDSFKEELDKYFKNHTSPDVDLGDISGINASVVNIQKEIDRLNEVAKNLNESLIDLQELGKYEQYIKGGGGSDIIKLLNEQVNKEMQSSNLYMSMSSWCYTHSLDGAGLFLFDHAAEEYEHAKKLIIFLNENNVPVQLTSISAPEHKFEGLTQIFQKAYEHEQHISESINNIVDHAIKSKDHATFNFLQWYVAEQHEEEVLFKDILDKIELIGNENHGLYLADQYVKGIAKSRKS

SEQ ID NO: 13681 - protein, 1379 aa, Artificial Sequence
  SARS-CoV-2/Belgium/BC-03016/2020__EPI_ISL_415157 spike protein (1-1211)(N914C_S1123C) Ferritin construct
MFVFLVLLPLVSSQCVNLTTRTQLPPAYTNSFTRGVYYPDKVFRSSVLHSTQDLFLPFFSNVTWFHAIHVSGTNGTKRFDNPVLPFNDGVYFASTEKSNIIRGWIFGTTLDSKTQSLLIVNNATNVVIKVCEFQFCNDPFLGVYYHKNNKSWMESEFRVYSSANNCTFEYVSQPFLMDLEGKQGNFKNLREFVFKNIDGYFKIYSKHTPINLVRDLPQGFSALEPLVDLPIGINITRFQTLLALHRSYLTPGDSSSGWTAGAAAYYVGYLQPRTFLLKYNENGTITDAVDCALDPLSETKCTLKSFTVEKGIYQTSNFRVQPTESIVRFPNITNLCPFGEVFNATRFASVYAWNRKRISNCVADYSVLYNSASFSTFKCYGVSPTKLNDLCFTNVYADSFVIRGDEVRQIAPGQTGKIADYNYKLPDDFTGCVIAWNSNNLDSKVGGNYNYLYRLFRKSNLKPFERDISTEIYQAGSTPCNGVEGFNCYFPLQSYGFQPTNGVGYQPYRVVVLSFELLHAPATVCGPKKSTNLVKNKCVNFNFNGLTGTGVLTESNKKFLPFQQFGRDIADTTDAVRDPQTLEILDITPCSFGGVSVITPGTNTSNQVAVLYQGVNCTEVPVAIHADQLTPTWRVYSTGSNVFQTRAGCLIGAEHVNNSYECDIPIGAGICASYQTQTNSPRRARSVASQSIIAYTMSLGAENSVAYSNNSIAIPTNFTISVTTEILPVSMTKTSVDCTMYICGDSTECSNLLLQYGSFCTQLNRALTGIAVEQDKNTQEVFAQVKQIYKTPPIKDFGGFNFSQILPDPSKPSKRSFIEDLLFNKVTLADAGFIKQYGDCLGDIAARDLICAQKFNGLTVLPPLLTDEMIAQYTSALLAGTITSGWTFGAGAALQIPFAMQMAYRFNGIGVTQCVLYENQKLIANQFNSAIGKIQDSLSSTAPALGKLQDVVNQNAQALNTLVKQLSSNFGAISSVLNDILSRLDKVEAEVQIDRLITGRLQSLQTYVTQQLIRAAEIRASANLAATKMSECVLGQSKRVDFCGKGYHLMSFPQSAPHGVVFLHVTYVPAQEKNFTTAPAICHDGKAHFPREGVFVSNGTHWFVTQRNFYEPQIITTDNTFVCGNCDVVIGIVNNTVYDPLQPELDSFKEELDKYFKNHTSPDVDLGDISGINASVVNIQKEIDRLNEVAKNLNESLIDLQELGKYEQYIKGGGGSDIIKLLNEQVNKEMQSSNLYMSMSSWCYTHSLDGAGLFLFDHAAEEYEHAKKLIIFLNENNVPVQLTSISAPEHKFEGLTQIFQKAYEHEQHISESINNIVDHAIKSKDHATFNFLQWYVAEQHEEEVLFKDILDKIELIGNENHGLYLADQYVKGIAKSRKS

SEQ ID NO: 13682 - protein, 1379 aa, Artificial Sequence
  SARS-CoV-2/Germany/BavPat3/2020__EPI_ISL_414521 spike protein (1-1211)(N914C_S1123C) Ferritin construct
MFVFLVLLPLVSSQCVNLTTRTQLPPAYTNSFTRGVYYPDKVFRSSVLHSTQDLFLPFFSNVTWFHAIHVSGTNGTKRFDNPVLPFNDGVYFASTEKSNIIRGWIFGTTLDSKTQSLLIVNNATNVVIKVCEFQFCNDPFLGVYYHKNNKSWMESEFRVYSSANNCTFEYVSQPFLMDLEGKQGNFKNLREFVFKNIDGYFKIYSKHTPINLVRDLPQGFSALEPLVDLPIGINITRFQTLLALHRSYLTPGDSSSGWTAGAAAYYVGYLQPRTFLLKYNENGTITDAVDCALDPLSETKCTLKSFTVEKGIYQTSNFRVQPTESIVRFPNITNLCPFGEVFNATRFASVYAWNRKRISNCVADYSVLYNSASFSTFKCYGVSPTKLNDLCFTNVYADSFVIRGDEVRQIAPGQTGKIADYNYKLPDDFTGCVIAWNSNNLDSKVGGNYNYLYRLFRKSNLKPFERDISTEIYQAGSTPCNGVEGFNCYFPLQSYGFQPTNGVGYQPYRVVVLSFELLHAPATVCGPKKSTNLVKNKCVNFNFNGLTGTGVLTESNKKFLPFQQFGRDIADTTDAVRDPQTLEILDITPCSFGGVSVITPGTNTSNQVAVLYQDVNCTEVPVAIHADQLTPTWRVYSTGSNVFQTRAGCLIGAEHVNNSYECDIPIGAGICASYQTQTNSPRRARSVASQSIIAYTMSLGAENSVAYSNNSIAIPTNFTISVTTEILPVSMTKTSVDCTMYICGDSTECSNLLLQYGSFCTQLNRALTGIAVEQDKNTQQVFAQVKQIYKTPPIKDFGGFNFSQILPDPSKPSKRSFIEDLLFNKVTLADAGFIKQYGDCLGDIAARDLICAQKFNGLTVLPPLLTDEMIAQYTSALLAGTITSGWTFGAGAALQIPFAMQMAYRFNGIGVTQCVLYENQKLIANQFNSAIGKIQDSLSSTASALGKLQDVVNQNAQALNTLVKQLSSNFGAISSVLNDILSRLDKVEAEVQIDRLITGRLQSLQTYVTQQLIRAAEIRASANLAATKMSECVLGQSKRVDFCGKGYHLMSFPQSAPHGVVFLHVTYVPAQEKNFTTAPAICHDGKAHFPREGVFVSNGTHWFVTQRNFYEPQIITTDNTFVCGNCDVVIGIVNNTVYDPLQPELDSFKEELDKYFKNHTSPDVDLGDISGINASVVNIQKEIDRLNEVAKNLNESLIDLQELGKYEQYIKGGGGSDIIKLLNEQVNKEMQSSNLYMSMSSWCYTHSLDGAGLFLFDHAAEEYEHAKKLIIFLNENNVPVQLTSISAPEHKFEGLTQIFQKAYEHEQHISESINNIVDHAIKSKDHATFNFLQWYVAEQHEEEVLFKDILDKIELIGNENHGLYLADQYVKGIAKSRKS

SEQ ID NO: 13683 - protein, 1379 aa, Artificial Sequence
  SARS-CoV-2/France/HF1805/2020__EPI_ISL_414628 spike protein (1-1211)(N914C_S1123C) Ferritin construct
MFVFLVLLPLVSSQCVNLTTRTQLPPAYTNSFTRGVYYPDKVFRSSVLHSTQDLFLPFFSNVTWFHAIHVSGTNGTKRFDNPVLPFNDGVYFASTEKSNIIRGWIFGTTLDSKTQSLLIVNNATNVVIKVCEFQFCNDPFLGVYYHKNNKSWMESEFRVYSSANNCTFEYVSQPFLMDLEGKQGNFKNLREFVFKNIDGYFKIYSKHTPINLVRDLPQGFSALEPLVDLPIGINITRFQTLLALHRSYLTPGDSSSGWTAGAAAYYVGYLQPRTFLLKYNENGTITDAVDCALDPLSETKCTLKSFTVEKGIYQTSNFRVQPTESIVRFPNITNLCPFGEVFNATRFASVYAWNRKRISNCVADYSVLYNSASFSTFKCYGVSPTKLNDLCFTNVYADSFVIRGDEVRQIAPGQTGKIADYNYKLPDDFTGCVIAWNSNNLDSKVGGNYNYLYRLFRKSNLKPFERDISTEIYQAGSTPCNGVEGFNCYFPLQSYGFQPTNGVGYQPYRVVVLSFELLHAPATVCGPKKSTNLVKNKCVNFNFNGLTGTGVLTESNKKFLPFQQFGRDIADTTDAVRDPQTLEILDITPCSFGGVSVITPGTNTSNQVAVLYQGVNCTEVPVAIHADQLTPTWRVYSTGSNVFQTRAGCLIGAEHVNNSYECDIPIGAGICASYQTQTNSPRRARSVASQSIIAYTMSLGAENSVAYSNNSIAIPTNFTISVTTEILPVSMTKTSVDCTMYICGDSTECSNLLLQYGSFCTQLNRALTGIAVEQDKNTQEVFAQVKQIYKTPPIKDFGGFNFSQILPDPSKPSKRSFIEDLLFNKVTLADAGFIKQYGDCLGDIAARDLICAQKFNGLTVLPPLLTDEMIAQYTSALLAGTITSGWTFGAGAALQIPFAMQMAYRFNGIGVTQCVLYENQKLIANQFNSAIGKIQDSLSSTASALGKLQDVVNQNAQALNTLVKQLSSNFGAISSVLNDILSRLDKVEAEVQIDRLITGRLQSLQTYVTQQLIRAAEIRASANLAATKMSECVLGQSKRVDFCGKGYHLMSFPQSAPHGVVFLHVTYVPAQEKNFTTAPAICHDGKAHFPREGVFVSNGTHWFVTQRNFYEPQIITTDNTFVCGNCDVVIGVVNNTVYDPLQPELDSFKEELDKYFKNHTSPDVDLGDISGINASVVNIQKEIDRLNEVAKNLNESLIDLQELGKYEQYIKGGGGSDIIKLLNEQVNKEMQSSNLYMSMSSWCYTHSLDGAGLFLFDHAAEEYEHAKKLIIFLNENNVPVQLTSISAPEHKFEGLTQIFQKAYEHEQHISESINNIVDHAIKSKDHATFNFLQWYVAEQHEEEVLFKDILDKIELIGNENHGLYLADQYVKGIAKSRKS

SEQ ID NO: 13684 - protein, 1379 aa, Artificial Sequence
  SARS-CoV-2/Netherlands/ZuidHolland_9/2020__EPI_ISL_414445 spike protein (1-1211)(N914C_S1123C) Ferritin construct
MFVFLVLLPLVSSQCVNLTTRTQLPPAYTNSFTRGVYYPDKVFRSSVLHSTQDLFLPFFSNVTWFHAIHVSGTNGTKRFDNPVLPFNDGVYFASTEKSNIIRGWIFGTTLDSKTQSLLIVNNATNVVIKVCEFQFCNDPFLGVYYHKNNKSWMESEFRVYSSANNCTFEYVSQPFLMDLEGKQGNFKNLREFVFKNIDGYFKIYSKHTPINLVRDLPQGFSALEPLVDLPIGINITRFQTLLALHRSYLTPGDSSSGWTAGAAAYYVGYLQPRTFLLKYNENGTITDAVDCALDPLSETKCTLKSFTVEKGIYQTSNFRVQPTESIVRFPNITNLCPFGEVFNATRFASVYAWNRKRISNCVADYSVLYNSASFSTFKCYGVSPTKLNDLCFTNVYADSFVIRGDEVRQIAPGQTGKIADYNYKLPDDFTGCVIAWNSNNLDSKVGGNYNYLYRLFRKSNLKPFERDISTEIYQAGSTPCNGVEGFNCYFPLQSYGFQPTNGVGYQPYRVVVLSFELLHAPATVCGPKKSTNLVKNKCVNFNFNGLTGTGVLTESNKKFLPFQQFGRDIADTTDAVRDPQTLEILDITPCSFGGVSVITPGTNTSNQVAVLYQGVNCTEVPVAIHADQLTPTWRVYSTGSNVFQTRAGCLIGAEHVNNSYECDIPIGAGICASYQTQTNSPRRARSVASQSIIAYTMSLGAENSVAYSNNSIAIPTNFTISVTTEILPVSMTKTSVDCTMYICGDSTECSNLLLQYGSFCTQLNRALTGIAVEQDKNTQEVFAQVKQIYKTPPIKDFGGFNFSQILPDPSKPSKRSFIEDLLFNKVTLADAGFIKQYGDCLGDIAARDLICVQKFNGLTVLPPLLTDEMIAQYTSALLAGTITSGWTFGAGAALQIPFAMQMAYRFNGIGVTQCVLYENQKLIANQFNSAIGKIQDSLSSTASALGKLQDVVNQNAQALNTLVKQLSSNFGAISSVLNDILSRLDKVEAEVQIDRLITGRLQSLQTYVTQQLIRAAEIRASANLAATKMSECVLGQSKRVDFCGKGYHLMSFPQSAPHGVVFLHVTYVPAQEKNFTTAPAICHDGKAHFPREGVFVSNGTHWFVTQRNFYEPQIITTDNTFVCGNCDVVIGIVNNTVYDPLQPELDSFKEELDKYFKNHTSPDVDLGDISGINASVVNIQKEIDRLNEVAKNLNESLIDLQELGKYEQYIKGGGGSDIIKLLNEQVNKEMQSSNLYMSMSSWCYTHSLDGAGLFLFDHAAEEYEHAKKLIIFLNENNVPVQLTSISAPEHKFEGLTQIFQKAYEHEQHISESINNIVDHAIKSKDHATFNFLQWYVAEQHEEEVLFKDILDKIELIGNENHGLYLADQYVKGIAKSRKS

SEQ ID NO: 13685 - protein, 1379 aa, Artificial Sequence
  SARS-CoV-2/Finland/FIN03032020A/2020__EPI_ISL_413602 spike protein (1-1211)(N914C_S1123C) Ferritin construct
MFVFLVLLPLVSSQCVNLTTRTQLPPAYTNSFTRGVYYPDKVFRSSVLHSTQDLFLPFFSNVTWFHAIHVSGTNGTKRFDNPVLPFNDGVYFASTEKSNIIRGWIFGTTLDSKTQSLLIVNNATNVVIKVCEFQFCNDPFLGVYYHKNNKSWMESEFRVYSSANNCTFEYVSQPFLMDLEGKQGNFKNLREFVFKNIDGYFKIYSKHTPINLVRDLPQGFSALEPLVDLPIGINITRFQTLLALHRSYLTPGDSSSGWTAGAAAYYVGYLQPRTFLLKYNENGTITDAVDCALDPLSETKCTLKSFTVEKGIYQTSNFRVQPTESIVRFPNITNLCPFGEVFNATRFASVYAWNRKRISNCVADYSVLYNSASFSTFKCYGVSPTKLNDLCFTNVYADSFVIRGDEVRQIAPGQTGKIADYNYKLPDDFTGCVISWNSNNLDSKVGGNYNYLYRLFRKSNLKPFERDISTEIYQAGSTPCNGVEGFNCYFPLQSYGFQPTNGVGYQPYRVVVLSFELLHAPATVCGPKKSTNLVKNKCVNFNFNGLTGTGVLTESNKKFLPFQQFGRDIADTTDAVRDPQTLEILDITPCSFGGVSVITPGTNTSNQVAVLYQGVNCTEVPVAIHADQLTPTWRVYSTGSNVFQTRAGCLIGAEHVNNSYECDIPIGAGICASYQTQTNSPRRARSVASQSIIAYTMSLGAENSVAYSNNSIAIPTNFTISVTTEILPVSMTKTSVDCTMYICGDSTECSNLLLQYGSFCTQLNRALTGIAVEQDKNTQEVFAQVKQIYKTPPIKDFGGFNFSQILPDPSKPSKRSFIEDLLFNKVTLADAGFIKQYGDCLGDIAARDLICAQKFNGLTVLPPLLTDEMIAQYTSALLAGTITSGWTFGAGAALQIPFAMQMAYRFNGIGVTQCVLYENQKLIANQFNSAIGKIQDSLSSTASALGKLQDVVNQNAQALNTLVKQLSSNFGAISSVLNDILSRLDKVEAEVQIDRLITGRLQSLQTYVTQQLIRAAEIRASANLAATKMSECVLGQSKRVDFCGKGYHLMSFPQSAPHGVVFLHVTYVPAQEKNFTTAPAICHDGKAHFPREGVFVSNGTHWFVTQRNFYEPQIITTDNTFVCGNCDVVIGIVNNTVYDPLQPELDSFKEELDKYFKNHTSPDVDLGDISGINASVVNIQKEIDRLNEVAKNLNESLIDLQELGKYEQYIKGGGGSDIIKLLNEQVNKEMQSSNLYMSMSSWCYTHSLDGAGLFLFDHAAEEYEHAKKLIIFLNENNVPVQLTSISAPEHKFEGLTQIFQKAYEHEQHISESINNIVDHAIKSKDHATFNFLQWYVAEQHEEEVLFKDILDKIELIGNENHGLYLADQYVKGIAKSRKS

SEQ ID NO: 13686 - protein, 1379 aa, Artificial Sequence
  SARS-CoV-2/France/GE1977/2020__EPI_ISL_414632 spike protein (1-1211)(N914C_S1123C) Ferritin construct
MFVFLVLLPLVSSQCVNLTTRTQLPPAYTNSFTRGVYYPDKVFRSSVLHSTQDLFLPFFSNVTWFHAIHVSGTNGTKRFDNPVLPFNDGVYFASTEKSNIIRGWIFGTTLDSKTQSLLIVNNATNVVIKVCEFQFCNDPFLGVYYHKNNKSWMESEFRVYSSANNCTFEYVSQPFLMDLEGKQGNFKNLREFVFKNIDGYFKIYSKHTPINLVRDLPQGFSALEPLVDLPIGINITRFQTLLALHRSYLTPGDSSSGWTAGAAAYYVGYLQPRTFLLKYNENGTITDAVDCALDPLSETKCTLKSFTVEKGIYQTSNFRVQPTESIVRFPNITNLCPFGEVFNATRFASVYAWNRKRISNCVADYSVLYNSASFSTFKCYGVSPTKLNDLCFTNVYADSFVIRGDEVRQIAPGQTGKIADYNYKLPDDFTGCVIAWNSNNLDSKVGGNYNYLYRLFRKSNLKPFERDISTEIYQAGSTPCNGVEGFNCYFPLQSYGFQPTNGVGYQPYRVVVLSFELLHAPATVCGPKKSTNLVKNKCVNFNFNGLTGTGVLTESNKKFLPFQQFGRDIADTTDAVRDPQTLEILDITPCSFGGVSVITPGTNTSNQVAVLYQGVNCTEVPVAIHADQLTPTWRVYSTGSNVFQTRAGCLIGAEHVNNSYECDIPIGAGICASYQTQTNSPRRARSVASQSIIAYTMSLGAENSVAYSNNSIAIPTNFTISVTTEILPVSMTKTSVDCTMYICGDSTECSNLLLQYGSFCTQLNRALTGIAVEQDKNTQEVFAQVKQIYKTPPIKDFGGFNFSQILPDPSKPSKRSFIEDLLFNKVTLADAGFIKQYGDCLGDIAARDLICAQKFNGLTVLPPLLTDEMIAQYTSALLAGTITSGWTFGAGAALQIPFAMQMAYRFNGIGVTQCVLYENQKLIANQFNSAIGKIQDSLFSTASALGKLQDVVNQNAQALNTLVKQLSSNFGAISSVLNDILSRLDKVEAEVQIDRLITGRLQSLQTYVTQQLIRAAEIRASANLAATKMSECVLGQSKRVDFCGKGYHLMSFPQSAPHGVVFLHVTYVPAQEKNFTTAPAICHDGKAHFPREGVFVSNGTHWFVTQRNFYEPQIITTDNTFVCGNCDVVIGIVNNTVYDPLQPELDSFKEELDKYFKNHTSPDVDLGDISGINASVVNIQKEIDRLNEVAKNLNESLIDLQELGKYEQYIKGGGGSDIIKLLNEQVNKEMQSSNLYMSMSSWCYTHSLDGAGLFLFDHAAEEYEHAKKLIIFLNENNVPVQLTSISAPEHKFEGLTQIFQKAYEHEQHISESINNIVDHAIKSKDHATFNFLQWYVAEQHEEEVLFKDILDKIELIGNENHGLYLADQYVKGIAKSRKS

SEQ ID NO: 13687 - protein, 1379 aa, Artificial Sequence
  SARS-CoV-2/Finland/FIN-313/2020__EPI_ISL_414641 spike protein (1-1211)(N914C_S1123C) Ferritin construct
MFVFLVLLPLVSSQCVNLTTRTQLPPAYTNSFTRGVYYPDKVFRSSVLHSTQDLFLPFFSNVTWFHAIHVSGTNGTKRFDNPVLPFNDGVYFASTEKSNIIRGWIFGTTLDSKTQSLLIVNNATNVVIKVCEFQFCNDPFLGVYYHKNNKSWMESEFRVYSSANNCTFEYVSQPFLMDLEGKQGNFKNLREFVFKNIDGYFKIYSKHTPINLVRDLPQGFSALEPLVDLPIGINITRFKTLLALHRSYLTPGDSSSGWTAGAAAYYVGYLQPRTFLLKYNENGTITDAVDCALDPLSETKCTLKSFTVEKGIYQTSNFRVQPTESIVRFPNITNLCPFGEVFNATRFASVYAWNRKRISNCVADYSVLYNSASFSTFKCYGVSPTKLNDLCFTNVYADSFVIRGDEVRQIAPGQTGKIADYNYKLPDDFTGCVIAWNSNNLDSKVGGNYNYLYRLFRKSNLKPFERDISTEIYQAGSTPCNGVEGFNCYFPLQSYGFQPTNGVGYQPYRVVVLSFELLHAPATVCGPKKSTNLVKNKCVNFNFNGLTGTGVLTESNKKFLPFQQFGRDIADTTDAVRDPQTLEILDITPCSFGGVSVITPGTNTSNQVAVLYQGVNCTEVPVAIHADQLTPTWRVYSTGSNVFQTRAGCLIGAEHVNNSYECDIPIGAGICASYQTQTNSPRRARSVASQSIIAYTMSLGAENSVAYSNNSIAIPTNFTISVTTEILPVSMTKTSVDCTMYICGDSTECSNLLLQYGSFCTQLNRALTGIAVEQDKNTQEVFAQVKQIYKTPPIKDFGGFNFSQILPDPSKPSKRSFIEDLLFNKVTLADAGFIKQYGDCLGDIAARDLICAQKFNGLTVLPPLLTDEMIAQYTSALLAGTITSGWTFGAGAALQIPFAMQMAYRFNGIGVTQCVLYENQKLIANQFNSAIGKIQDSLSSTASALGKLQDVVNQNAQALNTLVKQLSSNFGAISSVLNDILSRLDKVEAEVQIDRLITGRLQSLQTYVTQQLIRAAEIRASANLAATKMSECVLGQSKRVDFCGKGYHLMSFPQSAPHGVVFLHVTYVPAQEKNFTTAPAICHDGKAHFPREGVFVSNGTHWFVTQRNFYEPQIITTDNTFVCGNCDVVIGIVNNTVYDPLQPELDSFKEELDKYFKNHTSPDVDLGDISGINASVVNIQKEIDRLNEVAKNLNESLIDLQELGKYEQYIKGGGGSDIIKLLNEQVNKEMQSSNLYMSMSSWCYTHSLDGAGLFLFDHAAEEYEHAKKLIIFLNENNVPVQLTSISAPEHKFEGLTQIFQKAYEHEQHISESINNIVDHAIKSKDHATFNFLQWYVAEQHEEEVLFKDILDKIELIGNENHGLYLADQYVKGIAKSRKS

SEQ ID NO: 13688 - protein, 1379 aa, Artificial Sequence
  SARS-CoV-2/Netherlands/ZuidHolland_2/2020__EPI_ISL_414556 spike protein (1-1211)(N914C_S1123C) Ferritin construct
MFVFLVLLPLVSSQCVNLTTRTQLPPAYTNSFTRGVYYPDKVFRSSVLHSTQDLFLPFFSNVTWFHAIHVSGTNGTKRFDNPVLPFNDGVYFASTEKSNIIRGWIFGTTLDSKTQSLLIVNNATNVVIKVCEFQFCNDPFLGVYYHKNNKSWMESEFRVYSSANNCTFEYVSQPFLMDLEGKQGNFKNLREFVFKNIDGYFKIYSKHTPINLVRDLPQGFSALEPLVDLPIGINITRFQTLLALHRSYLTPGDSSSGWTAGAAAYYVGYLQPRTFLLKYNENGTITDAVDCALDPLSETKCTLKSFTVEKGIYQTSNFRVQPTESIVRFPNITNLCPFGEVFNATRFASVYAWNRKRISNCVADYSVLYNSASFSTFKCYGVSPTKLNDLCFTNVYADSFVIRGDEVRQIAPGQTGKIADYNYKLPDDFTGCVIAWNSNNLDSKVGGNYNYLYRLFRKSNLKPFERDISTEIYQAGSTPCNGVEGFNCYFPLQSYGFQPTNGVGYQPYRVVVLSFELLHAPATVCGPKKSTNLVKNKCVNFNFNGLTGTGVLTESNKKFLPFQQFGRDIADTTDAVRDPQTLEILDITPCSFGGVSVITPGTNTSNQVAVLYQGVNCTEVPVAIHADQLTPTWRVYSTGSNVFQTRAGCLIGAEHVNNSYECDIPIGAGICASYQTQTNSPRRARSVASQSIIAYTMSLGAENSVAYSNNSIAIPTNFTISVTTEILPVSMTKTSVDCTMYICGDSTECSNLLLQYGSFCTQLNRALTGIALEQDKNTQEVFAQVKQIYKTPPIKDFGGFNFSQILPDPSKPSKRSFIEDLLFNKVTLADAGFIKQYGDCLGDIAARDLICAQKFNGLTVLPPLLTDEMIAQYTSALLAGTITSGWTFGAGAALQIPFAMQMAYRFNGIGVTQCVLYENQKLIANQFNSAIGKIQDSLSSTASALGKLQDVVNQNAQALNTLVKQLSSNFGAISSVLNDILSRLDKVEAEVQIDRLITGRLQSLQTYVTQQLIRAAEIRASANLAATKMSECVLGQSKRVDFCGKGYHLMSFPQSAPHGVVFLHVTYVPAQEKNFTTAPAICHDGKAHFPREGVFVSNGTHWFVTQRNFYEPQIITTDNTFVCGNCDVVIGIVNNTVYDPLQPELDSFKEELDKYFKNHTSPDVDLGDISGINASVVNIQKEIDRLNEVAKNLNESLIDLQELGKYEQYIKGGGGSDIIKLLNEQVNKEMQSSNLYMSMSSWCYTHSLDGAGLFLFDHAAEEYEHAKKLIIFLNENNVPVQLTSISAPEHKFEGLTQIFQKAYEHEQHISESINNIVDHAIKSKDHATFNFLQWYVAEQHEEEVLFKDILDKIELIGNENHGLYLADQYVKGIAKSRKS

SEQ ID NO: 13689 - protein, 1379 aa, Artificial Sequence
  SARS-CoV-2/USA/WA-UW31/2020__EPI_ISL_414618 spike protein (1-1211)(N914C_S1123C) Ferritin construct
MFVFLVLLPLVSSQCVNLTTRTQLPPAYTNSFTRGVYYPDKVFRSSVLHSTQDLFLPFFSNVTWFHAIHVSGTNGTKRFDNPVLPFNDGVYFASTEKSNIIRGWIFGTTLDSKTQSLLIVNNATNVVIKVCEFQFCNDPFLGVYYHKNNKSWMESEFRVYSSANNCTFEYVSQPFLMDLEGKQGNFKNLREFVFKNIDGYFKIYSKHTPINLVRDLPQGFSALEPLVDLPIGINITRFQTLLALHRSYLTPGDSSSGWTAGAAAYYVGYLQPRTFLLKYNENGTITDAVDCALDPLSETKCTLKSFTVEKGIYQTSNFRVQPTESIVRFPNITNLCPFGEVFNATRFASVYAWNRKRISNCVADYSVLYNSASFSTFKCYGVSPTKLNDLCFTNVYADSFVIRGDEVRQIAPGQTGKIADYNYKLPDDFTGCVIAWNSNNLDSKVGGNYNYLYRLFRKSNLKPFERDISTEIYQAGSTPCNGAEGFNCYFPLQSYGFQPTNGVGYQPYRVVVLSFELLHAPATVCGPKKSTNLVKNKCVNFNFNGLTGTGVLTESNKKFLPFQQFGRDIADTTDAVRDPQTLEILDITPCSFGGVSVITPGTNTSNQVAVLYQDVNCTEVPVAIHADQLTPTWRVYSTGSNVFQTRAGCLIGAEHVNNSYECDIPIGAGICASYQTQTNSPRRARSVASQSIIAYTMSLGAENSVAYSNNSIAIPTNFTISVTTEILPVSMTKTSVDCTMYICGDSTECSNLLLQYGSFCTQLNRALTGIAVEQDKNTQEVFAQVKQIYKTPPIKDFGGFNFSQILPDPSKPSKRSFIEDLLFNKVTLADAGFIKQYGDCLGDIAARDLICAQKFNGLTVLPPLLTDEMIAQYTSALLAGTITSGWTFGAGAALQIPFAMQMAYRFNGIGVTQCVLYENQKLIANQFNSAIGKIQDSLSSTASALGKLQDVVNQNAQALNTLVKQLSSNFGAISSVLNDILSRLDKVEAEVQIDRLITGRLQSLQTYVTQQLIRAAEIRASANLAATKMSECVLGQSKRVDFCGKGYHLMSFPQSAPHGVVFLHVTYVPAQEKNFTTAPAICHDGKAHFPREGVFVSNGTHWFVTQRNFYEPQIITTDNTFVCGNCDVVIGIVNNTVYDPLQPELDSFKEELDKYFKNHTSPDVDLGDISGINASVVNIQKEIDRLNEVAKNLNESLIDLQELGKYEQYIKGGGGSDIIKLLNEQVNKEMQSSNLYMSMSSWCYTHSLDGAGLFLFDHAAEEYEHAKKLIIFLNENNVPVQLTSISAPEHKFEGLTQIFQKAYEHEQHISESINNIVDHAIKSKDHATFNFLQWYVAEQHEEEVLFKDILDKIELIGNENHGLYLADQYVKGIAKSRKS

SEQ ID NO: 13690 - protein, 1379 aa, Artificial Sequence
  SARS-CoV-2/South Korea/SNU01/2020__EPI_ISL_411929 spike protein (1-1211)(N914C_S1123C) Ferritin construct
MFVFLVLLPLVSSQCVNLTTRTQLPPAYTNSFTRGVYYPDKVFRSSVLHSTQDLFLPFFSNVTWFHAIHVSGTNGTKRFDNPVLPFNDGVYFASTEKSNIIRGWIFGTTLDSKTQSLLIVNNATNVVIKVCEFQFCNDPFLGVYYHKNNKSWMESEFRVYSSANNCTFEYVSQPFLMDLEGKQGNFKNLREFVFKNIDGYFKIYSKHTPINLVRDLPQGFWALEPLVDLPIGINITRFQTLLALHRSYLTPGDSSSGWTAGAAAYYVGYLQPRTFLLKYNENGTITDAVDCALDPLSETKCTLKSFTVEKGIYQTSNFRVQPTESIVRFPNITNLCPFGEVFNATRFASVYAWNRKRISNCVADYSVLYNSASFSTFKCYGVSPTKLNDLCFTNVYADSFVIRGDEVRQIAPGQTGKIADYNYKLPDDFTGCVIAWNSNNLDSKVGGNYNYLYRLFRKSNLKPFERDISTEIYQAGSTPCNGVEGFNCYFPLQSYGFQPTNGVGYQPYRVVVLSFELLHAPATVCGPKKSTNLVKNKCVNFNFNGLTGTGVLTESNKKFLPFQQFGRDIADTTDAVRDPQTLEILDITPCSFGGVSVITPGTNTSNQVAVLYQDVNCTEVPVAIHADQLTPTWRVYSTGSNVFQTRAGCLIGAEHVNNSYECDIPIGAGICASYQTQTNSPRRARSVASQSIIAYTMSLGAENSVAYSNNSIAIPTNFTISVTTEILPVSMTKTSVDCTMYICGDSTECSNLLLQYGSFCTQLNRALTGIAVEQDKNTQEVFAQVKQIYKTPPIKDFGGFNFSQILPDPSKPSKRSFIEDLLFNKVTLADAGFIKQYGDCLGDIAARDLICAQKFNGLTVLPPLLTDEMIAQYTSALLAGTITSGWTFGAGAALQIPFAMQMAYRFNGIGVTQCVLYENQKLIANQFNSAIGKIQDSLSSTASALGKLQDVVNQNAQALNTLVKQLSSNFGAISSVLNDILSRLDKVEAEVQIDRLITGRLQSLQTYVTQQLIRAAEIRASANLAATKMSECVLGQSKRVDFCGKGYHLMSFPQSAPHGVVFLHVTYVPAQEKNFTTAPAICHDGKAHFPREGVFVSNGTHWFVTQRNFYEPQIITTDNTFVCGNCDVVIGIVNNTVYDPLQPELDSFKEELDKYFKNHTSPDVDLGDISGINASVVNIQKEIDRLNEVAKNLNESLIDLQELGKYEQYIKGGGGSDIIKLLNEQVNKEMQSSNLYMSMSSWCYTHSLDGAGLFLFDHAAEEYEHAKKLIIFLNENNVPVQLTSISAPEHKFEGLTQIFQKAYEHEQHISESINNIVDHAIKSKDHATFNFLQWYVAEQHEEEVLFKDILDKIELIGNENHGLYLADQYVKGIAKSRKS

SEQ ID NO: 13691 - protein, 1379 aa, Artificial Sequence
  SARS-CoV-2/China/WF0004/2020__EPI_ISL_413694 spike protein (1-1211)(N914C_S1123C) Ferritin construct
MFVFLVLLPLVSSQCVNLTTRTQLPPAYTNSFTRGVYYPDKVFRSSVLHSTQDLFLPFFSNVTWFHAIHVSGTNGTKRFDNPVLPFNDGVYFASTEKSNIIRGWIFGTTLDSKTQSLLIVNNATNVVIKVCEFQFCNDPFLGVYYHKNNKSWTESEFRVYSSANNCTFEYVSQPFLMDLEGKQGNFKNLREFVFKNIDGYFKIYSKHTPINLVRDLPQGFSALEPLVDLPIGINITRFQTLLALHRSYLTPGDSSSGWTAGAAAYYVGYLQPRTFLLKYNENGTITDAVDCALDPLSETKCTLKSFTVEKGIYQTSNFRVQPTESIVRFPNITNLCPFGEVFNATRFASVYAWNRKRISNCVADYSVLYNSASFSTFKCYGVSPTKLNDLCFTNVYADSFVIRGDEVRQIAPGQTGKIADYNYKLPDDFTGCVIAWNSNNLDSKVGGNYNYLYRLFRKSNLKPFERDISTEIYQAGSTPCNGVEGFNCYFPLQSYGFQPTNGVGYQPYRVVVLSFELLHAPATVCGPKKSTNLVKNKCVNFNFNGLTGTGVLTESNKKFLPFQQFGRDIADTTDAVRDPQTLEILDITPCSFGGVSVITPGTNTSNQVAVLYQDVNCTEVPVAIHADQLTPTWRVYSTGSNVFQTRAGCLIGAEHVNNSYECDIPIGAGICASYQTQTNSPRRARSVASQSIIAYTMSLGAENSVAYSNNSIAIPTNFTISVTTEILPVSMTKTSVDCTMYICGDSTECSNLLLQYGSFCTQLNRALTGIAVEQDKNTQEVFAQVKQIYKTPPIKDFGGFNFSQILPDPSKPSKRSFIEDLLFNKVTLADAGFIKQYGDCLGDIAARDLICAQKFNGLTVLPPLLTDEMIAQYTSALLAGTITSGWTFGAGAALQIPFAMQMAYRFNGIGVTQCVLYENQKLIANQFNSAIGKIQDSLSSTASALGKLQDVVNQNAQALNTLVKQLSSNFGAISSVLNDILSRLDKVEAEVQIDRLITGRLQSLQTYVTQQLIRAAEIRASANLAATKMSECVLGQSKRFDFCGKGYHLMSFPQSAPHGVVFLHVTYVPAQEKNFTTAPAICHDGKAHFPREGVFVSNGTHWFVTQRNFYEPQIITTDNTFVCGNCDVVIGIVNNTVYDPLQPELDSFKEELDKYFKNHTSPDVDLGDISGINASVVNIQKEIDRLNEVAKNLNESLIDLQELGKYEQYIKGGGGSDIIKLLNEQVNKEMQSSNLYMSMSSWCYTHSLDGAGLFLFDHAAEEYEHAKKLIIFLNENNVPVQLTSISAPEHKFEGLTQIFQKAYEHEQHISESINNIVDHAIKSKDHATFNFLQWYVAEQHEEEVLFKDILDKIELIGNENHGLYLADQYVKGIAKSRKS

SEQ ID NO: 13692 - protein, 1379 aa, Artificial Sequence
  SARS-CoV-2/China/WF0028/2020__EPI_ISL_413791 spike protein (1-1211)(N914C_S1123C) Ferritin construct
MFVFLVLLPLVSSQCVNLTTRTQLPPAYTNSFTRGVYYPDKVFRSSVLHSTQDLFLPFFSNVTWFHAIHVSGTNGTKRFDNPVLPFNDGVYFASTEKSNIIRGWIFGTTLDSKTQSLLIVNNATNVVIKVCEFQFCNDPFLGVYYHKNNKSWMESEFRVYSSANNCTFEYVSQPFLMDLEGKQGNFKNLREFVFKNIDGYFKIYSKHTPINLVRDLPQGFSALEPLVDLPIGINITRFQTLLALHRSYLTPGDSSSGWTAGAAAYYVGYLQPRTFLLKYNENGTITDAVDCALDPLSETKCTLKSFTVEKGIYQTSNFRVQPTESIVRFPNITNLCPFGEVFNATRFASVYAWNRKRISNCVADYSVLYNSASFSTFKCYGVSPTKLNDLCFTNVYADSFVIRGDEVRQIAPGQTGKIADYNYKLPDDFTGCVIAWNSNNLDSKVGGNYNYLYRLFRKSNLKPFERDISTEIYQAGSTPCNGVEGFNCYFPLQSYGFQPTNGVGYQPYRVVVLSFELLHAPATVCGPKKSTNLVKNKCVNFNFNGLTGTGVLTESNKKFLPFQQFGRDIADTTDAVRDPQTLEILDITPCSFGGVSVITPGTNTSNQVAVLYQDVNCTEVPVAIHADQLTPTWRVYSTGSNVFQTRAGCLIGAEHVNNSYECDIPIGAGICASYQTQTNSPRRARSVASQSIIAYTMSLGAENSVAYSNNSIAIPTNFTISVTTEILPVSMTKTSVDCTMYICGDSTECSNLLLQYGSFCTQLNRALTGIAVEQDKNTQEVFAQVKQIYKTPPIKDFGGFNFSQILPDPSKPSKRSFIEDLLFNKVTLADAGFIKQYGDCLGDIAARDLICAQKFNGLTVLPPLLTDEMIAQYTSALLAGTITSGWTFGAGAALQIPFAMQMAYRFNGIGVTQCVLYENQKLIANQFNSAIGKIQDSLSSTASALGKLQDVVNQNAQALNTLVKQLSSNFGAISSVLNDILSRLDKVEAEVQIDRLITGRLQSLQTYVTQQLIRAAEIRASANLAATKMSECVLGQSKRVDFCGKGYHLMSFPQSAPHGVVFLHVTYVPAQEKNFTTAPAICHDGKAHFPREGVFVSNGTHWFVTQRNFYEPQIITTDNTFVCGNCDVVIGIVNNTVYDPLQPELESFKEELDKYFKNHTSPDVDLGDISGINASVVNIQKEIDRLNEVAKNLNESLIDLQELGKYEQYIKGGGGSDIIKLLNEQVNKEMQSSNLYMSMSSWCYTHSLDGAGLFLFDHAAEEYEHAKKLIIFLNENNVPVQLTSISAPEHKFEGLTQIFQKAYEHEQHISESINNIVDHAIKSKDHATFNFLQWYVAEQHEEEVLFKDILDKIELIGNENHGLYLADQYVKGIAKSRKS

SEQ ID NO: 13693 - protein, 1379 aa, Artificial Sequence
  SARS-CoV-2/2019-nCoV/USA-CruiseA-18/2020__MT159716.1 spike protein (1-1211)(N914C_S1123C) Ferritin construct
MFVFLVLLPLVSSQCVNLTTRTQLPPAYTNSFTRGVYYPDKVFRSSVLHSTQDLFLPFFSNVTWFHAIHVSGTNGTKRFDNPVLPFNDGVYFASTEKSNIIRGWIFGTTLDSKTQSLLIVNNATNVVIKVCEFQFCNDPFLGVYYHKNNKSWMESELRVYSSANNCTFEYVSQPFLMDLEGKQGNFKNLREFVFKNIDGYFKIYSKHTPINLVRDLPQGFSALEPLVDLPIGINITRFQTLLALHRSYLTPGDSSSGWTAGAAAYYVGYLQPRTFLLKYNENGTITDAVDCALDPLSETKCTLKSFTVEKGIYQTSNFRVQPTESIVRFPNITNLCPFGEVFNATRFASVYAWNRKRISNCVADYSVLYNSASFSTFKCYGVSPTKLNDLCFTNVYADSFVIRGDEVRQIAPGQTGKIADYNYKLPDDFTGCVIAWNSNNLDSKVGGNYNYLYRLFRKSNLKPFERDISTEIYQAGSTPCNGVEGFNCYFPLQSYGFQPTNGVGYQPYRVVVLSFELLHAPATVCGPKKSTNLVKNKCVNFNFNGLTGTGVLTESNKKFLPFQQFGRDIADTTDAVRDPQTLEILDITPCSFGGVSVITPGTNTSNQVAVLYQDVNCTEVPVAIHADQLTPTWRVYSTGSNVFQTRAGCLIGAEHVNNSYECDIPIGAGICASYQTQTNSPRRARSVASQSIIAYTMSLGAENSVAYSNNSIAIPTNFTISVTTEILPVSMTKTSVDCTMYICGDSTECSNLLLQYGSFCTQLNRALTGIAVEQDKNTQEVFAQVKQIYKTPPIKDFGGFNFSQILPDPSKPSKRSFIEDLLFNKVTLADAGFIKQYGDCLGDIAARDLICAQKFNGLTVLPPLLTDEMIAQYTSALLAGTITSGWTFGAGAALQIPFAMQMAYRFNGIGVTQCVLYENQKLIANQFNSAIGKIQDSLSSTASALGKLQDVVNQNAQALNTLVKQLSSNFGAISSVLNDILSRLDKVEAEVQIDRLITGRLQSLQTYVTQQLIRAAEIRASANLAATKMSECVLGQSKRVDFCGKGYHLMSFPQSAPHGVVFLHVTYVPAQEKNFTTAPAICHDGKAHFPREGVFVSNGTHWFVTQRNFYEPQIITTDNTFVCGNCDVVIGIVNNTVYDPLQPELDSFKEELDKYFKNHTSPDVDLGDISGINASVVNIQKEIDRLNEVAKNLNESLIDLQELGKYEQYIKGGGGSDIIKLLNEQVNKEMQSSNLYMSMSSWCYTHSLDGAGLFLFDHAAEEYEHAKKLIIFLNENNVPVQLTSISAPEHKFEGLTQIFQKAYEHEQHISESINNIVDHAIKSKDHATFNFLQWYVAEQHEEEVLFKDILDKIELIGNENHGLYLADQYVKGIAKSRKS

SEQ ID NO: 13694 - protein, 1379 aa, Artificial Sequence
  SARS-CoV-2/SARS-CoV-2/Yunnan-01/human/2020/CHN__MT049951.1 spike protein (1-1211)(N914C_S1123C) Ferritin construct
MFVFLVLLPLVSSQCVNLTTRTQLPPANTNSFTRGVYYPDKVFRSSVLHSTQDLFLPFFSNVTWFHAIHVSGTNGTKRFDNPVLPFNDGVYFASTEKSNIIRGWIFGTTLDSKTQSLLIVNNATNVVIKVCEFQFCNDPFLGVYYHKNNKSWMESEFRVYSSANNCTFEYVSQPFLMDLEGKQGNFKNLREFVFKNIDGYFKIYSKHTPINLVRDLPQGFSALEPLVDLPIGINITRFQTLLALHRSYLTPGDSSSGWTAGAAAYYVGYLQPRTFLLKYNENGTITDAVDCALDPLSETKCTLKSFTVEKGIYQTSNFRVQPTESIVRFPNITNLCPFGEVFNATRFASVYAWNRKRISNCVADYSVLYNSASFSTFKCYGVSPTKLNDLCFTNVYADSFVIRGDEVRQIAPGQTGKIADYNYKLPDDFTGCVIAWNSNNLDSKVGGNYNYLYRLFRKSNLKPFERDISTEIYQAGSTPCNGVEGFNCYFPLQSYGFQPTNGVGYQPYRVVVLSFELLHAPATVCGPKKSTNLVKNKCVNFNFNGLTGTGVLTESNKKFLPFQQFGRDIADTTDAVRDPQTLEILDITPCSFGGVSVITPGTNTSNQVAVLYQDVNCTEVPVAIHADQLTPTWRVYSTGSNVFQTRAGCLIGAEHVNNSYECDIPIGAGICASYQTQTNSPRRARSVASQSIIAYTMSLGAENSVAYSNNSIAIPTNFTISVTTEILPVSMTKTSVDCTMYICGDSTECSNLLLQYGSFCTQLNRALTGIAVEQDKNTQEVFAQVKQIYKTPPIKDFGGFNFSQILPDPSKPSKRSFIEDLLFNKVTLADAGFIKQYGDCLGDIAARDLICAQKFNGLTVLPPLLTDEMIAQYTSALLAGTITSGWTFGAGAALQIPFAMQMAYRFNGIGVTQCVLYENQKLIANQFNSAIGKIQDSLSSTASALGKLQDVVNQNAQALNTLVKQLSSNFGAISSVLNDILSRLDKVEAEVQIDRLITGRLQSLQTYVTQQLIRAAEIRASANLAATKMSECVLGQSKRVDFCGKGYHLMSFPQSAPHGVVFLHVTYVPAQEKNFTTAPAICHDGKAHFPREGVFVSNGTHWFVTQRNFYEPQIITTDNTFVCGNCDVVIGIVNNTVYDPLQPELDSFKEELDKYFKNHTSPDVDLGDISGINASVVNIQKEIDRLNEVAKNLNESLIDLQELGKYEQYIKGGGGSDIIKLLNEQVNKEMQSSNLYMSMSSWCYTHSLDGAGLFLFDHAAEEYEHAKKLIIFLNENNVPVQLTSISAPEHKFEGLTQIFQKAYEHEQHISESINNIVDHAIKSKDHATFNFLQWYVAEQHEEEVLFKDILDKIELIGNENHGLYLADQYVKGIAKSRKS

SEQ ID NO: 13695 - protein, 1379 aa, Artificial Sequence
  SARS-CoV-2/USA/WA-UW292/2020__EPI_ISL_418077 spike protein (1-1211)(N914C_S1123C) Ferritin construct
MFVFLVLLPLVSSQCVNLTTRTQLPPAYTNSFTRGVYYPDKVFRSSVLHSTQDLFLPFFSNVTWFHAIHVSGTNGTKRFDNPVLPFNDGVYFASTEKSNIIRGWIFGTTLDSKTQSLLIVNNATNVVIKVCEFQFCNDPFLGVYYHKNNKSWMESEFRVYSSANNCTFEYVSQPFLMDLEGKQGNFKNLREFVFKNIDGYFKIYSKHTPINLVRDLPQGFSALEPLVDLPIGINITRFQTLLALHRSYLTPGDSSSGWTAGAAAYYVGYLQPRTFLLKYNENGTITDAVDCALDPLSETKCTLKSFTVEKGIYQTSNFRVQPTESIVRFPNITNLCPFGEVFNATRFASVYAWNRKRISNCVADYSVLYNSASFSTFKCYGVSPTKLNDLCFTNVYADSFVIRGDEVRQIAPGQTGKIADYNYKLPDDFTGCVIAWNSNNLDSKVGGNYNYLYRLFRKSNLKPFERDISTEIYQASSTPCNGVEGFNCYFPLQSYGFQPTNGVGYQPYRVVVLSFELLHAPATVCGPKKSTNLVKNKCVNFNFNGLTGTGVLTESNKKFLPFQQFGRDIADTTDAVRDPQTLEILDITPCSFGGVSVITPGTNTSNQVAVLYQDVNCTEVPVAIHADQLTPTWRVYSTGSNVFQTRAGCLIGAEHVNNSYECDIPIGAGICASYQTQTNSPRRARSVASQSIIAYTMSLGAENSVAYSNNSIAIPTNFTISVTTEILPVSMTKTSVDCTMYICGDSTECSNLLLQYGSFCTQLNRALTGIAVEQDKNTQEVFAQVKQIYKTPPIKDFGGFNFSQILPDPSKPSKRSFIEDLLFNKVTLADAGFIKQYGDCLGDIAARDLICAQKFNGLTVLPPLLTDEMIAQYTSALLAGTITSGWTFGAGAALQIPFAMQMAYRFNGIGVTQCVLYENQKLIANQFNSAIGKIQDSLSSTASALGKLQDVVNQNAQALNTLVKQLSSNFGAISSVLNDILSRLDKVEAEVQIDRLITGRLQSLQTYVTQQLIRAAEIRASANLAATKMSECVLGQSKRVDFCGKGYHLMSFPQSAPHGVVFLHVTYVPAQEKNFTTAPAICHDGKAHFPREGVFVSNGTHWFVTQRNFYEPQIITTDNTFVCGNCDVVIGIVNNTVYDPLQPELDSFKEELDKYFKNHTSPDVDLGDISGINASVVNIQKEIDRLNEVAKNLNESLIDLQELGKYEQYIKGGGGSDIIKLLNEQVNKEMQSSNLYMSMSSWCYTHSLDGAGLFLFDHAAEEYEHAKKLIIFLNENNVPVQLTSISAPEHKFEGLTQIFQKAYEHEQHISESINNIVDHAIKSKDHATFNFLQWYVAEQHEEEVLFKDILDKIELIGNENHGLYLADQYVKGIAKSRKS

SEQ ID NO: 13696 - protein, 1379 aa, Artificial Sequence
  SARS-CoV-2/Iceland/192/2020__EPI_ISL_417819 spike protein (1-1211)(N914C_S1123C) Ferritin construct
MFVFFVLLPLVSSQCVNLTTRTQLPPAYTNSFTRGVYYPDKVFRSSVLHSTQDLFLPFFSNVTWFHAIHVSGTNGTKRFDNPVLPFNDGVYFASTEKSNIIRGWIFGTTLDSKTQSLLIVNNATNVVIKVCEFQFCNDPFLGVYYHKNNKSWMESEFRVYSSANNCTFEYVSQPFLMDLEGKQGNFKNLREFVFKNIDGYFKIYSKHTPINLVRDLPQGFSALEPLVDLPIGINITRFQTLLALHRSYLTPGDSSSGWTAGAAAYYVGYLQPRTFLLKYNENGTITDAVDCALDPLSETKCTLKSFTVEKGIYQTSNFRVQPTESIVRFPNITNLCPFGEVFNATRFASVYAWNRKRISNCVADYSVLYNSASFSTFKCYGVSPTKLNDLCFTNVYADSFVIRGDEVRQIAPGQTGKIADYNYKLPDDFTGCVIAWNSNNLDSKVGGNYNYLYRLFRKSNLKPFERDISTEIYQAGSTPCNGVEGFNCYFPLQSYGFQPTNGVGYQPYRVVVLSFELLHAPATVCGPKKSTNLVKNKCVNFNFNGLTGTGVLTESNKKFLPFQQFGRDIADTTDAVRDPQTLEILDITPCSFGGVSVITPGTNTSNQVAVLYQGVNCTEVPVAIHADQLTPTWRVYSTGSNVFQTRAGCLIGAEHVNNSYECDIPIGAGICASYQTQTNSPRRARSVASQSIIAYTMSLGAENSVAYSNNSIAIPTNFTISVTTEILPVSMTKTSVDCTMYICGDSTECSNLLLQYGSFCTQLNRALTGIAVEQDKNTQEVFAQVKQIYKTPPIKDFGGFNFSQILPDPSKPSKRSFIEDLLFNKVTLADAGFIKQYGDCLGDIAARDLICAQKFNGLTVLPPLLTDEMIAQYTSALLAGTITSGWTFGAGAALQIPFAMQMAYRFNGIGVTQCVLYENQKLIANQFNSAIGKIQDSLSSTASALGKLQDVVNQNAQALNTLVKQLSSNFGAISSVLNDILSRLDKVEAEVQIDRLITGRLQSLQTYVTQQLIRAAEIRASANLAATKMSECVLGQSKRVDFCGKGYHLMSFPQSAPHGVVFLHVTYVPAQEKNFTTAPAICHDGKAHFPREGVFVSNGTHWFVTQRNFYEPQIITTDNTFVCGNCDVVIGIVNNTVYDPLQPELDSFKEELDKYFKNHTSPDVDLGDISGINASVVNIQKEIDRLNEVAKNLNESLIDLQELGKYEQYIKGGGGSDIIKLLNEQVNKEMQSSNLYMSMSSWCYTHSLDGAGLFLFDHAAEEYEHAKKLIIFLNENNVPVQLTSISAPEHKFEGLTQIFQKAYEHEQHISESINNIVDHAIKSKDHATFNFLQWYVAEQHEEEVLFKDILDKIELIGNENHGLYLADQYVKGIAKSRKS

SEQ ID NO: 13697 - protein, 1379 aa, Artificial Sequence
  SARS-CoV-2/Belgium/ULG-6939/2020__EPI_ISL_417020 spike protein (1-1211)(N914C_S1123C) Ferritin construct
MFVFLVLLPLVSSQCVNLTTRTQLPPAYTNSFTRGVYYPDKVFRSSVLHSTQDLFLPFFSNVTWFHAIHVSGTNGTKRFDNPVLPFNDGVYFASTEKSNIIRGWIFGTTLDSKTQSLLIVNNATNVVIKVCEFQFCNDPFLGVYYHKNNKSWMESEFRVYSSANNCTFEYVSQPFLMDLEGKQGNFKNLREFVFKNIDGYFKIYSKHTPINLVRDLPQGFSALEPLVDLPIGINITRFQTLLALHRSYLTPGDSSSGWTAGAAAYYVGYLQPRTFLLKYNENGTITDAVDCALDPLSETKCTLKSFTVEKGIYQTSNFRVQPTESIVRFPNITNLCPFGEVFNATRFASVYAWNRKRISNCVADYSVLYNSASFSTFKCYGVSPTKLNDLCFTNVYADSFVIRGDEVRQIAPGQTGKIADYNYKLPDDFTGCVIAWNSNNLDSKVGGNYNYLYRLFRKSNLKPFERDISTEIYQAGSTPCNGVEGFNCYFPLQSYGFQPTNGVGYQPYRVVVLSFELLHAPATVCGPKKSTNLVKNKCVNFNFNGLTGTGVLTESNKKFLPFQQFGRDIADTTDAVRDPQTLEILDITPCSFGGVSVITPGTNTSNQVAVLYQGVNCTEVPVAIHADQLTPTWRVYSTGSNVFQTRAGCLIGAEHVNNSYECDIPIGAGICASYQTQTNSPRRARSVASQSIIAYTMSLGAENSVVYSNNSIAIPTNFTISVTTEILPVSMTKTSVDCTMYICGDSTECSNLLLQYGSFCTQLNRALTGIAVEQDKNTQEVFAQVKQIYKTPPIKDFGGFNFSQILPDPSKPSKRSFIEDLLFNKVTLADAGFIKQYGDCLGDIAARDLICAQKFNGLTVLPPLLTDEMIAQYTSALLAGTITSGWTFGAGAALQIPFAMQMAYRFNGIGVTQCVLYENQKLIANQFNSAIGKIQDSLSSTASALGKLQDVVNQNAQALNTLVKQLSSNFGAISSVLNDILSRLDKVEAEVQIDRLITGRLQSLQTYVTQQLIRAAEIRASANLAATKMSECVLGQSKRVDFCGKGYHLMSFPQSAPHGVVFLHVTYVPAQEKNFTTAPAICHDGKAHFPREGVFVSNGTHWFVTQRNFYEPQIITTDNTFVCGNCDVVIGIVNNTVYDPLQPELDSFKEELDKYFKNHTSPDVDLGDISGINASVVNIQKEIDRLNEVAKNLNESLIDLQELGKYEQYIKGGGGSDIIKLLNEQVNKEMQSSNLYMSMSSWCYTHSLDGAGLFLFDHAAEEYEHAKKLIIFLNENNVPVQLTSISAPEHKFEGLTQIFQKAYEHEQHISESINNIVDHAIKSKDHATFNFLQWYVAEQHEEEVLFKDILDKIELIGNENHGLYLADQYVKGIAKSRKS

SEQ ID NO: 13698 - protein, 1379 aa, Artificial Sequence
  SARS-CoV-2/France/HF2496/2020__EPI_ISL_418231 spike protein (1-1211)(N914C_S1123C) Ferritin construct
MFVFLVLLPLVSSQCVNLTTRTQLPPAYTNSFTRGVYYPDKVFRSSVLHSTQDLFLPFFSNVTWFHAIHVSGTNGTKRFDNPVLPFNDGVYFASTEKSNIIRGWIFGTTLDSKTQSLLIVNNATNVVIKVCEFQFCNDPFLGVYYHKNNKSWMESEFRVYSSANNCTFEYVSQPFLMDLEGKQGNFKNLREFVFKNIDGYFKIYSKHTPINLVRDLPQGFSALEPLVDLPIGINITRFQTLLALHRSYLTPGDSSSGWTAGAAAYYVGYLQPRTFLLKYNENGTITDAVDCALDPLSETKCTLKSFTVEKGIYQTSNFRVQPTESIVRFPNITNLCPFGEVFNATRFASVYAWNRKRISNCVADYSVLYNSASFSTFKCYGVSPTKLNDLCFTNVYADSFVIRGDEVRQIAPGQTGKIADYNYKLPDDFTGCVIAWNSNNLDSKVGGNYNYLYRLFRKSNLKPFERDISTEIYQAGSTPCNGVEGFNCYFPLQSYGFQPTNGVGYQPYRVVVLSFELLHAPATVCGPKKSTNLVKNKCVNFNFNGLTGTGVLTESNKKFLPFQQFGRDIADTTDAVRDPQTLEILDITPCSFGGVSVITPGTNTSNQVAVLYQGVNCTEVPVAIHADQLTPTWRVYSTGSNVFQTRAGCLIGAEHVNNSYECDIPIGAGICASYQTQTNSPRRARSVASQSIIAYTMSLGAENSVAYSNNSIAIPTNFTISVTTEILPVSMTKTSVDCTMYICGDSTECSNLLLQYGSFCTQLNRALTGIAVEQDKNTQEVFAQVKQIYKTPPIKDFGGFNFSQILPDPSKPSKRSFIEDLLFNKVTLADAGFIKQYGDCLGDIVARDLICAQKFNGLTVLPPLLTDEMIAQYTSALLAGTITSGWTFGAGAALQIPFAMQMAYRFNGIGVTQCVLYENQKLIANQFNSAIGKIQDSLSSTASALGKLQDVVNQNAQALNTLVKQLSSNFGAISSVLNDILSRLDKVEAEVQIDRLITGRLQSLQTYVTQQLIRAAEIRASANLAATKMSECVLGQSKRVDFCGKGYHLMSFPQSAPHGVVFLHVTYVPAQEKNFTTAPAICHDGKAHFPREGVFVSNGTHWFVTQRNFYEPQIITTDNTFVCGNCDVVIGIVNNTVYDPLQPELDSFKEELDKYFKNHTSPDVDLGDISGINASVVNIQKEIDRLNEVAKNLNESLIDLQELGKYEQYIKGGGGSDIIKLLNEQVNKEMQSSNLYMSMSSWCYTHSLDGAGLFLFDHAAEEYEHAKKLIIFLNENNVPVQLTSISAPEHKFEGLTQIFQKAYEHEQHISESINNIVDHAIKSKDHATFNFLQWYVAEQHEEEVLFKDILDKIELIGNENHGLYLADQYVKGIAKSRKS

SEQ ID NO: 13699 - protein, 1379 aa, Artificial Sequence
  SARS-CoV-2/USA/WA-UW291/2020__EPI_ISL_418076 spike protein (1-1211)(N914C_S1123C) Ferritin construct
MFVFLVLLPLVSSQCVNLTTRTQLPPAYTNSFTRGVYYPDKVFRSSVLHSTQDLFLPFFSNVTWFHAIHVSGTNGTKRFDNPVLPFNDGVYFASTEKSNIIRGWIFGTTLDSKTQSLLIVNNATNVVIKVCEFQFCNDPFLGVYYHKNNKSWMESEFRVYSSANNCTFEYVSQPFLMDLEGKQGNFKNLREFVFKNIDGYFKIYSKHTPINLVRDLPQGFSALEPLVDLPIGINITRFQTLLALHRSYLTPGDSSSGWTAGAAAYYVGYLQPRTFLLKYNENGTITDAVDCALDPLSETKCTLKSFTVEKGIYQTSNFRVQPTESIVRFPNITNLCPFGEVFNATRFASVYAWNRKRISNCVADYSVLYNSASFSTFKCYGVSPTKLNDLCFTNVYADSFVIRGDEVRQIAPGQTGKIADYNYKLPDDFTGCVIAWNSNNLDSKVGGNYNYLYRLFRKSNLKPFERDISTEIYQAGSTPCNGVEGFNCYFPLQSYGFQPTNGVGYQPYRVVVLSFELLHAPATVCGPKKSTNLVKNKCVNFNFNGLTGTGVLTESNKKFLPFQQFGRDIADTTDAVRDPQTLEILDITPCSFGGVSVITPGTNTSNQVAVLYQGVNCTEVPVAIHADQLTPTWRVYSTGSNVFQTRAGCLIGAEHVNNSYECDIPIGAGICASYQTQTNSPRRARSVASQSIIAYTMSLGAENSVAYSNNSIAIPTNFTISVTTEILPVSMTKTSVDCTMYICGDSTECSNLLLQYGSFCTQLNRALTGIAVEQDKNTQEVFAQVKQIYKTPPIKDFGGFNFSQILPDPSKPSKRSFIEDLLFNKVTLADAGFIKQYGDCLGDIAARDLICAQKFNGLTVLPPLLTDEMIAQYTSALLAGTITSGWTFGAGAALQIPFAMQMAYRFNGIGVTQCVLYENQKLIANQFNSAIGKIQYSLSSTASALGKLQDVVNQNAQALNTLVKQLSSNFGAISSVLNDILSRLDKVEAEVQIDRLITGRLQSLQTYVTQQLIRAAEIRASANLAATKMSECVLGQSKRVDFCGKGYHLMSFPQSAPHGVVFLHVTYVPAQEKNFTTAPAICHDGKAHFPREGVFVSNGTHWFVTQRNFYEPQIITTDNTFVCGNCDVVIGIVNNTVYDPLQPELDSFKEELDKYFKNHTSPDVDLGDISGINASVVNIQKEIDRLNEVAKNLNESLIDLQELGKYEQYIKGGGGSDIIKLLNEQVNKEMQSSNLYMSMSSWCYTHSLDGAGLFLFDHAAEEYEHAKKLIIFLNENNVPVQLTSISAPEHKFEGLTQIFQKAYEHEQHISESINNIVDHAIKSKDHATFNFLQWYVAEQHEEEVLFKDILDKIELIGNENHGLYLADQYVKGIAKSRKS

SEQ ID NO: 13700 - protein, 1379 aa, Artificial Sequence; identical to SEQ ID NO: 13663
  SARS-CoV-2/Portugal/PT0034/2020__EPI_ISL_418019 spike protein (1-1211)(N914C_S1123C) Ferritin construct

SEQ ID NO: 13701 - protein, 1379 aa, Artificial Sequence
  SARS-CoV-2/Iceland/202/2020__EPI_ISL_417750 spike protein (1-1211)(N914C_S1123C) Ferritin construct
MFVFLVLLPLVSSQCVNLTTRTQLPPAYTNSFTRGVYYPDKVFRSSVLHSTQDLFLPFFSNVTWFHAIHVSGTNGTKRFDNPVLPFNDGVYFASTEKSNIIRGWIFGTTLDSKTQSLLIVNNATNVVIKVCEFQFCNDPFLGVYYHKNNKSWMESEFRVYSSANNCTFEYVSQPFLMDLEGKQGNFKNLREFVFKNIDGYFKIYSKHTPINLVRDLPQGFSALEPLVDLPIGINITRFQTLLALHRSYLTPGDSSSGWTAGAAAYYVGYLQPRTFLLKYNENGTITDAVDCALDPLSETKCTLKSFTVEKGIYQTSNFRVQPTESIVRFPNITNLCPFGEVFNATRFASVYAWNRKRISNCVADYSVLYNSASFSTFKCYGVSPTKLNDLCFTNVYADSFVIRGDEVRQIAPGQTGKIADYNYKLPDDFTGCVIAWNSNNLDSKVGGNYNYLYRLFRKSNLKPFERDISTEIYQAGSTPCNGVEGFNCYFPLQSYGFQPTNGVGYQPYRVVVLSFELLHAPATVCGPKKSTNLVKNKCVNFNFNGLTGTGVLTESNKKFLPFQQFGRDIADTTDAVRDPQTLEILDITPCSFGGVSVITPGTNTSNQVAVLYQDVNCTEVPVAIHADQLTPTWRVYSTGSNVFQTRAGCLIGAEHVNNSYECDIPIGAGICASYQTQTNSPRRARSVASQSIIAYTMSLGAENSVAYSNNSIAIPTNFTISVTTEILPVSMTKTSVDCTMYICGDSTECSNLLLQYGSFCTQLNRALTGIAVEQDKNTQEVFAQVKQIYKTPPIKDFGGFNFSQILPDPSKPSKRSFIEDLLFNKVTLADAGFIKQYGDCLGDIAARDLICAQKFNGLTVLPPLLTDEMIAQYTSALLAGTITSGWTFGAGAALQIPFAMQMAYRFNGIGVTQCVLYENQKLIANQFNSAIGKIQDSLSSTASALGKLQDVVNQNAQALNTLVKQLSSNFGAISSVLNDILSRLDKVEAEVQIDRLITGRLQSLQTYVTQQLIRAAEIRASANLAATKMSECVLGQSKRVDFCGKGYHLMSFPQSAPHGVVFLHVTYVPAQEKNFTTAPAICHDGKAHFPREGVFVSNGTHWFVTQRNFYEPQIITTDNTFVCGNCDVVIGIVNNTVYDPLQPELDSFKEELDKYFKNHTSPDVDLGDIPGINASVVNIQKEIDRLNEVAKNLNESLIDLQELGKYEQYIKGGGGSDIIKLLNEQVNKEMQSSNLYMSMSSWCYTHSLDGAGLFLFDHAAEEYEHAKKLIIFLNENNVPVQLTSISAPEHKFEGLTQIFQKAYEHEQHISESINNIVDHAIKSKDHATFNFLQWYVAEQHEEEVLFKDILDKIELIGNENHGLYLADQYVKGIAKSRKS

SEQ ID NO: 13702 - protein, 1379 aa, Artificial Sequence
  SARS-CoV-2/USA/WA-UW261/2020__EPI_ISL_418046 spike protein (1-1211)(N914C_S1123C) Ferritin construct
MFVFLVLLPLVSSQCVNLTTRTQLPPAYTNSFTRGVYYPDKVFRSSVLHSTQDLFLPFFSNVTWFHAIHVSGTNGTKRFDNPVLPFNDGVYFASTEKSNIIRGWIFGTTLDSKTQSLLIVNNATNVVIKVCEFQFCNDPFLGVYYHKNNKSWMESEFRVYSSANNCTFEYVSQPFLMDLEGKQGNFKNLREFVFKNIDGYFKIYSKHTPINLVRDLPQGFSALEPLVDLPIGINITRFQTLLALHRSYLTPGDSSSGWTAGAAAYYVGYLQPRTFLLKYNENGTITDAVDCALDPLSETKCTLKSFTVEKGIYQTSNFRVQPTESIVRFPNITNLCPFGEVFNATRFTSVYAWNRKRISNCVADYSVLYNSASFSTFKCYGVSPTKLNDLCFTNVYADSFVIRGDEVRQIAPGQTGKIADYNYKLPDDFTGCVIAWNSNNLDSKVGGNYNYLYRLFRKSNLKPFERDISTEIYQAGSTPCNGVEGFNCYFPLQSYGFQPTNGVGYQPYRVVVLSFELLHAPATVCGPKKSTNLVKNKCVNFNFNGLTGTGVLTESNKKFLPFQQFGRDIADTTDAVRDPQTLEILDITPCSFGGVSVITPGTNTSNQVAVLYQDVNCTEVPVAIHADQLTPTWRVYSTGSNVFQTRAGCLIGAEHVNNSYECDIPIGAGICASYQTQTNSPRRARSVASQSIIAYTMSLGAENSVAYSNNSIAIPTNFTISVTTEILPVSMTKTSVDCTMYICGDSTECSNLLLQYGSFCTQLNRALTGIAVEQDKNTQEVFAQVKQIYKTPPIKDFGGFNFSQILPDPSKPSKRSFIEDLLFNKVTLADAGFIKQYGDCLGDIAARDLICAQKFNGLTVLPPLLTDEMIAQYTSALLAGTITSGWTFGAGAALQIPFAMQMAYRFNGIGVTQCVLYENQKLIANQFNSAIGKIQDSLSSTASALGKLQDVVNQNAQALNTLVKQLSSNFGAISSVLNDILSRLDKVEAEVQIDRLITGRLQSLQTYVTQQLIRAAEIRASANLAATKMSECVLGQSKRVDFCGKGYHLMSFPQSAPHGVVFLHVTYVPAQEKNFTTAPAICHDGKAHFPREGVFVSNGTHWFVTQRNFYEPQIITTDNTFVCGNCDVVIGIVNNTVYDPLQPELDSFKEELDKYFKNHTSPDVDLGDISGINASVVNIQKEIDRLNEVAKNLNESLIDLQELGKYEQYIKGGGGSDIIKLLNEQVNKEMQSSNLYMSMSSWCYTHSLDGAGLFLFDHAAEEYEHAKKLIIFLNENNVPVQLTSISAPEHKFEGLTQIFQKAYEHEQHISESINNIVDHAIKSKDHATFNFLQWYVAEQHEEEVLFKDILDKIELIGNENHGLYLADQYVKGIAKSRKS

SEQ ID NO: 13703 - protein, 1379 aa, Artificial Sequence
  SARS-CoV-2/Portugal/PT0035/2020__EPI_ISL_418020 spike protein (1-1211)(N914C_S1123C) Ferritin construct
MFVFLVLLPLVSSQCVNLTTRTQLPPAYTNSFTRGVYYPDKVFRSSVLHSTQDLFLPFFSNVTWFHAIHVSGTNGTKRFDNPVLPFNDGVYFASTEKSNIIRGWIFGTTLDSKTQSLLIVNNATNVVIKVCEFQFCNDPFLGVYYHKNNKSWMESEFRVYSSANNCTFEYVSQPFLMDLEGKQGNFKNLREFVFKNIDGYFKIYSKHTPINLVRDLPQGFSALEPLVDLPIGINITRFQTLLALHRSYLTPGDSSSGWTAGAAAYYVGYLQPRTFLLKYNENGTITDAVDCALDPLSETKCTLKSFTVEKGIYQTSNFRVQPTESIVRFPNITNLCPFGEVFNATRFASVYAWNRKRISNCVADYSVLYNSASFSTFKCYGVSPTKLNDLCFTNVYADSFVIRGDEVRQIAPGQTGKIADYNYKLPDDFTGCVIAWNSNNLDSKVGGNYNYLYRLFRKSNLKPFERDISTEIYQAGSTPCNGVEGFNCYFPLQSYGFQPTNGVGYQPYRVVVLSFELLHAPATVCGPKKSTNLVKNKCVNFNFNGLTGTGVLTESNKKFLPFQQFGRDIADTTDAVRDPQTLEILDITPCSFGGVSVITPGTNTSNQVAVLYQDVNCTEVPVAIHADQLTPTWRVYSTGSNVFQTRAGCLIGAEHVNNSYECDIPIGAGICASYQTQTNSPRRARSVASQSIIAYTMSLGAENSVAYSNNSIAIPTNFTISVTTEILPVSMTKTSVDCTMYICGDSTECSNLLLQYGSFCTQLNRALTGIAVEQDKNTQEVFAQVKQIYKTPPIKDFGGFNFSQILPDPSKPSKRSFIEDLLFNKVTLADAGFIKQYGDCLGDISARDLICAQKFNGLTVLPPLLTDEMIAQYTSALLAGTITSGWTFGAGAALQIPFAMQMAYRFNGIGVTQCVLYENQKLIANQFNSAIGKIQDSLSSTASALGKLQDVVNQNAQALNTLVKQLSSNFGAISSVLNDILSRLDKVEAEVQIDRLITGRLQSLQTYVTQQLIRAAEIRASANLAATKMSECVLGQSKRVDFCGKGYHLMSFPQSAPHGVVFLHVTYVPAQEKNFTTAPAICHDGKAHFPREGVFVSNGTHWFVTQRNFYEPQIITTDNTFVCGNCDVVIGIVNNTVYDPLQPELDSFKEELDKYFKNHTSPDVDLGDISGINASVVNIQKEIDRLNEVAKNLNESLIDLQELGKYEQYIKGGGGSDIIKLLNEQVNKEMQSSNLYMSMSSWCYTHSLDGAGLFLFDHAAEEYEHAKKLIIFLNENNVPVQLTSISAPEHKFEGLTQIFQKAYEHEQHISESINNIVDHAIKSKDHATFNFLQWYVAEQHEEEVLFKDILDKIELIGNENHGLYLADQYVKGIAKSRKS

SEQ ID NO: 13704 - protein, 1379 aa, Artificial Sequence
  SARS-CoV-2/USA/NY-NYUMC7/2020__EPI_ISL_418192 spike protein (1-1211)(N914C_S1123C) Ferritin construct
MFVFLVLLPLVSSQCVNLTTRTQLPPAYTNSFTRGVYYPDKVFRSSVLHSTQDLFLPFFSNVTWFHAIHVSGTNGTKRFDNPVLPFNDGVYFASTEKSNIIRGWIFGTTLDSKTQSLLIVNNATNVVIKVCEFQFCNDPFLGVYHHKNNKSWMESEFRVYSSANNCTFEYVSQPFLMDLEGKQGNFKNLREFVFKNIDGYFKIYSKHTPINLVRDLPQGFSALEPLVDLPIGINITRFQTLLALHRSYLTPGDSSSGWTAGAAAYYVGYLQPRTFLLKYNENGTITDAVDCALDPLSETKCTLKSFTVEKGIYQTSNFRVQPTESIVRFPNITNLCPFGEVFNATRFASVYAWNRKRISNCVADYSVLYNSASFSTFKCYGVSPTKLNDLCFTNVYADSFVIRGDEVRQIAPGQTGKIADYNYKLPDDFTGCVIAWNSNNLDSKVGGNYNYLYRLFRKSNLKPFERDISTEIYQAGSTPCNGVEGFNCYFPLQSYGFQPTNGVGYQPYRVVVLSFELLHAPATVCGPKKSTNLVKNKCVNFNFNGLTGTGVLTESNKKFLPFQQFGRDIADTTDAVRDPQTLEILDITPCSFGGVSVITPGTNTSNQVAVLYQGVNCTEVPVAIHADQLTPTWRVYSTGSNVFQTRAGCLIGAEHVNNSYECDIPIGAGICASYQTQTNSPRRARSVASQSIIAYTMSLGAENSVAYSNNSIAIPTNFTISVTTEILPVSMTKTSVDCTMYICGDSTECSNLLLQYGSFCTQLNRALTGIAVEQDKNTQEVFAQVKQIYKTPPIKDFGGFNFSQILPDPSKPSKRSFIEDLLFNKVTLADAGFIKQYGDCLGDIAARDLICAQKFNGLTVLPPLLTDEMIAQYTSALLAGTITSGWTFGAGAALQIPFAMQMAYRFNGIGVTQCVLYENQKLIANQFNSAIGKIQDSLSSTASALGKLQDVVNQNAQALNTLVKQLSSNFGAISSVLNDILSRLDKVEAEVQIDRLITGRLQSLQTYVTQQLIRAAEIRASANLAATKMSECVLGQSKRVDFCGKGYHLMSFPQSAPHGVVFLHVTYVPAQEKNFTTAPAICHDGKAHFPREGVFVSNGTHWFVTQRNFYEPQIITTDNTFVCGNCDVVIGIVNNTVYDPLQPELDSFKEELDKYFKNHTSPDVDLGDISGINASVVNIQKEIDRLNEVAKNLNESLIDLQELGKYEQYIKGGGGSDIIKLLNEQVNKEMQSSNLYMSMSSWCYTHSLDGAGLFLFDHAAEEYEHAKKLIIFLNENNVPVQLTSISAPEHKFEGLTQIFQKAYEHEQHISESINNIVDHAIKSKDHATFNFLQWYVAEQHEEEVLFKDILDKIELIGNENHGLYLADQYVKGIAKSRKS

SEQ ID NO: 13705 - protein, 1379 aa, Artificial Sequence
  SARS-CoV-2/Iceland/189/2020__EPI_ISL_417709 spike protein (1-1211)(N914C_S1123C) Ferritin construct
MFVFLVLLPLVSSQCVNLTTRTQLPPAYTNSFTRGVYYPDKVFRSSVLHSTQDLFLPFFSNVTWFHAIHVSGTNGTKRFDNPVLPFNDGVYFASTEKSNIIRGWIFGTTLDSKTQSLLIVNNATNVVIKVCEFQFCNDPFLGVYYHKNNKSWMESEFRVYSSANNCTFEYVSQPFLMDLEGKQGNFKNLREFVFKNIDGYFKIYSKHTPINLVRDLPQGFSALEPLVDLPIGINITRFQTLLALHRSYLTPGDSSSGWTAGAAAYYVGYLQPRTFLLKYNENGTITDAVDCALDPLSETKCTLKSFTVEKGIYQTSNFRVQPTESIVRFPNITNLCPFGEVFNATRFASVYAWNRKRISNCVADYSVLYNSASFSTFKCYGVSPTKLNDLCFTNVYADSFVIRGDEVRQIAPGQTGKIADYNYKLPDDFTGCVIAWNSNNLDSKVGGNYNYLYRLFRKSNLKPFERDISTEIYQAGSTPCNGVEGFNCYFPLQSYGFQPTNGVGYQPYRVVVLSFELLHAPATVCGPKKSTNLVKNKCVNFNFNGLTGTGVLTESNKKFLPFQQFGRDIADTTDAVRDPQTLEILDITPCSFGGVSVITPGTNTSNQVAVLYQGVNCTEVPVAIHADQLTPTWRVYSTGSNVFQTRAGCLIGAEHVNNSYECDIPIGAGICASYQTQTNSPRRARSVASQSIIAYTMSLGAENSVAYSNNSIAIPTNFTISVTTEILPVSMTKTSVDCTMYICGDSTECSNLLLQYGSFCTQLNRALTGIAVEQDKNTQEVFAQVKQIYKTPPIKDFGGFNFSQILPDPSKPSKRSFIEDLLFNKVTLADAGFTKQYGDCLGDIAARDLICAQKFNGLTVLPPLLTDEMIAQYTSALLAGTITSGWTFGAGAALQIPFAMQMAYRFNGIGVTQCVLYENQKLIANQFNSAIGKIQDSLSSTASALGKLQDVVNQNAQALNTLVKQLSSNFGAISSVLNDILSRLDKVEAEVQIDRLITGRLQSLQTYVTQQLIRAAEIRASANLAATKMSECVLGQSKRVDFCGKGYHLMSFPQSAPHGVVFLHVTYVPAQEKNFTTAPAICHDGKAHFPREGVFVSNGTHWFVTQRNFYEPQIITTDNTFVCGNCDVVIGIVNNTVYDPLQPELDSFKEELDKYFKNHTSPDVDLGDISGINASVVNIQKEIDRLNEVAKNLNESLIDLQELGKYEQYIKGGGGSDIIKLLNEQVNKEMQSSNLYMSMSSWCYTHSLDGAGLFLFDHAAEEYEHAKKLIIFLNENNVPVQLTSISAPEHKFEGLTQIFQKAYEHEQHISESINNIVDHAIKSKDHATFNFLQWYVAEQHEEEVLFKDILDKIELIGNENHGLYLADQYVKGIAKSRKS

SEQ ID NO: 13706 - protein, 1379 aa, Artificial Sequence
  SARS-CoV-2/Australia/NSW56/2020__EPI_ISL_417408 spike protein (1-1211)(N914C_S1123C) Ferritin construct
MFVFLVLLPLVSSQCVNLTTRTQLPPAYTNSFTRGVYYPDKVFRSSVLHSTQDLFLPFFSNVTWFHAIHVSGTNGTKRFDNPVLPFNDGVYFASTEKSNIIRGWIFGTTLDSKTQSLLIVNNATNVVIKVCEFQFCNDPFLGVYYHKNNKSWMESEFRVYSSANNCTFEYVSQPFLMDLEGKQGNFKNLREFVFKNIDGYFKIYSKHTPINLVRDLPQGFSALEPLVDLPIGINITRFQTLLALHRSYLTPGDSSSGWTAGAAAYYVGYLQPRTFLLKYNENGTITDAVDCALDPLSETKCTLKSFTVEKGIYQTSNFRVQPTESIVRFPNITNLCPFGEVFNATRFASVYAWNRKRISNCVADYSVLYNSASFSTFKCYGVSPTKLNDLCFTNVYADSFVIRGDEVRQIAPGQTGKIADYNYKLPDDFTGCVIAWNSNNLDSKVGGNYNYLYRLFRKSNLKPFERDISTEIYQAGSTPCNGVEGFNCYFPLQSYGFQPTNGVGYQPYRVVVLSFELLHAPATVCGPKKSTNLVKNKCVNFNFNGLTGTGVLTESNKKFLPFQQFGRDIADTTDAVRDPQTLEILDITPCSFGGVSVITPGTNTSNQVAVLYQDVNCTEVPVAIHADQLTPTWRVYSTGSNVFQTRAGCLIGAEHVNNSYECDIPIGAGICASYQTQTNSPRRARSVASQSIIAYTMSLGAENSVAYSNNSIAIPTNFTISVTTEILPVSMTKTSVDCTMYICGDSTECSNLLLQYGSFCTQLNRALTGIAVEQDKNTQEVFAQVKQIYKTPPIKDFGGFNFSQILPDSSKPSKRSFIEDLLFNKVTLADAGFIKQYGDCLGDIAARDLICAQKFNGLTVLPPLLTDEMIAQYTSALLAGTITSGWTFGAGAALQIPFAMQMAYRFNGIGVTQCVLYENQKLIANQFNSAIGKIQDSLSSTASALGKLQDVVNQNAQALNTLVKQLSSNFGAISSVLNDILSRLDKVEAEVQIDRLITGRLQSLQTYVTQQLIRAAEIRASANLAATKMSECVLGQSKRVDFCGKGYHLMSFPQSAPHGVVFLHVTYVPAQEKNFTTAPAICHDGKAHFPREGVFVSNGTHWFVTQRNFYEPQIITTDNTFVCGNCDVVIGIVNNTVYDPLQPELDSFKEELDKYFKNHTSPDVDLGDISGINASVVNIQKEIDRLNEVAKNLNESLIDLQELGKYEQYIKGGGGSDIIKLLNEQVNKEMQSSNLYMSMSSWCYTHSLDGAGLFLFDHAAEEYEHAKKLIIFLNENNVPVQLTSISAPEHKFEGLTQIFQKAYEHEQHISESINNIVDHAIKSKDHATFNFLQWYVAEQHEEEVLFKDILDKIELIGNENHGLYLADQYVKGIAKSRKS

SEQ ID NO: 13707 - protein, 1379 aa, Artificial Sequence
  SARS-CoV-2/Iceland/280/2020__EPI_ISL_417608 spike protein (1-1211)(N914C_S1123C) Ferritin construct
MFVFLVLLPLVSSQCVNLTTRTQLPPAYTNSFTRGVYYPDKVFRSSVLHSTQDLFLPFFSNVTWFHAIHVSGTNGTKRFDNPVLPFNDGVYFASTEKSNIIRGWIFGTTLDSKTQSLLIVNNATNVVIKVCEFQFCNDPFLGVYYHKNNKSWMESEFRVYSSANNCTFEYVSQPFLMDLEGKQGNFKNLREFVFKNIDGYFKIYSKHTPINLVRDLPQGFSALEPLVDLPIGINITRFQTLLALHRSYLTPGDSSSGWTAGAAAYYVGYLQPRTFLLKYNENGTITDAVDCALDPLSETKCTLKSFTVEKGIYQTSNFRVQPTESIVRFPNITNLCPFGEVFNATRFASVYAWNRKRISNCVADYSVLYNSASFSTFKCYGVSPTKLNDLCFTNVYADSFVIRGDEVRQIAPGQTGKIADYNYKLPDDFTGCVIAWNSNNLDSKVGGNYNYLYRLFRKSNLKPFERDISTEIYQAGSTPCNGVEGFNCYFPLQSYGFQPTNGVGYQPYRVVVLSFELLHAPATVCGPKKSTNLVKNKCVNFNFNGLTGTGVLTESNKKFLPFQQFGRDIADTTDAVRDPQTLEILDITPCSFGGVSVITPGTNTSNQVAVLYQGVNCTEVPVAIHADQLTPTWRVYSTGSNVFQTRAGCLIGAEHVNNSYECDIPIGAGICASYHTQTNSPRRARSVASQSIIAYTMSLGAENSVAYSNNSIAIPTNFTISVTTEILPVSMTKTSVDCTMYICGDSTECSNLLLQYGSFCTQLNRALTGIAVEQDKNTQEVFAQVKQIYKTPPIKDFGGFNFSQILPDPSKPSKRSFIEDLLFNKVTLADAGFIKQYGDCLGDIAARDLICAQKFNGLTVLPPLLTDEMIAQYTSALLAGTITSGWTFGAGAALQIPFAMQMAYRFNGIGVTQCVLYENQKLIANQFNSAIGKIQDSLSSTASALGKLQDVVNQNAQALNTLVKQLSSNFGAISSVLNDILSRLDKVEAEVQIDRLITGRLQSLQTYVTQQLIRAAEIRASANLAATKMSECVLGQSKRVDFCGKGYHLMSFPQSAPHGVVFLHVTYVPAQEKNFTTAPAICHDGKAHFPREGVFVSNGTHWFVTQRNFYEPQIITTDNTFVCGNCDVVIGIVNNTVYDPLQPELDSFKEELDKYFKNHTSPDVDLGDISGINASVVNIQKEIDRLNEVAKNLNESLIDLQELGKYEQYIKGGGGSDIIKLLNEQVNKEMQSSNLYMSMSSWCYTHSLDGAGLFLFDHAAEEYEHAKKLIIFLNENNVPVQLTSISAPEHKFEGLTQIFQKAYEHEQHISESINNIVDHAIKSKDHATFNFLQWYVAEQHEEEVLFKDILDKIELIGNENHGLYLADQYVKGIAKSRKS

SEQ ID NO: 13708 - protein, 1379 aa, Artificial Sequence; identical to SEQ ID NO: 13663
  SARS-CoV-2/Iceland/247/2020__EPI_ISL_417575 spike protein (1-1211)(N914C_S1123C) Ferritin construct

SEQ ID NO: 13709 - protein, 1379 aa, Artificial Sequence
  SARS-CoV-2/Iceland/238/2020__EPI_ISL_417566 spike protein (1-1211)(N914C_S1123C) Ferritin construct
MFVFLVLLPLVSSQCVNLTTRTQLPPAYTNSFTRGVYYPDKVFRSSVLHSTQDLFLPFFSNVTWFHAIHVSGTNGTKRFDNPVLPFNDGVYFASTEKSNIIRGWIFGTTLDSKTQSLLIVNNATNVVIKVCEFQFCNDPFLGVYYHKNNKSWMESEFRVYSSANNCTFEYVSQPFLMDLEGKQGNFKNLREFVFKNIDGYFKIYSKHTPINLVRDLPQGFSALEPLVDLPIGINITRFQTLLALHRSYLTPGDSSSGWTAGAAAYYVGYLQPRTFLLKYNENGTITDAVDCALDPLSETKCTLKSFTVEKGIYQTSNFRVQPTESIVRFPNITNLCPFGEVFNATRFASVYAWNRKRISNCVADYSVLYNSASFSTFKCYGVSPTKLNDLCFTNVYADSFVIRGDEVRQIAPGQTGKIADYNYKLPDDFTGCVIAWNSNNLDSKVGGNYNYLYRLFRKSNLKPFERDISTEIYQAGSTPCNGVEGFNCYFPLQSYGFQPTNGVGYQPYRVVVLSFELLHAPATVCGPKKSTNLVKNKCVNFNFNGLTGTGVLTESNKKFLPFQQFGRDIADTTDAVRDPQTLEILDITPCSFGGVSVITPGTNTSNQVAVLYQGVNCTEVPVAIHADQLTPTWRVYSTGSNVFQTRAGCLIGAEHVNNSYECDIPIGAGICASYQTQTNSPRRARSVASQSIIAYTMSLGAENSVAYSNNSIAIPTNFTISVTTEILPVSMTKTSVDCTMYICGDSTECSNLLLQYGSFCTQLNRALTGIAVEQDKNTQEVFAQVKQIYKTPPIKDFGGFNFSQILPDPSKPSKRSFIEDLLFNKVTLADVGFIKQYGDCLGDIAARDLICAQKFNGLTVLPPLLTDEMIAQYTSALLAGTITSGWTFGAGAALQIPFAMQMAYRFNGIGVTQCVLYENQKLIANQFNSAIGKIQDSLSSTASALGKLQDVVNQNAQALNTLVKQLSSNFGAISSVLNDILSRLDKVEAEVQIDRLITGRLQSLQTYVTQQLIRAAEIRASANLAATKMSECVLGQSKRVDFCGKGYHLMSFPQSAPHGVVFLHVTYVPAQEKNFTTAPAICHDGKAHFPREGVFVSNGTHWFVTQRNFYEPQIITTDNTFVCGNCDVVIGIVNNTVYDPLQPELDSFKEELDKYFKNHTSPDVDLGDISGINASVVNIQKEIDRLNEVAKNLNESLIDLQELGKYEQYIKGGGGSDIIKLLNEQVNKEMQSSNLYMSMSSWCYTHSLDGAGLFLFDHAAEEYEHAKKLIIFLNENNVPVQLTSISAPEHKFEGLTQIFQKAYEHEQHISESINNIVDHAIKSKDHATFNFLQWYVAEQHEEEVLFKDILDKIELIGNENHGLYLADQYVKGIAKSRKS

SEQ ID NO: 13710 - protein, 1379 aa, Artificial Sequence
  SARS-CoV-2/Greece/16/2020__EPI_ISL_418265 spike protein (1-1211)(N914C_S1123C) Ferritin construct
MFVFLVLLPLVSSQCVNLTTRTQLPPAYTNSFTRGVYYPDKVFRSSVLHSTQDLFLPFFSNVTWFHAIHVSGTNGTKRFDNPVLPFNDGVYFASTEKSNIIRGWIFGTTLDSKTQSLLIVNNATNVVIKVCEFQFCNDPFLGVYYHKNNKSWMESEFRVYSSANNCTFEYVSQPFLMDLEGKQGNFKNLREFVFKNVDGYFKIYSKHTPINLVRDLPQGFSALEPLVDLPIGINITRFQTLLALHRSYLTPGDSSSGWTAGAAAYYVGYLQPRTFLLKYNENGTITDAVDCALDPLSETKCTLKSFTVEKGIYQTSNFRVQPTESIVRFPNITNLCPFGEVFNATRFASVYAWNRKRISNCVADYSVLYNSASFSTFKCYGVSPTKLNDLCFTNVYADSFVIRGDEVRQIAPGQTGKIADYNYKLPDDFTGCVIAWNSNNLDSKVGGNYNYLYRLFRKSNLKPFERDISTEIYQAGSTPCNGVEGFNCYFPLQSYGFQPTNGVGYQPYRVVVLSFELLHAPATVCGPKKSTNLVKNKCVNFNFNGLTGTGVLTESNKKFLPFQQFGRDIADTTDAVRDPQTLEILDITPCSFGGVSVITPGTNTSNQVAVLYQDVNCTEVPVAIHADQLTPTWRVYSTGSNVFQTRAGCLIGAEHVNNSYECDIPIGAGICASYQTQTNSPRRARSVASQSIIAYTMSLGAENSVAYSNNSIAIPTNFTISVTTEILPVSMTKTSVDCTMYICGDSTECSNLLLQYGSFCTQLNRALTGIAVEQDKNTQEVFAQVKQIYKTPPIKDFGGFNFSQILPDPSKPSKRSFIEDLLFNKVTLADAGFIKQYGDCLGDIAARDLICAQKFNGLTVLPPLLTDEMIAQYTSALLAGTITSGWTFGAGAALQIPFAMQMAYRFNGIGVTQCVLYENQKLIANQFNSAIGKIQDSLSSTASALGKLQDVVNQNAQALNTLVKQLSSNFGAISSVLNDILSRLDKVEAEVQIDRLITGRLQSLQTYVTQQLIRAAEIRASANLAATKMSECVLGQSKRVDFCGKGYHLMSFPQSAPHGVVFLHVTYVPAQEKNFTTAPAICHDGKAHFPREGVFVSNGTHWFVTQRNFYEPQIITTDNTFVCGNCDVVIGIVNNTVYDPLQPELDSFKEELDKYFKNHTSPDVDLGDISGINASVVNIQKEIDRLNEVAKNLNESLIDLQELGKYEQYIKGGGGSDIIKLLNEQVNKEMQSSNLYMSMSSWCYTHSLDGAGLFLFDHAAEEYEHAKKLIIFLNENNVPVQLTSISAPEHKFEGLTQIFQKAYEHEQHISESINNIVDHAIKSKDHATFNFLQWYVAEQHEEEVLFKDILDKIELIGNENHGLYLADQYVKGIAKSRKS

SEQ ID NO: 13711 - protein, 1379 aa, Artificial Sequence
  SARS-CoV-2/Iceland/319/2020__EPI_ISL_417648 spike protein (1-1211)(N914C_S1123C) Ferritin construct
MFVFLVLLPLVSSQCVNLTTRTQLPPAYTNSFTRGVYYPDKVFRSSVLHSTQDLFLPFFSNVTWFHAIHVSGTNGTKRFDNPVLPFNDGVYFASTEKSNIIRGWIFGTTLDSKTQSLLIVNNATNVVIKVCEFQFCNDPFLGVYYHKNNKSWMESEFRVYSSANNCTFEYVSQPFLIDLEGKQGNFKNLREFVFKNIDGYFKIYSKHTPINLVRDLPQGFSALEPLVDLPIGINITRFQTLLALHRSYLTPGDSSSGWTAGAAAYYVGYLQPRTFLLKYNENGTITDAVDCALDPLSETKCTLKSFTVEKGIYQTSNFRVQPTESIVRFPNITNLCPFGEVFNATRFASVYAWNRKRISNCVADYSVLYNSASFSTFKCYGVSPTKLNDLCFTNVYADSFVIRGDEVRQIAPGQTGKIADYNYKLPDDFTGCVIAWNSNNLDSKVGGNYNYLYRLFRKSNLKPFERDISTEIYQAGSTPCNGVEGFNCYFPLQSYGFQPTNGVGYQPYRVVVLSFELLHAPATVCGPKKSTNLVKNKCVNFNFNGLTGTGVLTESNKKFLPFQQFGRDIADTTDAVRDPQTLEILDITPCSFGGVSVITPGTNTSNQVAVLYQGVNCTEVPVAIHADQLTPTWRVYSTGSNVFQTRAGCLIGAEHVNNSYECDIPIGAGICASYQTQTNSPRRARSVASQSIIAYTMSLGAENSVAYSNNSIAIPTNFTISVTTEILPVSMTKTSVDCTMYICGDSTECSNLLLQYGSFCTQLNRALTGIAVEQDKNTQEVFAQVKQIYKTPPIKDFGGFNFSQILPDPSKPSKRSFIEDLLFNKVTLADAGFIKQYGDCLGDIAARDLICAQKFNGLTVLPPLLTDEMIAQYTSALLAGTITSGWTFGAGAALQIPFAMQMAYRFNGIGVTQCVLYENQKLIANQFNSAIGKIQDSLSSTASALGKLQDVVNQNAQALNTLVKQLSSNFGAISSVLNDILSRLDKVEAEVQIDRLITGRLQSLQTYVTQQLIRAAEIRASANLAATKMSECVLGQSKRVDFCGKGYHLMSFPQSAPHGVVFLHVTYVPAQEKNFTTAPAICHDGKAHFPREGVFVSNGTHWFVTQRNFYEPQIITTDNTFVCGNCDVVIGIVNNTVYDPLQPELDSFKEELDKYFKNHTSPDVDLGDISGINASVVNIQKEIDRLNEVAKNLNESLIDLQELGKYEQYIKGGGGSDIIKLLNEQVNKEMQSSNLYMSMSSWCYTHSLDGAGLFLFDHAAEEYEHAKKLIIFLNENNVPVQLTSISAPEHKFEGLTQIFQKAYEHEQHISESINNIVDHAIKSKDHATFNFLQWYVAEQHEEEVLFKDILDKIELIGNENHGLYLADQYVKGIAKSRKS

SEQ ID NO: 13712 - protein, 1379 aa, Artificial Sequence
  SARS-CoV-2/Congo/94/2020__EPI_ISL_417947 spike protein (1-1211)(N914C_S1123C) Ferritin construct
MFVFLVLLPLVSSQCVNLTTRTQLPPAYTNSFTRGVYYPDKVFRSSVLHSTQDLFLPFFSNVTWFHAIHVSGTNGTKRFDNPVLPFNDGVYFASTEKSNIIRGWIFGTTLDSKTQSLLIVNNATNVVIKVCEFQFCNDPFLGVYYHKNNKSWMESEFRVYSSANNCTFEYVSQPFLMDLEGKQGNFKNLREFVFKNIDGYFKIYSKHTPINLVRDLPQGFSALEPLVDLPIGINITRFQTLLALHRSYLTPGDSSSGWTAGAAAYYVGYLQPRTFLLKYNENGTITDAVDCALDPLSETKCTLKSFTVEKGIYQTSNFRVQPTESIVRFPNITNLCPFGEVFNATRFASVYAWNRKRISNCVADYSVLYNSASFSTFKCYGVSPTKLNDLCFTNVYADSFVIRGDEVRQIAPGQTGKIADYNYKLPDDFTGCVIAWNSNNLDSKVGGNYNYLYRLFRKSNLKPFERDISTEIYQAGSTPCNGVEGFNCYFPLQSYGFQPTNGVGYQPYRVVVLSFELLHAPATVCGPKKSTNLVKNKCVNFNFNGLTGTGVLTESNKKFLPFQQFGRDIADTTDAVRDPQTLEILDITPCSFGGVSVITPGTNTSNQVAVLYQGVNCTEVPVAIHADQLTPTWRVYSTGSNVFQTRAGCLIGAEHVNNSYECDIPIGAGICASYQTQTNSPRRARSVASQSIIAYTMSLGAENSVAYSNNSIAIPTNFTISVTTEILPVSMTKTSVDCTMYICGDSTECSNLLLQYGSFCTQLNRALTGIAVEQDKNTQEVFAQVKQIYKTPPIKDFGGFNFSQILPDPSKPSKRSFIEDILFNKVTLADAGFIKQYGDCLGDIAARDLICAQKFNGLTVLPPLLTDEMIAQYTSALLAGTITSGWTFGAGAALQIPFAMQMAYRFNGIGVTQCVLYENQKLIANQFNSAIGKIQDSLSSTASALGKLQDVVNQNAQALNTLVKQLSSNFGAISSVLNDILSRLDKVEAEVQIDRLITGRLQSLQTYVTQQLIRAAEIRASANLAATKMSECVLGQSKRVDFCGKGYHLMSFPQSAPHGVVFLHVTYVPAQEKNFTTAPAICHDGKAHFPREGVFVSNGTHWFVTQRNFYEPQIITTDNTFVCGNCDVVIGIVNNTVYDPLQPELDSFKEELDKYFKNHTSPDVDLGDISGINASVVNIQKEIDRLNEVAKNLNESLIDLQELGKYEQYIKGGGGSDIIKLLNEQVNKEMQSSNLYMSMSSWCYTHSLDGAGLFLFDHAAEEYEHAKKLIIFLNENNVPVQLTSISAPEHKFEGLTQIFQKAYEHEQHISESINNIVDHAIKSKDHATFNFLQWYVAEQHEEEVLFKDILDKIELIGNENHGLYLADQYVKGIAKSRKS

SEQ ID NO: 13713 - protein, 1379 aa, Artificial Sequence
  SARS-CoV-2/Congo/158/2020__EPI_ISL_417950 spike protein (1-1211)(N914C_S1123C) Ferritin construct
MFVFLVLLPLVSSQCVNLTTRTQLPPAYTNSFTRGVYYPDKVFRSSVLHSTQDLFLPFFSNVTWFHAIHVSGTNGTKRFDNPVLPFNDGVYFASTEKSNIIRGWIFGTTLDSKTQSLLIVNNATNVVIKVCEFQFCNDPFLGVYYHKNNKSWMESEFRVYSSANNCTFEYVSQPFLMDLEGKQGNFKNLREFVFKNIDGYFKIYSKHTPINLVRDLPQGFSALEPLVDLPIGINITRFQTLLALHRSYLTPGDSSSGWTAGAAAYYVGYLQPRTFLLKYNENGTITDAVDCALDPLSETKCTLKSFTVEKGIYQTSNFRVQPTESIVRFPNITNLCPFGEVFNATRFASVYAWNRKRISNCVADYSVLYNSASFSTFKCYGVSPTKLNDLCFTNVYADSFVIRGDEVRQIAPGQTGKIADYNYKLPDDFTGCVIAWNSNNLDSKVGGNYNYLYRLFRKSNLKPFERDISTEIYQAGSTPCNGVEGFNCYFPLQSYGFQPTNGVGYQPYRVVVLSFELLHAPATVCGPKKSTNLVKNKCVNFNFNGLTGTGVLTESNKKFLPFQQFGRDIADTTDAVRDPQTLEILDITPCSFGGVSVITPGTNTSNQVAVLYQDVNCTEVPVAIHADQLTPTWRVYSTGSNVFQTRAGCLIGAEHVNNSYECDIPIGAGICASYQTQTNSPRRARSVASQSIIAYTMSLGAENSVAYSNNSIAIPTNFTISVTTEILPVSMTKTSVDCTMYICGDSTECSNLLLQYGSFCTQLNRALTGIAVEQDKNTQEVFAQVKQIYKTPPIKDFGGFNFSQILPDPSKPSKRSFIEDLLFNKVTLADAGFIKQYGDCLGDIAARDLICAQKFNGLTVLPPLLTDEMIAQYTSALLAGTITSGWTFGAGAALQIPFAMQMAYRFNGIGVTQCVLYENQKLIANQFNSAIGKIQDSLSSTASALGKLQDVVNQNAQALNTLVKQLSSNFGAISSVLNDILSRLDKVEAEVQIDRLITGRLQSLQTYVTQQLIRAAEIRASANLAATKMSECVLGQSKRVDFCGKGYHLMSFPQSAPHGVVFLHVTYVPAQEKNFTTAPAICHDGKAHFPREGVFVSNGTHWFVTQRNFYEPQIITTDNTFLCGNCDVVIGIVNNTVYDPLQPELDSFKEELDKYFKNHTSPDVDLGDISGINASVVNIQKEIDRLNEVAKNLNESLIDLQELGKYEQYIKGGGGSDIIKLLNEQVNKEMQSSNLYMSMSSWCYTHSLDGAGLFLFDHAAEEYEHAKKLIIFLNENNVPVQLTSISAPEHKFEGLTQIFQKAYEHEQHISESINNIVDHAIKSKDHATFNFLQWYVAEQHEEEVLFKDILDKIELIGNENHGLYLADQYVKGIAKSRKS

SEQ ID NO: 13714 - protein, 1379 aa, Artificial Sequence
  SARS-CoV-2/USA/UT-00034/2020__EPI_ISL_417977 spike protein (1-1211)(N914C_S1123C) Ferritin construct
MFVFLVLLPLVSSQCVNLTTRTQLPPAYTNSFTRGVYYPDKVFRSSVLHSTQDLFLPFFSNVTWFHAIHVSGTNGTKRFDNPVLPFNDGVYFASTEKSNIIRGWIFGTTLDSKTQSLLIVNNATNVVIKVCEFQFCNDPFLGVYYYKNNKSWMESEFRVYSSANNCTFEYVSQPFLMDLEGKQGNFKNLREFVFKNIDGYFKIYSKHTPINLVRDLPQGFSALEPLVDLPIGINITRFQTLLALHRSYLTPGDSSSGWTAGAAAYYVGYLQPRTFLLKYNENGTITDAVDCALDPLSETKCTLKSFTVEKGIYQTSNFRVQPTESIVRFPNITNLCPFGEVFNATRFASVYAWNRKRISNCVADYSVLYNSASFSTFKCYGVSPTKLNDLCFTNVYADSFVIRGDEVRQIAPGQTGKIADYNYKLPDDFTGCVIAWNSNNLDSKVGGNYNYLYRLFRKSNLKPFERDISTEIYQAGSTPCNGVEGFNCYFPLQSYGFQPTNGVGYQPYRVVVLSFELLHAPATVCGPKKSTNLVKNKCVNFNFNGLTGTGVLTESNKKFLPFQQFGRDIADTTDAVRDPQTLEILDITPCSFGGVSVITPGTNTSNQVAVLYQGVNCTEVPVAIHADQLTPTWRVYSTGSNVFQTRAGCLIGAEHVNNSYECDIPIGAGICASYQTQTNSPRRARSVASQSIIAYTMSLGAENSVAYSNNSIAIPTNFTISVTTEILPVSMTKTSVDCTMYICGDSTECSNLLLQYGSFCTQLNRALTGIAVEQDKNTQEVFAQVKQIYKTPPIKDFGGFNFSQILPDPSKPSKRSFIEDLLFNKVTLADAGFIKQYGDCLGDIAARDLICAQKFNGLTVLPPLLTDEMIAQYTSALLAGTITSGWTFGAGAALQIPFAMQMAYRFNGIGVTQCVLYENQKLIANQFNSAIGKIQDSLSSTASALGKLQDVVNQNAQALNTLVKQLSSNFGAISSVLNDILSRLDKVEAEVQIDRLITGRLQSLQTYVTQQLIRAAEIRASANLAATKMSECVLGQSKRVDFCGKGYHLMSFPQSAPHGVVFLHVTYVPAQEKNFTTAPAICHDGKAHFPREGVFVSNGTHWFVTQRNFYEPQIITTDNTFVCGNCDVVIGIVNNTVYDPLQPELDSFKEELDKYFKNHTSPDVDLGDISGINASVVNIQKEIDRLNEVAKNLNESLIDLQELGKYEQYIKGGGGSDIIKLLNEQVNKEMQSSNLYMSMSSWCYTHSLDGAGLFLFDHAAEEYEHAKKLIIFLNENNVPVQLTSISAPEHKFEGLTQIFQKAYEHEQHISESINNIVDHAIKSKDHATFNFLQWYVAEQHEEEVLFKDILDKIELIGNENHGLYLADQYVKGIAKSRKS

SEQ ID NO: 13715 - protein, 1379 aa, Artificial Sequence
  SARS-CoV-2/USA/UT-00033/2020__EPI_ISL_417976 spike protein (1-1211)(N914C_S1123C) Ferritin construct
MFVFLVLLPLVSSQCVNLTTRTQLPPAYTNSFTRGVYYPDKVFRSSVLHSTQDLFLPFFSNVTWFHAIHVSGTNGTKRFDNPVLPFNDGVYFASTEKSNIIRGWIFGTTLDSKTQSLLIVNNATNVVIKVCEFQFCNDPFLGVYYHKNNKSWMESEFRVYSSANNCTFEYVSQPFLMDLEGKQGNFKNLREFVFKNIDGYFKIYSKHTPINLVRDLPQGFSALEPLVDLPIGINITRFQTLLALHRSYLTPGDSSSGLTAGAAAYYVGYLQPRTFLLKYNENGTITDAVDCALDPLSETKCTLKSFTVEKGIYQTSNFRVQPTESIVRFPNITNLCPFGEVFNATRFASVYAWNRKRISNCVADYSVLYNSASFSTFKCYGVSPTKLNDLCFTNVYADSFVIRGDEVRQIAPGQTGKIADYNYKLPDDFTGCVIAWNSNNLDSKVGGNYNYLYRLFRKSNLKPFERDISTEIYQAGSTPCNGVEGFNCYFPLQSYGFQPTNGVGYQPYRVVVLSFELLHAPATVCGPKKSTNLVKNKCVNFNFNGLTGTGVLTESNKKFLPFQQFGRDIADTTDAVRDPQTLEILDITPCSFGGVSVITPGTNTSNQVAVLYQGVNCTEVPVAIHADQLTPTWRVYSTGSNVFQTRAGCLIGAEHVNNSYECDIPIGAGICASYQTQTNSPRRARSVASQSIIAYTMSLGAENSVAYSNNSIAIPTNFTISVTTEILPVSMTKTSVDCTMYICGDSTECSNLLLQYGSFCTQLNRALTGIAVEQDKNTQEVFAQVKQIYKTPPIKDFGGFNFSQILPDPSKPSKRSFIEDLLFNKVTLADAGFIKQYGDCLGDIAARDLICAQKFNGLTVLPPLLTDEMIAQYTSALLAGTITSGWTFGAGAALQIPFAMQMAYRFNGIGVTQCVLYENQKLIANQFNSAIGKIQDSLSSTASALGKLQDVVNQNAQALNTLVKQLSSNFGAISSVLNDILSRLDKVEAEVQIDRLITGRLQSLQTYVTQQLIRAAEIRASANLAATKMSECVLGQSKRVDFCGKGYHLMSFPQSAPHGVVFLHVTYVPAQEKNFTTAPAICHDGKAHFPREGVFVSNGTHWFVTQRNFYEPQIITTDNTFVCGNCDVVIGIVNNTVYDPLQPELDSFKEELDKYFKNHTSPDVDLGDISGINASVVNIQKEIDRLNEVAKNLNESLIDLQELGKYEQYIKGGGGSDIIKLLNEQVNKEMQSSNLYMSMSSWCYTHSLDGAGLFLFDHAAEEYEHAKKLIIFLNENNVPVQLTSISAPEHKFEGLTQIFQKAYEHEQHISESINNIVDHAIKSKDHATFNFLQWYVAEQHEEEVLFKDILDKIELIGNENHGLYLADQYVKGIAKSRKS

SEQ ID NO: 13716 - protein, 1379 aa, Artificial Sequence
  SARS-CoV-2/USA/WI-13/2020__EPI_ISL_417516 spike protein (1-1211)(N914C_S1123C) Ferritin construct
MFVFLVLLPLVSSQCVNLTTRTQLPPAYTNSFTRGVYYPDKVFRSSVLHSTQDLFLPFFSNVTWFHAIHVSGTNGTKRFDNPVLPFNDGVYFASTEKSNIIRGWIFGTTLDSKTQSLLIVNNATNVVIKVCEFQFCNDPFLGVYYHKNNKSWMESEFRVYSSANNCTFEYVSQPFLMDLEGKQGNFKNLREFVFKNIDGYFKIYSKHTPINLVRDLPQGFSALEPLVDLPIGINITRFQTLLALHRSYLTPGDSSSGWTAGAAAYYVGYLQPRTFLLKYNENGTITDAVDCALDPLSETKCTLKSFTVEKGIYQTSNFRVLPTESIVRFPNITNLCPFGEVFNATRFASVYAWNRKRISNCVADYSVLYNSASFSTFKCYGVSPTKLNDLCFTNVYADSFVIRGDEVRQIAPGQTGKIADYNYKLPDDFTGCVIAWNSNNLDSKVGGNYNYLYRLFRKSNLKPFERDISTEIYQAGSTPCNGVEGFNCYFPLQSYGFQPTNGVGYQPYRVVVLSFELLHAPATVCGPKKSTNLVKNKCVNFNFNGLTGTGVLTESNKKFLPFQQFGRDIADTTDAVRDPQTLEILDITPCSFGGVSVITPGTNTSNQVAVLYQGVNCTEVPVAIHADQLTPTWRVYSTGSNVFQTRAGCLIGAEHVNNSYECDIPIGAGICASYQTQTNSPRRARSVASQSIIAYTMSLGAENSVAYSNNSIAIPTNFTISVTTEILPVSMTKTSVDCTMYICGDSTECSNLLLQYGSFCTQLNRALTGIAVEQDKNTQEVFAQVKQIYKTPPIKDFGGFNFSQILPDPSKPSKRSFIEDLLFNKVTLADAGFIKQYGDCLGDIAARDLICAQKFNGLTVLPPLLTDEMIAQYTSALLAGTITSGWTFGAGAALQIPFAMQMAYRFNGIGVTQCVLYENQKLIANQFNSAIGKIQDSLSSTASALGKLQDVVNQNAQALNTLVKQLSSNFGAISSVLNDILSRLDKVEAEVQIDRLITGRLQSLQTYVTQQLIRAAEIRASANLAATKMSECVLGQSKRVDFCGKGYHLMSFPQSAPHGVVFLHVTYVPAQEKNFTTAPAICHDGKAHFPREGVFVSNGTHWFVTQRNFYEPQIITTDNTFVCGNCDVVIGIVNNTVYDPLQPELDSFKEELDKYFKNHTSPDVDLGDISGINASVVNIQKEIDRLNEVAKNLNESLIDLQELGKYEQYIKGGGGSDIIKLLNEQVNKEMQSSNLYMSMSSWCYTHSLDGAGLFLFDHAAEEYEHAKKLIIFLNENNVPVQLTSISAPEHKFEGLTQIFQKAYEHEQHISESINNIVDHAIKSKDHATFNFLQWYVAEQHEEEVLFKDILDKIELIGNENHGLYLADQYVKGIAKSRKS

SEQ ID NO: 13717 - protein, 1378 aa, Artificial Sequence
  SARS-CoV-2/India/1-27/2020__EPI_ISL_413522 spike protein (1-1210)(N913C_S1122C) Ferritin construct
MFVFLVLLPLVSSQCVNLTTRTQLPPAYTNSFTRGVYYPDKVFRSSVLHSTQDLFLPFFSNVTWFHAIHVSGTNGTKRFDNPVLPFNDGVYFASTEKSNIIRGWIFGTTLDSKTQSLLIVNNATNVVIKVCEFQFCNDPFLGVYHKNNKSWMESEFRVYSSANNCTFEYVSQPFLMDLEGKQGNFKNLREFVFKNIDGYFKIYSKHTPINLVRDLPQGFSALEPLVDLPIGINITRFQTLLALHRSYLTPGDSSSGWTAGAAAYYVGYLQPRTFLLKYNENGTITDAVDCALDPLSETKCTLKSFTVEKGIYQTSNFRVQPTESIVRFPNITNLCPFGEVFNATRFASVYAWNRKRISNCVADYSVLYNSASFSTFKCYGVSPTKLNDLCFTNVYADSFVIRGDEVIQIAPGQTGKIADYNYKLPDDFTGCVIAWNSNNLDSKVGGNYNYLYRLFRKSNLKPFERDISTEIYQAGSTPCNGVEGFNCYFPLQSYGFQPTNGVGYQPYRVVVLSFELLHAPATVCGPKKSTNLVKNKCVNFNFNGLTGTGVLTESNKKFLPFQQFGRDIADTTDAVRDPQTLEILDITPCSFGGVSVITPGTNTSNQVAVLYQDVNCTEVPVAIHADQLTPTWRVYSTGSNVFQTRAGCLIGAEHVNNSYECDIPIGAGICASYQTQTNSPRRARSVASQSIIAYTMSLGAENSVAYSNNSIAIPTNFTISVTTEILPVSMTKTSVDCTMYICGDSTECSNLLLQYGSFCTQLNRALTGIAVEQDKNTQEVFAQVKQIYKTPPIKDFGGFNFSQILPDPSKPSKRSFIEDLLFNKVTLADAGFIKQYGDCLGDIAARDLICAQKFNGLTVLPPLLTDEMIAQYTSALLAGTITSGWTFGAGAALQIPFAMQMAYRFNGIGVTQCVLYENQKLIANQFNSAIGKIQDSLSSTASALGKLQDVVNQNAQALNTLVKQLSSNFGAISSVLNDILSRLDKVEAEVQIDRLITGRLQSLQTYVTQQLIRAAEIRASANLAATKMSECVLGQSKRVDFCGKGYHLMSFPQSAPHGVVFLHVTYVPAQEKNFTTAPAICHDGKAHFPREGVFVSNGTHWFVTQRNFYEPQIITTDNTFVCGNCDVVIGIVNNTVYDPLQPELDSFKEELDKYFKNHTSPDVDLGDISGINASVVNIQKEIDRLNEVAKNLNESLIDLQELGKYEQYIKGGGGSDIIKLLNEQVNKEMQSSNLYMSMSSWCYTHSLDGAGLFLFDHAAEEYEHAKKLIIFLNENNVPVQLTSISAPEHKFEGLTQIFQKAYEHEQHISESINNIVDHAIKSKDHATFNFLQWYVAEQHEEEVLFKDILDKIELIGNENHGLYLADQYVKGIAKSRKS

SEQ ID NO: 13718 - protein, 1373 aa, Artificial Sequence
  SARS-CoV-2/pangolin/Guangxi/P4L/2017__EPI_ISL_410538 spike protein (1-1205)(N908C_S1117C) Ferritin construct
MFVFLFVLPLVSSQCVNLTTRTGIPPGYTNSSTRGVYYPDKVFRSSILHLTQDLFLPFFSNVTWFNTINYQGGFKKFDNPVLPFNDGVYFASTEKSNIIRGWIFGTTLDARTQSLLIVNNATNVVIKVCEFQFCTDPFLGVYYHNNNKTWVENEFRVYSSANNCTFEYISQPFLMDLEGKQGNFKNLREFVFKNVDGYFKIYSKHTPIDLVRDLPRGFAALEPLVDLPIGINITRFQTLLALHRSYLTPGNLESGWTTGAAAYYVGYLQQRTFLLSYNQNGTITDAVDCSLDPLSETKCTLKSLTVEKGIYQTSNFRVQPTISIVRFPNITNLCPFGEVFNASKFASVYAWNRKRISNCVADYSVLYNSTSFSTFKCYGVSPTKLNDLCFTNVYADSFVVKGDEVRQIAPGQTGVIADYNYKLPDDFTGCVIAWNSVKQDALTGGNYGYLYRLFRKSKLKPFERDISTEIYQAGSTPCNGQVGLNCYYPLERYGFHPTTGVNYQPFRVVVLSFELLNGPATVCGPKLSTTLVKDKCVNFNFNGLTGTGVLTTSKKQFLPFQQFGRDISDTTDAVRDPQTLEILDITPCSFGGVSVITPGTNTSNQVAVLYQDVNCTEVPMAIHAEQLTPAWRVYSAGANVFQTRAGCLVGAEHVNNSYECDIPVGAGICASYHSMSSLRSVNQRSIIAYTMSLGAENSVAYSNNSIAIPTNFTISVTTEILPVSMTKTSVDCTMYICGDSIECSNLLLQYGSFCTQLNRALTGIAVEQDKNTQEVFAQVKQIYKTPPIKDFGGFNFSQILPDPSKPSKRSFIEDLLFNKVTLADAGFIKQYGDCLGDIAARDLICAQKFNGLTVLPPLLTDEMIAQYTSALLAGTITSGWTFGAGAALQIPFAMQMAYRFNGIGVTQCVLYENQKLIANQFNSAIGKIQDSLSSTASALGKLQDVVNQNAQALNTLVKQLSSNFGAISSVLNDILSRLDKVEAEVQIDRLITGRLQSLQTYVTQQLIRAAEIRASANLAATKMSECVLGQSKRVDFCGKGYHLMSFPQSAPHGVVFLHVTYVPAQEKNFTTAPAICHEGKAHFPREGVFVSNGTHWFITQRNFYEPQIITTDNTFVCGSCDVVIGIVNNTVYDPLQPELDSFKEELDKYFKNHTSPDVDLGDISGINASVVNIQKEIDRLNEVAKNLNESPIDLQELGKYEQYIKGGGGSDIIKLLNEQVNKEMQSSNLYMSMSSWCYTHSLDGAGLFLFDHAAEEYEHAKKLIIFLNENNVPVQLTSISAPEHKFEGLTQIFQKAYEHEQHISESINNIVDHAIKSKDHATFNFLQWYVAEQHEEEVLFKDILDKIELIGNENHGLYLADQYVKGIAKSRKS

SEQ ID NO: 13719 - protein, 1373 aa, Artificial Sequence
  SARS-CoV-2/pangolin/Guangxi/P5L/2017__EPI_ISL_410540 spike protein (1-1205)(N908C_S1117C) Ferritin construct
MFVFLFVLPLVSSQCVNLTTRTGIPPGYTNSSTRGVYYPDKVFRSSILHLTQDLFLPFFSNVTWFNTINYQGGFKKFDNPVLPFNDGVYFASTEKSNIIRGWIFGTTLDARTQSLLIVNNATNVVIKVCEFQFCTDPFLGVYYHNNNKTWVENEFRVYSSANNCTFEYISQPFLMDLEGKQGNFKNLREFVFKNVDGYFKIYSKHTPIDLVRDLPRGFAALEPLVDLPIGINITRFQTLLALHRSYLTPGKLESGWTTGAAAYYVGYLQQRTFLLSYNQNGTITDAVDCSLDPLSETKCTLKSLTVEKGIYQTSNFRVQPTISIVRFPNITNLCPFGEVFNASKFASVYAWNRKRISNCVADYSVLYNSTSFSTFKCYGVSPTKLNDLCFTNVYADSFVVKGDEVRQIAPGQTGVIADYNYKLPDDFTGCVIAWNSVKQDALTGGNYGYLYRLFRKSKLKPFERDISTEIYQAGSTPCNGQVGLNCYYPLERYGFHPTTGVNYQPFRVVVLSFELLNGPATVCGPKLSTTLVKDKCVNFNFNGLTGTGVLTTSKKQFLPFQQFGRDISDTTDAVRDPQTLEILDITPCSFGGVSVITPGTNTSNQVAVLYQDVNCTEVPMAIHAEQLTPAWRVYSAGANVFQTRAGCLVGAEHVNNSYECDIPVGAGICASYHSMSSFRSVNQRSIIAYTMSLGAENSVAYSNNSIAIPTNFTISVTTEILPVSMTKTSVDCTMYICGDSIECSNLLLQYGSFCTQLNRALTGIAVEQDKNTQEVFAQVKQIYKTPPIKDFGGFNFSQILPDPSKPSKRSFIEDLLFNKVTLADAGFIKQYGDCLGDIAARDLICAQKFNGLTVLPPLLTDEMIAQYTSALLAGTITSGWTFGAGAALQIPFAMQMAYRFNGIGVTQCVLYENQKLIANQFNSAIGKIQDSLSSTASALGKLQDVVNQNAQALNTLVKQLSSNFGAISSVLNDILSRLDKVEAEVQIDRLITGRLQSLQTYVTQQLIRAAEIRASANLAATKMSECVLGQSKRVDFCGKGYHLMSFPQSAPHGVVFLHVTYVPAQEKNFTTAPAICHEGKAHFPREGVFVSNGTHWFITQRNFYEPQIITTDNTFVCGSCDVVIGIVNNTVYDPLQPELDSFKEELDKYFKNHTSPDVDLGDISGINASVVNIQKEIDRLNEVAKNLNESLIDLQELGKYEQYIKGGGGSDIIKLLNEQVNKEMQSSNLYMSMSSWCYTHSLDGAGLFLFDHAAEEYEHAKKLIIFLNENNVPVQLTSISAPEHKFEGLTQIFQKAYEHEQHISESINNIVDHAIKSKDHATFNFLQWYVAEQHEEEVLFKDILDKIELIGNENHGLYLADQYVKGIAKSRKS

SEQ ID NO: 13720 - protein, 1373 aa, Artificial Sequence
  SARS-CoV-2/pangolin/Guangxi/P5E/2017__EPI_ISL_410541 spike protein (1-1205)(N908C_S1117C) Ferritin construct
MFVFLFVLPLVSSQCVNLTTRTGIPPGYTNSSTRGVYYPDKVFRSSILHLTQDLFLPFFSNVTWFNTITYQGGSKKFDNPVLPFNDGVYFASTEKSNIIRGWIFGTTLDARTQSLLIVNNATNVVIKVCEFQFCTDPFLGVYYHNNNKTWVENEFRVYSSANNCTFEYISQPFLMDLEGKQGNFKNLREFVFKNVDGYFKIYSKHTPIDLVRDLPRGFAALEPLVDLPIGINITRFQTLLALHRSYLTPGKLESGWTTGAAAYYVGYLQQRTFLLSYNQNGTITDAVDCSLDPLSETKCTLKSLTVEKGIYQTSNFRVQPTISIVRFPNITNLCPFGEVFNASKFASVYAWNRKRISNCVADYSVLYNSTSFSTFKCYGVSPTKLNDLCFTNVYADSFVVKGDEVRQIAPGQTGVIADYNYKLPDDFTGCVIAWNSVKQDALTGDNYGYLYRLFRKSKLKPFERDISTEIYQAGSTPCNGQVGLNCYYPLERYGFHPTTGVNYQPFRVVVLSFELLNGPATVCGPKLSTTLVKDKCVNFNFNGLTGTGVLTTSKKQFLPFQQFGRDISDTTDAVRDPQTLEILDITPCSFGGVSVITPGTNTSNQVAVLYQDVNCTEVPMAIHAEQLTPAWRVYSAGANVFQTRAGCLVGAEHVNNSYECDIPVGAGICASYHSMSSFRSVNQRSIIAYTMSLGAENSVAYSNNSIAIPTNFTISVTTEILPVSMTKTSVDCTMYICGDSIECSNLLLQYGSFCTQLNRALTGIAVEQDKNTQEVFAQVKQIYKTPPIKDFGGFNFSQILPDPSKPSKRSFIEDLLFNKVTLADAGFIKQYGDCLGDIAARDLICAQKFNGLTVLPPLLTDEMIAQYTSALLAGTITSGWTFGAGAALQIPFAMQMAYRFNGIGVTQCVLYENQKLIANQFNSAIGKIQDSLSSTASALGKLQDVVNQNAQALNTLVKQLSSNFGAISSVLNDILSRLDKVEAEVQIDRLITGRLQSLQTYVTQQLIRAAEIRASANLAATKMSECVLGQSKRVDFCGKGYHLMSFPQSAPHGVVFLHVTYVPAQEKNFTTAPAICHEGKAHFPREGVFVSNGTHWFITQRNFYEPQIITTDNTFVCGSCDVVIGIVNNTVYDPLQPELDSFKEELDKYFKNHTSPDVDLGDISGINASVVNIQKEIDRLNEVAKNLNESLIDLQELGKYEQYIKGGGGSDIIKLLNEQVNKEMQSSNLYMSMSSWCYTHSLDGAGLFLFDHAAEEYEHAKKLIIFLNENNVPVQLTSISAPEHKFEGLTQIFQKAYEHEQHISESINNIVDHAIKSKDHATFNFLQWYVAEQHEEEVLFKDILDKIELIGNENHGLYLADQYVKGIAKSRKS

SEQ ID NO: 13721 - protein, 1371 aa, Artificial Sequence
  SARS-CoV-2/pangolin/Guangxi/P1E/2017__EPI_ISL_410539 spike protein (1-1203)(N906C_S1115C) Ferritin construct
MFVFLFVLPLVSSQCVNLTTRTGIQPGYTNSSTRGVYYPDKVFRSSILHLTQDLFLPFFSNVTWFNTINYQGGFKKFDNPVLPFNDGVYFASTEKSNIIRGWIFGTTLDARTQSLLIVNNATNVVIKVCEFQFCTDPFLGVYYHNNNKTWVENEFRVYSSANNCTFEYISQPFLMDLEGKQGNFKNLREFVFKNVDGYFKIYSKHTPIDLVRDLPRGFAALEPLVDLPIGINITRFQTLLALHRSYLTPGKLESGWTTGAAAYYVGYLQQRTFLLSYNQNGTITDAVDCSLDPLSETKCTLKSLTVEKGIYQTSNFRVQPTISIVRFPNITNLCPFGEVFNASKFASVYAWNRKRISNCVADYSVLYNSTSFSTFKCYGVSPTKLNDLCFTNVYADSFVVKGDEVRQIAPGQTGVIADYNYKLPDDFTGCVIAWNSVKQDALTGGNYLYRLFRKSKLKPFERDISTEIYQAGSTPCNGQVGLNCYYPLERYGFHPTTGVNYQPFRVVVLSFELLNGPATVCGPKLSTTLVKDKCVNFNFNGLTGTGVLTTSKKQFLPFQQFGRDISDTTDAVRDPQTLEILDITPCSFGGVSVITPGTNTSNQVAVLYQDVNCTEVPMAIHAEQLTPAWRVYSAGANVFQTRAGCLVGAEHVNNSYECDIPVGAGICASYHSMSSLRSVNQRSIIAYTMSLGAENSVAYSNNSIAIPTNFTISVTTEILPVSMTKTSVDCTMYICGDSIECSNLLLQYGSFCTQLNRALTGIAVEQDKNTQEVFAQVKQIYKTPPIKDFGGFNFSQILPDPSKPSKRSFIEDLLFNKVTLADAGFIKQYGDCLGDIAARDLICAQKFNGLTVLPPLLTDEMIAQYTSALLAGTITSGWTFGAGAALQIPFAMQMAYRFNGIGVTQCVLYENQKLIANQFNSAIGKIQDSLSSTASALGKLQDVVNQNAQALNTLVKQLSSNFGAISSVLNDILSRLDKVEAEVQIDRLITGRLQSLQTYVTQQLIRAAEIRASANLAATKMSECVLGQSKRVDFCGKGYHLMSFPQSAPHGVVFLHVTYVPAQEKNFTTAPAICHEGKAHFPREGVFVSNGTHWFITQRNFYEPQIITTDNTFVCGSCDVVIGIVNNTVYDPLQPELDSFKEELDKYFKNHTSPDVDLGDISGINASVVNIQKEIDRLNEVAKNLNESLIDLQELGKYEQYIKGGGGSDIIKLLNEQVNKEMQSSNLYMSMSSWCYTHSLDGAGLFLFDHAAEEYEHAKKLIIFLNENNVPVQLTSISAPEHKFEGLTQIFQKAYEHEQHISESINNIVDHAIKSKDHATFNFLQWYVAEQHEEEVLFKDILDKIELIGNENHGLYLADQYVKGIAKSRKS

SEQ ID NO: 13722 - protein, 1241 aa, Artificial Sequence
  SARS-CoV-2/Wuhan/WIV05/2019__EPI_ISL_402128 spike protein (1-1211)(N914C_S1123C) Foldon construct
MFVFLVLLPLVSSQCVNLTTRTQLPPAYTNSFTRGVYYPDKVFRSSVLHSTQDLFLPFFSNVTWFHAIHVSGTNGTKRFDNPVLPFNDGVYFASTEKSNIIRGWIFGTTLDSKTQSLLIVNNATNVVIKVCEFQFCNDPFLGVYYHKNNKSWMESEFRVYSSANNCTFEYVSQPFLMDLEGKQGNFKNLREFVFKNIDGYFKIYSKHTPINLVRDLPQGFSALEPLVDLPIGINITRFQTLLALHRSYLTPGDSSSGWTAGAAAYYVGYLQPRTFLLKYNENGTITDAVDCALDPLSETKCTLKSFTVEKGIYQTSNFRVQPTESIVRFPNITNLCPFGEVFNATRFASVYAWNRKRISNCVADYSVLYNSASFSTFKCYGVSPTKLNDLCFTNVYADSFVIRGDEVRQIAPGQTGKIADYNYKLPDDFTGCVIAWNSNNLDSKVGGNYNYLYRLFRKSNLKPFERDISTEIYQAGSTPCNGVEGFNCYFPLQSYGFQPTNGVGYQPYRVVVLSFELLHAPATVCGPKKSTNLVKNKCVNFNFNGLTGTGVLTESNKKFLPFQQFGRDIADTTDAVRDPQTLEILDITPCSFGGVSVITPGTNTSNQVAVLYQDVNCTEVPVAIHADQLTPTWRVYSTGSNVFQTRAGCLIGAEHVNNSYECDIPIGAGICASYQTQTNSPRRARSVASQSIIAYTMSLGAENSVAYSNNSIAIPTNFTISVTTEILPVSMTKTSVDCTMYICGDSTECSNLLLQYGSFCTQLNRALTGIAVEQDKNTQEVFAQVKQIYKTPPIKDFGGFNFSQILPDPSKPSKRSFIEDLLFNKVTLADAGFIKQYGDCLGDIAARDLICAQKFNGLTVLPPLLTDEMIAQYTSALLAGTITSGWTFGAGAALQIPFAMQMAYRFNGIGVTQCVLYENQKLIANQFNSAIGKIQDSLSSTASALGKLQDVVNQNAQALNTLVKQLSSNFGAISSVLNDILSRLDKVEAEVQIDRLITGRLQSLQTYVTQQLIRAAEIRASANLAATKMSECVLGQSKRVDFCGKGYHLMSFPQSAPHGVVFLHVTYVPAQEKNFTTAPAICHDGKAHFPREGVFVSNGTHWFVTQRNFYEPQIITTDNTFVCGNCDVVIGIVNNTVYDPLQPELDSFKEELDKYFKNHTSPDVDLGDISGINASVVNIQKEIDRLNEVAKNLNESLIDLQELGKYEQYIKGGSGYIPEAPRDGQAYVRKDGEWVLLSTFL

SEQ ID NO: 13723 - protein, 1237 aa, Artificial Sequence
  SARS-CoV-2/bat/Yunnan/RaTG13/2013__EPI_ISL_402131 spike protein (1-1207)(N910C_S1119C) Foldon construct
MFVFLVLLPLVSSQCVNLTTRTQLPPAYTNSSTRGVYYPDKVFRSSVLHLTQDLFLPFFSNVTWFHAIHVSGTNGIKRFDNPVLPFNDGVYFASTEKSNIIRGWIFGTTLDSKTQSLLIVNNATNVVIKVCEFQFCNDPFLGVYYHKNNKSWMESEFRVYSSANNCTFEYVSQPFLMDLEGKQGNFKNLREFVFKNIDGYFKIYSKHTPINLVRDLPPGFSALEPLVDLPIGINITRFQTLLALHRSYLTPGDSSSGWTAGAAAYYVGYLQPRTFLLKYNENGTITDAVDCALDPLSETKCTLKSFTVEKGIYQTSNFRVQPTDSIVRFPNITNLCPFGEVFNATTFASVYAWNRKRISNCVADYSVLYNSTSFSTFKCYGVSPTKLNDLCFTNVYADSFVITGDEVRQIAPGQTGKIADYNYKLPDDFTGCVIAWNSKHIDAKEGGNFNYLYRLFRKANLKPFERDISTEIYQAGSKPCNGQTGLNCYYPLYRYGFYPTDGVGHQPYRVVVLSFELLNAPATVCGPKKSTNLVKNKCVNFNFNGLTGTGVLTESNKKFLPFQQFGRDIADTTDAVRDPQTLEILDITPCSFGGVSVITPGTNASNQVAVLYQDVNCTEVPVAIHADQLTPTWRVYSTGSNVFQTRAGCLIGAEHVNNSYECDIPIGAGICASYQTQTNSRSVASQSIIAYTMSLGAENSVAYSNNSIAIPTNFTISVTTEILPVSMTKTSVDCTMYICGDSTECSNLLLQYGSFCTQLNRALTGIAVEQDKNTQEVFAQVKQIYKTPPIKDFGGFNFSQILPDPSKPSKRSFIEDLLFNKVTLADAGFIKQYGDCLGDIAARDLICAQKFNGLTVLPPLLTDEMIAQYTSALLAGTITSGWTFGAGAALQIPFAMQMAYRFNGIGVTQCVLYENQKLIANQFNSAIGKIQDSLSSTASALGKLQDVVNQNAQALNTLVKQLSSNFGAISSVLNDILSRLDKVEAEVQIDRLITGRLQSLQTYVTQQLIRAAEIRASANLAATKMSECVLGQSKRVDFCGKGYHLMSFPQSAPHGVVFLHVTYVPAQEKNFTTAPAICHDGKAHFPREGVFVSNGTHWFVTQRNFYEPQIITTDNTFVCGSCDVVIGIVNNTVYDPLQPELDSFKEELDKYFKNHTSPDVDLGDISGINASVVNIQKEIDRLNEVAKNLNESLIDLQELGKYEQYIKGGSGYIPEAPRDGQAYVRKDGEWVLLSTFL

SEQ ID NO: 13724 - protein, 1241 aa, Artificial Sequence
  SARS-CoV-2/Wuhan/HBCDC-HB-01/2019__EPI_ISL_402132 spike protein (1-1211)(N914C_S1123C) Foldon construct
MFVFLVLLPLVSSQCVNLTTRTQLPPAYTNSITRGVYYPDKVFRSSVLHSTQDLFLPFFSNVTWFHAIHVSGTNGTKRFDNPVLPFNDGVYFASTEKSNIIRGWIFGTTLDSKTQSLLIVNNATNVVIKVCEFQFCNDPFLGVYYHKNNKSWMESEFRVYSSANNCTFEYVSQPFLMDLEGKQGNFKNLREFVFKNIDGYFKIYSKHTPINLVRDLPQGFSALEPLVDLPIGINITRFQTLLALHRSYLTPGDSSSGWTAGAAAYYVGYLQPRTFLLKYNENGTITDAVDCALDPLSETKCTLKSFTVEKGIYQTSNFRVQPTESIVRFPNITNLCPFGEVFNATRFASVYAWNRKRISNCVADYSVLYNSASFSTFKCYGVSPTKLNDLCFTNVYADSFVIRGDEVRQIAPGQTGKIADYNYKLPDDFTGCVIAWNSNNLDSKVGGNYNYLYRLFRKSNLKPFERDISTEIYQAGSTPCNGVEGFNCYFPLQSYGFQPTNGVGYQPYRVVVLSFELLHAPATVCGPKKSTNLVKNKCVNFNFNGLTGTGVLTESNKKFLPFQQFGRDIADTTDAVRDPQTLEILDITPCSFGGVSVITPGTNTSNQVAVLYQDVNCTEVPVAIHADQLTPTWRVYSTGSNVFQTRAGCLIGAEHVNNSYECDIPIGAGICASYQTQTNSPRRARSVASQSIIAYTMSLGAENSVAYSNNSIAIPTNFTISVTTEILPVSMTKTSVDCTMYICGDSTECSNLLLQYGSFCTQLNRALTGIAVEQDKNTQEVFAQVKQIYKTPPIKDFGGFNFSQILPDPSKPSKRSFIEDLLFNKVTLADAGFIKQYGDCLGDIAARDLICAQKFNGLTVLPPLLTDEMIAQYTSALLAGTITSGWTFGAGAALQIPFAMQMAYRFNGIGVTQCVLYENQKLIANQFNSAIGKIQDSLSSTASALGKLQDVVNQNAQALNTLVKQLSSNFGAISSVLNDILSRLDKVEAEVQIDRLITGRLQSLQTYVTQQLIRAAEIRASANLAATKMSECVLGQSKRVDFCGKGYHLMSFPQSAPHGVVFLHVTYVPAQEKNFTTAPAICHDGKAHFPREGVFVSNGTHWFVTQRNFYEPQIITTDNTFVCGNCDVVIGIVNNTVYDPLQPELDSFKEELDKYFKNHTSPDVDLGDISGINASVVNIQKEIDRLNEVAKNLNESLIDLQELGKYEQYIKGGSGYIPEAPRDGQAYVRKDGEWVLLSTFL

SEQ ID NO: 13725 - protein, 1241 aa, Artificial Sequence
  SARS-CoV-2/Guangdong/20SF028/2020__EPI_ISL_403936 spike protein (1-1211)(N914C_S1123C) Foldon construct
MFVFLVLLPLVSSQCVNLTTRTQLPPAYTNSFTRGVYYPDKVFRSSVLYSTQDLFLPFFSNVTWFHAIHVSGTNGTKRFDNPVLPFNDGVYFASTEKSNIIRGWIFGTTLDSKTQSLLIVNNATNVVIKVCEFQFCNDPFLGVYYHKNNKSWMESEFRVYSSANNCTFEYVSQPFLMDLEGKQGNFKNLREFVFKNIDGYFKIYSKHTPINLVRDLPQGFSALEPLVDLPIGINITRFQTLLALHRSYLTPGDSSSGWTAGAAAYYVGYLQPRTFLLKYNENGTITDAVDCALDPLSETKCTLKSFTVEKGIYQTSNFRVQPTESIVRFPNITNLCPFGEVFNATRFASVYAWNRKRISNCVADYSVLYNSASFSTFKCYGVSPTKLNDLCFTNVYADSFVIRGDEVRQIAPGQTGKIADYNYKLPDDFTGCVIAWNSNNLDSKVGGNYNYLYRLFRKSNLKPFERDISTEIYQAGSTPCNGVEGFNCYFPLQSYGFQPTNGVGYQPYRVVVLSFELLHAPATVCGPKKSTNLVKNKCVNFNFNGLTGTGVLTESNKKFLPFQQFGRDIADTTDAVRDPQTLEILDITPCSFGGVSVITPGTNTSNQVAVLYQDVNCTEVPVAIHADQLTPTWRVYSTGSNVFQTRAGCLIGAEHVNNSYECDIPIGAGICASYQTQTNSPRRARSVASQSIIAYTMSLGAENSVAYSNNSIAIPTNFTISVTTEILPVSMTKTSVDCTMYICGDSTECSNLLLQYGSFCTQLNRALTGIAVEQDKNTQEVFAQVKQIYKTPPIKDFGGFNFSQILPDPSKPSKRSFIEDLLFNKVTLADAGFIKQYGDCLGDIAARDLICAQKFNGLTVLPPLLTDEMIAQYTSALLAGTITSGWTFGAGAALQIPFAMQMAYRFNGIGVTQCVLYENQKLIANQFNSAIGKIQDSLSSTASALGKLQDVVNQNAQALNTLVKQLSSNFGAISSVLNDILSRLDKVEAEVQIDRLITGRLQSLQTYVTQQLIRAAEIRASANLAATKMSECVLGQSKRVDFCGKGYHLMSFPQSAPHGVVFLHVTYVPAQEKNFTTAPAICHDGKAHFPREGVFVSNGTHWFVTQRNFYEPQIITTDNTFVCGNCDVVIGIVNNTVYDPLQPELDSFKEELDKYFKNHTSPDVDLGDISGINASVVNIQKEIDRLNEVAKNLNESLIDLQELGKYEQYIKGGSGYIPEAPRDGQAYVRKDGEWVLLSTFL

SEQ ID NO: 13726 - protein, 1241 aa, Artificial Sequence
  SARS-CoV-2/Shenzhen/SZTH-001/2020__EPI_ISL_406592 spike protein (1-1211)(N914C_S1123C) Foldon construct
MFVFLVLLPLVSSQCVNLTTRTQLPPAYTNSFTRGVYYPDKVFRSSVLHSTQDLFLPFFSNVTWFHAIHVSGTNGTKRFDNPVLPFNDGVYFASTEKSNIIRGWIFGTTLDSKTQSLLIVNNATNVVIKVCEFQFCNDPFLGVYYHKNNKSWMESEFRVYSSANNCTFEYVSQPFLMDLEGKQGNFKNLREFVFKNIDGYFKIYSKHTPINLVRDLPQGFSALEPLVDLPIGINITRFQTLLALHRSYLTPGDSSSGWTAGAAAYYVGYLQPRTFLLKYNENGTITDAVDCALDPLSETKCTLKSFTVEKGIYQTSNFRVQPTESIVRFPNITNLCPFGEVFNATRFASVYAWNRKRISNCVADYSVLYNSASFSTFKCYGVSPTKLNDLCFTNVYADSFVIRGDEVRQIAPGQTGKIADYNYKLPDDFTGCVIAWNSNNLDSKVGGNYNYLYRLFRKSNLKPFERDISTEIYQAGSTPCNGVEGFNCYFPLQSYGFQPTNGVGYQPYRVVVLSFELLHAPATVCGPKKSTNLVKNKCVNFNFNGLTGTGVLTESNKKFLPFQQFGRDIADTTDAVRDPQTLEILDITPCSFGGVSVITPGTNTSNQVAVLYQDVNCTEVPVAIHADQLTPTWRVYSTGSNVFQTRAGCLIGAEHVNNSYECDIPIGAGICASYQTQTNSPRRARSVASQSIIAYTMSLGAENSVAYSNNSIAIPTNFTISVTTEILPVSMTKTSVDCTMYICGDSTECSNLLLQYGSFCTQLNRALTGIAVEQDKNTQEVFAQVKQIYKTPPIKDFGGFNFSQILPDPSKPSKRSFIEDLLFNKVTLADAGFIKQYGDCLGDIAARDLICAQKFNGLTVLPPLLTDEMIAQYTSALLAGTITSGWTFGAGAALQIPFAMQMAYRFNGIGVTQCVLYENQKLIANQFNSAIGKIQDSLSSTASALGKLQDVVNQNAQALNTLVKQLSSNFGAISSVLNDILSRLDKVEAEVQIDRLITGRLQSLQTYVTQQLIRAAEIRASANLAATKMSECVLGQSKRVDFCGKGYHLMSFPQSAPHGVVFLHVTYVPAQEKNFTTAPAICHDGKAHFPREGVFVSNGTHWFVTQRNFYEPQIITTDNTFVCGNCDVLIGIVNNTVYDPLQPELDSFKEELDKYFKNHTSPDVDLGDISGINASVVNIQKEIDRLNEVAKNLNESLIDLQELGKYEQYIKGGSGYIPEAPRDGQAYVRKDGEWVLLSTFL

SEQ ID NO: 13727 - protein, 1241 aa, Artificial Sequence
  SARS-CoV-2/Shenzhen/SZTH-004/2020__EPI_ISL_406595 spike protein (1-1211)(N914C_S1123C) Foldon construct
MFVFLVLLPLVSSQCVNLTTRTQLPPAYTNSFTRGVYYPDKVFRSSVLHSTQDLFLPFFSNVTWFHAIHVSGTNGTKRFDNPVLPFNDGVYFASTEKSNIIRGWIFGTTLDSKTQSLLIVNNATNVVIKVCEFQFCNDPFLGVYYHKNNKSWMESEFRVYSSANNCTFEYVSQPFLMDLEGKQGNFKNLREFVFKNIDGYFKIYSKHTPINLVRDLPQGFSALEPLVDLPIGINITRFQTLLALHRSYLTPGDSSSGWTAGAAAYYVGYLQPRTFLLKYNENGTITDAVDCALDPLSETKCTLKSFTVEKGIYQTSNFRVQPTESIVRFPNITNLCPFGEVFNATRFASVYAWDRKRISNCVAYYSVLYNSASFSTFKCYGVSPTKLNDLCFTNVYADSFVIRGDEVRQIAPGQTGKIADYNYKLPDDFTGCVIAWNSNNLDSKVGGNYNYLYRLFRKSNLKPFERDISTEIYQAGSTPCNGVEGFNCYFPLQSYGFQPTNGVGYQPYRVVVLSFELLHAPATVCGPKKSTNLVKNKCVNFNFNGLTGTGVLTESNKKFLPFQQFGRDIADTTDAVRDPQTLEILDITPCSFGGVSVITPGTNTSNQVAVLYQDVNCTEVPVAIHADQLTPTWRVYSTGSNVFQTRAGCLIGAEHVNNSYECDIPIGAGICASYQTQTNSPRRARSVASQSIIAYTMSLGAENSVAYSNNSIAIPTNFTISVTTEILPVSMTKTSVDCTMYICGDSTECSNLLLQYGSFCTQLNRALTGIAVEQDKNTQEVFAQVKQIYKTPPIKDFGGFNFSQILPDPSKPSKRSFIEDLLFNKVTLADAGFIKQYGDCLGDIAARDLICAQKFNGLTVLPPLLTDEMIAQYTSALLAGTITSGWTFGAGAALQIPFAMQMAYRFNGIGVTQCVLYENQKLIANQFNSAIGKIQDSLSSTASALGKLQDVVNQNAQALNTLVKQLSSNFGAISSVLNDILSRLDKVEAEVQIDRLITGRLQSLQTYVTQQLIRAAEIRASANLAATKMSECVLGQSKRVDFCGKGYHLMSFPQSAPHGVVFLHVTYVPAQEKNFTTAPAICHDGKAHFPREGVFVSNGTHWFVTQRNFYEPQIITTDNTFVCGNCDVVIGIVNNTVYDPLQPELDSFKEELDKYFKNHTSPDVDLGDISGINASVVNIQKEIDRLNEVAKNLNESLIDLQELGKYEQYIKGGSGYIPEAPRDGQAYVRKDGEWVLLSTFL

SEQ ID NO: 13728 - protein, 1241 aa, Artificial Sequence
  SARS-CoV-2/France/IDF0372/2020__EPI_ISL_406596 spike protein (1-1211)(N914C_S1123C) Foldon construct
MFVFLVLLPLVSSQCVNLTTRTQLPPAYTNSFTRGVYYPDKVFRSSVLHSTQDLFLPFFSNVTWFHAIHVSGTNGTKRFDNPVLPFNDGVYFASTEKSNIIRGWIFGTTLDSKTQSLLIVNNATNVVIKVCEFQFCNDPFLGVYYHKNNKSWMESEFRVYSSANNCTFEYVSQPFLMDLEGKQGNFKNLREFVFKNIDGYFKIYSKHTPINLVRDLPQGFSALEPLVDLPIGINITRFQTLLALHRSYLTPGDSSSGWTAGAAAYYVGYLQPRTFLLKYNENGTITDAVDCALDPLSETKCTLKSFTVEKGIYQTSNFRVQPTESIVRFPNITNLCPFGEVFNATRFASVYAWNRKRISNCVADYSFLYNSASFSTFKCYGVSPTKLNDLCFTNVYADSFVIRGDEVRQIAPGQTGKIADYNYKLPDDFTGCVIAWNSNNLDSKVGGNYNYLYRLFRKSNLKPFERDISTEIYQAGSTPCNGVEGFNCYFPLQSYGFQPTNGVGYQPYRVVVLSFELLHAPATVCGPKKSTNLVKNKCVNFNFNGLTGTGVLTESNKKFLPFQQFGRDIADTTDAVRDPQTLEILDITPCSFGGVSVITPGTNTSNQVAVLYQDVNCTEVPVAIHADQLTPTWRVYSTGSNVFQTRAGCLIGAEHVNNSYECDIPIGAGICASYQTQTNSPRRARSVASQSIIAYTMSLGAENSVAYSNNSIAIPTNFTISVTTEILPVSMTKTSVDCTMYICGDSTECSNLLLQYGSFCTQLNRALTGIAVEQDKNTQEVFAQVKQIYKTPPIKDFGGFNFSQILPDPSKPSKRSFIEDLLFNKVTLADAGFIKQYGDCLGDIAARDLICAQKFNGLTVLPPLLTDEMIAQYTSALLAGTITSGWTFGAGAALQIPFAMQMAYRFNGIGVTQCVLYENQKLIANQFNSAIGKIQDSLSSTASALGKLQDVVNQNAQALNTLVKQLSSNFGAISSVLNDILSRLDKVEAEVQIDRLITGRLQSLQTYVTQQLIRAAEIRASANLAATKMSECVLGQSKRVDFCGKGYHLMSFPQSAPHGVVFLHVTYVPAQEKNFTTAPAICHDGKAHFPREGVFVSNGTHWFVTQRNFYEPQIITTDNTFVCGNCDVVIGIVNNTVYDPLQPELDSFKEELDKYFKNHTSPDVDLGDISGINASVVNIQKEIDRLNEVAKNLNESLIDLQELGKYEQYIKGGSGYIPEAPRDGQAYVRKDGEWVLLSTFL

SEQ ID NO: 13729 - protein, 1241 aa, Artificial Sequence
  SARS-CoV-2/Australia/VIC01/2020__EPI_ISL_406844 spike protein (1-1211)(N914C_S1123C) Foldon construct
MFVFLVLLPLVSSQCVNLTTRTQLPPAYTNSFTRGVYYPDKVFRSSVLHSTQDLFLPFFSNVTWFHAIHVSGTNGTKRFDNPVLPFNDGVYFASTEKSNIIRGWIFGTTLDSKTQSLLIVNNATNVVIKVCEFQFCNDPFLGVYYHKNNKSWMESEFRVYSSANNCTFEYVSQPFLMDLEGKQGNFKNLREFVFKNIDGYFKIYSKHTPINLVRDLPQGFSALEPLVDLPIGINITRFQTLLALHRRYLTPGDSSSGWTAGAAAYYVGYLQPRTFLLKYNENGTITDAVDCALDPLSETKCTLKSFTVEKGIYQTSNFRVQPTESIVRFPNITNLCPFGEVFNATRFASVYAWNRKRISNCVADYSVLYNSASFSTFKCYGVSPTKLNDLCFTNVYADSFVIRGDEVRQIAPGQTGKIADYNYKLPDDFTGCVIAWNSNNLDSKVGGNYNYLYRLFRKSNLKPFERDISTEIYQAGSTPCNGVEGFNCYFPLQSYGFQPTNGVGYQPYRVVVLSFELLHAPATVCGPKKSTNLVKNKCVNFNFNGLTGTGVLTESNKKFLPFQQFGRDIADTTDAVRDPQTLEILDITPCSFGGVSVITPGTNTSNQVAVLYQDVNCTEVPVAIHADQLTPTWRVYSTGSNVFQTRAGCLIGAEHVNNSYECDIPIGAGICASYQTQTNSPRRARSVASQSIIAYTMSLGAENSVAYSNNSIAIPTNFTISVTTEILPVSMTKTSVDCTMYICGDSTECSNLLLQYGSFCTQLNRALTGIAVEQDKNTQEVFAQVKQIYKTPPIKDFGGFNFSQILPDPSKPSKRSFIEDLLFNKVTLADAGFIKQYGDCLGDIAARDLICAQKFNGLTVLPPLLTDEMIAQYTSALLAGTITSGWTFGAGAALQIPFAMQMAYRFNGIGVTQCVLYENQKLIANQFNSAIGKIQDSLSSTASALGKLQDVVNQNAQALNTLVKQLSSNFGAISSVLNDILSRLDKVEAEVQIDRLITGRLQSLQTYVTQQLIRAAEIRASANLAATKMSECVLGQSKRVDFCGKGYHLMSFPQSAPHGVVFLHVTYVPAQEKNFTTAPAICHDGKAHFPREGVFVSNGTHWFVTQRNFYEPQIITTDNTFVCGNCDVVIGIVNNTVYDPLQPELDSFKEELDKYFKNHTSPDVDLGDISGINASVVNIQKEIDRLNEVAKNLNESLIDLQELGKYEQYIKGGSGYIPEAPRDGQAYVRKDGEWVLLSTFL

SEQ ID NO: 13730 - protein, 1241 aa, Artificial Sequence
  SARS-CoV-2/Germany/BavPat1/2020__EPI_ISL_406862 spike protein (1-1211)(N914C_S1123C) Foldon construct
MFVFLVLLPLVSSQCVNLTTRTQLPPAYTNSFTRGVYYPDKVFRSSVLHSTQDLFLPFFSNVTWFHAIHVSGTNGTKRFDNPVLPFNDGVYFASTEKSNIIRGWIFGTTLDSKTQSLLIVNNATNVVIKVCEFQFCNDPFLGVYYHKNNKSWMESEFRVYSSANNCTFEYVSQPFLMDLEGKQGNFKNLREFVFKNIDGYFKIYSKHTPINLVRDLPQGFSALEPLVDLPIGINITRFQTLLALHRSYLTPGDSSSGWTAGAAAYYVGYLQPRTFLLKYNENGTITDAVDCALDPLSETKCTLKSFTVEKGIYQTSNFRVQPTESIVRFPNITNLCPFGEVFNATRFASVYAWNRKRISNCVADYSVLYNSASFSTFKCYGVSPTKLNDLCFTNVYADSFVIRGDEVRQIAPGQTGKIADYNYKLPDDFTGCVIAWNSNNLDSKVGGNYNYLYRLFRKSNLKPFERDISTEIYQAGSTPCNGVEGFNCYFPLQSYGFQPTNGVGYQPYRVVVLSFELLHAPATVCGPKKSTNLVKNKCVNFNFNGLTGTGVLTESNKKFLPFQQFGRDIADTTDAVRDPQTLEILDITPCSFGGVSVITPGTNTSNQVAVLYQGVNCTEVPVAIHADQLTPTWRVYSTGSNVFQTRAGCLIGAEHVNNSYECDIPIGAGICASYQTQTNSPRRARSVASQSIIAYTMSLGAENSVAYSNNSIAIPTNFTISVTTEILPVSMTKTSVDCTMYICGDSTECSNLLLQYGSFCTQLNRALTGIAVEQDKNTQEVFAQVKQIYKTPPIKDFGGFNFSQILPDPSKPSKRSFIEDLLFNKVTLADAGFIKQYGDCLGDIAARDLICAQKFNGLTVLPPLLTDEMIAQYTSALLAGTITSGWTFGAGAALQIPFAMQMAYRFNGIGVTQCVLYENQKLIANQFNSAIGKIQDSLSSTASALGKLQDVVNQNAQALNTLVKQLSSNFGAISSVLNDILSRLDKVEAEVQIDRLITGRLQSLQTYVTQQLIRAAEIRASANLAATKMSECVLGQSKRVDFCGKGYHLMSFPQSAPHGVVFLHVTYVPAQEKNFTTAPAICHDGKAHFPREGVFVSNGTHWFVTQRNFYEPQIITTDNTFVCGNCDVVIGIVNNTVYDPLQPELDSFKEELDKYFKNHTSPDVDLGDISGINASVVNIQKEIDRLNEVAKNLNESLIDLQELGKYEQYIKGGSGYIPEAPRDGQAYVRKDGEWVLLSTFL

SEQ ID NO: 13731 - protein, 1241 aa, Artificial Sequence
  SARS-CoV-2/Wuhan/HBCDC-HB-02/2020__EPI_ISL_412978 spike protein (1-1211)(N914C_S1123C) Foldon construct
MFVFLVLLPLVSSQCVNLTTRTQLPPAYTNSFTRGVYYPDKVFRSSVLHSTQDLFLPFFSNVTWFHAIHVSGTNGTKRFDNPVLPFNDGVYFASTEKSNIIRGWIFGTTLDSKTQSLLIVNNATNVVIKVCEFQFCNDPFLGVYYHKNNKSWMESEFRVYSSANNCTFEYVSQPFLMDLEGKQGNFKNLREFVFKNIDGYFKIYSKHTPINLVRDLPQGFSALEPLVDLPIGINITRFQTLLALHRSYLTPGDSSSGWTAGAAAYYVGYLQPRTFLLKYNENGTITDAVDCALDPLSETKCTLKSFTVEKGIYQTSNFRVQPTESIVRFPNITNLCPFGEVFNATRFASVYAWNRKRISNCVADYSVLYNSASFSTFKCYGVSPTKLNDLCFTNVYADSFVIRGDEVRQIAPGQTGKIADYNYKLPDDFTGCVIAWNSNNLDSKVGGNYNYLYRLFRKSNLKPFERDISTEIYQAGSTPCNGVEGFNCYFPLQSYGFQPTNGVGYQPYRVVVLSFELLHAPATVCGPKKSTNLVKNKCVNFNFNGLTGTGVLTESNKKFLPFQQFGRDIADTTDAVRDPQTLEILDITPCSFGGVSVITPGTNTSNQVAVLYQDVNCTEVPVAIHADQLTPTWRVYSTGSNVFQTRAGCLIGAEHVNNSYECDIPIGAGICASYQTQTNSPRRARSVASQSIIAYTMSLGAENSVAYSNNSIAIPTNFTISVTTEILPVSMTKTSVDCTMYICGDSTECSNFLLQYGSFCTQLNRALTGIAVEQDKNTQEVFAQVKQIYKTPPIKDFGGFNFSQILPDPSKPSKRSFIEDLLFNKVTLADAGFIKQYGDCLGDIAARDLICAQKFNGLTVLPPLLTDEMIAQYTSALLAGTITSGWTFGAGAALQIPFAMQMAYRFNGIGVTQCVLYENQKLIANQFNSAIGKIQDSLSSTASALGKLQDVVNQNAQALNTLVKQLSSNFGAISSVLNDILSRLDKVEAEVQIDRLITGRLQSLQTYVTQQLIRAAEIRASANLAATKMSECVLGQSKRVDFCGKGYHLMSFPQSAPHGVVFLHVTYVPAQEKNFTTAPAICHDGKAHFPREGVFVSNGTHWFVTQRNFYEPQIITTDNTFVCGNCDVVIGIVNNTVYDPLQPELDSFKEELDKYFKNHTSPDVDLGDISGINASVVNIQKEIDRLNEVAKNLNESLIDLQELGKYEQYIKGGSGYIPEAPRDGQAYVRKDGEWVLLSTFL

SEQ ID NO: 13732 - protein, 1241 aa, Artificial Sequence
  SARS-CoV-2/Australia/QLD02/2020__EPI_ISL_407896 spike protein (1-1211)(N914C_S1123C) Foldon construct
MFVFLVLLPLVSSQCVNLTTRTQLPPAYTNSFTRGVYYPDKVFRSSVLHSTQDLFLPFFSNVTWFHAIHVSGTNGTKRFDNPVLPFNDGVYFASTEKSNIIRGWIFGTTLDSKTQSLLIVNNATNVVIKVCEFQFCNDPFLGVYYHKNNKSWMESEFRVYSSANNCTFEYVSQPFLMDLEGKQGNFKNLREFVFKNIDGYFKIYSKHTPINLVRDLPQGFSALEPLVDLPIGINITRFQTLLALHRSYLTPGDSSSGWTAGAAAYYVGYLQPRTFLLKYNENGTITDAVDCALDPLSETKCTLKSFTVEKGIYQTSNFRVQPTESIVRFPNITNLCPFGEVFNATRFASVYAWNRKRISNCVADYSVLYNSASFSTFKCYGVSPTKLNDLCFTNVYADSFVIRGDEVRQIAPGQTGKIADYNYKLPDDFTGCVIAWNSNNLDSKVGGNYNYLYRLFRKSNLKPFERDISTEIYQAGSTPCNGVEGFNCYFPLQSYGFQPTNGVGYQPYRVVVLSFELLHAPATVCGPKKSTNLVKNKCVNFNFNGLTGTGVLTESNKKFLPFQQFGRDIADTTDAVRDPQTLEILDITPCSFGGVSVITPGTNTSNQVAVLYQDVNCTEVPVAIHADQLTPTWRVYSTGSNVFQTRAGCLIGAEHVNNSYECDIPIGAGICASYQTQTNSPRRARSVASQSIIAYTMSLGAENSVAYSNNSIAIPTNFTISVTTEILPVSMTKTSVDCTMYICGDSTECSNLLLQYGSFCTQLNRALTGIAVEQDKNTQEVFAQVKQIYKTPPIKDFGGFNFSQILPDPSKPSKRSFIEDLLFNKVTLADAGFIKQYGDCLGDIAARDLICAQKFNGLTVLPPLLTDEMIAQYTSALLAGTITSGWTFGAGAALQIPFAMQMAYRFNGIGVTQCVLYENQKLIANQFNSAIGKIQDSLSSTASALGKLQDVVNQNAQALNTLVKQLSSNFGAISSVLNDILSRLDKVEAEVQIDRLITGRLQSLQTYVTQQLIRAAEIRASANLAATKMSECVLGQSKRVDFCGKGYHLMSFPQSAPHGVVFLHVTYVPAQEKNFTTAPAICHDGKAHFPREGVFVSNGTHWFVTQRNFYEPQIITTDNTFVCGNCDVVIGIVNNTVYDPLQLELDSFKEELDKYFKNHTSPDVDLGDISGINASVVNIQKEIDRLNEVAKNLNESLIDLQELGKYEQYIKGGSGYIPEAPRDGQAYVRKDGEWVLLSTFL

SEQ ID NO: 13733 - protein, 1241 aa, Artificial Sequence
  SARS-CoV-2/India/1-31/2020__EPI_ISL_413523 spike protein (1-1211)(N914C_S1123C) Foldon construct
MFVFLVLLPLVSSQCVNLTTRTQLPPAYTNSFTRGVYYPDKVFRSSVLHSTQDLFLPFFSNVTWFHAIHVSGTNGTKRFDNPVLPFNDGVYFASTEKSNIIRGWIFGTTLDSKTQSLLIVNNATNVVIKVCEFQFCNDPFLGVYYHKNNKSWMESEFRVYSSANNCTFEYVSQPFLMDLEGKQGNFKNLREFVFKNIDGYFKIYSKHTPINLVRDLPQGFSALEPLVDLPIGINITRFQTLLALHRSYLTPGDSSSGWTAGAAAYYVGYLQPRTFLLKYNENGTITDAVDCALDPLSETKCTLKSFTVEKGIYQTSNFRVQPTESIVRFPNITNLCPFGEVFNATRFASVYAWNRKRISNCVADYSVLYNSASFSTFKCYGVSPTKLNDLCFTNVYADSFVIRGDEVRQIAPGQTGKIADYNYKLPDDFTGCVIAWNSNNLDSKVGGNYNYLYRLFRKSNLKPFERDISTEIYQAGSTPCNGVEGFNCYFPLQSYGFQPTNGVGYQPYRVVVLSFELLHAPATVCGPKKSTNLVKNKCVNFNFNGLTGTGVLTESNKKFLPFQQFGRDIADTTDAVRDPQTLEILDITPCSFGGVSVITPGTNTSNQVAVLYQDVNCTEVPVAIHADQLTPTWRVYSTGSNVFQTRAGCLIGAEHVNNSYECDIPIGAGICASYQTQTNSPRRARSVASQSIIAYTMSLGAENSVAYSNNSIAIPTNFTISVTTEILPVSMTKTSVDCTMYICGDSTECSNLLLQYGSFCTQLNRALTGIAVEQDKNTQEVFAQVKQIYKTPPIKDFGGFNFSQILPDPSKPSKRSFIEDLLFNKVTLADAGFIKQYGDCLGDIAARDLICAQKFNGLTVLPPLLTDEMIAQYTSALLAGTITSGWTFGAGAALQIPFAMQMAYRFNGIGVTQCVLYENQKLIANQFNSVIGKIQDSLSSTASALGKLQDVVNQNAQALNTLVKQLSSNFGAISSVLNDILSRLDKVEAEVQIDRLITGRLQSLQTYVTQQLIRAAEIRASANLAATKMSECVLGQSKRVDFCGKGYHLMSFPQSAPHGVVFLHVTYVPAQEKNFTTAPAICHDGKAHFPREGVFVSNGTHWFVTQRNFYEPQIITTDNTFVCGNCDVVIGIVNNTVYDPLQPELDSFKEELDKYFKNHTSPDVDLGDISGINASVVNIQKEIDRLNEVAKNLNESLIDLQELGKYEQYIKGGSGYIPEAPRDGQAYVRKDGEWVLLSTFL

SEQ ID NO: 13734 - protein, 1241 aa, Artificial Sequence
  SARS-CoV-2/Guangdong/GD2020087-P0008/2020__EPI_ISL_413863 spike protein (1-1211)(N914C_S1123C) Foldon construct
MFVFLVLLPLVSSQCVNLTTRTQLPPAYTNSFTRGVYYPDKVFRSSVLHSTQDLFLPFFSNVTWFHAIHVSGTNGTKRFDNPVLPFNDGVYFASTEKSNIIRGWIFGTTLDSKTQSLLIVNNATNVVIKVCEFQFCNDPFLGVYYHKNNKSWMESEFRVYSSANNCTFEYVSQPFLMDLEGKQGNFKNLREFVFKNIDGYFKIYSKHTPINLVRDLPQGFSALEPLVDLPIGINITRFQTLLALHRSYLTPGDSSSGWTAGAAAYYVGYLQPRTFLLKYNENGTITDAVDCALDPLSETKCTLKSFTVEKGIYQTSNFRVQPTESIVRFPNITNLCPFGEVFNATRFASVYAWNRKRISNCVADYSVLYNSASFSTFKCYGVSPTKLNDLCFTNVYADSFVIRGDEVREIAPGQTGKIADYNYKLPDDFTGCVIAWNSNNLDSKVGGNYNYLYRLFRKSNLKPFERDISTEIYQAGSTPCNGVEGFNCYFPLQSYGFQPTNGVGYQPYRVVVLSFELLHAPATVCGPKKSTNLVKNKCVNFNFNGLTGTGVLTESNKKFLPFQQFGRDIADTTDAVRDPQTLEILDITPCSFGGVSVITPGTNTSNQVAVLYQDVNCTEVPVAIHADQLTPTWRVYSTGSNVFQTRAGCLIGAEHVNNSYECDIPIGAGICASYQTQTNSPRRARSVASQSIIAYTMSLGAENSVAYSNNSIAIPTNFTISVTTEILPVSMTKTSVDCTMYICGDSTECSNLLLQYGSFCTQLNRALTGIAVEQDKNTQEVFAQVKQIYKTPPIKDFGGFNFSQILPDPSKPSKRSFIEDLLFNKVTLADAGFIKQYGDCLGDIAARDLICAQKFNGLTVLPPLLTDEMIAQYTSALLAGTITSGWTFGAGAALQIPFAMQMAYRFNGIGVTQCVLYENQKLIANQFNSAIGKIQDSLSSTASALGKLQDVVNQNAQALNTLVKQLSSNFGAISSVLNDILSRLDKVEAEVQIDRLITGRLQSLQTYVTQQLIRAAEIRASANLAATKMSECVLGQSKRVDFCGKGYHLMSFPQSAPHGVVFLHVTYVPAQEKNFTTAPAICHDGKAHFPREGVFVSNGTHWFVTQRNFYEPQIITTDNTFVCGNCDVVIGIVNNTVYDPLQPELDSFKEELDKYFKNHTSPDVDLGDISGINASVVNIQKEIDRLNEVAKNLNESLIDLQELGKYEQYIKGGSGYIPEAPRDGQAYVRKDGEWVLLSTFL

SEQ ID NO: 13735 - protein, 1241 aa, Artificial Sequence
  SARS-CoV-2/Sweden/01/2020__EPI_ISL_411951 spike protein (1-1211)(N914C_S1123C) Foldon construct
MFVFLVLLPLVSSQCVNLTTRTQLPPAYTNSFTRGVYYPDKVFRSSVLHSTQDLFLPFFSNVTWFHAIHVSGTNGTKRFDNPVLPFNDGVYFASTEKSNIIRGWIFGTTLDSKTQSLLIVNNATNVVIKVCEFQFCNDPFLGVYYHKNNKSWMESEFRVYSSANNCTFEYVSQPFLMDLEGKQGNFKNLREFVFKNIDGYFKIYSKHTPINLVRDLPQGFSALEPLVDLPIGINITRFQTLLALHRSYLTPGDSSSGWTAGAAAYYVGYLQPRTFLLKYNENGTITDAVDCALDPLSETKCTLKSFTVEKGIYQTSNFRVQPTESIVRFPNITNLCPFGEVFNATRFASVYAWNRKRISNCVADYSVLYNSASFSTFKCYGVSPTKLNDLCFTNVYADSFVIRGDEVRQIAPGQTGKIADYNYKLPDDFTGCVIAWNSNNLDSKVGGNYNYLYRLFRKSNLKPFERDISTEIYQAGSTPCNGVEGFNCYFPLQSYGFQPTNGVGYQPYRVVVLSFELLHAPATVCGPKKSTNLVKNKCVNFNFNGLTGTGVLTESNKKFLPFQQFGRDIADTTDAVRDPQTLEILDITPCSFGGVSVITPGTNTSNQVAVLYQDVNCTEVPVAIHADQLTPTWRVYSTGSNVFQTRAGCLIGAEHVNNSYECDIPIGAGICASYQTQTNSPRRARSVASQSIIAYTMSLGAENSVAYSNNSIAIPTNFTISVTTEILPVSMTKTSVDCTMYICGDSTECSNLLLQYGSFCTQLNRALTGIAVEQDKNTQEVFAQVKQIYKTPPIKDCGGFNFSQILPDPSKPSKRSFIEDLLFNKVTLADAGFIKQYGDCLGDIAARDLICAQKFNGLTVLPPLLTDEMIAQYTSALLAGTITSGWTFGAGAALQIPFAMQMAYRFNGIGVTQCVLYENQKLIANQFNSAIGKIQDSLSSTASALGKLQDVVNQNAQALNTLVKQLSSNFGAISSVLNDILSRLDKVEAEVQIDRLITGRLQSLQTYVTQQLIRAAEIRASANLAATKMSECVLGQSKRVDFCGKGYHLMSFPQSAPHGVVFLHVTYVPAQEKNFTTAPAICHDGKAHFPREGVFVSNGTHWFVTQRNFYEPQIITTDNTFVCGNCDVVIGIVNNTVYDPLQPELDSFKEELDKYFKNHTSPDVDLGDISGINASVVNIQKEIDRLNEVAKNLNESLIDLQELGKYEQYIKGGSGYIPEAPRDGQAYVRKDGEWVLLSTFL

SEQ ID NO: 13736 - protein, 1241 aa, Artificial Sequence
  SARS-CoV-2/Tianmen/HBCDC-HB-07/2020__EPI_ISL_412983 spike protein (1-1211)(N914C_S1123C) Foldon construct
MFVFLVLLPLVSSQCVNLTTRTQLPPAYTNSFTRGVYYPDKVFRSSVLHSTQDLFLPFFSNVTWFHAIHVSGTNGTKRFDNPVLPFNDGVYFASTEKSNIIRGWIFGTTLDSKTQSLLIVNNATNVVIKVCEFQFCNDPFLGVYYHKNNKSWMESEFRVYSSANNCTFEYVSQPFLMDLEGKQGNFKNLREFVFKNIDGYFKIYSKHTPINLVRDLPQGFSALEPLVDLPIGINITRFQTLLALHRSYLTPGDSSSGWTAGAAAYYVGYLQPRTFLLKYNENGTITDAVDCALDPLSETKCTLKSFTVEKGIYQTSNFRVQPTESIVRFPNITNLCPFGEVFNATRFASVYAWNRKRISNCVADYSVLYNSASFSTFKCYGVSPTKLNDLCFTNVYADSFVIRGDEVRQIAPGQTGKIADYNYKLPDDFTGCVIAWNSNNLDSKVGGNYNYLYRLFRKSNLKPFERDISTEIYQAGSTPCNGVEGFNCYFPLQSYGFQPTNGVGYQPYRVVVLSFELLHAPATVCGPKKSTNLVKNKCVNFNFNGLTGTGVLTESNKKFLPFQQFGRDIADTTDAVRDPQTLEILDITPCSFGGVSVITPGTNTSNQVAVLYQDLNCTEVPVAIHADQLTPTWRVYSTGSNVFQTRAGCLIGAEHVNNSYECDIPIGAGICASYQTQTNSPRRARSVASQSIIAYTMSLGAENSVAYSNNSIAIPTNFTISVTTEILPVSMTKTSVDCTMYICGDSTECSNLLLQYGSFCTQLNRALTGIAVEQDKNTQEVFAQVKQIYKTPPIKDFGGFNFSQILPDPSKPSKRSFIEDLLFNKVTLADAGFIKQYGDCLGDIAARDLICAQKFNGLTVLPPLLTDEMIAQYTSALLAGTITSGWTFGAGAALQIPFAMQMAYRFNGIGVTQCVLYENQKLIANQFNSAIGKIQDSLSSTASALGKLQDVVNQNAQALNTLVKQLSSNFGAISSVLNDILSRLDKVEAEVQIDRLITGRLQSLQTYVTQQLIRAAEIRASANLAATKMSECVLGQSKRVDFCGKGYHLMSFPQSAPHGVVFLHVTYVPAQEKNFTTAPAICHDGKAHFPREGVFVSNGTHWFVTQRNFYEPQIITTDNTFVCGNCDVVIGIVNNTVYDPLQPELDSFKEELDKYFKNHTSPDVDLGDISGINASVVNIQKEIDRLNEVAKNLNESLIDLQELGKYEQYIKGGSGYIPEAPRDGQAYVRKDGEWVLLSTFL

SEQ ID NO: 13737 - protein, 1241 aa, Artificial Sequence
  SARS-CoV-2/Hong Kong/case42_VM20002493/2020__EPI_ISL_414527 spike protein (1-1211)(N914C_S1123C) Foldon construct
MFVFLVLLPLVSSQCVNLTTRTQLPPAYTNSFTRGVYYPDKVFRSSVLHSTQDLFLPFFSNVTWFHAIHVSGTNGTKRFDNPVLPFNDGVYFASTEKSNIIRGWIFGTTLDSKTQSLLIVNNATNVVIKVCEFQFCNDPFLGVYYHKNNKSWMESEFRVYSSANNCTFEYVSQPFLMDLEGKQGNFKNLREFVFKNIDGYFKIYSKHTPINLVRDLPQGFSALEPLVDLPIGINITRFQTLLALHRSYLTPGDSSSGWTAGAAAYYVGYLQPRTFLLKYNENGTITDAVDCALDPLSETKCTLKSFTVEKGIYQTSNFRVQPTESIVRFPNITNLCPFGEVFNATRFASVYAWNRKRISNCVADYSVLYNSASFSTFKCYGVSPTKLNDLCFTNVYADSFVIRGDEVRQIAPGQTGKIADYNYKLPDDFTGCVIAWNSNNLDSKVGGNYNYLYRLFRKSNLKPFERDISTEIYQAGSTPCNGVEGFNCYFPLQSYGFQPTNGVGYQPYRVVVLSFELLHAPATVCGPKKSTNLVKNKCVNFNFNGLTGTGVLTESNKKFLPFQQFGRDIADTTDAVRDPQTLEILDITPCSFGGVSVITPGTNTSNQVAVLYQDVNCTEVPVAIHADQLTPTWRVYSTGSNVFQTRAGCLIGAEHVNNSYECDIPIGAGICASYQTQTNSPRRARSVASQSIIAYTMSLGAENSVAYSNNSIAIPTNFAISVTTEILPVSMTKTSVDCTMYICGDSTECSNLLLQYGSFCTQLNRALTGIAVEQDKNTQEVFAQVKQIYKTPPIKDFGGFNFSQILPDPSKPSKRSFIEDLLFNKVTLADAGFIKQYGDCLGDIAARDLICAQKFNGLTVLPPLLTDEMIAQYTSALLAGTITSGWTFGAGAALQIPFAMQMAYRFNGIGVTQCVLYENQKLIANQFNSAIGKIQDSLSSTASALGKLQDVVNQNAQALNTLVKQLSSNFGAISSVLNDILSRLDKVEAEVQIDRLITGRLQSLQTYVTQQLIRAAEIRASANLAATKMSECVLGQSKRVDFCGKGYHLMSFPQSAPHGVVFLHVTYVPAQEKNFTTAPAICHDGKAHFPREGVFVSNGTHWFVTQRNFYEPQIITTDNTFVCGNCDVVIGIVNNTVYDPLQPELDSFKEELDKYFKNHTSPDVDLGDISGINASVVNIQKEIDRLNEVAKNLNESLIDLQELGKYEQYIKGGSGYIPEAPRDGQAYVRKDGEWVLLSTFL

SEQ ID NO: 13738 - protein, 1241 aa, Artificial Sequence
  SARS-CoV-2/USA/CruiseA-23/2020__EPI_ISL_414482 spike protein (1-1211)(N914C_S1123C) Foldon construct
MFVFLVLLPLVSSQCVNLTTRTQLPPAYTNSFTRGVYYPDKVFRSSVLHSTQDLFLPFFSNVTWFHAIHVSGTNGTKRFDNPVLPFNDGVYFASTEKSNIIRGWIFGTTLDSKTQSLLIVNNATNVVIKVCEFQFCNDPFLGVYYHKNNKSWMESEFRVYSSANNCTFEYVSQPFLMDLEVKQGNFKNLREFVFKNIDGYFKIYSKHTPINLVRDLPQGFSALEPLVDLPIGINITRFQTLLALHRSYLTPGDSSSGWTAGAAAYYVGYLQPRTFLLKYNENGTITDAVDCALDPLSETKCTLKSFTVEKGIYQTSNFRVQPTESIVRFPNITNLCPFGEVFNATRFASVYAWNRKRISNCVADYSVLYNSASFSTFKCYGVSPTKLNDLCFTNVYADSFVIRGDEVRQIAPGQTGKIADYNYKLPDDFTGCVIAWNSNNLDSKVGGNYNYLYRLFRKSNLKPFERDISTEIYQAGSTPCNGVEGFNCYFPLQSYGFQPTNGVGYQPYRVVVLSFELLHAPATVCGPKKSTNLVKNKCVNFNFNGLTGTGVLTESNKKFLPFQQFGRDIADTTDAVRDPQTLEILDITPCSFGGVSVITPGTNTSNQVAVLYQDVNCTEVPVAIHADQLTPTWRVYSTGSNVFQTRAGCLIGAEHVNNSYECDIPIGAGICASYQTQTNSPRRARSVASQSIIAYTMSLGAENSVAYSNNSIAIPTNFTISVTTEILPVSMTKTSVDCTMYICGDSTECSNLLLQYGSFCTQLNRALTGIAVEQDKNTQEVFAQVKQIYKTPPIKDFGGFNFSQILPDPSKPSKRSFIEDLLFNKVTLADAGFIKQYGDCLGDIAARDLICAQKFNGLTVLPPLLTDEMIAQYTSALLAGTITSGWTFGAGAALQIPFAMQMAYRFNGIGVTQCVLYENQKLIANQFNSAIGKIQDSLSSTASALGKLQDVVNQNAQALNTLVKQLSSNFGAISSVLNDILSRLDKVEAEVQIDRLITGRLQSLQTYVTQQLIRAAEIRASANLAATKMSECVLGQSKRVDFCGKGYHLMSFPQSAPHGVVFLHVTYVPAQEKNFTTAPAICHDGKAHFPREGVFVSNGTHWFVTQRNFYEPQIITTDNTFVCGNCDVVIGIVNNTVYDPLQPELDSFKEELDKYFKNHTSPDVDLGDISGINASVVNIQKEIDRLNEVAKNLNESLIDLQELGKYEQYIKGGSGYIPEAPRDGQAYVRKDGEWVLLSTFL

SEQ ID NO: 13739 - protein, 1241 aa, Artificial Sequence
  SARS-CoV-2/Hong Kong/case85_VM20002868/2020__EPI_ISL_414519 spike protein (1-1211)(N914C_S1123C) Foldon construct
MFVFLVLVPLVSSQCVNLTTRTQLPPAYTNSFTRGVYYPDKVFRSSVLHSTQDLFLPFFSNVTWFHAIHVSGTNGTKRFDNPVLPFNDGVYFASTEKSNIIRGWIFGTTLDSKTQSLLIVNNATNVVIKVCEFQFCNDPFLGVYYHKNNKSWMESEFRVYSSANNCTFEYVSQPFLMDLEGKQGNFKNLREFVFKNIDGYFKIYSKHTPINLVRDLPQGFSALEPLVDLPIGINITRFQTLLALHRSYLTPGDSSSGWTAGAAAYYVGYLQPRTFLLKYNENGTITDAVDCALDPLSETKCTLKSFTVEKGIYQTSNFRVQPTESIVRFPNITNLCPFGEVFNATRFASVYAWNRKRISNCVADYSVLYNSASFSTFKCYGVSPTKLNDLCFTNVYADSFVIRGDEVRQIAPGQTGKIADYNYKLPDDFTGCVIAWNSNNLDSKVGGNYNYLYRLFRKSNLKPFERDISTEIYQAGSTPCNGVEGFNCYFPLQSYGFQPTNGVGYQPYRVVVLSFELLHAPATVCGPKKSTNLVKNKCVNFNFNGLTGTGVLTESNKKFLPFQQFGRDIADTTDAVRDPQTLEILDITPCSFGGVSVITPGTNTSNQVAVLYQDVNCTEVPVAIHADQLTPTWRVYSTGSNVFQTRAGCLIGAEHVNNSYECDIPIGAGICASYQTQTNSPRRARSVASQSIIAYTMSLGAENSVAYSNNSIAIPTNFTISVTTEILPVSMTKTSVDCTMYICGDSTECSNLLLQYGSFCTQLNRALTGIAVEQDKNTQEVFAQVKQIYKTPPIKDFGGFNFSQILPDPSKPSKRSFIEDLLFNKVTLADAGFIKQYGDCLGDIAARDLICAQKFNGLTVLPPLLTDEMIAQYTSALLAGTITSGWTFGAGAALQIPFAMQMAYRFNGIGVTQCVLYENQKLIANQFNSAIGKIQDSLSSTASALGKLQDVVNQNAQALNTLVKQLSSNFGAISSVLNDILSRLDKVEAEVQIDRLITGRLQSLQTYVTQQLIRAAEIRASANLAATKMSECVLGQSKRVDFCGKGYHLMSFPQSAPHGVVFLHVTYVPAQEKNFTTAPAICHDGKAHFPREGVFVSNGTHWFVTQRNFYEPQIITTDNTFVCGNCDVVIGIVNNTVYDPLQPELDSFKEELDKYFKNHTSPDVDLGDISGINASVVNIQKEIDRLNEVAKNLNESLIDLQELGKYEQYIKGGSGYIPEAPRDGQAYVRKDGEWVLLSTFL

SEQ ID NO: 13740 - protein, 1241 aa, Artificial Sequence; identical to SEQ ID NO: 13730
  SARS-CoV-2/England/200990660/2020__EPI_ISL_414523 spike protein (1-1211)(N914C_S1123C) Foldon construct

SEQ ID NO: 13741 - protein, 1241 aa, Artificial Sequence
  SARS-CoV-2/Australia/NSW09/2020__EPI_ISL_413595 spike protein (1-1211)(N914C_S1123C) Foldon construct
MFVFLVLLPLVSSQCVNLTTRTQLPPAYTNSFTRGVYYPDKVFRSSVLHSTQDLFLPFFSNVTWFHAIHVSGTNGTKRFDNPVLPFNDGVYFASTEKSNIIRGWIFGTTLDSKTQSLLIVNNATNVVIKVCEFQFCNDPFLGVYYHKNNKSWMESEFRVYSSANNCTFEYVSQPFLMDLEGKQGNFKNLREFVFKNIDGYFKIYSKHTPINLVRDLPQGFSALEPLVDLPIGINITRFQTLLALHRSYLTPGDSSSGWTAGAAAYYVGYLQPRTFLLKYNENGTITDAVDCALDPLSETKCTLKSFTVEKGIYQTSNFRVQPTESIVRFPNITNLCPFGEVFNATRFASVYAWNRKRISNCVADYSVLYNSASFSTFKCYGVSPTKLNDLCFTNVYADSFVIRGDEVRQIAPGQTGKIADYNYKLPDDFTGCVIAWNSNNLDSKVGGNYNYLYRLFRKSNLKPFERDISTEIYQAGSTPCNGVEGFNCYFPLQSYGFQPTNGVGYQPYRVVVLSFELLHAPATVCGPKKSTNLVKNKCVNFNFNGLTGTGVLTESNKKFLPFQQFGRDIADTTDAVRDPQTLEILDITPCSFGGVSVITPGTNTSNQVAVLYQDVNCTEVPVAIHADQLTPTWRVYSTGSNVFQTRAGCLIGAEHVNNSYECDIPIGAGICASYQTQTNSPRRARSVASQSIIAYTMSLGAENSVAYSNNSIAIPTNFTISVTTEILPVSMTKTSVDCTMYICGDSTECSNLLLQYGSFCTQLNRALTGIAVEQDKNTQEVFAQVKQIYKTPPIKDFGGFNFSQILPDPSKPSKRSFIEDLLFNKVTLADAGFIKQYGDCLGDIAARDLICAQKFNGLTVLPPLLTDEMIAQYTSALLAGTITSGWTFGAGAALQIPFAMQMAYRFNGIGVTQCVLYENQKLIANQFNSAIGKIQDSLSFTASALGKLQDVVNQNAQALNTLVKQLSSNFGAISSVLNDILSRLDKVEAEVQIDRLITGRLQSLQTYVTQQLIRAAEIRASANLAATKMSECVLGQSKRVDFCGKGYHLMSFPQSAPHGVVFLHVTYVPAQEKNFTTAPAICHDGKAHFPREGVFVSNGTHWFVTQRNFYEPQIITTDNTFVCGNCDVVIGIVNNTVYDPLQPELDSFKEELDKYFKNHTSPDVDLGDISGINASVVNIQKEIDRLNEVAKNLNESLIDLQELGKYEQYIKGGSGYIPEAPRDGQAYVRKDGEWVLLSTFL

SEQ ID NO: 13742 - protein, 1241 aa, Artificial Sequence; identical to SEQ ID NO: 13722
  SARS-CoV-2/Australia/NSW10/2020__EPI_ISL_413596 spike protein (1-1211)(N914C_S1123C) Foldon construct

SEQ ID NO: 13743 - protein, 1241 aa, Artificial Sequence
  SARS-CoV-2/Switzerland/1000477797/2020__EPI_ISL_413023 spike protein (1-1211)(N914C_S1123C) Foldon construct
MFVFLVLLPLVSSQCVNLTTRTQLPPAYTNSFTRGVYYPDKVFRSSVLHSTQDLFLPFFSNVTWFHAIHVSGTNGTKRFDNPVLPFNDGVYFASTEKSNIIRGWIFGTTLDSKTQSLLIVNNATNVVIKVCEFQFCNDPFLGVYYHKNNKSWMESEFRVYSSANNCTFEYVSQPFLMDLEGKQGNFKNLREFVFKNIDGYFNIYSKHTPINLVRDLPQGFSALEPLVDLPIGINITRFQTLLALHRSYLTPGDSSSGWTAGAAAYYVGYLQPRTFLLKYNENGTITDAVDCALDPLSETKCTLKSFTVEKGIYQTSNFRVQPTESIVRFPNITNLCPFGEVFNATRFASVYAWNRKRISNCVADYSVLYNSASFSTFKCYGVSPTKLNDLCFTNVYADSFVIRGDEVRQIAPGQTGKIADYNYKLPDDFTGCVIAWNSNNLDSKVGGNYNYLYRLFRKSNLKPFERDISTEIYQAGSTPCNGVEGFNCYFPLQSYGFQPTNGVGYQPYRVVVLSFELLHAPATVCGPKKSTNLVKNKCVNFNFNGLTGTGVLTESNKKFLPFQQFGRDIADTTDAVRDPQTLEILDITPCSFGGVSVITPGTNTSNQVAVLYQGVNCTEVPVAIHADQLTPTWRVYSTGSNVFQTRAGCLIGAEHVNNSYECDIPIGAGICASYQTQTNSPRRARSVASQSIIAYTMSLGAENSVAYSNNSIAIPTNFTISVTTEILPVSMTKTSVDCTMYICGDSTECSNLLLQYGSFCTQLNRALTGIAVEQDKNTQEVFAQVKQIYKTPPIKDFGGFNFSQILPDPSKPSKRSFIEDLLFNKVTLADAGFIKQYGDCLGDIAARDLICAQKFNGLTVLPPLLTDEMIAQYTSALLAGTITSGWTFGAGAALQIPFAMQMAYRFNGIGVTQCVLYENQKLIANQFNSAIGKIQDSLSSTASALGKLQDVVNQNAQALNTLVKQLSSNFGAISSVLNDILSRLDKVEAEVQIDRLITGRLQSLQTYVTQQLIRAAEIRASANLAATKMSECVLGQSKRVDFCGKGYHLMSFPQSAPHGVVFLHVTYVPAQEKNFTTAPAICHDGKAHFPREGVFVSNGTHWFVTQRNFYEPQIITTDNTFVCGNCDVVIGIVNNTVYDPLQPELDSFKEELDKYFKNHTSPDVDLGDISGINASVVNIQKEIDRLNEVAKNLNESLIDLQELGKYEQYIKGGSGYIPEAPRDGQAYVRKDGEWVLLSTFL

SEQ ID NO: 13744 - protein, 1241 aa, Artificial Sequence
  SARS-CoV-2/Belgium/BA-02291/2020__EPI_ISL_415159 spike protein (1-1211)(N914C_S1123C) Foldon construct
MFVFLVLLPLVSSQCVNLTTRTQLPPAYTNSFTRGVYYPDKVFRSSVLHSTQDLFLPFFSNVTWFHAIHVSGTNGTKRFDNPVLPFNDGVYFASTEKSNIIRGWIFGTTLDSKTQSLLIVNNATNVVIKVCEFQFCNDPFLGVYYHKNNKSWMESEFRVYSSANNCTFEYVSQPFLMDLEGKQGNFKNLREFVFKNIDGYFKIYSKHTPINLVRDLPQGFSALEPLVDLPIGINITRFQTLLALHRSYLTPGDSSSGWTAGAAAYYVGYLQPRTFLLKYNENGTITDAVDCALDPLSETKCTLKSFTVEKGIYQTSNFRVQPTESIVRFPNITNLCPFGEVFNATRFASVYAWNRKRISNCVADYSVLYNSASFSTFKCYGVSPTKLNDLCFTNVYADSFVIRGDEVRQIAPGQTGKIADYNYKLPDDFTGCVIAWNSNNLDSKVGGNYNYLYRLFRRSNLKPFERDISTEIYQAGSTPCNGVEGFNCYFPLQSYGFQPTNGVGYQPYRVVVLSFELLPAPATVCGPKKSTNLVKNKCVNFNFNGLTGTGVLTESNKKFLPFQQFGRDIADTTDAVRDPQTLEILDITPCSFGGVSVITPGTNTSNQVAVLYQGVNCTEVPVAIHADQLTPTWRVYSTGSNVFQTRAGCLIGAEHVNNSYECDIPIGAGICASYQTQTNSPRRARSVASQSIIAYTMSLGAENSVAYSNNSIAIPTNFTISVTTEILPVSMTKTSVDCTMYICGDSTECSNLLLQYGSFCTQLNRALTGIAVEQDKNTQEVFAQVKQIYKTPPIKDFGGFNFSQILPDPSKPSKRSFIEDLLFNKVTLADAGFIKQYGDCLGDIAARDLICAQKFNGLTVLPPLLTDEMIAQYTSALLAGTITSGWTFGAGAALQIPFAMQMAYRFNGIGVTQCVLYENQKLIANQFNSAIGKIQDSLSSAAPALGKLQDVVNQNAQALNTLVKQLSSNFGAISSVLNDILSRLDKVEAEVQIDRLITGRLQSLQTYVTQQLIRAAEIRASANLAATKMSECVLGQSKRVDFCGKGYHLMSFPQSAPHGVVFLHVTYVPAQEKNFTTAPAICHDGKAHFPREGVFVSNGTHWFVTQRNFYEPQIITTDNTFVCGNCDVVIGIVNNTVYDPLQPELDSFKEELDKYFKNHTSPDVDLGDISGINASVVNIQKEIDRLNEVAKNLNESLIDLQELGKYEQYIKGGSGYIPEAPRDGQAYVRKDGEWVLLSTFL

SEQ ID NO: 13745 - protein, 1241 aa, Artificial Sequence
  SARS-CoV-2/USA/WA8-UW5/2020__EPI_ISL_413486 spike protein (1-1211)(N914C_S1123C) Foldon construct
MFVFLVLLPLVSSQCVNLTTRTQLPPAYTNSFTRGVYYPDKVFRSSVLHSTQDLFLPFFSNVTWFHAIHVSGTNGTKRFDNPVLPFNDGVYFASTEKSNIIRGWIFGTTLDSKTQSLLIVNNATNVVIKVCEFQFCNDPFLGVYYHKNNKSWMESEFRVYSSANNCTFEYVSQPFLMDLEGKQGNFKNLREFVFKNIDGYFKIYSKHTPINLVRDLPQGFSALEPLVDLPIGINITRFQTLLALHRSYLTPGDSSSGWTAGAAAYYVGYLQPRTFLLKYNENGTITDAVDCALDPLSETKCTLKSFTVEKGIYQTSNFRVQPTESIVRFPNITNLCPFGEVFNATRFASVYAWNRKRISNCVADYSVLYNSASFSTFKCYGVSPTKLNDLCFTNVYADSFVIRGDEVRQIAPGQTGKIADYNYKLPDDFTGCVIAWNSNNLDSKVGGNYNYLYRLFRKSNLKPFERDISTEIYQAGSTPCNGVEGFNCYFPLQSYGFQPTNGVGYQPYRVVVLSFELLHAPATVCGPKKSTNLVKNKCVNFNFNGLTGTGVLTESNKKFLPFQQFGRDIADTTDAVRDPQTLEILDITPCSFGGVSVITPGTNTSNQVAVLYQDVNCTEVPVAIHADQLTPTWRVYSTGSNVFQTRAGCLIGAEYVNNSYECDIPIGAGICASYQTQTNSPRRARSVASQSIIAYTMSLGAENSVAYSNNSIAIPTNFTISVTTEILPVSMTKTSVDCTMYICGDSTECSNLLLQYGSFCTQLNRALTGIAVEQDKNTQEVFAQVKQIYKTPPIKDFGGFNFSQILPDPSKPSKRSFIEDLLFNKVTLADAGFIKQYGDCLGDIAARDLICAQKFNGLTVLPPLLTDEMIAQYTSALLAGTITSGWTFGAGAALQIPFAMQMAYRFNGIGVTQCVLYENQKLIANQFNSAIGKIQDSLSSTASALGKLQDVVNQNAQALNTLVKQLSSNFGAISSVLNDILSRLDKVEAEVQIDRLITGRLQSLQTYVTQQLIRAAEIRASANLAATKMSECVLGQSKRVDFCGKGYHLMSFPQSAPHGVVFLHVTYVPAQEKNFTTAPAICHDGKAHFPREGVFVSNGTHWFVTQRNFYEPQIITTDNTFVCGNCDVVIGIVNNTVYDPLQPELDSFKEELDKYFKNHTSPDVDLGDISGINASVVNIQKEIDRLNEVAKNLNESLIDLQELGKYEQYIKGGSGYIPEAPRDGQAYVRKDGEWVLLSTFL

SEQ ID NO: 13746 - protein, 1241 aa, Artificial Sequence
  SARS-CoV-2/England/20102000506/2020__EPI_ISL_415147 spike protein (1-1211)(N914C_S1123C) Foldon construct
MFVFLVLLPLVSSQCVNLTTRTQLPPAYTNSFTRGVYYPDKVFRSSVLHSTQDLFLPFFSNVTWFHAIHVSGTNGTKRFDNPVLPFNDGVYFASTEKSNIIRGWIFGTTLDSKTQSLLIVNNATNVVIKVCEFQFCNDPFLGVYYHKNNKSWMESEFRVYSSANNCTFEYVSQPFLMDLEGKQGNFKNLREFVFKNIDGYFKIYSKHTPINLVRDLPQGFSALEPLVDLPIGINITRFQTLLALHRSYLTPGDSSSGWTAGAAAYYVGYLQPRTFLLKYNENGTITDAVDCALDPLSETKCTLKSFTVEKGIYQTSNFRVQPTESIVRFPNITNLCPFGEVFNATRFASVYAWNRKRISNCVADYSVLYNSASFSTFKCYGVSPTKLNDLCFTNVYADSFVIRGDEVRQIAPGQTGKIADYNYKLPDDFTGCVIAWNSNNLDSKVGGNYNYLYRLFRKSNLKPFERDISTEIYQAGSTPCNGVEGFNCYFPLQSYGFQPTNGVGYQPYRVVVLSFELLHAPATVCGPKKSTNLVKNKCVNFNFNGLTGTGVLTESNKKFLPFQQFGRDIADTTDAVRDPQTLEILDITPCSFGGVSVITPGTNTSNQVAVLYQGVNCTEVPVAIHADQLTPTWRVYSTGSNVFQTRAGCLIGAEHVNNSYECDIPIGAGICASYQTQTNSPRRARSVASQSIIAYTMSLGAENSVAYSNNSIAIPTNFTISVTTEILPVSMTKTSVDCTMYICGDSTECSNLLLQYGSFCTQLNRALTGIAVEQDKNTQEVFAQVKQIYKTPPIKDFGGFNFSQILPDPSKPSKRSFIEDLLFNKVTLADAGFIKQYGYCLGDIAARDLICAQKFNGLTVLPPLLTDEMIAQYTSALLAGTITSGWTFGAGAALQIPFAMQMAYRFNGIGVTQCVLYENQKLIANQFNSAIGKIQDSLSSTASALGKLQDVVNQNAQALNTLVKQLSSNFGAISSVLNDILSRLDKVEAEVQIDRLITGRLQSLQTYVTQQLIRAAEIRASANLAATKMSECVLGQSKRVDFCGKGYHLMSFPQSAPHGVVFLHVTYVPAQEKNFTTAPAICHDGKAHFPREGVFVSNGTHWFVTQRNFYEPQIITTDNTFVCGNCDVVIGIVNNTVYDPLQPELDSFKEELDKYFKNHTSPDVDLGDISGINASVVNIQKEIDRLNEVAKNLNESLIDLQELGKYEQYIKGGSGYIPEAPRDGQAYVRKDGEWVLLSTFL

SEQ ID NO: 13747 - protein, 1241 aa, Artificial Sequence
  SARS-CoV-2/Belgium/VAG-03013/2020__EPI_ISL_415155 spike protein (1-1211)(N914C_S1123C) Foldon construct
MFVFLVLLPLVSSQCVNLTTRTQLPPAYTNSFTRGVYYPDKVFRSSVLHSTQDLFLPFFSNVTWFHAIHVSGTNGTKRFDNPVLPFNDGVYFASTEKSNIIRGWIFGTTLDSKTQSLLIVNNATNVVIKVCEFQFCNDPFLGVYYHKNNKSWMESEFRVYSSANNCTFEYVSQPFLMDLEGKQGNFKNLREFVFKNIDGYFKIYSKHTPINLVRDLPQGFSALEPLVDLPIGINITRFQTLLALHRSYLTPGDSSSGWTAGAAAYYVGYLQPRTFLLKYNENGTITDAVDCALDPLSETKCTLKSFTVEKGIYQTSNFRVQPTESIVRFPNITNLCPFGEVFNATRFASVYAWNRKRISNCVADYSVLYNSASFSTFKCYGVSPTKLNDLCFTNVYADSFVIRGDEVRQIAPGQTGKIADYNYKLPDDFTGCVIAWNSNNLDSKVGGNYNYLYRLFRKSNLKPFERDISTEIYQAGSTPCNGVEGFNCYFPLQSYGFQPTNGVGYQPYRVVVLSFELLHAPATVCGPKKSTNLVKNKCVNFNFNGLTGTGVLTESNKKFLPFQQFGRDIADTTDAVRDPQTLEILDITPCSFGGVSVITPGTNTSNQVAVLYQGVNCTEVPVAIHADQLTPTWRVYSTGSNVFQTRAGCLIGAEHVNNSYECDIPIGAGICASYQTQTNSPRRARSVASQSIIAYTMSLGAENSVAYSNNSIAIPTNFTISVTTEILPVSMTKTSVDCTMYICGDSTECSNLLLQYGSFCTQLNRALTGIAVEQDKNTQEVFAQVKQIYKTPPIKDFGGFNFSQILPDPSKPSKRSFIEDLLFNKVTLADAGFIKQYGDCLGDIAARDLICAQKFNGLTVLPPLLTDEMIAQYTSALLAGTITSGWTFGAGAALQIPFAMQMAYRFNGIGVTQCVLYENQKLIANQFNSAIGKIQDSLSSTATALGKLQDVVNQNAQALNTLVKQLSSNFGAISSVLNDILSRLDKVEAEVQIDRLITGRLQSLQTYVTQQLIRAAEIRASANLAATKMSECVLGQSKRVDFCGKGYHLMSFPQSAPHGVVFLHVTYVPAQEKNFTTAPAICHDGKAHFPREGVFVSNGTHWFVTQRNFYEPQIITTDNTFVCGNCDVVIGIVNNTVYDPLQPELDSFKEELDKYFKNHTSPDVDLGDISGINASVVNIQKEIDRLNEVAKNLNESLIDLQELGKYEQYIKGGSGYIPEAPRDGQAYVRKDGEWVLLSTFL

SEQ ID NO: 13748 - protein, 1241 aa, Artificial Sequence
  SARS-CoV-2/Belgium/BC-03016/2020__EPI_ISL_415157 spike protein (1-1211)(N914C_S1123C) Foldon construct
MFVFLVLLPLVSSQCVNLTTRTQLPPAYTNSFTRGVYYPDKVFRSSVLHSTQDLFLPFFSNVTWFHAIHVSGTNGTKRFDNPVLPFNDGVYFASTEKSNIIRGWIFGTTLDSKTQSLLIVNNATNVVIKVCEFQFCNDPFLGVYYHKNNKSWMESEFRVYSSANNCTFEYVSQPFLMDLEGKQGNFKNLREFVFKNIDGYFKIYSKHTPINLVRDLPQGFSALEPLVDLPIGINITRFQTLLALHRSYLTPGDSSSGWTAGAAAYYVGYLQPRTFLLKYNENGTITDAVDCALDPLSETKCTLKSFTVEKGIYQTSNFRVQPTESIVRFPNITNLCPFGEVFNATRFASVYAWNRKRISNCVADYSVLYNSASFSTFKCYGVSPTKLNDLCFTNVYADSFVIRGDEVRQIAPGQTGKIADYNYKLPDDFTGCVIAWNSNNLDSKVGGNYNYLYRLFRKSNLKPFERDISTEIYQAGSTPCNGVEGFNCYFPLQSYGFQPTNGVGYQPYRVVVLSFELLHAPATVCGPKKSTNLVKNKCVNFNFNGLTGTGVLTESNKKFLPFQQFGRDIADTTDAVRDPQTLEILDITPCSFGGVSVITPGTNTSNQVAVLYQGVNCTEVPVAIHADQLTPTWRVYSTGSNVFQTRAGCLIGAEHVNNSYECDIPIGAGICASYQTQTNSPRRARSVASQSIIAYTMSLGAENSVAYSNNSIAIPTNFTISVTTEILPVSMTKTSVDCTMYICGDSTECSNLLLQYGSFCTQLNRALTGIAVEQDKNTQEVFAQVKQIYKTPPIKDFGGFNFSQILPDPSKPSKRSFIEDLLFNKVTLADAGFIKQYGDCLGDIAARDLICAQKFNGLTVLPPLLTDEMIAQYTSALLAGTITSGWTFGAGAALQIPFAMQMAYRFNGIGVTQCVLYENQKLIANQFNSAIGKIQDSLSSTAPALGKLQDVVNQNAQALNTLVKQLSSNFGAISSVLNDILSRLDKVEAEVQIDRLITGRLQSLQTYVTQQLIRAAEIRASANLAATKMSECVLGQSKRVDFCGKGYHLMSFPQSAPHGVVFLHVTYVPAQEKNFTTAPAICHDGKAHFPREGVFVSNGTHWFVTQRNFYEPQIITTDNTFVCGNCDVVIGIVNNTVYDPLQPELDSFKEELDKYFKNHTSPDVDLGDISGINASVVNIQKEIDRLNEVAKNLNESLIDLQELGKYEQYIKGGSGYIPEAPRDGQAYVRKDGEWVLLSTFL

SEQ ID NO: 13749 - protein, 1241 aa, Artificial Sequence
  SARS-CoV-2/Germany/BavPat3/2020__EPI_ISL_414521 spike protein (1-1211)(N914C_S1123C) Foldon construct
MFVFLVLLPLVSSQCVNLTTRTQLPPAYTNSFTRGVYYPDKVFRSSVLHSTQDLFLPFFSNVTWFHAIHVSGTNGTKRFDNPVLPFNDGVYFASTEKSNIIRGWIFGTTLDSKTQSLLIVNNATNVVIKVCEFQFCNDPFLGVYYHKNNKSWMESEFRVYSSANNCTFEYVSQPFLMDLEGKQGNFKNLREFVFKNIDGYFKIYSKHTPINLVRDLPQGFSALEPLVDLPIGINITRFQTLLALHRSYLTPGDSSSGWTAGAAAYYVGYLQPRTFLLKYNENGTITDAVDCALDPLSETKCTLKSFTVEKGIYQTSNFRVQPTESIVRFPNITNLCPFGEVFNATRFASVYAWNRKRISNCVADYSVLYNSASFSTFKCYGVSPTKLNDLCFTNVYADSFVIRGDEVRQIAPGQTGKIADYNYKLPDDFTGCVIAWNSNNLDSKVGGNYNYLYRLFRKSNLKPFERDISTEIYQAGSTPCNGVEGFNCYFPLQSYGFQPTNGVGYQPYRVVVLSFELLHAPATVCGPKKSTNLVKNKCVNFNFNGLTGTGVLTESNKKFLPFQQFGRDIADTTDAVRDPQTLEILDITPCSFGGVSVITPGTNTSNQVAVLYQDVNCTEVPVAIHADQLTPTWRVYSTGSNVFQTRAGCLIGAEHVNNSYECDIPIGAGICASYQTQTNSPRRARSVASQSIIAYTMSLGAENSVAYSNNSIAIPTNFTISVTTEILPVSMTKTSVDCTMYICGDSTECSNLLLQYGSFCTQLNRALTGIAVEQDKNTQQVFAQVKQIYKTPPIKDFGGFNFSQILPDPSKPSKRSFIEDLLFNKVTLADAGFIKQYGDCLGDIAARDLICAQKFNGLTVLPPLLTDEMIAQYTSALLAGTITSGWTFGAGAALQIPFAMQMAYRFNGIGVTQCVLYENQKLIANQFNSAIGKIQDSLSSTASALGKLQDVVNQNAQALNTLVKQLSSNFGAISSVLNDILSRLDKVEAEVQIDRLITGRLQSLQTYVTQQLIRAAEIRASANLAATKMSECVLGQSKRVDFCGKGYHLMSFPQSAPHGVVFLHVTYVPAQEKNFTTAPAICHDGKAHFPREGVFVSNGTHWFVTQRNFYEPQIITTDNTFVCGNCDVVIGIVNNTVYDPLQPELDSFKEELDKYFKNHTSPDVDLGDISGINASVVNIQKEIDRLNEVAKNLNESLIDLQELGKYEQYIKGGSGYIPEAPRDGQAYVRKDGEWVLLSTFL

SEQ ID NO: 13750 - protein, 1241 aa, Artificial Sequence
  SARS-CoV-2/France/HF1805/2020__EPI_ISL_414628 spike protein (1-1211)(N914C_S1123C) Foldon construct
MFVFLVLLPLVSSQCVNLTTRTQLPPAYTNSFTRGVYYPDKVFRSSVLHSTQDLFLPFFSNVTWFHAIHVSGTNGTKRFDNPVLPFNDGVYFASTEKSNIIRGWIFGTTLDSKTQSLLIVNNATNVVIKVCEFQFCNDPFLGVYYHKNNKSWMESEFRVYSSANNCTFEYVSQPFLMDLEGKQGNFKNLREFVFKNIDGYFKIYSKHTPINLVRDLPQGFSALEPLVDLPIGINITRFQTLLALHRSYLTPGDSSSGWTAGAAAYYVGYLQPRTFLLKYNENGTITDAVDCALDPLSETKCTLKSFTVEKGIYQTSNFRVQPTESIVRFPNITNLCPFGEVFNATRFASVYAWNRKRISNCVADYSVLYNSASFSTFKCYGVSPTKLNDLCFTNVYADSFVIRGDEVRQIAPGQTGKIADYNYKLPDDFTGCVIAWNSNNLDSKVGGNYNYLYRLFRKSNLKPFERDISTEIYQAGSTPCNGVEGFNCYFPLQSYGFQPTNGVGYQPYRVVVLSFELLHAPATVCGPKKSTNLVKNKCVNFNFNGLTGTGVLTESNKKFLPFQQFGRDIADTTDAVRDPQTLEILDITPCSFGGVSVITPGTNTSNQVAVLYQGVNCTEVPVAIHADQLTPTWRVYSTGSNVFQTRAGCLIGAEHVNNSYECDIPIGAGICASYQTQTNSPRRARSVASQSIIAYTMSLGAENSVAYSNNSIAIPTNFTISVTTEILPVSMTKTSVDCTMYICGDSTECSNLLLQYGSFCTQLNRALTGIAVEQDKNTQEVFAQVKQIYKTPPIKDFGGFNFSQILPDPSKPSKRSFIEDLLFNKVTLADAGFIKQYGDCLGDIAARDLICAQKFNGLTVLPPLLTDEMIAQYTSALLAGTITSGWTFGAGAALQIPFAMQMAYRFNGIGVTQCVLYENQKLIANQFNSAIGKIQDSLSSTASALGKLQDVVNQNAQALNTLVKQLSSNFGAISSVLNDILSRLDKVEAEVQIDRLITGRLQSLQTYVTQQLIRAAEIRASANLAATKMSECVLGQSKRVDFCGKGYHLMSFPQSAPHGVVFLHVTYVPAQEKNFTTAPAICHDGKAHFPREGVFVSNGTHWFVTQRNFYEPQIITTDNTFVCGNCDVVIGVVNNTVYDPLQPELDSFKEELDKYFKNHTSPDVDLGDISGINASVVNIQKEIDRLNEVAKNLNESLIDLQELGKYEQYIKGGSGYIPEAPRDGQAYVRKDGEWVLLSTFL

SEQ ID NO: 13751 - protein, 1241 aa, Artificial Sequence
  SARS-CoV-2/Netherlands/ZuidHolland_9/2020__EPI_ISL_414445 spike protein (1-1211)(N914C_S1123C) Foldon construct
MFVFLVLLPLVSSQCVNLTTRTQLPPAYTNSFTRGVYYPDKVFRSSVLHSTQDLFLPFFSNVTWFHAIHVSGTNGTKRFDNPVLPFNDGVYFASTEKSNIIRGWIFGTTLDSKTQSLLIVNNATNVVIKVCEFQFCNDPFLGVYYHKNNKSWMESEFRVYSSANNCTFEYVSQPFLMDLEGKQGNFKNLREFVFKNIDGYFKIYSKHTPINLVRDLPQGFSALEPLVDLPIGINITRFQTLLALHRSYLTPGDSSSGWTAGAAAYYVGYLQPRTFLLKYNENGTITDAVDCALDPLSETKCTLKSFTVEKGIYQTSNFRVQPTESIVRFPNITNLCPFGEVFNATRFASVYAWNRKRISNCVADYSVLYNSASFSTFKCYGVSPTKLNDLCFTNVYADSFVIRGDEVRQIAPGQTGKIADYNYKLPDDFTGCVIAWNSNNLDSKVGGNYNYLYRLFRKSNLKPFERDISTEIYQAGSTPCNGVEGFNCYFPLQSYGFQPTNGVGYQPYRVVVLSFELLHAPATVCGPKKSTNLVKNKCVNFNFNGLTGTGVLTESNKKFLPFQQFGRDIADTTDAVRDPQTLEILDITPCSFGGVSVITPGTNTSNQVAVLYQGVNCTEVPVAIHADQLTPTWRVYSTGSNVFQTRAGCLIGAEHVNNSYECDIPIGAGICASYQTQTNSPRRARSVASQSIIAYTMSLGAENSVAYSNNSIAIPTNFTISVTTEILPVSMTKTSVDCTMYICGDSTECSNLLLQYGSFCTQLNRALTGIAVEQDKNTQEVFAQVKQIYKTPPIKDFGGFNFSQILPDPSKPSKRSFIEDLLFNKVTLADAGFIKQYGDCLGDIAARDLICVQKFNGLTVLPPLLTDEMIAQYTSALLAGTITSGWTFGAGAALQIPFAMQMAYRFNGIGVTQCVLYENQKLIANQFNSAIGKIQDSLSSTASALGKLQDVVNQNAQALNTLVKQLSSNFGAISSVLNDILSRLDKVEAEVQIDRLITGRLQSLQTYVTQQLIRAAEIRASANLAATKMSECVLGQSKRVDFCGKGYHLMSFPQSAPHGVVFLHVTYVPAQEKNFTTAPAICHDGKAHFPREGVFVSNGTHWFVTQRNFYEPQIITTDNTFVCGNCDVVIGIVNNTVYDPLQPELDSFKEELDKYFKNHTSPDVDLGDISGINASVVNIQKEIDRLNEVAKNLNESLIDLQELGKYEQYIKGGSGYIPEAPRDGQAYVRKDGEWVLLSTFL

SEQ ID NO: 13752 - protein, 1241 aa, Artificial Sequence
  SARS-CoV-2/Finland/FIN03032020A/2020__EPI_ISL_413602 spike protein (1-1211)(N914C_S1123C) Foldon construct
MFVFLVLLPLVSSQCVNLTTRTQLPPAYTNSFTRGVYYPDKVFRSSVLHSTQDLFLPFFSNVTWFHAIHVSGTNGTKRFDNPVLPFNDGVYFASTEKSNIIRGWIFGTTLDSKTQSLLIVNNATNVVIKVCEFQFCNDPFLGVYYHKNNKSWMESEFRVYSSANNCTFEYVSQPFLMDLEGKQGNFKNLREFVFKNIDGYFKIYSKHTPINLVRDLPQGFSALEPLVDLPIGINITRFQTLLALHRSYLTPGDSSSGWTAGAAAYYVGYLQPRTFLLKYNENGTITDAVDCALDPLSETKCTLKSFTVEKGIYQTSNFRVQPTESIVRFPNITNLCPFGEVFNATRFASVYAWNRKRISNCVADYSVLYNSASFSTFKCYGVSPTKLNDLCFTNVYADSFVIRGDEVRQIAPGQTGKIADYNYKLPDDFTGCVISWNSNNLDSKVGGNYNYLYRLFRKSNLKPFERDISTEIYQAGSTPCNGVEGFNCYFPLQSYGFQPTNGVGYQPYRVVVLSFELLHAPATVCGPKKSTNLVKNKCVNFNFNGLTGTGVLTESNKKFLPFQQFGRDIADTTDAVRDPQTLEILDITPCSFGGVSVITPGTNTSNQVAVLYQGVNCTEVPVAIHADQLTPTWRVYSTGSNVFQTRAGCLIGAEHVNNSYECDIPIGAGICASYQTQTNSPRRARSVASQSIIAYTMSLGAENSVAYSNNSIAIPTNFTISVTTEILPVSMTKTSVDCTMYICGDSTECSNLLLQYGSFCTQLNRALTGIAVEQDKNTQEVFAQVKQIYKTPPIKDFGGFNFSQILPDPSKPSKRSFIEDLLFNKVTLADAGFIKQYGDCLGDIAARDLICAQKFNGLTVLPPLLTDEMIAQYTSALLAGTITSGWTFGAGAALQIPFAMQMAYRFNGIGVTQCVLYENQKLIANQFNSAIGKIQDSLSSTASALGKLQDVVNQNAQALNTLVKQLSSNFGAISSVLNDILSRLDKVEAEVQIDRLITGRLQSLQTYVTQQLIRAAEIRASANLAATKMSECVLGQSKRVDFCGKGYHLMSFPQSAPHGVVFLHVTYVPAQEKNFTTAPAICHDGKAHFPREGVFVSNGTHWFVTQRNFYEPQIITTDNTFVCGNCDVVIGIVNNTVYDPLQPELDSFKEELDKYFKNHTSPDVDLGDISGINASVVNIQKEIDRLNEVAKNLNESLIDLQELGKYEQYIKGGSGYIPEAPRDGQAYVRKDGEWVLLSTFL

SEQ ID NO: 13753 - protein, 1241 aa, Artificial Sequence
  SARS-CoV-2/France/GE1977/2020__EPI_ISL_414632 spike protein (1-1211)(N914C_S1123C) Foldon construct
MFVFLVLLPLVSSQCVNLTTRTQLPPAYTNSFTRGVYYPDKVFRSSVLHSTQDLFLPFFSNVTWFHAIHVSGTNGTKRFDNPVLPFNDGVYFASTEKSNIIRGWIFGTTLDSKTQSLLIVNNATNVVIKVCEFQFCNDPFLGVYYHKNNKSWMESEFRVYSSANNCTFEYVSQPFLMDLEGKQGNFKNLREFVFKNIDGYFKIYSKHTPINLVRDLPQGFSALEPLVDLPIGINITRFQTLLALHRSYLTPGDSSSGWTAGAAAYYVGYLQPRTFLLKYNENGTITDAVDCALDPLSETKCTLKSFTVEKGIYQTSNFRVQPTESIVRFPNITNLCPFGEVFNATRFASVYAWNRKRISNCVADYSVLYNSASFSTFKCYGVSPTKLNDLCFTNVYADSFVIRGDEVRQIAPGQTGKIADYNYKLPDDFTGCVIAWNSNNLDSKVGGNYNYLYRLFRKSNLKPFERDISTEIYQAGSTPCNGVEGFNCYFPLQSYGFQPTNGVGYQPYRVVVLSFELLHAPATVCGPKKSTNLVKNKCVNFNFNGLTGTGVLTESNKKFLPFQQFGRDIADTTDAVRDPQTLEILDITPCSFGGVSVITPGTNTSNQVAVLYQGVNCTEVPVAIHADQLTPTWRVYSTGSNVFQTRAGCLIGAEHVNNSYECDIPIGAGICASYQTQTNSPRRARSVASQSIIAYTMSLGAENSVAYSNNSIAIPTNFTISVTTEILPVSMTKTSVDCTMYICGDSTECSNLLLQYGSFCTQLNRALTGIAVEQDKNTQEVFAQVKQIYKTPPIKDFGGFNFSQILPDPSKPSKRSFIEDLLFNKVTLADAGFIKQYGDCLGDIAARDLICAQKFNGLTVLPPLLTDEMIAQYTSALLAGTITSGWTFGAGAALQIPFAMQMAYRFNGIGVTQCVLYENQKLIANQFNSAIGKIQDSLFSTASALGKLQDVVNQNAQALNTLVKQLSSNFGAISSVLNDILSRLDKVEAEVQIDRLITGRLQSLQTYVTQQLIRAAEIRASANLAATKMSECVLGQSKRVDFCGKGYHLMSFPQSAPHGVVFLHVTYVPAQEKNFTTAPAICHDGKAHFPREGVFVSNGTHWFVTQRNFYEPQIITTDNTFVCGNCDVVIGIVNNTVYDPLQPELDSFKEELDKYFKNHTSPDVDLGDISGINASVVNIQKEIDRLNEVAKNLNESLIDLQELGKYEQYIKGGSGYIPEAPRDGQAYVRKDGEWVLLSTFL

SEQ ID NO: 13754 - protein, 1241 aa, Artificial Sequence
  SARS-CoV-2/Finland/FIN-313/2020__EPI_ISL_414641 spike protein (1-1211)(N914C_S1123C) Foldon construct
MFVFLVLLPLVSSQCVNLTTRTQLPPAYTNSFTRGVYYPDKVFRSSVLHSTQDLFLPFFSNVTWFHAIHVSGTNGTKRFDNPVLPFNDGVYFASTEKSNIIRGWIFGTTLDSKTQSLLIVNNATNVVIKVCEFQFCNDPFLGVYYHKNNKSWMESEFRVYSSANNCTFEYVSQPFLMDLEGKQGNFKNLREFVFKNIDGYFKIYSKHTPINLVRDLPQGFSALEPLVDLPIGINITRFKTLLALHRSYLTPGDSSSGWTAGAAAYYVGYLQPRTFLLKYNENGTITDAVDCALDPLSETKCTLKSFTVEKGIYQTSNFRVQPTESIVRFPNITNLCPFGEVFNATRFASVYAWNRKRISNCVADYSVLYNSASFSTFKCYGVSPTKLNDLCFTNVYADSFVIRGDEVRQIAPGQTGKIADYNYKLPDDFTGCVIAWNSNNLDSKVGGNYNYLYRLFRKSNLKPFERDISTEIYQAGSTPCNGVEGFNCYFPLQSYGFQPTNGVGYQPYRVVVLSFELLHAPATVCGPKKSTNLVKNKCVNFNFNGLTGTGVLTESNKKFLPFQQFGRDIADTTDAVRDPQTLEILDITPCSFGGVSVITPGTNTSNQVAVLYQGVNCTEVPVAIHADQLTPTWRVYSTGSNVFQTRAGCLIGAEHVNNSYECDIPIGAGICASYQTQTNSPRRARSVASQSIIAYTMSLGAENSVAYSNNSIAIPTNFTISVTTEILPVSMTKTSVDCTMYICGDSTECSNLLLQYGSFCTQLNRALTGIAVEQDKNTQEVFAQVKQIYKTPPIKDFGGFNFSQILPDPSKPSKRSFIEDLLFNKVTLADAGFIKQYGDCLGDIAARDLICAQKFNGLTVLPPLLTDEMIAQYTSALLAGTITSGWTFGAGAALQIPFAMQMAYRFNGIGVTQCVLYENQKLIANQFNSAIGKIQDSLSSTASALGKLQDVVNQNAQALNTLVKQLSSNFGAISSVLNDILSRLDKVEAEVQIDRLITGRLQSLQTYVTQQLIRAAEIRASANLAATKMSECVLGQSKRVDFCGKGYHLMSFPQSAPHGVVFLHVTYVPAQEKNFTTAPAICHDGKAHFPREGVFVSNGTHWFVTQRNFYEPQIITTDNTFVCGNCDVVIGIVNNTVYDPLQPELDSFKEELDKYFKNHTSPDVDLGDISGINASVVNIQKEIDRLNEVAKNLNESLIDLQELGKYEQYIKGGSGYIPEAPRDGQAYVRKDGEWVLLSTFL

SEQ ID NO: 13755 - protein, 1241 aa, Artificial Sequence
  SARS-CoV-2/Netherlands/ZuidHolland_2/2020__EPI_ISL_414556 spike protein (1-1211)(N914C_S1123C) Foldon construct
MFVFLVLLPLVSSQCVNLTTRTQLPPAYTNSFTRGVYYPDKVFRSSVLHSTQDLFLPFFSNVTWFHAIHVSGTNGTKRFDNPVLPFNDGVYFASTEKSNIIRGWIFGTTLDSKTQSLLIVNNATNVVIKVCEFQFCNDPFLGVYYHKNNKSWMESEFRVYSSANNCTFEYVSQPFLMDLEGKQGNFKNLREFVFKNIDGYFKIYSKHTPINLVRDLPQGFSALEPLVDLPIGINITRFQTLLALHRSYLTPGDSSSGWTAGAAAYYVGYLQPRTFLLKYNENGTITDAVDCALDPLSETKCTLKSFTVEKGIYQTSNFRVQPTESIVRFPNITNLCPFGEVFNATRFASVYAWNRKRISNCVADYSVLYNSASFSTFKCYGVSPTKLNDLCFTNVYADSFVIRGDEVRQIAPGQTGKIADYNYKLPDDFTGCVIAWNSNNLDSKVGGNYNYLYRLFRKSNLKPFERDISTEIYQAGSTPCNGVEGFNCYFPLQSYGFQPTNGVGYQPYRVVVLSFELLHAPATVCGPKKSTNLVKNKCVNFNFNGLTGTGVLTESNKKFLPFQQFGRDIADTTDAVRDPQTLEILDITPCSFGGVSVITPGTNTSNQVAVLYQGVNCTEVPVAIHADQLTPTWRVYSTGSNVFQTRAGCLIGAEHVNNSYECDIPIGAGICASYQTQTNSPRRARSVASQSIIAYTMSLGAENSVAYSNNSIAIPTNFTISVTTEILPVSMTKTSVDCTMYICGDSTECSNLLLQYGSFCTQLNRALTGIALEQDKNTQEVFAQVKQIYKTPPIKDFGGFNFSQILPDPSKPSKRSFIEDLLFNKVTLADAGFIKQYGDCLGDIAARDLICAQKFNGLTVLPPLLTDEMIAQYTSALLAGTITSGWTFGAGAALQIPFAMQMAYRFNGIGVTQCVLYENQKLIANQFNSAIGKIQDSLSSTASALGKLQDVVNQNAQALNTLVKQLSSNFGAISSVLNDILSRLDKVEAEVQIDRLITGRLQSLQTYVTQQLIRAAEIRASANLAATKMSECVLGQSKRVDFCGKGYHLMSFPQSAPHGVVFLHVTYVPAQEKNFTTAPAICHDGKAHFPREGVFVSNGTHWFVTQRNFYEPQIITTDNTFVCGNCDVVIGIVNNTVYDPLQPELDSFKEELDKYFKNHTSPDVDLGDISGINASVVNIQKEIDRLNEVAKNLNESLIDLQELGKYEQYIKGGSGYIPEAPRDGQAYVRKDGEWVLLSTFL

SEQ ID NO: 13756 - protein, 1241 aa, Artificial Sequence
  SARS-CoV-2/USA/WA-UW31/2020__EPI_ISL_414618 spike protein (1-1211)(N914C_S1123C) Foldon construct
MFVFLVLLPLVSSQCVNLTTRTQLPPAYTNSFTRGVYYPDKVFRSSVLHSTQDLFLPFFSNVTWFHAIHVSGTNGTKRFDNPVLPFNDGVYFASTEKSNIIRGWIFGTTLDSKTQSLLIVNNATNVVIKVCEFQFCNDPFLGVYYHKNNKSWMESEFRVYSSANNCTFEYVSQPFLMDLEGKQGNFKNLREFVFKNIDGYFKIYSKHTPINLVRDLPQGFSALEPLVDLPIGINITRFQTLLALHRSYLTPGDSSSGWTAGAAAYYVGYLQPRTFLLKYNENGTITDAVDCALDPLSETKCTLKSFTVEKGIYQTSNFRVQPTESIVRFPNITNLCPFGEVFNATRFASVYAWNRKRISNCVADYSVLYNSASFSTFKCYGVSPTKLNDLCFTNVYADSFVIRGDEVRQIAPGQTGKIADYNYKLPDDFTGCVIAWNSNNLDSKVGGNYNYLYRLFRKSNLKPFERDISTEIYQAGSTPCNGAEGFNCYFPLQSYGFQPTNGVGYQPYRVVVLSFELLHAPATVCGPKKSTNLVKNKCVNFNFNGLTGTGVLTESNKKFLPFQQFGRDIADTTDAVRDPQTLEILDITPCSFGGVSVITPGTNTSNQVAVLYQDVNCTEVPVAIHADQLTPTWRVYSTGSNVFQTRAGCLIGAEHVNNSYECDIPIGAGICASYQTQTNSPRRARSVASQSIIAYTMSLGAENSVAYSNNSIAIPTNFTISVTTEILPVSMTKTSVDCTMYICGDSTECSNLLLQYGSFCTQLNRALTGIAVEQDKNTQEVFAQVKQIYKTPPIKDFGGFNFSQILPDPSKPSKRSFIEDLLFNKVTLADAGFIKQYGDCLGDIAARDLICAQKFNGLTVLPPLLTDEMIAQYTSALLAGTITSGWTFGAGAALQIPFAMQMAYRFNGIGVTQCVLYENQKLIANQFNSAIGKIQDSLSSTASALGKLQDVVNQNAQALNTLVKQLSSNFGAISSVLNDILSRLDKVEAEVQIDRLITGRLQSLQTYVTQQLIRAAEIRASANLAATKMSECVLGQSKRVDFCGKGYHLMSFPQSAPHGVVFLHVTYVPAQEKNFTTAPAICHDGKAHFPREGVFVSNGTHWFVTQRNFYEPQIITTDNTFVCGNCDVVIGIVNNTVYDPLQPELDSFKEELDKYFKNHTSPDVDLGDISGINASVVNIQKEIDRLNEVAKNLNESLIDLQELGKYEQYIKGGSGYIPEAPRDGQAYVRKDGEWVLLSTFL

SEQ ID NO: 13757 - protein, 1241 aa, Artificial Sequence
  SARS-CoV-2/South Korea/SNU01/2020__EPI_ISL_411929 spike protein (1-1211)(N914C_S1123C) Foldon construct
MFVFLVLLPLVSSQCVNLTTRTQLPPAYTNSFTRGVYYPDKVFRSSVLHSTQDLFLPFFSNVTWFHAIHVSGTNGTKRFDNPVLPFNDGVYFASTEKSNIIRGWIFGTTLDSKTQSLLIVNNATNVVIKVCEFQFCNDPFLGVYYHKNNKSWMESEFRVYSSANNCTFEYVSQPFLMDLEGKQGNFKNLREFVFKNIDGYFKIYSKHTPINLVRDLPQGFWALEPLVDLPIGINITRFQTLLALHRSYLTPGDSSSGWTAGAAAYYVGYLQPRTFLLKYNENGTITDAVDCALDPLSETKCTLKSFTVEKGIYQTSNFRVQPTESIVRFPNITNLCPFGEVFNATRFASVYAWNRKRISNCVADYSVLYNSASFSTFKCYGVSPTKLNDLCFTNVYADSFVIRGDEVRQIAPGQTGKIADYNYKLPDDFTGCVIAWNSNNLDSKVGGNYNYLYRLFRKSNLKPFERDISTEIYQAGSTPCNGVEGFNCYFPLQSYGFQPTNGVGYQPYRVVVLSFELLHAPATVCGPKKSTNLVKNKCVNFNFNGLTGTGVLTESNKKFLPFQQFGRDIADTTDAVRDPQTLEILDITPCSFGGVSVITPGTNTSNQVAVLYQDVNCTEVPVAIHADQLTPTWRVYSTGSNVFQTRAGCLIGAEHVNNSYECDIPIGAGICASYQTQTNSPRRARSVASQSIIAYTMSLGAENSVAYSNNSIAIPTNFTISVTTEILPVSMTKTSVDCTMYICGDSTECSNLLLQYGSFCTQLNRALTGIAVEQDKNTQEVFAQVKQIYKTPPIKDFGGFNFSQILPDPSKPSKRSFIEDLLFNKVTLADAGFIKQYGDCLGDIAARDLICAQKFNGLTVLPPLLTDEMIAQYTSALLAGTITSGWTFGAGAALQIPFAMQMAYRFNGIGVTQCVLYENQKLIANQFNSAIGKIQDSLSSTASALGKLQDVVNQNAQALNTLVKQLSSNFGAISSVLNDILSRLDKVEAEVQIDRLITGRLQSLQTYVTQQLIRAAEIRASANLAATKMSECVLGQSKRVDFCGKGYHLMSFPQSAPHGVVFLHVTYVPAQEKNFTTAPAICHDGKAHFPREGVFVSNGTHWFVTQRNFYEPQIITTDNTFVCGNCDVVIGIVNNTVYDPLQPELDSFKEELDKYFKNHTSPDVDLGDISGINASVVNIQKEIDRLNEVAKNLNESLIDLQELGKYEQYIKGGSGYIPEAPRDGQAYVRKDGEWVLLSTFL

SEQ ID NO: 13758 - protein, 1241 aa, Artificial Sequence
  SARS-CoV-2/China/WF0004/2020__EPI_ISL_413694 spike protein (1-1211)(N914C_S1123C) Foldon construct
MFVFLVLLPLVSSQCVNLTTRTQLPPAYTNSFTRGVYYPDKVFRSSVLHSTQDLFLPFFSNVTWFHAIHVSGTNGTKRFDNPVLPFNDGVYFASTEKSNIIRGWIFGTTLDSKTQSLLIVNNATNVVIKVCEFQFCNDPFLGVYYHKNNKSWTESEFRVYSSANNCTFEYVSQPFLMDLEGKQGNFKNLREFVFKNIDGYFKIYSKHTPINLVRDLPQGFSALEPLVDLPIGINITRFQTLLALHRSYLTPGDSSSGWTAGAAAYYVGYLQPRTFLLKYNENGTITDAVDCALDPLSETKCTLKSFTVEKGIYQTSNFRVQPTESIVRFPNITNLCPFGEVFNATRFASVYAWNRKRISNCVADYSVLYNSASFSTFKCYGVSPTKLNDLCFTNVYADSFVIRGDEVRQIAPGQTGKIADYNYKLPDDFTGCVIAWNSNNLDSKVGGNYNYLYRLFRKSNLKPFERDISTEIYQAGSTPCNGVEGFNCYFPLQSYGFQPTNGVGYQPYRVVVLSFELLHAPATVCGPKKSTNLVKNKCVNFNFNGLTGTGVLTESNKKFLPFQQFGRDIADTTDAVRDPQTLEILDITPCSFGGVSVITPGTNTSNQVAVLYQDVNCTEVPVAIHADQLTPTWRVYSTGSNVFQTRAGCLIGAEHVNNSYECDIPIGAGICASYQTQTNSPRRARSVASQSIIAYTMSLGAENSVAYSNNSIAIPTNFTISVTTEILPVSMTKTSVDCTMYICGDSTECSNLLLQYGSFCTQLNRALTGIAVEQDKNTQEVFAQVKQIYKTPPIKDFGGFNFSQILPDPSKPSKRSFIEDLLFNKVTLADAGFIKQYGDCLGDIAARDLICAQKFNGLTVLPPLLTDEMIAQYTSALLAGTITSGWTFGAGAALQIPFAMQMAYRFNGIGVTQCVLYENQKLIANQFNSAIGKIQDSLSSTASALGKLQDVVNQNAQALNTLVKQLSSNFGAISSVLNDILSRLDKVEAEVQIDRLITGRLQSLQTYVTQQLIRAAEIRASANLAATKMSECVLGQSKRFDFCGKGYHLMSFPQSAPHGVVFLHVTYVPAQEKNFTTAPAICHDGKAHFPREGVFVSNGTHWFVTQRNFYEPQIITTDNTFVCGNCDVVIGIVNNTVYDPLQPELDSFKEELDKYFKNHTSPDVDLGDISGINASVVNIQKEIDRLNEVAKNLNESLIDLQELGKYEQYIKGGSGYIPEAPRDGQAYVRKDGEWVLLSTFL

SEQ ID NO: 13759 - protein, 1241 aa, Artificial Sequence
  SARS-CoV-2/China/WF0028/2020__EPI_ISL_413791 spike protein (1-1211)(N914C_S1123C) Foldon construct
MFVFLVLLPLVSSQCVNLTTRTQLPPAYTNSFTRGVYYPDKVFRSSVLHSTQDLFLPFFSNVTWFHAIHVSGTNGTKRFDNPVLPFNDGVYFASTEKSNIIRGWIFGTTLDSKTQSLLIVNNATNVVIKVCEFQFCNDPFLGVYYHKNNKSWMESEFRVYSSANNCTFEYVSQPFLMDLEGKQGNFKNLREFVFKNIDGYFKIYSKHTPINLVRDLPQGFSALEPLVDLPIGINITRFQTLLALHRSYLTPGDSSSGWTAGAAAYYVGYLQPRTFLLKYNENGTITDAVDCALDPLSETKCTLKSFTVEKGIYQTSNFRVQPTESIVRFPNITNLCPFGEVFNATRFASVYAWNRKRISNCVADYSVLYNSASFSTFKCYGVSPTKLNDLCFTNVYADSFVIRGDEVRQIAPGQTGKIADYNYKLPDDFTGCVIAWNSNNLDSKVGGNYNYLYRLFRKSNLKPFERDISTEIYQAGSTPCNGVEGFNCYFPLQSYGFQPTNGVGYQPYRVVVLSFELLHAPATVCGPKKSTNLVKNKCVNFNFNGLTGTGVLTESNKKFLPFQQFGRDIADTTDAVRDPQTLEILDITPCSFGGVSVITPGTNTSNQVAVLYQDVNCTEVPVAIHADQLTPTWRVYSTGSNVFQTRAGCLIGAEHVNNSYECDIPIGAGICASYQTQTNSPRRARSVASQSIIAYTMSLGAENSVAYSNNSIAIPTNFTISVTTEILPVSMTKTSVDCTMYICGDSTECSNLLLQYGSFCTQLNRALTGIAVEQDKNTQEVFAQVKQIYKTPPIKDFGGFNFSQILPDPSKPSKRSFIEDLLFNKVTLADAGFIKQYGDCLGDIAARDLICAQKFNGLTVLPPLLTDEMIAQYTSALLAGTITSGWTFGAGAALQIPFAMQMAYRFNGIGVTQCVLYENQKLIANQFNSAIGKIQDSLSSTASALGKLQDVVNQNAQALNTLVKQLSSNFGAISSVLNDILSRLDKVEAEVQIDRLITGRLQSLQTYVTQQLIRAAEIRASANLAATKMSECVLGQSKRVDFCGKGYHLMSFPQSAPHGVVFLHVTYVPAQEKNFTTAPAICHDGKAHFPREGVFVSNGTHWFVTQRNFYEPQIITTDNTFVCGNCDVVIGIVNNTVYDPLQPELESFKEELDKYFKNHTSPDVDLGDISGINASVVNIQKEIDRLNEVAKNLNESLIDLQELGKYEQYIKGGSGYIPEAPRDGQAYVRKDGEWVLLSTFL

SEQ ID NO: 13760 - protein, 1241 aa, Artificial Sequence
  SARS-CoV-2/2019-nCoV/USA-CruiseA-18/2020__MT159716.1 spike protein (1-1211)(N914C_S1123C) Foldon construct
MFVFLVLLPLVSSQCVNLTTRTQLPPAYTNSFTRGVYYPDKVFRSSVLHSTQDLFLPFFSNVTWFHAIHVSGTNGTKRFDNPVLPFNDGVYFASTEKSNIIRGWIFGTTLDSKTQSLLIVNNATNVVIKVCEFQFCNDPFLGVYYHKNNKSWMESELRVYSSANNCTFEYVSQPFLMDLEGKQGNFKNLREFVFKNIDGYFKIYSKHTPINLVRDLPQGFSALEPLVDLPIGINITRFQTLLALHRSYLTPGDSSSGWTAGAAAYYVGYLQPRTFLLKYNENGTITDAVDCALDPLSETKCTLKSFTVEKGIYQTSNFRVQPTESIVRFPNITNLCPFGEVFNATRFASVYAWNRKRISNCVADYSVLYNSASFSTFKCYGVSPTKLNDLCFTNVYADSFVIRGDEVRQIAPGQTGKIADYNYKLPDDFTGCVIAWNSNNLDSKVGGNYNYLYRLFRKSNLKPFERDISTEIYQAGSTPCNGVEGFNCYFPLQSYGFQPTNGVGYQPYRVVVLSFELLHAPATVCGPKKSTNLVKNKCVNFNFNGLTGTGVLTESNKKFLPFQQFGRDIADTTDAVRDPQTLEILDITPCSFGGVSVITPGTNTSNQVAVLYQDVNCTEVPVAIHADQLTPTWRVYSTGSNVFQTRAGCLIGAEHVNNSYECDIPIGAGICASYQTQTNSPRRARSVASQSIIAYTMSLGAENSVAYSNNSIAIPTNFTISVTTEILPVSMTKTSVDCTMYICGDSTECSNLLLQYGSFCTQLNRALTGIAVEQDKNTQEVFAQVKQIYKTPPIKDFGGFNFSQILPDPSKPSKRSFIEDLLFNKVTLADAGFIKQYGDCLGDIAARDLICAQKFNGLTVLPPLLTDEMIAQYTSALLAGTITSGWTFGAGAALQIPFAMQMAYRFNGIGVTQCVLYENQKLIANQFNSAIGKIQDSLSSTASALGKLQDVVNQNAQALNTLVKQLSSNFGAISSVLNDILSRLDKVEAEVQIDRLITGRLQSLQTYVTQQLIRAAEIRASANLAATKMSECVLGQSKRVDFCGKGYHLMSFPQSAPHGVVFLHVTYVPAQEKNFTTAPAICHDGKAHFPREGVFVSNGTHWFVTQRNFYEPQIITTDNTFVCGNCDVVIGIVNNTVYDPLQPELDSFKEELDKYFKNHTSPDVDLGDISGINASVVNIQKEIDRLNEVAKNLNESLIDLQELGKYEQYIKGGSGYIPEAPRDGQAYVRKDGEWVLLSTFL

SEQ ID NO: 13761 - protein, 1241 aa, Artificial Sequence
  SARS-CoV-2/SARS-CoV-2/Yunnan-01/human/2020/CHN__MT049951.1 spike protein (1-1211)(N914C_S1123C) Foldon construct
MFVFLVLLPLVSSQCVNLTTRTQLPPANTNSFTRGVYYPDKVFRSSVLHSTQDLFLPFFSNVTWFHAIHVSGTNGTKRFDNPVLPFNDGVYFASTEKSNIIRGWIFGTTLDSKTQSLLIVNNATNVVIKVCEFQFCNDPFLGVYYHKNNKSWMESEFRVYSSANNCTFEYVSQPFLMDLEGKQGNFKNLREFVFKNIDGYFKIYSKHTPINLVRDLPQGFSALEPLVDLPIGINITRFQTLLALHRSYLTPGDSSSGWTAGAAAYYVGYLQPRTFLLKYNENGTITDAVDCALDPLSETKCTLKSFTVEKGIYQTSNFRVQPTESIVRFPNITNLCPFGEVFNATRFASVYAWNRKRISNCVADYSVLYNSASFSTFKCYGVSPTKLNDLCFTNVYADSFVIRGDEVRQIAPGQTGKIADYNYKLPDDFTGCVIAWNSNNLDSKVGGNYNYLYRLFRKSNLKPFERDISTEIYQAGSTPCNGVEGFNCYFPLQSYGFQPTNGVGYQPYRVVVLSFELLHAPATVCGPKKSTNLVKNKCVNFNFNGLTGTGVLTESNKKFLPFQQFGRDIADTTDAVRDPQTLEILDITPCSFGGVSVITPGTNTSNQVAVLYQDVNCTEVPVAIHADQLTPTWRVYSTGSNVFQTRAGCLIGAEHVNNSYECDIPIGAGICASYQTQTNSPRRARSVASQSIIAYTMSLGAENSVAYSNNSIAIPTNFTISVTTEILPVSMTKTSVDCTMYICGDSTECSNLLLQYGSFCTQLNRALTGIAVEQDKNTQEVFAQVKQIYKTPPIKDFGGFNFSQILPDPSKPSKRSFIEDLLFNKVTLADAGFIKQYGDCLGDIAARDLICAQKFNGLTVLPPLLTDEMIAQYTSALLAGTITSGWTFGAGAALQIPFAMQMAYRFNGIGVTQCVLYENQKLIANQFNSAIGKIQDSLSSTASALGKLQDVVNQNAQALNTLVKQLSSNFGAISSVLNDILSRLDKVEAEVQIDRLITGRLQSLQTYVTQQLIRAAEIRASANLAATKMSECVLGQSKRVDFCGKGYHLMSFPQSAPHGVVFLHVTYVPAQEKNFTTAPAICHDGKAHFPREGVFVSNGTHWFVTQRNFYEPQIITTDNTFVCGNCDVVIGIVNNTVYDPLQPELDSFKEELDKYFKNHTSPDVDLGDISGINASVVNIQKEIDRLNEVAKNLNESLIDLQELGKYEQYIKGGSGYIPEAPRDGQAYVRKDGEWVLLSTFL

SEQ ID NO: 13762 - protein, 1241 aa, Artificial Sequence
  SARS-CoV-2/USA/WA-UW292/2020__EPI_ISL_418077 spike protein (1-1211)(N914C_S1123C) Foldon construct
MFVFLVLLPLVSSQCVNLTTRTQLPPAYTNSFTRGVYYPDKVFRSSVLHSTQDLFLPFFSNVTWFHAIHVSGTNGTKRFDNPVLPFNDGVYFASTEKSNIIRGWIFGTTLDSKTQSLLIVNNATNVVIKVCEFQFCNDPFLGVYYHKNNKSWMESEFRVYSSANNCTFEYVSQPFLMDLEGKQGNFKNLREFVFKNIDGYFKIYSKHTPINLVRDLPQGFSALEPLVDLPIGINITRFQTLLALHRSYLTPGDSSSGWTAGAAAYYVGYLQPRTFLLKYNENGTITDAVDCALDPLSETKCTLKSFTVEKGIYQTSNFRVQPTESIVRFPNITNLCPFGEVFNATRFASVYAWNRKRISNCVADYSVLYNSASFSTFKCYGVSPTKLNDLCFTNVYADSFVIRGDEVRQIAPGQTGKIADYNYKLPDDFTGCVIAWNSNNLDSKVGGNYNYLYRLFRKSNLKPFERDISTEIYQASSTPCNGVEGFNCYFPLQSYGFQPTNGVGYQPYRVVVLSFELLHAPATVCGPKKSTNLVKNKCVNFNFNGLTGTGVLTESNKKFLPFQQFGRDIADTTDAVRDPQTLEILDITPCSFGGVSVITPGTNTSNQVAVLYQDVNCTEVPVAIHADQLTPTWRVYSTGSNVFQTRAGCLIGAEHVNNSYECDIPIGAGICASYQTQTNSPRRARSVASQSIIAYTMSLGAENSVAYSNNSIAIPTNFTISVTTEILPVSMTKTSVDCTMYICGDSTECSNLLLQYGSFCTQLNRALTGIAVEQDKNTQEVFAQVKQIYKTPPIKDFGGFNFSQILPDPSKPSKRSFIEDLLFNKVTLADAGFIKQYGDCLGDIAARDLICAQKFNGLTVLPPLLTDEMIAQYTSALLAGTITSGWTFGAGAALQIPFAMQMAYRFNGIGVTQCVLYENQKLIANQFNSAIGKIQDSLSSTASALGKLQDVVNQNAQALNTLVKQLSSNFGAISSVLNDILSRLDKVEAEVQIDRLITGRLQSLQTYVTQQLIRAAEIRASANLAATKMSECVLGQSKRVDFCGKGYHLMSFPQSAPHGVVFLHVTYVPAQEKNFTTAPAICHDGKAHFPREGVFVSNGTHWFVTQRNFYEPQIITTDNTFVCGNCDVVIGIVNNTVYDPLQPELDSFKEELDKYFKNHTSPDVDLGDISGINASVVNIQKEIDRLNEVAKNLNESLIDLQELGKYEQYIKGGSGYIPEAPRDGQAYVRKDGEWVLLSTFL

SEQ ID NO: 13763 - protein, 1241 aa, Artificial Sequence
  SARS-CoV-2/Iceland/192/2020__EPI_ISL_417819 spike protein (1-1211)(N914C_S1123C) Foldon construct
MFVFFVLLPLVSSQCVNLTTRTQLPPAYTNSFTRGVYYPDKVFRSSVLHSTQDLFLPFFSNVTWFHAIHVSGTNGTKRFDNPVLPFNDGVYFASTEKSNIIRGWIFGTTLDSKTQSLLIVNNATNVVIKVCEFQFCNDPFLGVYYHKNNKSWMESEFRVYSSANNCTFEYVSQPFLMDLEGKQGNFKNLREFVFKNIDGYFKIYSKHTPINLVRDLPQGFSALEPLVDLPIGINITRFQTLLALHRSYLTPGDSSSGWTAGAAAYYVGYLQPRTFLLKYNENGTITDAVDCALDPLSETKCTLKSFTVEKGIYQTSNFRVQPTESIVRFPNITNLCPFGEVFNATRFASVYAWNRKRISNCVADYSVLYNSASFSTFKCYGVSPTKLNDLCFTNVYADSFVIRGDEVRQIAPGQTGKIADYNYKLPDDFTGCVIAWNSNNLDSKVGGNYNYLYRLFRKSNLKPFERDISTEIYQAGSTPCNGVEGFNCYFPLQSYGFQPTNGVGYQPYRVVVLSFELLHAPATVCGPKKSTNLVKNKCVNFNFNGLTGTGVLTESNKKFLPFQQFGRDIADTTDAVRDPQTLEILDITPCSFGGVSVITPGTNTSNQVAVLYQGVNCTEVPVAIHADQLTPTWRVYSTGSNVFQTRAGCLIGAEHVNNSYECDIPIGAGICASYQTQTNSPRRARSVASQSIIAYTMSLGAENSVAYSNNSIAIPTNFTISVTTEILPVSMTKTSVDCTMYICGDSTECSNLLLQYGSFCTQLNRALTGIAVEQDKNTQEVFAQVKQIYKTPPIKDFGGFNFSQILPDPSKPSKRSFIEDLLFNKVTLADAGFIKQYGDCLGDIAARDLICAQKFNGLTVLPPLLTDEMIAQYTSALLAGTITSGWTFGAGAALQIPFAMQMAYRFNGIGVTQCVLYENQKLIANQFNSAIGKIQDSLSSTASALGKLQDVVNQNAQALNTLVKQLSSNFGAISSVLNDILSRLDKVEAEVQIDRLITGRLQSLQTYVTQQLIRAAEIRASANLAATKMSECVLGQSKRVDFCGKGYHLMSFPQSAPHGVVFLHVTYVPAQEKNFTTAPAICHDGKAHFPREGVFVSNGTHWFVTQRNFYEPQIITTDNTFVCGNCDVVIGIVNNTVYDPLQPELDSFKEELDKYFKNHTSPDVDLGDISGINASVVNIQKEIDRLNEVAKNLNESLIDLQELGKYEQYIKGGSGYIPEAPRDGQAYVRKDGEWVLLSTFL

SEQ ID NO: 13764 - protein, 1241 aa, Artificial Sequence
  SARS-CoV-2/Belgium/ULG-6939/2020__EPI_ISL_417020 spike protein (1-1211)(N914C_S1123C) Foldon construct
MFVFLVLLPLVSSQCVNLTTRTQLPPAYTNSFTRGVYYPDKVFRSSVLHSTQDLFLPFFSNVTWFHAIHVSGTNGTKRFDNPVLPFNDGVYFASTEKSNIIRGWIFGTTLDSKTQSLLIVNNATNVVIKVCEFQFCNDPFLGVYYHKNNKSWMESEFRVYSSANNCTFEYVSQPFLMDLEGKQGNFKNLREFVFKNIDGYFKIYSKHTPINLVRDLPQGFSALEPLVDLPIGINITRFQTLLALHRSYLTPGDSSSGWTAGAAAYYVGYLQPRTFLLKYNENGTITDAVDCALDPLSETKCTLKSFTVEKGIYQTSNFRVQPTESIVRFPNITNLCPFGEVFNATRFASVYAWNRKRISNCVADYSVLYNSASFSTFKCYGVSPTKLNDLCFTNVYADSFVIRGDEVRQIAPGQTGKIADYNYKLPDDFTGCVIAWNSNNLDSKVGGNYNYLYRLFRKSNLKPFERDISTEIYQAGSTPCNGVEGFNCYFPLQSYGFQPTNGVGYQPYRVVVLSFELLHAPATVCGPKKSTNLVKNKCVNFNFNGLTGTGVLTESNKKFLPFQQFGRDIADTTDAVRDPQTLEILDITPCSFGGVSVITPGTNTSNQVAVLYQGVNCTEVPVAIHADQLTPTWRVYSTGSNVFQTRAGCLIGAEHVNNSYECDIPIGAGICASYQTQTNSPRRARSVASQSIIAYTMSLGAENSVVYSNNSIAIPTNFTISVTTEILPVSMTKTSVDCTMYICGDSTECSNLLLQYGSFCTQLNRALTGIAVEQDKNTQEVFAQVKQIYKTPPIKDFGGFNFSQILPDPSKPSKRSFIEDLLFNKVTLADAGFIKQYGDCLGDIAARDLICAQKFNGLTVLPPLLTDEMIAQYTSALLAGTITSGWTFGAGAALQIPFAMQMAYRFNGIGVTQCVLYENQKLIANQFNSAIGKIQDSLSSTASALGKLQDVVNQNAQALNTLVKQLSSNFGAISSVLNDILSRLDKVEAEVQIDRLITGRLQSLQTYVTQQLIRAAEIRASANLAATKMSECVLGQSKRVDFCGKGYHLMSFPQSAPHGVVFLHVTYVPAQEKNFTTAPAICHDGKAHFPREGVFVSNGTHWFVTQRNFYEPQIITTDNTFVCGNCDVVIGIVNNTVYDPLQPELDSFKEELDKYFKNHTSPDVDLGDISGINASVVNIQKEIDRLNEVAKNLNESLIDLQELGKYEQYIKGGSGYIPEAPRDGQAYVRKDGEWVLLSTFL

SEQ ID NO: 13765 - protein, 1241 aa, Artificial Sequence
  SARS-CoV-2/France/HF2496/2020__EPI_ISL_418231 spike protein (1-1211)(N914C_S1123C) Foldon construct
MFVFLVLLPLVSSQCVNLTTRTQLPPAYTNSFTRGVYYPDKVFRSSVLHSTQDLFLPFFSNVTWFHAIHVSGTNGTKRFDNPVLPFNDGVYFASTEKSNIIRGWIFGTTLDSKTQSLLIVNNATNVVIKVCEFQFCNDPFLGVYYHKNNKSWMESEFRVYSSANNCTFEYVSQPFLMDLEGKQGNFKNLREFVFKNIDGYFKIYSKHTPINLVRDLPQGFSALEPLVDLPIGINITRFQTLLALHRSYLTPGDSSSGWTAGAAAYYVGYLQPRTFLLKYNENGTITDAVDCALDPLSETKCTLKSFTVEKGIYQTSNFRVQPTESIVRFPNITNLCPFGEVFNATRFASVYAWNRKRISNCVADYSVLYNSASFSTFKCYGVSPTKLNDLCFTNVYADSFVIRGDEVRQIAPGQTGKIADYNYKLPDDFTGCVIAWNSNNLDSKVGGNYNYLYRLFRKSNLKPFERDISTEIYQAGSTPCNGVEGFNCYFPLQSYGFQPTNGVGYQPYRVVVLSFELLHAPATVCGPKKSTNLVKNKCVNFNFNGLTGTGVLTESNKKFLPFQQFGRDIADTTDAVRDPQTLEILDITPCSFGGVSVITPGTNTSNQVAVLYQGVNCTEVPVAIHADQLTPTWRVYSTGSNVFQTRAGCLIGAEHVNNSYECDIPIGAGICASYQTQTNSPRRARSVASQSIIAYTMSLGAENSVAYSNNSIAIPTNFTISVTTEILPVSMTKTSVDCTMYICGDSTECSNLLLQYGSFCTQLNRALTGIAVEQDKNTQEVFAQVKQIYKTPPIKDFGGFNFSQILPDPSKPSKRSFIEDLLFNKVTLADAGFIKQYGDCLGDIVARDLICAQKFNGLTVLPPLLTDEMIAQYTSALLAGTITSGWTFGAGAALQIPFAMQMAYRFNGIGVTQCVLYENQKLIANQFNSAIGKIQDSLSSTASALGKLQDVVNQNAQALNTLVKQLSSNFGAISSVLNDILSRLDKVEAEVQIDRLITGRLQSLQTYVTQQLIRAAEIRASANLAATKMSECVLGQSKRVDFCGKGYHLMSFPQSAPHGVVFLHVTYVPAQEKNFTTAPAICHDGKAHFPREGVFVSNGTHWFVTQRNFYEPQIITTDNTFVCGNCDVVIGIVNNTVYDPLQPELDSFKEELDKYFKNHTSPDVDLGDISGINASVVNIQKEIDRLNEVAKNLNESLIDLQELGKYEQYIKGGSGYIPEAPRDGQAYVRKDGEWVLLSTFL

SEQ ID NO: 13766 - protein, 1241 aa, Artificial Sequence
  SARS-CoV-2/USA/WA-UW291/2020__EPI_ISL_418076 spike protein (1-1211)(N914C_S1123C) Foldon construct
MFVFLVLLPLVSSQCVNLTTRTQLPPAYTNSFTRGVYYPDKVFRSSVLHSTQDLFLPFFSNVTWFHAIHVSGTNGTKRFDNPVLPFNDGVYFASTEKSNIIRGWIFGTTLDSKTQSLLIVNNATNVVIKVCEFQFCNDPFLGVYYHKNNKSWMESEFRVYSSANNCTFEYVSQPFLMDLEGKQGNFKNLREFVFKNIDGYFKIYSKHTPINLVRDLPQGFSALEPLVDLPIGINITRFQTLLALHRSYLTPGDSSSGWTAGAAAYYVGYLQPRTFLLKYNENGTITDAVDCALDPLSETKCTLKSFTVEKGIYQTSNFRVQPTESIVRFPNITNLCPFGEVFNATRFASVYAWNRKRISNCVADYSVLYNSASFSTFKCYGVSPTKLNDLCFTNVYADSFVIRGDEVRQIAPGQTGKIADYNYKLPDDFTGCVIAWNSNNLDSKVGGNYNYLYRLFRKSNLKPFERDISTEIYQAGSTPCNGVEGFNCYFPLQSYGFQPTNGVGYQPYRVVVLSFELLHAPATVCGPKKSTNLVKNKCVNFNFNGLTGTGVLTESNKKFLPFQQFGRDIADTTDAVRDPQTLEILDITPCSFGGVSVITPGTNTSNQVAVLYQGVNCTEVPVAIHADQLTPTWRVYSTGSNVFQTRAGCLIGAEHVNNSYECDIPIGAGICASYQTQTNSPRRARSVASQSIIAYTMSLGAENSVAYSNNSIAIPTNFTISVTTEILPVSMTKTSVDCTMYICGDSTECSNLLLQYGSFCTQLNRALTGIAVEQDKNTQEVFAQVKQIYKTPPIKDFGGFNFSQILPDPSKPSKRSFIEDLLFNKVTLADAGFIKQYGDCLGDIAARDLICAQKFNGLTVLPPLLTDEMIAQYTSALLAGTITSGWTFGAGAALQIPFAMQMAYRFNGIGVTQCVLYENQKLIANQFNSAIGKIQYSLSSTASALGKLQDVVNQNAQALNTLVKQLSSNFGAISSVLNDILSRLDKVEAEVQIDRLITGRLQSLQTYVTQQLIRAAEIRASANLAATKMSECVLGQSKRVDFCGKGYHLMSFPQSAPHGVVFLHVTYVPAQEKNFTTAPAICHDGKAHFPREGVFVSNGTHWFVTQRNFYEPQIITTDNTFVCGNCDVVIGIVNNTVYDPLQPELDSFKEELDKYFKNHTSPDVDLGDISGINASVVNIQKEIDRLNEVAKNLNESLIDLQELGKYEQYIKGGSGYIPEAPRDGQAYVRKDGEWVLLSTFL

SEQ ID NO: 13767 - protein, 1241 aa, Artificial Sequence; identical to SEQ ID NO: 13730
  SARS-CoV-2/Portugal/PT0034/2020__EPI_ISL_418019 spike protein (1-1211)(N914C_S1123C) Foldon construct

SEQ ID NO: 13768 - protein, 1241 aa, Artificial Sequence
  SARS-CoV-2/Iceland/202/2020__EPI_ISL_417750 spike protein (1-1211)(N914C_S1123C) Foldon construct
MFVFLVLLPLVSSQCVNLTTRTQLPPAYTNSFTRGVYYPDKVFRSSVLHSTQDLFLPFFSNVTWFHAIHVSGTNGTKRFDNPVLPFNDGVYFASTEKSNIIRGWIFGTTLDSKTQSLLIVNNATNVVIKVCEFQFCNDPFLGVYYHKNNKSWMESEFRVYSSANNCTFEYVSQPFLMDLEGKQGNFKNLREFVFKNIDGYFKIYSKHTPINLVRDLPQGFSALEPLVDLPIGINITRFQTLLALHRSYLTPGDSSSGWTAGAAAYYVGYLQPRTFLLKYNENGTITDAVDCALDPLSETKCTLKSFTVEKGIYQTSNFRVQPTESIVRFPNITNLCPFGEVFNATRFASVYAWNRKRISNCVADYSVLYNSASFSTFKCYGVSPTKLNDLCFTNVYADSFVIRGDEVRQIAPGQTGKIADYNYKLPDDFTGCVIAWNSNNLDSKVGGNYNYLYRLFRKSNLKPFERDISTEIYQAGSTPCNGVEGFNCYFPLQSYGFQPTNGVGYQPYRVVVLSFELLHAPATVCGPKKSTNLVKNKCVNFNFNGLTGTGVLTESNKKFLPFQQFGRDIADTTDAVRDPQTLEILDITPCSFGGVSVITPGTNTSNQVAVLYQDVNCTEVPVAIHADQLTPTWRVYSTGSNVFQTRAGCLIGAEHVNNSYECDIPIGAGICASYQTQTNSPRRARSVASQSIIAYTMSLGAENSVAYSNNSIAIPTNFTISVTTEILPVSMTKTSVDCTMYICGDSTECSNLLLQYGSFCTQLNRALTGIAVEQDKNTQEVFAQVKQIYKTPPIKDFGGFNFSQILPDPSKPSKRSFIEDLLFNKVTLADAGFIKQYGDCLGDIAARDLICAQKFNGLTVLPPLLTDEMIAQYTSALLAGTITSGWTFGAGAALQIPFAMQMAYRFNGIGVTQCVLYENQKLIANQFNSAIGKIQDSLSSTASALGKLQDVVNQNAQALNTLVKQLSSNFGAISSVLNDILSRLDKVEAEVQIDRLITGRLQSLQTYVTQQLIRAAEIRASANLAATKMSECVLGQSKRVDFCGKGYHLMSFPQSAPHGVVFLHVTYVPAQEKNFTTAPAICHDGKAHFPREGVFVSNGTHWFVTQRNFYEPQIITTDNTFVCGNCDVVIGIVNNTVYDPLQPELDSFKEELDKYFKNHTSPDVDLGDIPGINASVVNIQKEIDRLNEVAKNLNESLIDLQELGKYEQYIKGGSGYIPEAPRDGQAYVRKDGEWVLLSTFL

SEQ ID NO: 13769 - protein, 1241 aa, Artificial Sequence
  SARS-CoV-2/USA/WA-UW261/2020__EPI_ISL_418046 spike protein (1-1211)(N914C_S1123C) Foldon construct
MFVFLVLLPLVSSQCVNLTTRTQLPPAYTNSFTRGVYYPDKVFRSSVLHSTQDLFLPFFSNVTWFHAIHVSGTNGTKRFDNPVLPFNDGVYFASTEKSNIIRGWIFGTTLDSKTQSLLIVNNATNVVIKVCEFQFCNDPFLGVYYHKNNKSWMESEFRVYSSANNCTFEYVSQPFLMDLEGKQGNFKNLREFVFKNIDGYFKIYSKHTPINLVRDLPQGFSALEPLVDLPIGINITRFQTLLALHRSYLTPGDSSSGWTAGAAAYYVGYLQPRTFLLKYNENGTITDAVDCALDPLSETKCTLKSFTVEKGIYQTSNFRVQPTESIVRFPNITNLCPFGEVFNATRFTSVYAWNRKRISNCVADYSVLYNSASFSTFKCYGVSPTKLNDLCFTNVYADSFVIRGDEVRQIAPGQTGKIADYNYKLPDDFTGCVIAWNSNNLDSKVGGNYNYLYRLFRKSNLKPFERDISTEIYQAGSTPCNGVEGFNCYFPLQSYGFQPTNGVGYQPYRVVVLSFELLHAPATVCGPKKSTNLVKNKCVNFNFNGLTGTGVLTESNKKFLPFQQFGRDIADTTDAVRDPQTLEILDITPCSFGGVSVITPGTNTSNQVAVLYQDVNCTEVPVAIHADQLTPTWRVYSTGSNVFQTRAGCLIGAEHVNNSYECDIPIGAGICASYQTQTNSPRRARSVASQSIIAYTMSLGAENSVAYSNNSIAIPTNFTISVTTEILPVSMTKTSVDCTMYICGDSTECSNLLLQYGSFCTQLNRALTGIAVEQDKNTQEVFAQVKQIYKTPPIKDFGGFNFSQILPDPSKPSKRSFIEDLLFNKVTLADAGFIKQYGDCLGDIAARDLICAQKFNGLTVLPPLLTDEMIAQYTSALLAGTITSGWTFGAGAALQIPFAMQMAYRFNGIGVTQCVLYENQKLIANQFNSAIGKIQDSLSSTASALGKLQDVVNQNAQALNTLVKQLSSNFGAISSVLNDILSRLDKVEAEVQIDRLITGRLQSLQTYVTQQLIRAAEIRASANLAATKMSECVLGQSKRVDFCGKGYHLMSFPQSAPHGVVFLHVTYVPAQEKNFTTAPAICHDGKAHFPREGVFVSNGTHWFVTQRNFYEPQIITTDNTFVCGNCDVVIGIVNNTVYDPLQPELDSFKEELDKYFKNHTSPDVDLGDISGINASVVNIQKEIDRLNEVAKNLNESLIDLQELGKYEQYIKGGSGYIPEAPRDGQAYVRKDGEWVLLSTFL

SEQ ID NO: 13770 - protein, 1241 aa, Artificial Sequence
  SARS-CoV-2/Portugal/PT0035/2020__EPI_ISL_418020 spike protein (1-1211)(N914C_S1123C) Foldon construct
MFVFLVLLPLVSSQCVNLTTRTQLPPAYTNSFTRGVYYPDKVFRSSVLHSTQDLFLPFFSNVTWFHAIHVSGTNGTKRFDNPVLPFNDGVYFASTEKSNIIRGWIFGTTLDSKTQSLLIVNNATNVVIKVCEFQFCNDPFLGVYYHKNNKSWMESEFRVYSSANNCTFEYVSQPFLMDLEGKQGNFKNLREFVFKNIDGYFKIYSKHTPINLVRDLPQGFSALEPLVDLPIGINITRFQTLLALHRSYLTPGDSSSGWTAGAAAYYVGYLQPRTFLLKYNENGTITDAVDCALDPLSETKCTLKSFTVEKGIYQTSNFRVQPTESIVRFPNITNLCPFGEVFNATRFASVYAWNRKRISNCVADYSVLYNSASFSTFKCYGVSPTKLNDLCFTNVYADSFVIRGDEVRQIAPGQTGKIADYNYKLPDDFTGCVIAWNSNNLDSKVGGNYNYLYRLFRKSNLKPFERDISTEIYQAGSTPCNGVEGFNCYFPLQSYGFQPTNGVGYQPYRVVVLSFELLHAPATVCGPKKSTNLVKNKCVNFNFNGLTGTGVLTESNKKFLPFQQFGRDIADTTDAVRDPQTLEILDITPCSFGGVSVITPGTNTSNQVAVLYQDVNCTEVPVAIHADQLTPTWRVYSTGSNVFQTRAGCLIGAEHVNNSYECDIPIGAGICASYQTQTNSPRRARSVASQSIIAYTMSLGAENSVAYSNNSIAIPTNFTISVTTEILPVSMTKTSVDCTMYICGDSTECSNLLLQYGSFCTQLNRALTGIAVEQDKNTQEVFAQVKQIYKTPPIKDFGGFNFSQILPDPSKPSKRSFIEDLLFNKVTLADAGFIKQYGDCLGDISARDLICAQKFNGLTVLPPLLTDEMIAQYTSALLAGTITSGWTFGAGAALQIPFAMQMAYRFNGIGVTQCVLYENQKLIANQFNSAIGKIQDSLSSTASALGKLQDVVNQNAQALNTLVKQLSSNFGAISSVLNDILSRLDKVEAEVQIDRLITGRLQSLQTYVTQQLIRAAEIRASANLAATKMSECVLGQSKRVDFCGKGYHLMSFPQSAPHGVVFLHVTYVPAQEKNFTTAPAICHDGKAHFPREGVFVSNGTHWFVTQRNFYEPQIITTDNTFVCGNCDVVIGIVNNTVYDPLQPELDSFKEELDKYFKNHTSPDVDLGDISGINASVVNIQKEIDRLNEVAKNLNESLIDLQELGKYEQYIKGGSGYIPEAPRDGQAYVRKDGEWVLLSTFL

SEQ ID NO: 13771 - protein, 1241 aa, Artificial Sequence
  SARS-CoV-2/USA/NY-NYUMC7/2020__EPI_ISL_418192 spike protein (1-1211)(N914C_S1123C) Foldon construct
MFVFLVLLPLVSSQCVNLTTRTQLPPAYTNSFTRGVYYPDKVFRSSVLHSTQDLFLPFFSNVTWFHAIHVSGTNGTKRFDNPVLPFNDGVYFASTEKSNIIRGWIFGTTLDSKTQSLLIVNNATNVVIKVCEFQFCNDPFLGVYHHKNNKSWMESEFRVYSSANNCTFEYVSQPFLMDLEGKQGNFKNLREFVFKNIDGYFKIYSKHTPINLVRDLPQGFSALEPLVDLPIGINITRFQTLLALHRSYLTPGDSSSGWTAGAAAYYVGYLQPRTFLLKYNENGTITDAVDCALDPLSETKCTLKSFTVEKGIYQTSNFRVQPTESIVRFPNITNLCPFGEVFNATRFASVYAWNRKRISNCVADYSVLYNSASFSTFKCYGVSPTKLNDLCFTNVYADSFVIRGDEVRQIAPGQTGKIADYNYKLPDDFTGCVIAWNSNNLDSKVGGNYNYLYRLFRKSNLKPFERDISTEIYQAGSTPCNGVEGFNCYFPLQSYGFQPTNGVGYQPYRVVVLSFELLHAPATVCGPKKSTNLVKNKCVNFNFNGLTGTGVLTESNKKFLPFQQFGRDIADTTDAVRDPQTLEILDITPCSFGGVSVITPGTNTSNQVAVLYQGVNCTEVPVAIHADQLTPTWRVYSTGSNVFQTRAGCLIGAEHVNNSYECDIPIGAGICASYQTQTNSPRRARSVASQSIIAYTMSLGAENSVAYSNNSIAIPTNFTISVTTEILPVSMTKTSVDCTMYICGDSTECSNLLLQYGSFCTQLNRALTGIAVEQDKNTQEVFAQVKQIYKTPPIKDFGGFNFSQILPDPSKPSKRSFIEDLLFNKVTLADAGFIKQYGDCLGDIAARDLICAQKFNGLTVLPPLLTDEMIAQYTSALLAGTITSGWTFGAGAALQIPFAMQMAYRFNGIGVTQCVLYENQKLIANQFNSAIGKIQDSLSSTASALGKLQDVVNQNAQALNTLVKQLSSNFGAISSVLNDILSRLDKVEAEVQIDRLITGRLQSLQTYVTQQLIRAAEIRASANLAATKMSECVLGQSKRVDFCGKGYHLMSFPQSAPHGVVFLHVTYVPAQEKNFTTAPAICHDGKAHFPREGVFVSNGTHWFVTQRNFYEPQIITTDNTFVCGNCDVVIGIVNNTVYDPLQPELDSFKEELDKYFKNHTSPDVDLGDISGINASVVNIQKEIDRLNEVAKNLNESLIDLQELGKYEQYIKGGSGYIPEAPRDGQAYVRKDGEWVLLSTFL

SEQ ID NO: 13772 - protein, 1241 aa, Artificial Sequence
  SARS-CoV-2/Iceland/189/2020__EPI_ISL_417709 spike protein (1-1211)(N914C_S1123C) Foldon construct
MFVFLVLLPLVSSQCVNLTTRTQLPPAYTNSFTRGVYYPDKVFRSSVLHSTQDLFLPFFSNVTWFHAIHVSGTNGTKRFDNPVLPFNDGVYFASTEKSNIIRGWIFGTTLDSKTQSLLIVNNATNVVIKVCEFQFCNDPFLGVYYHKNNKSWMESEFRVYSSANNCTFEYVSQPFLMDLEGKQGNFKNLREFVFKNIDGYFKIYSKHTPINLVRDLPQGFSALEPLVDLPIGINITRFQTLLALHRSYLTPGDSSSGWTAGAAAYYVGYLQPRTFLLKYNENGTITDAVDCALDPLSETKCTLKSFTVEKGIYQTSNFRVQPTESIVRFPNITNLCPFGEVFNATRFASVYAWNRKRISNCVADYSVLYNSASFSTFKCYGVSPTKLNDLCFTNVYADSFVIRGDEVRQIAPGQTGKIADYNYKLPDDFTGCVIAWNSNNLDSKVGGNYNYLYRLFRKSNLKPFERDISTEIYQAGSTPCNGVEGFNCYFPLQSYGFQPTNGVGYQPYRVVVLSFELLHAPATVCGPKKSTNLVKNKCVNFNFNGLTGTGVLTESNKKFLPFQQFGRDIADTTDAVRDPQTLEILDITPCSFGGVSVITPGTNTSNQVAVLYQGVNCTEVPVAIHADQLTPTWRVYSTGSNVFQTRAGCLIGAEHVNNSYECDIPIGAGICASYQTQTNSPRRARSVASQSIIAYTMSLGAENSVAYSNNSIAIPTNFTISVTTEILPVSMTKTSVDCTMYICGDSTECSNLLLQYGSFCTQLNRALTGIAVEQDKNTQEVFAQVKQIYKTPPIKDFGGFNFSQILPDPSKPSKRSFIEDLLFNKVTLADAGFTKQYGDCLGDIAARDLICAQKFNGLTVLPPLLTDEMIAQYTSALLAGTITSGWTFGAGAALQIPFAMQMAYRFNGIGVTQCVLYENQKLIANQFNSAIGKIQDSLSSTASALGKLQDVVNQNAQALNTLVKQLSSNFGAISSVLNDILSRLDKVEAEVQIDRLITGRLQSLQTYVTQQLIRAAEIRASANLAATKMSECVLGQSKRVDFCGKGYHLMSFPQSAPHGVVFLHVTYVPAQEKNFTTAPAICHDGKAHFPREGVFVSNGTHWFVTQRNFYEPQIITTDNTFVCGNCDVVIGIVNNTVYDPLQPELDSFKEELDKYFKNHTSPDVDLGDISGINASVVNIQKEIDRLNEVAKNLNESLIDLQELGKYEQYIKGGSGYIPEAPRDGQAYVRKDGEWVLLSTFL

SEQ ID NO: 13773 - protein, 1241 aa, Artificial Sequence
  SARS-CoV-2/Australia/NSW56/2020__EPI_ISL_417408 spike protein (1-1211)(N914C_S1123C) Foldon construct
MFVFLVLLPLVSSQCVNLTTRTQLPPAYTNSFTRGVYYPDKVFRSSVLHSTQDLFLPFFSNVTWFHAIHVSGTNGTKRFDNPVLPFNDGVYFASTEKSNIIRGWIFGTTLDSKTQSLLIVNNATNVVIKVCEFQFCNDPFLGVYYHKNNKSWMESEFRVYSSANNCTFEYVSQPFLMDLEGKQGNFKNLREFVFKNIDGYFKIYSKHTPINLVRDLPQGFSALEPLVDLPIGINITRFQTLLALHRSYLTPGDSSSGWTAGAAAYYVGYLQPRTFLLKYNENGTITDAVDCALDPLSETKCTLKSFTVEKGIYQTSNFRVQPTESIVRFPNITNLCPFGEVFNATRFASVYAWNRKRISNCVADYSVLYNSASFSTFKCYGVSPTKLNDLCFTNVYADSFVIRGDEVRQIAPGQTGKIADYNYKLPDDFTGCVIAWNSNNLDSKVGGNYNYLYRLFRKSNLKPFERDISTEIYQAGSTPCNGVEGFNCYFPLQSYGFQPTNGVGYQPYRVVVLSFELLHAPATVCGPKKSTNLVKNKCVNFNFNGLTGTGVLTESNKKFLPFQQFGRDIADTTDAVRDPQTLEILDITPCSFGGVSVITPGTNTSNQVAVLYQDVNCTEVPVAIHADQLTPTWRVYSTGSNVFQTRAGCLIGAEHVNNSYECDIPIGAGICASYQTQTNSPRRARSVASQSIIAYTMSLGAENSVAYSNNSIAIPTNFTISVTTEILPVSMTKTSVDCTMYICGDSTECSNLLLQYGSFCTQLNRALTGIAVEQDKNTQEVFAQVKQIYKTPPIKDFGGFNFSQILPDSSKPSKRSFIEDLLFNKVTLADAGFIKQYGDCLGDIAARDLICAQKFNGLTVLPPLLTDEMIAQYTSALLAGTITSGWTFGAGAALQIPFAMQMAYRFNGIGVTQCVLYENQKLIANQFNSAIGKIQDSLSSTASALGKLQDVVNQNAQALNTLVKQLSSNFGAISSVLNDILSRLDKVEAEVQIDRLITGRLQSLQTYVTQQLIRAAEIRASANLAATKMSECVLGQSKRVDFCGKGYHLMSFPQSAPHGVVFLHVTYVPAQEKNFTTAPAICHDGKAHFPREGVFVSNGTHWFVTQRNFYEPQIITTDNTFVCGNCDVVIGIVNNTVYDPLQPELDSFKEELDKYFKNHTSPDVDLGDISGINASVVNIQKEIDRLNEVAKNLNESLIDLQELGKYEQYIKGGSGYIPEAPRDGQAYVRKDGEWVLLSTFL

SEQ ID NO: 13774 - protein, 1241 aa, Artificial Sequence
  SARS-CoV-2/Iceland/280/2020__EPI_ISL_417608 spike protein (1-1211)(N914C_S1123C) Foldon construct
MFVFLVLLPLVSSQCVNLTTRTQLPPAYTNSFTRGVYYPDKVFRSSVLHSTQDLFLPFFSNVTWFHAIHVSGTNGTKRFDNPVLPFNDGVYFASTEKSNIIRGWIFGTTLDSKTQSLLIVNNATNVVIKVCEFQFCNDPFLGVYYHKNNKSWMESEFRVYSSANNCTFEYVSQPFLMDLEGKQGNFKNLREFVFKNIDGYFKIYSKHTPINLVRDLPQGFSALEPLVDLPIGINITRFQTLLALHRSYLTPGDSSSGWTAGAAAYYVGYLQPRTFLLKYNENGTITDAVDCALDPLSETKCTLKSFTVEKGIYQTSNFRVQPTESIVRFPNITNLCPFGEVFNATRFASVYAWNRKRISNCVADYSVLYNSASFSTFKCYGVSPTKLNDLCFTNVYADSFVIRGDEVRQIAPGQTGKIADYNYKLPDDFTGCVIAWNSNNLDSKVGGNYNYLYRLFRKSNLKPFERDISTEIYQAGSTPCNGVEGFNCYFPLQSYGFQPTNGVGYQPYRVVVLSFELLHAPATVCGPKKSTNLVKNKCVNFNFNGLTGTGVLTESNKKFLPFQQFGRDIADTTDAVRDPQTLEILDITPCSFGGVSVITPGTNTSNQVAVLYQGVNCTEVPVAIHADQLTPTWRVYSTGSNVFQTRAGCLIGAEHVNNSYECDIPIGAGICASYHTQTNSPRRARSVASQSIIAYTMSLGAENSVAYSNNSIAIPTNFTISVTTEILPVSMTKTSVDCTMYICGDSTECSNLLLQYGSFCTQLNRALTGIAVEQDKNTQEVFAQVKQIYKTPPIKDFGGFNFSQILPDPSKPSKRSFIEDLLFNKVTLADAGFIKQYGDCLGDIAARDLICAQKFNGLTVLPPLLTDEMIAQYTSALLAGTITSGWTFGAGAALQIPFAMQMAYRFNGIGVTQCVLYENQKLIANQFNSAIGKIQDSLSSTASALGKLQDVVNQNAQALNTLVKQLSSNFGAISSVLNDILSRLDKVEAEVQIDRLITGRLQSLQTYVTQQLIRAAEIRASANLAATKMSECVLGQSKRVDFCGKGYHLMSFPQSAPHGVVFLHVTYVPAQEKNFTTAPAICHDGKAHFPREGVFVSNGTHWFVTQRNFYEPQIITTDNTFVCGNCDVVIGIVNNTVYDPLQPELDSFKEELDKYFKNHTSPDVDLGDISGINASVVNIQKEIDRLNEVAKNLNESLIDLQELGKYEQYIKGGSGYIPEAPRDGQAYVRKDGEWVLLSTFL

SEQ ID NO: 13775 - protein, 1241 aa, Artificial Sequence; identical to SEQ ID NO: 13730
  SARS-CoV-2/Iceland/247/2020__EPI_ISL_417575 spike protein (1-1211)(N914C_S1123C) Foldon construct

SEQ ID NO: 13776 - protein, 1241 aa, Artificial Sequence
  SARS-CoV-2/Iceland/238/2020__EPI_ISL_417566 spike protein (1-1211)(N914C_S1123C) Foldon construct
MFVFLVLLPLVSSQCVNLTTRTQLPPAYTNSFTRGVYYPDKVFRSSVLHSTQDLFLPFFSNVTWFHAIHVSGTNGTKRFDNPVLPFNDGVYFASTEKSNIIRGWIFGTTLDSKTQSLLIVNNATNVVIKVCEFQFCNDPFLGVYYHKNNKSWMESEFRVYSSANNCTFEYVSQPFLMDLEGKQGNFKNLREFVFKNIDGYFKIYSKHTPINLVRDLPQGFSALEPLVDLPIGINITRFQTLLALHRSYLTPGDSSSGWTAGAAAYYVGYLQPRTFLLKYNENGTITDAVDCALDPLSETKCTLKSFTVEKGIYQTSNFRVQPTESIVRFPNITNLCPFGEVFNATRFASVYAWNRKRISNCVADYSVLYNSASFSTFKCYGVSPTKLNDLCFTNVYADSFVIRGDEVRQIAPGQTGKIADYNYKLPDDFTGCVIAWNSNNLDSKVGGNYNYLYRLFRKSNLKPFERDISTEIYQAGSTPCNGVEGFNCYFPLQSYGFQPTNGVGYQPYRVVVLSFELLHAPATVCGPKKSTNLVKNKCVNFNFNGLTGTGVLTESNKKFLPFQQFGRDIADTTDAVRDPQTLEILDITPCSFGGVSVITPGTNTSNQVAVLYQGVNCTEVPVAIHADQLTPTWRVYSTGSNVFQTRAGCLIGAEHVNNSYECDIPIGAGICASYQTQTNSPRRARSVASQSIIAYTMSLGAENSVAYSNNSIAIPTNFTISVTTEILPVSMTKTSVDCTMYICGDSTECSNLLLQYGSFCTQLNRALTGIAVEQDKNTQEVFAQVKQIYKTPPIKDFGGFNFSQILPDPSKPSKRSFIEDLLFNKVTLADVGFIKQYGDCLGDIAARDLICAQKFNGLTVLPPLLTDEMIAQYTSALLAGTITSGWTFGAGAALQIPFAMQMAYRFNGIGVTQCVLYENQKLIANQFNSAIGKIQDSLSSTASALGKLQDVVNQNAQALNTLVKQLSSNFGAISSVLNDILSRLDKVEAEVQIDRLITGRLQSLQTYVTQQLIRAAEIRASANLAATKMSECVLGQSKRVDFCGKGYHLMSFPQSAPHGVVFLHVTYVPAQEKNFTTAPAICHDGKAHFPREGVFVSNGTHWFVTQRNFYEPQIITTDNTFVCGNCDVVIGIVNNTVYDPLQPELDSFKEELDKYFKNHTSPDVDLGDISGINASVVNIQKEIDRLNEVAKNLNESLIDLQELGKYEQYIKGGSGYIPEAPRDGQAYVRKDGEWVLLSTFL

SEQ ID NO: 13777 - protein, 1241 aa, Artificial Sequence
  SARS-CoV-2/Greece/16/2020__EPI_ISL_418265 spike protein (1-1211)(N914C_S1123C) Foldon construct
MFVFLVLLPLVSSQCVNLTTRTQLPPAYTNSFTRGVYYPDKVFRSSVLHSTQDLFLPFFSNVTWFHAIHVSGTNGTKRFDNPVLPFNDGVYFASTEKSNIIRGWIFGTTLDSKTQSLLIVNNATNVVIKVCEFQFCNDPFLGVYYHKNNKSWMESEFRVYSSANNCTFEYVSQPFLMDLEGKQGNFKNLREFVFKNVDGYFKIYSKHTPINLVRDLPQGFSALEPLVDLPIGINITRFQTLLALHRSYLTPGDSSSGWTAGAAAYYVGYLQPRTFLLKYNENGTITDAVDCALDPLSETKCTLKSFTVEKGIYQTSNFRVQPTESIVRFPNITNLCPFGEVFNATRFASVYAWNRKRISNCVADYSVLYNSASFSTFKCYGVSPTKLNDLCFTNVYADSFVIRGDEVRQIAPGQTGKIADYNYKLPDDFTGCVIAWNSNNLDSKVGGNYNYLYRLFRKSNLKPFERDISTEIYQAGSTPCNGVEGFNCYFPLQSYGFQPTNGVGYQPYRVVVLSFELLHAPATVCGPKKSTNLVKNKCVNFNFNGLTGTGVLTESNKKFLPFQQFGRDIADTTDAVRDPQTLEILDITPCSFGGVSVITPGTNTSNQVAVLYQDVNCTEVPVAIHADQLTPTWRVYSTGSNVFQTRAGCLIGAEHVNNSYECDIPIGAGICASYQTQTNSPRRARSVASQSIIAYTMSLGAENSVAYSNNSIAIPTNFTISVTTEILPVSMTKTSVDCTMYICGDSTECSNLLLQYGSFCTQLNRALTGIAVEQDKNTQEVFAQVKQIYKTPPIKDFGGFNFSQILPDPSKPSKRSFIEDLLFNKVTLADAGFIKQYGDCLGDIAARDLICAQKFNGLTVLPPLLTDEMIAQYTSALLAGTITSGWTFGAGAALQIPFAMQMAYRFNGIGVTQCVLYENQKLIANQFNSAIGKIQDSLSSTASALGKLQDVVNQNAQALNTLVKQLSSNFGAISSVLNDILSRLDKVEAEVQIDRLITGRLQSLQTYVTQQLIRAAEIRASANLAATKMSECVLGQSKRVDFCGKGYHLMSFPQSAPHGVVFLHVTYVPAQEKNFTTAPAICHDGKAHFPREGVFVSNGTHWFVTQRNFYEPQIITTDNTFVCGNCDVVIGIVNNTVYDPLQPELDSFKEELDKYFKNHTSPDVDLGDISGINASVVNIQKEIDRLNEVAKNLNESLIDLQELGKYEQYIKGGSGYIPEAPRDGQAYVRKDGEWVLLSTFL

SEQ ID NO: 13778 - protein, 1241 aa, Artificial Sequence
  SARS-CoV-2/Iceland/319/2020__EPI_ISL_417648 spike protein (1-1211)(N914C_S1123C) Foldon construct
MFVFLVLLPLVSSQCVNLTTRTQLPPAYTNSFTRGVYYPDKVFRSSVLHSTQDLFLPFFSNVTWFHAIHVSGTNGTKRFDNPVLPFNDGVYFASTEKSNIIRGWIFGTTLDSKTQSLLIVNNATNVVIKVCEFQFCNDPFLGVYYHKNNKSWMESEFRVYSSANNCTFEYVSQPFLIDLEGKQGNFKNLREFVFKNIDGYFKIYSKHTPINLVRDLPQGFSALEPLVDLPIGINITRFQTLLALHRSYLTPGDSSSGWTAGAAAYYVGYLQPRTFLLKYNENGTITDAVDCALDPLSETKCTLKSFTVEKGIYQTSNFRVQPTESIVRFPNITNLCPFGEVFNATRFASVYAWNRKRISNCVADYSVLYNSASFSTFKCYGVSPTKLNDLCFTNVYADSFVIRGDEVRQIAPGQTGKIADYNYKLPDDFTGCVIAWNSNNLDSKVGGNYNYLYRLFRKSNLKPFERDISTEIYQAGSTPCNGVEGFNCYFPLQSYGFQPTNGVGYQPYRVVVLSFELLHAPATVCGPKKSTNLVKNKCVNFNFNGLTGTGVLTESNKKFLPFQQFGRDIADTTDAVRDPQTLEILDITPCSFGGVSVITPGTNTSNQVAVLYQGVNCTEVPVAIHADQLTPTWRVYSTGSNVFQTRAGCLIGAEHVNNSYECDIPIGAGICASYQTQTNSPRRARSVASQSIIAYTMSLGAENSVAYSNNSIAIPTNFTISVTTEILPVSMTKTSVDCTMYICGDSTECSNLLLQYGSFCTQLNRALTGIAVEQDKNTQEVFAQVKQIYKTPPIKDFGGFNFSQILPDPSKPSKRSFIEDLLFNKVTLADAGFIKQYGDCLGDIAARDLICAQKFNGLTVLPPLLTDEMIAQYTSALLAGTITSGWTFGAGAALQIPFAMQMAYRFNGIGVTQCVLYENQKLIANQFNSAIGKIQDSLSSTASALGKLQDVVNQNAQALNTLVKQLSSNFGAISSVLNDILSRLDKVEAEVQIDRLITGRLQSLQTYVTQQLIRAAEIRASANLAATKMSECVLGQSKRVDFCGKGYHLMSFPQSAPHGVVFLHVTYVPAQEKNFTTAPAICHDGKAHFPREGVFVSNGTHWFVTQRNFYEPQIITTDNTFVCGNCDVVIGIVNNTVYDPLQPELDSFKEELDKYFKNHTSPDVDLGDISGINASVVNIQKEIDRLNEVAKNLNESLIDLQELGKYEQYIKGGSGYIPEAPRDGQAYVRKDGEWVLLSTFL

SEQ ID NO: 13779 - protein, 1241 aa, Artificial Sequence
  SARS-CoV-2/Congo/94/2020__EPI_ISL_417947 spike protein (1-1211)(N914C_S1123C) Foldon construct
MFVFLVLLPLVSSQCVNLTTRTQLPPAYTNSFTRGVYYPDKVFRSSVLHSTQDLFLPFFSNVTWFHAIHVSGTNGTKRFDNPVLPFNDGVYFASTEKSNIIRGWIFGTTLDSKTQSLLIVNNATNVVIKVCEFQFCNDPFLGVYYHKNNKSWMESEFRVYSSANNCTFEYVSQPFLMDLEGKQGNFKNLREFVFKNIDGYFKIYSKHTPINLVRDLPQGFSALEPLVDLPIGINITRFQTLLALHRSYLTPGDSSSGWTAGAAAYYVGYLQPRTFLLKYNENGTITDAVDCALDPLSETKCTLKSFTVEKGIYQTSNFRVQPTESIVRFPNITNLCPFGEVFNATRFASVYAWNRKRISNCVADYSVLYNSASFSTFKCYGVSPTKLNDLCFTNVYADSFVIRGDEVRQIAPGQTGKIADYNYKLPDDFTGCVIAWNSNNLDSKVGGNYNYLYRLFRKSNLKPFERDISTEIYQAGSTPCNGVEGFNCYFPLQSYGFQPTNGVGYQPYRVVVLSFELLHAPATVCGPKKSTNLVKNKCVNFNFNGLTGTGVLTESNKKFLPFQQFGRDIADTTDAVRDPQTLEILDITPCSFGGVSVITPGTNTSNQVAVLYQGVNCTEVPVAIHADQLTPTWRVYSTGSNVFQTRAGCLIGAEHVNNSYECDIPIGAGICASYQTQTNSPRRARSVASQSIIAYTMSLGAENSVAYSNNSIAIPTNFTISVTTEILPVSMTKTSVDCTMYICGDSTECSNLLLQYGSFCTQLNRALTGIAVEQDKNTQEVFAQVKQIYKTPPIKDFGGFNFSQILPDPSKPSKRSFIEDILFNKVTLADAGFIKQYGDCLGDIAARDLICAQKFNGLTVLPPLLTDEMIAQYTSALLAGTITSGWTFGAGAALQIPFAMQMAYRFNGIGVTQCVLYENQKLIANQFNSAIGKIQDSLSSTASALGKLQDVVNQNAQALNTLVKQLSSNFGAISSVLNDILSRLDKVEAEVQIDRLITGRLQSLQTYVTQQLIRAAEIRASANLAATKMSECVLGQSKRVDFCGKGYHLMSFPQSAPHGVVFLHVTYVPAQEKNFTTAPAICHDGKAHFPREGVFVSNGTHWFVTQRNFYEPQIITTDNTFVCGNCDVVIGIVNNTVYDPLQPELDSFKEELDKYFKNHTSPDVDLGDISGINASVVNIQKEIDRLNEVAKNLNESLIDLQELGKYEQYIKGGSGYIPEAPRDGQAYVRKDGEWVLLSTFL

SEQ ID NO: 13780 - protein, 1241 aa, Artificial Sequence
  SARS-CoV-2/Congo/158/2020__EPI_ISL_417950 spike protein (1-1211)(N914C_S1123C) Foldon construct
MFVFLVLLPLVSSQCVNLTTRTQLPPAYTNSFTRGVYYPDKVFRSSVLHSTQDLFLPFFSNVTWFHAIHVSGTNGTKRFDNPVLPFNDGVYFASTEKSNIIRGWIFGTTLDSKTQSLLIVNNATNVVIKVCEFQFCNDPFLGVYYHKNNKSWMESEFRVYSSANNCTFEYVSQPFLMDLEGKQGNFKNLREFVFKNIDGYFKIYSKHTPINLVRDLPQGFSALEPLVDLPIGINITRFQTLLALHRSYLTPGDSSSGWTAGAAAYYVGYLQPRTFLLKYNENGTITDAVDCALDPLSETKCTLKSFTVEKGIYQTSNFRVQPTESIVRFPNITNLCPFGEVFNATRFASVYAWNRKRISNCVADYSVLYNSASFSTFKCYGVSPTKLNDLCFTNVYADSFVIRGDEVRQIAPGQTGKIADYNYKLPDDFTGCVIAWNSNNLDSKVGGNYNYLYRLFRKSNLKPFERDISTEIYQAGSTPCNGVEGFNCYFPLQSYGFQPTNGVGYQPYRVVVLSFELLHAPATVCGPKKSTNLVKNKCVNFNFNGLTGTGVLTESNKKFLPFQQFGRDIADTTDAVRDPQTLEILDITPCSFGGVSVITPGTNTSNQVAVLYQDVNCTEVPVAIHADQLTPTWRVYSTGSNVFQTRAGCLIGAEHVNNSYECDIPIGAGICASYQTQTNSPRRARSVASQSIIAYTMSLGAENSVAYSNNSIAIPTNFTISVTTEILPVSMTKTSVDCTMYICGDSTECSNLLLQYGSFCTQLNRALTGIAVEQDKNTQEVFAQVKQIYKTPPIKDFGGFNFSQILPDPSKPSKRSFIEDLLFNKVTLADAGFIKQYGDCLGDIAARDLICAQKFNGLTVLPPLLTDEMIAQYTSALLAGTITSGWTFGAGAALQIPFAMQMAYRFNGIGVTQCVLYENQKLIANQFNSAIGKIQDSLSSTASALGKLQDVVNQNAQALNTLVKQLSSNFGAISSVLNDILSRLDKVEAEVQIDRLITGRLQSLQTYVTQQLIRAAEIRASANLAATKMSECVLGQSKRVDFCGKGYHLMSFPQSAPHGVVFLHVTYVPAQEKNFTTAPAICHDGKAHFPREGVFVSNGTHWFVTQRNFYEPQIITTDNTFLCGNCDVVIGIVNNTVYDPLQPELDSFKEELDKYFKNHTSPDVDLGDISGINASVVNIQKEIDRLNEVAKNLNESLIDLQELGKYEQYIKGGSGYIPEAPRDGQAYVRKDGEWVLLSTFL

SEQ ID NO: 13781 - protein, 1241 aa, Artificial Sequence
  SARS-CoV-2/USA/UT-00034/2020__EPI_ISL_417977 spike protein (1-1211)(N914C_S1123C) Foldon construct
MFVFLVLLPLVSSQCVNLTTRTQLPPAYTNSFTRGVYYPDKVFRSSVLHSTQDLFLPFFSNVTWFHAIHVSGTNGTKRFDNPVLPFNDGVYFASTEKSNIIRGWIFGTTLDSKTQSLLIVNNATNVVIKVCEFQFCNDPFLGVYYYKNNKSWMESEFRVYSSANNCTFEYVSQPFLMDLEGKQGNFKNLREFVFKNIDGYFKIYSKHTPINLVRDLPQGFSALEPLVDLPIGINITRFQTLLALHRSYLTPGDSSSGWTAGAAAYYVGYLQPRTFLLKYNENGTITDAVDCALDPLSETKCTLKSFTVEKGIYQTSNFRVQPTESIVRFPNITNLCPFGEVFNATRFASVYAWNRKRISNCVADYSVLYNSASFSTFKCYGVSPTKLNDLCFTNVYADSFVIRGDEVRQIAPGQTGKIADYNYKLPDDFTGCVIAWNSNNLDSKVGGNYNYLYRLFRKSNLKPFERDISTEIYQAGSTPCNGVEGFNCYFPLQSYGFQPTNGVGYQPYRVVVLSFELLHAPATVCGPKKSTNLVKNKCVNFNFNGLTGTGVLTESNKKFLPFQQFGRDIADTTDAVRDPQTLEILDITPCSFGGVSVITPGTNTSNQVAVLYQGVNCTEVPVAIHADQLTPTWRVYSTGSNVFQTRAGCLIGAEHVNNSYECDIPIGAGICASYQTQTNSPRRARSVASQSIIAYTMSLGAENSVAYSNNSIAIPTNFTISVTTEILPVSMTKTSVDCTMYICGDSTECSNLLLQYGSFCTQLNRALTGIAVEQDKNTQEVFAQVKQIYKTPPIKDFGGFNFSQILPDPSKPSKRSFIEDLLFNKVTLADAGFIKQYGDCLGDIAARDLICAQKFNGLTVLPPLLTDEMIAQYTSALLAGTITSGWTFGAGAALQIPFAMQMAYRFNGIGVTQCVLYENQKLIANQFNSAIGKIQDSLSSTASALGKLQDVVNQNAQALNTLVKQLSSNFGAISSVLNDILSRLDKVEAEVQIDRLITGRLQSLQTYVTQQLIRAAEIRASANLAATKMSECVLGQSKRVDFCGKGYHLMSFPQSAPHGVVFLHVTYVPAQEKNFTTAPAICHDGKAHFPREGVFVSNGTHWFVTQRNFYEPQIITTDNTFVCGNCDVVIGIVNNTVYDPLQPELDSFKEELDKYFKNHTSPDVDLGDISGINASVVNIQKEIDRLNEVAKNLNESLIDLQELGKYEQYIKGGSGYIPEAPRDGQAYVRKDGEWVLLSTFL

SEQ ID NO: 13782 - protein, 1241 aa, Artificial Sequence
  SARS-CoV-2/USA/UT-00033/2020__EPI_ISL_417976 spike protein (1-1211)(N914C_S1123C) Foldon construct
MFVFLVLLPLVSSQCVNLTTRTQLPPAYTNSFTRGVYYPDKVFRSSVLHSTQDLFLPFFSNVTWFHAIHVSGTNGTKRFDNPVLPFNDGVYFASTEKSNIIRGWIFGTTLDSKTQSLLIVNNATNVVIKVCEFQFCNDPFLGVYYHKNNKSWMESEFRVYSSANNCTFEYVSQPFLMDLEGKQGNFKNLREFVFKNIDGYFKIYSKHTPINLVRDLPQGFSALEPLVDLPIGINITRFQTLLALHRSYLTPGDSSSGLTAGAAAYYVGYLQPRTFLLKYNENGTITDAVDCALDPLSETKCTLKSFTVEKGIYQTSNFRVQPTESIVRFPNITNLCPFGEVFNATRFASVYAWNRKRISNCVADYSVLYNSASFSTFKCYGVSPTKLNDLCFTNVYADSFVIRGDEVRQIAPGQTGKIADYNYKLPDDFTGCVIAWNSNNLDSKVGGNYNYLYRLFRKSNLKPFERDISTEIYQAGSTPCNGVEGFNCYFPLQSYGFQPTNGVGYQPYRVVVLSFELLHAPATVCGPKKSTNLVKNKCVNFNFNGLTGTGVLTESNKKFLPFQQFGRDIADTTDAVRDPQTLEILDITPCSFGGVSVITPGTNTSNQVAVLYQGVNCTEVPVAIHADQLTPTWRVYSTGSNVFQTRAGCLIGAEHVNNSYECDIPIGAGICASYQTQTNSPRRARSVASQSIIAYTMSLGAENSVAYSNNSIAIPTNFTISVTTEILPVSMTKTSVDCTMYICGDSTECSNLLLQYGSFCTQLNRALTGIAVEQDKNTQEVFAQVKQIYKTPPIKDFGGFNFSQILPDPSKPSKRSFIEDLLFNKVTLADAGFIKQYGDCLGDIAARDLICAQKFNGLTVLPPLLTDEMIAQYTSALLAGTITSGWTFGAGAALQIPFAMQMAYRFNGIGVTQCVLYENQKLIANQFNSAIGKIQDSLSSTASALGKLQDVVNQNAQALNTLVKQLSSNFGAISSVLNDILSRLDKVEAEVQIDRLITGRLQSLQTYVTQQLIRAAEIRASANLAATKMSECVLGQSKRVDFCGKGYHLMSFPQSAPHGVVFLHVTYVPAQEKNFTTAPAICHDGKAHFPREGVFVSNGTHWFVTQRNFYEPQIITTDNTFVCGNCDVVIGIVNNTVYDPLQPELDSFKEELDKYFKNHTSPDVDLGDISGINASVVNIQKEIDRLNEVAKNLNESLIDLQELGKYEQYIKGGSGYIPEAPRDGQAYVRKDGEWVLLSTFL

SEQ ID NO: 13783 - protein, 1241 aa, Artificial Sequence
  SARS-CoV-2/USA/WI-13/2020__EPI_ISL_417516 spike protein (1-1211)(N914C_S1123C) Foldon construct
MFVFLVLLPLVSSQCVNLTTRTQLPPAYTNSFTRGVYYPDKVFRSSVLHSTQDLFLPFFSNVTWFHAIHVSGTNGTKRFDNPVLPFNDGVYFASTEKSNIIRGWIFGTTLDSKTQSLLIVNNATNVVIKVCEFQFCNDPFLGVYYHKNNKSWMESEFRVYSSANNCTFEYVSQPFLMDLEGKQGNFKNLREFVFKNIDGYFKIYSKHTPINLVRDLPQGFSALEPLVDLPIGINITRFQTLLALHRSYLTPGDSSSGWTAGAAAYYVGYLQPRTFLLKYNENGTITDAVDCALDPLSETKCTLKSFTVEKGIYQTSNFRVLPTESIVRFPNITNLCPFGEVFNATRFASVYAWNRKRISNCVADYSVLYNSASFSTFKCYGVSPTKLNDLCFTNVYADSFVIRGDEVRQIAPGQTGKIADYNYKLPDDFTGCVIAWNSNNLDSKVGGNYNYLYRLFRKSNLKPFERDISTEIYQAGSTPCNGVEGFNCYFPLQSYGFQPTNGVGYQPYRVVVLSFELLHAPATVCGPKKSTNLVKNKCVNFNFNGLTGTGVLTESNKKFLPFQQFGRDIADTTDAVRDPQTLEILDITPCSFGGVSVITPGTNTSNQVAVLYQGVNCTEVPVAIHADQLTPTWRVYSTGSNVFQTRAGCLIGAEHVNNSYECDIPIGAGICASYQTQTNSPRRARSVASQSIIAYTMSLGAENSVAYSNNSIAIPTNFTISVTTEILPVSMTKTSVDCTMYICGDSTECSNLLLQYGSFCTQLNRALTGIAVEQDKNTQEVFAQVKQIYKTPPIKDFGGFNFSQILPDPSKPSKRSFIEDLLFNKVTLADAGFIKQYGDCLGDIAARDLICAQKFNGLTVLPPLLTDEMIAQYTSALLAGTITSGWTFGAGAALQIPFAMQMAYRFNGIGVTQCVLYENQKLIANQFNSAIGKIQDSLSSTASALGKLQDVVNQNAQALNTLVKQLSSNFGAISSVLNDILSRLDKVEAEVQIDRLITGRLQSLQTYVTQQLIRAAEIRASANLAATKMSECVLGQSKRVDFCGKGYHLMSFPQSAPHGVVFLHVTYVPAQEKNFTTAPAICHDGKAHFPREGVFVSNGTHWFVTQRNFYEPQIITTDNTFVCGNCDVVIGIVNNTVYDPLQPELDSFKEELDKYFKNHTSPDVDLGDISGINASVVNIQKEIDRLNEVAKNLNESLIDLQELGKYEQYIKGGSGYIPEAPRDGQAYVRKDGEWVLLSTFL

SEQ ID NO: 13784 - protein, 1240 aa, Artificial Sequence
  SARS-CoV-2/India/1-27/2020__EPI_ISL_413522 spike protein (1-1210)(N913C_S1122C) Foldon construct
MFVFLVLLPLVSSQCVNLTTRTQLPPAYTNSFTRGVYYPDKVFRSSVLHSTQDLFLPFFSNVTWFHAIHVSGTNGTKRFDNPVLPFNDGVYFASTEKSNIIRGWIFGTTLDSKTQSLLIVNNATNVVIKVCEFQFCNDPFLGVYHKNNKSWMESEFRVYSSANNCTFEYVSQPFLMDLEGKQGNFKNLREFVFKNIDGYFKIYSKHTPINLVRDLPQGFSALEPLVDLPIGINITRFQTLLALHRSYLTPGDSSSGWTAGAAAYYVGYLQPRTFLLKYNENGTITDAVDCALDPLSETKCTLKSFTVEKGIYQTSNFRVQPTESIVRFPNITNLCPFGEVFNATRFASVYAWNRKRISNCVADYSVLYNSASFSTFKCYGVSPTKLNDLCFTNVYADSFVIRGDEVIQIAPGQTGKIADYNYKLPDDFTGCVIAWNSNNLDSKVGGNYNYLYRLFRKSNLKPFERDISTEIYQAGSTPCNGVEGFNCYFPLQSYGFQPTNGVGYQPYRVVVLSFELLHAPATVCGPKKSTNLVKNKCVNFNFNGLTGTGVLTESNKKFLPFQQFGRDIADTTDAVRDPQTLEILDITPCSFGGVSVITPGTNTSNQVAVLYQDVNCTEVPVAIHADQLTPTWRVYSTGSNVFQTRAGCLIGAEHVNNSYECDIPIGAGICASYQTQTNSPRRARSVASQSIIAYTMSLGAENSVAYSNNSIAIPTNFTISVTTEILPVSMTKTSVDCTMYICGDSTECSNLLLQYGSFCTQLNRALTGIAVEQDKNTQEVFAQVKQIYKTPPIKDFGGFNFSQILPDPSKPSKRSFIEDLLFNKVTLADAGFIKQYGDCLGDIAARDLICAQKFNGLTVLPPLLTDEMIAQYTSALLAGTITSGWTFGAGAALQIPFAMQMAYRFNGIGVTQCVLYENQKLIANQFNSAIGKIQDSLSSTASALGKLQDVVNQNAQALNTLVKQLSSNFGAISSVLNDILSRLDKVEAEVQIDRLITGRLQSLQTYVTQQLIRAAEIRASANLAATKMSECVLGQSKRVDFCGKGYHLMSFPQSAPHGVVFLHVTYVPAQEKNFTTAPAICHDGKAHFPREGVFVSNGTHWFVTQRNFYEPQIITTDNTFVCGNCDVVIGIVNNTVYDPLQPELDSFKEELDKYFKNHTSPDVDLGDISGINASVVNIQKEIDRLNEVAKNLNESLIDLQELGKYEQYIKGGSGYIPEAPRDGQAYVRKDGEWVLLSTFL

SEQ ID NO: 13785 - protein, 1235 aa, Artificial Sequence
  SARS-CoV-2/pangolin/Guangxi/P4L/2017__EPI_ISL_410538 spike protein (1-1205)(N908C_S1117C) Foldon construct
MFVFLFVLPLVSSQCVNLTTRTGIPPGYTNSSTRGVYYPDKVFRSSILHLTQDLFLPFFSNVTWFNTINYQGGFKKFDNPVLPFNDGVYFASTEKSNIIRGWIFGTTLDARTQSLLIVNNATNVVIKVCEFQFCTDPFLGVYYHNNNKTWVENEFRVYSSANNCTFEYISQPFLMDLEGKQGNFKNLREFVFKNVDGYFKIYSKHTPIDLVRDLPRGFAALEPLVDLPIGINITRFQTLLALHRSYLTPGNLESGWTTGAAAYYVGYLQQRTFLLSYNQNGTITDAVDCSLDPLSETKCTLKSLTVEKGIYQTSNFRVQPTISIVRFPNITNLCPFGEVFNASKFASVYAWNRKRISNCVADYSVLYNSTSFSTFKCYGVSPTKLNDLCFTNVYADSFVVKGDEVRQIAPGQTGVIADYNYKLPDDFTGCVIAWNSVKQDALTGGNYGYLYRLFRKSKLKPFERDISTEIYQAGSTPCNGQVGLNCYYPLERYGFHPTTGVNYQPFRVVVLSFELLNGPATVCGPKLSTTLVKDKCVNFNFNGLTGTGVLTTSKKQFLPFQQFGRDISDTTDAVRDPQTLEILDITPCSFGGVSVITPGTNTSNQVAVLYQDVNCTEVPMAIHAEQLTPAWRVYSAGANVFQTRAGCLVGAEHVNNSYECDIPVGAGICASYHSMSSLRSVNQRSIIAYTMSLGAENSVAYSNNSIAIPTNFTISVTTEILPVSMTKTSVDCTMYICGDSIECSNLLLQYGSFCTQLNRALTGIAVEQDKNTQEVFAQVKQIYKTPPIKDFGGFNFSQILPDPSKPSKRSFIEDLLFNKVTLADAGFIKQYGDCLGDIAARDLICAQKFNGLTVLPPLLTDEMIAQYTSALLAGTITSGWTFGAGAALQIPFAMQMAYRFNGIGVTQCVLYENQKLIANQFNSAIGKIQDSLSSTASALGKLQDVVNQNAQALNTLVKQLSSNFGAISSVLNDILSRLDKVEAEVQIDRLITGRLQSLQTYVTQQLIRAAEIRASANLAATKMSECVLGQSKRVDFCGKGYHLMSFPQSAPHGVVFLHVTYVPAQEKNFTTAPAICHEGKAHFPREGVFVSNGTHWFITQRNFYEPQIITTDNTFVCGSCDVVIGIVNNTVYDPLQPELDSFKEELDKYFKNHTSPDVDLGDISGINASVVNIQKEIDRLNEVAKNLNESPIDLQELGKYEQYIKGGSGYIPEAPRDGQAYVRKDGEWVLLSTFL

SEQ ID NO: 13786 - protein, 1235 aa, Artificial Sequence
  SARS-CoV-2/pangolin/Guangxi/P5L/2017__EPI_ISL_410540 spike protein (1-1205)(N908C_S1117C) Foldon construct
MFVFLFVLPLVSSQCVNLTTRTGIPPGYTNSSTRGVYYPDKVFRSSILHLTQDLFLPFFSNVTWFNTINYQGGFKKFDNPVLPFNDGVYFASTEKSNIIRGWIFGTTLDARTQSLLIVNNATNVVIKVCEFQFCTDPFLGVYYHNNNKTWVENEFRVYSSANNCTFEYISQPFLMDLEGKQGNFKNLREFVFKNVDGYFKIYSKHTPIDLVRDLPRGFAALEPLVDLPIGINITRFQTLLALHRSYLTPGKLESGWTTGAAAYYVGYLQQRTFLLSYNQNGTITDAVDCSLDPLSETKCTLKSLTVEKGIYQTSNFRVQPTISIVRFPNITNLCPFGEVFNASKFASVYAWNRKRISNCVADYSVLYNSTSFSTFKCYGVSPTKLNDLCFTNVYADSFVVKGDEVRQIAPGQTGVIADYNYKLPDDFTGCVIAWNSVKQDALTGGNYGYLYRLFRKSKLKPFERDISTEIYQAGSTPCNGQVGLNCYYPLERYGFHPTTGVNYQPFRVVVLSFELLNGPATVCGPKLSTTLVKDKCVNFNFNGLTGTGVLTTSKKQFLPFQQFGRDISDTTDAVRDPQTLEILDITPCSFGGVSVITPGTNTSNQVAVLYQDVNCTEVPMAIHAEQLTPAWRVYSAGANVFQTRAGCLVGAEHVNNSYECDIPVGAGICASYHSMSSFRSVNQRSIIAYTMSLGAENSVAYSNNSIAIPTNFTISVTTEILPVSMTKTSVDCTMYICGDSIECSNLLLQYGSFCTQLNRALTGIAVEQDKNTQEVFAQVKQIYKTPPIKDFGGFNFSQILPDPSKPSKRSFIEDLLFNKVTLADAGFIKQYGDCLGDIAARDLICAQKFNGLTVLPPLLTDEMIAQYTSALLAGTITSGWTFGAGAALQIPFAMQMAYRFNGIGVTQCVLYENQKLIANQFNSAIGKIQDSLSSTASALGKLQDVVNQNAQALNTLVKQLSSNFGAISSVLNDILSRLDKVEAEVQIDRLITGRLQSLQTYVTQQLIRAAEIRASANLAATKMSECVLGQSKRVDFCGKGYHLMSFPQSAPHGVVFLHVTYVPAQEKNFTTAPAICHEGKAHFPREGVFVSNGTHWFITQRNFYEPQIITTDNTFVCGSCDVVIGIVNNTVYDPLQPELDSFKEELDKYFKNHTSPDVDLGDISGINASVVNIQKEIDRLNEVAKNLNESLIDLQELGKYEQYIKGGSGYIPEAPRDGQAYVRKDGEWVLLSTFL

SEQ ID NO: 13787 - protein, 1235 aa, Artificial Sequence
  SARS-CoV-2/pangolin/Guangxi/P5E/2017__EPI_ISL_410541 spike protein (1-1205)(N908C_S1117C) Foldon construct
MFVFLFVLPLVSSQCVNLTTRTGIPPGYTNSSTRGVYYPDKVFRSSILHLTQDLFLPFFSNVTWFNTITYQGGSKKFDNPVLPFNDGVYFASTEKSNIIRGWIFGTTLDARTQSLLIVNNATNVVIKVCEFQFCTDPFLGVYYHNNNKTWVENEFRVYSSANNCTFEYISQPFLMDLEGKQGNFKNLREFVFKNVDGYFKIYSKHTPIDLVRDLPRGFAALEPLVDLPIGINITRFQTLLALHRSYLTPGKLESGWTTGAAAYYVGYLQQRTFLLSYNQNGTITDAVDCSLDPLSETKCTLKSLTVEKGIYQTSNFRVQPTISIVRFPNITNLCPFGEVFNASKFASVYAWNRKRISNCVADYSVLYNSTSFSTFKCYGVSPTKLNDLCFTNVYADSFVVKGDEVRQIAPGQTGVIADYNYKLPDDFTGCVIAWNSVKQDALTGDNYGYLYRLFRKSKLKPFERDISTEIYQAGSTPCNGQVGLNCYYPLERYGFHPTTGVNYQPFRVVVLSFELLNGPATVCGPKLSTTLVKDKCVNFNFNGLTGTGVLTTSKKQFLPFQQFGRDISDTTDAVRDPQTLEILDITPCSFGGVSVITPGTNTSNQVAVLYQDVNCTEVPMAIHAEQLTPAWRVYSAGANVFQTRAGCLVGAEHVNNSYECDIPVGAGICASYHSMSSFRSVNQRSIIAYTMSLGAENSVAYSNNSIAIPTNFTISVTTEILPVSMTKTSVDCTMYICGDSIECSNLLLQYGSFCTQLNRALTGIAVEQDKNTQEVFAQVKQIYKTPPIKDFGGFNFSQILPDPSKPSKRSFIEDLLFNKVTLADAGFIKQYGDCLGDIAARDLICAQKFNGLTVLPPLLTDEMIAQYTSALLAGTITSGWTFGAGAALQIPFAMQMAYRFNGIGVTQCVLYENQKLIANQFNSAIGKIQDSLSSTASALGKLQDVVNQNAQALNTLVKQLSSNFGAISSVLNDILSRLDKVEAEVQIDRLITGRLQSLQTYVTQQLIRAAEIRASANLAATKMSECVLGQSKRVDFCGKGYHLMSFPQSAPHGVVFLHVTYVPAQEKNFTTAPAICHEGKAHFPREGVFVSNGTHWFITQRNFYEPQIITTDNTFVCGSCDVVIGIVNNTVYDPLQPELDSFKEELDKYFKNHTSPDVDLGDISGINASVVNIQKEIDRLNEVAKNLNESLIDLQELGKYEQYIKGGSGYIPEAPRDGQAYVRKDGEWVLLSTFL

SEQ ID NO: 13788 - protein, 1233 aa, Artificial Sequence
  SARS-CoV-2/pangolin/Guangxi/P1E/2017__EPI_ISL_410539 spike protein (1-1203)(N906C_S1115C) Foldon construct
MFVFLFVLPLVSSQCVNLTTRTGIQPGYTNSSTRGVYYPDKVFRSSILHLTQDLFLPFFSNVTWFNTINYQGGFKKFDNPVLPFNDGVYFASTEKSNIIRGWIFGTTLDARTQSLLIVNNATNVVIKVCEFQFCTDPFLGVYYHNNNKTWVENEFRVYSSANNCTFEYISQPFLMDLEGKQGNFKNLREFVFKNVDGYFKIYSKHTPIDLVRDLPRGFAALEPLVDLPIGINITRFQTLLALHRSYLTPGKLESGWTTGAAAYYVGYLQQRTFLLSYNQNGTITDAVDCSLDPLSETKCTLKSLTVEKGIYQTSNFRVQPTISIVRFPNITNLCPFGEVFNASKFASVYAWNRKRISNCVADYSVLYNSTSFSTFKCYGVSPTKLNDLCFTNVYADSFVVKGDEVRQIAPGQTGVIADYNYKLPDDFTGCVIAWNSVKQDALTGGNYLYRLFRKSKLKPFERDISTEIYQAGSTPCNGQVGLNCYYPLERYGFHPTTGVNYQPFRVVVLSFELLNGPATVCGPKLSTTLVKDKCVNFNFNGLTGTGVLTTSKKQFLPFQQFGRDISDTTDAVRDPQTLEILDITPCSFGGVSVITPGTNTSNQVAVLYQDVNCTEVPMAIHAEQLTPAWRVYSAGANVFQTRAGCLVGAEHVNNSYECDIPVGAGICASYHSMSSLRSVNQRSIIAYTMSLGAENSVAYSNNSIAIPTNFTISVTTEILPVSMTKTSVDCTMYICGDSIECSNLLLQYGSFCTQLNRALTGIAVEQDKNTQEVFAQVKQIYKTPPIKDFGGFNFSQILPDPSKPSKRSFIEDLLFNKVTLADAGFIKQYGDCLGDIAARDLICAQKFNGLTVLPPLLTDEMIAQYTSALLAGTITSGWTFGAGAALQIPFAMQMAYRFNGIGVTQCVLYENQKLIANQFNSAIGKIQDSLSSTASALGKLQDVVNQNAQALNTLVKQLSSNFGAISSVLNDILSRLDKVEAEVQIDRLITGRLQSLQTYVTQQLIRAAEIRASANLAATKMSECVLGQSKRVDFCGKGYHLMSFPQSAPHGVVFLHVTYVPAQEKNFTTAPAICHEGKAHFPREGVFVSNGTHWFITQRNFYEPQIITTDNTFVCGSCDVVIGIVNNTVYDPLQPELDSFKEELDKYFKNHTSPDVDLGDISGINASVVNIQKEIDRLNEVAKNLNESLIDLQELGKYEQYIKGGSGYIPEAPRDGQAYVRKDGEWVLLSTFL

SEQ ID NO: 13789 - protein, 1365 aa, Artificial Sequence
  SARS-CoV-2/Wuhan/WIV05/2019__EPI_ISL_402128 spike protein (1-1211)(N914C_S1123C) WhcAg construct
MFVFLVLLPLVSSQCVNLTTRTQLPPAYTNSFTRGVYYPDKVFRSSVLHSTQDLFLPFFSNVTWFHAIHVSGTNGTKRFDNPVLPFNDGVYFASTEKSNIIRGWIFGTTLDSKTQSLLIVNNATNVVIKVCEFQFCNDPFLGVYYHKNNKSWMESEFRVYSSANNCTFEYVSQPFLMDLEGKQGNFKNLREFVFKNIDGYFKIYSKHTPINLVRDLPQGFSALEPLVDLPIGINITRFQTLLALHRSYLTPGDSSSGWTAGAAAYYVGYLQPRTFLLKYNENGTITDAVDCALDPLSETKCTLKSFTVEKGIYQTSNFRVQPTESIVRFPNITNLCPFGEVFNATRFASVYAWNRKRISNCVADYSVLYNSASFSTFKCYGVSPTKLNDLCFTNVYADSFVIRGDEVRQIAPGQTGKIADYNYKLPDDFTGCVIAWNSNNLDSKVGGNYNYLYRLFRKSNLKPFERDISTEIYQAGSTPCNGVEGFNCYFPLQSYGFQPTNGVGYQPYRVVVLSFELLHAPATVCGPKKSTNLVKNKCVNFNFNGLTGTGVLTESNKKFLPFQQFGRDIADTTDAVRDPQTLEILDITPCSFGGVSVITPGTNTSNQVAVLYQDVNCTEVPVAIHADQLTPTWRVYSTGSNVFQTRAGCLIGAEHVNNSYECDIPIGAGICASYQTQTNSPRRARSVASQSIIAYTMSLGAENSVAYSNNSIAIPTNFTISVTTEILPVSMTKTSVDCTMYICGDSTECSNLLLQYGSFCTQLNRALTGIAVEQDKNTQEVFAQVKQIYKTPPIKDFGGFNFSQILPDPSKPSKRSFIEDLLFNKVTLADAGFIKQYGDCLGDIAARDLICAQKFNGLTVLPPLLTDEMIAQYTSALLAGTITSGWTFGAGAALQIPFAMQMAYRFNGIGVTQCVLYENQKLIANQFNSAIGKIQDSLSSTASALGKLQDVVNQNAQALNTLVKQLSSNFGAISSVLNDILSRLDKVEAEVQIDRLITGRLQSLQTYVTQQLIRAAEIRASANLAATKMSECVLGQSKRVDFCGKGYHLMSFPQSAPHGVVFLHVTYVPAQEKNFTTAPAICHDGKAHFPREGVFVSNGTHWFVTQRNFYEPQIITTDNTFVCGNCDVVIGIVNNTVYDPLQPELDSFKEELDKYFKNHTSPDVDLGDISGINASVVNIQKEIDRLNEVAKNLNESLIDLQELGKYEQYIKGGGGSDIDPYKEFGSSYQLLNFLPLDFFPDLNALVDTATALYEEELTGREHCSPHHTAIRQALVCWDELTKLIAWMSSNITSEQVRTIIVNHVNDTWGLKVRQSLWFHLSCLTFGQHTVQEFLVSFGVWIRTPAPYRPPNAPILSTLPEHTVIC

SEQ ID NO: 13790 - protein, 1361 aa, Artificial Sequence
  SARS-CoV-2/bat/Yunnan/RaTG13/2013__EPI_ISL_402131 spike protein (1-1207)(N910C_S1119C) WhcAg construct
MFVFLVLLPLVSSQCVNLTTRTQLPPAYTNSSTRGVYYPDKVFRSSVLHLTQDLFLPFFSNVTWFHAIHVSGTNGIKRFDNPVLPFNDGVYFASTEKSNIIRGWIFGTTLDSKTQSLLIVNNATNVVIKVCEFQFCNDPFLGVYYHKNNKSWMESEFRVYSSANNCTFEYVSQPFLMDLEGKQGNFKNLREFVFKNIDGYFKIYSKHTPINLVRDLPPGFSALEPLVDLPIGINITRFQTLLALHRSYLTPGDSSSGWTAGAAAYYVGYLQPRTFLLKYNENGTITDAVDCALDPLSETKCTLKSFTVEKGIYQTSNFRVQPTDSIVRFPNITNLCPFGEVFNATTFASVYAWNRKRISNCVADYSVLYNSTSFSTFKCYGVSPTKLNDLCFTNVYADSFVITGDEVRQIAPGQTGKIADYNYKLPDDFTGCVIAWNSKHIDAKEGGNFNYLYRLFRKANLKPFERDISTEIYQAGSKPCNGQTGLNCYYPLYRYGFYPTDGVGHQPYRVVVLSFELLNAPATVCGPKKSTNLVKNKCVNFNFNGLTGTGVLTESNKKFLPFQQFGRDIADTTDAVRDPQTLEILDITPCSFGGVSVITPGTNASNQVAVLYQDVNCTEVPVAIHADQLTPTWRVYSTGSNVFQTRAGCLIGAEHVNNSYECDIPIGAGICASYQTQTNSRSVASQSIIAYTMSLGAENSVAYSNNSIAIPTNFTISVTTEILPVSMTKTSVDCTMYICGDSTECSNLLLQYGSFCTQLNRALTGIAVEQDKNTQEVFAQVKQIYKTPPIKDFGGFNFSQILPDPSKPSKRSFIEDLLFNKVTLADAGFIKQYGDCLGDIAARDLICAQKFNGLTVLPPLLTDEMIAQYTSALLAGTITSGWTFGAGAALQIPFAMQMAYRFNGIGVTQCVLYENQKLIANQFNSAIGKIQDSLSSTASALGKLQDVVNQNAQALNTLVKQLSSNFGAISSVLNDILSRLDKVEAEVQIDRLITGRLQSLQTYVTQQLIRAAEIRASANLAATKMSECVLGQSKRVDFCGKGYHLMSFPQSAPHGVVFLHVTYVPAQEKNFTTAPAICHDGKAHFPREGVFVSNGTHWFVTQRNFYEPQIITTDNTFVCGSCDVVIGIVNNTVYDPLQPELDSFKEELDKYFKNHTSPDVDLGDISGINASVVNIQKEIDRLNEVAKNLNESLIDLQELGKYEQYIKGGGGSDIDPYKEFGSSYQLLNFLPLDFFPDLNALVDTATALYEEELTGREHCSPHHTAIRQALVCWDELTKLIAWMSSNITSEQVRTIIVNHVNDTWGLKVRQSLWFHLSCLTFGQHTVQEFLVSFGVWIRTPAPYRPPNAPILSTLPEHTVIC

SEQ ID NO: 13791 - protein, 1365 aa, Artificial Sequence
  SARS-CoV-2/Wuhan/HBCDC-HB-01/2019__EPI_ISL_402132 spike protein (1-1211)(N914C_S1123C) WhcAg construct
MFVFLVLLPLVSSQCVNLTTRTQLPPAYTNSITRGVYYPDKVFRSSVLHSTQDLFLPFFSNVTWFHAIHVSGTNGTKRFDNPVLPFNDGVYFASTEKSNIIRGWIFGTTLDSKTQSLLIVNNATNVVIKVCEFQFCNDPFLGVYYHKNNKSWMESEFRVYSSANNCTFEYVSQPFLMDLEGKQGNFKNLREFVFKNIDGYFKIYSKHTPINLVRDLPQGFSALEPLVDLPIGINITRFQTLLALHRSYLTPGDSSSGWTAGAAAYYVGYLQPRTFLLKYNENGTITDAVDCALDPLSETKCTLKSFTVEKGIYQTSNFRVQPTESIVRFPNITNLCPFGEVFNATRFASVYAWNRKRISNCVADYSVLYNSASFSTFKCYGVSPTKLNDLCFTNVYADSFVIRGDEVRQIAPGQTGKIADYNYKLPDDFTGCVIAWNSNNLDSKVGGNYNYLYRLFRKSNLKPFERDISTEIYQAGSTPCNGVEGFNCYFPLQSYGFQPTNGVGYQPYRVVVLSFELLHAPATVCGPKKSTNLVKNKCVNFNFNGLTGTGVLTESNKKFLPFQQFGRDIADTTDAVRDPQTLEILDITPCSFGGVSVITPGTNTSNQVAVLYQDVNCTEVPVAIHADQLTPTWRVYSTGSNVFQTRAGCLIGAEHVNNSYECDIPIGAGICASYQTQTNSPRRARSVASQSIIAYTMSLGAENSVAYSNNSIAIPTNFTISVTTEILPVSMTKTSVDCTMYICGDSTECSNLLLQYGSFCTQLNRALTGIAVEQDKNTQEVFAQVKQIYKTPPIKDFGGFNFSQILPDPSKPSKRSFIEDLLFNKVTLADAGFIKQYGDCLGDIAARDLICAQKFNGLTVLPPLLTDEMIAQYTSALLAGTITSGWTFGAGAALQIPFAMQMAYRFNGIGVTQCVLYENQKLIANQFNSAIGKIQDSLSSTASALGKLQDVVNQNAQALNTLVKQLSSNFGAISSVLNDILSRLDKVEAEVQIDRLITGRLQSLQTYVTQQLIRAAEIRASANLAATKMSECVLGQSKRVDFCGKGYHLMSFPQSAPHGVVFLHVTYVPAQEKNFTTAPAICHDGKAHFPREGVFVSNGTHWFVTQRNFYEPQIITTDNTFVCGNCDVVIGIVNNTVYDPLQPELDSFKEELDKYFKNHTSPDVDLGDISGINASVVNIQKEIDRLNEVAKNLNESLIDLQELGKYEQYIKGGGGSDIDPYKEFGSSYQLLNFLPLDFFPDLNALVDTATALYEEELTGREHCSPHHTAIRQALVCWDELTKLIAWMSSNITSEQVRTIIVNHVNDTWGLKVRQSLWFHLSCLTFGQHTVQEFLVSFGVWIRTPAPYRPPNAPILSTLPEHTVIC

SEQ ID NO: 13792 - protein, 1365 aa, Artificial Sequence
  SARS-CoV-2/Guangdong/20SF028/2020__EPI_ISL_403936 spike protein (1-1211)(N914C_S1123C) WhcAg construct
MFVFLVLLPLVSSQCVNLTTRTQLPPAYTNSFTRGVYYPDKVFRSSVLYSTQDLFLPFFSNVTWFHAIHVSGTNGTKRFDNPVLPFNDGVYFASTEKSNIIRGWIFGTTLDSKTQSLLIVNNATNVVIKVCEFQFCNDPFLGVYYHKNNKSWMESEFRVYSSANNCTFEYVSQPFLMDLEGKQGNFKNLREFVFKNIDGYFKIYSKHTPINLVRDLPQGFSALEPLVDLPIGINITRFQTLLALHRSYLTPGDSSSGWTAGAAAYYVGYLQPRTFLLKYNENGTITDAVDCALDPLSETKCTLKSFTVEKGIYQTSNFRVQPTESIVRFPNITNLCPFGEVFNATRFASVYAWNRKRISNCVADYSVLYNSASFSTFKCYGVSPTKLNDLCFTNVYADSFVIRGDEVRQIAPGQTGKIADYNYKLPDDFTGCVIAWNSNNLDSKVGGNYNYLYRLFRKSNLKPFERDISTEIYQAGSTPCNGVEGFNCYFPLQSYGFQPTNGVGYQPYRVVVLSFELLHAPATVCGPKKSTNLVKNKCVNFNFNGLTGTGVLTESNKKFLPFQQFGRDIADTTDAVRDPQTLEILDITPCSFGGVSVITPGTNTSNQVAVLYQDVNCTEVPVAIHADQLTPTWRVYSTGSNVFQTRAGCLIGAEHVNNSYECDIPIGAGICASYQTQTNSPRRARSVASQSIIAYTMSLGAENSVAYSNNSIAIPTNFTISVTTEILPVSMTKTSVDCTMYICGDSTECSNLLLQYGSFCTQLNRALTGIAVEQDKNTQEVFAQVKQIYKTPPIKDFGGFNFSQILPDPSKPSKRSFIEDLLFNKVTLADAGFIKQYGDCLGDIAARDLICAQKFNGLTVLPPLLTDEMIAQYTSALLAGTITSGWTFGAGAALQIPFAMQMAYRFNGIGVTQCVLYENQKLIANQFNSAIGKIQDSLSSTASALGKLQDVVNQNAQALNTLVKQLSSNFGAISSVLNDILSRLDKVEAEVQIDRLITGRLQSLQTYVTQQLIRAAEIRASANLAATKMSECVLGQSKRVDFCGKGYHLMSFPQSAPHGVVFLHVTYVPAQEKNFTTAPAICHDGKAHFPREGVFVSNGTHWFVTQRNFYEPQIITTDNTFVCGNCDVVIGIVNNTVYDPLQPELDSFKEELDKYFKNHTSPDVDLGDISGINASVVNIQKEIDRLNEVAKNLNESLIDLQELGKYEQYIKGGGGSDIDPYKEFGSSYQLLNFLPLDFFPDLNALVDTATALYEEELTGREHCSPHHTAIRQALVCWDELTKLIAWMSSNITSEQVRTIIVNHVNDTWGLKVRQSLWFHLSCLTFGQHTVQEFLVSFGVWIRTPAPYRPPNAPILSTLPEHTVIC

SEQ ID NO: 13793 - protein, 1365 aa, Artificial Sequence
  SARS-CoV-2/Shenzhen/SZTH-001/2020__EPI_ISL_406592 spike protein (1-1211)(N914C_S1123C) WhcAg construct
MFVFLVLLPLVSSQCVNLTTRTQLPPAYTNSFTRGVYYPDKVFRSSVLHSTQDLFLPFFSNVTWFHAIHVSGTNGTKRFDNPVLPFNDGVYFASTEKSNIIRGWIFGTTLDSKTQSLLIVNNATNVVIKVCEFQFCNDPFLGVYYHKNNKSWMESEFRVYSSANNCTFEYVSQPFLMDLEGKQGNFKNLREFVFKNIDGYFKIYSKHTPINLVRDLPQGFSALEPLVDLPIGINITRFQTLLALHRSYLTPGDSSSGWTAGAAAYYVGYLQPRTFLLKYNENGTITDAVDCALDPLSETKCTLKSFTVEKGIYQTSNFRVQPTESIVRFPNITNLCPFGEVFNATRFASVYAWNRKRISNCVADYSVLYNSASFSTFKCYGVSPTKLNDLCFTNVYADSFVIRGDEVRQIAPGQTGKIADYNYKLPDDFTGCVIAWNSNNLDSKVGGNYNYLYRLFRKSNLKPFERDISTEIYQAGSTPCNGVEGFNCYFPLQSYGFQPTNGVGYQPYRVVVLSFELLHAPATVCGPKKSTNLVKNKCVNFNFNGLTGTGVLTESNKKFLPFQQFGRDIADTTDAVRDPQTLEILDITPCSFGGVSVITPGTNTSNQVAVLYQDVNCTEVPVAIHADQLTPTWRVYSTGSNVFQTRAGCLIGAEHVNNSYECDIPIGAGICASYQTQTNSPRRARSVASQSIIAYTMSLGAENSVAYSNNSIAIPTNFTISVTTEILPVSMTKTSVDCTMYICGDSTECSNLLLQYGSFCTQLNRALTGIAVEQDKNTQEVFAQVKQIYKTPPIKDFGGFNFSQILPDPSKPSKRSFIEDLLFNKVTLADAGFIKQYGDCLGDIAARDLICAQKFNGLTVLPPLLTDEMIAQYTSALLAGTITSGWTFGAGAALQIPFAMQMAYRFNGIGVTQCVLYENQKLIANQFNSAIGKIQDSLSSTASALGKLQDVVNQNAQALNTLVKQLSSNFGAISSVLNDILSRLDKVEAEVQIDRLITGRLQSLQTYVTQQLIRAAEIRASANLAATKMSECVLGQSKRVDFCGKGYHLMSFPQSAPHGVVFLHVTYVPAQEKNFTTAPAICHDGKAHFPREGVFVSNGTHWFVTQRNFYEPQIITTDNTFVCGNCDVLIGIVNNTVYDPLQPELDSFKEELDKYFKNHTSPDVDLGDISGINASVVNIQKEIDRLNEVAKNLNESLIDLQELGKYEQYIKGGGGSDIDPYKEFGSSYQLLNFLPLDFFPDLNALVDTATALYEEELTGREHCSPHHTAIRQALVCWDELTKLIAWMSSNITSEQVRTIIVNHVNDTWGLKVRQSLWFHLSCLTFGQHTVQEFLVSFGVWIRTPAPYRPPNAPILSTLPEHTVIC

SEQ ID NO: 13794 - protein, 1365 aa, Artificial Sequence
  SARS-CoV-2/Shenzhen/SZTH-004/2020__EPI_ISL_406595 spike protein (1-1211)(N914C_S1123C) WhcAg construct
MFVFLVLLPLVSSQCVNLTTRTQLPPAYTNSFTRGVYYPDKVFRSSVLHSTQDLFLPFFSNVTWFHAIHVSGTNGTKRFDNPVLPFNDGVYFASTEKSNIIRGWIFGTTLDSKTQSLLIVNNATNVVIKVCEFQFCNDPFLGVYYHKNNKSWMESEFRVYSSANNCTFEYVSQPFLMDLEGKQGNFKNLREFVFKNIDGYFKIYSKHTPINLVRDLPQGFSALEPLVDLPIGINITRFQTLLALHRSYLTPGDSSSGWTAGAAAYYVGYLQPRTFLLKYNENGTITDAVDCALDPLSETKCTLKSFTVEKGIYQTSNFRVQPTESIVRFPNITNLCPFGEVFNATRFASVYAWDRKRISNCVAYYSVLYNSASFSTFKCYGVSPTKLNDLCFTNVYADSFVIRGDEVRQIAPGQTGKIADYNYKLPDDFTGCVIAWNSNNLDSKVGGNYNYLYRLFRKSNLKPFERDISTEIYQAGSTPCNGVEGFNCYFPLQSYGFQPTNGVGYQPYRVVVLSFELLHAPATVCGPKKSTNLVKNKCVNFNFNGLTGTGVLTESNKKFLPFQQFGRDIADTTDAVRDPQTLEILDITPCSFGGVSVITPGTNTSNQVAVLYQDVNCTEVPVAIHADQLTPTWRVYSTGSNVFQTRAGCLIGAEHVNNSYECDIPIGAGICASYQTQTNSPRRARSVASQSIIAYTMSLGAENSVAYSNNSIAIPTNFTISVTTEILPVSMTKTSVDCTMYICGDSTECSNLLLQYGSFCTQLNRALTGIAVEQDKNTQEVFAQVKQIYKTPPIKDFGGFNFSQILPDPSKPSKRSFIEDLLFNKVTLADAGFIKQYGDCLGDIAARDLICAQKFNGLTVLPPLLTDEMIAQYTSALLAGTITSGWTFGAGAALQIPFAMQMAYRFNGIGVTQCVLYENQKLIANQFNSAIGKIQDSLSSTASALGKLQDVVNQNAQALNTLVKQLSSNFGAISSVLNDILSRLDKVEAEVQIDRLITGRLQSLQTYVTQQLIRAAEIRASANLAATKMSECVLGQSKRVDFCGKGYHLMSFPQSAPHGVVFLHVTYVPAQEKNFTTAPAICHDGKAHFPREGVFVSNGTHWFVTQRNFYEPQIITTDNTFVCGNCDVVIGIVNNTVYDPLQPELDSFKEELDKYFKNHTSPDVDLGDISGINASVVNIQKEIDRLNEVAKNLNESLIDLQELGKYEQYIKGGGGSDIDPYKEFGSSYQLLNFLPLDFFPDLNALVDTATALYEEELTGREHCSPHHTAIRQALVCWDELTKLIAWMSSNITSEQVRTIIVNHVNDTWGLKVRQSLWFHLSCLTFGQHTVQEFLVSFGVWIRTPAPYRPPNAPILSTLPEHTVIC

SEQ ID NO: 13795 - protein, 1365 aa, Artificial Sequence
  SARS-CoV-2/France/IDF0372/2020__EPI_ISL_406596 spike protein (1-1211)(N914C_S1123C) WhcAg construct
MFVFLVLLPLVSSQCVNLTTRTQLPPAYTNSFTRGVYYPDKVFRSSVLHSTQDLFLPFFSNVTWFHAIHVSGTNGTKRFDNPVLPFNDGVYFASTEKSNIIRGWIFGTTLDSKTQSLLIVNNATNVVIKVCEFQFCNDPFLGVYYHKNNKSWMESEFRVYSSANNCTFEYVSQPFLMDLEGKQGNFKNLREFVFKNIDGYFKIYSKHTPINLVRDLPQGFSALEPLVDLPIGINITRFQTLLALHRSYLTPGDSSSGWTAGAAAYYVGYLQPRTFLLKYNENGTITDAVDCALDPLSETKCTLKSFTVEKGIYQTSNFRVQPTESIVRFPNITNLCPFGEVFNATRFASVYAWNRKRISNCVADYSFLYNSASFSTFKCYGVSPTKLNDLCFTNVYADSFVIRGDEVRQIAPGQTGKIADYNYKLPDDFTGCVIAWNSNNLDSKVGGNYNYLYRLFRKSNLKPFERDISTEIYQAGSTPCNGVEGFNCYFPLQSYGFQPTNGVGYQPYRVVVLSFELLHAPATVCGPKKSTNLVKNKCVNFNFNGLTGTGVLTESNKKFLPFQQFGRDIADTTDAVRDPQTLEILDITPCSFGGVSVITPGTNTSNQVAVLYQDVNCTEVPVAIHADQLTPTWRVYSTGSNVFQTRAGCLIGAEHVNNSYECDIPIGAGICASYQTQTNSPRRARSVASQSIIAYTMSLGAENSVAYSNNSIAIPTNFTISVTTEILPVSMTKTSVDCTMYICGDSTECSNLLLQYGSFCTQLNRALTGIAVEQDKNTQEVFAQVKQIYKTPPIKDFGGFNFSQILPDPSKPSKRSFIEDLLFNKVTLADAGFIKQYGDCLGDIAARDLICAQKFNGLTVLPPLLTDEMIAQYTSALLAGTITSGWTFGAGAALQIPFAMQMAYRFNGIGVTQCVLYENQKLIANQFNSAIGKIQDSLSSTASALGKLQDVVNQNAQALNTLVKQLSSNFGAISSVLNDILSRLDKVEAEVQIDRLITGRLQSLQTYVTQQLIRAAEIRASANLAATKMSECVLGQSKRVDFCGKGYHLMSFPQSAPHGVVFLHVTYVPAQEKNFTTAPAICHDGKAHFPREGVFVSNGTHWFVTQRNFYEPQIITTDNTFVCGNCDVVIGIVNNTVYDPLQPELDSFKEELDKYFKNHTSPDVDLGDISGINASVVNIQKEIDRLNEVAKNLNESLIDLQELGKYEQYIKGGGGSDIDPYKEFGSSYQLLNFLPLDFFPDLNALVDTATALYEEELTGREHCSPHHTAIRQALVCWDELTKLIAWMSSNITSEQVRTIIVNHVNDTWGLKVRQSLWFHLSCLTFGQHTVQEFLVSFGVWIRTPAPYRPPNAPILSTLPEHTVIC

SEQ ID NO: 13796 - protein, 1365 aa, Artificial Sequence
  SARS-CoV-2/Australia/VIC01/2020__EPI_ISL_406844 spike protein (1-1211)(N914C_S1123C) WhcAg construct
MFVFLVLLPLVSSQCVNLTTRTQLPPAYTNSFTRGVYYPDKVFRSSVLHSTQDLFLPFFSNVTWFHAIHVSGTNGTKRFDNPVLPFNDGVYFASTEKSNIIRGWIFGTTLDSKTQSLLIVNNATNVVIKVCEFQFCNDPFLGVYYHKNNKSWMESEFRVYSSANNCTFEYVSQPFLMDLEGKQGNFKNLREFVFKNIDGYFKIYSKHTPINLVRDLPQGFSALEPLVDLPIGINITRFQTLLALHRRYLTPGDSSSGWTAGAAAYYVGYLQPRTFLLKYNENGTITDAVDCALDPLSETKCTLKSFTVEKGIYQTSNFRVQPTESIVRFPNITNLCPFGEVFNATRFASVYAWNRKRISNCVADYSVLYNSASFSTFKCYGVSPTKLNDLCFTNVYADSFVIRGDEVRQIAPGQTGKIADYNYKLPDDFTGCVIAWNSNNLDSKVGGNYNYLYRLFRKSNLKPFERDISTEIYQAGSTPCNGVEGFNCYFPLQSYGFQPTNGVGYQPYRVVVLSFELLHAPATVCGPKKSTNLVKNKCVNFNFNGLTGTGVLTESNKKFLPFQQFGRDIADTTDAVRDPQTLEILDITPCSFGGVSVITPGTNTSNQVAVLYQDVNCTEVPVAIHADQLTPTWRVYSTGSNVFQTRAGCLIGAEHVNNSYECDIPIGAGICASYQTQTNSPRRARSVASQSIIAYTMSLGAENSVAYSNNSIAIPTNFTISVTTEILPVSMTKTSVDCTMYICGDSTECSNLLLQYGSFCTQLNRALTGIAVEQDKNTQEVFAQVKQIYKTPPIKDFGGFNFSQILPDPSKPSKRSFIEDLLFNKVTLADAGFIKQYGDCLGDIAARDLICAQKFNGLTVLPPLLTDEMIAQYTSALLAGTITSGWTFGAGAALQIPFAMQMAYRFNGIGVTQCVLYENQKLIANQFNSAIGKIQDSLSSTASALGKLQDVVNQNAQALNTLVKQLSSNFGAISSVLNDILSRLDKVEAEVQIDRLITGRLQSLQTYVTQQLIRAAEIRASANLAATKMSECVLGQSKRVDFCGKGYHLMSFPQSAPHGVVFLHVTYVPAQEKNFTTAPAICHDGKAHFPREGVFVSNGTHWFVTQRNFYEPQIITTDNTFVCGNCDVVIGIVNNTVYDPLQPELDSFKEELDKYFKNHTSPDVDLGDISGINASVVNIQKEIDRLNEVAKNLNESLIDLQELGKYEQYIKGGGGSDIDPYKEFGSSYQLLNFLPLDFFPDLNALVDTATALYEEELTGREHCSPHHTAIRQALVCWDELTKLIAWMSSNITSEQVRTIIVNHVNDTWGLKVRQSLWFHLSCLTFGQHTVQEFLVSFGVWIRTPAPYRPPNAPILSTLPEHTVIC

SEQ ID NO: 13797 - protein, 1365 aa, Artificial Sequence
  SARS-CoV-2/Germany/BavPat1/2020__EPI_ISL_406862 spike protein (1-1211)(N914C_S1123C) WhcAg construct
MFVFLVLLPLVSSQCVNLTTRTQLPPAYTNSFTRGVYYPDKVFRSSVLHSTQDLFLPFFSNVTWFHAIHVSGTNGTKRFDNPVLPFNDGVYFASTEKSNIIRGWIFGTTLDSKTQSLLIVNNATNVVIKVCEFQFCNDPFLGVYYHKNNKSWMESEFRVYSSANNCTFEYVSQPFLMDLEGKQGNFKNLREFVFKNIDGYFKIYSKHTPINLVRDLPQGFSALEPLVDLPIGINITRFQTLLALHRSYLTPGDSSSGWTAGAAAYYVGYLQPRTFLLKYNENGTITDAVDCALDPLSETKCTLKSFTVEKGIYQTSNFRVQPTESIVRFPNITNLCPFGEVFNATRFASVYAWNRKRISNCVADYSVLYNSASFSTFKCYGVSPTKLNDLCFTNVYADSFVIRGDEVRQIAPGQTGKIADYNYKLPDDFTGCVIAWNSNNLDSKVGGNYNYLYRLFRKSNLKPFERDISTEIYQAGSTPCNGVEGFNCYFPLQSYGFQPTNGVGYQPYRVVVLSFELLHAPATVCGPKKSTNLVKNKCVNFNFNGLTGTGVLTESNKKFLPFQQFGRDIADTTDAVRDPQTLEILDITPCSFGGVSVITPGTNTSNQVAVLYQGVNCTEVPVAIHADQLTPTWRVYSTGSNVFQTRAGCLIGAEHVNNSYECDIPIGAGICASYQTQTNSPRRARSVASQSIIAYTMSLGAENSVAYSNNSIAIPTNFTISVTTEILPVSMTKTSVDCTMYICGDSTECSNLLLQYGSFCTQLNRALTGIAVEQDKNTQEVFAQVKQIYKTPPIKDFGGFNFSQILPDPSKPSKRSFIEDLLFNKVTLADAGFIKQYGDCLGDIAARDLICAQKFNGLTVLPPLLTDEMIAQYTSALLAGTITSGWTFGAGAALQIPFAMQMAYRFNGIGVTQCVLYENQKLIANQFNSAIGKIQDSLSSTASALGKLQDVVNQNAQALNTLVKQLSSNFGAISSVLNDILSRLDKVEAEVQIDRLITGRLQSLQTYVTQQLIRAAEIRASANLAATKMSECVLGQSKRVDFCGKGYHLMSFPQSAPHGVVFLHVTYVPAQEKNFTTAPAICHDGKAHFPREGVFVSNGTHWFVTQRNFYEPQIITTDNTFVCGNCDVVIGIVNNTVYDPLQPELDSFKEELDKYFKNHTSPDVDLGDISGINASVVNIQKEIDRLNEVAKNLNESLIDLQELGKYEQYIKGGGGSDIDPYKEFGSSYQLLNFLPLDFFPDLNALVDTATALYEEELTGREHCSPHHTAIRQALVCWDELTKLIAWMSSNITSEQVRTIIVNHVNDTWGLKVRQSLWFHLSCLTFGQHTVQEFLVSFGVWIRTPAPYRPPNAPILSTLPEHTVIC

SEQ ID NO: 13798 - protein, 1365 aa, Artificial Sequence
  SARS-CoV-2/Wuhan/HBCDC-HB-02/2020__EPI_ISL_412978 spike protein (1-1211)(N914C_S1123C) WhcAg construct
MFVFLVLLPLVSSQCVNLTTRTQLPPAYTNSFTRGVYYPDKVFRSSVLHSTQDLFLPFFSNVTWFHAIHVSGTNGTKRFDNPVLPFNDGVYFASTEKSNIIRGWIFGTTLDSKTQSLLIVNNATNVVIKVCEFQFCNDPFLGVYYHKNNKSWMESEFRVYSSANNCTFEYVSQPFLMDLEGKQGNFKNLREFVFKNIDGYFKIYSKHTPINLVRDLPQGFSALEPLVDLPIGINITRFQTLLALHRSYLTPGDSSSGWTAGAAAYYVGYLQPRTFLLKYNENGTITDAVDCALDPLSETKCTLKSFTVEKGIYQTSNFRVQPTESIVRFPNITNLCPFGEVFNATRFASVYAWNRKRISNCVADYSVLYNSASFSTFKCYGVSPTKLNDLCFTNVYADSFVIRGDEVRQIAPGQTGKIADYNYKLPDDFTGCVIAWNSNNLDSKVGGNYNYLYRLFRKSNLKPFERDISTEIYQAGSTPCNGVEGFNCYFPLQSYGFQPTNGVGYQPYRVVVLSFELLHAPATVCGPKKSTNLVKNKCVNFNFNGLTGTGVLTESNKKFLPFQQFGRDIADTTDAVRDPQTLEILDITPCSFGGVSVITPGTNTSNQVAVLYQDVNCTEVPVAIHADQLTPTWRVYSTGSNVFQTRAGCLIGAEHVNNSYECDIPIGAGICASYQTQTNSPRRARSVASQSIIAYTMSLGAENSVAYSNNSIAIPTNFTISVTTEILPVSMTKTSVDCTMYICGDSTECSNFLLQYGSFCTQLNRALTGIAVEQDKNTQEVFAQVKQIYKTPPIKDFGGFNFSQILPDPSKPSKRSFIEDLLFNKVTLADAGFIKQYGDCLGDIAARDLICAQKFNGLTVLPPLLTDEMIAQYTSALLAGTITSGWTFGAGAALQIPFAMQMAYRFNGIGVTQCVLYENQKLIANQFNSAIGKIQDSLSSTASALGKLQDVVNQNAQALNTLVKQLSSNFGAISSVLNDILSRLDKVEAEVQIDRLITGRLQSLQTYVTQQLIRAAEIRASANLAATKMSECVLGQSKRVDFCGKGYHLMSFPQSAPHGVVFLHVTYVPAQEKNFTTAPAICHDGKAHFPREGVFVSNGTHWFVTQRNFYEPQIITTDNTFVCGNCDVVIGIVNNTVYDPLQPELDSFKEELDKYFKNHTSPDVDLGDISGINASVVNIQKEIDRLNEVAKNLNESLIDLQELGKYEQYIKGGGGSDIDPYKEFGSSYQLLNFLPLDFFPDLNALVDTATALYEEELTGREHCSPHHTAIRQALVCWDELTKLIAWMSSNITSEQVRTIIVNHVNDTWGLKVRQSLWFHLSCLTFGQHTVQEFLVSFGVWIRTPAPYRPPNAPILSTLPEHTVIC

SEQ ID NO: 13799 - protein, 1365 aa, Artificial Sequence
  SARS-CoV-2/Australia/QLD02/2020__EPI_ISL_407896 spike protein (1-1211)(N914C_S1123C) WhcAg construct
MFVFLVLLPLVSSQCVNLTTRTQLPPAYTNSFTRGVYYPDKVFRSSVLHSTQDLFLPFFSNVTWFHAIHVSGTNGTKRFDNPVLPFNDGVYFASTEKSNIIRGWIFGTTLDSKTQSLLIVNNATNVVIKVCEFQFCNDPFLGVYYHKNNKSWMESEFRVYSSANNCTFEYVSQPFLMDLEGKQGNFKNLREFVFKNIDGYFKIYSKHTPINLVRDLPQGFSALEPLVDLPIGINITRFQTLLALHRSYLTPGDSSSGWTAGAAAYYVGYLQPRTFLLKYNENGTITDAVDCALDPLSETKCTLKSFTVEKGIYQTSNFRVQPTESIVRFPNITNLCPFGEVFNATRFASVYAWNRKRISNCVADYSVLYNSASFSTFKCYGVSPTKLNDLCFTNVYADSFVIRGDEVRQIAPGQTGKIADYNYKLPDDFTGCVIAWNSNNLDSKVGGNYNYLYRLFRKSNLKPFERDISTEIYQAGSTPCNGVEGFNCYFPLQSYGFQPTNGVGYQPYRVVVLSFELLHAPATVCGPKKSTNLVKNKCVNFNFNGLTGTGVLTESNKKFLPFQQFGRDIADTTDAVRDPQTLEILDITPCSFGGVSVITPGTNTSNQVAVLYQDVNCTEVPVAIHADQLTPTWRVYSTGSNVFQTRAGCLIGAEHVNNSYECDIPIGAGICASYQTQTNSPRRARSVASQSIIAYTMSLGAENSVAYSNNSIAIPTNFTISVTTEILPVSMTKTSVDCTMYICGDSTECSNLLLQYGSFCTQLNRALTGIAVEQDKNTQEVFAQVKQIYKTPPIKDFGGFNFSQILPDPSKPSKRSFIEDLLFNKVTLADAGFIKQYGDCLGDIAARDLICAQKFNGLTVLPPLLTDEMIAQYTSALLAGTITSGWTFGAGAALQIPFAMQMAYRFNGIGVTQCVLYENQKLIANQFNSAIGKIQDSLSSTASALGKLQDVVNQNAQALNTLVKQLSSNFGAISSVLNDILSRLDKVEAEVQIDRLITGRLQSLQTYVTQQLIRAAEIRASANLAATKMSECVLGQSKRVDFCGKGYHLMSFPQSAPHGVVFLHVTYVPAQEKNFTTAPAICHDGKAHFPREGVFVSNGTHWFVTQRNFYEPQIITTDNTFVCGNCDVVIGIVNNTVYDPLQLELDSFKEELDKYFKNHTSPDVDLGDISGINASVVNIQKEIDRLNEVAKNLNESLIDLQELGKYEQYIKGGGGSDIDPYKEFGSSYQLLNFLPLDFFPDLNALVDTATALYEEELTGREHCSPHHTAIRQALVCWDELTKLIAWMSSNITSEQVRTIIVNHVNDTWGLKVRQSLWFHLSCLTFGQHTVQEFLVSFGVWIRTPAPYRPPNAPILSTLPEHTVIC

SEQ ID NO: 13800 - protein, 1365 aa, Artificial Sequence
  SARS-CoV-2/India/1-31/2020__EPI_ISL_413523 spike protein (1-1211)(N914C_S1123C) WhcAg construct
MFVFLVLLPLVSSQCVNLTTRTQLPPAYTNSFTRGVYYPDKVFRSSVLHSTQDLFLPFFSNVTWFHAIHVSGTNGTKRFDNPVLPFNDGVYFASTEKSNIIRGWIFGTTLDSKTQSLLIVNNATNVVIKVCEFQFCNDPFLGVYYHKNNKSWMESEFRVYSSANNCTFEYVSQPFLMDLEGKQGNFKNLREFVFKNIDGYFKIYSKHTPINLVRDLPQGFSALEPLVDLPIGINITRFQTLLALHRSYLTPGDSSSGWTAGAAAYYVGYLQPRTFLLKYNENGTITDAVDCALDPLSETKCTLKSFTVEKGIYQTSNFRVQPTESIVRFPNITNLCPFGEVFNATRFASVYAWNRKRISNCVADYSVLYNSASFSTFKCYGVSPTKLNDLCFTNVYADSFVIRGDEVRQIAPGQTGKIADYNYKLPDDFTGCVIAWNSNNLDSKVGGNYNYLYRLFRKSNLKPFERDISTEIYQAGSTPCNGVEGFNCYFPLQSYGFQPTNGVGYQPYRVVVLSFELLHAPATVCGPKKSTNLVKNKCVNFNFNGLTGTGVLTESNKKFLPFQQFGRDIADTTDAVRDPQTLEILDITPCSFGGVSVITPGTNTSNQVAVLYQDVNCTEVPVAIHADQLTPTWRVYSTGSNVFQTRAGCLIGAEHVNNSYECDIPIGAGICASYQTQTNSPRRARSVASQSIIAYTMSLGAENSVAYSNNSIAIPTNFTISVTTEILPVSMTKTSVDCTMYICGDSTECSNLLLQYGSFCTQLNRALTGIAVEQDKNTQEVFAQVKQIYKTPPIKDFGGFNFSQILPDPSKPSKRSFIEDLLFNKVTLADAGFIKQYGDCLGDIAARDLICAQKFNGLTVLPPLLTDEMIAQYTSALLAGTITSGWTFGAGAALQIPFAMQMAYRFNGIGVTQCVLYENQKLIANQFNSVIGKIQDSLSSTASALGKLQDVVNQNAQALNTLVKQLSSNFGAISSVLNDILSRLDKVEAEVQIDRLITGRLQSLQTYVTQQLIRAAEIRASANLAATKMSECVLGQSKRVDFCGKGYHLMSFPQSAPHGVVFLHVTYVPAQEKNFTTAPAICHDGKAHFPREGVFVSNGTHWFVTQRNFYEPQIITTDNTFVCGNCDVVIGIVNNTVYDPLQPELDSFKEELDKYFKNHTSPDVDLGDISGINASVVNIQKEIDRLNEVAKNLNESLIDLQELGKYEQYIKGGGGSDIDPYKEFGSSYQLLNFLPLDFFPDLNALVDTATALYEEELTGREHCSPHHTAIRQALVCWDELTKLIAWMSSNITSEQVRTIIVNHVNDTWGLKVRQSLWFHLSCLTFGQHTVQEFLVSFGVWIRTPAPYRPPNAPILSTLPEHTVIC

SEQ ID NO: 13801 - protein, 1365 aa, Artificial Sequence
  SARS-CoV-2/Guangdong/GD2020087-P0008/2020__EPI_ISL_413863 spike protein (1-1211)(N914C_S1123C) WhcAg construct
MFVFLVLLPLVSSQCVNLTTRTQLPPAYTNSFTRGVYYPDKVFRSSVLHSTQDLFLPFFSNVTWFHAIHVSGTNGTKRFDNPVLPFNDGVYFASTEKSNIIRGWIFGTTLDSKTQSLLIVNNATNVVIKVCEFQFCNDPFLGVYYHKNNKSWMESEFRVYSSANNCTFEYVSQPFLMDLEGKQGNFKNLREFVFKNIDGYFKIYSKHTPINLVRDLPQGFSALEPLVDLPIGINITRFQTLLALHRSYLTPGDSSSGWTAGAAAYYVGYLQPRTFLLKYNENGTITDAVDCALDPLSETKCTLKSFTVEKGIYQTSNFRVQPTESIVRFPNITNLCPFGEVFNATRFASVYAWNRKRISNCVADYSVLYNSASFSTFKCYGVSPTKLNDLCFTNVYADSFVIRGDEVREIAPGQTGKIADYNYKLPDDFTGCVIAWNSNNLDSKVGGNYNYLYRLFRKSNLKPFERDISTEIYQAGSTPCNGVEGFNCYFPLQSYGFQPTNGVGYQPYRVVVLSFELLHAPATVCGPKKSTNLVKNKCVNFNFNGLTGTGVLTESNKKFLPFQQFGRDIADTTDAVRDPQTLEILDITPCSFGGVSVITPGTNTSNQVAVLYQDVNCTEVPVAIHADQLTPTWRVYSTGSNVFQTRAGCLIGAEHVNNSYECDIPIGAGICASYQTQTNSPRRARSVASQSIIAYTMSLGAENSVAYSNNSIAIPTNFTISVTTEILPVSMTKTSVDCTMYICGDSTECSNLLLQYGSFCTQLNRALTGIAVEQDKNTQEVFAQVKQIYKTPPIKDFGGFNFSQILPDPSKPSKRSFIEDLLFNKVTLADAGFIKQYGDCLGDIAARDLICAQKFNGLTVLPPLLTDEMIAQYTSALLAGTITSGWTFGAGAALQIPFAMQMAYRFNGIGVTQCVLYENQKLIANQFNSAIGKIQDSLSSTASALGKLQDVVNQNAQALNTLVKQLSSNFGAISSVLNDILSRLDKVEAEVQIDRLITGRLQSLQTYVTQQLIRAAEIRASANLAATKMSECVLGQSKRVDFCGKGYHLMSFPQSAPHGVVFLHVTYVPAQEKNFTTAPAICHDGKAHFPREGVFVSNGTHWFVTQRNFYEPQIITTDNTFVCGNCDVVIGIVNNTVYDPLQPELDSFKEELDKYFKNHTSPDVDLGDISGINASVVNIQKEIDRLNEVAKNLNESLIDLQELGKYEQYIKGGGGSDIDPYKEFGSSYQLLNFLPLDFFPDLNALVDTATALYEEELTGREHCSPHHTAIRQALVCWDELTKLIAWMSSNITSEQVRTIIVNHVNDTWGLKVRQSLWFHLSCLTFGQHTVQEFLVSFGVWIRTPAPYRPPNAPILSTLPEHTVIC

SEQ ID NO: 13802 - protein, 1365 aa, Artificial Sequence
  SARS-CoV-2/Sweden/01/2020__EPI_ISL_411951 spike protein (1-1211)(N914C_S1123C) WhcAg construct
MFVFLVLLPLVSSQCVNLTTRTQLPPAYTNSFTRGVYYPDKVFRSSVLHSTQDLFLPFFSNVTWFHAIHVSGTNGTKRFDNPVLPFNDGVYFASTEKSNIIRGWIFGTTLDSKTQSLLIVNNATNVVIKVCEFQFCNDPFLGVYYHKNNKSWMESEFRVYSSANNCTFEYVSQPFLMDLEGKQGNFKNLREFVFKNIDGYFKIYSKHTPINLVRDLPQGFSALEPLVDLPIGINITRFQTLLALHRSYLTPGDSSSGWTAGAAAYYVGYLQPRTFLLKYNENGTITDAVDCALDPLSETKCTLKSFTVEKGIYQTSNFRVQPTESIVRFPNITNLCPFGEVFNATRFASVYAWNRKRISNCVADYSVLYNSASFSTFKCYGVSPTKLNDLCFTNVYADSFVIRGDEVRQIAPGQTGKIADYNYKLPDDFTGCVIAWNSNNLDSKVGGNYNYLYRLFRKSNLKPFERDISTEIYQAGSTPCNGVEGFNCYFPLQSYGFQPTNGVGYQPYRVVVLSFELLHAPATVCGPKKSTNLVKNKCVNFNFNGLTGTGVLTESNKKFLPFQQFGRDIADTTDAVRDPQTLEILDITPCSFGGVSVITPGTNTSNQVAVLYQDVNCTEVPVAIHADQLTPTWRVYSTGSNVFQTRAGCLIGAEHVNNSYECDIPIGAGICASYQTQTNSPRRARSVASQSIIAYTMSLGAENSVAYSNNSIAIPTNFTISVTTEILPVSMTKTSVDCTMYICGDSTECSNLLLQYGSFCTQLNRALTGIAVEQDKNTQEVFAQVKQIYKTPPIKDCGGFNFSQILPDPSKPSKRSFIEDLLFNKVTLADAGFIKQYGDCLGDIAARDLICAQKFNGLTVLPPLLTDEMIAQYTSALLAGTITSGWTFGAGAALQIPFAMQMAYRFNGIGVTQCVLYENQKLIANQFNSAIGKIQDSLSSTASALGKLQDVVNQNAQALNTLVKQLSSNFGAISSVLNDILSRLDKVEAEVQIDRLITGRLQSLQTYVTQQLIRAAEIRASANLAATKMSECVLGQSKRVDFCGKGYHLMSFPQSAPHGVVFLHVTYVPAQEKNFTTAPAICHDGKAHFPREGVFVSNGTHWFVTQRNFYEPQIITTDNTFVCGNCDVVIGIVNNTVYDPLQPELDSFKEELDKYFKNHTSPDVDLGDISGINASVVNIQKEIDRLNEVAKNLNESLIDLQELGKYEQYIKGGGGSDIDPYKEFGSSYQLLNFLPLDFFPDLNALVDTATALYEEELTGREHCSPHHTAIRQALVCWDELTKLIAWMSSNITSEQVRTIIVNHVNDTWGLKVRQSLWFHLSCLTFGQHTVQEFLVSFGVWIRTPAPYRPPNAPILSTLPEHTVIC

SEQ ID NO: 13803 - protein, 1365 aa, Artificial Sequence
  SARS-CoV-2/Tianmen/HBCDC-HB-07/2020__EPI_ISL_412983 spike protein (1-1211)(N914C_S1123C) WhcAg construct
MFVFLVLLPLVSSQCVNLTTRTQLPPAYTNSFTRGVYYPDKVFRSSVLHSTQDLFLPFFSNVTWFHAIHVSGTNGTKRFDNPVLPFNDGVYFASTEKSNIIRGWIFGTTLDSKTQSLLIVNNATNVVIKVCEFQFCNDPFLGVYYHKNNKSWMESEFRVYSSANNCTFEYVSQPFLMDLEGKQGNFKNLREFVFKNIDGYFKIYSKHTPINLVRDLPQGFSALEPLVDLPIGINITRFQTLLALHRSYLTPGDSSSGWTAGAAAYYVGYLQPRTFLLKYNENGTITDAVDCALDPLSETKCTLKSFTVEKGIYQTSNFRVQPTESIVRFPNITNLCPFGEVFNATRFASVYAWNRKRISNCVADYSVLYNSASFSTFKCYGVSPTKLNDLCFTNVYADSFVIRGDEVRQIAPGQTGKIADYNYKLPDDFTGCVIAWNSNNLDSKVGGNYNYLYRLFRKSNLKPFERDISTEIYQAGSTPCNGVEGFNCYFPLQSYGFQPTNGVGYQPYRVVVLSFELLHAPATVCGPKKSTNLVKNKCVNFNFNGLTGTGVLTESNKKFLPFQQFGRDIADTTDAVRDPQTLEILDITPCSFGGVSVITPGTNTSNQVAVLYQDLNCTEVPVAIHADQLTPTWRVYSTGSNVFQTRAGCLIGAEHVNNSYECDIPIGAGICASYQTQTNSPRRARSVASQSIIAYTMSLGAENSVAYSNNSIAIPTNFTISVTTEILPVSMTKTSVDCTMYICGDSTECSNLLLQYGSFCTQLNRALTGIAVEQDKNTQEVFAQVKQIYKTPPIKDFGGFNFSQILPDPSKPSKRSFIEDLLFNKVTLADAGFIKQYGDCLGDIAARDLICAQKFNGLTVLPPLLTDEMIAQYTSALLAGTITSGWTFGAGAALQIPFAMQMAYRFNGIGVTQCVLYENQKLIANQFNSAIGKIQDSLSSTASALGKLQDVVNQNAQALNTLVKQLSSNFGAISSVLNDILSRLDKVEAEVQIDRLITGRLQSLQTYVTQQLIRAAEIRASANLAATKMSECVLGQSKRVDFCGKGYHLMSFPQSAPHGVVFLHVTYVPAQEKNFTTAPAICHDGKAHFPREGVFVSNGTHWFVTQRNFYEPQIITTDNTFVCGNCDVVIGIVNNTVYDPLQPELDSFKEELDKYFKNHTSPDVDLGDISGINASVVNIQKEIDRLNEVAKNLNESLIDLQELGKYEQYIKGGGGSDIDPYKEFGSSYQLLNFLPLDFFPDLNALVDTATALYEEELTGREHCSPHHTAIRQALVCWDELTKLIAWMSSNITSEQVRTIIVNHVNDTWGLKVRQSLWFHLSCLTFGQHTVQEFLVSFGVWIRTPAPYRPPNAPILSTLPEHTVIC

SEQ ID NO: 13804 - protein, 1365 aa, Artificial Sequence
  SARS-CoV-2/Hong Kong/case42_VM20002493/2020__EPI_ISL_414527 spike protein (1-1211)(N914C_S1123C) WhcAg construct
MFVFLVLLPLVSSQCVNLTTRTQLPPAYTNSFTRGVYYPDKVFRSSVLHSTQDLFLPFFSNVTWFHAIHVSGTNGTKRFDNPVLPFNDGVYFASTEKSNIIRGWIFGTTLDSKTQSLLIVNNATNVVIKVCEFQFCNDPFLGVYYHKNNKSWMESEFRVYSSANNCTFEYVSQPFLMDLEGKQGNFKNLREFVFKNIDGYFKIYSKHTPINLVRDLPQGFSALEPLVDLPIGINITRFQTLLALHRSYLTPGDSSSGWTAGAAAYYVGYLQPRTFLLKYNENGTITDAVDCALDPLSETKCTLKSFTVEKGIYQTSNFRVQPTESIVRFPNITNLCPFGEVFNATRFASVYAWNRKRISNCVADYSVLYNSASFSTFKCYGVSPTKLNDLCFTNVYADSFVIRGDEVRQIAPGQTGKIADYNYKLPDDFTGCVIAWNSNNLDSKVGGNYNYLYRLFRKSNLKPFERDISTEIYQAGSTPCNGVEGFNCYFPLQSYGFQPTNGVGYQPYRVVVLSFELLHAPATVCGPKKSTNLVKNKCVNFNFNGLTGTGVLTESNKKFLPFQQFGRDIADTTDAVRDPQTLEILDITPCSFGGVSVITPGTNTSNQVAVLYQDVNCTEVPVAIHADQLTPTWRVYSTGSNVFQTRAGCLIGAEHVNNSYECDIPIGAGICASYQTQTNSPRRARSVASQSIIAYTMSLGAENSVAYSNNSIAIPTNFAISVTTEILPVSMTKTSVDCTMYICGDSTECSNLLLQYGSFCTQLNRALTGIAVEQDKNTQEVFAQVKQIYKTPPIKDFGGFNFSQILPDPSKPSKRSFIEDLLFNKVTLADAGFIKQYGDCLGDIAARDLICAQKFNGLTVLPPLLTDEMIAQYTSALLAGTITSGWTFGAGAALQIPFAMQMAYRFNGIGVTQCVLYENQKLIANQFNSAIGKIQDSLSSTASALGKLQDVVNQNAQALNTLVKQLSSNFGAISSVLNDILSRLDKVEAEVQIDRLITGRLQSLQTYVTQQLIRAAEIRASANLAATKMSECVLGQSKRVDFCGKGYHLMSFPQSAPHGVVFLHVTYVPAQEKNFTTAPAICHDGKAHFPREGVFVSNGTHWFVTQRNFYEPQIITTDNTFVCGNCDVVIGIVNNTVYDPLQPELDSFKEELDKYFKNHTSPDVDLGDISGINASVVNIQKEIDRLNEVAKNLNESLIDLQELGKYEQYIKGGGGSDIDPYKEFGSSYQLLNFLPLDFFPDLNALVDTATALYEEELTGREHCSPHHTAIRQALVCWDELTKLIAWMSSNITSEQVRTIIVNHVNDTWGLKVRQSLWFHLSCLTFGQHTVQEFLVSFGVWIRTPAPYRPPNAPILSTLPEHTVIC

SEQ ID NO: 13805 - protein, 1365 aa, Artificial Sequence
  SARS-CoV-2/USA/CruiseA-23/2020__EPI_ISL_414482 spike protein (1-1211)(N914C_S1123C) WhcAg construct
MFVFLVLLPLVSSQCVNLTTRTQLPPAYTNSFTRGVYYPDKVFRSSVLHSTQDLFLPFFSNVTWFHAIHVSGTNGTKRFDNPVLPFNDGVYFASTEKSNIIRGWIFGTTLDSKTQSLLIVNNATNVVIKVCEFQFCNDPFLGVYYHKNNKSWMESEFRVYSSANNCTFEYVSQPFLMDLEVKQGNFKNLREFVFKNIDGYFKIYSKHTPINLVRDLPQGFSALEPLVDLPIGINITRFQTLLALHRSYLTPGDSSSGWTAGAAAYYVGYLQPRTFLLKYNENGTITDAVDCALDPLSETKCTLKSFTVEKGIYQTSNFRVQPTESIVRFPNITNLCPFGEVFNATRFASVYAWNRKRISNCVADYSVLYNSASFSTFKCYGVSPTKLNDLCFTNVYADSFVIRGDEVRQIAPGQTGKIADYNYKLPDDFTGCVIAWNSNNLDSKVGGNYNYLYRLFRKSNLKPFERDISTEIYQAGSTPCNGVEGFNCYFPLQSYGFQPTNGVGYQPYRVVVLSFELLHAPATVCGPKKSTNLVKNKCVNFNFNGLTGTGVLTESNKKFLPFQQFGRDIADTTDAVRDPQTLEILDITPCSFGGVSVITPGTNTSNQVAVLYQDVNCTEVPVAIHADQLTPTWRVYSTGSNVFQTRAGCLIGAEHVNNSYECDIPIGAGICASYQTQTNSPRRARSVASQSIIAYTMSLGAENSVAYSNNSIAIPTNFTISVTTEILPVSMTKTSVDCTMYICGDSTECSNLLLQYGSFCTQLNRALTGIAVEQDKNTQEVFAQVKQIYKTPPIKDFGGFNFSQILPDPSKPSKRSFIEDLLFNKVTLADAGFIKQYGDCLGDIAARDLICAQKFNGLTVLPPLLTDEMIAQYTSALLAGTITSGWTFGAGAALQIPFAMQMAYRFNGIGVTQCVLYENQKLIANQFNSAIGKIQDSLSSTASALGKLQDVVNQNAQALNTLVKQLSSNFGAISSVLNDILSRLDKVEAEVQIDRLITGRLQSLQTYVTQQLIRAAEIRASANLAATKMSECVLGQSKRVDFCGKGYHLMSFPQSAPHGVVFLHVTYVPAQEKNFTTAPAICHDGKAHFPREGVFVSNGTHWFVTQRNFYEPQIITTDNTFVCGNCDVVIGIVNNTVYDPLQPELDSFKEELDKYFKNHTSPDVDLGDISGINASVVNIQKEIDRLNEVAKNLNESLIDLQELGKYEQYIKGGGGSDIDPYKEFGSSYQLLNFLPLDFFPDLNALVDTATALYEEELTGREHCSPHHTAIRQALVCWDELTKLIAWMSSNITSEQVRTIIVNHVNDTWGLKVRQSLWFHLSCLTFGQHTVQEFLVSFGVWIRTPAPYRPPNAPILSTLPEHTVIC

SEQ ID NO: 13806 - protein, 1365 aa, Artificial Sequence
  SARS-CoV-2/Hong Kong/case85_VM20002868/2020__EPI_ISL_414519 spike protein (1-1211)(N914C_S1123C) WhcAg construct
MFVFLVLVPLVSSQCVNLTTRTQLPPAYTNSFTRGVYYPDKVFRSSVLHSTQDLFLPFFSNVTWFHAIHVSGTNGTKRFDNPVLPFNDGVYFASTEKSNIIRGWIFGTTLDSKTQSLLIVNNATNVVIKVCEFQFCNDPFLGVYYHKNNKSWMESEFRVYSSANNCTFEYVSQPFLMDLEGKQGNFKNLREFVFKNIDGYFKIYSKHTPINLVRDLPQGFSALEPLVDLPIGINITRFQTLLALHRSYLTPGDSSSGWTAGAAAYYVGYLQPRTFLLKYNENGTITDAVDCALDPLSETKCTLKSFTVEKGIYQTSNFRVQPTESIVRFPNITNLCPFGEVFNATRFASVYAWNRKRISNCVADYSVLYNSASFSTFKCYGVSPTKLNDLCFTNVYADSFVIRGDEVRQIAPGQTGKIADYNYKLPDDFTGCVIAWNSNNLDSKVGGNYNYLYRLFRKSNLKPFERDISTEIYQAGSTPCNGVEGFNCYFPLQSYGFQPTNGVGYQPYRVVVLSFELLHAPATVCGPKKSTNLVKNKCVNFNFNGLTGTGVLTESNKKFLPFQQFGRDIADTTDAVRDPQTLEILDITPCSFGGVSVITPGTNTSNQVAVLYQDVNCTEVPVAIHADQLTPTWRVYSTGSNVFQTRAGCLIGAEHVNNSYECDIPIGAGICASYQTQTNSPRRARSVASQSIIAYTMSLGAENSVAYSNNSIAIPTNFTISVTTEILPVSMTKTSVDCTMYICGDSTECSNLLLQYGSFCTQLNRALTGIAVEQDKNTQEVFAQVKQIYKTPPIKDFGGFNFSQILPDPSKPSKRSFIEDLLFNKVTLADAGFIKQYGDCLGDIAARDLICAQKFNGLTVLPPLLTDEMIAQYTSALLAGTITSGWTFGAGAALQIPFAMQMAYRFNGIGVTQCVLYENQKLIANQFNSAIGKIQDSLSSTASALGKLQDVVNQNAQALNTLVKQLSSNFGAISSVLNDILSRLDKVEAEVQIDRLITGRLQSLQTYVTQQLIRAAEIRASANLAATKMSECVLGQSKRVDFCGKGYHLMSFPQSAPHGVVFLHVTYVPAQEKNFTTAPAICHDGKAHFPREGVFVSNGTHWFVTQRNFYEPQIITTDNTFVCGNCDVVIGIVNNTVYDPLQPELDSFKEELDKYFKNHTSPDVDLGDISGINASVVNIQKEIDRLNEVAKNLNESLIDLQELGKYEQYIKGGGGSDIDPYKEFGSSYQLLNFLPLDFFPDLNALVDTATALYEEELTGREHCSPHHTAIRQALVCWDELTKLIAWMSSNITSEQVRTIIVNHVNDTWGLKVRQSLWFHLSCLTFGQHTVQEFLVSFGVWIRTPAPYRPPNAPILSTLPEHTVIC

SEQ ID NO: 13807 - protein, 1365 aa, Artificial Sequence; identical to SEQ ID NO: 13797
  SARS-CoV-2/England/200990660/2020__EPI_ISL_414523 spike protein (1-1211)(N914C_S1123C) WhcAg construct

SEQ ID NO: 13808 - protein, 1365 aa, Artificial Sequence
  SARS-CoV-2/Australia/NSW09/2020__EPI_ISL_413595 spike protein (1-1211)(N914C_S1123C) WhcAg construct
MFVFLVLLPLVSSQCVNLTTRTQLPPAYTNSFTRGVYYPDKVFRSSVLHSTQDLFLPFFSNVTWFHAIHVSGTNGTKRFDNPVLPFNDGVYFASTEKSNIIRGWIFGTTLDSKTQSLLIVNNATNVVIKVCEFQFCNDPFLGVYYHKNNKSWMESEFRVYSSANNCTFEYVSQPFLMDLEGKQGNFKNLREFVFKNIDGYFKIYSKHTPINLVRDLPQGFSALEPLVDLPIGINITRFQTLLALHRSYLTPGDSSSGWTAGAAAYYVGYLQPRTFLLKYNENGTITDAVDCALDPLSETKCTLKSFTVEKGIYQTSNFRVQPTESIVRFPNITNLCPFGEVFNATRFASVYAWNRKRISNCVADYSVLYNSASFSTFKCYGVSPTKLNDLCFTNVYADSFVIRGDEVRQIAPGQTGKIADYNYKLPDDFTGCVIAWNSNNLDSKVGGNYNYLYRLFRKSNLKPFERDISTEIYQAGSTPCNGVEGFNCYFPLQSYGFQPTNGVGYQPYRVVVLSFELLHAPATVCGPKKSTNLVKNKCVNFNFNGLTGTGVLTESNKKFLPFQQFGRDIADTTDAVRDPQTLEILDITPCSFGGVSVITPGTNTSNQVAVLYQDVNCTEVPVAIHADQLTPTWRVYSTGSNVFQTRAGCLIGAEHVNNSYECDIPIGAGICASYQTQTNSPRRARSVASQSIIAYTMSLGAENSVAYSNNSIAIPTNFTISVTTEILPVSMTKTSVDCTMYICGDSTECSNLLLQYGSFCTQLNRALTGIAVEQDKNTQEVFAQVKQIYKTPPIKDFGGFNFSQILPDPSKPSKRSFIEDLLFNKVTLADAGFIKQYGDCLGDIAARDLICAQKFNGLTVLPPLLTDEMIAQYTSALLAGTITSGWTFGAGAALQIPFAMQMAYRFNGIGVTQCVLYENQKLIANQFNSAIGKIQDSLSFTASALGKLQDVVNQNAQALNTLVKQLSSNFGAISSVLNDILSRLDKVEAEVQIDRLITGRLQSLQTYVTQQLIRAAEIRASANLAATKMSECVLGQSKRVDFCGKGYHLMSFPQSAPHGVVFLHVTYVPAQEKNFTTAPAICHDGKAHFPREGVFVSNGTHWFVTQRNFYEPQIITTDNTFVCGNCDVVIGIVNNTVYDPLQPELDSFKEELDKYFKNHTSPDVDLGDISGINASVVNIQKEIDRLNEVAKNLNESLIDLQELGKYEQYIKGGGGSDIDPYKEFGSSYQLLNFLPLDFFPDLNALVDTATALYEEELTGREHCSPHHTAIRQALVCWDELTKLIAWMSSNITSEQVRTIIVNHVNDTWGLKVRQSLWFHLSCLTFGQHTVQEFLVSFGVWIRTPAPYRPPNAPILSTLPEHTVIC

SEQ ID NO: 13809 - protein, 1365 aa, Artificial Sequence; identical to SEQ ID NO: 13789
  SARS-CoV-2/Australia/NSW10/2020__EPI_ISL_413596 spike protein (1-1211)(N914C_S1123C) WhcAg construct

SEQ ID NO: 13810 - protein, 1365 aa, Artificial Sequence
  SARS-CoV-2/Switzerland/1000477797/2020__EPI_ISL_413023 spike protein (1-1211)(N914C_S1123C) WhcAg construct
MFVFLVLLPLVSSQCVNLTTRTQLPPAYTNSFTRGVYYPDKVFRSSVLHSTQDLFLPFFSNVTWFHAIHVSGTNGTKRFDNPVLPFNDGVYFASTEKSNIIRGWIFGTTLDSKTQSLLIVNNATNVVIKVCEFQFCNDPFLGVYYHKNNKSWMESEFRVYSSANNCTFEYVSQPFLMDLEGKQGNFKNLREFVFKNIDGYFNIYSKHTPINLVRDLPQGFSALEPLVDLPIGINITRFQTLLALHRSYLTPGDSSSGWTAGAAAYYVGYLQPRTFLLKYNENGTITDAVDCALDPLSETKCTLKSFTVEKGIYQTSNFRVQPTESIVRFPNITNLCPFGEVFNATRFASVYAWNRKRISNCVADYSVLYNSASFSTFKCYGVSPTKLNDLCFTNVYADSFVIRGDEVRQIAPGQTGKIADYNYKLPDDFTGCVIAWNSNNLDSKVGGNYNYLYRLFRKSNLKPFERDISTEIYQAGSTPCNGVEGFNCYFPLQSYGFQPTNGVGYQPYRVVVLSFELLHAPATVCGPKKSTNLVKNKCVNFNFNGLTGTGVLTESNKKFLPFQQFGRDIADTTDAVRDPQTLEILDITPCSFGGVSVITPGTNTSNQVAVLYQGVNCTEVPVAIHADQLTPTWRVYSTGSNVFQTRAGCLIGAEHVNNSYECDIPIGAGICASYQTQTNSPRRARSVASQSIIAYTMSLGAENSVAYSNNSIAIPTNFTISVTTEILPVSMTKTSVDCTMYICGDSTECSNLLLQYGSFCTQLNRALTGIAVEQDKNTQEVFAQVKQIYKTPPIKDFGGFNFSQILPDPSKPSKRSFIEDLLFNKVTLADAGFIKQYGDCLGDIAARDLICAQKFNGLTVLPPLLTDEMIAQYTSALLAGTITSGWTFGAGAALQIPFAMQMAYRFNGIGVTQCVLYENQKLIANQFNSAIGKIQDSLSSTASALGKLQDVVNQNAQALNTLVKQLSSNFGAISSVLNDILSRLDKVEAEVQIDRLITGRLQSLQTYVTQQLIRAAEIRASANLAATKMSECVLGQSKRVDFCGKGYHLMSFPQSAPHGVVFLHVTYVPAQEKNFTTAPAICHDGKAHFPREGVFVSNGTHWFVTQRNFYEPQIITTDNTFVCGNCDVVIGIVNNTVYDPLQPELDSFKEELDKYFKNHTSPDVDLGDISGINASVVNIQKEIDRLNEVAKNLNESLIDLQELGKYEQYIKGGGGSDIDPYKEFGSSYQLLNFLPLDFFPDLNALVDTATALYEEELTGREHCSPHHTAIRQALVCWDELTKLIAWMSSNITSEQVRTIIVNHVNDTWGLKVRQSLWFHLSCLTFGQHTVQEFLVSFGVWIRTPAPYRPPNAPILSTLPEHTVIC

SEQ ID NO: 13811 - protein, 1365 aa, Artificial Sequence
  SARS-CoV-2/Belgium/BA-02291/2020__EPI_ISL_415159 spike protein (1-1211)(N914C_S1123C) WhcAg construct
MFVFLVLLPLVSSQCVNLTTRTQLPPAYTNSFTRGVYYPDKVFRSSVLHSTQDLFLPFFSNVTWFHAIHVSGTNGTKRFDNPVLPFNDGVYFASTEKSNIIRGWIFGTTLDSKTQSLLIVNNATNVVIKVCEFQFCNDPFLGVYYHKNNKSWMESEFRVYSSANNCTFEYVSQPFLMDLEGKQGNFKNLREFVFKNIDGYFKIYSKHTPINLVRDLPQGFSALEPLVDLPIGINITRFQTLLALHRSYLTPGDSSSGWTAGAAAYYVGYLQPRTFLLKYNENGTITDAVDCALDPLSETKCTLKSFTVEKGIYQTSNFRVQPTESIVRFPNITNLCPFGEVFNATRFASVYAWNRKRISNCVADYSVLYNSASFSTFKCYGVSPTKLNDLCFTNVYADSFVIRGDEVRQIAPGQTGKIADYNYKLPDDFTGCVIAWNSNNLDSKVGGNYNYLYRLFRRSNLKPFERDISTEIYQAGSTPCNGVEGFNCYFPLQSYGFQPTNGVGYQPYRVVVLSFELLPAPATVCGPKKSTNLVKNKCVNFNFNGLTGTGVLTESNKKFLPFQQFGRDIADTTDAVRDPQTLEILDITPCSFGGVSVITPGTNTSNQVAVLYQGVNCTEVPVAIHADQLTPTWRVYSTGSNVFQTRAGCLIGAEHVNNSYECDIPIGAGICASYQTQTNSPRRARSVASQSIIAYTMSLGAENSVAYSNNSIAIPTNFTISVTTEILPVSMTKTSVDCTMYICGDSTECSNLLLQYGSFCTQLNRALTGIAVEQDKNTQEVFAQVKQIYKTPPIKDFGGFNFSQILPDPSKPSKRSFIEDLLFNKVTLADAGFIKQYGDCLGDIAARDLICAQKFNGLTVLPPLLTDEMIAQYTSALLAGTITSGWTFGAGAALQIPFAMQMAYRFNGIGVTQCVLYENQKLIANQFNSAIGKIQDSLSSAAPALGKLQDVVNQNAQALNTLVKQLSSNFGAISSVLNDILSRLDKVEAEVQIDRLITGRLQSLQTYVTQQLIRAAEIRASANLAATKMSECVLGQSKRVDFCGKGYHLMSFPQSAPHGVVFLHVTYVPAQEKNFTTAPAICHDGKAHFPREGVFVSNGTHWFVTQRNFYEPQIITTDNTFVCGNCDVVIGIVNNTVYDPLQPELDSFKEELDKYFKNHTSPDVDLGDISGINASVVNIQKEIDRLNEVAKNLNESLIDLQELGKYEQYIKGGGGSDIDPYKEFGSSYQLLNFLPLDFFPDLNALVDTATALYEEELTGREHCSPHHTAIRQALVCWDELTKLIAWMSSNITSEQVRTIIVNHVNDTWGLKVRQSLWFHLSCLTFGQHTVQEFLVSFGVWIRTPAPYRPPNAPILSTLPEHTVIC

SEQ ID NO: 13812 - protein, 1365 aa, Artificial Sequence
  SARS-CoV-2/USA/WA8-UW5/2020__EPI_ISL_413486 spike protein (1-1211)(N914C_S1123C) WhcAg construct
MFVFLVLLPLVSSQCVNLTTRTQLPPAYTNSFTRGVYYPDKVFRSSVLHSTQDLFLPFFSNVTWFHAIHVSGTNGTKRFDNPVLPFNDGVYFASTEKSNIIRGWIFGTTLDSKTQSLLIVNNATNVVIKVCEFQFCNDPFLGVYYHKNNKSWMESEFRVYSSANNCTFEYVSQPFLMDLEGKQGNFKNLREFVFKNIDGYFKIYSKHTPINLVRDLPQGFSALEPLVDLPIGINITRFQTLLALHRSYLTPGDSSSGWTAGAAAYYVGYLQPRTFLLKYNENGTITDAVDCALDPLSETKCTLKSFTVEKGIYQTSNFRVQPTESIVRFPNITNLCPFGEVFNATRFASVYAWNRKRISNCVADYSVLYNSASFSTFKCYGVSPTKLNDLCFTNVYADSFVIRGDEVRQIAPGQTGKIADYNYKLPDDFTGCVIAWNSNNLDSKVGGNYNYLYRLFRKSNLKPFERDISTEIYQAGSTPCNGVEGFNCYFPLQSYGFQPTNGVGYQPYRVVVLSFELLHAPATVCGPKKSTNLVKNKCVNFNFNGLTGTGVLTESNKKFLPFQQFGRDIADTTDAVRDPQTLEILDITPCSFGGVSVITPGTNTSNQVAVLYQDVNCTEVPVAIHADQLTPTWRVYSTGSNVFQTRAGCLIGAEYVNNSYECDIPIGAGICASYQTQTNSPRRARSVASQSIIAYTMSLGAENSVAYSNNSIAIPTNFTISVTTEILPVSMTKTSVDCTMYICGDSTECSNLLLQYGSFCTQLNRALTGIAVEQDKNTQEVFAQVKQIYKTPPIKDFGGFNFSQILPDPSKPSKRSFIEDLLFNKVTLADAGFIKQYGDCLGDIAARDLICAQKFNGLTVLPPLLTDEMIAQYTSALLAGTITSGWTFGAGAALQIPFAMQMAYRFNGIGVTQCVLYENQKLIANQFNSAIGKIQDSLSSTASALGKLQDVVNQNAQALNTLVKQLSSNFGAISSVLNDILSRLDKVEAEVQIDRLITGRLQSLQTYVTQQLIRAAEIRASANLAATKMSECVLGQSKRVDFCGKGYHLMSFPQSAPHGVVFLHVTYVPAQEKNFTTAPAICHDGKAHFPREGVFVSNGTHWFVTQRNFYEPQIITTDNTFVCGNCDVVIGIVNNTVYDPLQPELDSFKEELDKYFKNHTSPDVDLGDISGINASVVNIQKEIDRLNEVAKNLNESLIDLQELGKYEQYIKGGGGSDIDPYKEFGSSYQLLNFLPLDFFPDLNALVDTATALYEEELTGREHCSPHHTAIRQALVCWDELTKLIAWMSSNITSEQVRTIIVNHVNDTWGLKVRQSLWFHLSCLTFGQHTVQEFLVSFGVWIRTPAPYRPPNAPILSTLPEHTVIC

SEQ ID NO: 13813 - protein, 1365 aa, Artificial Sequence
  SARS-CoV-2/England/20102000506/2020__EPI_ISL_415147 spike protein (1-1211)(N914C_S1123C) WhcAg construct
MFVFLVLLPLVSSQCVNLTTRTQLPPAYTNSFTRGVYYPDKVFRSSVLHSTQDLFLPFFSNVTWFHAIHVSGTNGTKRFDNPVLPFNDGVYFASTEKSNIIRGWIFGTTLDSKTQSLLIVNNATNVVIKVCEFQFCNDPFLGVYYHKNNKSWMESEFRVYSSANNCTFEYVSQPFLMDLEGKQGNFKNLREFVFKNIDGYFKIYSKHTPINLVRDLPQGFSALEPLVDLPIGINITRFQTLLALHRSYLTPGDSSSGWTAGAAAYYVGYLQPRTFLLKYNENGTITDAVDCALDPLSETKCTLKSFTVEKGIYQTSNFRVQPTESIVRFPNITNLCPFGEVFNATRFASVYAWNRKRISNCVADYSVLYNSASFSTFKCYGVSPTKLNDLCFTNVYADSFVIRGDEVRQIAPGQTGKIADYNYKLPDDFTGCVIAWNSNNLDSKVGGNYNYLYRLFRKSNLKPFERDISTEIYQAGSTPCNGVEGFNCYFPLQSYGFQPTNGVGYQPYRVVVLSFELLHAPATVCGPKKSTNLVKNKCVNFNFNGLTGTGVLTESNKKFLPFQQFGRDIADTTDAVRDPQTLEILDITPCSFGGVSVITPGTNTSNQVAVLYQGVNCTEVPVAIHADQLTPTWRVYSTGSNVFQTRAGCLIGAEHVNNSYECDIPIGAGICASYQTQTNSPRRARSVASQSIIAYTMSLGAENSVAYSNNSIAIPTNFTISVTTEILPVSMTKTSVDCTMYICGDSTECSNLLLQYGSFCTQLNRALTGIAVEQDKNTQEVFAQVKQIYKTPPIKDFGGFNFSQILPDPSKPSKRSFIEDLLFNKVTLADAGFIKQYGYCLGDIAARDLICAQKFNGLTVLPPLLTDEMIAQYTSALLAGTITSGWTFGAGAALQIPFAMQMAYRFNGIGVTQCVLYENQKLIANQFNSAIGKIQDSLSSTASALGKLQDVVNQNAQALNTLVKQLSSNFGAISSVLNDILSRLDKVEAEVQIDRLITGRLQSLQTYVTQQLIRAAEIRASANLAATKMSECVLGQSKRVDFCGKGYHLMSFPQSAPHGVVFLHVTYVPAQEKNFTTAPAICHDGKAHFPREGVFVSNGTHWFVTQRNFYEPQIITTDNTFVCGNCDVVIGIVNNTVYDPLQPELDSFKEELDKYFKNHTSPDVDLGDISGINASVVNIQKEIDRLNEVAKNLNESLIDLQELGKYEQYIKGGGGSDIDPYKEFGSSYQLLNFLPLDFFPDLNALVDTATALYEEELTGREHCSPHHTAIRQALVCWDELTKLIAWMSSNITSEQVRTIIVNHVNDTWGLKVRQSLWFHLSCLTFGQHTVQEFLVSFGVWIRTPAPYRPPNAPILSTLPEHTVIC

SEQ ID NO: 13814 - protein, 1365 aa, Artificial Sequence
  SARS-CoV-2/Belgium/VAG-03013/2020__EPI_ISL_415155 spike protein (1-1211)(N914C_S1123C) WhcAg construct
MFVFLVLLPLVSSQCVNLTTRTQLPPAYTNSFTRGVYYPDKVFRSSVLHSTQDLFLPFFSNVTWFHAIHVSGTNGTKRFDNPVLPFNDGVYFASTEKSNIIRGWIFGTTLDSKTQSLLIVNNATNVVIKVCEFQFCNDPFLGVYYHKNNKSWMESEFRVYSSANNCTFEYVSQPFLMDLEGKQGNFKNLREFVFKNIDGYFKIYSKHTPINLVRDLPQGFSALEPLVDLPIGINITRFQTLLALHRSYLTPGDSSSGWTAGAAAYYVGYLQPRTFLLKYNENGTITDAVDCALDPLSETKCTLKSFTVEKGIYQTSNFRVQPTESIVRFPNITNLCPFGEVFNATRFASVYAWNRKRISNCVADYSVLYNSASFSTFKCYGVSPTKLNDLCFTNVYADSFVIRGDEVRQIAPGQTGKIADYNYKLPDDFTGCVIAWNSNNLDSKVGGNYNYLYRLFRKSNLKPFERDISTEIYQAGSTPCNGVEGFNCYFPLQSYGFQPTNGVGYQPYRVVVLSFELLHAPATVCGPKKSTNLVKNKCVNFNFNGLTGTGVLTESNKKFLPFQQFGRDIADTTDAVRDPQTLEILDITPCSFGGVSVITPGTNTSNQVAVLYQGVNCTEVPVAIHADQLTPTWRVYSTGSNVFQTRAGCLIGAEHVNNSYECDIPIGAGICASYQTQTNSPRRARSVASQSIIAYTMSLGAENSVAYSNNSIAIPTNFTISVTTEILPVSMTKTSVDCTMYICGDSTECSNLLLQYGSFCTQLNRALTGIAVEQDKNTQEVFAQVKQIYKTPPIKDFGGFNFSQILPDPSKPSKRSFIEDLLFNKVTLADAGFIKQYGDCLGDIAARDLICAQKFNGLTVLPPLLTDEMIAQYTSALLAGTITSGWTFGAGAALQIPFAMQMAYRFNGIGVTQCVLYENQKLIANQFNSAIGKIQDSLSSTATALGKLQDVVNQNAQALNTLVKQLSSNFGAISSVLNDILSRLDKVEAEVQIDRLITGRLQSLQTYVTQQLIRAAEIRASANLAATKMSECVLGQSKRVDFCGKGYHLMSFPQSAPHGVVFLHVTYVPAQEKNFTTAPAICHDGKAHFPREGVFVSNGTHWFVTQRNFYEPQIITTDNTFVCGNCDVVIGIVNNTVYDPLQPELDSFKEELDKYFKNHTSPDVDLGDISGINASVVNIQKEIDRLNEVAKNLNESLIDLQELGKYEQYIKGGGGSDIDPYKEFGSSYQLLNFLPLDFFPDLNALVDTATALYEEELTGREHCSPHHTAIRQALVCWDELTKLIAWMSSNITSEQVRTIIVNHVNDTWGLKVRQSLWFHLSCLTFGQHTVQEFLVSFGVWIRTPAPYRPPNAPILSTLPEHTVIC

SEQ ID NO: 13815 - protein, 1365 aa, Artificial Sequence
  SARS-CoV-2/Belgium/BC-03016/2020__EPI_ISL_415157 spike protein (1-1211)(N914C_S1123C) WhcAg construct
MFVFLVLLPLVSSQCVNLTTRTQLPPAYTNSFTRGVYYPDKVFRSSVLHSTQDLFLPFFSNVTWFHAIHVSGTNGTKRFDNPVLPFNDGVYFASTEKSNIIRGWIFGTTLDSKTQSLLIVNNATNVVIKVCEFQFCNDPFLGVYYHKNNKSWMESEFRVYSSANNCTFEYVSQPFLMDLEGKQGNFKNLREFVFKNIDGYFKIYSKHTPINLVRDLPQGFSALEPLVDLPIGINITRFQTLLALHRSYLTPGDSSSGWTAGAAAYYVGYLQPRTFLLKYNENGTITDAVDCALDPLSETKCTLKSFTVEKGIYQTSNFRVQPTESIVRFPNITNLCPFGEVFNATRFASVYAWNRKRISNCVADYSVLYNSASFSTFKCYGVSPTKLNDLCFTNVYADSFVIRGDEVRQIAPGQTGKIADYNYKLPDDFTGCVIAWNSNNLDSKVGGNYNYLYRLFRKSNLKPFERDISTEIYQAGSTPCNGVEGFNCYFPLQSYGFQPTNGVGYQPYRVVVLSFELLHAPATVCGPKKSTNLVKNKCVNFNFNGLTGTGVLTESNKKFLPFQQFGRDIADTTDAVRDPQTLEILDITPCSFGGVSVITPGTNTSNQVAVLYQGVNCTEVPVAIHADQLTPTWRVYSTGSNVFQTRAGCLIGAEHVNNSYECDIPIGAGICASYQTQTNSPRRARSVASQSIIAYTMSLGAENSVAYSNNSIAIPTNFTISVTTEILPVSMTKTSVDCTMYICGDSTECSNLLLQYGSFCTQLNRALTGIAVEQDKNTQEVFAQVKQIYKTPPIKDFGGFNFSQILPDPSKPSKRSFIEDLLFNKVTLADAGFIKQYGDCLGDIAARDLICAQKFNGLTVLPPLLTDEMIAQYTSALLAGTITSGWTFGAGAALQIPFAMQMAYRFNGIGVTQCVLYENQKLIANQFNSAIGKIQDSLSSTAPALGKLQDVVNQNAQALNTLVKQLSSNFGAISSVLNDILSRLDKVEAEVQIDRLITGRLQSLQTYVTQQLIRAAEIRASANLAATKMSECVLGQSKRVDFCGKGYHLMSFPQSAPHGVVFLHVTYVPAQEKNFTTAPAICHDGKAHFPREGVFVSNGTHWFVTQRNFYEPQIITTDNTFVCGNCDVVIGIVNNTVYDPLQPELDSFKEELDKYFKNHTSPDVDLGDISGINASVVNIQKEIDRLNEVAKNLNESLIDLQELGKYEQYIKGGGGSDIDPYKEFGSSYQLLNFLPLDFFPDLNALVDTATALYEEELTGREHCSPHHTAIRQALVCWDELTKLIAWMSSNITSEQVRTIIVNHVNDTWGLKVRQSLWFHLSCLTFGQHTVQEFLVSFGVWIRTPAPYRPPNAPILSTLPEHTVIC

SEQ ID NO: 13816 - protein, 1365 aa, Artificial Sequence
  SARS-CoV-2/Germany/BavPat3/2020__EPI_ISL_414521 spike protein (1-1211)(N914C_S1123C) WhcAg construct
MFVFLVLLPLVSSQCVNLTTRTQLPPAYTNSFTRGVYYPDKVFRSSVLHSTQDLFLPFFSNVTWFHAIHVSGTNGTKRFDNPVLPFNDGVYFASTEKSNIIRGWIFGTTLDSKTQSLLIVNNATNVVIKVCEFQFCNDPFLGVYYHKNNKSWMESEFRVYSSANNCTFEYVSQPFLMDLEGKQGNFKNLREFVFKNIDGYFKIYSKHTPINLVRDLPQGFSALEPLVDLPIGINITRFQTLLALHRSYLTPGDSSSGWTAGAAAYYVGYLQPRTFLLKYNENGTITDAVDCALDPLSETKCTLKSFTVEKGIYQTSNFRVQPTESIVRFPNITNLCPFGEVFNATRFASVYAWNRKRISNCVADYSVLYNSASFSTFKCYGVSPTKLNDLCFTNVYADSFVIRGDEVRQIAPGQTGKIADYNYKLPDDFTGCVIAWNSNNLDSKVGGNYNYLYRLFRKSNLKPFERDISTEIYQAGSTPCNGVEGFNCYFPLQSYGFQPTNGVGYQPYRVVVLSFELLHAPATVCGPKKSTNLVKNKCVNFNFNGLTGTGVLTESNKKFLPFQQFGRDIADTTDAVRDPQTLEILDITPCSFGGVSVITPGTNTSNQVAVLYQDVNCTEVPVAIHADQLTPTWRVYSTGSNVFQTRAGCLIGAEHVNNSYECDIPIGAGICASYQTQTNSPRRARSVASQSIIAYTMSLGAENSVAYSNNSIAIPTNFTISVTTEILPVSMTKTSVDCTMYICGDSTECSNLLLQYGSFCTQLNRALTGIAVEQDKNTQQVFAQVKQIYKTPPIKDFGGFNFSQILPDPSKPSKRSFIEDLLFNKVTLADAGFIKQYGDCLGDIAARDLICAQKFNGLTVLPPLLTDEMIAQYTSALLAGTITSGWTFGAGAALQIPFAMQMAYRFNGIGVTQCVLYENQKLIANQFNSAIGKIQDSLSSTASALGKLQDVVNQNAQALNTLVKQLSSNFGAISSVLNDILSRLDKVEAEVQIDRLITGRLQSLQTYVTQQLIRAAEIRASANLAATKMSECVLGQSKRVDFCGKGYHLMSFPQSAPHGVVFLHVTYVPAQEKNFTTAPAICHDGKAHFPREGVFVSNGTHWFVTQRNFYEPQIITTDNTFVCGNCDVVIGIVNNTVYDPLQPELDSFKEELDKYFKNHTSPDVDLGDISGINASVVNIQKEIDRLNEVAKNLNESLIDLQELGKYEQYIKGGGGSDIDPYKEFGSSYQLLNFLPLDFFPDLNALVDTATALYEEELTGREHCSPHHTAIRQALVCWDELTKLIAWMSSNITSEQVRTIIVNHVNDTWGLKVRQSLWFHLSCLTFGQHTVQEFLVSFGVWIRTPAPYRPPNAPILSTLPEHTVIC

SEQ ID NO: 13817 - protein, 1365 aa, Artificial Sequence
  SARS-CoV-2/France/HF1805/2020__EPI_ISL_414628 spike protein (1-1211)(N914C_S1123C) WhcAg construct
MFVFLVLLPLVSSQCVNLTTRTQLPPAYTNSFTRGVYYPDKVFRSSVLHSTQDLFLPFFSNVTWFHAIHVSGTNGTKRFDNPVLPFNDGVYFASTEKSNIIRGWIFGTTLDSKTQSLLIVNNATNVVIKVCEFQFCNDPFLGVYYHKNNKSWMESEFRVYSSANNCTFEYVSQPFLMDLEGKQGNFKNLREFVFKNIDGYFKIYSKHTPINLVRDLPQGFSALEPLVDLPIGINITRFQTLLALHRSYLTPGDSSSGWTAGAAAYYVGYLQPRTFLLKYNENGTITDAVDCALDPLSETKCTLKSFTVEKGIYQTSNFRVQPTESIVRFPNITNLCPFGEVFNATRFASVYAWNRKRISNCVADYSVLYNSASFSTFKCYGVSPTKLNDLCFTNVYADSFVIRGDEVRQIAPGQTGKIADYNYKLPDDFTGCVIAWNSNNLDSKVGGNYNYLYRLFRKSNLKPFERDISTEIYQAGSTPCNGVEGFNCYFPLQSYGFQPTNGVGYQPYRVVVLSFELLHAPATVCGPKKSTNLVKNKCVNFNFNGLTGTGVLTESNKKFLPFQQFGRDIADTTDAVRDPQTLEILDITPCSFGGVSVITPGTNTSNQVAVLYQGVNCTEVPVAIHADQLTPTWRVYSTGSNVFQTRAGCLIGAEHVNNSYECDIPIGAGICASYQTQTNSPRRARSVASQSIIAYTMSLGAENSVAYSNNSIAIPTNFTISVTTEILPVSMTKTSVDCTMYICGDSTECSNLLLQYGSFCTQLNRALTGIAVEQDKNTQEVFAQVKQIYKTPPIKDFGGFNFSQILPDPSKPSKRSFIEDLLFNKVTLADAGFIKQYGDCLGDIAARDLICAQKFNGLTVLPPLLTDEMIAQYTSALLAGTITSGWTFGAGAALQIPFAMQMAYRFNGIGVTQCVLYENQKLIANQFNSAIGKIQDSLSSTASALGKLQDVVNQNAQALNTLVKQLSSNFGAISSVLNDILSRLDKVEAEVQIDRLITGRLQSLQTYVTQQLIRAAEIRASANLAATKMSECVLGQSKRVDFCGKGYHLMSFPQSAPHGVVFLHVTYVPAQEKNFTTAPAICHDGKAHFPREGVFVSNGTHWFVTQRNFYEPQIITTDNTFVCGNCDVVIGVVNNTVYDPLQPELDSFKEELDKYFKNHTSPDVDLGDISGINASVVNIQKEIDRLNEVAKNLNESLIDLQELGKYEQYIKGGGGSDIDPYKEFGSSYQLLNFLPLDFFPDLNALVDTATALYEEELTGREHCSPHHTAIRQALVCWDELTKLIAWMSSNITSEQVRTIIVNHVNDTWGLKVRQSLWFHLSCLTFGQHTVQEFLVSFGVWIRTPAPYRPPNAPILSTLPEHTVIC

SEQ ID NO: 13818 - protein, 1365 aa, Artificial Sequence
  SARS-CoV-2/Netherlands/ZuidHolland_9/2020__EPI_ISL_414445 spike protein (1-1211)(N914C_S1123C) WhcAg construct
MFVFLVLLPLVSSQCVNLTTRTQLPPAYTNSFTRGVYYPDKVFRSSVLHSTQDLFLPFFSNVTWFHAIHVSGTNGTKRFDNPVLPFNDGVYFASTEKSNIIRGWIFGTTLDSKTQSLLIVNNATNVVIKVCEFQFCNDPFLGVYYHKNNKSWMESEFRVYSSANNCTFEYVSQPFLMDLEGKQGNFKNLREFVFKNIDGYFKIYSKHTPINLVRDLPQGFSALEPLVDLPIGINITRFQTLLALHRSYLTPGDSSSGWTAGAAAYYVGYLQPRTFLLKYNENGTITDAVDCALDPLSETKCTLKSFTVEKGIYQTSNFRVQPTESIVRFPNITNLCPFGEVFNATRFASVYAWNRKRISNCVADYSVLYNSASFSTFKCYGVSPTKLNDLCFTNVYADSFVIRGDEVRQIAPGQTGKIADYNYKLPDDFTGCVIAWNSNNLDSKVGGNYNYLYRLFRKSNLKPFERDISTEIYQAGSTPCNGVEGFNCYFPLQSYGFQPTNGVGYQPYRVVVLSFELLHAPATVCGPKKSTNLVKNKCVNFNFNGLTGTGVLTESNKKFLPFQQFGRDIADTTDAVRDPQTLEILDITPCSFGGVSVITPGTNTSNQVAVLYQGVNCTEVPVAIHADQLTPTWRVYSTGSNVFQTRAGCLIGAEHVNNSYECDIPIGAGICASYQTQTNSPRRARSVASQSIIAYTMSLGAENSVAYSNNSIAIPTNFTISVTTEILPVSMTKTSVDCTMYICGDSTECSNLLLQYGSFCTQLNRALTGIAVEQDKNTQEVFAQVKQIYKTPPIKDFGGFNFSQILPDPSKPSKRSFIEDLLFNKVTLADAGFIKQYGDCLGDIAARDLICVQKFNGLTVLPPLLTDEMIAQYTSALLAGTITSGWTFGAGAALQIPFAMQMAYRFNGIGVTQCVLYENQKLIANQFNSAIGKIQDSLSSTASALGKLQDVVNQNAQALNTLVKQLSSNFGAISSVLNDILSRLDKVEAEVQIDRLITGRLQSLQTYVTQQLIRAAEIRASANLAATKMSECVLGQSKRVDFCGKGYHLMSFPQSAPHGVVFLHVTYVPAQEKNFTTAPAICHDGKAHFPREGVFVSNGTHWFVTQRNFYEPQIITTDNTFVCGNCDVVIGIVNNTVYDPLQPELDSFKEELDKYFKNHTSPDVDLGDISGINASVVNIQKEIDRLNEVAKNLNESLIDLQELGKYEQYIKGGGGSDIDPYKEFGSSYQLLNFLPLDFFPDLNALVDTATALYEEELTGREHCSPHHTAIRQALVCWDELTKLIAWMSSNITSEQVRTIIVNHVNDTWGLKVRQSLWFHLSCLTFGQHTVQEFLVSFGVWIRTPAPYRPPNAPILSTLPEHTVIC

SEQ ID NO: 13819 - protein, 1365 aa, Artificial Sequence
  SARS-CoV-2/Finland/FIN03032020A/2020__EPI_ISL_413602 spike protein (1-1211)(N914C_S1123C) WhcAg construct
MFVFLVLLPLVSSQCVNLTTRTQLPPAYTNSFTRGVYYPDKVFRSSVLHSTQDLFLPFFSNVTWFHAIHVSGTNGTKRFDNPVLPFNDGVYFASTEKSNIIRGWIFGTTLDSKTQSLLIVNNATNVVIKVCEFQFCNDPFLGVYYHKNNKSWMESEFRVYSSANNCTFEYVSQPFLMDLEGKQGNFKNLREFVFKNIDGYFKIYSKHTPINLVRDLPQGFSALEPLVDLPIGINITRFQTLLALHRSYLTPGDSSSGWTAGAAAYYVGYLQPRTFLLKYNENGTITDAVDCALDPLSETKCTLKSFTVEKGIYQTSNFRVQPTESIVRFPNITNLCPFGEVFNATRFASVYAWNRKRISNCVADYSVLYNSASFSTFKCYGVSPTKLNDLCFTNVYADSFVIRGDEVRQIAPGQTGKIADYNYKLPDDFTGCVISWNSNNLDSKVGGNYNYLYRLFRKSNLKPFERDISTEIYQAGSTPCNGVEGFNCYFPLQSYGFQPTNGVGYQPYRVVVLSFELLHAPATVCGPKKSTNLVKNKCVNFNFNGLTGTGVLTESNKKFLPFQQFGRDIADTTDAVRDPQTLEILDITPCSFGGVSVITPGTNTSNQVAVLYQGVNCTEVPVAIHADQLTPTWRVYSTGSNVFQTRAGCLIGAEHVNNSYECDIPIGAGICASYQTQTNSPRRARSVASQSIIAYTMSLGAENSVAYSNNSIAIPTNFTISVTTEILPVSMTKTSVDCTMYICGDSTECSNLLLQYGSFCTQLNRALTGIAVEQDKNTQEVFAQVKQIYKTPPIKDFGGFNFSQILPDPSKPSKRSFIEDLLFNKVTLADAGFIKQYGDCLGDIAARDLICAQKFNGLTVLPPLLTDEMIAQYTSALLAGTITSGWTFGAGAALQIPFAMQMAYRFNGIGVTQCVLYENQKLIANQFNSAIGKIQDSLSSTASALGKLQDVVNQNAQALNTLVKQLSSNFGAISSVLNDILSRLDKVEAEVQIDRLITGRLQSLQTYVTQQLIRAAEIRASANLAATKMSECVLGQSKRVDFCGKGYHLMSFPQSAPHGVVFLHVTYVPAQEKNFTTAPAICHDGKAHFPREGVFVSNGTHWFVTQRNFYEPQIITTDNTFVCGNCDVVIGIVNNTVYDPLQPELDSFKEELDKYFKNHTSPDVDLGDISGINASVVNIQKEIDRLNEVAKNLNESLIDLQELGKYEQYIKGGGGSDIDPYKEFGSSYQLLNFLPLDFFPDLNALVDTATALYEEELTGREHCSPHHTAIRQALVCWDELTKLIAWMSSNITSEQVRTIIVNHVNDTWGLKVRQSLWFHLSCLTFGQHTVQEFLVSFGVWIRTPAPYRPPNAPILSTLPEHTVIC

SEQ ID NO: 13820 - protein, 1365 aa, Artificial Sequence
  SARS-CoV-2/France/GE1977/2020__EPI_ISL_414632 spike protein (1-1211)(N914C_S1123C) WhcAg construct
MFVFLVLLPLVSSQCVNLTTRTQLPPAYTNSFTRGVYYPDKVFRSSVLHSTQDLFLPFFSNVTWFHAIHVSGTNGTKRFDNPVLPFNDGVYFASTEKSNIIRGWIFGTTLDSKTQSLLIVNNATNVVIKVCEFQFCNDPFLGVYYHKNNKSWMESEFRVYSSANNCTFEYVSQPFLMDLEGKQGNFKNLREFVFKNIDGYFKIYSKHTPINLVRDLPQGFSALEPLVDLPIGINITRFQTLLALHRSYLTPGDSSSGWTAGAAAYYVGYLQPRTFLLKYNENGTITDAVDCALDPLSETKCTLKSFTVEKGIYQTSNFRVQPTESIVRFPNITNLCPFGEVFNATRFASVYAWNRKRISNCVADYSVLYNSASFSTFKCYGVSPTKLNDLCFTNVYADSFVIRGDEVRQIAPGQTGKIADYNYKLPDDFTGCVIAWNSNNLDSKVGGNYNYLYRLFRKSNLKPFERDISTEIYQAGSTPCNGVEGFNCYFPLQSYGFQPTNGVGYQPYRVVVLSFELLHAPATVCGPKKSTNLVKNKCVNFNFNGLTGTGVLTESNKKFLPFQQFGRDIADTTDAVRDPQTLEILDITPCSFGGVSVITPGTNTSNQVAVLYQGVNCTEVPVAIHADQLTPTWRVYSTGSNVFQTRAGCLIGAEHVNNSYECDIPIGAGICASYQTQTNSPRRARSVASQSIIAYTMSLGAENSVAYSNNSIAIPTNFTISVTTEILPVSMTKTSVDCTMYICGDSTECSNLLLQYGSFCTQLNRALTGIAVEQDKNTQEVFAQVKQIYKTPPIKDFGGFNFSQILPDPSKPSKRSFIEDLLFNKVTLADAGFIKQYGDCLGDIAARDLICAQKFNGLTVLPPLLTDEMIAQYTSALLAGTITSGWTFGAGAALQIPFAMQMAYRFNGIGVTQCVLYENQKLIANQFNSAIGKIQDSLFSTASALGKLQDVVNQNAQALNTLVKQLSSNFGAISSVLNDILSRLDKVEAEVQIDRLITGRLQSLQTYVTQQLIRAAEIRASANLAATKMSECVLGQSKRVDFCGKGYHLMSFPQSAPHGVVFLHVTYVPAQEKNFTTAPAICHDGKAHFPREGVFVSNGTHWFVTQRNFYEPQIITTDNTFVCGNCDVVIGIVNNTVYDPLQPELDSFKEELDKYFKNHTSPDVDLGDISGINASVVNIQKEIDRLNEVAKNLNESLIDLQELGKYEQYIKGGGGSDIDPYKEFGSSYQLLNFLPLDFFPDLNALVDTATALYEEELTGREHCSPHHTAIRQALVCWDELTKLIAWMSSNITSEQVRTIIVNHVNDTWGLKVRQSLWFHLSCLTFGQHTVQEFLVSFGVWIRTPAPYRPPNAPILSTLPEHTVIC

SEQ ID NO: 13821 - protein, 1365 aa, Artificial Sequence
  SARS-CoV-2/Finland/FIN-313/2020__EPI_ISL_414641 spike protein (1-1211)(N914C_S1123C) WhcAg construct
MFVFLVLLPLVSSQCVNLTTRTQLPPAYTNSFTRGVYYPDKVFRSSVLHSTQDLFLPFFSNVTWFHAIHVSGTNGTKRFDNPVLPFNDGVYFASTEKSNIIRGWIFGTTLDSKTQSLLIVNNATNVVIKVCEFQFCNDPFLGVYYHKNNKSWMESEFRVYSSANNCTFEYVSQPFLMDLEGKQGNFKNLREFVFKNIDGYFKIYSKHTPINLVRDLPQGFSALEPLVDLPIGINITRFKTLLALHRSYLTPGDSSSGWTAGAAAYYVGYLQPRTFLLKYNENGTITDAVDCALDPLSETKCTLKSFTVEKGIYQTSNFRVQPTESIVRFPNITNLCPFGEVFNATRFASVYAWNRKRISNCVADYSVLYNSASFSTFKCYGVSPTKLNDLCFTNVYADSFVIRGDEVRQIAPGQTGKIADYNYKLPDDFTGCVIAWNSNNLDSKVGGNYNYLYRLFRKSNLKPFERDISTEIYQAGSTPCNGVEGFNCYFPLQSYGFQPTNGVGYQPYRVVVLSFELLHAPATVCGPKKSTNLVKNKCVNFNFNGLTGTGVLTESNKKFLPFQQFGRDIADTTDAVRDPQTLEILDITPCSFGGVSVITPGTNTSNQVAVLYQGVNCTEVPVAIHADQLTPTWRVYSTGSNVFQTRAGCLIGAEHVNNSYECDIPIGAGICASYQTQTNSPRRARSVASQSIIAYTMSLGAENSVAYSNNSIAIPTNFTISVTTEILPVSMTKTSVDCTMYICGDSTECSNLLLQYGSFCTQLNRALTGIAVEQDKNTQEVFAQVKQIYKTPPIKDFGGFNFSQILPDPSKPSKRSFIEDLLFNKVTLADAGFIKQYGDCLGDIAARDLICAQKFNGLTVLPPLLTDEMIAQYTSALLAGTITSGWTFGAGAALQIPFAMQMAYRFNGIGVTQCVLYENQKLIANQFNSAIGKIQDSLSSTASALGKLQDVVNQNAQALNTLVKQLSSNFGAISSVLNDILSRLDKVEAEVQIDRLITGRLQSLQTYVTQQLIRAAEIRASANLAATKMSECVLGQSKRVDFCGKGYHLMSFPQSAPHGVVFLHVTYVPAQEKNFTTAPAICHDGKAHFPREGVFVSNGTHWFVTQRNFYEPQIITTDNTFVCGNCDVVIGIVNNTVYDPLQPELDSFKEELDKYFKNHTSPDVDLGDISGINASVVNIQKEIDRLNEVAKNLNESLIDLQELGKYEQYIKGGGGSDIDPYKEFGSSYQLLNFLPLDFFPDLNALVDTATALYEEELTGREHCSPHHTAIRQALVCWDELTKLIAWMSSNITSEQVRTIIVNHVNDTWGLKVRQSLWFHLSCLTFGQHTVQEFLVSFGVWIRTPAPYRPPNAPILSTLPEHTVIC

SEQ ID NO: 13822 - protein, 1365 aa, Artificial Sequence
  SARS-CoV-2/Netherlands/ZuidHolland_2/2020__EPI_ISL_414556 spike protein (1-1211)(N914C_S1123C) WhcAg construct
MFVFLVLLPLVSSQCVNLTTRTQLPPAYTNSFTRGVYYPDKVFRSSVLHSTQDLFLPFFSNVTWFHAIHVSGTNGTKRFDNPVLPFNDGVYFASTEKSNIIRGWIFGTTLDSKTQSLLIVNNATNVVIKVCEFQFCNDPFLGVYYHKNNKSWMESEFRVYSSANNCTFEYVSQPFLMDLEGKQGNFKNLREFVFKNIDGYFKIYSKHTPINLVRDLPQGFSALEPLVDLPIGINITRFQTLLALHRSYLTPGDSSSGWTAGAAAYYVGYLQPRTFLLKYNENGTITDAVDCALDPLSETKCTLKSFTVEKGIYQTSNFRVQPTESIVRFPNITNLCPFGEVFNATRFASVYAWNRKRISNCVADYSVLYNSASFSTFKCYGVSPTKLNDLCFTNVYADSFVIRGDEVRQIAPGQTGKIADYNYKLPDDFTGCVIAWNSNNLDSKVGGNYNYLYRLFRKSNLKPFERDISTEIYQAGSTPCNGVEGFNCYFPLQSYGFQPTNGVGYQPYRVVVLSFELLHAPATVCGPKKSTNLVKNKCVNFNFNGLTGTGVLTESNKKFLPFQQFGRDIADTTDAVRDPQTLEILDITPCSFGGVSVITPGTNTSNQVAVLYQGVNCTEVPVAIHADQLTPTWRVYSTGSNVFQTRAGCLIGAEHVNNSYECDIPIGAGICASYQTQTNSPRRARSVASQSIIAYTMSLGAENSVAYSNNSIAIPTNFTISVTTEILPVSMTKTSVDCTMYICGDSTECSNLLLQYGSFCTQLNRALTGIALEQDKNTQEVFAQVKQIYKTPPIKDFGGFNFSQILPDPSKPSKRSFIEDLLFNKVTLADAGFIKQYGDCLGDIAARDLICAQKFNGLTVLPPLLTDEMIAQYTSALLAGTITSGWTFGAGAALQIPFAMQMAYRFNGIGVTQCVLYENQKLIANQFNSAIGKIQDSLSSTASALGKLQDVVNQNAQALNTLVKQLSSNFGAISSVLNDILSRLDKVEAEVQIDRLITGRLQSLQTYVTQQLIRAAEIRASANLAATKMSECVLGQSKRVDFCGKGYHLMSFPQSAPHGVVFLHVTYVPAQEKNFTTAPAICHDGKAHFPREGVFVSNGTHWFVTQRNFYEPQIITTDNTFVCGNCDVVIGIVNNTVYDPLQPELDSFKEELDKYFKNHTSPDVDLGDISGINASVVNIQKEIDRLNEVAKNLNESLIDLQELGKYEQYIKGGGGSDIDPYKEFGSSYQLLNFLPLDFFPDLNALVDTATALYEEELTGREHCSPHHTAIRQALVCWDELTKLIAWMSSNITSEQVRTIIVNHVNDTWGLKVRQSLWFHLSCLTFGQHTVQEFLVSFGVWIRTPAPYRPPNAPILSTLPEHTVIC

SEQ ID NO: 13823 - protein, 1365 aa, Artificial Sequence
  SARS-CoV-2/USA/WA-UW31/2020__EPI_ISL_414618 spike protein (1-1211)(N914C_S1123C) WhcAg construct
MFVFLVLLPLVSSQCVNLTTRTQLPPAYTNSFTRGVYYPDKVFRSSVLHSTQDLFLPFFSNVTWFHAIHVSGTNGTKRFDNPVLPFNDGVYFASTEKSNIIRGWIFGTTLDSKTQSLLIVNNATNVVIKVCEFQFCNDPFLGVYYHKNNKSWMESEFRVYSSANNCTFEYVSQPFLMDLEGKQGNFKNLREFVFKNIDGYFKIYSKHTPINLVRDLPQGFSALEPLVDLPIGINITRFQTLLALHRSYLTPGDSSSGWTAGAAAYYVGYLQPRTFLLKYNENGTITDAVDCALDPLSETKCTLKSFTVEKGIYQTSNFRVQPTESIVRFPNITNLCPFGEVFNATRFASVYAWNRKRISNCVADYSVLYNSASFSTFKCYGVSPTKLNDLCFTNVYADSFVIRGDEVRQIAPGQTGKIADYNYKLPDDFTGCVIAWNSNNLDSKVGGNYNYLYRLFRKSNLKPFERDISTEIYQAGSTPCNGAEGFNCYFPLQSYGFQPTNGVGYQPYRVVVLSFELLHAPATVCGPKKSTNLVKNKCVNFNFNGLTGTGVLTESNKKFLPFQQFGRDIADTTDAVRDPQTLEILDITPCSFGGVSVITPGTNTSNQVAVLYQDVNCTEVPVAIHADQLTPTWRVYSTGSNVFQTRAGCLIGAEHVNNSYECDIPIGAGICASYQTQTNSPRRARSVASQSIIAYTMSLGAENSVAYSNNSIAIPTNFTISVTTEILPVSMTKTSVDCTMYICGDSTECSNLLLQYGSFCTQLNRALTGIAVEQDKNTQEVFAQVKQIYKTPPIKDFGGFNFSQILPDPSKPSKRSFIEDLLFNKVTLADAGFIKQYGDCLGDIAARDLICAQKFNGLTVLPPLLTDEMIAQYTSALLAGTITSGWTFGAGAALQIPFAMQMAYRFNGIGVTQCVLYENQKLIANQFNSAIGKIQDSLSSTASALGKLQDVVNQNAQALNTLVKQLSSNFGAISSVLNDILSRLDKVEAEVQIDRLITGRLQSLQTYVTQQLIRAAEIRASANLAATKMSECVLGQSKRVDFCGKGYHLMSFPQSAPHGVVFLHVTYVPAQEKNFTTAPAICHDGKAHFPREGVFVSNGTHWFVTQRNFYEPQIITTDNTFVCGNCDVVIGIVNNTVYDPLQPELDSFKEELDKYFKNHTSPDVDLGDISGINASVVNIQKEIDRLNEVAKNLNESLIDLQELGKYEQYIKGGGGSDIDPYKEFGSSYQLLNFLPLDFFPDLNALVDTATALYEEELTGREHCSPHHTAIRQALVCWDELTKLIAWMSSNITSEQVRTIIVNHVNDTWGLKVRQSLWFHLSCLTFGQHTVQEFLVSFGVWIRTPAPYRPPNAPILSTLPEHTVIC

SEQ ID NO: 13824 - protein, 1365 aa, Artificial Sequence
  SARS-CoV-2/South Korea/SNU01/2020__EPI_ISL_411929 spike protein (1-1211)(N914C_S1123C) WhcAg construct
MFVFLVLLPLVSSQCVNLTTRTQLPPAYTNSFTRGVYYPDKVFRSSVLHSTQDLFLPFFSNVTWFHAIHVSGTNGTKRFDNPVLPFNDGVYFASTEKSNIIRGWIFGTTLDSKTQSLLIVNNATNVVIKVCEFQFCNDPFLGVYYHKNNKSWMESEFRVYSSANNCTFEYVSQPFLMDLEGKQGNFKNLREFVFKNIDGYFKIYSKHTPINLVRDLPQGFWALEPLVDLPIGINITRFQTLLALHRSYLTPGDSSSGWTAGAAAYYVGYLQPRTFLLKYNENGTITDAVDCALDPLSETKCTLKSFTVEKGIYQTSNFRVQPTESIVRFPNITNLCPFGEVFNATRFASVYAWNRKRISNCVADYSVLYNSASFSTFKCYGVSPTKLNDLCFTNVYADSFVIRGDEVRQIAPGQTGKIADYNYKLPDDFTGCVIAWNSNNLDSKVGGNYNYLYRLFRKSNLKPFERDISTEIYQAGSTPCNGVEGFNCYFPLQSYGFQPTNGVGYQPYRVVVLSFELLHAPATVCGPKKSTNLVKNKCVNFNFNGLTGTGVLTESNKKFLPFQQFGRDIADTTDAVRDPQTLEILDITPCSFGGVSVITPGTNTSNQVAVLYQDVNCTEVPVAIHADQLTPTWRVYSTGSNVFQTRAGCLIGAEHVNNSYECDIPIGAGICASYQTQTNSPRRARSVASQSIIAYTMSLGAENSVAYSNNSIAIPTNFTISVTTEILPVSMTKTSVDCTMYICGDSTECSNLLLQYGSFCTQLNRALTGIAVEQDKNTQEVFAQVKQIYKTPPIKDFGGFNFSQILPDPSKPSKRSFIEDLLFNKVTLADAGFIKQYGDCLGDIAARDLICAQKFNGLTVLPPLLTDEMIAQYTSALLAGTITSGWTFGAGAALQIPFAMQMAYRFNGIGVTQCVLYENQKLIANQFNSAIGKIQDSLSSTASALGKLQDVVNQNAQALNTLVKQLSSNFGAISSVLNDILSRLDKVEAEVQIDRLITGRLQSLQTYVTQQLIRAAEIRASANLAATKMSECVLGQSKRVDFCGKGYHLMSFPQSAPHGVVFLHVTYVPAQEKNFTTAPAICHDGKAHFPREGVFVSNGTHWFVTQRNFYEPQIITTDNTFVCGNCDVVIGIVNNTVYDPLQPELDSFKEELDKYFKNHTSPDVDLGDISGINASVVNIQKEIDRLNEVAKNLNESLIDLQELGKYEQYIKGGGGSDIDPYKEFGSSYQLLNFLPLDFFPDLNALVDTATALYEEELTGREHCSPHHTAIRQALVCWDELTKLIAWMSSNITSEQVRTIIVNHVNDTWGLKVRQSLWFHLSCLTFGQHTVQEFLVSFGVWIRTPAPYRPPNAPILSTLPEHTVIC

SEQ ID NO: 13825 - protein, 1365 aa, Artificial Sequence
  SARS-CoV-2/China/WF0004/2020__EPI_ISL_413694 spike protein (1-1211)(N914C_S1123C) WhcAg construct
MFVFLVLLPLVSSQCVNLTTRTQLPPAYTNSFTRGVYYPDKVFRSSVLHSTQDLFLPFFSNVTWFHAIHVSGTNGTKRFDNPVLPFNDGVYFASTEKSNIIRGWIFGTTLDSKTQSLLIVNNATNVVIKVCEFQFCNDPFLGVYYHKNNKSWTESEFRVYSSANNCTFEYVSQPFLMDLEGKQGNFKNLREFVFKNIDGYFKIYSKHTPINLVRDLPQGFSALEPLVDLPIGINITRFQTLLALHRSYLTPGDSSSGWTAGAAAYYVGYLQPRTFLLKYNENGTITDAVDCALDPLSETKCTLKSFTVEKGIYQTSNFRVQPTESIVRFPNITNLCPFGEVFNATRFASVYAWNRKRISNCVADYSVLYNSASFSTFKCYGVSPTKLNDLCFTNVYADSFVIRGDEVRQIAPGQTGKIADYNYKLPDDFTGCVIAWNSNNLDSKVGGNYNYLYRLFRKSNLKPFERDISTEIYQAGSTPCNGVEGFNCYFPLQSYGFQPTNGVGYQPYRVVVLSFELLHAPATVCGPKKSTNLVKNKCVNFNFNGLTGTGVLTESNKKFLPFQQFGRDIADTTDAVRDPQTLEILDITPCSFGGVSVITPGTNTSNQVAVLYQDVNCTEVPVAIHADQLTPTWRVYSTGSNVFQTRAGCLIGAEHVNNSYECDIPIGAGICASYQTQTNSPRRARSVASQSIIAYTMSLGAENSVAYSNNSIAIPTNFTISVTTEILPVSMTKTSVDCTMYICGDSTECSNLLLQYGSFCTQLNRALTGIAVEQDKNTQEVFAQVKQIYKTPPIKDFGGFNFSQILPDPSKPSKRSFIEDLLFNKVTLADAGFIKQYGDCLGDIAARDLICAQKFNGLTVLPPLLTDEMIAQYTSALLAGTITSGWTFGAGAALQIPFAMQMAYRFNGIGVTQCVLYENQKLIANQFNSAIGKIQDSLSSTASALGKLQDVVNQNAQALNTLVKQLSSNFGAISSVLNDILSRLDKVEAEVQIDRLITGRLQSLQTYVTQQLIRAAEIRASANLAATKMSECVLGQSKRFDFCGKGYHLMSFPQSAPHGVVFLHVTYVPAQEKNFTTAPAICHDGKAHFPREGVFVSNGTHWFVTQRNFYEPQIITTDNTFVCGNCDVVIGIVNNTVYDPLQPELDSFKEELDKYFKNHTSPDVDLGDISGINASVVNIQKEIDRLNEVAKNLNESLIDLQELGKYEQYIKGGGGSDIDPYKEFGSSYQLLNFLPLDFFPDLNALVDTATALYEEELTGREHCSPHHTAIRQALVCWDELTKLIAWMSSNITSEQVRTIIVNHVNDTWGLKVRQSLWFHLSCLTFGQHTVQEFLVSFGVWIRTPAPYRPPNAPILSTLPEHTVIC

SEQ ID NO: 13826 - protein, 1365 aa, Artificial Sequence
  SARS-CoV-2/China/WF0028/2020__EPI_ISL_413791 spike protein (1-1211)(N914C_S1123C) WhcAg construct
MFVFLVLLPLVSSQCVNLTTRTQLPPAYTNSFTRGVYYPDKVFRSSVLHSTQDLFLPFFSNVTWFHAIHVSGTNGTKRFDNPVLPFNDGVYFASTEKSNIIRGWIFGTTLDSKTQSLLIVNNATNVVIKVCEFQFCNDPFLGVYYHKNNKSWMESEFRVYSSANNCTFEYVSQPFLMDLEGKQGNFKNLREFVFKNIDGYFKIYSKHTPINLVRDLPQGFSALEPLVDLPIGINITRFQTLLALHRSYLTPGDSSSGWTAGAAAYYVGYLQPRTFLLKYNENGTITDAVDCALDPLSETKCTLKSFTVEKGIYQTSNFRVQPTESIVRFPNITNLCPFGEVFNATRFASVYAWNRKRISNCVADYSVLYNSASFSTFKCYGVSPTKLNDLCFTNVYADSFVIRGDEVRQIAPGQTGKIADYNYKLPDDFTGCVIAWNSNNLDSKVGGNYNYLYRLFRKSNLKPFERDISTEIYQAGSTPCNGVEGFNCYFPLQSYGFQPTNGVGYQPYRVVVLSFELLHAPATVCGPKKSTNLVKNKCVNFNFNGLTGTGVLTESNKKFLPFQQFGRDIADTTDAVRDPQTLEILDITPCSFGGVSVITPGTNTSNQVAVLYQDVNCTEVPVAIHADQLTPTWRVYSTGSNVFQTRAGCLIGAEHVNNSYECDIPIGAGICASYQTQTNSPRRARSVASQSIIAYTMSLGAENSVAYSNNSIAIPTNFTISVTTEILPVSMTKTSVDCTMYICGDSTECSNLLLQYGSFCTQLNRALTGIAVEQDKNTQEVFAQVKQIYKTPPIKDFGGFNFSQILPDPSKPSKRSFIEDLLFNKVTLADAGFIKQYGDCLGDIAARDLICAQKFNGLTVLPPLLTDEMIAQYTSALLAGTITSGWTFGAGAALQIPFAMQMAYRFNGIGVTQCVLYENQKLIANQFNSAIGKIQDSLSSTASALGKLQDVVNQNAQALNTLVKQLSSNFGAISSVLNDILSRLDKVEAEVQIDRLITGRLQSLQTYVTQQLIRAAEIRASANLAATKMSECVLGQSKRVDFCGKGYHLMSFPQSAPHGVVFLHVTYVPAQEKNFTTAPAICHDGKAHFPREGVFVSNGTHWFVTQRNFYEPQIITTDNTFVCGNCDVVIGIVNNTVYDPLQPELESFKEELDKYFKNHTSPDVDLGDISGINASVVNIQKEIDRLNEVAKNLNESLIDLQELGKYEQYIKGGGGSDIDPYKEFGSSYQLLNFLPLDFFPDLNALVDTATALYEEELTGREHCSPHHTAIRQALVCWDELTKLIAWMSSNITSEQVRTIIVNHVNDTWGLKVRQSLWFHLSCLTFGQHTVQEFLVSFGVWIRTPAPYRPPNAPILSTLPEHTVIC

SEQ ID NO: 13827 - protein, 1365 aa, Artificial Sequence
  SARS-CoV-2/2019-nCoV/USA-CruiseA-18/2020__MT159716.1 spike protein (1-1211)(N914C_S1123C) WhcAg construct
MFVFLVLLPLVSSQCVNLTTRTQLPPAYTNSFTRGVYYPDKVFRSSVLHSTQDLFLPFFSNVTWFHAIHVSGTNGTKRFDNPVLPFNDGVYFASTEKSNIIRGWIFGTTLDSKTQSLLIVNNATNVVIKVCEFQFCNDPFLGVYYHKNNKSWMESELRVYSSANNCTFEYVSQPFLMDLEGKQGNFKNLREFVFKNIDGYFKIYSKHTPINLVRDLPQGFSALEPLVDLPIGINITRFQTLLALHRSYLTPGDSSSGWTAGAAAYYVGYLQPRTFLLKYNENGTITDAVDCALDPLSETKCTLKSFTVEKGIYQTSNFRVQPTESIVRFPNITNLCPFGEVFNATRFASVYAWNRKRISNCVADYSVLYNSASFSTFKCYGVSPTKLNDLCFTNVYADSFVIRGDEVRQIAPGQTGKIADYNYKLPDDFTGCVIAWNSNNLDSKVGGNYNYLYRLFRKSNLKPFERDISTEIYQAGSTPCNGVEGFNCYFPLQSYGFQPTNGVGYQPYRVVVLSFELLHAPATVCGPKKSTNLVKNKCVNFNFNGLTGTGVLTESNKKFLPFQQFGRDIADTTDAVRDPQTLEILDITPCSFGGVSVITPGTNTSNQVAVLYQDVNCTEVPVAIHADQLTPTWRVYSTGSNVFQTRAGCLIGAEHVNNSYECDIPIGAGICASYQTQTNSPRRARSVASQSIIAYTMSLGAENSVAYSNNSIAIPTNFTISVTTEILPVSMTKTSVDCTMYICGDSTECSNLLLQYGSFCTQLNRALTGIAVEQDKNTQEVFAQVKQIYKTPPIKDFGGFNFSQILPDPSKPSKRSFIEDLLFNKVTLADAGFIKQYGDCLGDIAARDLICAQKFNGLTVLPPLLTDEMIAQYTSALLAGTITSGWTFGAGAALQIPFAMQMAYRFNGIGVTQCVLYENQKLIANQFNSAIGKIQDSLSSTASALGKLQDVVNQNAQALNTLVKQLSSNFGAISSVLNDILSRLDKVEAEVQIDRLITGRLQSLQTYVTQQLIRAAEIRASANLAATKMSECVLGQSKRVDFCGKGYHLMSFPQSAPHGVVFLHVTYVPAQEKNFTTAPAICHDGKAHFPREGVFVSNGTHWFVTQRNFYEPQIITTDNTFVCGNCDVVIGIVNNTVYDPLQPELDSFKEELDKYFKNHTSPDVDLGDISGINASVVNIQKEIDRLNEVAKNLNESLIDLQELGKYEQYIKGGGGSDIDPYKEFGSSYQLLNFLPLDFFPDLNALVDTATALYEEELTGREHCSPHHTAIRQALVCWDELTKLIAWMSSNITSEQVRTIIVNHVNDTWGLKVRQSLWFHLSCLTFGQHTVQEFLVSFGVWIRTPAPYRPPNAPILSTLPEHTVIC

SEQ ID NO: 13828 - protein, 1365 aa, Artificial Sequence
  SARS-CoV-2/SARS-CoV-2/Yunnan-01/human/2020/CHN__MT049951.1 spike protein (1-1211)(N914C_S1123C) WhcAg construct
MFVFLVLLPLVSSQCVNLTTRTQLPPANTNSFTRGVYYPDKVFRSSVLHSTQDLFLPFFSNVTWFHAIHVSGTNGTKRFDNPVLPFNDGVYFASTEKSNIIRGWIFGTTLDSKTQSLLIVNNATNVVIKVCEFQFCNDPFLGVYYHKNNKSWMESEFRVYSSANNCTFEYVSQPFLMDLEGKQGNFKNLREFVFKNIDGYFKIYSKHTPINLVRDLPQGFSALEPLVDLPIGINITRFQTLLALHRSYLTPGDSSSGWTAGAAAYYVGYLQPRTFLLKYNENGTITDAVDCALDPLSETKCTLKSFTVEKGIYQTSNFRVQPTESIVRFPNITNLCPFGEVFNATRFASVYAWNRKRISNCVADYSVLYNSASFSTFKCYGVSPTKLNDLCFTNVYADSFVIRGDEVRQIAPGQTGKIADYNYKLPDDFTGCVIAWNSNNLDSKVGGNYNYLYRLFRKSNLKPFERDISTEIYQAGSTPCNGVEGFNCYFPLQSYGFQPTNGVGYQPYRVVVLSFELLHAPATVCGPKKSTNLVKNKCVNFNFNGLTGTGVLTESNKKFLPFQQFGRDIADTTDAVRDPQTLEILDITPCSFGGVSVITPGTNTSNQVAVLYQDVNCTEVPVAIHADQLTPTWRVYSTGSNVFQTRAGCLIGAEHVNNSYECDIPIGAGICASYQTQTNSPRRARSVASQSIIAYTMSLGAENSVAYSNNSIAIPTNFTISVTTEILPVSMTKTSVDCTMYICGDSTECSNLLLQYGSFCTQLNRALTGIAVEQDKNTQEVFAQVKQIYKTPPIKDFGGFNFSQILPDPSKPSKRSFIEDLLFNKVTLADAGFIKQYGDCLGDIAARDLICAQKFNGLTVLPPLLTDEMIAQYTSALLAGTITSGWTFGAGAALQIPFAMQMAYRFNGIGVTQCVLYENQKLIANQFNSAIGKIQDSLSSTASALGKLQDVVNQNAQALNTLVKQLSSNFGAISSVLNDILSRLDKVEAEVQIDRLITGRLQSLQTYVTQQLIRAAEIRASANLAATKMSECVLGQSKRVDFCGKGYHLMSFPQSAPHGVVFLHVTYVPAQEKNFTTAPAICHDGKAHFPREGVFVSNGTHWFVTQRNFYEPQIITTDNTFVCGNCDVVIGIVNNTVYDPLQPELDSFKEELDKYFKNHTSPDVDLGDISGINASVVNIQKEIDRLNEVAKNLNESLIDLQELGKYEQYIKGGGGSDIDPYKEFGSSYQLLNFLPLDFFPDLNALVDTATALYEEELTGREHCSPHHTAIRQALVCWDELTKLIAWMSSNITSEQVRTIIVNHVNDTWGLKVRQSLWFHLSCLTFGQHTVQEFLVSFGVWIRTPAPYRPPNAPILSTLPEHTVIC

SEQ ID NO: 13829 - protein, 1365 aa, Artificial Sequence
  SARS-CoV-2/USA/WA-UW292/2020__EPI_ISL_418077 spike protein (1-1211)(N914C_S1123C) WhcAg construct
MFVFLVLLPLVSSQCVNLTTRTQLPPAYTNSFTRGVYYPDKVFRSSVLHSTQDLFLPFFSNVTWFHAIHVSGTNGTKRFDNPVLPFNDGVYFASTEKSNIIRGWIFGTTLDSKTQSLLIVNNATNVVIKVCEFQFCNDPFLGVYYHKNNKSWMESEFRVYSSANNCTFEYVSQPFLMDLEGKQGNFKNLREFVFKNIDGYFKIYSKHTPINLVRDLPQGFSALEPLVDLPIGINITRFQTLLALHRSYLTPGDSSSGWTAGAAAYYVGYLQPRTFLLKYNENGTITDAVDCALDPLSETKCTLKSFTVEKGIYQTSNFRVQPTESIVRFPNITNLCPFGEVFNATRFASVYAWNRKRISNCVADYSVLYNSASFSTFKCYGVSPTKLNDLCFTNVYADSFVIRGDEVRQIAPGQTGKIADYNYKLPDDFTGCVIAWNSNNLDSKVGGNYNYLYRLFRKSNLKPFERDISTEIYQASSTPCNGVEGFNCYFPLQSYGFQPTNGVGYQPYRVVVLSFELLHAPATVCGPKKSTNLVKNKCVNFNFNGLTGTGVLTESNKKFLPFQQFGRDIADTTDAVRDPQTLEILDITPCSFGGVSVITPGTNTSNQVAVLYQDVNCTEVPVAIHADQLTPTWRVYSTGSNVFQTRAGCLIGAEHVNNSYECDIPIGAGICASYQTQTNSPRRARSVASQSIIAYTMSLGAENSVAYSNNSIAIPTNFTISVTTEILPVSMTKTSVDCTMYICGDSTECSNLLLQYGSFCTQLNRALTGIAVEQDKNTQEVFAQVKQIYKTPPIKDFGGFNFSQILPDPSKPSKRSFIEDLLFNKVTLADAGFIKQYGDCLGDIAARDLICAQKFNGLTVLPPLLTDEMIAQYTSALLAGTITSGWTFGAGAALQIPFAMQMAYRFNGIGVTQCVLYENQKLIANQFNSAIGKIQDSLSSTASALGKLQDVVNQNAQALNTLVKQLSSNFGAISSVLNDILSRLDKVEAEVQIDRLITGRLQSLQTYVTQQLIRAAEIRASANLAATKMSECVLGQSKRVDFCGKGYHLMSFPQSAPHGVVFLHVTYVPAQEKNFTTAPAICHDGKAHFPREGVFVSNGTHWFVTQRNFYEPQIITTDNTFVCGNCDVVIGIVNNTVYDPLQPELDSFKEELDKYFKNHTSPDVDLGDISGINASVVNIQKEIDRLNEVAKNLNESLIDLQELGKYEQYIKGGGGSDIDPYKEFGSSYQLLNFLPLDFFPDLNALVDTATALYEEELTGREHCSPHHTAIRQALVCWDELTKLIAWMSSNITSEQVRTIIVNHVNDTWGLKVRQSLWFHLSCLTFGQHTVQEFLVSFGVWIRTPAPYRPPNAPILSTLPEHTVIC

SEQ ID NO: 13830 - protein, 1365 aa, Artificial Sequence
  SARS-CoV-2/Iceland/192/2020__EPI_ISL_417819 spike protein (1-1211)(N914C_S1123C) WhcAg construct
MFVFFVLLPLVSSQCVNLTTRTQLPPAYTNSFTRGVYYPDKVFRSSVLHSTQDLFLPFFSNVTWFHAIHVSGTNGTKRFDNPVLPFNDGVYFASTEKSNIIRGWIFGTTLDSKTQSLLIVNNATNVVIKVCEFQFCNDPFLGVYYHKNNKSWMESEFRVYSSANNCTFEYVSQPFLMDLEGKQGNFKNLREFVFKNIDGYFKIYSKHTPINLVRDLPQGFSALEPLVDLPIGINITRFQTLLALHRSYLTPGDSSSGWTAGAAAYYVGYLQPRTFLLKYNENGTITDAVDCALDPLSETKCTLKSFTVEKGIYQTSNFRVQPTESIVRFPNITNLCPFGEVFNATRFASVYAWNRKRISNCVADYSVLYNSASFSTFKCYGVSPTKLNDLCFTNVYADSFVIRGDEVRQIAPGQTGKIADYNYKLPDDFTGCVIAWNSNNLDSKVGGNYNYLYRLFRKSNLKPFERDISTEIYQAGSTPCNGVEGFNCYFPLQSYGFQPTNGVGYQPYRVVVLSFELLHAPATVCGPKKSTNLVKNKCVNFNFNGLTGTGVLTESNKKFLPFQQFGRDIADTTDAVRDPQTLEILDITPCSFGGVSVITPGTNTSNQVAVLYQGVNCTEVPVAIHADQLTPTWRVYSTGSNVFQTRAGCLIGAEHVNNSYECDIPIGAGICASYQTQTNSPRRARSVASQSIIAYTMSLGAENSVAYSNNSIAIPTNFTISVTTEILPVSMTKTSVDCTMYICGDSTECSNLLLQYGSFCTQLNRALTGIAVEQDKNTQEVFAQVKQIYKTPPIKDFGGFNFSQILPDPSKPSKRSFIEDLLFNKVTLADAGFIKQYGDCLGDIAARDLICAQKFNGLTVLPPLLTDEMIAQYTSALLAGTITSGWTFGAGAALQIPFAMQMAYRFNGIGVTQCVLYENQKLIANQFNSAIGKIQDSLSSTASALGKLQDVVNQNAQALNTLVKQLSSNFGAISSVLNDILSRLDKVEAEVQIDRLITGRLQSLQTYVTQQLIRAAEIRASANLAATKMSECVLGQSKRVDFCGKGYHLMSFPQSAPHGVVFLHVTYVPAQEKNFTTAPAICHDGKAHFPREGVFVSNGTHWFVTQRNFYEPQIITTDNTFVCGNCDVVIGIVNNTVYDPLQPELDSFKEELDKYFKNHTSPDVDLGDISGINASVVNIQKEIDRLNEVAKNLNESLIDLQELGKYEQYIKGGGGSDIDPYKEFGSSYQLLNFLPLDFFPDLNALVDTATALYEEELTGREHCSPHHTAIRQALVCWDELTKLIAWMSSNITSEQVRTIIVNHVNDTWGLKVRQSLWFHLSCLTFGQHTVQEFLVSFGVWIRTPAPYRPPNAPILSTLPEHTVIC

SEQ ID NO: 13831 - protein, 1365 aa, Artificial Sequence
  SARS-CoV-2/Belgium/ULG-6939/2020__EPI_ISL_417020 spike protein (1-1211)(N914C_S1123C) WhcAg construct
MFVFLVLLPLVSSQCVNLTTRTQLPPAYTNSFTRGVYYPDKVFRSSVLHSTQDLFLPFFSNVTWFHAIHVSGTNGTKRFDNPVLPFNDGVYFASTEKSNIIRGWIFGTTLDSKTQSLLIVNNATNVVIKVCEFQFCNDPFLGVYYHKNNKSWMESEFRVYSSANNCTFEYVSQPFLMDLEGKQGNFKNLREFVFKNIDGYFKIYSKHTPINLVRDLPQGFSALEPLVDLPIGINITRFQTLLALHRSYLTPGDSSSGWTAGAAAYYVGYLQPRTFLLKYNENGTITDAVDCALDPLSETKCTLKSFTVEKGIYQTSNFRVQPTESIVRFPNITNLCPFGEVFNATRFASVYAWNRKRISNCVADYSVLYNSASFSTFKCYGVSPTKLNDLCFTNVYADSFVIRGDEVRQIAPGQTGKIADYNYKLPDDFTGCVIAWNSNNLDSKVGGNYNYLYRLFRKSNLKPFERDISTEIYQAGSTPCNGVEGFNCYFPLQSYGFQPTNGVGYQPYRVVVLSFELLHAPATVCGPKKSTNLVKNKCVNFNFNGLTGTGVLTESNKKFLPFQQFGRDIADTTDAVRDPQTLEILDITPCSFGGVSVITPGTNTSNQVAVLYQGVNCTEVPVAIHADQLTPTWRVYSTGSNVFQTRAGCLIGAEHVNNSYECDIPIGAGICASYQTQTNSPRRARSVASQSIIAYTMSLGAENSVVYSNNSIAIPTNFTISVTTEILPVSMTKTSVDCTMYICGDSTECSNLLLQYGSFCTQLNRALTGIAVEQDKNTQEVFAQVKQIYKTPPIKDFGGFNFSQILPDPSKPSKRSFIEDLLFNKVTLADAGFIKQYGDCLGDIAARDLICAQKFNGLTVLPPLLTDEMIAQYTSALLAGTITSGWTFGAGAALQIPFAMQMAYRFNGIGVTQCVLYENQKLIANQFNSAIGKIQDSLSSTASALGKLQDVVNQNAQALNTLVKQLSSNFGAISSVLNDILSRLDKVEAEVQIDRLITGRLQSLQTYVTQQLIRAAEIRASANLAATKMSECVLGQSKRVDFCGKGYHLMSFPQSAPHGVVFLHVTYVPAQEKNFTTAPAICHDGKAHFPREGVFVSNGTHWFVTQRNFYEPQIITTDNTFVCGNCDVVIGIVNNTVYDPLQPELDSFKEELDKYFKNHTSPDVDLGDISGINASVVNIQKEIDRLNEVAKNLNESLIDLQELGKYEQYIKGGGGSDIDPYKEFGSSYQLLNFLPLDFFPDLNALVDTATALYEEELTGREHCSPHHTAIRQALVCWDELTKLIAWMSSNITSEQVRTIIVNHVNDTWGLKVRQSLWFHLSCLTFGQHTVQEFLVSFGVWIRTPAPYRPPNAPILSTLPEHTVIC

SEQ ID NO: 13832 - protein, 1365 aa, Artificial Sequence
  SARS-CoV-2/France/HF2496/2020__EPI_ISL_418231 spike protein (1-1211)(N914C_S1123C) WhcAg construct
MFVFLVLLPLVSSQCVNLTTRTQLPPAYTNSFTRGVYYPDKVFRSSVLHSTQDLFLPFFSNVTWFHAIHVSGTNGTKRFDNPVLPFNDGVYFASTEKSNIIRGWIFGTTLDSKTQSLLIVNNATNVVIKVCEFQFCNDPFLGVYYHKNNKSWMESEFRVYSSANNCTFEYVSQPFLMDLEGKQGNFKNLREFVFKNIDGYFKIYSKHTPINLVRDLPQGFSALEPLVDLPIGINITRFQTLLALHRSYLTPGDSSSGWTAGAAAYYVGYLQPRTFLLKYNENGTITDAVDCALDPLSETKCTLKSFTVEKGIYQTSNFRVQPTESIVRFPNITNLCPFGEVFNATRFASVYAWNRKRISNCVADYSVLYNSASFSTFKCYGVSPTKLNDLCFTNVYADSFVIRGDEVRQIAPGQTGKIADYNYKLPDDFTGCVIAWNSNNLDSKVGGNYNYLYRLFRKSNLKPFERDISTEIYQAGSTPCNGVEGFNCYFPLQSYGFQPTNGVGYQPYRVVVLSFELLHAPATVCGPKKSTNLVKNKCVNFNFNGLTGTGVLTESNKKFLPFQQFGRDIADTTDAVRDPQTLEILDITPCSFGGVSVITPGTNTSNQVAVLYQGVNCTEVPVAIHADQLTPTWRVYSTGSNVFQTRAGCLIGAEHVNNSYECDIPIGAGICASYQTQTNSPRRARSVASQSIIAYTMSLGAENSVAYSNNSIAIPTNFTISVTTEILPVSMTKTSVDCTMYICGDSTECSNLLLQYGSFCTQLNRALTGIAVEQDKNTQEVFAQVKQIYKTPPIKDFGGFNFSQILPDPSKPSKRSFIEDLLFNKVTLADAGFIKQYGDCLGDIVARDLICAQKFNGLTVLPPLLTDEMIAQYTSALLAGTITSGWTFGAGAALQIPFAMQMAYRFNGIGVTQCVLYENQKLIANQFNSAIGKIQDSLSSTASALGKLQDVVNQNAQALNTLVKQLSSNFGAISSVLNDILSRLDKVEAEVQIDRLITGRLQSLQTYVTQQLIRAAEIRASANLAATKMSECVLGQSKRVDFCGKGYHLMSFPQSAPHGVVFLHVTYVPAQEKNFTTAPAICHDGKAHFPREGVFVSNGTHWFVTQRNFYEPQIITTDNTFVCGNCDVVIGIVNNTVYDPLQPELDSFKEELDKYFKNHTSPDVDLGDISGINASVVNIQKEIDRLNEVAKNLNESLIDLQELGKYEQYIKGGGGSDIDPYKEFGSSYQLLNFLPLDFFPDLNALVDTATALYEEELTGREHCSPHHTAIRQALVCWDELTKLIAWMSSNITSEQVRTIIVNHVNDTWGLKVRQSLWFHLSCLTFGQHTVQEFLVSFGVWIRTPAPYRPPNAPILSTLPEHTVIC

SEQ ID NO: 13833 - protein, 1365 aa, Artificial Sequence
  SARS-CoV-2/USA/WA-UW291/2020__EPI_ISL_418076 spike protein (1-1211)(N914C_S1123C) WhcAg construct
MFVFLVLLPLVSSQCVNLTTRTQLPPAYTNSFTRGVYYPDKVFRSSVLHSTQDLFLPFFSNVTWFHAIHVSGTNGTKRFDNPVLPFNDGVYFASTEKSNIIRGWIFGTTLDSKTQSLLIVNNATNVVIKVCEFQFCNDPFLGVYYHKNNKSWMESEFRVYSSANNCTFEYVSQPFLMDLEGKQGNFKNLREFVFKNIDGYFKIYSKHTPINLVRDLPQGFSALEPLVDLPIGINITRFQTLLALHRSYLTPGDSSSGWTAGAAAYYVGYLQPRTFLLKYNENGTITDAVDCALDPLSETKCTLKSFTVEKGIYQTSNFRVQPTESIVRFPNITNLCPFGEVFNATRFASVYAWNRKRISNCVADYSVLYNSASFSTFKCYGVSPTKLNDLCFTNVYADSFVIRGDEVRQIAPGQTGKIADYNYKLPDDFTGCVIAWNSNNLDSKVGGNYNYLYRLFRKSNLKPFERDISTEIYQAGSTPCNGVEGFNCYFPLQSYGFQPTNGVGYQPYRVVVLSFELLHAPATVCGPKKSTNLVKNKCVNFNFNGLTGTGVLTESNKKFLPFQQFGRDIADTTDAVRDPQTLEILDITPCSFGGVSVITPGTNTSNQVAVLYQGVNCTEVPVAIHADQLTPTWRVYSTGSNVFQTRAGCLIGAEHVNNSYECDIPIGAGICASYQTQTNSPRRARSVASQSIIAYTMSLGAENSVAYSNNSIAIPTNFTISVTTEILPVSMTKTSVDCTMYICGDSTECSNLLLQYGSFCTQLNRALTGIAVEQDKNTQEVFAQVKQIYKTPPIKDFGGFNFSQILPDPSKPSKRSFIEDLLFNKVTLADAGFIKQYGDCLGDIAARDLICAQKFNGLTVLPPLLTDEMIAQYTSALLAGTITSGWTFGAGAALQIPFAMQMAYRFNGIGVTQCVLYENQKLIANQFNSAIGKIQYSLSSTASALGKLQDVVNQNAQALNTLVKQLSSNFGAISSVLNDILSRLDKVEAEVQIDRLITGRLQSLQTYVTQQLIRAAEIRASANLAATKMSECVLGQSKRVDFCGKGYHLMSFPQSAPHGVVFLHVTYVPAQEKNFTTAPAICHDGKAHFPREGVFVSNGTHWFVTQRNFYEPQIITTDNTFVCGNCDVVIGIVNNTVYDPLQPELDSFKEELDKYFKNHTSPDVDLGDISGINASVVNIQKEIDRLNEVAKNLNESLIDLQELGKYEQYIKGGGGSDIDPYKEFGSSYQLLNFLPLDFFPDLNALVDTATALYEEELTGREHCSPHHTAIRQALVCWDELTKLIAWMSSNITSEQVRTIIVNHVNDTWGLKVRQSLWFHLSCLTFGQHTVQEFLVSFGVWIRTPAPYRPPNAPILSTLPEHTVIC

SEQ ID NO: 13834 - protein, 1365 aa, Artificial Sequence; identical to SEQ ID NO: 13797
  SARS-CoV-2/Portugal/PT0034/2020__EPI_ISL_418019 spike protein (1-1211)(N914C_S1123C) WhcAg construct

SEQ ID NO: 13835 - protein, 1365 aa, Artificial Sequence
  SARS-CoV-2/Iceland/202/2020__EPI_ISL_417750 spike protein (1-1211)(N914C_S1123C) WhcAg construct
MFVFLVLLPLVSSQCVNLTTRTQLPPAYTNSFTRGVYYPDKVFRSSVLHSTQDLFLPFFSNVTWFHAIHVSGTNGTKRFDNPVLPFNDGVYFASTEKSNIIRGWIFGTTLDSKTQSLLIVNNATNVVIKVCEFQFCNDPFLGVYYHKNNKSWMESEFRVYSSANNCTFEYVSQPFLMDLEGKQGNFKNLREFVFKNIDGYFKIYSKHTPINLVRDLPQGFSALEPLVDLPIGINITRFQTLLALHRSYLTPGDSSSGWTAGAAAYYVGYLQPRTFLLKYNENGTITDAVDCALDPLSETKCTLKSFTVEKGIYQTSNFRVQPTESIVRFPNITNLCPFGEVFNATRFASVYAWNRKRISNCVADYSVLYNSASFSTFKCYGVSPTKLNDLCFTNVYADSFVIRGDEVRQIAPGQTGKIADYNYKLPDDFTGCVIAWNSNNLDSKVGGNYNYLYRLFRKSNLKPFERDISTEIYQAGSTPCNGVEGFNCYFPLQSYGFQPTNGVGYQPYRVVVLSFELLHAPATVCGPKKSTNLVKNKCVNFNFNGLTGTGVLTESNKKFLPFQQFGRDIADTTDAVRDPQTLEILDITPCSFGGVSVITPGTNTSNQVAVLYQDVNCTEVPVAIHADQLTPTWRVYSTGSNVFQTRAGCLIGAEHVNNSYECDIPIGAGICASYQTQTNSPRRARSVASQSIIAYTMSLGAENSVAYSNNSIAIPTNFTISVTTEILPVSMTKTSVDCTMYICGDSTECSNLLLQYGSFCTQLNRALTGIAVEQDKNTQEVFAQVKQIYKTPPIKDFGGFNFSQILPDPSKPSKRSFIEDLLFNKVTLADAGFIKQYGDCLGDIAARDLICAQKFNGLTVLPPLLTDEMIAQYTSALLAGTITSGWTFGAGAALQIPFAMQMAYRFNGIGVTQCVLYENQKLIANQFNSAIGKIQDSLSSTASALGKLQDVVNQNAQALNTLVKQLSSNFGAISSVLNDILSRLDKVEAEVQIDRLITGRLQSLQTYVTQQLIRAAEIRASANLAATKMSECVLGQSKRVDFCGKGYHLMSFPQSAPHGVVFLHVTYVPAQEKNFTTAPAICHDGKAHFPREGVFVSNGTHWFVTQRNFYEPQIITTDNTFVCGNCDVVIGIVNNTVYDPLQPELDSFKEELDKYFKNHTSPDVDLGDIPGINASVVNIQKEIDRLNEVAKNLNESLIDLQELGKYEQYIKGGGGSDIDPYKEFGSSYQLLNFLPLDFFPDLNALVDTATALYEEELTGREHCSPHHTAIRQALVCWDELTKLIAWMSSNITSEQVRTIIVNHVNDTWGLKVRQSLWFHLSCLTFGQHTVQEFLVSFGVWIRTPAPYRPPNAPILSTLPEHTVIC

SEQ ID NO: 13836 - protein, 1365 aa, Artificial Sequence
  SARS-CoV-2/USA/WA-UW261/2020__EPI_ISL_418046 spike protein (1-1211)(N914C_S1123C) WhcAg construct
MFVFLVLLPLVSSQCVNLTTRTQLPPAYTNSFTRGVYYPDKVFRSSVLHSTQDLFLPFFSNVTWFHAIHVSGTNGTKRFDNPVLPFNDGVYFASTEKSNIIRGWIFGTTLDSKTQSLLIVNNATNVVIKVCEFQFCNDPFLGVYYHKNNKSWMESEFRVYSSANNCTFEYVSQPFLMDLEGKQGNFKNLREFVFKNIDGYFKIYSKHTPINLVRDLPQGFSALEPLVDLPIGINITRFQTLLALHRSYLTPGDSSSGWTAGAAAYYVGYLQPRTFLLKYNENGTITDAVDCALDPLSETKCTLKSFTVEKGIYQTSNFRVQPTESIVRFPNITNLCPFGEVFNATRFTSVYAWNRKRISNCVADYSVLYNSASFSTFKCYGVSPTKLNDLCFTNVYADSFVIRGDEVRQIAPGQTGKIADYNYKLPDDFTGCVIAWNSNNLDSKVGGNYNYLYRLFRKSNLKPFERDISTEIYQAGSTPCNGVEGFNCYFPLQSYGFQPTNGVGYQPYRVVVLSFELLHAPATVCGPKKSTNLVKNKCVNFNFNGLTGTGVLTESNKKFLPFQQFGRDIADTTDAVRDPQTLEILDITPCSFGGVSVITPGTNTSNQVAVLYQDVNCTEVPVAIHADQLTPTWRVYSTGSNVFQTRAGCLIGAEHVNNSYECDIPIGAGICASYQTQTNSPRRARSVASQSIIAYTMSLGAENSVAYSNNSIAIPTNFTISVTTEILPVSMTKTSVDCTMYICGDSTECSNLLLQYGSFCTQLNRALTGIAVEQDKNTQEVFAQVKQIYKTPPIKDFGGFNFSQILPDPSKPSKRSFIEDLLFNKVTLADAGFIKQYGDCLGDIAARDLICAQKFNGLTVLPPLLTDEMIAQYTSALLAGTITSGWTFGAGAALQIPFAMQMAYRFNGIGVTQCVLYENQKLIANQFNSAIGKIQDSLSSTASALGKLQDVVNQNAQALNTLVKQLSSNFGAISSVLNDILSRLDKVEAEVQIDRLITGRLQSLQTYVTQQLIRAAEIRASANLAATKMSECVLGQSKRVDFCGKGYHLMSFPQSAPHGVVFLHVTYVPAQEKNFTTAPAICHDGKAHFPREGVFVSNGTHWFVTQRNFYEPQIITTDNTFVCGNCDVVIGIVNNTVYDPLQPELDSFKEELDKYFKNHTSPDVDLGDISGINASVVNIQKEIDRLNEVAKNLNESLIDLQELGKYEQYIKGGGGSDIDPYKEFGSSYQLLNFLPLDFFPDLNALVDTATALYEEELTGREHCSPHHTAIRQALVCWDELTKLIAWMSSNITSEQVRTIIVNHVNDTWGLKVRQSLWFHLSCLTFGQHTVQEFLVSFGVWIRTPAPYRPPNAPILSTLPEHTVIC

SEQ ID NO: 13837 - protein, 1365 aa, Artificial Sequence
  SARS-CoV-2/Portugal/PT0035/2020__EPI_ISL_418020 spike protein (1-1211)(N914C_S1123C) WhcAg construct
MFVFLVLLPLVSSQCVNLTTRTQLPPAYTNSFTRGVYYPDKVFRSSVLHSTQDLFLPFFSNVTWFHAIHVSGTNGTKRFDNPVLPFNDGVYFASTEKSNIIRGWIFGTTLDSKTQSLLIVNNATNVVIKVCEFQFCNDPFLGVYYHKNNKSWMESEFRVYSSANNCTFEYVSQPFLMDLEGKQGNFKNLREFVFKNIDGYFKIYSKHTPINLVRDLPQGFSALEPLVDLPIGINITRFQTLLALHRSYLTPGDSSSGWTAGAAAYYVGYLQPRTFLLKYNENGTITDAVDCALDPLSETKCTLKSFTVEKGIYQTSNFRVQPTESIVRFPNITNLCPFGEVFNATRFASVYAWNRKRISNCVADYSVLYNSASFSTFKCYGVSPTKLNDLCFTNVYADSFVIRGDEVRQIAPGQTGKIADYNYKLPDDFTGCVIAWNSNNLDSKVGGNYNYLYRLFRKSNLKPFERDISTEIYQAGSTPCNGVEGFNCYFPLQSYGFQPTNGVGYQPYRVVVLSFELLHAPATVCGPKKSTNLVKNKCVNFNFNGLTGTGVLTESNKKFLPFQQFGRDIADTTDAVRDPQTLEILDITPCSFGGVSVITPGTNTSNQVAVLYQDVNCTEVPVAIHADQLTPTWRVYSTGSNVFQTRAGCLIGAEHVNNSYECDIPIGAGICASYQTQTNSPRRARSVASQSIIAYTMSLGAENSVAYSNNSIAIPTNFTISVTTEILPVSMTKTSVDCTMYICGDSTECSNLLLQYGSFCTQLNRALTGIAVEQDKNTQEVFAQVKQIYKTPPIKDFGGFNFSQILPDPSKPSKRSFIEDLLFNKVTLADAGFIKQYGDCLGDISARDLICAQKFNGLTVLPPLLTDEMIAQYTSALLAGTITSGWTFGAGAALQIPFAMQMAYRFNGIGVTQCVLYENQKLIANQFNSAIGKIQDSLSSTASALGKLQDVVNQNAQALNTLVKQLSSNFGAISSVLNDILSRLDKVEAEVQIDRLITGRLQSLQTYVTQQLIRAAEIRASANLAATKMSECVLGQSKRVDFCGKGYHLMSFPQSAPHGVVFLHVTYVPAQEKNFTTAPAICHDGKAHFPREGVFVSNGTHWFVTQRNFYEPQIITTDNTFVCGNCDVVIGIVNNTVYDPLQPELDSFKEELDKYFKNHTSPDVDLGDISGINASVVNIQKEIDRLNEVAKNLNESLIDLQELGKYEQYIKGGGGSDIDPYKEFGSSYQLLNFLPLDFFPDLNALVDTATALYEEELTGREHCSPHHTAIRQALVCWDELTKLIAWMSSNITSEQVRTIIVNHVNDTWGLKVRQSLWFHLSCLTFGQHTVQEFLVSFGVWIRTPAPYRPPNAPILSTLPEHTVIC

SEQ ID NO: 13838 - protein, 1365 aa, Artificial Sequence
  SARS-CoV-2/USA/NY-NYUMC7/2020__EPI_ISL_418192 spike protein (1-1211)(N914C_S1123C) WhcAg construct
MFVFLVLLPLVSSQCVNLTTRTQLPPAYTNSFTRGVYYPDKVFRSSVLHSTQDLFLPFFSNVTWFHAIHVSGTNGTKRFDNPVLPFNDGVYFASTEKSNIIRGWIFGTTLDSKTQSLLIVNNATNVVIKVCEFQFCNDPFLGVYHHKNNKSWMESEFRVYSSANNCTFEYVSQPFLMDLEGKQGNFKNLREFVFKNIDGYFKIYSKHTPINLVRDLPQGFSALEPLVDLPIGINITRFQTLLALHRSYLTPGDSSSGWTAGAAAYYVGYLQPRTFLLKYNENGTITDAVDCALDPLSETKCTLKSFTVEKGIYQTSNFRVQPTESIVRFPNITNLCPFGEVFNATRFASVYAWNRKRISNCVADYSVLYNSASFSTFKCYGVSPTKLNDLCFTNVYADSFVIRGDEVRQIAPGQTGKIADYNYKLPDDFTGCVIAWNSNNLDSKVGGNYNYLYRLFRKSNLKPFERDISTEIYQAGSTPCNGVEGFNCYFPLQSYGFQPTNGVGYQPYRVVVLSFELLHAPATVCGPKKSTNLVKNKCVNFNFNGLTGTGVLTESNKKFLPFQQFGRDIADTTDAVRDPQTLEILDITPCSFGGVSVITPGTNTSNQVAVLYQGVNCTEVPVAIHADQLTPTWRVYSTGSNVFQTRAGCLIGAEHVNNSYECDIPIGAGICASYQTQTNSPRRARSVASQSIIAYTMSLGAENSVAYSNNSIAIPTNFTISVTTEILPVSMTKTSVDCTMYICGDSTECSNLLLQYGSFCTQLNRALTGIAVEQDKNTQEVFAQVKQIYKTPPIKDFGGFNFSQILPDPSKPSKRSFIEDLLFNKVTLADAGFIKQYGDCLGDIAARDLICAQKFNGLTVLPPLLTDEMIAQYTSALLAGTITSGWTFGAGAALQIPFAMQMAYRFNGIGVTQCVLYENQKLIANQFNSAIGKIQDSLSSTASALGKLQDVVNQNAQALNTLVKQLSSNFGAISSVLNDILSRLDKVEAEVQIDRLITGRLQSLQTYVTQQLIRAAEIRASANLAATKMSECVLGQSKRVDFCGKGYHLMSFPQSAPHGVVFLHVTYVPAQEKNFTTAPAICHDGKAHFPREGVFVSNGTHWFVTQRNFYEPQIITTDNTFVCGNCDVVIGIVNNTVYDPLQPELDSFKEELDKYFKNHTSPDVDLGDISGINASVVNIQKEIDRLNEVAKNLNESLIDLQELGKYEQYIKGGGGSDIDPYKEFGSSYQLLNFLPLDFFPDLNALVDTATALYEEELTGREHCSPHHTAIRQALVCWDELTKLIAWMSSNITSEQVRTIIVNHVNDTWGLKVRQSLWFHLSCLTFGQHTVQEFLVSFGVWIRTPAPYRPPNAPILSTLPEHTVIC

SEQ ID NO: 13839 - protein, 1365 aa, Artificial Sequence
  SARS-CoV-2/Iceland/189/2020__EPI_ISL_417709 spike protein (1-1211)(N914C_S1123C) WhcAg construct
MFVFLVLLPLVSSQCVNLTTRTQLPPAYTNSFTRGVYYPDKVFRSSVLHSTQDLFLPFFSNVTWFHAIHVSGTNGTKRFDNPVLPFNDGVYFASTEKSNIIRGWIFGTTLDSKTQSLLIVNNATNVVIKVCEFQFCNDPFLGVYYHKNNKSWMESEFRVYSSANNCTFEYVSQPFLMDLEGKQGNFKNLREFVFKNIDGYFKIYSKHTPINLVRDLPQGFSALEPLVDLPIGINITRFQTLLALHRSYLTPGDSSSGWTAGAAAYYVGYLQPRTFLLKYNENGTITDAVDCALDPLSETKCTLKSFTVEKGIYQTSNFRVQPTESIVRFPNITNLCPFGEVFNATRFASVYAWNRKRISNCVADYSVLYNSASFSTFKCYGVSPTKLNDLCFTNVYADSFVIRGDEVRQIAPGQTGKIADYNYKLPDDFTGCVIAWNSNNLDSKVGGNYNYLYRLFRKSNLKPFERDISTEIYQAGSTPCNGVEGFNCYFPLQSYGFQPTNGVGYQPYRVVVLSFELLHAPATVCGPKKSTNLVKNKCVNFNFNGLTGTGVLTESNKKFLPFQQFGRDIADTTDAVRDPQTLEILDITPCSFGGVSVITPGTNTSNQVAVLYQGVNCTEVPVAIHADQLTPTWRVYSTGSNVFQTRAGCLIGAEHVNNSYECDIPIGAGICASYQTQTNSPRRARSVASQSIIAYTMSLGAENSVAYSNNSIAIPTNFTISVTTEILPVSMTKTSVDCTMYICGDSTECSNLLLQYGSFCTQLNRALTGIAVEQDKNTQEVFAQVKQIYKTPPIKDFGGFNFSQILPDPSKPSKRSFIEDLLFNKVTLADAGFTKQYGDCLGDIAARDLICAQKFNGLTVLPPLLTDEMIAQYTSALLAGTITSGWTFGAGAALQIPFAMQMAYRFNGIGVTQCVLYENQKLIANQFNSAIGKIQDSLSSTASALGKLQDVVNQNAQALNTLVKQLSSNFGAISSVLNDILSRLDKVEAEVQIDRLITGRLQSLQTYVTQQLIRAAEIRASANLAATKMSECVLGQSKRVDFCGKGYHLMSFPQSAPHGVVFLHVTYVPAQEKNFTTAPAICHDGKAHFPREGVFVSNGTHWFVTQRNFYEPQIITTDNTFVCGNCDVVIGIVNNTVYDPLQPELDSFKEELDKYFKNHTSPDVDLGDISGINASVVNIQKEIDRLNEVAKNLNESLIDLQELGKYEQYIKGGGGSDIDPYKEFGSSYQLLNFLPLDFFPDLNALVDTATALYEEELTGREHCSPHHTAIRQALVCWDELTKLIAWMSSNITSEQVRTIIVNHVNDTWGLKVRQSLWFHLSCLTFGQHTVQEFLVSFGVWIRTPAPYRPPNAPILSTLPEHTVIC

SEQ ID NO: 13840 - protein, 1365 aa, Artificial Sequence
  SARS-CoV-2/Australia/NSW56/2020__EPI_ISL_417408 spike protein (1-1211)(N914C_S1123C) WhcAg construct
MFVFLVLLPLVSSQCVNLTTRTQLPPAYTNSFTRGVYYPDKVFRSSVLHSTQDLFLPFFSNVTWFHAIHVSGTNGTKRFDNPVLPFNDGVYFASTEKSNIIRGWIFGTTLDSKTQSLLIVNNATNVVIKVCEFQFCNDPFLGVYYHKNNKSWMESEFRVYSSANNCTFEYVSQPFLMDLEGKQGNFKNLREFVFKNIDGYFKIYSKHTPINLVRDLPQGFSALEPLVDLPIGINITRFQTLLALHRSYLTPGDSSSGWTAGAAAYYVGYLQPRTFLLKYNENGTITDAVDCALDPLSETKCTLKSFTVEKGIYQTSNFRVQPTESIVRFPNITNLCPFGEVFNATRFASVYAWNRKRISNCVADYSVLYNSASFSTFKCYGVSPTKLNDLCFTNVYADSFVIRGDEVRQIAPGQTGKIADYNYKLPDDFTGCVIAWNSNNLDSKVGGNYNYLYRLFRKSNLKPFERDISTEIYQAGSTPCNGVEGFNCYFPLQSYGFQPTNGVGYQPYRVVVLSFELLHAPATVCGPKKSTNLVKNKCVNFNFNGLTGTGVLTESNKKFLPFQQFGRDIADTTDAVRDPQTLEILDITPCSFGGVSVITPGTNTSNQVAVLYQDVNCTEVPVAIHADQLTPTWRVYSTGSNVFQTRAGCLIGAEHVNNSYECDIPIGAGICASYQTQTNSPRRARSVASQSIIAYTMSLGAENSVAYSNNSIAIPTNFTISVTTEILPVSMTKTSVDCTMYICGDSTECSNLLLQYGSFCTQLNRALTGIAVEQDKNTQEVFAQVKQIYKTPPIKDFGGFNFSQILPDSSKPSKRSFIEDLLFNKVTLADAGFIKQYGDCLGDIAARDLICAQKFNGLTVLPPLLTDEMIAQYTSALLAGTITSGWTFGAGAALQIPFAMQMAYRFNGIGVTQCVLYENQKLIANQFNSAIGKIQDSLSSTASALGKLQDVVNQNAQALNTLVKQLSSNFGAISSVLNDILSRLDKVEAEVQIDRLITGRLQSLQTYVTQQLIRAAEIRASANLAATKMSECVLGQSKRVDFCGKGYHLMSFPQSAPHGVVFLHVTYVPAQEKNFTTAPAICHDGKAHFPREGVFVSNGTHWFVTQRNFYEPQIITTDNTFVCGNCDVVIGIVNNTVYDPLQPELDSFKEELDKYFKNHTSPDVDLGDISGINASVVNIQKEIDRLNEVAKNLNESLIDLQELGKYEQYIKGGGGSDIDPYKEFGSSYQLLNFLPLDFFPDLNALVDTATALYEEELTGREHCSPHHTAIRQALVCWDELTKLIAWMSSNITSEQVRTIIVNHVNDTWGLKVRQSLWFHLSCLTFGQHTVQEFLVSFGVWIRTPAPYRPPNAPILSTLPEHTVIC

SEQ ID NO: 13841 - protein, 1365 aa, Artificial Sequence
  SARS-CoV-2/Iceland/280/2020__EPI_ISL_417608 spike protein (1-1211)(N914C_S1123C) WhcAg construct
MFVFLVLLPLVSSQCVNLTTRTQLPPAYTNSFTRGVYYPDKVFRSSVLHSTQDLFLPFFSNVTWFHAIHVSGTNGTKRFDNPVLPFNDGVYFASTEKSNIIRGWIFGTTLDSKTQSLLIVNNATNVVIKVCEFQFCNDPFLGVYYHKNNKSWMESEFRVYSSANNCTFEYVSQPFLMDLEGKQGNFKNLREFVFKNIDGYFKIYSKHTPINLVRDLPQGFSALEPLVDLPIGINITRFQTLLALHRSYLTPGDSSSGWTAGAAAYYVGYLQPRTFLLKYNENGTITDAVDCALDPLSETKCTLKSFTVEKGIYQTSNFRVQPTESIVRFPNITNLCPFGEVFNATRFASVYAWNRKRISNCVADYSVLYNSASFSTFKCYGVSPTKLNDLCFTNVYADSFVIRGDEVRQIAPGQTGKIADYNYKLPDDFTGCVIAWNSNNLDSKVGGNYNYLYRLFRKSNLKPFERDISTEIYQAGSTPCNGVEGFNCYFPLQSYGFQPTNGVGYQPYRVVVLSFELLHAPATVCGPKKSTNLVKNKCVNFNFNGLTGTGVLTESNKKFLPFQQFGRDIADTTDAVRDPQTLEILDITPCSFGGVSVITPGTNTSNQVAVLYQGVNCTEVPVAIHADQLTPTWRVYSTGSNVFQTRAGCLIGAEHVNNSYECDIPIGAGICASYHTQTNSPRRARSVASQSIIAYTMSLGAENSVAYSNNSIAIPTNFTISVTTEILPVSMTKTSVDCTMYICGDSTECSNLLLQYGSFCTQLNRALTGIAVEQDKNTQEVFAQVKQIYKTPPIKDFGGFNFSQILPDPSKPSKRSFIEDLLFNKVTLADAGFIKQYGDCLGDIAARDLICAQKFNGLTVLPPLLTDEMIAQYTSALLAGTITSGWTFGAGAALQIPFAMQMAYRFNGIGVTQCVLYENQKLIANQFNSAIGKIQDSLSSTASALGKLQDVVNQNAQALNTLVKQLSSNFGAISSVLNDILSRLDKVEAEVQIDRLITGRLQSLQTYVTQQLIRAAEIRASANLAATKMSECVLGQSKRVDFCGKGYHLMSFPQSAPHGVVFLHVTYVPAQEKNFTTAPAICHDGKAHFPREGVFVSNGTHWFVTQRNFYEPQIITTDNTFVCGNCDVVIGIVNNTVYDPLQPELDSFKEELDKYFKNHTSPDVDLGDISGINASVVNIQKEIDRLNEVAKNLNESLIDLQELGKYEQYIKGGGGSDIDPYKEFGSSYQLLNFLPLDFFPDLNALVDTATALYEEELTGREHCSPHHTAIRQALVCWDELTKLIAWMSSNITSEQVRTIIVNHVNDTWGLKVRQSLWFHLSCLTFGQHTVQEFLVSFGVWIRTPAPYRPPNAPILSTLPEHTVIC

SEQ ID NO: 13842 - protein, 1365 aa, Artificial Sequence; identical to SEQ ID NO: 13797
  SARS-CoV-2/Iceland/247/2020__EPI_ISL_417575 spike protein (1-1211)(N914C_S1123C) WhcAg construct

SEQ ID NO: 13843 - protein, 1365 aa, Artificial Sequence
  SARS-CoV-2/Iceland/238/2020__EPI_ISL_417566 spike protein (1-1211)(N914C_S1123C) WhcAg construct
MFVFLVLLPLVSSQCVNLTTRTQLPPAYTNSFTRGVYYPDKVFRSSVLHSTQDLFLPFFSNVTWFHAIHVSGTNGTKRFDNPVLPFNDGVYFASTEKSNIIRGWIFGTTLDSKTQSLLIVNNATNVVIKVCEFQFCNDPFLGVYYHKNNKSWMESEFRVYSSANNCTFEYVSQPFLMDLEGKQGNFKNLREFVFKNIDGYFKIYSKHTPINLVRDLPQGFSALEPLVDLPIGINITRFQTLLALHRSYLTPGDSSSGWTAGAAAYYVGYLQPRTFLLKYNENGTITDAVDCALDPLSETKCTLKSFTVEKGIYQTSNFRVQPTESIVRFPNITNLCPFGEVFNATRFASVYAWNRKRISNCVADYSVLYNSASFSTFKCYGVSPTKLNDLCFTNVYADSFVIRGDEVRQIAPGQTGKIADYNYKLPDDFTGCVIAWNSNNLDSKVGGNYNYLYRLFRKSNLKPFERDISTEIYQAGSTPCNGVEGFNCYFPLQSYGFQPTNGVGYQPYRVVVLSFELLHAPATVCGPKKSTNLVKNKCVNFNFNGLTGTGVLTESNKKFLPFQQFGRDIADTTDAVRDPQTLEILDITPCSFGGVSVITPGTNTSNQVAVLYQGVNCTEVPVAIHADQLTPTWRVYSTGSNVFQTRAGCLIGAEHVNNSYECDIPIGAGICASYQTQTNSPRRARSVASQSIIAYTMSLGAENSVAYSNNSIAIPTNFTISVTTEILPVSMTKTSVDCTMYICGDSTECSNLLLQYGSFCTQLNRALTGIAVEQDKNTQEVFAQVKQIYKTPPIKDFGGFNFSQILPDPSKPSKRSFIEDLLFNKVTLADVGFIKQYGDCLGDIAARDLICAQKFNGLTVLPPLLTDEMIAQYTSALLAGTITSGWTFGAGAALQIPFAMQMAYRFNGIGVTQCVLYENQKLIANQFNSAIGKIQDSLSSTASALGKLQDVVNQNAQALNTLVKQLSSNFGAISSVLNDILSRLDKVEAEVQIDRLITGRLQSLQTYVTQQLIRAAEIRASANLAATKMSECVLGQSKRVDFCGKGYHLMSFPQSAPHGVVFLHVTYVPAQEKNFTTAPAICHDGKAHFPREGVFVSNGTHWFVTQRNFYEPQIITTDNTFVCGNCDVVIGIVNNTVYDPLQPELDSFKEELDKYFKNHTSPDVDLGDISGINASVVNIQKEIDRLNEVAKNLNESLIDLQELGKYEQYIKGGGGSDIDPYKEFGSSYQLLNFLPLDFFPDLNALVDTATALYEEELTGREHCSPHHTAIRQALVCWDELTKLIAWMSSNITSEQVRTIIVNHVNDTWGLKVRQSLWFHLSCLTFGQHTVQEFLVSFGVWIRTPAPYRPPNAPILSTLPEHTVIC

SEQ ID NO: 13844 - protein, 1365 aa, Artificial Sequence
  SARS-CoV-2/Greece/16/2020__EPI_ISL_418265 spike protein (1-1211)(N914C_S1123C) WhcAg construct
MFVFLVLLPLVSSQCVNLTTRTQLPPAYTNSFTRGVYYPDKVFRSSVLHSTQDLFLPFFSNVTWFHAIHVSGTNGTKRFDNPVLPFNDGVYFASTEKSNIIRGWIFGTTLDSKTQSLLIVNNATNVVIKVCEFQFCNDPFLGVYYHKNNKSWMESEFRVYSSANNCTFEYVSQPFLMDLEGKQGNFKNLREFVFKNVDGYFKIYSKHTPINLVRDLPQGFSALEPLVDLPIGINITRFQTLLALHRSYLTPGDSSSGWTAGAAAYYVGYLQPRTFLLKYNENGTITDAVDCALDPLSETKCTLKSFTVEKGIYQTSNFRVQPTESIVRFPNITNLCPFGEVFNATRFASVYAWNRKRISNCVADYSVLYNSASFSTFKCYGVSPTKLNDLCFTNVYADSFVIRGDEVRQIAPGQTGKIADYNYKLPDDFTGCVIAWNSNNLDSKVGGNYNYLYRLFRKSNLKPFERDISTEIYQAGSTPCNGVEGFNCYFPLQSYGFQPTNGVGYQPYRVVVLSFELLHAPATVCGPKKSTNLVKNKCVNFNFNGLTGTGVLTESNKKFLPFQQFGRDIADTTDAVRDPQTLEILDITPCSFGGVSVITPGTNTSNQVAVLYQDVNCTEVPVAIHADQLTPTWRVYSTGSNVFQTRAGCLIGAEHVNNSYECDIPIGAGICASYQTQTNSPRRARSVASQSIIAYTMSLGAENSVAYSNNSIAIPTNFTISVTTEILPVSMTKTSVDCTMYICGDSTECSNLLLQYGSFCTQLNRALTGIAVEQDKNTQEVFAQVKQIYKTPPIKDFGGFNFSQILPDPSKPSKRSFIEDLLFNKVTLADAGFIKQYGDCLGDIAARDLICAQKFNGLTVLPPLLTDEMIAQYTSALLAGTITSGWTFGAGAALQIPFAMQMAYRFNGIGVTQCVLYENQKLIANQFNSAIGKIQDSLSSTASALGKLQDVVNQNAQALNTLVKQLSSNFGAISSVLNDILSRLDKVEAEVQIDRLITGRLQSLQTYVTQQLIRAAEIRASANLAATKMSECVLGQSKRVDFCGKGYHLMSFPQSAPHGVVFLHVTYVPAQEKNFTTAPAICHDGKAHFPREGVFVSNGTHWFVTQRNFYEPQIITTDNTFVCGNCDVVIGIVNNTVYDPLQPELDSFKEELDKYFKNHTSPDVDLGDISGINASVVNIQKEIDRLNEVAKNLNESLIDLQELGKYEQYIKGGGGSDIDPYKEFGSSYQLLNFLPLDFFPDLNALVDTATALYEEELTGREHCSPHHTAIRQALVCWDELTKLIAWMSSNITSEQVRTIIVNHVNDTWGLKVRQSLWFHLSCLTFGQHTVQEFLVSFGVWIRTPAPYRPPNAPILSTLPEHTVIC

SEQ ID NO: 13845 - protein, 1365 aa, Artificial Sequence
  SARS-CoV-2/Iceland/319/2020__EPI_ISL_417648 spike protein (1-1211)(N914C_S1123C) WhcAg construct
MFVFLVLLPLVSSQCVNLTTRTQLPPAYTNSFTRGVYYPDKVFRSSVLHSTQDLFLPFFSNVTWFHAIHVSGTNGTKRFDNPVLPFNDGVYFASTEKSNIIRGWIFGTTLDSKTQSLLIVNNATNVVIKVCEFQFCNDPFLGVYYHKNNKSWMESEFRVYSSANNCTFEYVSQPFLIDLEGKQGNFKNLREFVFKNIDGYFKIYSKHTPINLVRDLPQGFSALEPLVDLPIGINITRFQTLLALHRSYLTPGDSSSGWTAGAAAYYVGYLQPRTFLLKYNENGTITDAVDCALDPLSETKCTLKSFTVEKGIYQTSNFRVQPTESIVRFPNITNLCPFGEVFNATRFASVYAWNRKRISNCVADYSVLYNSASFSTFKCYGVSPTKLNDLCFTNVYADSFVIRGDEVRQIAPGQTGKIADYNYKLPDDFTGCVIAWNSNNLDSKVGGNYNYLYRLFRKSNLKPFERDISTEIYQAGSTPCNGVEGFNCYFPLQSYGFQPTNGVGYQPYRVVVLSFELLHAPATVCGPKKSTNLVKNKCVNFNFNGLTGTGVLTESNKKFLPFQQFGRDIADTTDAVRDPQTLEILDITPCSFGGVSVITPGTNTSNQVAVLYQGVNCTEVPVAIHADQLTPTWRVYSTGSNVFQTRAGCLIGAEHVNNSYECDIPIGAGICASYQTQTNSPRRARSVASQSIIAYTMSLGAENSVAYSNNSIAIPTNFTISVTTEILPVSMTKTSVDCTMYICGDSTECSNLLLQYGSFCTQLNRALTGIAVEQDKNTQEVFAQVKQIYKTPPIKDFGGFNFSQILPDPSKPSKRSFIEDLLFNKVTLADAGFIKQYGDCLGDIAARDLICAQKFNGLTVLPPLLTDEMIAQYTSALLAGTITSGWTFGAGAALQIPFAMQMAYRFNGIGVTQCVLYENQKLIANQFNSAIGKIQDSLSSTASALGKLQDVVNQNAQALNTLVKQLSSNFGAISSVLNDILSRLDKVEAEVQIDRLITGRLQSLQTYVTQQLIRAAEIRASANLAATKMSECVLGQSKRVDFCGKGYHLMSFPQSAPHGVVFLHVTYVPAQEKNFTTAPAICHDGKAHFPREGVFVSNGTHWFVTQRNFYEPQIITTDNTFVCGNCDVVIGIVNNTVYDPLQPELDSFKEELDKYFKNHTSPDVDLGDISGINASVVNIQKEIDRLNEVAKNLNESLIDLQELGKYEQYIKGGGGSDIDPYKEFGSSYQLLNFLPLDFFPDLNALVDTATALYEEELTGREHCSPHHTAIRQALVCWDELTKLIAWMSSNITSEQVRTIIVNHVNDTWGLKVRQSLWFHLSCLTFGQHTVQEFLVSFGVWIRTPAPYRPPNAPILSTLPEHTVIC

SEQ ID NO: 13846 - protein, 1365 aa, Artificial Sequence
  SARS-CoV-2/Congo/94/2020__EPI_ISL_417947 spike protein (1-1211)(N914C_S1123C) WhcAg construct
MFVFLVLLPLVSSQCVNLTTRTQLPPAYTNSFTRGVYYPDKVFRSSVLHSTQDLFLPFFSNVTWFHAIHVSGTNGTKRFDNPVLPFNDGVYFASTEKSNIIRGWIFGTTLDSKTQSLLIVNNATNVVIKVCEFQFCNDPFLGVYYHKNNKSWMESEFRVYSSANNCTFEYVSQPFLMDLEGKQGNFKNLREFVFKNIDGYFKIYSKHTPINLVRDLPQGFSALEPLVDLPIGINITRFQTLLALHRSYLTPGDSSSGWTAGAAAYYVGYLQPRTFLLKYNENGTITDAVDCALDPLSETKCTLKSFTVEKGIYQTSNFRVQPTESIVRFPNITNLCPFGEVFNATRFASVYAWNRKRISNCVADYSVLYNSASFSTFKCYGVSPTKLNDLCFTNVYADSFVIRGDEVRQIAPGQTGKIADYNYKLPDDFTGCVIAWNSNNLDSKVGGNYNYLYRLFRKSNLKPFERDISTEIYQAGSTPCNGVEGFNCYFPLQSYGFQPTNGVGYQPYRVVVLSFELLHAPATVCGPKKSTNLVKNKCVNFNFNGLTGTGVLTESNKKFLPFQQFGRDIADTTDAVRDPQTLEILDITPCSFGGVSVITPGTNTSNQVAVLYQGVNCTEVPVAIHADQLTPTWRVYSTGSNVFQTRAGCLIGAEHVNNSYECDIPIGAGICASYQTQTNSPRRARSVASQSIIAYTMSLGAENSVAYSNNSIAIPTNFTISVTTEILPVSMTKTSVDCTMYICGDSTECSNLLLQYGSFCTQLNRALTGIAVEQDKNTQEVFAQVKQIYKTPPIKDFGGFNFSQILPDPSKPSKRSFIEDILFNKVTLADAGFIKQYGDCLGDIAARDLICAQKFNGLTVLPPLLTDEMIAQYTSALLAGTITSGWTFGAGAALQIPFAMQMAYRFNGIGVTQCVLYENQKLIANQFNSAIGKIQDSLSSTASALGKLQDVVNQNAQALNTLVKQLSSNFGAISSVLNDILSRLDKVEAEVQIDRLITGRLQSLQTYVTQQLIRAAEIRASANLAATKMSECVLGQSKRVDFCGKGYHLMSFPQSAPHGVVFLHVTYVPAQEKNFTTAPAICHDGKAHFPREGVFVSNGTHWFVTQRNFYEPQIITTDNTFVCGNCDVVIGIVNNTVYDPLQPELDSFKEELDKYFKNHTSPDVDLGDISGINASVVNIQKEIDRLNEVAKNLNESLIDLQELGKYEQYIKGGGGSDIDPYKEFGSSYQLLNFLPLDFFPDLNALVDTATALYEEELTGREHCSPHHTAIRQALVCWDELTKLIAWMSSNITSEQVRTIIVNHVNDTWGLKVRQSLWFHLSCLTFGQHTVQEFLVSFGVWIRTPAPYRPPNAPILSTLPEHTVIC

SEQ ID NO: 13847 - protein, 1365 aa, Artificial Sequence
  SARS-CoV-2/Congo/158/2020__EPI_ISL_417950 spike protein (1-1211)(N914C_S1123C) WhcAg construct
MFVFLVLLPLVSSQCVNLTTRTQLPPAYTNSFTRGVYYPDKVFRSSVLHSTQDLFLPFFSNVTWFHAIHVSGTNGTKRFDNPVLPFNDGVYFASTEKSNIIRGWIFGTTLDSKTQSLLIVNNATNVVIKVCEFQFCNDPFLGVYYHKNNKSWMESEFRVYSSANNCTFEYVSQPFLMDLEGKQGNFKNLREFVFKNIDGYFKIYSKHTPINLVRDLPQGFSALEPLVDLPIGINITRFQTLLALHRSYLTPGDSSSGWTAGAAAYYVGYLQPRTFLLKYNENGTITDAVDCALDPLSETKCTLKSFTVEKGIYQTSNFRVQPTESIVRFPNITNLCPFGEVFNATRFASVYAWNRKRISNCVADYSVLYNSASFSTFKCYGVSPTKLNDLCFTNVYADSFVIRGDEVRQIAPGQTGKIADYNYKLPDDFTGCVIAWNSNNLDSKVGGNYNYLYRLFRKSNLKPFERDISTEIYQAGSTPCNGVEGFNCYFPLQSYGFQPTNGVGYQPYRVVVLSFELLHAPATVCGPKKSTNLVKNKCVNFNFNGLTGTGVLTESNKKFLPFQQFGRDIADTTDAVRDPQTLEILDITPCSFGGVSVITPGTNTSNQVAVLYQDVNCTEVPVAIHADQLTPTWRVYSTGSNVFQTRAGCLIGAEHVNNSYECDIPIGAGICASYQTQTNSPRRARSVASQSIIAYTMSLGAENSVAYSNNSIAIPTNFTISVTTEILPVSMTKTSVDCTMYICGDSTECSNLLLQYGSFCTQLNRALTGIAVEQDKNTQEVFAQVKQIYKTPPIKDFGGFNFSQILPDPSKPSKRSFIEDLLFNKVTLADAGFIKQYGDCLGDIAARDLICAQKFNGLTVLPPLLTDEMIAQYTSALLAGTITSGWTFGAGAALQIPFAMQMAYRFNGIGVTQCVLYENQKLIANQFNSAIGKIQDSLSSTASALGKLQDVVNQNAQALNTLVKQLSSNFGAISSVLNDILSRLDKVEAEVQIDRLITGRLQSLQTYVTQQLIRAAEIRASANLAATKMSECVLGQSKRVDFCGKGYHLMSFPQSAPHGVVFLHVTYVPAQEKNFTTAPAICHDGKAHFPREGVFVSNGTHWFVTQRNFYEPQIITTDNTFLCGNCDVVIGIVNNTVYDPLQPELDSFKEELDKYFKNHTSPDVDLGDISGINASVVNIQKEIDRLNEVAKNLNESLIDLQELGKYEQYIKGGGGSDIDPYKEFGSSYQLLNFLPLDFFPDLNALVDTATALYEEELTGREHCSPHHTAIRQALVCWDELTKLIAWMSSNITSEQVRTIIVNHVNDTWGLKVRQSLWFHLSCLTFGQHTVQEFLVSFGVWIRTPAPYRPPNAPILSTLPEHTVIC

SEQ ID NO: 13848 - protein, 1365 aa, Artificial Sequence
  SARS-CoV-2/USA/UT-00034/2020__EPI_ISL_417977 spike protein (1-1211)(N914C_S1123C) WhcAg construct
MFVFLVLLPLVSSQCVNLTTRTQLPPAYTNSFTRGVYYPDKVFRSSVLHSTQDLFLPFFSNVTWFHAIHVSGTNGTKRFDNPVLPFNDGVYFASTEKSNIIRGWIFGTTLDSKTQSLLIVNNATNVVIKVCEFQFCNDPFLGVYYYKNNKSWMESEFRVYSSANNCTFEYVSQPFLMDLEGKQGNFKNLREFVFKNIDGYFKIYSKHTPINLVRDLPQGFSALEPLVDLPIGINITRFQTLLALHRSYLTPGDSSSGWTAGAAAYYVGYLQPRTFLLKYNENGTITDAVDCALDPLSETKCTLKSFTVEKGIYQTSNFRVQPTESIVRFPNITNLCPFGEVFNATRFASVYAWNRKRISNCVADYSVLYNSASFSTFKCYGVSPTKLNDLCFTNVYADSFVIRGDEVRQIAPGQTGKIADYNYKLPDDFTGCVIAWNSNNLDSKVGGNYNYLYRLFRKSNLKPFERDISTEIYQAGSTPCNGVEGFNCYFPLQSYGFQPTNGVGYQPYRVVVLSFELLHAPATVCGPKKSTNLVKNKCVNFNFNGLTGTGVLTESNKKFLPFQQFGRDIADTTDAVRDPQTLEILDITPCSFGGVSVITPGTNTSNQVAVLYQGVNCTEVPVAIHADQLTPTWRVYSTGSNVFQTRAGCLIGAEHVNNSYECDIPIGAGICASYQTQTNSPRRARSVASQSIIAYTMSLGAENSVAYSNNSIAIPTNFTISVTTEILPVSMTKTSVDCTMYICGDSTECSNLLLQYGSFCTQLNRALTGIAVEQDKNTQEVFAQVKQIYKTPPIKDFGGFNFSQILPDPSKPSKRSFIEDLLFNKVTLADAGFIKQYGDCLGDIAARDLICAQKFNGLTVLPPLLTDEMIAQYTSALLAGTITSGWTFGAGAALQIPFAMQMAYRFNGIGVTQCVLYENQKLIANQFNSAIGKIQDSLSSTASALGKLQDVVNQNAQALNTLVKQLSSNFGAISSVLNDILSRLDKVEAEVQIDRLITGRLQSLQTYVTQQLIRAAEIRASANLAATKMSECVLGQSKRVDFCGKGYHLMSFPQSAPHGVVFLHVTYVPAQEKNFTTAPAICHDGKAHFPREGVFVSNGTHWFVTQRNFYEPQIITTDNTFVCGNCDVVIGIVNNTVYDPLQPELDSFKEELDKYFKNHTSPDVDLGDISGINASVVNIQKEIDRLNEVAKNLNESLIDLQELGKYEQYIKGGGGSDIDPYKEFGSSYQLLNFLPLDFFPDLNALVDTATALYEEELTGREHCSPHHTAIRQALVCWDELTKLIAWMSSNITSEQVRTIIVNHVNDTWGLKVRQSLWFHLSCLTFGQHTVQEFLVSFGVWIRTPAPYRPPNAPILSTLPEHTVIC

SEQ ID NO: 13849 - protein, 1365 aa, Artificial Sequence
  SARS-CoV-2/USA/UT-00033/2020__EPI_ISL_417976 spike protein (1-1211)(N914C_S1123C) WhcAg construct
MFVFLVLLPLVSSQCVNLTTRTQLPPAYTNSFTRGVYYPDKVFRSSVLHSTQDLFLPFFSNVTWFHAIHVSGTNGTKRFDNPVLPFNDGVYFASTEKSNIIRGWIFGTTLDSKTQSLLIVNNATNVVIKVCEFQFCNDPFLGVYYHKNNKSWMESEFRVYSSANNCTFEYVSQPFLMDLEGKQGNFKNLREFVFKNIDGYFKIYSKHTPINLVRDLPQGFSALEPLVDLPIGINITRFQTLLALHRSYLTPGDSSSGLTAGAAAYYVGYLQPRTFLLKYNENGTITDAVDCALDPLSETKCTLKSFTVEKGIYQTSNFRVQPTESIVRFPNITNLCPFGEVFNATRFASVYAWNRKRISNCVADYSVLYNSASFSTFKCYGVSPTKLNDLCFTNVYADSFVIRGDEVRQIAPGQTGKIADYNYKLPDDFTGCVIAWNSNNLDSKVGGNYNYLYRLFRKSNLKPFERDISTEIYQAGSTPCNGVEGFNCYFPLQSYGFQPTNGVGYQPYRVVVLSFELLHAPATVCGPKKSTNLVKNKCVNFNFNGLTGTGVLTESNKKFLPFQQFGRDIADTTDAVRDPQTLEILDITPCSFGGVSVITPGTNTSNQVAVLYQGVNCTEVPVAIHADQLTPTWRVYSTGSNVFQTRAGCLIGAEHVNNSYECDIPIGAGICASYQTQTNSPRRARSVASQSIIAYTMSLGAENSVAYSNNSIAIPTNFTISVTTEILPVSMTKTSVDCTMYICGDSTECSNLLLQYGSFCTQLNRALTGIAVEQDKNTQEVFAQVKQIYKTPPIKDFGGFNFSQILPDPSKPSKRSFIEDLLFNKVTLADAGFIKQYGDCLGDIAARDLICAQKFNGLTVLPPLLTDEMIAQYTSALLAGTITSGWTFGAGAALQIPFAMQMAYRFNGIGVTQCVLYENQKLIANQFNSAIGKIQDSLSSTASALGKLQDVVNQNAQALNTLVKQLSSNFGAISSVLNDILSRLDKVEAEVQIDRLITGRLQSLQTYVTQQLIRAAEIRASANLAATKMSECVLGQSKRVDFCGKGYHLMSFPQSAPHGVVFLHVTYVPAQEKNFTTAPAICHDGKAHFPREGVFVSNGTHWFVTQRNFYEPQIITTDNTFVCGNCDVVIGIVNNTVYDPLQPELDSFKEELDKYFKNHTSPDVDLGDISGINASVVNIQKEIDRLNEVAKNLNESLIDLQELGKYEQYIKGGGGSDIDPYKEFGSSYQLLNFLPLDFFPDLNALVDTATALYEEELTGREHCSPHHTAIRQALVCWDELTKLIAWMSSNITSEQVRTIIVNHVNDTWGLKVRQSLWFHLSCLTFGQHTVQEFLVSFGVWIRTPAPYRPPNAPILSTLPEHTVIC

SEQ ID NO: 13850 - protein, 1365 aa, Artificial Sequence
  SARS-CoV-2/USA/WI-13/2020__EPI_ISL_417516 spike protein (1-1211)(N914C_S1123C) WhcAg construct
MFVFLVLLPLVSSQCVNLTTRTQLPPAYTNSFTRGVYYPDKVFRSSVLHSTQDLFLPFFSNVTWFHAIHVSGTNGTKRFDNPVLPFNDGVYFASTEKSNIIRGWIFGTTLDSKTQSLLIVNNATNVVIKVCEFQFCNDPFLGVYYHKNNKSWMESEFRVYSSANNCTFEYVSQPFLMDLEGKQGNFKNLREFVFKNIDGYFKIYSKHTPINLVRDLPQGFSALEPLVDLPIGINITRFQTLLALHRSYLTPGDSSSGWTAGAAAYYVGYLQPRTFLLKYNENGTITDAVDCALDPLSETKCTLKSFTVEKGIYQTSNFRVLPTESIVRFPNITNLCPFGEVFNATRFASVYAWNRKRISNCVADYSVLYNSASFSTFKCYGVSPTKLNDLCFTNVYADSFVIRGDEVRQIAPGQTGKIADYNYKLPDDFTGCVIAWNSNNLDSKVGGNYNYLYRLFRKSNLKPFERDISTEIYQAGSTPCNGVEGFNCYFPLQSYGFQPTNGVGYQPYRVVVLSFELLHAPATVCGPKKSTNLVKNKCVNFNFNGLTGTGVLTESNKKFLPFQQFGRDIADTTDAVRDPQTLEILDITPCSFGGVSVITPGTNTSNQVAVLYQGVNCTEVPVAIHADQLTPTWRVYSTGSNVFQTRAGCLIGAEHVNNSYECDIPIGAGICASYQTQTNSPRRARSVASQSIIAYTMSLGAENSVAYSNNSIAIPTNFTISVTTEILPVSMTKTSVDCTMYICGDSTECSNLLLQYGSFCTQLNRALTGIAVEQDKNTQEVFAQVKQIYKTPPIKDFGGFNFSQILPDPSKPSKRSFIEDLLFNKVTLADAGFIKQYGDCLGDIAARDLICAQKFNGLTVLPPLLTDEMIAQYTSALLAGTITSGWTFGAGAALQIPFAMQMAYRFNGIGVTQCVLYENQKLIANQFNSAIGKIQDSLSSTASALGKLQDVVNQNAQALNTLVKQLSSNFGAISSVLNDILSRLDKVEAEVQIDRLITGRLQSLQTYVTQQLIRAAEIRASANLAATKMSECVLGQSKRVDFCGKGYHLMSFPQSAPHGVVFLHVTYVPAQEKNFTTAPAICHDGKAHFPREGVFVSNGTHWFVTQRNFYEPQIITTDNTFVCGNCDVVIGIVNNTVYDPLQPELDSFKEELDKYFKNHTSPDVDLGDISGINASVVNIQKEIDRLNEVAKNLNESLIDLQELGKYEQYIKGGGGSDIDPYKEFGSSYQLLNFLPLDFFPDLNALVDTATALYEEELTGREHCSPHHTAIRQALVCWDELTKLIAWMSSNITSEQVRTIIVNHVNDTWGLKVRQSLWFHLSCLTFGQHTVQEFLVSFGVWIRTPAPYRPPNAPILSTLPEHTVIC

SEQ ID NO: 13851 - protein, 1364 aa, Artificial Sequence
  SARS-CoV-2/India/1-27/2020__EPI_ISL_413522 spike protein (1-1210)(N913C_S1122C) WhcAg construct
MFVFLVLLPLVSSQCVNLTTRTQLPPAYTNSFTRGVYYPDKVFRSSVLHSTQDLFLPFFSNVTWFHAIHVSGTNGTKRFDNPVLPFNDGVYFASTEKSNIIRGWIFGTTLDSKTQSLLIVNNATNVVIKVCEFQFCNDPFLGVYHKNNKSWMESEFRVYSSANNCTFEYVSQPFLMDLEGKQGNFKNLREFVFKNIDGYFKIYSKHTPINLVRDLPQGFSALEPLVDLPIGINITRFQTLLALHRSYLTPGDSSSGWTAGAAAYYVGYLQPRTFLLKYNENGTITDAVDCALDPLSETKCTLKSFTVEKGIYQTSNFRVQPTESIVRFPNITNLCPFGEVFNATRFASVYAWNRKRISNCVADYSVLYNSASFSTFKCYGVSPTKLNDLCFTNVYADSFVIRGDEVIQIAPGQTGKIADYNYKLPDDFTGCVIAWNSNNLDSKVGGNYNYLYRLFRKSNLKPFERDISTEIYQAGSTPCNGVEGFNCYFPLQSYGFQPTNGVGYQPYRVVVLSFELLHAPATVCGPKKSTNLVKNKCVNFNFNGLTGTGVLTESNKKFLPFQQFGRDIADTTDAVRDPQTLEILDITPCSFGGVSVITPGTNTSNQVAVLYQDVNCTEVPVAIHADQLTPTWRVYSTGSNVFQTRAGCLIGAEHVNNSYECDIPIGAGICASYQTQTNSPRRARSVASQSIIAYTMSLGAENSVAYSNNSIAIPTNFTISVTTEILPVSMTKTSVDCTMYICGDSTECSNLLLQYGSFCTQLNRALTGIAVEQDKNTQEVFAQVKQIYKTPPIKDFGGFNFSQILPDPSKPSKRSFIEDLLFNKVTLADAGFIKQYGDCLGDIAARDLICAQKFNGLTVLPPLLTDEMIAQYTSALLAGTITSGWTFGAGAALQIPFAMQMAYRFNGIGVTQCVLYENQKLIANQFNSAIGKIQDSLSSTASALGKLQDVVNQNAQALNTLVKQLSSNFGAISSVLNDILSRLDKVEAEVQIDRLITGRLQSLQTYVTQQLIRAAEIRASANLAATKMSECVLGQSKRVDFCGKGYHLMSFPQSAPHGVVFLHVTYVPAQEKNFTTAPAICHDGKAHFPREGVFVSNGTHWFVTQRNFYEPQIITTDNTFVCGNCDVVIGIVNNTVYDPLQPELDSFKEELDKYFKNHTSPDVDLGDISGINASVVNIQKEIDRLNEVAKNLNESLIDLQELGKYEQYIKGGGGSDIDPYKEFGSSYQLLNFLPLDFFPDLNALVDTATALYEEELTGREHCSPHHTAIRQALVCWDELTKLIAWMSSNITSEQVRTIIVNHVNDTWGLKVRQSLWFHLSCLTFGQHTVQEFLVSFGVWIRTPAPYRPPNAPILSTLPEHTVIC

SEQ ID NO: 13852 - protein, 1359 aa, Artificial Sequence
  SARS-CoV-2/pangolin/Guangxi/P4L/2017__EPI_ISL_410538 spike protein (1-1205)(N908C_S1117C) WhcAg construct
MFVFLFVLPLVSSQCVNLTTRTGIPPGYTNSSTRGVYYPDKVFRSSILHLTQDLFLPFFSNVTWFNTINYQGGFKKFDNPVLPFNDGVYFASTEKSNIIRGWIFGTTLDARTQSLLIVNNATNVVIKVCEFQFCTDPFLGVYYHNNNKTWVENEFRVYSSANNCTFEYISQPFLMDLEGKQGNFKNLREFVFKNVDGYFKIYSKHTPIDLVRDLPRGFAALEPLVDLPIGINITRFQTLLALHRSYLTPGNLESGWTTGAAAYYVGYLQQRTFLLSYNQNGTITDAVDCSLDPLSETKCTLKSLTVEKGIYQTSNFRVQPTISIVRFPNITNLCPFGEVFNASKFASVYAWNRKRISNCVADYSVLYNSTSFSTFKCYGVSPTKLNDLCFTNVYADSFVVKGDEVRQIAPGQTGVIADYNYKLPDDFTGCVIAWNSVKQDALTGGNYGYLYRLFRKSKLKPFERDISTEIYQAGSTPCNGQVGLNCYYPLERYGFHPTTGVNYQPFRVVVLSFELLNGPATVCGPKLSTTLVKDKCVNFNFNGLTGTGVLTTSKKQFLPFQQFGRDISDTTDAVRDPQTLEILDITPCSFGGVSVITPGTNTSNQVAVLYQDVNCTEVPMAIHAEQLTPAWRVYSAGANVFQTRAGCLVGAEHVNNSYECDIPVGAGICASYHSMSSLRSVNQRSIIAYTMSLGAENSVAYSNNSIAIPTNFTISVTTEILPVSMTKTSVDCTMYICGDSIECSNLLLQYGSFCTQLNRALTGIAVEQDKNTQEVFAQVKQIYKTPPIKDFGGFNFSQILPDPSKPSKRSFIEDLLFNKVTLADAGFIKQYGDCLGDIAARDLICAQKFNGLTVLPPLLTDEMIAQYTSALLAGTITSGWTFGAGAALQIPFAMQMAYRFNGIGVTQCVLYENQKLIANQFNSAIGKIQDSLSSTASALGKLQDVVNQNAQALNTLVKQLSSNFGAISSVLNDILSRLDKVEAEVQIDRLITGRLQSLQTYVTQQLIRAAEIRASANLAATKMSECVLGQSKRVDFCGKGYHLMSFPQSAPHGVVFLHVTYVPAQEKNFTTAPAICHEGKAHFPREGVFVSNGTHWFITQRNFYEPQIITTDNTFVCGSCDVVIGIVNNTVYDPLQPELDSFKEELDKYFKNHTSPDVDLGDISGINASVVNIQKEIDRLNEVAKNLNESPIDLQELGKYEQYIKGGGGSDIDPYKEFGSSYQLLNFLPLDFFPDLNALVDTATALYEEELTGREHCSPHHTAIRQALVCWDELTKLIAWMSSNITSEQVRTIIVNHVNDTWGLKVRQSLWFHLSCLTFGQHTVQEFLVSFGVWIRTPAPYRPPNAPILSTLPEHTVIC

SEQ ID NO: 13853 - protein, 1359 aa, Artificial Sequence
  SARS-CoV-2/pangolin/Guangxi/P5L/2017__EPI_ISL_410540 spike protein (1-1205)(N908C_S1117C) WhcAg construct
MFVFLFVLPLVSSQCVNLTTRTGIPPGYTNSSTRGVYYPDKVFRSSILHLTQDLFLPFFSNVTWFNTINYQGGFKKFDNPVLPFNDGVYFASTEKSNIIRGWIFGTTLDARTQSLLIVNNATNVVIKVCEFQFCTDPFLGVYYHNNNKTWVENEFRVYSSANNCTFEYISQPFLMDLEGKQGNFKNLREFVFKNVDGYFKIYSKHTPIDLVRDLPRGFAALEPLVDLPIGINITRFQTLLALHRSYLTPGKLESGWTTGAAAYYVGYLQQRTFLLSYNQNGTITDAVDCSLDPLSETKCTLKSLTVEKGIYQTSNFRVQPTISIVRFPNITNLCPFGEVFNASKFASVYAWNRKRISNCVADYSVLYNSTSFSTFKCYGVSPTKLNDLCFTNVYADSFVVKGDEVRQIAPGQTGVIADYNYKLPDDFTGCVIAWNSVKQDALTGGNYGYLYRLFRKSKLKPFERDISTEIYQAGSTPCNGQVGLNCYYPLERYGFHPTTGVNYQPFRVVVLSFELLNGPATVCGPKLSTTLVKDKCVNFNFNGLTGTGVLTTSKKQFLPFQQFGRDISDTTDAVRDPQTLEILDITPCSFGGVSVITPGTNTSNQVAVLYQDVNCTEVPMAIHAEQLTPAWRVYSAGANVFQTRAGCLVGAEHVNNSYECDIPVGAGICASYHSMSSFRSVNQRSIIAYTMSLGAENSVAYSNNSIAIPTNFTISVTTEILPVSMTKTSVDCTMYICGDSIECSNLLLQYGSFCTQLNRALTGIAVEQDKNTQEVFAQVKQIYKTPPIKDFGGFNFSQILPDPSKPSKRSFIEDLLFNKVTLADAGFIKQYGDCLGDIAARDLICAQKFNGLTVLPPLLTDEMIAQYTSALLAGTITSGWTFGAGAALQIPFAMQMAYRFNGIGVTQCVLYENQKLIANQFNSAIGKIQDSLSSTASALGKLQDVVNQNAQALNTLVKQLSSNFGAISSVLNDILSRLDKVEAEVQIDRLITGRLQSLQTYVTQQLIRAAEIRASANLAATKMSECVLGQSKRVDFCGKGYHLMSFPQSAPHGVVFLHVTYVPAQEKNFTTAPAICHEGKAHFPREGVFVSNGTHWFITQRNFYEPQIITTDNTFVCGSCDVVIGIVNNTVYDPLQPELDSFKEELDKYFKNHTSPDVDLGDISGINASVVNIQKEIDRLNEVAKNLNESLIDLQELGKYEQYIKGGGGSDIDPYKEFGSSYQLLNFLPLDFFPDLNALVDTATALYEEELTGREHCSPHHTAIRQALVCWDELTKLIAWMSSNITSEQVRTIIVNHVNDTWGLKVRQSLWFHLSCLTFGQHTVQEFLVSFGVWIRTPAPYRPPNAPILSTLPEHTVIC

SEQ ID NO: 13854 - protein, 1359 aa, Artificial Sequence
  SARS-CoV-2/pangolin/Guangxi/P5E/2017__EPI_ISL_410541 spike protein (1-1205)(N908C_S1117C) WhcAg construct
MFVFLFVLPLVSSQCVNLTTRTGIPPGYTNSSTRGVYYPDKVFRSSILHLTQDLFLPFFSNVTWFNTITYQGGSKKFDNPVLPFNDGVYFASTEKSNIIRGWIFGTTLDARTQSLLIVNNATNVVIKVCEFQFCTDPFLGVYYHNNNKTWVENEFRVYSSANNCTFEYISQPFLMDLEGKQGNFKNLREFVFKNVDGYFKIYSKHTPIDLVRDLPRGFAALEPLVDLPIGINITRFQTLLALHRSYLTPGKLESGWTTGAAAYYVGYLQQRTFLLSYNQNGTITDAVDCSLDPLSETKCTLKSLTVEKGIYQTSNFRVQPTISIVRFPNITNLCPFGEVFNASKFASVYAWNRKRISNCVADYSVLYNSTSFSTFKCYGVSPTKLNDLCFTNVYADSFVVKGDEVRQIAPGQTGVIADYNYKLPDDFTGCVIAWNSVKQDALTGDNYGYLYRLFRKSKLKPFERDISTEIYQAGSTPCNGQVGLNCYYPLERYGFHPTTGVNYQPFRVVVLSFELLNGPATVCGPKLSTTLVKDKCVNFNFNGLTGTGVLTTSKKQFLPFQQFGRDISDTTDAVRDPQTLEILDITPCSFGGVSVITPGTNTSNQVAVLYQDVNCTEVPMAIHAEQLTPAWRVYSAGANVFQTRAGCLVGAEHVNNSYECDIPVGAGICASYHSMSSFRSVNQRSIIAYTMSLGAENSVAYSNNSIAIPTNFTISVTTEILPVSMTKTSVDCTMYICGDSIECSNLLLQYGSFCTQLNRALTGIAVEQDKNTQEVFAQVKQIYKTPPIKDFGGFNFSQILPDPSKPSKRSFIEDLLFNKVTLADAGFIKQYGDCLGDIAARDLICAQKFNGLTVLPPLLTDEMIAQYTSALLAGTITSGWTFGAGAALQIPFAMQMAYRFNGIGVTQCVLYENQKLIANQFNSAIGKIQDSLSSTASALGKLQDVVNQNAQALNTLVKQLSSNFGAISSVLNDILSRLDKVEAEVQIDRLITGRLQSLQTYVTQQLIRAAEIRASANLAATKMSECVLGQSKRVDFCGKGYHLMSFPQSAPHGVVFLHVTYVPAQEKNFTTAPAICHEGKAHFPREGVFVSNGTHWFITQRNFYEPQIITTDNTFVCGSCDVVIGIVNNTVYDPLQPELDSFKEELDKYFKNHTSPDVDLGDISGINASVVNIQKEIDRLNEVAKNLNESLIDLQELGKYEQYIKGGGGSDIDPYKEFGSSYQLLNFLPLDFFPDLNALVDTATALYEEELTGREHCSPHHTAIRQALVCWDELTKLIAWMSSNITSEQVRTIIVNHVNDTWGLKVRQSLWFHLSCLTFGQHTVQEFLVSFGVWIRTPAPYRPPNAPILSTLPEHTVIC

SEQ ID NO: 13855 - protein, 1357 aa, Artificial Sequence
  SARS-CoV-2/pangolin/Guangxi/P1E/2017__EPI_ISL_410539 spike protein (1-1203)(N906C_S1115C) WhcAg construct
MFVFLFVLPLVSSQCVNLTTRTGIQPGYTNSSTRGVYYPDKVFRSSILHLTQDLFLPFFSNVTWFNTINYQGGFKKFDNPVLPFNDGVYFASTEKSNIIRGWIFGTTLDARTQSLLIVNNATNVVIKVCEFQFCTDPFLGVYYHNNNKTWVENEFRVYSSANNCTFEYISQPFLMDLEGKQGNFKNLREFVFKNVDGYFKIYSKHTPIDLVRDLPRGFAALEPLVDLPIGINITRFQTLLALHRSYLTPGKLESGWTTGAAAYYVGYLQQRTFLLSYNQNGTITDAVDCSLDPLSETKCTLKSLTVEKGIYQTSNFRVQPTISIVRFPNITNLCPFGEVFNASKFASVYAWNRKRISNCVADYSVLYNSTSFSTFKCYGVSPTKLNDLCFTNVYADSFVVKGDEVRQIAPGQTGVIADYNYKLPDDFTGCVIAWNSVKQDALTGGNYLYRLFRKSKLKPFERDISTEIYQAGSTPCNGQVGLNCYYPLERYGFHPTTGVNYQPFRVVVLSFELLNGPATVCGPKLSTTLVKDKCVNFNFNGLTGTGVLTTSKKQFLPFQQFGRDISDTTDAVRDPQTLEILDITPCSFGGVSVITPGTNTSNQVAVLYQDVNCTEVPMAIHAEQLTPAWRVYSAGANVFQTRAGCLVGAEHVNNSYECDIPVGAGICASYHSMSSLRSVNQRSIIAYTMSLGAENSVAYSNNSIAIPTNFTISVTTEILPVSMTKTSVDCTMYICGDSIECSNLLLQYGSFCTQLNRALTGIAVEQDKNTQEVFAQVKQIYKTPPIKDFGGFNFSQILPDPSKPSKRSFIEDLLFNKVTLADAGFIKQYGDCLGDIAARDLICAQKFNGLTVLPPLLTDEMIAQYTSALLAGTITSGWTFGAGAALQIPFAMQMAYRFNGIGVTQCVLYENQKLIANQFNSAIGKIQDSLSSTASALGKLQDVVNQNAQALNTLVKQLSSNFGAISSVLNDILSRLDKVEAEVQIDRLITGRLQSLQTYVTQQLIRAAEIRASANLAATKMSECVLGQSKRVDFCGKGYHLMSFPQSAPHGVVFLHVTYVPAQEKNFTTAPAICHEGKAHFPREGVFVSNGTHWFITQRNFYEPQIITTDNTFVCGSCDVVIGIVNNTVYDPLQPELDSFKEELDKYFKNHTSPDVDLGDISGINASVVNIQKEIDRLNEVAKNLNESLIDLQELGKYEQYIKGGGGSDIDPYKEFGSSYQLLNFLPLDFFPDLNALVDTATALYEEELTGREHCSPHHTAIRQALVCWDELTKLIAWMSSNITSEQVRTIIVNHVNDTWGLKVRQSLWFHLSCLTFGQHTVQEFLVSFGVWIRTPAPYRPPNAPILSTLPEHTVIC

SEQ ID NO: 13856 - protein, 1307 aa, Artificial Sequence
  SARS-CoV-2/Wuhan/WIV05/2019__EPI_ISL_402128 spike protein (1-1147)(N914C_S1123C) LumSynth construct
MFVFLVLLPLVSSQCVNLTTRTQLPPAYTNSFTRGVYYPDKVFRSSVLHSTQDLFLPFFSNVTWFHAIHVSGTNGTKRFDNPVLPFNDGVYFASTEKSNIIRGWIFGTTLDSKTQSLLIVNNATNVVIKVCEFQFCNDPFLGVYYHKNNKSWMESEFRVYSSANNCTFEYVSQPFLMDLEGKQGNFKNLREFVFKNIDGYFKIYSKHTPINLVRDLPQGFSALEPLVDLPIGINITRFQTLLALHRSYLTPGDSSSGWTAGAAAYYVGYLQPRTFLLKYNENGTITDAVDCALDPLSETKCTLKSFTVEKGIYQTSNFRVQPTESIVRFPNITNLCPFGEVFNATRFASVYAWNRKRISNCVADYSVLYNSASFSTFKCYGVSPTKLNDLCFTNVYADSFVIRGDEVRQIAPGQTGKIADYNYKLPDDFTGCVIAWNSNNLDSKVGGNYNYLYRLFRKSNLKPFERDISTEIYQAGSTPCNGVEGFNCYFPLQSYGFQPTNGVGYQPYRVVVLSFELLHAPATVCGPKKSTNLVKNKCVNFNFNGLTGTGVLTESNKKFLPFQQFGRDIADTTDAVRDPQTLEILDITPCSFGGVSVITPGTNTSNQVAVLYQDVNCTEVPVAIHADQLTPTWRVYSTGSNVFQTRAGCLIGAEHVNNSYECDIPIGAGICASYQTQTNSPRRARSVASQSIIAYTMSLGAENSVAYSNNSIAIPTNFTISVTTEILPVSMTKTSVDCTMYICGDSTECSNLLLQYGSFCTQLNRALTGIAVEQDKNTQEVFAQVKQIYKTPPIKDFGGFNFSQILPDPSKPSKRSFIEDLLFNKVTLADAGFIKQYGDCLGDIAARDLICAQKFNGLTVLPPLLTDEMIAQYTSALLAGTITSGWTFGAGAALQIPFAMQMAYRFNGIGVTQCVLYENQKLIANQFNSAIGKIQDSLSSTASALGKLQDVVNQNAQALNTLVKQLSSNFGAISSVLNDILSRLDKVEAEVQIDRLITGRLQSLQTYVTQQLIRAAEIRASANLAATKMSECVLGQSKRVDFCGKGYHLMSFPQSAPHGVVFLHVTYVPAQEKNFTTAPAICHDGKAHFPREGVFVSNGTHWFVTQRNFYEPQIITTDNTFVCGNCDVVIGIVNNTVYDPLQPELDSGGGSGGGQIYEGKLTAEGLRFGIVASRFNHALVDRLVEGAIDAIVRHGGREEDITLVRVPGSWEIPVAAGELARKEDIDAVIAIGVLIRGATPHFDYIASEVSKGLADLSLELRKPITFGVITADTLEQAIERAGTKHGNKGWEAALSAIEMANLFKSLR

SEQ ID NO: 13857 - protein, 1303 aa, Artificial Sequence
  SARS-CoV-2/bat/Yunnan/RaTG13/2013__EPI_ISL_402131 spike protein (1-1143)(N910C_S1119C) LumSynth construct
MFVFLVLLPLVSSQCVNLTTRTQLPPAYTNSSTRGVYYPDKVFRSSVLHLTQDLFLPFFSNVTWFHAIHVSGTNGIKRFDNPVLPFNDGVYFASTEKSNIIRGWIFGTTLDSKTQSLLIVNNATNVVIKVCEFQFCNDPFLGVYYHKNNKSWMESEFRVYSSANNCTFEYVSQPFLMDLEGKQGNFKNLREFVFKNIDGYFKIYSKHTPINLVRDLPPGFSALEPLVDLPIGINITRFQTLLALHRSYLTPGDSSSGWTAGAAAYYVGYLQPRTFLLKYNENGTITDAVDCALDPLSETKCTLKSFTVEKGIYQTSNFRVQPTDSIVRFPNITNLCPFGEVFNATTFASVYAWNRKRISNCVADYSVLYNSTSFSTFKCYGVSPTKLNDLCFTNVYADSFVITGDEVRQIAPGQTGKIADYNYKLPDDFTGCVIAWNSKHIDAKEGGNFNYLYRLFRKANLKPFERDISTEIYQAGSKPCNGQTGLNCYYPLYRYGFYPTDGVGHQPYRVVVLSFELLNAPATVCGPKKSTNLVKNKCVNFNFNGLTGTGVLTESNKKFLPFQQFGRDIADTTDAVRDPQTLEILDITPCSFGGVSVITPGTNASNQVAVLYQDVNCTEVPVAIHADQLTPTWRVYSTGSNVFQTRAGCLIGAEHVNNSYECDIPIGAGICASYQTQTNSRSVASQSIIAYTMSLGAENSVAYSNNSIAIPTNFTISVTTEILPVSMTKTSVDCTMYICGDSTECSNLLLQYGSFCTQLNRALTGIAVEQDKNTQEVFAQVKQIYKTPPIKDFGGFNFSQILPDPSKPSKRSFIEDLLFNKVTLADAGFIKQYGDCLGDIAARDLICAQKFNGLTVLPPLLTDEMIAQYTSALLAGTITSGWTFGAGAALQIPFAMQMAYRFNGIGVTQCVLYENQKLIANQFNSAIGKIQDSLSSTASALGKLQDVVNQNAQALNTLVKQLSSNFGAISSVLNDILSRLDKVEAEVQIDRLITGRLQSLQTYVTQQLIRAAEIRASANLAATKMSECVLGQSKRVDFCGKGYHLMSFPQSAPHGVVFLHVTYVPAQEKNFTTAPAICHDGKAHFPREGVFVSNGTHWFVTQRNFYEPQIITTDNTFVCGSCDVVIGIVNNTVYDPLQPELDSGGGSGGGQIYEGKLTAEGLRFGIVASRFNHALVDRLVEGAIDAIVRHGGREEDITLVRVPGSWEIPVAAGELARKEDIDAVIAIGVLIRGATPHFDYIASEVSKGLADLSLELRKPITFGVITADTLEQAIERAGTKHGNKGWEAALSAIEMANLFKSLR

SEQ ID NO: 13858 - protein, 1307 aa, Artificial Sequence
  SARS-CoV-2/Wuhan/HBCDC-HB-01/2019__EPI_ISL_402132 spike protein (1-1147)(N914C_S1123C) LumSynth construct
MFVFLVLLPLVSSQCVNLTTRTQLPPAYTNSITRGVYYPDKVFRSSVLHSTQDLFLPFFSNVTWFHAIHVSGTNGTKRFDNPVLPFNDGVYFASTEKSNIIRGWIFGTTLDSKTQSLLIVNNATNVVIKVCEFQFCNDPFLGVYYHKNNKSWMESEFRVYSSANNCTFEYVSQPFLMDLEGKQGNFKNLREFVFKNIDGYFKIYSKHTPINLVRDLPQGFSALEPLVDLPIGINITRFQTLLALHRSYLTPGDSSSGWTAGAAAYYVGYLQPRTFLLKYNENGTITDAVDCALDPLSETKCTLKSFTVEKGIYQTSNFRVQPTESIVRFPNITNLCPFGEVFNATRFASVYAWNRKRISNCVADYSVLYNSASFSTFKCYGVSPTKLNDLCFTNVYADSFVIRGDEVRQIAPGQTGKIADYNYKLPDDFTGCVIAWNSNNLDSKVGGNYNYLYRLFRKSNLKPFERDISTEIYQAGSTPCNGVEGFNCYFPLQSYGFQPTNGVGYQPYRVVVLSFELLHAPATVCGPKKSTNLVKNKCVNFNFNGLTGTGVLTESNKKFLPFQQFGRDIADTTDAVRDPQTLEILDITPCSFGGVSVITPGTNTSNQVAVLYQDVNCTEVPVAIHADQLTPTWRVYSTGSNVFQTRAGCLIGAEHVNNSYECDIPIGAGICASYQTQTNSPRRARSVASQSIIAYTMSLGAENSVAYSNNSIAIPTNFTISVTTEILPVSMTKTSVDCTMYICGDSTECSNLLLQYGSFCTQLNRALTGIAVEQDKNTQEVFAQVKQIYKTPPIKDFGGFNFSQILPDPSKPSKRSFIEDLLFNKVTLADAGFIKQYGDCLGDIAARDLICAQKFNGLTVLPPLLTDEMIAQYTSALLAGTITSGWTFGAGAALQIPFAMQMAYRFNGIGVTQCVLYENQKLIANQFNSAIGKIQDSLSSTASALGKLQDVVNQNAQALNTLVKQLSSNFGAISSVLNDILSRLDKVEAEVQIDRLITGRLQSLQTYVTQQLIRAAEIRASANLAATKMSECVLGQSKRVDFCGKGYHLMSFPQSAPHGVVFLHVTYVPAQEKNFTTAPAICHDGKAHFPREGVFVSNGTHWFVTQRNFYEPQIITTDNTFVCGNCDVVIGIVNNTVYDPLQPELDSGGGSGGGQIYEGKLTAEGLRFGIVASRFNHALVDRLVEGAIDAIVRHGGREEDITLVRVPGSWEIPVAAGELARKEDIDAVIAIGVLIRGATPHFDYIASEVSKGLADLSLELRKPITFGVITADTLEQAIERAGTKHGNKGWEAALSAIEMANLFKSLR

SEQ ID NO: 13859 - protein, 1307 aa, Artificial Sequence
  SARS-CoV-2/Guangdong/20SF028/2020__EPI_ISL_403936 spike protein (1-1147)(N914C_S1123C) LumSynth construct
MFVFLVLLPLVSSQCVNLTTRTQLPPAYTNSFTRGVYYPDKVFRSSVLYSTQDLFLPFFSNVTWFHAIHVSGTNGTKRFDNPVLPFNDGVYFASTEKSNIIRGWIFGTTLDSKTQSLLIVNNATNVVIKVCEFQFCNDPFLGVYYHKNNKSWMESEFRVYSSANNCTFEYVSQPFLMDLEGKQGNFKNLREFVFKNIDGYFKIYSKHTPINLVRDLPQGFSALEPLVDLPIGINITRFQTLLALHRSYLTPGDSSSGWTAGAAAYYVGYLQPRTFLLKYNENGTITDAVDCALDPLSETKCTLKSFTVEKGIYQTSNFRVQPTESIVRFPNITNLCPFGEVFNATRFASVYAWNRKRISNCVADYSVLYNSASFSTFKCYGVSPTKLNDLCFTNVYADSFVIRGDEVRQIAPGQTGKIADYNYKLPDDFTGCVIAWNSNNLDSKVGGNYNYLYRLFRKSNLKPFERDISTEIYQAGSTPCNGVEGFNCYFPLQSYGFQPTNGVGYQPYRVVVLSFELLHAPATVCGPKKSTNLVKNKCVNFNFNGLTGTGVLTESNKKFLPFQQFGRDIADTTDAVRDPQTLEILDITPCSFGGVSVITPGTNTSNQVAVLYQDVNCTEVPVAIHADQLTPTWRVYSTGSNVFQTRAGCLIGAEHVNNSYECDIPIGAGICASYQTQTNSPRRARSVASQSIIAYTMSLGAENSVAYSNNSIAIPTNFTISVTTEILPVSMTKTSVDCTMYICGDSTECSNLLLQYGSFCTQLNRALTGIAVEQDKNTQEVFAQVKQIYKTPPIKDFGGFNFSQILPDPSKPSKRSFIEDLLFNKVTLADAGFIKQYGDCLGDIAARDLICAQKFNGLTVLPPLLTDEMIAQYTSALLAGTITSGWTFGAGAALQIPFAMQMAYRFNGIGVTQCVLYENQKLIANQFNSAIGKIQDSLSSTASALGKLQDVVNQNAQALNTLVKQLSSNFGAISSVLNDILSRLDKVEAEVQIDRLITGRLQSLQTYVTQQLIRAAEIRASANLAATKMSECVLGQSKRVDFCGKGYHLMSFPQSAPHGVVFLHVTYVPAQEKNFTTAPAICHDGKAHFPREGVFVSNGTHWFVTQRNFYEPQIITTDNTFVCGNCDVVIGIVNNTVYDPLQPELDSGGGSGGGQIYEGKLTAEGLRFGIVASRFNHALVDRLVEGAIDAIVRHGGREEDITLVRVPGSWEIPVAAGELARKEDIDAVIAIGVLIRGATPHFDYIASEVSKGLADLSLELRKPITFGVITADTLEQAIERAGTKHGNKGWEAALSAIEMANLFKSLR

SEQ ID NO: 13860 - protein, 1307 aa, Artificial Sequence
  SARS-CoV-2/Shenzhen/SZTH-001/2020__EPI_ISL_406592 spike protein (1-1147)(N914C_S1123C) LumSynth construct
MFVFLVLLPLVSSQCVNLTTRTQLPPAYTNSFTRGVYYPDKVFRSSVLHSTQDLFLPFFSNVTWFHAIHVSGTNGTKRFDNPVLPFNDGVYFASTEKSNIIRGWIFGTTLDSKTQSLLIVNNATNVVIKVCEFQFCNDPFLGVYYHKNNKSWMESEFRVYSSANNCTFEYVSQPFLMDLEGKQGNFKNLREFVFKNIDGYFKIYSKHTPINLVRDLPQGFSALEPLVDLPIGINITRFQTLLALHRSYLTPGDSSSGWTAGAAAYYVGYLQPRTFLLKYNENGTITDAVDCALDPLSETKCTLKSFTVEKGIYQTSNFRVQPTESIVRFPNITNLCPFGEVFNATRFASVYAWNRKRISNCVADYSVLYNSASFSTFKCYGVSPTKLNDLCFTNVYADSFVIRGDEVRQIAPGQTGKIADYNYKLPDDFTGCVIAWNSNNLDSKVGGNYNYLYRLFRKSNLKPFERDISTEIYQAGSTPCNGVEGFNCYFPLQSYGFQPTNGVGYQPYRVVVLSFELLHAPATVCGPKKSTNLVKNKCVNFNFNGLTGTGVLTESNKKFLPFQQFGRDIADTTDAVRDPQTLEILDITPCSFGGVSVITPGTNTSNQVAVLYQDVNCTEVPVAIHADQLTPTWRVYSTGSNVFQTRAGCLIGAEHVNNSYECDIPIGAGICASYQTQTNSPRRARSVASQSIIAYTMSLGAENSVAYSNNSIAIPTNFTISVTTEILPVSMTKTSVDCTMYICGDSTECSNLLLQYGSFCTQLNRALTGIAVEQDKNTQEVFAQVKQIYKTPPIKDFGGFNFSQILPDPSKPSKRSFIEDLLFNKVTLADAGFIKQYGDCLGDIAARDLICAQKFNGLTVLPPLLTDEMIAQYTSALLAGTITSGWTFGAGAALQIPFAMQMAYRFNGIGVTQCVLYENQKLIANQFNSAIGKIQDSLSSTASALGKLQDVVNQNAQALNTLVKQLSSNFGAISSVLNDILSRLDKVEAEVQIDRLITGRLQSLQTYVTQQLIRAAEIRASANLAATKMSECVLGQSKRVDFCGKGYHLMSFPQSAPHGVVFLHVTYVPAQEKNFTTAPAICHDGKAHFPREGVFVSNGTHWFVTQRNFYEPQIITTDNTFVCGNCDVLIGIVNNTVYDPLQPELDSGGGSGGGQIYEGKLTAEGLRFGIVASRFNHALVDRLVEGAIDAIVRHGGREEDITLVRVPGSWEIPVAAGELARKEDIDAVIAIGVLIRGATPHFDYIASEVSKGLADLSLELRKPITFGVITADTLEQAIERAGTKHGNKGWEAALSAIEMANLFKSLR

SEQ ID NO: 13861 - protein, 1307 aa, Artificial Sequence
  SARS-CoV-2/Shenzhen/SZTH-004/2020__EPI_ISL_406595 spike protein (1-1147)(N914C_S1123C) LumSynth construct
MFVFLVLLPLVSSQCVNLTTRTQLPPAYTNSFTRGVYYPDKVFRSSVLHSTQDLFLPFFSNVTWFHAIHVSGTNGTKRFDNPVLPFNDGVYFASTEKSNIIRGWIFGTTLDSKTQSLLIVNNATNVVIKVCEFQFCNDPFLGVYYHKNNKSWMESEFRVYSSANNCTFEYVSQPFLMDLEGKQGNFKNLREFVFKNIDGYFKIYSKHTPINLVRDLPQGFSALEPLVDLPIGINITRFQTLLALHRSYLTPGDSSSGWTAGAAAYYVGYLQPRTFLLKYNENGTITDAVDCALDPLSETKCTLKSFTVEKGIYQTSNFRVQPTESIVRFPNITNLCPFGEVFNATRFASVYAWDRKRISNCVAYYSVLYNSASFSTFKCYGVSPTKLNDLCFTNVYADSFVIRGDEVRQIAPGQTGKIADYNYKLPDDFTGCVIAWNSNNLDSKVGGNYNYLYRLFRKSNLKPFERDISTEIYQAGSTPCNGVEGFNCYFPLQSYGFQPTNGVGYQPYRVVVLSFELLHAPATVCGPKKSTNLVKNKCVNFNFNGLTGTGVLTESNKKFLPFQQFGRDIADTTDAVRDPQTLEILDITPCSFGGVSVITPGTNTSNQVAVLYQDVNCTEVPVAIHADQLTPTWRVYSTGSNVFQTRAGCLIGAEHVNNSYECDIPIGAGICASYQTQTNSPRRARSVASQSIIAYTMSLGAENSVAYSNNSIAIPTNFTISVTTEILPVSMTKTSVDCTMYICGDSTECSNLLLQYGSFCTQLNRALTGIAVEQDKNTQEVFAQVKQIYKTPPIKDFGGFNFSQILPDPSKPSKRSFIEDLLFNKVTLADAGFIKQYGDCLGDIAARDLICAQKFNGLTVLPPLLTDEMIAQYTSALLAGTITSGWTFGAGAALQIPFAMQMAYRFNGIGVTQCVLYENQKLIANQFNSAIGKIQDSLSSTASALGKLQDVVNQNAQALNTLVKQLSSNFGAISSVLNDILSRLDKVEAEVQIDRLITGRLQSLQTYVTQQLIRAAEIRASANLAATKMSECVLGQSKRVDFCGKGYHLMSFPQSAPHGVVFLHVTYVPAQEKNFTTAPAICHDGKAHFPREGVFVSNGTHWFVTQRNFYEPQIITTDNTFVCGNCDVVIGIVNNTVYDPLQPELDSGGGSGGGQIYEGKLTAEGLRFGIVASRFNHALVDRLVEGAIDAIVRHGGREEDITLVRVPGSWEIPVAAGELARKEDIDAVIAIGVLIRGATPHFDYIASEVSKGLADLSLELRKPITFGVITADTLEQAIERAGTKHGNKGWEAALSAIEMANLFKSLR

SEQ ID NO: 13862 - protein, 1307 aa, Artificial Sequence
  SARS-CoV-2/France/IDF0372/2020__EPI_ISL_406596 spike protein (1-1147)(N914C_S1123C) LumSynth construct
MFVFLVLLPLVSSQCVNLTTRTQLPPAYTNSFTRGVYYPDKVFRSSVLHSTQDLFLPFFSNVTWFHAIHVSGTNGTKRFDNPVLPFNDGVYFASTEKSNIIRGWIFGTTLDSKTQSLLIVNNATNVVIKVCEFQFCNDPFLGVYYHKNNKSWMESEFRVYSSANNCTFEYVSQPFLMDLEGKQGNFKNLREFVFKNIDGYFKIYSKHTPINLVRDLPQGFSALEPLVDLPIGINITRFQTLLALHRSYLTPGDSSSGWTAGAAAYYVGYLQPRTFLLKYNENGTITDAVDCALDPLSETKCTLKSFTVEKGIYQTSNFRVQPTESIVRFPNITNLCPFGEVFNATRFASVYAWNRKRISNCVADYSFLYNSASFSTFKCYGVSPTKLNDLCFTNVYADSFVIRGDEVRQIAPGQTGKIADYNYKLPDDFTGCVIAWNSNNLDSKVGGNYNYLYRLFRKSNLKPFERDISTEIYQAGSTPCNGVEGFNCYFPLQSYGFQPTNGVGYQPYRVVVLSFELLHAPATVCGPKKSTNLVKNKCVNFNFNGLTGTGVLTESNKKFLPFQQFGRDIADTTDAVRDPQTLEILDITPCSFGGVSVITPGTNTSNQVAVLYQDVNCTEVPVAIHADQLTPTWRVYSTGSNVFQTRAGCLIGAEHVNNSYECDIPIGAGICASYQTQTNSPRRARSVASQSIIAYTMSLGAENSVAYSNNSIAIPTNFTISVTTEILPVSMTKTSVDCTMYICGDSTECSNLLLQYGSFCTQLNRALTGIAVEQDKNTQEVFAQVKQIYKTPPIKDFGGFNFSQILPDPSKPSKRSFIEDLLFNKVTLADAGFIKQYGDCLGDIAARDLICAQKFNGLTVLPPLLTDEMIAQYTSALLAGTITSGWTFGAGAALQIPFAMQMAYRFNGIGVTQCVLYENQKLIANQFNSAIGKIQDSLSSTASALGKLQDVVNQNAQALNTLVKQLSSNFGAISSVLNDILSRLDKVEAEVQIDRLITGRLQSLQTYVTQQLIRAAEIRASANLAATKMSECVLGQSKRVDFCGKGYHLMSFPQSAPHGVVFLHVTYVPAQEKNFTTAPAICHDGKAHFPREGVFVSNGTHWFVTQRNFYEPQIITTDNTFVCGNCDVVIGIVNNTVYDPLQPELDSGGGSGGGQIYEGKLTAEGLRFGIVASRFNHALVDRLVEGAIDAIVRHGGREEDITLVRVPGSWEIPVAAGELARKEDIDAVIAIGVLIRGATPHFDYIASEVSKGLADLSLELRKPITFGVITADTLEQAIERAGTKHGNKGWEAALSAIEMANLFKSLR

SEQ ID NO: 13863 - protein, 1307 aa, Artificial Sequence
  SARS-CoV-2/Australia/VIC01/2020__EPI_ISL_406844 spike protein (1-1147)(N914C_S1123C) LumSynth construct
MFVFLVLLPLVSSQCVNLTTRTQLPPAYTNSFTRGVYYPDKVFRSSVLHSTQDLFLPFFSNVTWFHAIHVSGTNGTKRFDNPVLPFNDGVYFASTEKSNIIRGWIFGTTLDSKTQSLLIVNNATNVVIKVCEFQFCNDPFLGVYYHKNNKSWMESEFRVYSSANNCTFEYVSQPFLMDLEGKQGNFKNLREFVFKNIDGYFKIYSKHTPINLVRDLPQGFSALEPLVDLPIGINITRFQTLLALHRRYLTPGDSSSGWTAGAAAYYVGYLQPRTFLLKYNENGTITDAVDCALDPLSETKCTLKSFTVEKGIYQTSNFRVQPTESIVRFPNITNLCPFGEVFNATRFASVYAWNRKRISNCVADYSVLYNSASFSTFKCYGVSPTKLNDLCFTNVYADSFVIRGDEVRQIAPGQTGKIADYNYKLPDDFTGCVIAWNSNNLDSKVGGNYNYLYRLFRKSNLKPFERDISTEIYQAGSTPCNGVEGFNCYFPLQSYGFQPTNGVGYQPYRVVVLSFELLHAPATVCGPKKSTNLVKNKCVNFNFNGLTGTGVLTESNKKFLPFQQFGRDIADTTDAVRDPQTLEILDITPCSFGGVSVITPGTNTSNQVAVLYQDVNCTEVPVAIHADQLTPTWRVYSTGSNVFQTRAGCLIGAEHVNNSYECDIPIGAGICASYQTQTNSPRRARSVASQSIIAYTMSLGAENSVAYSNNSIAIPTNFTISVTTEILPVSMTKTSVDCTMYICGDSTECSNLLLQYGSFCTQLNRALTGIAVEQDKNTQEVFAQVKQIYKTPPIKDFGGFNFSQILPDPSKPSKRSFIEDLLFNKVTLADAGFIKQYGDCLGDIAARDLICAQKFNGLTVLPPLLTDEMIAQYTSALLAGTITSGWTFGAGAALQIPFAMQMAYRFNGIGVTQCVLYENQKLIANQFNSAIGKIQDSLSSTASALGKLQDVVNQNAQALNTLVKQLSSNFGAISSVLNDILSRLDKVEAEVQIDRLITGRLQSLQTYVTQQLIRAAEIRASANLAATKMSECVLGQSKRVDFCGKGYHLMSFPQSAPHGVVFLHVTYVPAQEKNFTTAPAICHDGKAHFPREGVFVSNGTHWFVTQRNFYEPQIITTDNTFVCGNCDVVIGIVNNTVYDPLQPELDSGGGSGGGQIYEGKLTAEGLRFGIVASRFNHALVDRLVEGAIDAIVRHGGREEDITLVRVPGSWEIPVAAGELARKEDIDAVIAIGVLIRGATPHFDYIASEVSKGLADLSLELRKPITFGVITADTLEQAIERAGTKHGNKGWEAALSAIEMANLFKSLR

SEQ ID NO: 13864 - protein, 1307 aa, Artificial Sequence
  SARS-CoV-2/Germany/BavPat1/2020__EPI_ISL_406862 spike protein (1-1147)(N914C_S1123C) LumSynth construct
MFVFLVLLPLVSSQCVNLTTRTQLPPAYTNSFTRGVYYPDKVFRSSVLHSTQDLFLPFFSNVTWFHAIHVSGTNGTKRFDNPVLPFNDGVYFASTEKSNIIRGWIFGTTLDSKTQSLLIVNNATNVVIKVCEFQFCNDPFLGVYYHKNNKSWMESEFRVYSSANNCTFEYVSQPFLMDLEGKQGNFKNLREFVFKNIDGYFKIYSKHTPINLVRDLPQGFSALEPLVDLPIGINITRFQTLLALHRSYLTPGDSSSGWTAGAAAYYVGYLQPRTFLLKYNENGTITDAVDCALDPLSETKCTLKSFTVEKGIYQTSNFRVQPTESIVRFPNITNLCPFGEVFNATRFASVYAWNRKRISNCVADYSVLYNSASFSTFKCYGVSPTKLNDLCFTNVYADSFVIRGDEVRQIAPGQTGKIADYNYKLPDDFTGCVIAWNSNNLDSKVGGNYNYLYRLFRKSNLKPFERDISTEIYQAGSTPCNGVEGFNCYFPLQSYGFQPTNGVGYQPYRVVVLSFELLHAPATVCGPKKSTNLVKNKCVNFNFNGLTGTGVLTESNKKFLPFQQFGRDIADTTDAVRDPQTLEILDITPCSFGGVSVITPGTNTSNQVAVLYQGVNCTEVPVAIHADQLTPTWRVYSTGSNVFQTRAGCLIGAEHVNNSYECDIPIGAGICASYQTQTNSPRRARSVASQSIIAYTMSLGAENSVAYSNNSIAIPTNFTISVTTEILPVSMTKTSVDCTMYICGDSTECSNLLLQYGSFCTQLNRALTGIAVEQDKNTQEVFAQVKQIYKTPPIKDFGGFNFSQILPDPSKPSKRSFIEDLLFNKVTLADAGFIKQYGDCLGDIAARDLICAQKFNGLTVLPPLLTDEMIAQYTSALLAGTITSGWTFGAGAALQIPFAMQMAYRFNGIGVTQCVLYENQKLIANQFNSAIGKIQDSLSSTASALGKLQDVVNQNAQALNTLVKQLSSNFGAISSVLNDILSRLDKVEAEVQIDRLITGRLQSLQTYVTQQLIRAAEIRASANLAATKMSECVLGQSKRVDFCGKGYHLMSFPQSAPHGVVFLHVTYVPAQEKNFTTAPAICHDGKAHFPREGVFVSNGTHWFVTQRNFYEPQIITTDNTFVCGNCDVVIGIVNNTVYDPLQPELDSGGGSGGGQIYEGKLTAEGLRFGIVASRFNHALVDRLVEGAIDAIVRHGGREEDITLVRVPGSWEIPVAAGELARKEDIDAVIAIGVLIRGATPHFDYIASEVSKGLADLSLELRKPITFGVITADTLEQAIERAGTKHGNKGWEAALSAIEMANLFKSLR

SEQ ID NO: 13865 - protein, 1307 aa, Artificial Sequence
  SARS-CoV-2/Wuhan/HBCDC-HB-02/2020__EPI_ISL_412978 spike protein (1-1147)(N914C_S1123C) LumSynth construct
MFVFLVLLPLVSSQCVNLTTRTQLPPAYTNSFTRGVYYPDKVFRSSVLHSTQDLFLPFFSNVTWFHAIHVSGTNGTKRFDNPVLPFNDGVYFASTEKSNIIRGWIFGTTLDSKTQSLLIVNNATNVVIKVCEFQFCNDPFLGVYYHKNNKSWMESEFRVYSSANNCTFEYVSQPFLMDLEGKQGNFKNLREFVFKNIDGYFKIYSKHTPINLVRDLPQGFSALEPLVDLPIGINITRFQTLLALHRSYLTPGDSSSGWTAGAAAYYVGYLQPRTFLLKYNENGTITDAVDCALDPLSETKCTLKSFTVEKGIYQTSNFRVQPTESIVRFPNITNLCPFGEVFNATRFASVYAWNRKRISNCVADYSVLYNSASFSTFKCYGVSPTKLNDLCFTNVYADSFVIRGDEVRQIAPGQTGKIADYNYKLPDDFTGCVIAWNSNNLDSKVGGNYNYLYRLFRKSNLKPFERDISTEIYQAGSTPCNGVEGFNCYFPLQSYGFQPTNGVGYQPYRVVVLSFELLHAPATVCGPKKSTNLVKNKCVNFNFNGLTGTGVLTESNKKFLPFQQFGRDIADTTDAVRDPQTLEILDITPCSFGGVSVITPGTNTSNQVAVLYQDVNCTEVPVAIHADQLTPTWRVYSTGSNVFQTRAGCLIGAEHVNNSYECDIPIGAGICASYQTQTNSPRRARSVASQSIIAYTMSLGAENSVAYSNNSIAIPTNFTISVTTEILPVSMTKTSVDCTMYICGDSTECSNFLLQYGSFCTQLNRALTGIAVEQDKNTQEVFAQVKQIYKTPPIKDFGGFNFSQILPDPSKPSKRSFIEDLLFNKVTLADAGFIKQYGDCLGDIAARDLICAQKFNGLTVLPPLLTDEMIAQYTSALLAGTITSGWTFGAGAALQIPFAMQMAYRFNGIGVTQCVLYENQKLIANQFNSAIGKIQDSLSSTASALGKLQDVVNQNAQALNTLVKQLSSNFGAISSVLNDILSRLDKVEAEVQIDRLITGRLQSLQTYVTQQLIRAAEIRASANLAATKMSECVLGQSKRVDFCGKGYHLMSFPQSAPHGVVFLHVTYVPAQEKNFTTAPAICHDGKAHFPREGVFVSNGTHWFVTQRNFYEPQIITTDNTFVCGNCDVVIGIVNNTVYDPLQPELDSGGGSGGGQIYEGKLTAEGLRFGIVASRFNHALVDRLVEGAIDAIVRHGGREEDITLVRVPGSWEIPVAAGELARKEDIDAVIAIGVLIRGATPHFDYIASEVSKGLADLSLELRKPITFGVITADTLEQAIERAGTKHGNKGWEAALSAIEMANLFKSLR

SEQ ID NO: 13866 - protein, 1307 aa, Artificial Sequence
  SARS-CoV-2/Australia/QLD02/2020__EPI_ISL_407896 spike protein (1-1147)(N914C_S1123C) LumSynth construct
MFVFLVLLPLVSSQCVNLTTRTQLPPAYTNSFTRGVYYPDKVFRSSVLHSTQDLFLPFFSNVTWFHAIHVSGTNGTKRFDNPVLPFNDGVYFASTEKSNIIRGWIFGTTLDSKTQSLLIVNNATNVVIKVCEFQFCNDPFLGVYYHKNNKSWMESEFRVYSSANNCTFEYVSQPFLMDLEGKQGNFKNLREFVFKNIDGYFKIYSKHTPINLVRDLPQGFSALEPLVDLPIGINITRFQTLLALHRSYLTPGDSSSGWTAGAAAYYVGYLQPRTFLLKYNENGTITDAVDCALDPLSETKCTLKSFTVEKGIYQTSNFRVQPTESIVRFPNITNLCPFGEVFNATRFASVYAWNRKRISNCVADYSVLYNSASFSTFKCYGVSPTKLNDLCFTNVYADSFVIRGDEVRQIAPGQTGKIADYNYKLPDDFTGCVIAWNSNNLDSKVGGNYNYLYRLFRKSNLKPFERDISTEIYQAGSTPCNGVEGFNCYFPLQSYGFQPTNGVGYQPYRVVVLSFELLHAPATVCGPKKSTNLVKNKCVNFNFNGLTGTGVLTESNKKFLPFQQFGRDIADTTDAVRDPQTLEILDITPCSFGGVSVITPGTNTSNQVAVLYQDVNCTEVPVAIHADQLTPTWRVYSTGSNVFQTRAGCLIGAEHVNNSYECDIPIGAGICASYQTQTNSPRRARSVASQSIIAYTMSLGAENSVAYSNNSIAIPTNFTISVTTEILPVSMTKTSVDCTMYICGDSTECSNLLLQYGSFCTQLNRALTGIAVEQDKNTQEVFAQVKQIYKTPPIKDFGGFNFSQILPDPSKPSKRSFIEDLLFNKVTLADAGFIKQYGDCLGDIAARDLICAQKFNGLTVLPPLLTDEMIAQYTSALLAGTITSGWTFGAGAALQIPFAMQMAYRFNGIGVTQCVLYENQKLIANQFNSAIGKIQDSLSSTASALGKLQDVVNQNAQALNTLVKQLSSNFGAISSVLNDILSRLDKVEAEVQIDRLITGRLQSLQTYVTQQLIRAAEIRASANLAATKMSECVLGQSKRVDFCGKGYHLMSFPQSAPHGVVFLHVTYVPAQEKNFTTAPAICHDGKAHFPREGVFVSNGTHWFVTQRNFYEPQIITTDNTFVCGNCDVVIGIVNNTVYDPLQLELDSGGGSGGGQIYEGKLTAEGLRFGIVASRFNHALVDRLVEGAIDAIVRHGGREEDITLVRVPGSWEIPVAAGELARKEDIDAVIAIGVLIRGATPHFDYIASEVSKGLADLSLELRKPITFGVITADTLEQAIERAGTKHGNKGWEAALSAIEMANLFKSLR

SEQ ID NO: 13867 - protein, 1307 aa, Artificial Sequence
  SARS-CoV-2/India/1-31/2020__EPI_ISL_413523 spike protein (1-1147)(N914C_S1123C) LumSynth construct
MFVFLVLLPLVSSQCVNLTTRTQLPPAYTNSFTRGVYYPDKVFRSSVLHSTQDLFLPFFSNVTWFHAIHVSGTNGTKRFDNPVLPFNDGVYFASTEKSNIIRGWIFGTTLDSKTQSLLIVNNATNVVIKVCEFQFCNDPFLGVYYHKNNKSWMESEFRVYSSANNCTFEYVSQPFLMDLEGKQGNFKNLREFVFKNIDGYFKIYSKHTPINLVRDLPQGFSALEPLVDLPIGINITRFQTLLALHRSYLTPGDSSSGWTAGAAAYYVGYLQPRTFLLKYNENGTITDAVDCALDPLSETKCTLKSFTVEKGIYQTSNFRVQPTESIVRFPNITNLCPFGEVFNATRFASVYAWNRKRISNCVADYSVLYNSASFSTFKCYGVSPTKLNDLCFTNVYADSFVIRGDEVRQIAPGQTGKIADYNYKLPDDFTGCVIAWNSNNLDSKVGGNYNYLYRLFRKSNLKPFERDISTEIYQAGSTPCNGVEGFNCYFPLQSYGFQPTNGVGYQPYRVVVLSFELLHAPATVCGPKKSTNLVKNKCVNFNFNGLTGTGVLTESNKKFLPFQQFGRDIADTTDAVRDPQTLEILDITPCSFGGVSVITPGTNTSNQVAVLYQDVNCTEVPVAIHADQLTPTWRVYSTGSNVFQTRAGCLIGAEHVNNSYECDIPIGAGICASYQTQTNSPRRARSVASQSIIAYTMSLGAENSVAYSNNSIAIPTNFTISVTTEILPVSMTKTSVDCTMYICGDSTECSNLLLQYGSFCTQLNRALTGIAVEQDKNTQEVFAQVKQIYKTPPIKDFGGFNFSQILPDPSKPSKRSFIEDLLFNKVTLADAGFIKQYGDCLGDIAARDLICAQKFNGLTVLPPLLTDEMIAQYTSALLAGTITSGWTFGAGAALQIPFAMQMAYRFNGIGVTQCVLYENQKLIANQFNSVIGKIQDSLSSTASALGKLQDVVNQNAQALNTLVKQLSSNFGAISSVLNDILSRLDKVEAEVQIDRLITGRLQSLQTYVTQQLIRAAEIRASANLAATKMSECVLGQSKRVDFCGKGYHLMSFPQSAPHGVVFLHVTYVPAQEKNFTTAPAICHDGKAHFPREGVFVSNGTHWFVTQRNFYEPQIITTDNTFVCGNCDVVIGIVNNTVYDPLQPELDSGGGSGGGQIYEGKLTAEGLRFGIVASRFNHALVDRLVEGAIDAIVRHGGREEDITLVRVPGSWEIPVAAGELARKEDIDAVIAIGVLIRGATPHFDYIASEVSKGLADLSLELRKPITFGVITADTLEQAIERAGTKHGNKGWEAALSAIEMANLFKSLR

SEQ ID NO: 13868 - protein, 1307 aa, Artificial Sequence
  SARS-CoV-2/Guangdong/GD2020087-P0008/2020__EPI_ISL_413863 spike protein (1-1147)(N914C_S1123C) LumSynth construct
MFVFLVLLPLVSSQCVNLTTRTQLPPAYTNSFTRGVYYPDKVFRSSVLHSTQDLFLPFFSNVTWFHAIHVSGTNGTKRFDNPVLPFNDGVYFASTEKSNIIRGWIFGTTLDSKTQSLLIVNNATNVVIKVCEFQFCNDPFLGVYYHKNNKSWMESEFRVYSSANNCTFEYVSQPFLMDLEGKQGNFKNLREFVFKNIDGYFKIYSKHTPINLVRDLPQGFSALEPLVDLPIGINITRFQTLLALHRSYLTPGDSSSGWTAGAAAYYVGYLQPRTFLLKYNENGTITDAVDCALDPLSETKCTLKSFTVEKGIYQTSNFRVQPTESIVRFPNITNLCPFGEVFNATRFASVYAWNRKRISNCVADYSVLYNSASFSTFKCYGVSPTKLNDLCFTNVYADSFVIRGDEVREIAPGQTGKIADYNYKLPDDFTGCVIAWNSNNLDSKVGGNYNYLYRLFRKSNLKPFERDISTEIYQAGSTPCNGVEGFNCYFPLQSYGFQPTNGVGYQPYRVVVLSFELLHAPATVCGPKKSTNLVKNKCVNFNFNGLTGTGVLTESNKKFLPFQQFGRDIADTTDAVRDPQTLEILDITPCSFGGVSVITPGTNTSNQVAVLYQDVNCTEVPVAIHADQLTPTWRVYSTGSNVFQTRAGCLIGAEHVNNSYECDIPIGAGICASYQTQTNSPRRARSVASQSIIAYTMSLGAENSVAYSNNSIAIPTNFTISVTTEILPVSMTKTSVDCTMYICGDSTECSNLLLQYGSFCTQLNRALTGIAVEQDKNTQEVFAQVKQIYKTPPIKDFGGFNFSQILPDPSKPSKRSFIEDLLFNKVTLADAGFIKQYGDCLGDIAARDLICAQKFNGLTVLPPLLTDEMIAQYTSALLAGTITSGWTFGAGAALQIPFAMQMAYRFNGIGVTQCVLYENQKLIANQFNSAIGKIQDSLSSTASALGKLQDVVNQNAQALNTLVKQLSSNFGAISSVLNDILSRLDKVEAEVQIDRLITGRLQSLQTYVTQQLIRAAEIRASANLAATKMSECVLGQSKRVDFCGKGYHLMSFPQSAPHGVVFLHVTYVPAQEKNFTTAPAICHDGKAHFPREGVFVSNGTHWFVTQRNFYEPQIITTDNTFVCGNCDVVIGIVNNTVYDPLQPELDSGGGSGGGQIYEGKLTAEGLRFGIVASRFNHALVDRLVEGAIDAIVRHGGREEDITLVRVPGSWEIPVAAGELARKEDIDAVIAIGVLIRGATPHFDYIASEVSKGLADLSLELRKPITFGVITADTLEQAIERAGTKHGNKGWEAALSAIEMANLFKSLR

SEQ ID NO: 13869 - protein, 1307 aa, Artificial Sequence
  SARS-CoV-2/Sweden/01/2020__EPI_ISL_411951 spike protein (1-1147)(N914C_S1123C) LumSynth construct
MFVFLVLLPLVSSQCVNLTTRTQLPPAYTNSFTRGVYYPDKVFRSSVLHSTQDLFLPFFSNVTWFHAIHVSGTNGTKRFDNPVLPFNDGVYFASTEKSNIIRGWIFGTTLDSKTQSLLIVNNATNVVIKVCEFQFCNDPFLGVYYHKNNKSWMESEFRVYSSANNCTFEYVSQPFLMDLEGKQGNFKNLREFVFKNIDGYFKIYSKHTPINLVRDLPQGFSALEPLVDLPIGINITRFQTLLALHRSYLTPGDSSSGWTAGAAAYYVGYLQPRTFLLKYNENGTITDAVDCALDPLSETKCTLKSFTVEKGIYQTSNFRVQPTESIVRFPNITNLCPFGEVFNATRFASVYAWNRKRISNCVADYSVLYNSASFSTFKCYGVSPTKLNDLCFTNVYADSFVIRGDEVRQIAPGQTGKIADYNYKLPDDFTGCVIAWNSNNLDSKVGGNYNYLYRLFRKSNLKPFERDISTEIYQAGSTPCNGVEGFNCYFPLQSYGFQPTNGVGYQPYRVVVLSFELLHAPATVCGPKKSTNLVKNKCVNFNFNGLTGTGVLTESNKKFLPFQQFGRDIADTTDAVRDPQTLEILDITPCSFGGVSVITPGTNTSNQVAVLYQDVNCTEVPVAIHADQLTPTWRVYSTGSNVFQTRAGCLIGAEHVNNSYECDIPIGAGICASYQTQTNSPRRARSVASQSIIAYTMSLGAENSVAYSNNSIAIPTNFTISVTTEILPVSMTKTSVDCTMYICGDSTECSNLLLQYGSFCTQLNRALTGIAVEQDKNTQEVFAQVKQIYKTPPIKDCGGFNFSQILPDPSKPSKRSFIEDLLFNKVTLADAGFIKQYGDCLGDIAARDLICAQKFNGLTVLPPLLTDEMIAQYTSALLAGTITSGWTFGAGAALQIPFAMQMAYRFNGIGVTQCVLYENQKLIANQFNSAIGKIQDSLSSTASALGKLQDVVNQNAQALNTLVKQLSSNFGAISSVLNDILSRLDKVEAEVQIDRLITGRLQSLQTYVTQQLIRAAEIRASANLAATKMSECVLGQSKRVDFCGKGYHLMSFPQSAPHGVVFLHVTYVPAQEKNFTTAPAICHDGKAHFPREGVFVSNGTHWFVTQRNFYEPQIITTDNTFVCGNCDVVIGIVNNTVYDPLQPELDSGGGSGGGQIYEGKLTAEGLRFGIVASRFNHALVDRLVEGAIDAIVRHGGREEDITLVRVPGSWEIPVAAGELARKEDIDAVIAIGVLIRGATPHFDYIASEVSKGLADLSLELRKPITFGVITADTLEQAIERAGTKHGNKGWEAALSAIEMANLFKSLR

SEQ ID NO: 13870 - protein, 1307 aa, Artificial Sequence
  SARS-CoV-2/Tianmen/HBCDC-HB-07/2020__EPI_ISL_412983 spike protein (1-1147)(N914C_S1123C) LumSynth construct
MFVFLVLLPLVSSQCVNLTTRTQLPPAYTNSFTRGVYYPDKVFRSSVLHSTQDLFLPFFSNVTWFHAIHVSGTNGTKRFDNPVLPFNDGVYFASTEKSNIIRGWIFGTTLDSKTQSLLIVNNATNVVIKVCEFQFCNDPFLGVYYHKNNKSWMESEFRVYSSANNCTFEYVSQPFLMDLEGKQGNFKNLREFVFKNIDGYFKIYSKHTPINLVRDLPQGFSALEPLVDLPIGINITRFQTLLALHRSYLTPGDSSSGWTAGAAAYYVGYLQPRTFLLKYNENGTITDAVDCALDPLSETKCTLKSFTVEKGIYQTSNFRVQPTESIVRFPNITNLCPFGEVFNATRFASVYAWNRKRISNCVADYSVLYNSASFSTFKCYGVSPTKLNDLCFTNVYADSFVIRGDEVRQIAPGQTGKIADYNYKLPDDFTGCVIAWNSNNLDSKVGGNYNYLYRLFRKSNLKPFERDISTEIYQAGSTPCNGVEGFNCYFPLQSYGFQPTNGVGYQPYRVVVLSFELLHAPATVCGPKKSTNLVKNKCVNFNFNGLTGTGVLTESNKKFLPFQQFGRDIADTTDAVRDPQTLEILDITPCSFGGVSVITPGTNTSNQVAVLYQDLNCTEVPVAIHADQLTPTWRVYSTGSNVFQTRAGCLIGAEHVNNSYECDIPIGAGICASYQTQTNSPRRARSVASQSIIAYTMSLGAENSVAYSNNSIAIPTNFTISVTTEILPVSMTKTSVDCTMYICGDSTECSNLLLQYGSFCTQLNRALTGIAVEQDKNTQEVFAQVKQIYKTPPIKDFGGFNFSQILPDPSKPSKRSFIEDLLFNKVTLADAGFIKQYGDCLGDIAARDLICAQKFNGLTVLPPLLTDEMIAQYTSALLAGTITSGWTFGAGAALQIPFAMQMAYRFNGIGVTQCVLYENQKLIANQFNSAIGKIQDSLSSTASALGKLQDVVNQNAQALNTLVKQLSSNFGAISSVLNDILSRLDKVEAEVQIDRLITGRLQSLQTYVTQQLIRAAEIRASANLAATKMSECVLGQSKRVDFCGKGYHLMSFPQSAPHGVVFLHVTYVPAQEKNFTTAPAICHDGKAHFPREGVFVSNGTHWFVTQRNFYEPQIITTDNTFVCGNCDVVIGIVNNTVYDPLQPELDSGGGSGGGQIYEGKLTAEGLRFGIVASRFNHALVDRLVEGAIDAIVRHGGREEDITLVRVPGSWEIPVAAGELARKEDIDAVIAIGVLIRGATPHFDYIASEVSKGLADLSLELRKPITFGVITADTLEQAIERAGTKHGNKGWEAALSAIEMANLFKSLR

SEQ ID NO: 13871 - protein, 1307 aa, Artificial Sequence
  SARS-CoV-2/Hong Kong/case42_VM20002493/2020__EPI_ISL_414527 spike protein (1-1147)(N914C_S1123C) LumSynth construct
MFVFLVLLPLVSSQCVNLTTRTQLPPAYTNSFTRGVYYPDKVFRSSVLHSTQDLFLPFFSNVTWFHAIHVSGTNGTKRFDNPVLPFNDGVYFASTEKSNIIRGWIFGTTLDSKTQSLLIVNNATNVVIKVCEFQFCNDPFLGVYYHKNNKSWMESEFRVYSSANNCTFEYVSQPFLMDLEGKQGNFKNLREFVFKNIDGYFKIYSKHTPINLVRDLPQGFSALEPLVDLPIGINITRFQTLLALHRSYLTPGDSSSGWTAGAAAYYVGYLQPRTFLLKYNENGTITDAVDCALDPLSETKCTLKSFTVEKGIYQTSNFRVQPTESIVRFPNITNLCPFGEVFNATRFASVYAWNRKRISNCVADYSVLYNSASFSTFKCYGVSPTKLNDLCFTNVYADSFVIRGDEVRQIAPGQTGKIADYNYKLPDDFTGCVIAWNSNNLDSKVGGNYNYLYRLFRKSNLKPFERDISTEIYQAGSTPCNGVEGFNCYFPLQSYGFQPTNGVGYQPYRVVVLSFELLHAPATVCGPKKSTNLVKNKCVNFNFNGLTGTGVLTESNKKFLPFQQFGRDIADTTDAVRDPQTLEILDITPCSFGGVSVITPGTNTSNQVAVLYQDVNCTEVPVAIHADQLTPTWRVYSTGSNVFQTRAGCLIGAEHVNNSYECDIPIGAGICASYQTQTNSPRRARSVASQSIIAYTMSLGAENSVAYSNNSIAIPTNFAISVTTEILPVSMTKTSVDCTMYICGDSTECSNLLLQYGSFCTQLNRALTGIAVEQDKNTQEVFAQVKQIYKTPPIKDFGGFNFSQILPDPSKPSKRSFIEDLLFNKVTLADAGFIKQYGDCLGDIAARDLICAQKFNGLTVLPPLLTDEMIAQYTSALLAGTITSGWTFGAGAALQIPFAMQMAYRFNGIGVTQCVLYENQKLIANQFNSAIGKIQDSLSSTASALGKLQDVVNQNAQALNTLVKQLSSNFGAISSVLNDILSRLDKVEAEVQIDRLITGRLQSLQTYVTQQLIRAAEIRASANLAATKMSECVLGQSKRVDFCGKGYHLMSFPQSAPHGVVFLHVTYVPAQEKNFTTAPAICHDGKAHFPREGVFVSNGTHWFVTQRNFYEPQIITTDNTFVCGNCDVVIGIVNNTVYDPLQPELDSGGGSGGGQIYEGKLTAEGLRFGIVASRFNHALVDRLVEGAIDAIVRHGGREEDITLVRVPGSWEIPVAAGELARKEDIDAVIAIGVLIRGATPHFDYIASEVSKGLADLSLELRKPITFGVITADTLEQAIERAGTKHGNKGWEAALSAIEMANLFKSLR

SEQ ID NO: 13872 - protein, 1307 aa, Artificial Sequence
  SARS-CoV-2/USA/CruiseA-23/2020__EPI_ISL_414482 spike protein (1-1147)(N914C_S1123C) LumSynth construct
MFVFLVLLPLVSSQCVNLTTRTQLPPAYTNSFTRGVYYPDKVFRSSVLHSTQDLFLPFFSNVTWFHAIHVSGTNGTKRFDNPVLPFNDGVYFASTEKSNIIRGWIFGTTLDSKTQSLLIVNNATNVVIKVCEFQFCNDPFLGVYYHKNNKSWMESEFRVYSSANNCTFEYVSQPFLMDLEVKQGNFKNLREFVFKNIDGYFKIYSKHTPINLVRDLPQGFSALEPLVDLPIGINITRFQTLLALHRSYLTPGDSSSGWTAGAAAYYVGYLQPRTFLLKYNENGTITDAVDCALDPLSETKCTLKSFTVEKGIYQTSNFRVQPTESIVRFPNITNLCPFGEVFNATRFASVYAWNRKRISNCVADYSVLYNSASFSTFKCYGVSPTKLNDLCFTNVYADSFVIRGDEVRQIAPGQTGKIADYNYKLPDDFTGCVIAWNSNNLDSKVGGNYNYLYRLFRKSNLKPFERDISTEIYQAGSTPCNGVEGFNCYFPLQSYGFQPTNGVGYQPYRVVVLSFELLHAPATVCGPKKSTNLVKNKCVNFNFNGLTGTGVLTESNKKFLPFQQFGRDIADTTDAVRDPQTLEILDITPCSFGGVSVITPGTNTSNQVAVLYQDVNCTEVPVAIHADQLTPTWRVYSTGSNVFQTRAGCLIGAEHVNNSYECDIPIGAGICASYQTQTNSPRRARSVASQSIIAYTMSLGAENSVAYSNNSIAIPTNFTISVTTEILPVSMTKTSVDCTMYICGDSTECSNLLLQYGSFCTQLNRALTGIAVEQDKNTQEVFAQVKQIYKTPPIKDFGGFNFSQILPDPSKPSKRSFIEDLLFNKVTLADAGFIKQYGDCLGDIAARDLICAQKFNGLTVLPPLLTDEMIAQYTSALLAGTITSGWTFGAGAALQIPFAMQMAYRFNGIGVTQCVLYENQKLIANQFNSAIGKIQDSLSSTASALGKLQDVVNQNAQALNTLVKQLSSNFGAISSVLNDILSRLDKVEAEVQIDRLITGRLQSLQTYVTQQLIRAAEIRASANLAATKMSECVLGQSKRVDFCGKGYHLMSFPQSAPHGVVFLHVTYVPAQEKNFTTAPAICHDGKAHFPREGVFVSNGTHWFVTQRNFYEPQIITTDNTFVCGNCDVVIGIVNNTVYDPLQPELDSGGGSGGGQIYEGKLTAEGLRFGIVASRFNHALVDRLVEGAIDAIVRHGGREEDITLVRVPGSWEIPVAAGELARKEDIDAVIAIGVLIRGATPHFDYIASEVSKGLADLSLELRKPITFGVITADTLEQAIERAGTKHGNKGWEAALSAIEMANLFKSLR

SEQ ID NO: 13873 - protein, 1307 aa, Artificial Sequence
  SARS-CoV-2/Hong Kong/case85_VM20002868/2020__EPI_ISL_414519 spike protein (1-1147)(N914C_S1123C) LumSynth construct
MFVFLVLVPLVSSQCVNLTTRTQLPPAYTNSFTRGVYYPDKVFRSSVLHSTQDLFLPFFSNVTWFHAIHVSGTNGTKRFDNPVLPFNDGVYFASTEKSNIIRGWIFGTTLDSKTQSLLIVNNATNVVIKVCEFQFCNDPFLGVYYHKNNKSWMESEFRVYSSANNCTFEYVSQPFLMDLEGKQGNFKNLREFVFKNIDGYFKIYSKHTPINLVRDLPQGFSALEPLVDLPIGINITRFQTLLALHRSYLTPGDSSSGWTAGAAAYYVGYLQPRTFLLKYNENGTITDAVDCALDPLSETKCTLKSFTVEKGIYQTSNFRVQPTESIVRFPNITNLCPFGEVFNATRFASVYAWNRKRISNCVADYSVLYNSASFSTFKCYGVSPTKLNDLCFTNVYADSFVIRGDEVRQIAPGQTGKIADYNYKLPDDFTGCVIAWNSNNLDSKVGGNYNYLYRLFRKSNLKPFERDISTEIYQAGSTPCNGVEGFNCYFPLQSYGFQPTNGVGYQPYRVVVLSFELLHAPATVCGPKKSTNLVKNKCVNFNFNGLTGTGVLTESNKKFLPFQQFGRDIADTTDAVRDPQTLEILDITPCSFGGVSVITPGTNTSNQVAVLYQDVNCTEVPVAIHADQLTPTWRVYSTGSNVFQTRAGCLIGAEHVNNSYECDIPIGAGICASYQTQTNSPRRARSVASQSIIAYTMSLGAENSVAYSNNSIAIPTNFTISVTTEILPVSMTKTSVDCTMYICGDSTECSNLLLQYGSFCTQLNRALTGIAVEQDKNTQEVFAQVKQIYKTPPIKDFGGFNFSQILPDPSKPSKRSFIEDLLFNKVTLADAGFIKQYGDCLGDIAARDLICAQKFNGLTVLPPLLTDEMIAQYTSALLAGTITSGWTFGAGAALQIPFAMQMAYRFNGIGVTQCVLYENQKLIANQFNSAIGKIQDSLSSTASALGKLQDVVNQNAQALNTLVKQLSSNFGAISSVLNDILSRLDKVEAEVQIDRLITGRLQSLQTYVTQQLIRAAEIRASANLAATKMSECVLGQSKRVDFCGKGYHLMSFPQSAPHGVVFLHVTYVPAQEKNFTTAPAICHDGKAHFPREGVFVSNGTHWFVTQRNFYEPQIITTDNTFVCGNCDVVIGIVNNTVYDPLQPELDSGGGSGGGQIYEGKLTAEGLRFGIVASRFNHALVDRLVEGAIDAIVRHGGREEDITLVRVPGSWEIPVAAGELARKEDIDAVIAIGVLIRGATPHFDYIASEVSKGLADLSLELRKPITFGVITADTLEQAIERAGTKHGNKGWEAALSAIEMANLFKSLR

SEQ ID NO: 13874 - protein, 1307 aa, Artificial Sequence; identical to SEQ ID NO: 13864
  SARS-CoV-2/England/200990660/2020__EPI_ISL_414523 spike protein (1-1147)(N914C_S1123C) LumSynth construct

SEQ ID NO: 13875 - protein, 1307 aa, Artificial Sequence
  SARS-CoV-2/Australia/NSW09/2020__EPI_ISL_413595 spike protein (1-1147)(N914C_S1123C) LumSynth construct
MFVFLVLLPLVSSQCVNLTTRTQLPPAYTNSFTRGVYYPDKVFRSSVLHSTQDLFLPFFSNVTWFHAIHVSGTNGTKRFDNPVLPFNDGVYFASTEKSNIIRGWIFGTTLDSKTQSLLIVNNATNVVIKVCEFQFCNDPFLGVYYHKNNKSWMESEFRVYSSANNCTFEYVSQPFLMDLEGKQGNFKNLREFVFKNIDGYFKIYSKHTPINLVRDLPQGFSALEPLVDLPIGINITRFQTLLALHRSYLTPGDSSSGWTAGAAAYYVGYLQPRTFLLKYNENGTITDAVDCALDPLSETKCTLKSFTVEKGIYQTSNFRVQPTESIVRFPNITNLCPFGEVFNATRFASVYAWNRKRISNCVADYSVLYNSASFSTFKCYGVSPTKLNDLCFTNVYADSFVIRGDEVRQIAPGQTGKIADYNYKLPDDFTGCVIAWNSNNLDSKVGGNYNYLYRLFRKSNLKPFERDISTEIYQAGSTPCNGVEGFNCYFPLQSYGFQPTNGVGYQPYRVVVLSFELLHAPATVCGPKKSTNLVKNKCVNFNFNGLTGTGVLTESNKKFLPFQQFGRDIADTTDAVRDPQTLEILDITPCSFGGVSVITPGTNTSNQVAVLYQDVNCTEVPVAIHADQLTPTWRVYSTGSNVFQTRAGCLIGAEHVNNSYECDIPIGAGICASYQTQTNSPRRARSVASQSIIAYTMSLGAENSVAYSNNSIAIPTNFTISVTTEILPVSMTKTSVDCTMYICGDSTECSNLLLQYGSFCTQLNRALTGIAVEQDKNTQEVFAQVKQIYKTPPIKDFGGFNFSQILPDPSKPSKRSFIEDLLFNKVTLADAGFIKQYGDCLGDIAARDLICAQKFNGLTVLPPLLTDEMIAQYTSALLAGTITSGWTFGAGAALQIPFAMQMAYRFNGIGVTQCVLYENQKLIANQFNSAIGKIQDSLSFTASALGKLQDVVNQNAQALNTLVKQLSSNFGAISSVLNDILSRLDKVEAEVQIDRLITGRLQSLQTYVTQQLIRAAEIRASANLAATKMSECVLGQSKRVDFCGKGYHLMSFPQSAPHGVVFLHVTYVPAQEKNFTTAPAICHDGKAHFPREGVFVSNGTHWFVTQRNFYEPQIITTDNTFVCGNCDVVIGIVNNTVYDPLQPELDSGGGSGGGQIYEGKLTAEGLRFGIVASRFNHALVDRLVEGAIDAIVRHGGREEDITLVRVPGSWEIPVAAGELARKEDIDAVIAIGVLIRGATPHFDYIASEVSKGLADLSLELRKPITFGVITADTLEQAIERAGTKHGNKGWEAALSAIEMANLFKSLR

SEQ ID NO: 13876 - protein, 1307 aa, Artificial Sequence; identical to SEQ ID NO: 13856
  SARS-CoV-2/Australia/NSW10/2020__EPI_ISL_413596 spike protein (1-1147)(N914C_S1123C) LumSynth construct

SEQ ID NO: 13877 - protein, 1307 aa, Artificial Sequence
  SARS-CoV-2/Switzerland/1000477797/2020__EPI_ISL_413023 spike protein (1-1147)(N914C_S1123C) LumSynth construct
MFVFLVLLPLVSSQCVNLTTRTQLPPAYTNSFTRGVYYPDKVFRSSVLHSTQDLFLPFFSNVTWFHAIHVSGTNGTKRFDNPVLPFNDGVYFASTEKSNIIRGWIFGTTLDSKTQSLLIVNNATNVVIKVCEFQFCNDPFLGVYYHKNNKSWMESEFRVYSSANNCTFEYVSQPFLMDLEGKQGNFKNLREFVFKNIDGYFNIYSKHTPINLVRDLPQGFSALEPLVDLPIGINITRFQTLLALHRSYLTPGDSSSGWTAGAAAYYVGYLQPRTFLLKYNENGTITDAVDCALDPLSETKCTLKSFTVEKGIYQTSNFRVQPTESIVRFPNITNLCPFGEVFNATRFASVYAWNRKRISNCVADYSVLYNSASFSTFKCYGVSPTKLNDLCFTNVYADSFVIRGDEVRQIAPGQTGKIADYNYKLPDDFTGCVIAWNSNNLDSKVGGNYNYLYRLFRKSNLKPFERDISTEIYQAGSTPCNGVEGFNCYFPLQSYGFQPTNGVGYQPYRVVVLSFELLHAPATVCGPKKSTNLVKNKCVNFNFNGLTGTGVLTESNKKFLPFQQFGRDIADTTDAVRDPQTLEILDITPCSFGGVSVITPGTNTSNQVAVLYQGVNCTEVPVAIHADQLTPTWRVYSTGSNVFQTRAGCLIGAEHVNNSYECDIPIGAGICASYQTQTNSPRRARSVASQSIIAYTMSLGAENSVAYSNNSIAIPTNFTISVTTEILPVSMTKTSVDCTMYICGDSTECSNLLLQYGSFCTQLNRALTGIAVEQDKNTQEVFAQVKQIYKTPPIKDFGGFNFSQILPDPSKPSKRSFIEDLLFNKVTLADAGFIKQYGDCLGDIAARDLICAQKFNGLTVLPPLLTDEMIAQYTSALLAGTITSGWTFGAGAALQIPFAMQMAYRFNGIGVTQCVLYENQKLIANQFNSAIGKIQDSLSSTASALGKLQDVVNQNAQALNTLVKQLSSNFGAISSVLNDILSRLDKVEAEVQIDRLITGRLQSLQTYVTQQLIRAAEIRASANLAATKMSECVLGQSKRVDFCGKGYHLMSFPQSAPHGVVFLHVTYVPAQEKNFTTAPAICHDGKAHFPREGVFVSNGTHWFVTQRNFYEPQIITTDNTFVCGNCDVVIGIVNNTVYDPLQPELDSGGGSGGGQIYEGKLTAEGLRFGIVASRFNHALVDRLVEGAIDAIVRHGGREEDITLVRVPGSWEIPVAAGELARKEDIDAVIAIGVLIRGATPHFDYIASEVSKGLADLSLELRKPITFGVITADTLEQAIERAGTKHGNKGWEAALSAIEMANLFKSLR

SEQ ID NO: 13878 - protein, 1307 aa, Artificial Sequence
  SARS-CoV-2/Belgium/BA-02291/2020__EPI_ISL_415159 spike protein (1-1147)(N914C_S1123C) LumSynth construct
MFVFLVLLPLVSSQCVNLTTRTQLPPAYTNSFTRGVYYPDKVFRSSVLHSTQDLFLPFFSNVTWFHAIHVSGTNGTKRFDNPVLPFNDGVYFASTEKSNIIRGWIFGTTLDSKTQSLLIVNNATNVVIKVCEFQFCNDPFLGVYYHKNNKSWMESEFRVYSSANNCTFEYVSQPFLMDLEGKQGNFKNLREFVFKNIDGYFKIYSKHTPINLVRDLPQGFSALEPLVDLPIGINITRFQTLLALHRSYLTPGDSSSGWTAGAAAYYVGYLQPRTFLLKYNENGTITDAVDCALDPLSETKCTLKSFTVEKGIYQTSNFRVQPTESIVRFPNITNLCPFGEVFNATRFASVYAWNRKRISNCVADYSVLYNSASFSTFKCYGVSPTKLNDLCFTNVYADSFVIRGDEVRQIAPGQTGKIADYNYKLPDDFTGCVIAWNSNNLDSKVGGNYNYLYRLFRRSNLKPFERDISTEIYQAGSTPCNGVEGFNCYFPLQSYGFQPTNGVGYQPYRVVVLSFELLPAPATVCGPKKSTNLVKNKCVNFNFNGLTGTGVLTESNKKFLPFQQFGRDIADTTDAVRDPQTLEILDITPCSFGGVSVITPGTNTSNQVAVLYQGVNCTEVPVAIHADQLTPTWRVYSTGSNVFQTRAGCLIGAEHVNNSYECDIPIGAGICASYQTQTNSPRRARSVASQSIIAYTMSLGAENSVAYSNNSIAIPTNFTISVTTEILPVSMTKTSVDCTMYICGDSTECSNLLLQYGSFCTQLNRALTGIAVEQDKNTQEVFAQVKQIYKTPPIKDFGGFNFSQILPDPSKPSKRSFIEDLLFNKVTLADAGFIKQYGDCLGDIAARDLICAQKFNGLTVLPPLLTDEMIAQYTSALLAGTITSGWTFGAGAALQIPFAMQMAYRFNGIGVTQCVLYENQKLIANQFNSAIGKIQDSLSSAAPALGKLQDVVNQNAQALNTLVKQLSSNFGAISSVLNDILSRLDKVEAEVQIDRLITGRLQSLQTYVTQQLIRAAEIRASANLAATKMSECVLGQSKRVDFCGKGYHLMSFPQSAPHGVVFLHVTYVPAQEKNFTTAPAICHDGKAHFPREGVFVSNGTHWFVTQRNFYEPQIITTDNTFVCGNCDVVIGIVNNTVYDPLQPELDSGGGSGGGQIYEGKLTAEGLRFGIVASRFNHALVDRLVEGAIDAIVRHGGREEDITLVRVPGSWEIPVAAGELARKEDIDAVIAIGVLIRGATPHFDYIASEVSKGLADLSLELRKPITFGVITADTLEQAIERAGTKHGNKGWEAALSAIEMANLFKSLR

SEQ ID NO: 13879 - protein, 1307 aa, Artificial Sequence
  SARS-CoV-2/USA/WA8-UW5/2020__EPI_ISL_413486 spike protein (1-1147)(N914C_S1123C) LumSynth construct
MFVFLVLLPLVSSQCVNLTTRTQLPPAYTNSFTRGVYYPDKVFRSSVLHSTQDLFLPFFSNVTWFHAIHVSGTNGTKRFDNPVLPFNDGVYFASTEKSNIIRGWIFGTTLDSKTQSLLIVNNATNVVIKVCEFQFCNDPFLGVYYHKNNKSWMESEFRVYSSANNCTFEYVSQPFLMDLEGKQGNFKNLREFVFKNIDGYFKIYSKHTPINLVRDLPQGFSALEPLVDLPIGINITRFQTLLALHRSYLTPGDSSSGWTAGAAAYYVGYLQPRTFLLKYNENGTITDAVDCALDPLSETKCTLKSFTVEKGIYQTSNFRVQPTESIVRFPNITNLCPFGEVFNATRFASVYAWNRKRISNCVADYSVLYNSASFSTFKCYGVSPTKLNDLCFTNVYADSFVIRGDEVRQIAPGQTGKIADYNYKLPDDFTGCVIAWNSNNLDSKVGGNYNYLYRLFRKSNLKPFERDISTEIYQAGSTPCNGVEGFNCYFPLQSYGFQPTNGVGYQPYRVVVLSFELLHAPATVCGPKKSTNLVKNKCVNFNFNGLTGTGVLTESNKKFLPFQQFGRDIADTTDAVRDPQTLEILDITPCSFGGVSVITPGTNTSNQVAVLYQDVNCTEVPVAIHADQLTPTWRVYSTGSNVFQTRAGCLIGAEYVNNSYECDIPIGAGICASYQTQTNSPRRARSVASQSIIAYTMSLGAENSVAYSNNSIAIPTNFTISVTTEILPVSMTKTSVDCTMYICGDSTECSNLLLQYGSFCTQLNRALTGIAVEQDKNTQEVFAQVKQIYKTPPIKDFGGFNFSQILPDPSKPSKRSFIEDLLFNKVTLADAGFIKQYGDCLGDIAARDLICAQKFNGLTVLPPLLTDEMIAQYTSALLAGTITSGWTFGAGAALQIPFAMQMAYRFNGIGVTQCVLYENQKLIANQFNSAIGKIQDSLSSTASALGKLQDVVNQNAQALNTLVKQLSSNFGAISSVLNDILSRLDKVEAEVQIDRLITGRLQSLQTYVTQQLIRAAEIRASANLAATKMSECVLGQSKRVDFCGKGYHLMSFPQSAPHGVVFLHVTYVPAQEKNFTTAPAICHDGKAHFPREGVFVSNGTHWFVTQRNFYEPQIITTDNTFVCGNCDVVIGIVNNTVYDPLQPELDSGGGSGGGQIYEGKLTAEGLRFGIVASRFNHALVDRLVEGAIDAIVRHGGREEDITLVRVPGSWEIPVAAGELARKEDIDAVIAIGVLIRGATPHFDYIASEVSKGLADLSLELRKPITFGVITADTLEQAIERAGTKHGNKGWEAALSAIEMANLFKSLR

SEQ ID NO: 13880 - protein, 1307 aa, Artificial Sequence
  SARS-CoV-2/England/20102000506/2020__EPI_ISL_415147 spike protein (1-1147)(N914C_S1123C) LumSynth construct
MFVFLVLLPLVSSQCVNLTTRTQLPPAYTNSFTRGVYYPDKVFRSSVLHSTQDLFLPFFSNVTWFHAIHVSGTNGTKRFDNPVLPFNDGVYFASTEKSNIIRGWIFGTTLDSKTQSLLIVNNATNVVIKVCEFQFCNDPFLGVYYHKNNKSWMESEFRVYSSANNCTFEYVSQPFLMDLEGKQGNFKNLREFVFKNIDGYFKIYSKHTPINLVRDLPQGFSALEPLVDLPIGINITRFQTLLALHRSYLTPGDSSSGWTAGAAAYYVGYLQPRTFLLKYNENGTITDAVDCALDPLSETKCTLKSFTVEKGIYQTSNFRVQPTESIVRFPNITNLCPFGEVFNATRFASVYAWNRKRISNCVADYSVLYNSASFSTFKCYGVSPTKLNDLCFTNVYADSFVIRGDEVRQIAPGQTGKIADYNYKLPDDFTGCVIAWNSNNLDSKVGGNYNYLYRLFRKSNLKPFERDISTEIYQAGSTPCNGVEGFNCYFPLQSYGFQPTNGVGYQPYRVVVLSFELLHAPATVCGPKKSTNLVKNKCVNFNFNGLTGTGVLTESNKKFLPFQQFGRDIADTTDAVRDPQTLEILDITPCSFGGVSVITPGTNTSNQVAVLYQGVNCTEVPVAIHADQLTPTWRVYSTGSNVFQTRAGCLIGAEHVNNSYECDIPIGAGICASYQTQTNSPRRARSVASQSIIAYTMSLGAENSVAYSNNSIAIPTNFTISVTTEILPVSMTKTSVDCTMYICGDSTECSNLLLQYGSFCTQLNRALTGIAVEQDKNTQEVFAQVKQIYKTPPIKDFGGFNFSQILPDPSKPSKRSFIEDLLFNKVTLADAGFIKQYGYCLGDIAARDLICAQKFNGLTVLPPLLTDEMIAQYTSALLAGTITSGWTFGAGAALQIPFAMQMAYRFNGIGVTQCVLYENQKLIANQFNSAIGKIQDSLSSTASALGKLQDVVNQNAQALNTLVKQLSSNFGAISSVLNDILSRLDKVEAEVQIDRLITGRLQSLQTYVTQQLIRAAEIRASANLAATKMSECVLGQSKRVDFCGKGYHLMSFPQSAPHGVVFLHVTYVPAQEKNFTTAPAICHDGKAHFPREGVFVSNGTHWFVTQRNFYEPQIITTDNTFVCGNCDVVIGIVNNTVYDPLQPELDSGGGSGGGQIYEGKLTAEGLRFGIVASRFNHALVDRLVEGAIDAIVRHGGREEDITLVRVPGSWEIPVAAGELARKEDIDAVIAIGVLIRGATPHFDYIASEVSKGLADLSLELRKPITFGVITADTLEQAIERAGTKHGNKGWEAALSAIEMANLFKSLR

SEQ ID NO: 13881 - protein, 1307 aa, Artificial Sequence
  SARS-CoV-2/Belgium/VAG-03013/2020__EPI_ISL_415155 spike protein (1-1147)(N914C_S1123C) LumSynth construct
MFVFLVLLPLVSSQCVNLTTRTQLPPAYTNSFTRGVYYPDKVFRSSVLHSTQDLFLPFFSNVTWFHAIHVSGTNGTKRFDNPVLPFNDGVYFASTEKSNIIRGWIFGTTLDSKTQSLLIVNNATNVVIKVCEFQFCNDPFLGVYYHKNNKSWMESEFRVYSSANNCTFEYVSQPFLMDLEGKQGNFKNLREFVFKNIDGYFKIYSKHTPINLVRDLPQGFSALEPLVDLPIGINITRFQTLLALHRSYLTPGDSSSGWTAGAAAYYVGYLQPRTFLLKYNENGTITDAVDCALDPLSETKCTLKSFTVEKGIYQTSNFRVQPTESIVRFPNITNLCPFGEVFNATRFASVYAWNRKRISNCVADYSVLYNSASFSTFKCYGVSPTKLNDLCFTNVYADSFVIRGDEVRQIAPGQTGKIADYNYKLPDDFTGCVIAWNSNNLDSKVGGNYNYLYRLFRKSNLKPFERDISTEIYQAGSTPCNGVEGFNCYFPLQSYGFQPTNGVGYQPYRVVVLSFELLHAPATVCGPKKSTNLVKNKCVNFNFNGLTGTGVLTESNKKFLPFQQFGRDIADTTDAVRDPQTLEILDITPCSFGGVSVITPGTNTSNQVAVLYQGVNCTEVPVAIHADQLTPTWRVYSTGSNVFQTRAGCLIGAEHVNNSYECDIPIGAGICASYQTQTNSPRRARSVASQSIIAYTMSLGAENSVAYSNNSIAIPTNFTISVTTEILPVSMTKTSVDCTMYICGDSTECSNLLLQYGSFCTQLNRALTGIAVEQDKNTQEVFAQVKQIYKTPPIKDFGGFNFSQILPDPSKPSKRSFIEDLLFNKVTLADAGFIKQYGDCLGDIAARDLICAQKFNGLTVLPPLLTDEMIAQYTSALLAGTITSGWTFGAGAALQIPFAMQMAYRFNGIGVTQCVLYENQKLIANQFNSAIGKIQDSLSSTATALGKLQDVVNQNAQALNTLVKQLSSNFGAISSVLNDILSRLDKVEAEVQIDRLITGRLQSLQTYVTQQLIRAAEIRASANLAATKMSECVLGQSKRVDFCGKGYHLMSFPQSAPHGVVFLHVTYVPAQEKNFTTAPAICHDGKAHFPREGVFVSNGTHWFVTQRNFYEPQIITTDNTFVCGNCDVVIGIVNNTVYDPLQPELDSGGGSGGGQIYEGKLTAEGLRFGIVASRFNHALVDRLVEGAIDAIVRHGGREEDITLVRVPGSWEIPVAAGELARKEDIDAVIAIGVLIRGATPHFDYIASEVSKGLADLSLELRKPITFGVITADTLEQAIERAGTKHGNKGWEAALSAIEMANLFKSLR

SEQ ID NO: 13882 - protein, 1307 aa, Artificial Sequence
  SARS-CoV-2/Belgium/BC-03016/2020__EPI_ISL_415157 spike protein (1-1147)(N914C_S1123C) LumSynth construct
MFVFLVLLPLVSSQCVNLTTRTQLPPAYTNSFTRGVYYPDKVFRSSVLHSTQDLFLPFFSNVTWFHAIHVSGTNGTKRFDNPVLPFNDGVYFASTEKSNIIRGWIFGTTLDSKTQSLLIVNNATNVVIKVCEFQFCNDPFLGVYYHKNNKSWMESEFRVYSSANNCTFEYVSQPFLMDLEGKQGNFKNLREFVFKNIDGYFKIYSKHTPINLVRDLPQGFSALEPLVDLPIGINITRFQTLLALHRSYLTPGDSSSGWTAGAAAYYVGYLQPRTFLLKYNENGTITDAVDCALDPLSETKCTLKSFTVEKGIYQTSNFRVQPTESIVRFPNITNLCPFGEVFNATRFASVYAWNRKRISNCVADYSVLYNSASFSTFKCYGVSPTKLNDLCFTNVYADSFVIRGDEVRQIAPGQTGKIADYNYKLPDDFTGCVIAWNSNNLDSKVGGNYNYLYRLFRKSNLKPFERDISTEIYQAGSTPCNGVEGFNCYFPLQSYGFQPTNGVGYQPYRVVVLSFELLHAPATVCGPKKSTNLVKNKCVNFNFNGLTGTGVLTESNKKFLPFQQFGRDIADTTDAVRDPQTLEILDITPCSFGGVSVITPGTNTSNQVAVLYQGVNCTEVPVAIHADQLTPTWRVYSTGSNVFQTRAGCLIGAEHVNNSYECDIPIGAGICASYQTQTNSPRRARSVASQSIIAYTMSLGAENSVAYSNNSIAIPTNFTISVTTEILPVSMTKTSVDCTMYICGDSTECSNLLLQYGSFCTQLNRALTGIAVEQDKNTQEVFAQVKQIYKTPPIKDFGGFNFSQILPDPSKPSKRSFIEDLLFNKVTLADAGFIKQYGDCLGDIAARDLICAQKFNGLTVLPPLLTDEMIAQYTSALLAGTITSGWTFGAGAALQIPFAMQMAYRFNGIGVTQCVLYENQKLIANQFNSAIGKIQDSLSSTAPALGKLQDVVNQNAQALNTLVKQLSSNFGAISSVLNDILSRLDKVEAEVQIDRLITGRLQSLQTYVTQQLIRAAEIRASANLAATKMSECVLGQSKRVDFCGKGYHLMSFPQSAPHGVVFLHVTYVPAQEKNFTTAPAICHDGKAHFPREGVFVSNGTHWFVTQRNFYEPQIITTDNTFVCGNCDVVIGIVNNTVYDPLQPELDSGGGSGGGQIYEGKLTAEGLRFGIVASRFNHALVDRLVEGAIDAIVRHGGREEDITLVRVPGSWEIPVAAGELARKEDIDAVIAIGVLIRGATPHFDYIASEVSKGLADLSLELRKPITFGVITADTLEQAIERAGTKHGNKGWEAALSAIEMANLFKSLR

SEQ ID NO: 13883 - protein, 1307 aa, Artificial Sequence
  SARS-CoV-2/Germany/BavPat3/2020__EPI_ISL_414521 spike protein (1-1147)(N914C_S1123C) LumSynth construct
MFVFLVLLPLVSSQCVNLTTRTQLPPAYTNSFTRGVYYPDKVFRSSVLHSTQDLFLPFFSNVTWFHAIHVSGTNGTKRFDNPVLPFNDGVYFASTEKSNIIRGWIFGTTLDSKTQSLLIVNNATNVVIKVCEFQFCNDPFLGVYYHKNNKSWMESEFRVYSSANNCTFEYVSQPFLMDLEGKQGNFKNLREFVFKNIDGYFKIYSKHTPINLVRDLPQGFSALEPLVDLPIGINITRFQTLLALHRSYLTPGDSSSGWTAGAAAYYVGYLQPRTFLLKYNENGTITDAVDCALDPLSETKCTLKSFTVEKGIYQTSNFRVQPTESIVRFPNITNLCPFGEVFNATRFASVYAWNRKRISNCVADYSVLYNSASFSTFKCYGVSPTKLNDLCFTNVYADSFVIRGDEVRQIAPGQTGKIADYNYKLPDDFTGCVIAWNSNNLDSKVGGNYNYLYRLFRKSNLKPFERDISTEIYQAGSTPCNGVEGFNCYFPLQSYGFQPTNGVGYQPYRVVVLSFELLHAPATVCGPKKSTNLVKNKCVNFNFNGLTGTGVLTESNKKFLPFQQFGRDIADTTDAVRDPQTLEILDITPCSFGGVSVITPGTNTSNQVAVLYQDVNCTEVPVAIHADQLTPTWRVYSTGSNVFQTRAGCLIGAEHVNNSYECDIPIGAGICASYQTQTNSPRRARSVASQSIIAYTMSLGAENSVAYSNNSIAIPTNFTISVTTEILPVSMTKTSVDCTMYICGDSTECSNLLLQYGSFCTQLNRALTGIAVEQDKNTQQVFAQVKQIYKTPPIKDFGGFNFSQILPDPSKPSKRSFIEDLLFNKVTLADAGFIKQYGDCLGDIAARDLICAQKFNGLTVLPPLLTDEMIAQYTSALLAGTITSGWTFGAGAALQIPFAMQMAYRFNGIGVTQCVLYENQKLIANQFNSAIGKIQDSLSSTASALGKLQDVVNQNAQALNTLVKQLSSNFGAISSVLNDILSRLDKVEAEVQIDRLITGRLQSLQTYVTQQLIRAAEIRASANLAATKMSECVLGQSKRVDFCGKGYHLMSFPQSAPHGVVFLHVTYVPAQEKNFTTAPAICHDGKAHFPREGVFVSNGTHWFVTQRNFYEPQIITTDNTFVCGNCDVVIGIVNNTVYDPLQPELDSGGGSGGGQIYEGKLTAEGLRFGIVASRFNHALVDRLVEGAIDAIVRHGGREEDITLVRVPGSWEIPVAAGELARKEDIDAVIAIGVLIRGATPHFDYIASEVSKGLADLSLELRKPITFGVITADTLEQAIERAGTKHGNKGWEAALSAIEMANLFKSLR

SEQ ID NO: 13884 - protein, 1307 aa, Artificial Sequence
  SARS-CoV-2/France/HF1805/2020__EPI_ISL_414628 spike protein (1-1147)(N914C_S1123C) LumSynth construct
MFVFLVLLPLVSSQCVNLTTRTQLPPAYTNSFTRGVYYPDKVFRSSVLHSTQDLFLPFFSNVTWFHAIHVSGTNGTKRFDNPVLPFNDGVYFASTEKSNIIRGWIFGTTLDSKTQSLLIVNNATNVVIKVCEFQFCNDPFLGVYYHKNNKSWMESEFRVYSSANNCTFEYVSQPFLMDLEGKQGNFKNLREFVFKNIDGYFKIYSKHTPINLVRDLPQGFSALEPLVDLPIGINITRFQTLLALHRSYLTPGDSSSGWTAGAAAYYVGYLQPRTFLLKYNENGTITDAVDCALDPLSETKCTLKSFTVEKGIYQTSNFRVQPTESIVRFPNITNLCPFGEVFNATRFASVYAWNRKRISNCVADYSVLYNSASFSTFKCYGVSPTKLNDLCFTNVYADSFVIRGDEVRQIAPGQTGKIADYNYKLPDDFTGCVIAWNSNNLDSKVGGNYNYLYRLFRKSNLKPFERDISTEIYQAGSTPCNGVEGFNCYFPLQSYGFQPTNGVGYQPYRVVVLSFELLHAPATVCGPKKSTNLVKNKCVNFNFNGLTGTGVLTESNKKFLPFQQFGRDIADTTDAVRDPQTLEILDITPCSFGGVSVITPGTNTSNQVAVLYQGVNCTEVPVAIHADQLTPTWRVYSTGSNVFQTRAGCLIGAEHVNNSYECDIPIGAGICASYQTQTNSPRRARSVASQSIIAYTMSLGAENSVAYSNNSIAIPTNFTISVTTEILPVSMTKTSVDCTMYICGDSTECSNLLLQYGSFCTQLNRALTGIAVEQDKNTQEVFAQVKQIYKTPPIKDFGGFNFSQILPDPSKPSKRSFIEDLLFNKVTLADAGFIKQYGDCLGDIAARDLICAQKFNGLTVLPPLLTDEMIAQYTSALLAGTITSGWTFGAGAALQIPFAMQMAYRFNGIGVTQCVLYENQKLIANQFNSAIGKIQDSLSSTASALGKLQDVVNQNAQALNTLVKQLSSNFGAISSVLNDILSRLDKVEAEVQIDRLITGRLQSLQTYVTQQLIRAAEIRASANLAATKMSECVLGQSKRVDFCGKGYHLMSFPQSAPHGVVFLHVTYVPAQEKNFTTAPAICHDGKAHFPREGVFVSNGTHWFVTQRNFYEPQIITTDNTFVCGNCDVVIGVVNNTVYDPLQPELDSGGGSGGGQIYEGKLTAEGLRFGIVASRFNHALVDRLVEGAIDAIVRHGGREEDITLVRVPGSWEIPVAAGELARKEDIDAVIAIGVLIRGATPHFDYIASEVSKGLADLSLELRKPITFGVITADTLEQAIERAGTKHGNKGWEAALSAIEMANLFKSLR

SEQ ID NO: 13885 - protein, 1307 aa, Artificial Sequence
  SARS-CoV-2/Netherlands/ZuidHolland_9/2020__EPI_ISL_414445 spike protein (1-1147)(N914C_S1123C) LumSynth construct
MFVFLVLLPLVSSQCVNLTTRTQLPPAYTNSFTRGVYYPDKVFRSSVLHSTQDLFLPFFSNVTWFHAIHVSGTNGTKRFDNPVLPFNDGVYFASTEKSNIIRGWIFGTTLDSKTQSLLIVNNATNVVIKVCEFQFCNDPFLGVYYHKNNKSWMESEFRVYSSANNCTFEYVSQPFLMDLEGKQGNFKNLREFVFKNIDGYFKIYSKHTPINLVRDLPQGFSALEPLVDLPIGINITRFQTLLALHRSYLTPGDSSSGWTAGAAAYYVGYLQPRTFLLKYNENGTITDAVDCALDPLSETKCTLKSFTVEKGIYQTSNFRVQPTESIVRFPNITNLCPFGEVFNATRFASVYAWNRKRISNCVADYSVLYNSASFSTFKCYGVSPTKLNDLCFTNVYADSFVIRGDEVRQIAPGQTGKIADYNYKLPDDFTGCVIAWNSNNLDSKVGGNYNYLYRLFRKSNLKPFERDISTEIYQAGSTPCNGVEGFNCYFPLQSYGFQPTNGVGYQPYRVVVLSFELLHAPATVCGPKKSTNLVKNKCVNFNFNGLTGTGVLTESNKKFLPFQQFGRDIADTTDAVRDPQTLEILDITPCSFGGVSVITPGTNTSNQVAVLYQGVNCTEVPVAIHADQLTPTWRVYSTGSNVFQTRAGCLIGAEHVNNSYECDIPIGAGICASYQTQTNSPRRARSVASQSIIAYTMSLGAENSVAYSNNSIAIPTNFTISVTTEILPVSMTKTSVDCTMYICGDSTECSNLLLQYGSFCTQLNRALTGIAVEQDKNTQEVFAQVKQIYKTPPIKDFGGFNFSQILPDPSKPSKRSFIEDLLFNKVTLADAGFIKQYGDCLGDIAARDLICVQKFNGLTVLPPLLTDEMIAQYTSALLAGTITSGWTFGAGAALQIPFAMQMAYRFNGIGVTQCVLYENQKLIANQFNSAIGKIQDSLSSTASALGKLQDVVNQNAQALNTLVKQLSSNFGAISSVLNDILSRLDKVEAEVQIDRLITGRLQSLQTYVTQQLIRAAEIRASANLAATKMSECVLGQSKRVDFCGKGYHLMSFPQSAPHGVVFLHVTYVPAQEKNFTTAPAICHDGKAHFPREGVFVSNGTHWFVTQRNFYEPQIITTDNTFVCGNCDVVIGIVNNTVYDPLQPELDSGGGSGGGQIYEGKLTAEGLRFGIVASRFNHALVDRLVEGAIDAIVRHGGREEDITLVRVPGSWEIPVAAGELARKEDIDAVIAIGVLIRGATPHFDYIASEVSKGLADLSLELRKPITFGVITADTLEQAIERAGTKHGNKGWEAALSAIEMANLFKSLR

SEQ ID NO: 13886 - protein, 1307 aa, Artificial Sequence
  SARS-CoV-2/Finland/FIN03032020A/2020__EPI_ISL_413602 spike protein (1-1147)(N914C_S1123C) LumSynth construct
MFVFLVLLPLVSSQCVNLTTRTQLPPAYTNSFTRGVYYPDKVFRSSVLHSTQDLFLPFFSNVTWFHAIHVSGTNGTKRFDNPVLPFNDGVYFASTEKSNIIRGWIFGTTLDSKTQSLLIVNNATNVVIKVCEFQFCNDPFLGVYYHKNNKSWMESEFRVYSSANNCTFEYVSQPFLMDLEGKQGNFKNLREFVFKNIDGYFKIYSKHTPINLVRDLPQGFSALEPLVDLPIGINITRFQTLLALHRSYLTPGDSSSGWTAGAAAYYVGYLQPRTFLLKYNENGTITDAVDCALDPLSETKCTLKSFTVEKGIYQTSNFRVQPTESIVRFPNITNLCPFGEVFNATRFASVYAWNRKRISNCVADYSVLYNSASFSTFKCYGVSPTKLNDLCFTNVYADSFVIRGDEVRQIAPGQTGKIADYNYKLPDDFTGCVISWNSNNLDSKVGGNYNYLYRLFRKSNLKPFERDISTEIYQAGSTPCNGVEGFNCYFPLQSYGFQPTNGVGYQPYRVVVLSFELLHAPATVCGPKKSTNLVKNKCVNFNFNGLTGTGVLTESNKKFLPFQQFGRDIADTTDAVRDPQTLEILDITPCSFGGVSVITPGTNTSNQVAVLYQGVNCTEVPVAIHADQLTPTWRVYSTGSNVFQTRAGCLIGAEHVNNSYECDIPIGAGICASYQTQTNSPRRARSVASQSIIAYTMSLGAENSVAYSNNSIAIPTNFTISVTTEILPVSMTKTSVDCTMYICGDSTECSNLLLQYGSFCTQLNRALTGIAVEQDKNTQEVFAQVKQIYKTPPIKDFGGFNFSQILPDPSKPSKRSFIEDLLFNKVTLADAGFIKQYGDCLGDIAARDLICAQKFNGLTVLPPLLTDEMIAQYTSALLAGTITSGWTFGAGAALQIPFAMQMAYRFNGIGVTQCVLYENQKLIANQFNSAIGKIQDSLSSTASALGKLQDVVNQNAQALNTLVKQLSSNFGAISSVLNDILSRLDKVEAEVQIDRLITGRLQSLQTYVTQQLIRAAEIRASANLAATKMSECVLGQSKRVDFCGKGYHLMSFPQSAPHGVVFLHVTYVPAQEKNFTTAPAICHDGKAHFPREGVFVSNGTHWFVTQRNFYEPQIITTDNTFVCGNCDVVIGIVNNTVYDPLQPELDSGGGSGGGQIYEGKLTAEGLRFGIVASRFNHALVDRLVEGAIDAIVRHGGREEDITLVRVPGSWEIPVAAGELARKEDIDAVIAIGVLIRGATPHFDYIASEVSKGLADLSLELRKPITFGVITADTLEQAIERAGTKHGNKGWEAALSAIEMANLFKSLR

SEQ ID NO: 13887 - protein, 1307 aa, Artificial Sequence
  SARS-CoV-2/France/GE1977/2020__EPI_ISL_414632 spike protein (1-1147)(N914C_S1123C) LumSynth construct
MFVFLVLLPLVSSQCVNLTTRTQLPPAYTNSFTRGVYYPDKVFRSSVLHSTQDLFLPFFSNVTWFHAIHVSGTNGTKRFDNPVLPFNDGVYFASTEKSNIIRGWIFGTTLDSKTQSLLIVNNATNVVIKVCEFQFCNDPFLGVYYHKNNKSWMESEFRVYSSANNCTFEYVSQPFLMDLEGKQGNFKNLREFVFKNIDGYFKIYSKHTPINLVRDLPQGFSALEPLVDLPIGINITRFQTLLALHRSYLTPGDSSSGWTAGAAAYYVGYLQPRTFLLKYNENGTITDAVDCALDPLSETKCTLKSFTVEKGIYQTSNFRVQPTESIVRFPNITNLCPFGEVFNATRFASVYAWNRKRISNCVADYSVLYNSASFSTFKCYGVSPTKLNDLCFTNVYADSFVIRGDEVRQIAPGQTGKIADYNYKLPDDFTGCVIAWNSNNLDSKVGGNYNYLYRLFRKSNLKPFERDISTEIYQAGSTPCNGVEGFNCYFPLQSYGFQPTNGVGYQPYRVVVLSFELLHAPATVCGPKKSTNLVKNKCVNFNFNGLTGTGVLTESNKKFLPFQQFGRDIADTTDAVRDPQTLEILDITPCSFGGVSVITPGTNTSNQVAVLYQGVNCTEVPVAIHADQLTPTWRVYSTGSNVFQTRAGCLIGAEHVNNSYECDIPIGAGICASYQTQTNSPRRARSVASQSIIAYTMSLGAENSVAYSNNSIAIPTNFTISVTTEILPVSMTKTSVDCTMYICGDSTECSNLLLQYGSFCTQLNRALTGIAVEQDKNTQEVFAQVKQIYKTPPIKDFGGFNFSQILPDPSKPSKRSFIEDLLFNKVTLADAGFIKQYGDCLGDIAARDLICAQKFNGLTVLPPLLTDEMIAQYTSALLAGTITSGWTFGAGAALQIPFAMQMAYRFNGIGVTQCVLYENQKLIANQFNSAIGKIQDSLFSTASALGKLQDVVNQNAQALNTLVKQLSSNFGAISSVLNDILSRLDKVEAEVQIDRLITGRLQSLQTYVTQQLIRAAEIRASANLAATKMSECVLGQSKRVDFCGKGYHLMSFPQSAPHGVVFLHVTYVPAQEKNFTTAPAICHDGKAHFPREGVFVSNGTHWFVTQRNFYEPQIITTDNTFVCGNCDVVIGIVNNTVYDPLQPELDSGGGSGGGQIYEGKLTAEGLRFGIVASRFNHALVDRLVEGAIDAIVRHGGREEDITLVRVPGSWEIPVAAGELARKEDIDAVIAIGVLIRGATPHFDYIASEVSKGLADLSLELRKPITFGVITADTLEQAIERAGTKHGNKGWEAALSAIEMANLFKSLR

SEQ ID NO: 13888 - protein, 1307 aa, Artificial Sequence
  SARS-CoV-2/Finland/FIN-313/2020__EPI_ISL_414641 spike protein (1-1147)(N914C_S1123C) LumSynth construct
MFVFLVLLPLVSSQCVNLTTRTQLPPAYTNSFTRGVYYPDKVFRSSVLHSTQDLFLPFFSNVTWFHAIHVSGTNGTKRFDNPVLPFNDGVYFASTEKSNIIRGWIFGTTLDSKTQSLLIVNNATNVVIKVCEFQFCNDPFLGVYYHKNNKSWMESEFRVYSSANNCTFEYVSQPFLMDLEGKQGNFKNLREFVFKNIDGYFKIYSKHTPINLVRDLPQGFSALEPLVDLPIGINITRFKTLLALHRSYLTPGDSSSGWTAGAAAYYVGYLQPRTFLLKYNENGTITDAVDCALDPLSETKCTLKSFTVEKGIYQTSNFRVQPTESIVRFPNITNLCPFGEVFNATRFASVYAWNRKRISNCVADYSVLYNSASFSTFKCYGVSPTKLNDLCFTNVYADSFVIRGDEVRQIAPGQTGKIADYNYKLPDDFTGCVIAWNSNNLDSKVGGNYNYLYRLFRKSNLKPFERDISTEIYQAGSTPCNGVEGFNCYFPLQSYGFQPTNGVGYQPYRVVVLSFELLHAPATVCGPKKSTNLVKNKCVNFNFNGLTGTGVLTESNKKFLPFQQFGRDIADTTDAVRDPQTLEILDITPCSFGGVSVITPGTNTSNQVAVLYQGVNCTEVPVAIHADQLTPTWRVYSTGSNVFQTRAGCLIGAEHVNNSYECDIPIGAGICASYQTQTNSPRRARSVASQSIIAYTMSLGAENSVAYSNNSIAIPTNFTISVTTEILPVSMTKTSVDCTMYICGDSTECSNLLLQYGSFCTQLNRALTGIAVEQDKNTQEVFAQVKQIYKTPPIKDFGGFNFSQILPDPSKPSKRSFIEDLLFNKVTLADAGFIKQYGDCLGDIAARDLICAQKFNGLTVLPPLLTDEMIAQYTSALLAGTITSGWTFGAGAALQIPFAMQMAYRFNGIGVTQCVLYENQKLIANQFNSAIGKIQDSLSSTASALGKLQDVVNQNAQALNTLVKQLSSNFGAISSVLNDILSRLDKVEAEVQIDRLITGRLQSLQTYVTQQLIRAAEIRASANLAATKMSECVLGQSKRVDFCGKGYHLMSFPQSAPHGVVFLHVTYVPAQEKNFTTAPAICHDGKAHFPREGVFVSNGTHWFVTQRNFYEPQIITTDNTFVCGNCDVVIGIVNNTVYDPLQPELDSGGGSGGGQIYEGKLTAEGLRFGIVASRFNHALVDRLVEGAIDAIVRHGGREEDITLVRVPGSWEIPVAAGELARKEDIDAVIAIGVLIRGATPHFDYIASEVSKGLADLSLELRKPITFGVITADTLEQAIERAGTKHGNKGWEAALSAIEMANLFKSLR

SEQ ID NO: 13889 - protein, 1307 aa, Artificial Sequence
  SARS-CoV-2/Netherlands/ZuidHolland_2/2020__EPI_ISL_414556 spike protein (1-1147)(N914C_S1123C) LumSynth construct
MFVFLVLLPLVSSQCVNLTTRTQLPPAYTNSFTRGVYYPDKVFRSSVLHSTQDLFLPFFSNVTWFHAIHVSGTNGTKRFDNPVLPFNDGVYFASTEKSNIIRGWIFGTTLDSKTQSLLIVNNATNVVIKVCEFQFCNDPFLGVYYHKNNKSWMESEFRVYSSANNCTFEYVSQPFLMDLEGKQGNFKNLREFVFKNIDGYFKIYSKHTPINLVRDLPQGFSALEPLVDLPIGINITRFQTLLALHRSYLTPGDSSSGWTAGAAAYYVGYLQPRTFLLKYNENGTITDAVDCALDPLSETKCTLKSFTVEKGIYQTSNFRVQPTESIVRFPNITNLCPFGEVFNATRFASVYAWNRKRISNCVADYSVLYNSASFSTFKCYGVSPTKLNDLCFTNVYADSFVIRGDEVRQIAPGQTGKIADYNYKLPDDFTGCVIAWNSNNLDSKVGGNYNYLYRLFRKSNLKPFERDISTEIYQAGSTPCNGVEGFNCYFPLQSYGFQPTNGVGYQPYRVVVLSFELLHAPATVCGPKKSTNLVKNKCVNFNFNGLTGTGVLTESNKKFLPFQQFGRDIADTTDAVRDPQTLEILDITPCSFGGVSVITPGTNTSNQVAVLYQGVNCTEVPVAIHADQLTPTWRVYSTGSNVFQTRAGCLIGAEHVNNSYECDIPIGAGICASYQTQTNSPRRARSVASQSIIAYTMSLGAENSVAYSNNSIAIPTNFTISVTTEILPVSMTKTSVDCTMYICGDSTECSNLLLQYGSFCTQLNRALTGIALEQDKNTQEVFAQVKQIYKTPPIKDFGGFNFSQILPDPSKPSKRSFIEDLLFNKVTLADAGFIKQYGDCLGDIAARDLICAQKFNGLTVLPPLLTDEMIAQYTSALLAGTITSGWTFGAGAALQIPFAMQMAYRFNGIGVTQCVLYENQKLIANQFNSAIGKIQDSLSSTASALGKLQDVVNQNAQALNTLVKQLSSNFGAISSVLNDILSRLDKVEAEVQIDRLITGRLQSLQTYVTQQLIRAAEIRASANLAATKMSECVLGQSKRVDFCGKGYHLMSFPQSAPHGVVFLHVTYVPAQEKNFTTAPAICHDGKAHFPREGVFVSNGTHWFVTQRNFYEPQIITTDNTFVCGNCDVVIGIVNNTVYDPLQPELDSGGGSGGGQIYEGKLTAEGLRFGIVASRFNHALVDRLVEGAIDAIVRHGGREEDITLVRVPGSWEIPVAAGELARKEDIDAVIAIGVLIRGATPHFDYIASEVSKGLADLSLELRKPITFGVITADTLEQAIERAGTKHGNKGWEAALSAIEMANLFKSLR

SEQ ID NO: 13890 - protein, 1307 aa, Artificial Sequence
  SARS-CoV-2/USA/WA-UW31/2020__EPI_ISL_414618 spike protein (1-1147)(N914C_S1123C) LumSynth construct
MFVFLVLLPLVSSQCVNLTTRTQLPPAYTNSFTRGVYYPDKVFRSSVLHSTQDLFLPFFSNVTWFHAIHVSGTNGTKRFDNPVLPFNDGVYFASTEKSNIIRGWIFGTTLDSKTQSLLIVNNATNVVIKVCEFQFCNDPFLGVYYHKNNKSWMESEFRVYSSANNCTFEYVSQPFLMDLEGKQGNFKNLREFVFKNIDGYFKIYSKHTPINLVRDLPQGFSALEPLVDLPIGINITRFQTLLALHRSYLTPGDSSSGWTAGAAAYYVGYLQPRTFLLKYNENGTITDAVDCALDPLSETKCTLKSFTVEKGIYQTSNFRVQPTESIVRFPNITNLCPFGEVFNATRFASVYAWNRKRISNCVADYSVLYNSASFSTFKCYGVSPTKLNDLCFTNVYADSFVIRGDEVRQIAPGQTGKIADYNYKLPDDFTGCVIAWNSNNLDSKVGGNYNYLYRLFRKSNLKPFERDISTEIYQAGSTPCNGAEGFNCYFPLQSYGFQPTNGVGYQPYRVVVLSFELLHAPATVCGPKKSTNLVKNKCVNFNFNGLTGTGVLTESNKKFLPFQQFGRDIADTTDAVRDPQTLEILDITPCSFGGVSVITPGTNTSNQVAVLYQDVNCTEVPVAIHADQLTPTWRVYSTGSNVFQTRAGCLIGAEHVNNSYECDIPIGAGICASYQTQTNSPRRARSVASQSIIAYTMSLGAENSVAYSNNSIAIPTNFTISVTTEILPVSMTKTSVDCTMYICGDSTECSNLLLQYGSFCTQLNRALTGIAVEQDKNTQEVFAQVKQIYKTPPIKDFGGFNFSQILPDPSKPSKRSFIEDLLFNKVTLADAGFIKQYGDCLGDIAARDLICAQKFNGLTVLPPLLTDEMIAQYTSALLAGTITSGWTFGAGAALQIPFAMQMAYRFNGIGVTQCVLYENQKLIANQFNSAIGKIQDSLSSTASALGKLQDVVNQNAQALNTLVKQLSSNFGAISSVLNDILSRLDKVEAEVQIDRLITGRLQSLQTYVTQQLIRAAEIRASANLAATKMSECVLGQSKRVDFCGKGYHLMSFPQSAPHGVVFLHVTYVPAQEKNFTTAPAICHDGKAHFPREGVFVSNGTHWFVTQRNFYEPQIITTDNTFVCGNCDVVIGIVNNTVYDPLQPELDSGGGSGGGQIYEGKLTAEGLRFGIVASRFNHALVDRLVEGAIDAIVRHGGREEDITLVRVPGSWEIPVAAGELARKEDIDAVIAIGVLIRGATPHFDYIASEVSKGLADLSLELRKPITFGVITADTLEQAIERAGTKHGNKGWEAALSAIEMANLFKSLR

SEQ ID NO: 13891 - protein, 1307 aa, Artificial Sequence
  SARS-CoV-2/South Korea/SNU01/2020__EPI_ISL_411929 spike protein (1-1147)(N914C_S1123C) LumSynth construct
MFVFLVLLPLVSSQCVNLTTRTQLPPAYTNSFTRGVYYPDKVFRSSVLHSTQDLFLPFFSNVTWFHAIHVSGTNGTKRFDNPVLPFNDGVYFASTEKSNIIRGWIFGTTLDSKTQSLLIVNNATNVVIKVCEFQFCNDPFLGVYYHKNNKSWMESEFRVYSSANNCTFEYVSQPFLMDLEGKQGNFKNLREFVFKNIDGYFKIYSKHTPINLVRDLPQGFWALEPLVDLPIGINITRFQTLLALHRSYLTPGDSSSGWTAGAAAYYVGYLQPRTFLLKYNENGTITDAVDCALDPLSETKCTLKSFTVEKGIYQTSNFRVQPTESIVRFPNITNLCPFGEVFNATRFASVYAWNRKRISNCVADYSVLYNSASFSTFKCYGVSPTKLNDLCFTNVYADSFVIRGDEVRQIAPGQTGKIADYNYKLPDDFTGCVIAWNSNNLDSKVGGNYNYLYRLFRKSNLKPFERDISTEIYQAGSTPCNGVEGFNCYFPLQSYGFQPTNGVGYQPYRVVVLSFELLHAPATVCGPKKSTNLVKNKCVNFNFNGLTGTGVLTESNKKFLPFQQFGRDIADTTDAVRDPQTLEILDITPCSFGGVSVITPGTNTSNQVAVLYQDVNCTEVPVAIHADQLTPTWRVYSTGSNVFQTRAGCLIGAEHVNNSYECDIPIGAGICASYQTQTNSPRRARSVASQSIIAYTMSLGAENSVAYSNNSIAIPTNFTISVTTEILPVSMTKTSVDCTMYICGDSTECSNLLLQYGSFCTQLNRALTGIAVEQDKNTQEVFAQVKQIYKTPPIKDFGGFNFSQILPDPSKPSKRSFIEDLLFNKVTLADAGFIKQYGDCLGDIAARDLICAQKFNGLTVLPPLLTDEMIAQYTSALLAGTITSGWTFGAGAALQIPFAMQMAYRFNGIGVTQCVLYENQKLIANQFNSAIGKIQDSLSSTASALGKLQDVVNQNAQALNTLVKQLSSNFGAISSVLNDILSRLDKVEAEVQIDRLITGRLQSLQTYVTQQLIRAAEIRASANLAATKMSECVLGQSKRVDFCGKGYHLMSFPQSAPHGVVFLHVTYVPAQEKNFTTAPAICHDGKAHFPREGVFVSNGTHWFVTQRNFYEPQIITTDNTFVCGNCDVVIGIVNNTVYDPLQPELDSGGGSGGGQIYEGKLTAEGLRFGIVASRFNHALVDRLVEGAIDAIVRHGGREEDITLVRVPGSWEIPVAAGELARKEDIDAVIAIGVLIRGATPHFDYIASEVSKGLADLSLELRKPITFGVITADTLEQAIERAGTKHGNKGWEAALSAIEMANLFKSLR

SEQ ID NO: 13892 - protein, 1307 aa, Artificial Sequence
  SARS-CoV-2/China/WF0004/2020__EPI_ISL_413694 spike protein (1-1147)(N914C_S1123C) LumSynth construct
MFVFLVLLPLVSSQCVNLTTRTQLPPAYTNSFTRGVYYPDKVFRSSVLHSTQDLFLPFFSNVTWFHAIHVSGTNGTKRFDNPVLPFNDGVYFASTEKSNIIRGWIFGTTLDSKTQSLLIVNNATNVVIKVCEFQFCNDPFLGVYYHKNNKSWTESEFRVYSSANNCTFEYVSQPFLMDLEGKQGNFKNLREFVFKNIDGYFKIYSKHTPINLVRDLPQGFSALEPLVDLPIGINITRFQTLLALHRSYLTPGDSSSGWTAGAAAYYVGYLQPRTFLLKYNENGTITDAVDCALDPLSETKCTLKSFTVEKGIYQTSNFRVQPTESIVRFPNITNLCPFGEVFNATRFASVYAWNRKRISNCVADYSVLYNSASFSTFKCYGVSPTKLNDLCFTNVYADSFVIRGDEVRQIAPGQTGKIADYNYKLPDDFTGCVIAWNSNNLDSKVGGNYNYLYRLFRKSNLKPFERDISTEIYQAGSTPCNGVEGFNCYFPLQSYGFQPTNGVGYQPYRVVVLSFELLHAPATVCGPKKSTNLVKNKCVNFNFNGLTGTGVLTESNKKFLPFQQFGRDIADTTDAVRDPQTLEILDITPCSFGGVSVITPGTNTSNQVAVLYQDVNCTEVPVAIHADQLTPTWRVYSTGSNVFQTRAGCLIGAEHVNNSYECDIPIGAGICASYQTQTNSPRRARSVASQSIIAYTMSLGAENSVAYSNNSIAIPTNFTISVTTEILPVSMTKTSVDCTMYICGDSTECSNLLLQYGSFCTQLNRALTGIAVEQDKNTQEVFAQVKQIYKTPPIKDFGGFNFSQILPDPSKPSKRSFIEDLLFNKVTLADAGFIKQYGDCLGDIAARDLICAQKFNGLTVLPPLLTDEMIAQYTSALLAGTITSGWTFGAGAALQIPFAMQMAYRFNGIGVTQCVLYENQKLIANQFNSAIGKIQDSLSSTASALGKLQDVVNQNAQALNTLVKQLSSNFGAISSVLNDILSRLDKVEAEVQIDRLITGRLQSLQTYVTQQLIRAAEIRASANLAATKMSECVLGQSKRFDFCGKGYHLMSFPQSAPHGVVFLHVTYVPAQEKNFTTAPAICHDGKAHFPREGVFVSNGTHWFVTQRNFYEPQIITTDNTFVCGNCDVVIGIVNNTVYDPLQPELDSGGGSGGGQIYEGKLTAEGLRFGIVASRFNHALVDRLVEGAIDAIVRHGGREEDITLVRVPGSWEIPVAAGELARKEDIDAVIAIGVLIRGATPHFDYIASEVSKGLADLSLELRKPITFGVITADTLEQAIERAGTKHGNKGWEAALSAIEMANLFKSLR

SEQ ID NO: 13893 - protein, 1307 aa, Artificial Sequence
  SARS-CoV-2/China/WF0028/2020__EPI_ISL_413791 spike protein (1-1147)(N914C_S1123C) LumSynth construct
MFVFLVLLPLVSSQCVNLTTRTQLPPAYTNSFTRGVYYPDKVFRSSVLHSTQDLFLPFFSNVTWFHAIHVSGTNGTKRFDNPVLPFNDGVYFASTEKSNIIRGWIFGTTLDSKTQSLLIVNNATNVVIKVCEFQFCNDPFLGVYYHKNNKSWMESEFRVYSSANNCTFEYVSQPFLMDLEGKQGNFKNLREFVFKNIDGYFKIYSKHTPINLVRDLPQGFSALEPLVDLPIGINITRFQTLLALHRSYLTPGDSSSGWTAGAAAYYVGYLQPRTFLLKYNENGTITDAVDCALDPLSETKCTLKSFTVEKGIYQTSNFRVQPTESIVRFPNITNLCPFGEVFNATRFASVYAWNRKRISNCVADYSVLYNSASFSTFKCYGVSPTKLNDLCFTNVYADSFVIRGDEVRQIAPGQTGKIADYNYKLPDDFTGCVIAWNSNNLDSKVGGNYNYLYRLFRKSNLKPFERDISTEIYQAGSTPCNGVEGFNCYFPLQSYGFQPTNGVGYQPYRVVVLSFELLHAPATVCGPKKSTNLVKNKCVNFNFNGLTGTGVLTESNKKFLPFQQFGRDIADTTDAVRDPQTLEILDITPCSFGGVSVITPGTNTSNQVAVLYQDVNCTEVPVAIHADQLTPTWRVYSTGSNVFQTRAGCLIGAEHVNNSYECDIPIGAGICASYQTQTNSPRRARSVASQSIIAYTMSLGAENSVAYSNNSIAIPTNFTISVTTEILPVSMTKTSVDCTMYICGDSTECSNLLLQYGSFCTQLNRALTGIAVEQDKNTQEVFAQVKQIYKTPPIKDFGGFNFSQILPDPSKPSKRSFIEDLLFNKVTLADAGFIKQYGDCLGDIAARDLICAQKFNGLTVLPPLLTDEMIAQYTSALLAGTITSGWTFGAGAALQIPFAMQMAYRFNGIGVTQCVLYENQKLIANQFNSAIGKIQDSLSSTASALGKLQDVVNQNAQALNTLVKQLSSNFGAISSVLNDILSRLDKVEAEVQIDRLITGRLQSLQTYVTQQLIRAAEIRASANLAATKMSECVLGQSKRVDFCGKGYHLMSFPQSAPHGVVFLHVTYVPAQEKNFTTAPAICHDGKAHFPREGVFVSNGTHWFVTQRNFYEPQIITTDNTFVCGNCDVVIGIVNNTVYDPLQPELESGGGSGGGQIYEGKLTAEGLRFGIVASRFNHALVDRLVEGAIDAIVRHGGREEDITLVRVPGSWEIPVAAGELARKEDIDAVIAIGVLIRGATPHFDYIASEVSKGLADLSLELRKPITFGVITADTLEQAIERAGTKHGNKGWEAALSAIEMANLFKSLR

SEQ ID NO: 13894 - protein, 1307 aa, Artificial Sequence
  SARS-CoV-2/2019-nCoV/USA-CruiseA-18/2020__MT159716.1 spike protein (1-1147)(N914C_S1123C) LumSynth construct
MFVFLVLLPLVSSQCVNLTTRTQLPPAYTNSFTRGVYYPDKVFRSSVLHSTQDLFLPFFSNVTWFHAIHVSGTNGTKRFDNPVLPFNDGVYFASTEKSNIIRGWIFGTTLDSKTQSLLIVNNATNVVIKVCEFQFCNDPFLGVYYHKNNKSWMESELRVYSSANNCTFEYVSQPFLMDLEGKQGNFKNLREFVFKNIDGYFKIYSKHTPINLVRDLPQGFSALEPLVDLPIGINITRFQTLLALHRSYLTPGDSSSGWTAGAAAYYVGYLQPRTFLLKYNENGTITDAVDCALDPLSETKCTLKSFTVEKGIYQTSNFRVQPTESIVRFPNITNLCPFGEVFNATRFASVYAWNRKRISNCVADYSVLYNSASFSTFKCYGVSPTKLNDLCFTNVYADSFVIRGDEVRQIAPGQTGKIADYNYKLPDDFTGCVIAWNSNNLDSKVGGNYNYLYRLFRKSNLKPFERDISTEIYQAGSTPCNGVEGFNCYFPLQSYGFQPTNGVGYQPYRVVVLSFELLHAPATVCGPKKSTNLVKNKCVNFNFNGLTGTGVLTESNKKFLPFQQFGRDIADTTDAVRDPQTLEILDITPCSFGGVSVITPGTNTSNQVAVLYQDVNCTEVPVAIHADQLTPTWRVYSTGSNVFQTRAGCLIGAEHVNNSYECDIPIGAGICASYQTQTNSPRRARSVASQSIIAYTMSLGAENSVAYSNNSIAIPTNFTISVTTEILPVSMTKTSVDCTMYICGDSTECSNLLLQYGSFCTQLNRALTGIAVEQDKNTQEVFAQVKQIYKTPPIKDFGGFNFSQILPDPSKPSKRSFIEDLLFNKVTLADAGFIKQYGDCLGDIAARDLICAQKFNGLTVLPPLLTDEMIAQYTSALLAGTITSGWTFGAGAALQIPFAMQMAYRFNGIGVTQCVLYENQKLIANQFNSAIGKIQDSLSSTASALGKLQDVVNQNAQALNTLVKQLSSNFGAISSVLNDILSRLDKVEAEVQIDRLITGRLQSLQTYVTQQLIRAAEIRASANLAATKMSECVLGQSKRVDFCGKGYHLMSFPQSAPHGVVFLHVTYVPAQEKNFTTAPAICHDGKAHFPREGVFVSNGTHWFVTQRNFYEPQIITTDNTFVCGNCDVVIGIVNNTVYDPLQPELDSGGGSGGGQIYEGKLTAEGLRFGIVASRFNHALVDRLVEGAIDAIVRHGGREEDITLVRVPGSWEIPVAAGELARKEDIDAVIAIGVLIRGATPHFDYIASEVSKGLADLSLELRKPITFGVITADTLEQAIERAGTKHGNKGWEAALSAIEMANLFKSLR

SEQ ID NO: 13895 - protein, 1307 aa, Artificial Sequence
  SARS-CoV-2/SARS-CoV-2/Yunnan-01/human/2020/CHN__MT049951.1 spike protein (1-1147)(N914C_S1123C) LumSynth construct
MFVFLVLLPLVSSQCVNLTTRTQLPPANTNSFTRGVYYPDKVFRSSVLHSTQDLFLPFFSNVTWFHAIHVSGTNGTKRFDNPVLPFNDGVYFASTEKSNIIRGWIFGTTLDSKTQSLLIVNNATNVVIKVCEFQFCNDPFLGVYYHKNNKSWMESEFRVYSSANNCTFEYVSQPFLMDLEGKQGNFKNLREFVFKNIDGYFKIYSKHTPINLVRDLPQGFSALEPLVDLPIGINITRFQTLLALHRSYLTPGDSSSGWTAGAAAYYVGYLQPRTFLLKYNENGTITDAVDCALDPLSETKCTLKSFTVEKGIYQTSNFRVQPTESIVRFPNITNLCPFGEVFNATRFASVYAWNRKRISNCVADYSVLYNSASFSTFKCYGVSPTKLNDLCFTNVYADSFVIRGDEVRQIAPGQTGKIADYNYKLPDDFTGCVIAWNSNNLDSKVGGNYNYLYRLFRKSNLKPFERDISTEIYQAGSTPCNGVEGFNCYFPLQSYGFQPTNGVGYQPYRVVVLSFELLHAPATVCGPKKSTNLVKNKCVNFNFNGLTGTGVLTESNKKFLPFQQFGRDIADTTDAVRDPQTLEILDITPCSFGGVSVITPGTNTSNQVAVLYQDVNCTEVPVAIHADQLTPTWRVYSTGSNVFQTRAGCLIGAEHVNNSYECDIPIGAGICASYQTQTNSPRRARSVASQSIIAYTMSLGAENSVAYSNNSIAIPTNFTISVTTEILPVSMTKTSVDCTMYICGDSTECSNLLLQYGSFCTQLNRALTGIAVEQDKNTQEVFAQVKQIYKTPPIKDFGGFNFSQILPDPSKPSKRSFIEDLLFNKVTLADAGFIKQYGDCLGDIAARDLICAQKFNGLTVLPPLLTDEMIAQYTSALLAGTITSGWTFGAGAALQIPFAMQMAYRFNGIGVTQCVLYENQKLIANQFNSAIGKIQDSLSSTASALGKLQDVVNQNAQALNTLVKQLSSNFGAISSVLNDILSRLDKVEAEVQIDRLITGRLQSLQTYVTQQLIRAAEIRASANLAATKMSECVLGQSKRVDFCGKGYHLMSFPQSAPHGVVFLHVTYVPAQEKNFTTAPAICHDGKAHFPREGVFVSNGTHWFVTQRNFYEPQIITTDNTFVCGNCDVVIGIVNNTVYDPLQPELDSGGGSGGGQIYEGKLTAEGLRFGIVASRFNHALVDRLVEGAIDAIVRHGGREEDITLVRVPGSWEIPVAAGELARKEDIDAVIAIGVLIRGATPHFDYIASEVSKGLADLSLELRKPITFGVITADTLEQAIERAGTKHGNKGWEAALSAIEMANLFKSLR

SEQ ID NO: 13896 - protein, 1307 aa, Artificial Sequence
  SARS-CoV-2/USA/WA-UW292/2020__EPI_ISL_418077 spike protein (1-1147)(N914C_S1123C) LumSynth construct
MFVFLVLLPLVSSQCVNLTTRTQLPPAYTNSFTRGVYYPDKVFRSSVLHSTQDLFLPFFSNVTWFHAIHVSGTNGTKRFDNPVLPFNDGVYFASTEKSNIIRGWIFGTTLDSKTQSLLIVNNATNVVIKVCEFQFCNDPFLGVYYHKNNKSWMESEFRVYSSANNCTFEYVSQPFLMDLEGKQGNFKNLREFVFKNIDGYFKIYSKHTPINLVRDLPQGFSALEPLVDLPIGINITRFQTLLALHRSYLTPGDSSSGWTAGAAAYYVGYLQPRTFLLKYNENGTITDAVDCALDPLSETKCTLKSFTVEKGIYQTSNFRVQPTESIVRFPNITNLCPFGEVFNATRFASVYAWNRKRISNCVADYSVLYNSASFSTFKCYGVSPTKLNDLCFTNVYADSFVIRGDEVRQIAPGQTGKIADYNYKLPDDFTGCVIAWNSNNLDSKVGGNYNYLYRLFRKSNLKPFERDISTEIYQASSTPCNGVEGFNCYFPLQSYGFQPTNGVGYQPYRVVVLSFELLHAPATVCGPKKSTNLVKNKCVNFNFNGLTGTGVLTESNKKFLPFQQFGRDIADTTDAVRDPQTLEILDITPCSFGGVSVITPGTNTSNQVAVLYQDVNCTEVPVAIHADQLTPTWRVYSTGSNVFQTRAGCLIGAEHVNNSYECDIPIGAGICASYQTQTNSPRRARSVASQSIIAYTMSLGAENSVAYSNNSIAIPTNFTISVTTEILPVSMTKTSVDCTMYICGDSTECSNLLLQYGSFCTQLNRALTGIAVEQDKNTQEVFAQVKQIYKTPPIKDFGGFNFSQILPDPSKPSKRSFIEDLLFNKVTLADAGFIKQYGDCLGDIAARDLICAQKFNGLTVLPPLLTDEMIAQYTSALLAGTITSGWTFGAGAALQIPFAMQMAYRFNGIGVTQCVLYENQKLIANQFNSAIGKIQDSLSSTASALGKLQDVVNQNAQALNTLVKQLSSNFGAISSVLNDILSRLDKVEAEVQIDRLITGRLQSLQTYVTQQLIRAAEIRASANLAATKMSECVLGQSKRVDFCGKGYHLMSFPQSAPHGVVFLHVTYVPAQEKNFTTAPAICHDGKAHFPREGVFVSNGTHWFVTQRNFYEPQIITTDNTFVCGNCDVVIGIVNNTVYDPLQPELDSGGGSGGGQIYEGKLTAEGLRFGIVASRFNHALVDRLVEGAIDAIVRHGGREEDITLVRVPGSWEIPVAAGELARKEDIDAVIAIGVLIRGATPHFDYIASEVSKGLADLSLELRKPITFGVITADTLEQAIERAGTKHGNKGWEAALSAIEMANLFKSLR

SEQ ID NO: 13897 - protein, 1307 aa, Artificial Sequence
  SARS-CoV-2/Iceland/192/2020__EPI_ISL_417819 spike protein (1-1147)(N914C_S1123C) LumSynth construct
MFVFFVLLPLVSSQCVNLTTRTQLPPAYTNSFTRGVYYPDKVFRSSVLHSTQDLFLPFFSNVTWFHAIHVSGTNGTKRFDNPVLPFNDGVYFASTEKSNIIRGWIFGTTLDSKTQSLLIVNNATNVVIKVCEFQFCNDPFLGVYYHKNNKSWMESEFRVYSSANNCTFEYVSQPFLMDLEGKQGNFKNLREFVFKNIDGYFKIYSKHTPINLVRDLPQGFSALEPLVDLPIGINITRFQTLLALHRSYLTPGDSSSGWTAGAAAYYVGYLQPRTFLLKYNENGTITDAVDCALDPLSETKCTLKSFTVEKGIYQTSNFRVQPTESIVRFPNITNLCPFGEVFNATRFASVYAWNRKRISNCVADYSVLYNSASFSTFKCYGVSPTKLNDLCFTNVYADSFVIRGDEVRQIAPGQTGKIADYNYKLPDDFTGCVIAWNSNNLDSKVGGNYNYLYRLFRKSNLKPFERDISTEIYQAGSTPCNGVEGFNCYFPLQSYGFQPTNGVGYQPYRVVVLSFELLHAPATVCGPKKSTNLVKNKCVNFNFNGLTGTGVLTESNKKFLPFQQFGRDIADTTDAVRDPQTLEILDITPCSFGGVSVITPGTNTSNQVAVLYQGVNCTEVPVAIHADQLTPTWRVYSTGSNVFQTRAGCLIGAEHVNNSYECDIPIGAGICASYQTQTNSPRRARSVASQSIIAYTMSLGAENSVAYSNNSIAIPTNFTISVTTEILPVSMTKTSVDCTMYICGDSTECSNLLLQYGSFCTQLNRALTGIAVEQDKNTQEVFAQVKQIYKTPPIKDFGGFNFSQILPDPSKPSKRSFIEDLLFNKVTLADAGFIKQYGDCLGDIAARDLICAQKFNGLTVLPPLLTDEMIAQYTSALLAGTITSGWTFGAGAALQIPFAMQMAYRFNGIGVTQCVLYENQKLIANQFNSAIGKIQDSLSSTASALGKLQDVVNQNAQALNTLVKQLSSNFGAISSVLNDILSRLDKVEAEVQIDRLITGRLQSLQTYVTQQLIRAAEIRASANLAATKMSECVLGQSKRVDFCGKGYHLMSFPQSAPHGVVFLHVTYVPAQEKNFTTAPAICHDGKAHFPREGVFVSNGTHWFVTQRNFYEPQIITTDNTFVCGNCDVVIGIVNNTVYDPLQPELDSGGGSGGGQIYEGKLTAEGLRFGIVASRFNHALVDRLVEGAIDAIVRHGGREEDITLVRVPGSWEIPVAAGELARKEDIDAVIAIGVLIRGATPHFDYIASEVSKGLADLSLELRKPITFGVITADTLEQAIERAGTKHGNKGWEAALSAIEMANLFKSLR

SEQ ID NO: 13898 - protein, 1307 aa, Artificial Sequence
  SARS-CoV-2/Belgium/ULG-6939/2020__EPI_ISL_417020 spike protein (1-1147)(N914C_S1123C) LumSynth construct
MFVFLVLLPLVSSQCVNLTTRTQLPPAYTNSFTRGVYYPDKVFRSSVLHSTQDLFLPFFSNVTWFHAIHVSGTNGTKRFDNPVLPFNDGVYFASTEKSNIIRGWIFGTTLDSKTQSLLIVNNATNVVIKVCEFQFCNDPFLGVYYHKNNKSWMESEFRVYSSANNCTFEYVSQPFLMDLEGKQGNFKNLREFVFKNIDGYFKIYSKHTPINLVRDLPQGFSALEPLVDLPIGINITRFQTLLALHRSYLTPGDSSSGWTAGAAAYYVGYLQPRTFLLKYNENGTITDAVDCALDPLSETKCTLKSFTVEKGIYQTSNFRVQPTESIVRFPNITNLCPFGEVFNATRFASVYAWNRKRISNCVADYSVLYNSASFSTFKCYGVSPTKLNDLCFTNVYADSFVIRGDEVRQIAPGQTGKIADYNYKLPDDFTGCVIAWNSNNLDSKVGGNYNYLYRLFRKSNLKPFERDISTEIYQAGSTPCNGVEGFNCYFPLQSYGFQPTNGVGYQPYRVVVLSFELLHAPATVCGPKKSTNLVKNKCVNFNFNGLTGTGVLTESNKKFLPFQQFGRDIADTTDAVRDPQTLEILDITPCSFGGVSVITPGTNTSNQVAVLYQGVNCTEVPVAIHADQLTPTWRVYSTGSNVFQTRAGCLIGAEHVNNSYECDIPIGAGICASYQTQTNSPRRARSVASQSIIAYTMSLGAENSVVYSNNSIAIPTNFTISVTTEILPVSMTKTSVDCTMYICGDSTECSNLLLQYGSFCTQLNRALTGIAVEQDKNTQEVFAQVKQIYKTPPIKDFGGFNFSQILPDPSKPSKRSFIEDLLFNKVTLADAGFIKQYGDCLGDIAARDLICAQKFNGLTVLPPLLTDEMIAQYTSALLAGTITSGWTFGAGAALQIPFAMQMAYRFNGIGVTQCVLYENQKLIANQFNSAIGKIQDSLSSTASALGKLQDVVNQNAQALNTLVKQLSSNFGAISSVLNDILSRLDKVEAEVQIDRLITGRLQSLQTYVTQQLIRAAEIRASANLAATKMSECVLGQSKRVDFCGKGYHLMSFPQSAPHGVVFLHVTYVPAQEKNFTTAPAICHDGKAHFPREGVFVSNGTHWFVTQRNFYEPQIITTDNTFVCGNCDVVIGIVNNTVYDPLQPELDSGGGSGGGQIYEGKLTAEGLRFGIVASRFNHALVDRLVEGAIDAIVRHGGREEDITLVRVPGSWEIPVAAGELARKEDIDAVIAIGVLIRGATPHFDYIASEVSKGLADLSLELRKPITFGVITADTLEQAIERAGTKHGNKGWEAALSAIEMANLFKSLR

SEQ ID NO: 13899 - protein, 1307 aa, Artificial Sequence
  SARS-CoV-2/France/HF2496/2020__EPI_ISL_418231 spike protein (1-1147)(N914C_S1123C) LumSynth construct
MFVFLVLLPLVSSQCVNLTTRTQLPPAYTNSFTRGVYYPDKVFRSSVLHSTQDLFLPFFSNVTWFHAIHVSGTNGTKRFDNPVLPFNDGVYFASTEKSNIIRGWIFGTTLDSKTQSLLIVNNATNVVIKVCEFQFCNDPFLGVYYHKNNKSWMESEFRVYSSANNCTFEYVSQPFLMDLEGKQGNFKNLREFVFKNIDGYFKIYSKHTPINLVRDLPQGFSALEPLVDLPIGINITRFQTLLALHRSYLTPGDSSSGWTAGAAAYYVGYLQPRTFLLKYNENGTITDAVDCALDPLSETKCTLKSFTVEKGIYQTSNFRVQPTESIVRFPNITNLCPFGEVFNATRFASVYAWNRKRISNCVADYSVLYNSASFSTFKCYGVSPTKLNDLCFTNVYADSFVIRGDEVRQIAPGQTGKIADYNYKLPDDFTGCVIAWNSNNLDSKVGGNYNYLYRLFRKSNLKPFERDISTEIYQAGSTPCNGVEGFNCYFPLQSYGFQPTNGVGYQPYRVVVLSFELLHAPATVCGPKKSTNLVKNKCVNFNFNGLTGTGVLTESNKKFLPFQQFGRDIADTTDAVRDPQTLEILDITPCSFGGVSVITPGTNTSNQVAVLYQGVNCTEVPVAIHADQLTPTWRVYSTGSNVFQTRAGCLIGAEHVNNSYECDIPIGAGICASYQTQTNSPRRARSVASQSIIAYTMSLGAENSVAYSNNSIAIPTNFTISVTTEILPVSMTKTSVDCTMYICGDSTECSNLLLQYGSFCTQLNRALTGIAVEQDKNTQEVFAQVKQIYKTPPIKDFGGFNFSQILPDPSKPSKRSFIEDLLFNKVTLADAGFIKQYGDCLGDIVARDLICAQKFNGLTVLPPLLTDEMIAQYTSALLAGTITSGWTFGAGAALQIPFAMQMAYRFNGIGVTQCVLYENQKLIANQFNSAIGKIQDSLSSTASALGKLQDVVNQNAQALNTLVKQLSSNFGAISSVLNDILSRLDKVEAEVQIDRLITGRLQSLQTYVTQQLIRAAEIRASANLAATKMSECVLGQSKRVDFCGKGYHLMSFPQSAPHGVVFLHVTYVPAQEKNFTTAPAICHDGKAHFPREGVFVSNGTHWFVTQRNFYEPQIITTDNTFVCGNCDVVIGIVNNTVYDPLQPELDSGGGSGGGQIYEGKLTAEGLRFGIVASRFNHALVDRLVEGAIDAIVRHGGREEDITLVRVPGSWEIPVAAGELARKEDIDAVIAIGVLIRGATPHFDYIASEVSKGLADLSLELRKPITFGVITADTLEQAIERAGTKHGNKGWEAALSAIEMANLFKSLR

SEQ ID NO: 13900 - protein, 1307 aa, Artificial Sequence
  SARS-CoV-2/USA/WA-UW291/2020__EPI_ISL_418076 spike protein (1-1147)(N914C_S1123C) LumSynth construct
MFVFLVLLPLVSSQCVNLTTRTQLPPAYTNSFTRGVYYPDKVFRSSVLHSTQDLFLPFFSNVTWFHAIHVSGTNGTKRFDNPVLPFNDGVYFASTEKSNIIRGWIFGTTLDSKTQSLLIVNNATNVVIKVCEFQFCNDPFLGVYYHKNNKSWMESEFRVYSSANNCTFEYVSQPFLMDLEGKQGNFKNLREFVFKNIDGYFKIYSKHTPINLVRDLPQGFSALEPLVDLPIGINITRFQTLLALHRSYLTPGDSSSGWTAGAAAYYVGYLQPRTFLLKYNENGTITDAVDCALDPLSETKCTLKSFTVEKGIYQTSNFRVQPTESIVRFPNITNLCPFGEVFNATRFASVYAWNRKRISNCVADYSVLYNSASFSTFKCYGVSPTKLNDLCFTNVYADSFVIRGDEVRQIAPGQTGKIADYNYKLPDDFTGCVIAWNSNNLDSKVGGNYNYLYRLFRKSNLKPFERDISTEIYQAGSTPCNGVEGFNCYFPLQSYGFQPTNGVGYQPYRVVVLSFELLHAPATVCGPKKSTNLVKNKCVNFNFNGLTGTGVLTESNKKFLPFQQFGRDIADTTDAVRDPQTLEILDITPCSFGGVSVITPGTNTSNQVAVLYQGVNCTEVPVAIHADQLTPTWRVYSTGSNVFQTRAGCLIGAEHVNNSYECDIPIGAGICASYQTQTNSPRRARSVASQSIIAYTMSLGAENSVAYSNNSIAIPTNFTISVTTEILPVSMTKTSVDCTMYICGDSTECSNLLLQYGSFCTQLNRALTGIAVEQDKNTQEVFAQVKQIYKTPPIKDFGGFNFSQILPDPSKPSKRSFIEDLLFNKVTLADAGFIKQYGDCLGDIAARDLICAQKFNGLTVLPPLLTDEMIAQYTSALLAGTITSGWTFGAGAALQIPFAMQMAYRFNGIGVTQCVLYENQKLIANQFNSAIGKIQYSLSSTASALGKLQDVVNQNAQALNTLVKQLSSNFGAISSVLNDILSRLDKVEAEVQIDRLITGRLQSLQTYVTQQLIRAAEIRASANLAATKMSECVLGQSKRVDFCGKGYHLMSFPQSAPHGVVFLHVTYVPAQEKNFTTAPAICHDGKAHFPREGVFVSNGTHWFVTQRNFYEPQIITTDNTFVCGNCDVVIGIVNNTVYDPLQPELDSGGGSGGGQIYEGKLTAEGLRFGIVASRFNHALVDRLVEGAIDAIVRHGGREEDITLVRVPGSWEIPVAAGELARKEDIDAVIAIGVLIRGATPHFDYIASEVSKGLADLSLELRKPITFGVITADTLEQAIERAGTKHGNKGWEAALSAIEMANLFKSLR

SEQ ID NO: 13901 - protein, 1307 aa, Artificial Sequence; identical to SEQ ID NO: 13864
  SARS-CoV-2/Portugal/PT0034/2020__EPI_ISL_418019 spike protein (1-1147)(N914C_S1123C) LumSynth construct

SEQ ID NO: 13902 - protein, 1307 aa, Artificial Sequence; identical to SEQ ID NO: 13856
  SARS-CoV-2/Iceland/202/2020__EPI_ISL_417750 spike protein (1-1147)(N914C_S1123C) LumSynth construct

SEQ ID NO: 13903 - protein, 1307 aa, Artificial Sequence
  SARS-CoV-2/USA/WA-UW261/2020__EPI_ISL_418046 spike protein (1-1147)(N914C_S1123C) LumSynth construct
MFVFLVLLPLVSSQCVNLTTRTQLPPAYTNSFTRGVYYPDKVFRSSVLHSTQDLFLPFFSNVTWFHAIHVSGTNGTKRFDNPVLPFNDGVYFASTEKSNIIRGWIFGTTLDSKTQSLLIVNNATNVVIKVCEFQFCNDPFLGVYYHKNNKSWMESEFRVYSSANNCTFEYVSQPFLMDLEGKQGNFKNLREFVFKNIDGYFKIYSKHTPINLVRDLPQGFSALEPLVDLPIGINITRFQTLLALHRSYLTPGDSSSGWTAGAAAYYVGYLQPRTFLLKYNENGTITDAVDCALDPLSETKCTLKSFTVEKGIYQTSNFRVQPTESIVRFPNITNLCPFGEVFNATRFTSVYAWNRKRISNCVADYSVLYNSASFSTFKCYGVSPTKLNDLCFTNVYADSFVIRGDEVRQIAPGQTGKIADYNYKLPDDFTGCVIAWNSNNLDSKVGGNYNYLYRLFRKSNLKPFERDISTEIYQAGSTPCNGVEGFNCYFPLQSYGFQPTNGVGYQPYRVVVLSFELLHAPATVCGPKKSTNLVKNKCVNFNFNGLTGTGVLTESNKKFLPFQQFGRDIADTTDAVRDPQTLEILDITPCSFGGVSVITPGTNTSNQVAVLYQDVNCTEVPVAIHADQLTPTWRVYSTGSNVFQTRAGCLIGAEHVNNSYECDIPIGAGICASYQTQTNSPRRARSVASQSIIAYTMSLGAENSVAYSNNSIAIPTNFTISVTTEILPVSMTKTSVDCTMYICGDSTECSNLLLQYGSFCTQLNRALTGIAVEQDKNTQEVFAQVKQIYKTPPIKDFGGFNFSQILPDPSKPSKRSFIEDLLFNKVTLADAGFIKQYGDCLGDIAARDLICAQKFNGLTVLPPLLTDEMIAQYTSALLAGTITSGWTFGAGAALQIPFAMQMAYRFNGIGVTQCVLYENQKLIANQFNSAIGKIQDSLSSTASALGKLQDVVNQNAQALNTLVKQLSSNFGAISSVLNDILSRLDKVEAEVQIDRLITGRLQSLQTYVTQQLIRAAEIRASANLAATKMSECVLGQSKRVDFCGKGYHLMSFPQSAPHGVVFLHVTYVPAQEKNFTTAPAICHDGKAHFPREGVFVSNGTHWFVTQRNFYEPQIITTDNTFVCGNCDVVIGIVNNTVYDPLQPELDSGGGSGGGQIYEGKLTAEGLRFGIVASRFNHALVDRLVEGAIDAIVRHGGREEDITLVRVPGSWEIPVAAGELARKEDIDAVIAIGVLIRGATPHFDYIASEVSKGLADLSLELRKPITFGVITADTLEQAIERAGTKHGNKGWEAALSAIEMANLFKSLR

SEQ ID NO: 13904 - protein, 1307 aa, Artificial Sequence
  SARS-CoV-2/Portugal/PT0035/2020__EPI_ISL_418020 spike protein (1-1147)(N914C_S1123C) LumSynth construct
MFVFLVLLPLVSSQCVNLTTRTQLPPAYTNSFTRGVYYPDKVFRSSVLHSTQDLFLPFFSNVTWFHAIHVSGTNGTKRFDNPVLPFNDGVYFASTEKSNIIRGWIFGTTLDSKTQSLLIVNNATNVVIKVCEFQFCNDPFLGVYYHKNNKSWMESEFRVYSSANNCTFEYVSQPFLMDLEGKQGNFKNLREFVFKNIDGYFKIYSKHTPINLVRDLPQGFSALEPLVDLPIGINITRFQTLLALHRSYLTPGDSSSGWTAGAAAYYVGYLQPRTFLLKYNENGTITDAVDCALDPLSETKCTLKSFTVEKGIYQTSNFRVQPTESIVRFPNITNLCPFGEVFNATRFASVYAWNRKRISNCVADYSVLYNSASFSTFKCYGVSPTKLNDLCFTNVYADSFVIRGDEVRQIAPGQTGKIADYNYKLPDDFTGCVIAWNSNNLDSKVGGNYNYLYRLFRKSNLKPFERDISTEIYQAGSTPCNGVEGFNCYFPLQSYGFQPTNGVGYQPYRVVVLSFELLHAPATVCGPKKSTNLVKNKCVNFNFNGLTGTGVLTESNKKFLPFQQFGRDIADTTDAVRDPQTLEILDITPCSFGGVSVITPGTNTSNQVAVLYQDVNCTEVPVAIHADQLTPTWRVYSTGSNVFQTRAGCLIGAEHVNNSYECDIPIGAGICASYQTQTNSPRRARSVASQSIIAYTMSLGAENSVAYSNNSIAIPTNFTISVTTEILPVSMTKTSVDCTMYICGDSTECSNLLLQYGSFCTQLNRALTGIAVEQDKNTQEVFAQVKQIYKTPPIKDFGGFNFSQILPDPSKPSKRSFIEDLLFNKVTLADAGFIKQYGDCLGDISARDLICAQKFNGLTVLPPLLTDEMIAQYTSALLAGTITSGWTFGAGAALQIPFAMQMAYRFNGIGVTQCVLYENQKLIANQFNSAIGKIQDSLSSTASALGKLQDVVNQNAQALNTLVKQLSSNFGAISSVLNDILSRLDKVEAEVQIDRLITGRLQSLQTYVTQQLIRAAEIRASANLAATKMSECVLGQSKRVDFCGKGYHLMSFPQSAPHGVVFLHVTYVPAQEKNFTTAPAICHDGKAHFPREGVFVSNGTHWFVTQRNFYEPQIITTDNTFVCGNCDVVIGIVNNTVYDPLQPELDSGGGSGGGQIYEGKLTAEGLRFGIVASRFNHALVDRLVEGAIDAIVRHGGREEDITLVRVPGSWEIPVAAGELARKEDIDAVIAIGVLIRGATPHFDYIASEVSKGLADLSLELRKPITFGVITADTLEQAIERAGTKHGNKGWEAALSAIEMANLFKSLR

SEQ ID NO: 13905 - protein, 1307 aa, Artificial Sequence
  SARS-CoV-2/USA/NY-NYUMC7/2020__EPI_ISL_418192 spike protein (1-1147)(N914C_S1123C) LumSynth construct
MFVFLVLLPLVSSQCVNLTTRTQLPPAYTNSFTRGVYYPDKVFRSSVLHSTQDLFLPFFSNVTWFHAIHVSGTNGTKRFDNPVLPFNDGVYFASTEKSNIIRGWIFGTTLDSKTQSLLIVNNATNVVIKVCEFQFCNDPFLGVYHHKNNKSWMESEFRVYSSANNCTFEYVSQPFLMDLEGKQGNFKNLREFVFKNIDGYFKIYSKHTPINLVRDLPQGFSALEPLVDLPIGINITRFQTLLALHRSYLTPGDSSSGWTAGAAAYYVGYLQPRTFLLKYNENGTITDAVDCALDPLSETKCTLKSFTVEKGIYQTSNFRVQPTESIVRFPNITNLCPFGEVFNATRFASVYAWNRKRISNCVADYSVLYNSASFSTFKCYGVSPTKLNDLCFTNVYADSFVIRGDEVRQIAPGQTGKIADYNYKLPDDFTGCVIAWNSNNLDSKVGGNYNYLYRLFRKSNLKPFERDISTEIYQAGSTPCNGVEGFNCYFPLQSYGFQPTNGVGYQPYRVVVLSFELLHAPATVCGPKKSTNLVKNKCVNFNFNGLTGTGVLTESNKKFLPFQQFGRDIADTTDAVRDPQTLEILDITPCSFGGVSVITPGTNTSNQVAVLYQGVNCTEVPVAIHADQLTPTWRVYSTGSNVFQTRAGCLIGAEHVNNSYECDIPIGAGICASYQTQTNSPRRARSVASQSIIAYTMSLGAENSVAYSNNSIAIPTNFTISVTTEILPVSMTKTSVDCTMYICGDSTECSNLLLQYGSFCTQLNRALTGIAVEQDKNTQEVFAQVKQIYKTPPIKDFGGFNFSQILPDPSKPSKRSFIEDLLFNKVTLADAGFIKQYGDCLGDIAARDLICAQKFNGLTVLPPLLTDEMIAQYTSALLAGTITSGWTFGAGAALQIPFAMQMAYRFNGIGVTQCVLYENQKLIANQFNSAIGKIQDSLSSTASALGKLQDVVNQNAQALNTLVKQLSSNFGAISSVLNDILSRLDKVEAEVQIDRLITGRLQSLQTYVTQQLIRAAEIRASANLAATKMSECVLGQSKRVDFCGKGYHLMSFPQSAPHGVVFLHVTYVPAQEKNFTTAPAICHDGKAHFPREGVFVSNGTHWFVTQRNFYEPQIITTDNTFVCGNCDVVIGIVNNTVYDPLQPELDSGGGSGGGQIYEGKLTAEGLRFGIVASRFNHALVDRLVEGAIDAIVRHGGREEDITLVRVPGSWEIPVAAGELARKEDIDAVIAIGVLIRGATPHFDYIASEVSKGLADLSLELRKPITFGVITADTLEQAIERAGTKHGNKGWEAALSAIEMANLFKSLR

SEQ ID NO: 13906 - protein, 1307 aa, Artificial Sequence
  SARS-CoV-2/Iceland/189/2020__EPI_ISL_417709 spike protein (1-1147)(N914C_S1123C) LumSynth construct
MFVFLVLLPLVSSQCVNLTTRTQLPPAYTNSFTRGVYYPDKVFRSSVLHSTQDLFLPFFSNVTWFHAIHVSGTNGTKRFDNPVLPFNDGVYFASTEKSNIIRGWIFGTTLDSKTQSLLIVNNATNVVIKVCEFQFCNDPFLGVYYHKNNKSWMESEFRVYSSANNCTFEYVSQPFLMDLEGKQGNFKNLREFVFKNIDGYFKIYSKHTPINLVRDLPQGFSALEPLVDLPIGINITRFQTLLALHRSYLTPGDSSSGWTAGAAAYYVGYLQPRTFLLKYNENGTITDAVDCALDPLSETKCTLKSFTVEKGIYQTSNFRVQPTESIVRFPNITNLCPFGEVFNATRFASVYAWNRKRISNCVADYSVLYNSASFSTFKCYGVSPTKLNDLCFTNVYADSFVIRGDEVRQIAPGQTGKIADYNYKLPDDFTGCVIAWNSNNLDSKVGGNYNYLYRLFRKSNLKPFERDISTEIYQAGSTPCNGVEGFNCYFPLQSYGFQPTNGVGYQPYRVVVLSFELLHAPATVCGPKKSTNLVKNKCVNFNFNGLTGTGVLTESNKKFLPFQQFGRDIADTTDAVRDPQTLEILDITPCSFGGVSVITPGTNTSNQVAVLYQGVNCTEVPVAIHADQLTPTWRVYSTGSNVFQTRAGCLIGAEHVNNSYECDIPIGAGICASYQTQTNSPRRARSVASQSIIAYTMSLGAENSVAYSNNSIAIPTNFTISVTTEILPVSMTKTSVDCTMYICGDSTECSNLLLQYGSFCTQLNRALTGIAVEQDKNTQEVFAQVKQIYKTPPIKDFGGFNFSQILPDPSKPSKRSFIEDLLFNKVTLADAGFTKQYGDCLGDIAARDLICAQKFNGLTVLPPLLTDEMIAQYTSALLAGTITSGWTFGAGAALQIPFAMQMAYRFNGIGVTQCVLYENQKLIANQFNSAIGKIQDSLSSTASALGKLQDVVNQNAQALNTLVKQLSSNFGAISSVLNDILSRLDKVEAEVQIDRLITGRLQSLQTYVTQQLIRAAEIRASANLAATKMSECVLGQSKRVDFCGKGYHLMSFPQSAPHGVVFLHVTYVPAQEKNFTTAPAICHDGKAHFPREGVFVSNGTHWFVTQRNFYEPQIITTDNTFVCGNCDVVIGIVNNTVYDPLQPELDSGGGSGGGQIYEGKLTAEGLRFGIVASRFNHALVDRLVEGAIDAIVRHGGREEDITLVRVPGSWEIPVAAGELARKEDIDAVIAIGVLIRGATPHFDYIASEVSKGLADLSLELRKPITFGVITADTLEQAIERAGTKHGNKGWEAALSAIEMANLFKSLR

SEQ ID NO: 13907 - protein, 1307 aa, Artificial Sequence
  SARS-CoV-2/Australia/NSW56/2020__EPI_ISL_417408 spike protein (1-1147)(N914C_S1123C) LumSynth construct
MFVFLVLLPLVSSQCVNLTTRTQLPPAYTNSFTRGVYYPDKVFRSSVLHSTQDLFLPFFSNVTWFHAIHVSGTNGTKRFDNPVLPFNDGVYFASTEKSNIIRGWIFGTTLDSKTQSLLIVNNATNVVIKVCEFQFCNDPFLGVYYHKNNKSWMESEFRVYSSANNCTFEYVSQPFLMDLEGKQGNFKNLREFVFKNIDGYFKIYSKHTPINLVRDLPQGFSALEPLVDLPIGINITRFQTLLALHRSYLTPGDSSSGWTAGAAAYYVGYLQPRTFLLKYNENGTITDAVDCALDPLSETKCTLKSFTVEKGIYQTSNFRVQPTESIVRFPNITNLCPFGEVFNATRFASVYAWNRKRISNCVADYSVLYNSASFSTFKCYGVSPTKLNDLCFTNVYADSFVIRGDEVRQIAPGQTGKIADYNYKLPDDFTGCVIAWNSNNLDSKVGGNYNYLYRLFRKSNLKPFERDISTEIYQAGSTPCNGVEGFNCYFPLQSYGFQPTNGVGYQPYRVVVLSFELLHAPATVCGPKKSTNLVKNKCVNFNFNGLTGTGVLTESNKKFLPFQQFGRDIADTTDAVRDPQTLEILDITPCSFGGVSVITPGTNTSNQVAVLYQDVNCTEVPVAIHADQLTPTWRVYSTGSNVFQTRAGCLIGAEHVNNSYECDIPIGAGICASYQTQTNSPRRARSVASQSIIAYTMSLGAENSVAYSNNSIAIPTNFTISVTTEILPVSMTKTSVDCTMYICGDSTECSNLLLQYGSFCTQLNRALTGIAVEQDKNTQEVFAQVKQIYKTPPIKDFGGFNFSQILPDSSKPSKRSFIEDLLFNKVTLADAGFIKQYGDCLGDIAARDLICAQKFNGLTVLPPLLTDEMIAQYTSALLAGTITSGWTFGAGAALQIPFAMQMAYRFNGIGVTQCVLYENQKLIANQFNSAIGKIQDSLSSTASALGKLQDVVNQNAQALNTLVKQLSSNFGAISSVLNDILSRLDKVEAEVQIDRLITGRLQSLQTYVTQQLIRAAEIRASANLAATKMSECVLGQSKRVDFCGKGYHLMSFPQSAPHGVVFLHVTYVPAQEKNFTTAPAICHDGKAHFPREGVFVSNGTHWFVTQRNFYEPQIITTDNTFVCGNCDVVIGIVNNTVYDPLQPELDSGGGSGGGQIYEGKLTAEGLRFGIVASRFNHALVDRLVEGAIDAIVRHGGREEDITLVRVPGSWEIPVAAGELARKEDIDAVIAIGVLIRGATPHFDYIASEVSKGLADLSLELRKPITFGVITADTLEQAIERAGTKHGNKGWEAALSAIEMANLFKSLR

SEQ ID NO: 13908 - protein, 1307 aa, Artificial Sequence
  SARS-CoV-2/Iceland/280/2020__EPI_ISL_417608 spike protein (1-1147)(N914C_S1123C) LumSynth construct
MFVFLVLLPLVSSQCVNLTTRTQLPPAYTNSFTRGVYYPDKVFRSSVLHSTQDLFLPFFSNVTWFHAIHVSGTNGTKRFDNPVLPFNDGVYFASTEKSNIIRGWIFGTTLDSKTQSLLIVNNATNVVIKVCEFQFCNDPFLGVYYHKNNKSWMESEFRVYSSANNCTFEYVSQPFLMDLEGKQGNFKNLREFVFKNIDGYFKIYSKHTPINLVRDLPQGFSALEPLVDLPIGINITRFQTLLALHRSYLTPGDSSSGWTAGAAAYYVGYLQPRTFLLKYNENGTITDAVDCALDPLSETKCTLKSFTVEKGIYQTSNFRVQPTESIVRFPNITNLCPFGEVFNATRFASVYAWNRKRISNCVADYSVLYNSASFSTFKCYGVSPTKLNDLCFTNVYADSFVIRGDEVRQIAPGQTGKIADYNYKLPDDFTGCVIAWNSNNLDSKVGGNYNYLYRLFRKSNLKPFERDISTEIYQAGSTPCNGVEGFNCYFPLQSYGFQPTNGVGYQPYRVVVLSFELLHAPATVCGPKKSTNLVKNKCVNFNFNGLTGTGVLTESNKKFLPFQQFGRDIADTTDAVRDPQTLEILDITPCSFGGVSVITPGTNTSNQVAVLYQGVNCTEVPVAIHADQLTPTWRVYSTGSNVFQTRAGCLIGAEHVNNSYECDIPIGAGICASYHTQTNSPRRARSVASQSIIAYTMSLGAENSVAYSNNSIAIPTNFTISVTTEILPVSMTKTSVDCTMYICGDSTECSNLLLQYGSFCTQLNRALTGIAVEQDKNTQEVFAQVKQIYKTPPIKDFGGFNFSQILPDPSKPSKRSFIEDLLFNKVTLADAGFIKQYGDCLGDIAARDLICAQKFNGLTVLPPLLTDEMIAQYTSALLAGTITSGWTFGAGAALQIPFAMQMAYRFNGIGVTQCVLYENQKLIANQFNSAIGKIQDSLSSTASALGKLQDVVNQNAQALNTLVKQLSSNFGAISSVLNDILSRLDKVEAEVQIDRLITGRLQSLQTYVTQQLIRAAEIRASANLAATKMSECVLGQSKRVDFCGKGYHLMSFPQSAPHGVVFLHVTYVPAQEKNFTTAPAICHDGKAHFPREGVFVSNGTHWFVTQRNFYEPQIITTDNTFVCGNCDVVIGIVNNTVYDPLQPELDSGGGSGGGQIYEGKLTAEGLRFGIVASRFNHALVDRLVEGAIDAIVRHGGREEDITLVRVPGSWEIPVAAGELARKEDIDAVIAIGVLIRGATPHFDYIASEVSKGLADLSLELRKPITFGVITADTLEQAIERAGTKHGNKGWEAALSAIEMANLFKSLR

SEQ ID NO: 13909 - protein, 1307 aa, Artificial Sequence; identical to SEQ ID NO: 13864
  SARS-CoV-2/Iceland/247/2020__EPI_ISL_417575 spike protein (1-1147)(N914C_S1123C) LumSynth construct

SEQ ID NO: 13910 - protein, 1307 aa, Artificial Sequence
  SARS-CoV-2/Iceland/238/2020__EPI_ISL_417566 spike protein (1-1147)(N914C_S1123C) LumSynth construct
MFVFLVLLPLVSSQCVNLTTRTQLPPAYTNSFTRGVYYPDKVFRSSVLHSTQDLFLPFFSNVTWFHAIHVSGTNGTKRFDNPVLPFNDGVYFASTEKSNIIRGWIFGTTLDSKTQSLLIVNNATNVVIKVCEFQFCNDPFLGVYYHKNNKSWMESEFRVYSSANNCTFEYVSQPFLMDLEGKQGNFKNLREFVFKNIDGYFKIYSKHTPINLVRDLPQGFSALEPLVDLPIGINITRFQTLLALHRSYLTPGDSSSGWTAGAAAYYVGYLQPRTFLLKYNENGTITDAVDCALDPLSETKCTLKSFTVEKGIYQTSNFRVQPTESIVRFPNITNLCPFGEVFNATRFASVYAWNRKRISNCVADYSVLYNSASFSTFKCYGVSPTKLNDLCFTNVYADSFVIRGDEVRQIAPGQTGKIADYNYKLPDDFTGCVIAWNSNNLDSKVGGNYNYLYRLFRKSNLKPFERDISTEIYQAGSTPCNGVEGFNCYFPLQSYGFQPTNGVGYQPYRVVVLSFELLHAPATVCGPKKSTNLVKNKCVNFNFNGLTGTGVLTESNKKFLPFQQFGRDIADTTDAVRDPQTLEILDITPCSFGGVSVITPGTNTSNQVAVLYQGVNCTEVPVAIHADQLTPTWRVYSTGSNVFQTRAGCLIGAEHVNNSYECDIPIGAGICASYQTQTNSPRRARSVASQSIIAYTMSLGAENSVAYSNNSIAIPTNFTISVTTEILPVSMTKTSVDCTMYICGDSTECSNLLLQYGSFCTQLNRALTGIAVEQDKNTQEVFAQVKQIYKTPPIKDFGGFNFSQILPDPSKPSKRSFIEDLLFNKVTLADVGFIKQYGDCLGDIAARDLICAQKFNGLTVLPPLLTDEMIAQYTSALLAGTITSGWTFGAGAALQIPFAMQMAYRFNGIGVTQCVLYENQKLIANQFNSAIGKIQDSLSSTASALGKLQDVVNQNAQALNTLVKQLSSNFGAISSVLNDILSRLDKVEAEVQIDRLITGRLQSLQTYVTQQLIRAAEIRASANLAATKMSECVLGQSKRVDFCGKGYHLMSFPQSAPHGVVFLHVTYVPAQEKNFTTAPAICHDGKAHFPREGVFVSNGTHWFVTQRNFYEPQIITTDNTFVCGNCDVVIGIVNNTVYDPLQPELDSGGGSGGGQIYEGKLTAEGLRFGIVASRFNHALVDRLVEGAIDAIVRHGGREEDITLVRVPGSWEIPVAAGELARKEDIDAVIAIGVLIRGATPHFDYIASEVSKGLADLSLELRKPITFGVITADTLEQAIERAGTKHGNKGWEAALSAIEMANLFKSLR

SEQ ID NO: 13911 - protein, 1307 aa, Artificial Sequence
  SARS-CoV-2/Greece/16/2020__EPI_ISL_418265 spike protein (1-1147)(N914C_S1123C) LumSynth construct
MFVFLVLLPLVSSQCVNLTTRTQLPPAYTNSFTRGVYYPDKVFRSSVLHSTQDLFLPFFSNVTWFHAIHVSGTNGTKRFDNPVLPFNDGVYFASTEKSNIIRGWIFGTTLDSKTQSLLIVNNATNVVIKVCEFQFCNDPFLGVYYHKNNKSWMESEFRVYSSANNCTFEYVSQPFLMDLEGKQGNFKNLREFVFKNVDGYFKIYSKHTPINLVRDLPQGFSALEPLVDLPIGINITRFQTLLALHRSYLTPGDSSSGWTAGAAAYYVGYLQPRTFLLKYNENGTITDAVDCALDPLSETKCTLKSFTVEKGIYQTSNFRVQPTESIVRFPNITNLCPFGEVFNATRFASVYAWNRKRISNCVADYSVLYNSASFSTFKCYGVSPTKLNDLCFTNVYADSFVIRGDEVRQIAPGQTGKIADYNYKLPDDFTGCVIAWNSNNLDSKVGGNYNYLYRLFRKSNLKPFERDISTEIYQAGSTPCNGVEGFNCYFPLQSYGFQPTNGVGYQPYRVVVLSFELLHAPATVCGPKKSTNLVKNKCVNFNFNGLTGTGVLTESNKKFLPFQQFGRDIADTTDAVRDPQTLEILDITPCSFGGVSVITPGTNTSNQVAVLYQDVNCTEVPVAIHADQLTPTWRVYSTGSNVFQTRAGCLIGAEHVNNSYECDIPIGAGICASYQTQTNSPRRARSVASQSIIAYTMSLGAENSVAYSNNSIAIPTNFTISVTTEILPVSMTKTSVDCTMYICGDSTECSNLLLQYGSFCTQLNRALTGIAVEQDKNTQEVFAQVKQIYKTPPIKDFGGFNFSQILPDPSKPSKRSFIEDLLFNKVTLADAGFIKQYGDCLGDIAARDLICAQKFNGLTVLPPLLTDEMIAQYTSALLAGTITSGWTFGAGAALQIPFAMQMAYRFNGIGVTQCVLYENQKLIANQFNSAIGKIQDSLSSTASALGKLQDVVNQNAQALNTLVKQLSSNFGAISSVLNDILSRLDKVEAEVQIDRLITGRLQSLQTYVTQQLIRAAEIRASANLAATKMSECVLGQSKRVDFCGKGYHLMSFPQSAPHGVVFLHVTYVPAQEKNFTTAPAICHDGKAHFPREGVFVSNGTHWFVTQRNFYEPQIITTDNTFVCGNCDVVIGIVNNTVYDPLQPELDSGGGSGGGQIYEGKLTAEGLRFGIVASRFNHALVDRLVEGAIDAIVRHGGREEDITLVRVPGSWEIPVAAGELARKEDIDAVIAIGVLIRGATPHFDYIASEVSKGLADLSLELRKPITFGVITADTLEQAIERAGTKHGNKGWEAALSAIEMANLFKSLR

SEQ ID NO: 13912 - protein, 1307 aa, Artificial Sequence
  SARS-CoV-2/Iceland/319/2020__EPI_ISL_417648 spike protein (1-1147)(N914C_S1123C) LumSynth construct
MFVFLVLLPLVSSQCVNLTTRTQLPPAYTNSFTRGVYYPDKVFRSSVLHSTQDLFLPFFSNVTWFHAIHVSGTNGTKRFDNPVLPFNDGVYFASTEKSNIIRGWIFGTTLDSKTQSLLIVNNATNVVIKVCEFQFCNDPFLGVYYHKNNKSWMESEFRVYSSANNCTFEYVSQPFLIDLEGKQGNFKNLREFVFKNIDGYFKIYSKHTPINLVRDLPQGFSALEPLVDLPIGINITRFQTLLALHRSYLTPGDSSSGWTAGAAAYYVGYLQPRTFLLKYNENGTITDAVDCALDPLSETKCTLKSFTVEKGIYQTSNFRVQPTESIVRFPNITNLCPFGEVFNATRFASVYAWNRKRISNCVADYSVLYNSASFSTFKCYGVSPTKLNDLCFTNVYADSFVIRGDEVRQIAPGQTGKIADYNYKLPDDFTGCVIAWNSNNLDSKVGGNYNYLYRLFRKSNLKPFERDISTEIYQAGSTPCNGVEGFNCYFPLQSYGFQPTNGVGYQPYRVVVLSFELLHAPATVCGPKKSTNLVKNKCVNFNFNGLTGTGVLTESNKKFLPFQQFGRDIADTTDAVRDPQTLEILDITPCSFGGVSVITPGTNTSNQVAVLYQGVNCTEVPVAIHADQLTPTWRVYSTGSNVFQTRAGCLIGAEHVNNSYECDIPIGAGICASYQTQTNSPRRARSVASQSIIAYTMSLGAENSVAYSNNSIAIPTNFTISVTTEILPVSMTKTSVDCTMYICGDSTECSNLLLQYGSFCTQLNRALTGIAVEQDKNTQEVFAQVKQIYKTPPIKDFGGFNFSQILPDPSKPSKRSFIEDLLFNKVTLADAGFIKQYGDCLGDIAARDLICAQKFNGLTVLPPLLTDEMIAQYTSALLAGTITSGWTFGAGAALQIPFAMQMAYRFNGIGVTQCVLYENQKLIANQFNSAIGKIQDSLSSTASALGKLQDVVNQNAQALNTLVKQLSSNFGAISSVLNDILSRLDKVEAEVQIDRLITGRLQSLQTYVTQQLIRAAEIRASANLAATKMSECVLGQSKRVDFCGKGYHLMSFPQSAPHGVVFLHVTYVPAQEKNFTTAPAICHDGKAHFPREGVFVSNGTHWFVTQRNFYEPQIITTDNTFVCGNCDVVIGIVNNTVYDPLQPELDSGGGSGGGQIYEGKLTAEGLRFGIVASRFNHALVDRLVEGAIDAIVRHGGREEDITLVRVPGSWEIPVAAGELARKEDIDAVIAIGVLIRGATPHFDYIASEVSKGLADLSLELRKPITFGVITADTLEQAIERAGTKHGNKGWEAALSAIEMANLFKSLR

SEQ ID NO: 13913 - protein, 1307 aa, Artificial Sequence
  SARS-CoV-2/Congo/94/2020__EPI_ISL_417947 spike protein (1-1147)(N914C_S1123C) LumSynth construct
MFVFLVLLPLVSSQCVNLTTRTQLPPAYTNSFTRGVYYPDKVFRSSVLHSTQDLFLPFFSNVTWFHAIHVSGTNGTKRFDNPVLPFNDGVYFASTEKSNIIRGWIFGTTLDSKTQSLLIVNNATNVVIKVCEFQFCNDPFLGVYYHKNNKSWMESEFRVYSSANNCTFEYVSQPFLMDLEGKQGNFKNLREFVFKNIDGYFKIYSKHTPINLVRDLPQGFSALEPLVDLPIGINITRFQTLLALHRSYLTPGDSSSGWTAGAAAYYVGYLQPRTFLLKYNENGTITDAVDCALDPLSETKCTLKSFTVEKGIYQTSNFRVQPTESIVRFPNITNLCPFGEVFNATRFASVYAWNRKRISNCVADYSVLYNSASFSTFKCYGVSPTKLNDLCFTNVYADSFVIRGDEVRQIAPGQTGKIADYNYKLPDDFTGCVIAWNSNNLDSKVGGNYNYLYRLFRKSNLKPFERDISTEIYQAGSTPCNGVEGFNCYFPLQSYGFQPTNGVGYQPYRVVVLSFELLHAPATVCGPKKSTNLVKNKCVNFNFNGLTGTGVLTESNKKFLPFQQFGRDIADTTDAVRDPQTLEILDITPCSFGGVSVITPGTNTSNQVAVLYQGVNCTEVPVAIHADQLTPTWRVYSTGSNVFQTRAGCLIGAEHVNNSYECDIPIGAGICASYQTQTNSPRRARSVASQSIIAYTMSLGAENSVAYSNNSIAIPTNFTISVTTEILPVSMTKTSVDCTMYICGDSTECSNLLLQYGSFCTQLNRALTGIAVEQDKNTQEVFAQVKQIYKTPPIKDFGGFNFSQILPDPSKPSKRSFIEDILFNKVTLADAGFIKQYGDCLGDIAARDLICAQKFNGLTVLPPLLTDEMIAQYTSALLAGTITSGWTFGAGAALQIPFAMQMAYRFNGIGVTQCVLYENQKLIANQFNSAIGKIQDSLSSTASALGKLQDVVNQNAQALNTLVKQLSSNFGAISSVLNDILSRLDKVEAEVQIDRLITGRLQSLQTYVTQQLIRAAEIRASANLAATKMSECVLGQSKRVDFCGKGYHLMSFPQSAPHGVVFLHVTYVPAQEKNFTTAPAICHDGKAHFPREGVFVSNGTHWFVTQRNFYEPQIITTDNTFVCGNCDVVIGIVNNTVYDPLQPELDSGGGSGGGQIYEGKLTAEGLRFGIVASRFNHALVDRLVEGAIDAIVRHGGREEDITLVRVPGSWEIPVAAGELARKEDIDAVIAIGVLIRGATPHFDYIASEVSKGLADLSLELRKPITFGVITADTLEQAIERAGTKHGNKGWEAALSAIEMANLFKSLR

SEQ ID NO: 13914 - protein, 1307 aa, Artificial Sequence
  SARS-CoV-2/Congo/158/2020__EPI_ISL_417950 spike protein (1-1147)(N914C_S1123C) LumSynth construct
MFVFLVLLPLVSSQCVNLTTRTQLPPAYTNSFTRGVYYPDKVFRSSVLHSTQDLFLPFFSNVTWFHAIHVSGTNGTKRFDNPVLPFNDGVYFASTEKSNIIRGWIFGTTLDSKTQSLLIVNNATNVVIKVCEFQFCNDPFLGVYYHKNNKSWMESEFRVYSSANNCTFEYVSQPFLMDLEGKQGNFKNLREFVFKNIDGYFKIYSKHTPINLVRDLPQGFSALEPLVDLPIGINITRFQTLLALHRSYLTPGDSSSGWTAGAAAYYVGYLQPRTFLLKYNENGTITDAVDCALDPLSETKCTLKSFTVEKGIYQTSNFRVQPTESIVRFPNITNLCPFGEVFNATRFASVYAWNRKRISNCVADYSVLYNSASFSTFKCYGVSPTKLNDLCFTNVYADSFVIRGDEVRQIAPGQTGKIADYNYKLPDDFTGCVIAWNSNNLDSKVGGNYNYLYRLFRKSNLKPFERDISTEIYQAGSTPCNGVEGFNCYFPLQSYGFQPTNGVGYQPYRVVVLSFELLHAPATVCGPKKSTNLVKNKCVNFNFNGLTGTGVLTESNKKFLPFQQFGRDIADTTDAVRDPQTLEILDITPCSFGGVSVITPGTNTSNQVAVLYQDVNCTEVPVAIHADQLTPTWRVYSTGSNVFQTRAGCLIGAEHVNNSYECDIPIGAGICASYQTQTNSPRRARSVASQSIIAYTMSLGAENSVAYSNNSIAIPTNFTISVTTEILPVSMTKTSVDCTMYICGDSTECSNLLLQYGSFCTQLNRALTGIAVEQDKNTQEVFAQVKQIYKTPPIKDFGGFNFSQILPDPSKPSKRSFIEDLLFNKVTLADAGFIKQYGDCLGDIAARDLICAQKFNGLTVLPPLLTDEMIAQYTSALLAGTITSGWTFGAGAALQIPFAMQMAYRFNGIGVTQCVLYENQKLIANQFNSAIGKIQDSLSSTASALGKLQDVVNQNAQALNTLVKQLSSNFGAISSVLNDILSRLDKVEAEVQIDRLITGRLQSLQTYVTQQLIRAAEIRASANLAATKMSECVLGQSKRVDFCGKGYHLMSFPQSAPHGVVFLHVTYVPAQEKNFTTAPAICHDGKAHFPREGVFVSNGTHWFVTQRNFYEPQIITTDNTFLCGNCDVVIGIVNNTVYDPLQPELDSGGGSGGGQIYEGKLTAEGLRFGIVASRFNHALVDRLVEGAIDAIVRHGGREEDITLVRVPGSWEIPVAAGELARKEDIDAVIAIGVLIRGATPHFDYIASEVSKGLADLSLELRKPITFGVITADTLEQAIERAGTKHGNKGWEAALSAIEMANLFKSLR

SEQ ID NO: 13915 - protein, 1307 aa, Artificial Sequence
  SARS-CoV-2/USA/UT-00034/2020__EPI_ISL_417977 spike protein (1-1147)(N914C_S1123C) LumSynth construct
MFVFLVLLPLVSSQCVNLTTRTQLPPAYTNSFTRGVYYPDKVFRSSVLHSTQDLFLPFFSNVTWFHAIHVSGTNGTKRFDNPVLPFNDGVYFASTEKSNIIRGWIFGTTLDSKTQSLLIVNNATNVVIKVCEFQFCNDPFLGVYYYKNNKSWMESEFRVYSSANNCTFEYVSQPFLMDLEGKQGNFKNLREFVFKNIDGYFKIYSKHTPINLVRDLPQGFSALEPLVDLPIGINITRFQTLLALHRSYLTPGDSSSGWTAGAAAYYVGYLQPRTFLLKYNENGTITDAVDCALDPLSETKCTLKSFTVEKGIYQTSNFRVQPTESIVRFPNITNLCPFGEVFNATRFASVYAWNRKRISNCVADYSVLYNSASFSTFKCYGVSPTKLNDLCFTNVYADSFVIRGDEVRQIAPGQTGKIADYNYKLPDDFTGCVIAWNSNNLDSKVGGNYNYLYRLFRKSNLKPFERDISTEIYQAGSTPCNGVEGFNCYFPLQSYGFQPTNGVGYQPYRVVVLSFELLHAPATVCGPKKSTNLVKNKCVNFNFNGLTGTGVLTESNKKFLPFQQFGRDIADTTDAVRDPQTLEILDITPCSFGGVSVITPGTNTSNQVAVLYQGVNCTEVPVAIHADQLTPTWRVYSTGSNVFQTRAGCLIGAEHVNNSYECDIPIGAGICASYQTQTNSPRRARSVASQSIIAYTMSLGAENSVAYSNNSIAIPTNFTISVTTEILPVSMTKTSVDCTMYICGDSTECSNLLLQYGSFCTQLNRALTGIAVEQDKNTQEVFAQVKQIYKTPPIKDFGGFNFSQILPDPSKPSKRSFIEDLLFNKVTLADAGFIKQYGDCLGDIAARDLICAQKFNGLTVLPPLLTDEMIAQYTSALLAGTITSGWTFGAGAALQIPFAMQMAYRFNGIGVTQCVLYENQKLIANQFNSAIGKIQDSLSSTASALGKLQDVVNQNAQALNTLVKQLSSNFGAISSVLNDILSRLDKVEAEVQIDRLITGRLQSLQTYVTQQLIRAAEIRASANLAATKMSECVLGQSKRVDFCGKGYHLMSFPQSAPHGVVFLHVTYVPAQEKNFTTAPAICHDGKAHFPREGVFVSNGTHWFVTQRNFYEPQIITTDNTFVCGNCDVVIGIVNNTVYDPLQPELDSGGGSGGGQIYEGKLTAEGLRFGIVASRFNHALVDRLVEGAIDAIVRHGGREEDITLVRVPGSWEIPVAAGELARKEDIDAVIAIGVLIRGATPHFDYIASEVSKGLADLSLELRKPITFGVITADTLEQAIERAGTKHGNKGWEAALSAIEMANLFKSLR

SEQ ID NO: 13916 - protein, 1307 aa, Artificial Sequence
  SARS-CoV-2/USA/UT-00033/2020__EPI_ISL_417976 spike protein (1-1147)(N914C_S1123C) LumSynth construct
MFVFLVLLPLVSSQCVNLTTRTQLPPAYTNSFTRGVYYPDKVFRSSVLHSTQDLFLPFFSNVTWFHAIHVSGTNGTKRFDNPVLPFNDGVYFASTEKSNIIRGWIFGTTLDSKTQSLLIVNNATNVVIKVCEFQFCNDPFLGVYYHKNNKSWMESEFRVYSSANNCTFEYVSQPFLMDLEGKQGNFKNLREFVFKNIDGYFKIYSKHTPINLVRDLPQGFSALEPLVDLPIGINITRFQTLLALHRSYLTPGDSSSGLTAGAAAYYVGYLQPRTFLLKYNENGTITDAVDCALDPLSETKCTLKSFTVEKGIYQTSNFRVQPTESIVRFPNITNLCPFGEVFNATRFASVYAWNRKRISNCVADYSVLYNSASFSTFKCYGVSPTKLNDLCFTNVYADSFVIRGDEVRQIAPGQTGKIADYNYKLPDDFTGCVIAWNSNNLDSKVGGNYNYLYRLFRKSNLKPFERDISTEIYQAGSTPCNGVEGFNCYFPLQSYGFQPTNGVGYQPYRVVVLSFELLHAPATVCGPKKSTNLVKNKCVNFNFNGLTGTGVLTESNKKFLPFQQFGRDIADTTDAVRDPQTLEILDITPCSFGGVSVITPGTNTSNQVAVLYQGVNCTEVPVAIHADQLTPTWRVYSTGSNVFQTRAGCLIGAEHVNNSYECDIPIGAGICASYQTQTNSPRRARSVASQSIIAYTMSLGAENSVAYSNNSIAIPTNFTISVTTEILPVSMTKTSVDCTMYICGDSTECSNLLLQYGSFCTQLNRALTGIAVEQDKNTQEVFAQVKQIYKTPPIKDFGGFNFSQILPDPSKPSKRSFIEDLLFNKVTLADAGFIKQYGDCLGDIAARDLICAQKFNGLTVLPPLLTDEMIAQYTSALLAGTITSGWTFGAGAALQIPFAMQMAYRFNGIGVTQCVLYENQKLIANQFNSAIGKIQDSLSSTASALGKLQDVVNQNAQALNTLVKQLSSNFGAISSVLNDILSRLDKVEAEVQIDRLITGRLQSLQTYVTQQLIRAAEIRASANLAATKMSECVLGQSKRVDFCGKGYHLMSFPQSAPHGVVFLHVTYVPAQEKNFTTAPAICHDGKAHFPREGVFVSNGTHWFVTQRNFYEPQIITTDNTFVCGNCDVVIGIVNNTVYDPLQPELDSGGGSGGGQIYEGKLTAEGLRFGIVASRFNHALVDRLVEGAIDAIVRHGGREEDITLVRVPGSWEIPVAAGELARKEDIDAVIAIGVLIRGATPHFDYIASEVSKGLADLSLELRKPITFGVITADTLEQAIERAGTKHGNKGWEAALSAIEMANLFKSLR

SEQ ID NO: 13917 - protein, 1307 aa, Artificial Sequence
  SARS-CoV-2/USA/WI-13/2020__EPI_ISL_417516 spike protein (1-1147)(N914C_S1123C) LumSynth construct
MFVFLVLLPLVSSQCVNLTTRTQLPPAYTNSFTRGVYYPDKVFRSSVLHSTQDLFLPFFSNVTWFHAIHVSGTNGTKRFDNPVLPFNDGVYFASTEKSNIIRGWIFGTTLDSKTQSLLIVNNATNVVIKVCEFQFCNDPFLGVYYHKNNKSWMESEFRVYSSANNCTFEYVSQPFLMDLEGKQGNFKNLREFVFKNIDGYFKIYSKHTPINLVRDLPQGFSALEPLVDLPIGINITRFQTLLALHRSYLTPGDSSSGWTAGAAAYYVGYLQPRTFLLKYNENGTITDAVDCALDPLSETKCTLKSFTVEKGIYQTSNFRVLPTESIVRFPNITNLCPFGEVFNATRFASVYAWNRKRISNCVADYSVLYNSASFSTFKCYGVSPTKLNDLCFTNVYADSFVIRGDEVRQIAPGQTGKIADYNYKLPDDFTGCVIAWNSNNLDSKVGGNYNYLYRLFRKSNLKPFERDISTEIYQAGSTPCNGVEGFNCYFPLQSYGFQPTNGVGYQPYRVVVLSFELLHAPATVCGPKKSTNLVKNKCVNFNFNGLTGTGVLTESNKKFLPFQQFGRDIADTTDAVRDPQTLEILDITPCSFGGVSVITPGTNTSNQVAVLYQGVNCTEVPVAIHADQLTPTWRVYSTGSNVFQTRAGCLIGAEHVNNSYECDIPIGAGICASYQTQTNSPRRARSVASQSIIAYTMSLGAENSVAYSNNSIAIPTNFTISVTTEILPVSMTKTSVDCTMYICGDSTECSNLLLQYGSFCTQLNRALTGIAVEQDKNTQEVFAQVKQIYKTPPIKDFGGFNFSQILPDPSKPSKRSFIEDLLFNKVTLADAGFIKQYGDCLGDIAARDLICAQKFNGLTVLPPLLTDEMIAQYTSALLAGTITSGWTFGAGAALQIPFAMQMAYRFNGIGVTQCVLYENQKLIANQFNSAIGKIQDSLSSTASALGKLQDVVNQNAQALNTLVKQLSSNFGAISSVLNDILSRLDKVEAEVQIDRLITGRLQSLQTYVTQQLIRAAEIRASANLAATKMSECVLGQSKRVDFCGKGYHLMSFPQSAPHGVVFLHVTYVPAQEKNFTTAPAICHDGKAHFPREGVFVSNGTHWFVTQRNFYEPQIITTDNTFVCGNCDVVIGIVNNTVYDPLQPELDSGGGSGGGQIYEGKLTAEGLRFGIVASRFNHALVDRLVEGAIDAIVRHGGREEDITLVRVPGSWEIPVAAGELARKEDIDAVIAIGVLIRGATPHFDYIASEVSKGLADLSLELRKPITFGVITADTLEQAIERAGTKHGNKGWEAALSAIEMANLFKSLR

SEQ ID NO: 13918 - protein, 1306 aa, Artificial Sequence
  SARS-CoV-2/India/1-27/2020__EPI_ISL_413522 spike protein (1-1146)(N913C_S1122C) LumSynth construct
MFVFLVLLPLVSSQCVNLTTRTQLPPAYTNSFTRGVYYPDKVFRSSVLHSTQDLFLPFFSNVTWFHAIHVSGTNGTKRFDNPVLPFNDGVYFASTEKSNIIRGWIFGTTLDSKTQSLLIVNNATNVVIKVCEFQFCNDPFLGVYHKNNKSWMESEFRVYSSANNCTFEYVSQPFLMDLEGKQGNFKNLREFVFKNIDGYFKIYSKHTPINLVRDLPQGFSALEPLVDLPIGINITRFQTLLALHRSYLTPGDSSSGWTAGAAAYYVGYLQPRTFLLKYNENGTITDAVDCALDPLSETKCTLKSFTVEKGIYQTSNFRVQPTESIVRFPNITNLCPFGEVFNATRFASVYAWNRKRISNCVADYSVLYNSASFSTFKCYGVSPTKLNDLCFTNVYADSFVIRGDEVIQIAPGQTGKIADYNYKLPDDFTGCVIAWNSNNLDSKVGGNYNYLYRLFRKSNLKPFERDISTEIYQAGSTPCNGVEGFNCYFPLQSYGFQPTNGVGYQPYRVVVLSFELLHAPATVCGPKKSTNLVKNKCVNFNFNGLTGTGVLTESNKKFLPFQQFGRDIADTTDAVRDPQTLEILDITPCSFGGVSVITPGTNTSNQVAVLYQDVNCTEVPVAIHADQLTPTWRVYSTGSNVFQTRAGCLIGAEHVNNSYECDIPIGAGICASYQTQTNSPRRARSVASQSIIAYTMSLGAENSVAYSNNSIAIPTNFTISVTTEILPVSMTKTSVDCTMYICGDSTECSNLLLQYGSFCTQLNRALTGIAVEQDKNTQEVFAQVKQIYKTPPIKDFGGFNFSQILPDPSKPSKRSFIEDLLFNKVTLADAGFIKQYGDCLGDIAARDLICAQKFNGLTVLPPLLTDEMIAQYTSALLAGTITSGWTFGAGAALQIPFAMQMAYRFNGIGVTQCVLYENQKLIANQFNSAIGKIQDSLSSTASALGKLQDVVNQNAQALNTLVKQLSSNFGAISSVLNDILSRLDKVEAEVQIDRLITGRLQSLQTYVTQQLIRAAEIRASANLAATKMSECVLGQSKRVDFCGKGYHLMSFPQSAPHGVVFLHVTYVPAQEKNFTTAPAICHDGKAHFPREGVFVSNGTHWFVTQRNFYEPQIITTDNTFVCGNCDVVIGIVNNTVYDPLQPELDSGGGSGGGQIYEGKLTAEGLRFGIVASRFNHALVDRLVEGAIDAIVRHGGREEDITLVRVPGSWEIPVAAGELARKEDIDAVIAIGVLIRGATPHFDYIASEVSKGLADLSLELRKPITFGVITADTLEQAIERAGTKHGNKGWEAALSAIEMANLFKSLR

SEQ ID NO: 13919 - protein, 1301 aa, Artificial Sequence
  SARS-CoV-2/pangolin/Guangxi/P4L/2017__EPI_ISL_410538 spike protein (1-1141)(N908C_S1117C) LumSynth construct
MFVFLFVLPLVSSQCVNLTTRTGIPPGYTNSSTRGVYYPDKVFRSSILHLTQDLFLPFFSNVTWFNTINYQGGFKKFDNPVLPFNDGVYFASTEKSNIIRGWIFGTTLDARTQSLLIVNNATNVVIKVCEFQFCTDPFLGVYYHNNNKTWVENEFRVYSSANNCTFEYISQPFLMDLEGKQGNFKNLREFVFKNVDGYFKIYSKHTPIDLVRDLPRGFAALEPLVDLPIGINITRFQTLLALHRSYLTPGNLESGWTTGAAAYYVGYLQQRTFLLSYNQNGTITDAVDCSLDPLSETKCTLKSLTVEKGIYQTSNFRVQPTISIVRFPNITNLCPFGEVFNASKFASVYAWNRKRISNCVADYSVLYNSTSFSTFKCYGVSPTKLNDLCFTNVYADSFVVKGDEVRQIAPGQTGVIADYNYKLPDDFTGCVIAWNSVKQDALTGGNYGYLYRLFRKSKLKPFERDISTEIYQAGSTPCNGQVGLNCYYPLERYGFHPTTGVNYQPFRVVVLSFELLNGPATVCGPKLSTTLVKDKCVNFNFNGLTGTGVLTTSKKQFLPFQQFGRDISDTTDAVRDPQTLEILDITPCSFGGVSVITPGTNTSNQVAVLYQDVNCTEVPMAIHAEQLTPAWRVYSAGANVFQTRAGCLVGAEHVNNSYECDIPVGAGICASYHSMSSLRSVNQRSIIAYTMSLGAENSVAYSNNSIAIPTNFTISVTTEILPVSMTKTSVDCTMYICGDSIECSNLLLQYGSFCTQLNRALTGIAVEQDKNTQEVFAQVKQIYKTPPIKDFGGFNFSQILPDPSKPSKRSFIEDLLFNKVTLADAGFIKQYGDCLGDIAARDLICAQKFNGLTVLPPLLTDEMIAQYTSALLAGTITSGWTFGAGAALQIPFAMQMAYRFNGIGVTQCVLYENQKLIANQFNSAIGKIQDSLSSTASALGKLQDVVNQNAQALNTLVKQLSSNFGAISSVLNDILSRLDKVEAEVQIDRLITGRLQSLQTYVTQQLIRAAEIRASANLAATKMSECVLGQSKRVDFCGKGYHLMSFPQSAPHGVVFLHVTYVPAQEKNFTTAPAICHEGKAHFPREGVFVSNGTHWFITQRNFYEPQIITTDNTFVCGSCDVVIGIVNNTVYDPLQPELDSGGGSGGGQIYEGKLTAEGLRFGIVASRFNHALVDRLVEGAIDAIVRHGGREEDITLVRVPGSWEIPVAAGELARKEDIDAVIAIGVLIRGATPHFDYIASEVSKGLADLSLELRKPITFGVITADTLEQAIERAGTKHGNKGWEAALSAIEMANLFKSLR

SEQ ID NO: 13920 - protein, 1301 aa, Artificial Sequence
  SARS-CoV-2/pangolin/Guangxi/P5L/2017__EPI_ISL_410540 spike protein (1-1141)(N908C_S1117C) LumSynth construct
MFVFLFVLPLVSSQCVNLTTRTGIPPGYTNSSTRGVYYPDKVFRSSILHLTQDLFLPFFSNVTWFNTINYQGGFKKFDNPVLPFNDGVYFASTEKSNIIRGWIFGTTLDARTQSLLIVNNATNVVIKVCEFQFCTDPFLGVYYHNNNKTWVENEFRVYSSANNCTFEYISQPFLMDLEGKQGNFKNLREFVFKNVDGYFKIYSKHTPIDLVRDLPRGFAALEPLVDLPIGINITRFQTLLALHRSYLTPGKLESGWTTGAAAYYVGYLQQRTFLLSYNQNGTITDAVDCSLDPLSETKCTLKSLTVEKGIYQTSNFRVQPTISIVRFPNITNLCPFGEVFNASKFASVYAWNRKRISNCVADYSVLYNSTSFSTFKCYGVSPTKLNDLCFTNVYADSFVVKGDEVRQIAPGQTGVIADYNYKLPDDFTGCVIAWNSVKQDALTGGNYGYLYRLFRKSKLKPFERDISTEIYQAGSTPCNGQVGLNCYYPLERYGFHPTTGVNYQPFRVVVLSFELLNGPATVCGPKLSTTLVKDKCVNFNFNGLTGTGVLTTSKKQFLPFQQFGRDISDTTDAVRDPQTLEILDITPCSFGGVSVITPGTNTSNQVAVLYQDVNCTEVPMAIHAEQLTPAWRVYSAGANVFQTRAGCLVGAEHVNNSYECDIPVGAGICASYHSMSSFRSVNQRSIIAYTMSLGAENSVAYSNNSIAIPTNFTISVTTEILPVSMTKTSVDCTMYICGDSIECSNLLLQYGSFCTQLNRALTGIAVEQDKNTQEVFAQVKQIYKTPPIKDFGGFNFSQILPDPSKPSKRSFIEDLLFNKVTLADAGFIKQYGDCLGDIAARDLICAQKFNGLTVLPPLLTDEMIAQYTSALLAGTITSGWTFGAGAALQIPFAMQMAYRFNGIGVTQCVLYENQKLIANQFNSAIGKIQDSLSSTASALGKLQDVVNQNAQALNTLVKQLSSNFGAISSVLNDILSRLDKVEAEVQIDRLITGRLQSLQTYVTQQLIRAAEIRASANLAATKMSECVLGQSKRVDFCGKGYHLMSFPQSAPHGVVFLHVTYVPAQEKNFTTAPAICHEGKAHFPREGVFVSNGTHWFITQRNFYEPQIITTDNTFVCGSCDVVIGIVNNTVYDPLQPELDSGGGSGGGQIYEGKLTAEGLRFGIVASRFNHALVDRLVEGAIDAIVRHGGREEDITLVRVPGSWEIPVAAGELARKEDIDAVIAIGVLIRGATPHFDYIASEVSKGLADLSLELRKPITFGVITADTLEQAIERAGTKHGNKGWEAALSAIEMANLFKSLR

SEQ ID NO: 13921 - protein, 1301 aa, Artificial Sequence
  SARS-CoV-2/pangolin/Guangxi/P5E/2017__EPI_ISL_410541 spike protein (1-1141)(N908C_S1117C) LumSynth construct
MFVFLFVLPLVSSQCVNLTTRTGIPPGYTNSSTRGVYYPDKVFRSSILHLTQDLFLPFFSNVTWFNTITYQGGSKKFDNPVLPFNDGVYFASTEKSNIIRGWIFGTTLDARTQSLLIVNNATNVVIKVCEFQFCTDPFLGVYYHNNNKTWVENEFRVYSSANNCTFEYISQPFLMDLEGKQGNFKNLREFVFKNVDGYFKIYSKHTPIDLVRDLPRGFAALEPLVDLPIGINITRFQTLLALHRSYLTPGKLESGWTTGAAAYYVGYLQQRTFLLSYNQNGTITDAVDCSLDPLSETKCTLKSLTVEKGIYQTSNFRVQPTISIVRFPNITNLCPFGEVFNASKFASVYAWNRKRISNCVADYSVLYNSTSFSTFKCYGVSPTKLNDLCFTNVYADSFVVKGDEVRQIAPGQTGVIADYNYKLPDDFTGCVIAWNSVKQDALTGDNYGYLYRLFRKSKLKPFERDISTEIYQAGSTPCNGQVGLNCYYPLERYGFHPTTGVNYQPFRVVVLSFELLNGPATVCGPKLSTTLVKDKCVNFNFNGLTGTGVLTTSKKQFLPFQQFGRDISDTTDAVRDPQTLEILDITPCSFGGVSVITPGTNTSNQVAVLYQDVNCTEVPMAIHAEQLTPAWRVYSAGANVFQTRAGCLVGAEHVNNSYECDIPVGAGICASYHSMSSFRSVNQRSIIAYTMSLGAENSVAYSNNSIAIPTNFTISVTTEILPVSMTKTSVDCTMYICGDSIECSNLLLQYGSFCTQLNRALTGIAVEQDKNTQEVFAQVKQIYKTPPIKDFGGFNFSQILPDPSKPSKRSFIEDLLFNKVTLADAGFIKQYGDCLGDIAARDLICAQKFNGLTVLPPLLTDEMIAQYTSALLAGTITSGWTFGAGAALQIPFAMQMAYRFNGIGVTQCVLYENQKLIANQFNSAIGKIQDSLSSTASALGKLQDVVNQNAQALNTLVKQLSSNFGAISSVLNDILSRLDKVEAEVQIDRLITGRLQSLQTYVTQQLIRAAEIRASANLAATKMSECVLGQSKRVDFCGKGYHLMSFPQSAPHGVVFLHVTYVPAQEKNFTTAPAICHEGKAHFPREGVFVSNGTHWFITQRNFYEPQIITTDNTFVCGSCDVVIGIVNNTVYDPLQPELDSGGGSGGGQIYEGKLTAEGLRFGIVASRFNHALVDRLVEGAIDAIVRHGGREEDITLVRVPGSWEIPVAAGELARKEDIDAVIAIGVLIRGATPHFDYIASEVSKGLADLSLELRKPITFGVITADTLEQAIERAGTKHGNKGWEAALSAIEMANLFKSLR

SEQ ID NO: 13922 - protein, 1299 aa, Artificial Sequence
  SARS-CoV-2/pangolin/Guangxi/P1E/2017__EPI_ISL_410539 spike protein (1-1139)(N906C_S1115C) LumSynth construct
MFVFLFVLPLVSSQCVNLTTRTGIQPGYTNSSTRGVYYPDKVFRSSILHLTQDLFLPFFSNVTWFNTINYQGGFKKFDNPVLPFNDGVYFASTEKSNIIRGWIFGTTLDARTQSLLIVNNATNVVIKVCEFQFCTDPFLGVYYHNNNKTWVENEFRVYSSANNCTFEYISQPFLMDLEGKQGNFKNLREFVFKNVDGYFKIYSKHTPIDLVRDLPRGFAALEPLVDLPIGINITRFQTLLALHRSYLTPGKLESGWTTGAAAYYVGYLQQRTFLLSYNQNGTITDAVDCSLDPLSETKCTLKSLTVEKGIYQTSNFRVQPTISIVRFPNITNLCPFGEVFNASKFASVYAWNRKRISNCVADYSVLYNSTSFSTFKCYGVSPTKLNDLCFTNVYADSFVVKGDEVRQIAPGQTGVIADYNYKLPDDFTGCVIAWNSVKQDALTGGNYLYRLFRKSKLKPFERDISTEIYQAGSTPCNGQVGLNCYYPLERYGFHPTTGVNYQPFRVVVLSFELLNGPATVCGPKLSTTLVKDKCVNFNFNGLTGTGVLTTSKKQFLPFQQFGRDISDTTDAVRDPQTLEILDITPCSFGGVSVITPGTNTSNQVAVLYQDVNCTEVPMAIHAEQLTPAWRVYSAGANVFQTRAGCLVGAEHVNNSYECDIPVGAGICASYHSMSSLRSVNQRSIIAYTMSLGAENSVAYSNNSIAIPTNFTISVTTEILPVSMTKTSVDCTMYICGDSIECSNLLLQYGSFCTQLNRALTGIAVEQDKNTQEVFAQVKQIYKTPPIKDFGGFNFSQILPDPSKPSKRSFIEDLLFNKVTLADAGFIKQYGDCLGDIAARDLICAQKFNGLTVLPPLLTDEMIAQYTSALLAGTITSGWTFGAGAALQIPFAMQMAYRFNGIGVTQCVLYENQKLIANQFNSAIGKIQDSLSSTASALGKLQDVVNQNAQALNTLVKQLSSNFGAISSVLNDILSRLDKVEAEVQIDRLITGRLQSLQTYVTQQLIRAAEIRASANLAATKMSECVLGQSKRVDFCGKGYHLMSFPQSAPHGVVFLHVTYVPAQEKNFTTAPAICHEGKAHFPREGVFVSNGTHWFITQRNFYEPQIITTDNTFVCGSCDVVIGIVNNTVYDPLQPELDSGGGSGGGQIYEGKLTAEGLRFGIVASRFNHALVDRLVEGAIDAIVRHGGREEDITLVRVPGSWEIPVAAGELARKEDIDAVIAIGVLIRGATPHFDYIASEVSKGLADLSLELRKPITFGVITADTLEQAIERAGTKHGNKGWEAALSAIEMANLFKSLR

SEQ ID NO: 13923 - protein, 1315 aa, Artificial Sequence
  SARS-CoV-2/Wuhan/WIV05/2019__EPI_ISL_402128 spike protein (1-1147)(N914C_S1123C) Ferritin construct
MFVFLVLLPLVSSQCVNLTTRTQLPPAYTNSFTRGVYYPDKVFRSSVLHSTQDLFLPFFSNVTWFHAIHVSGTNGTKRFDNPVLPFNDGVYFASTEKSNIIRGWIFGTTLDSKTQSLLIVNNATNVVIKVCEFQFCNDPFLGVYYHKNNKSWMESEFRVYSSANNCTFEYVSQPFLMDLEGKQGNFKNLREFVFKNIDGYFKIYSKHTPINLVRDLPQGFSALEPLVDLPIGINITRFQTLLALHRSYLTPGDSSSGWTAGAAAYYVGYLQPRTFLLKYNENGTITDAVDCALDPLSETKCTLKSFTVEKGIYQTSNFRVQPTESIVRFPNITNLCPFGEVFNATRFASVYAWNRKRISNCVADYSVLYNSASFSTFKCYGVSPTKLNDLCFTNVYADSFVIRGDEVRQIAPGQTGKIADYNYKLPDDFTGCVIAWNSNNLDSKVGGNYNYLYRLFRKSNLKPFERDISTEIYQAGSTPCNGVEGFNCYFPLQSYGFQPTNGVGYQPYRVVVLSFELLHAPATVCGPKKSTNLVKNKCVNFNFNGLTGTGVLTESNKKFLPFQQFGRDIADTTDAVRDPQTLEILDITPCSFGGVSVITPGTNTSNQVAVLYQDVNCTEVPVAIHADQLTPTWRVYSTGSNVFQTRAGCLIGAEHVNNSYECDIPIGAGICASYQTQTNSPRRARSVASQSIIAYTMSLGAENSVAYSNNSIAIPTNFTISVTTEILPVSMTKTSVDCTMYICGDSTECSNLLLQYGSFCTQLNRALTGIAVEQDKNTQEVFAQVKQIYKTPPIKDFGGFNFSQILPDPSKPSKRSFIEDLLFNKVTLADAGFIKQYGDCLGDIAARDLICAQKFNGLTVLPPLLTDEMIAQYTSALLAGTITSGWTFGAGAALQIPFAMQMAYRFNGIGVTQCVLYENQKLIANQFNSAIGKIQDSLSSTASALGKLQDVVNQNAQALNTLVKQLSSNFGAISSVLNDILSRLDKVEAEVQIDRLITGRLQSLQTYVTQQLIRAAEIRASANLAATKMSECVLGQSKRVDFCGKGYHLMSFPQSAPHGVVFLHVTYVPAQEKNFTTAPAICHDGKAHFPREGVFVSNGTHWFVTQRNFYEPQIITTDNTFVCGNCDVVIGIVNNTVYDPLQPELDSGGGGSDIIKLLNEQVNKEMQSSNLYMSMSSWCYTHSLDGAGLFLFDHAAEEYEHAKKLIIFLNENNVPVQLTSISAPEHKFEGLTQIFQKAYEHEQHISESINNIVDHAIKSKDHATFNFLQWYVAEQHEEEVLFKDILDKIELIGNENHGLYLADQYVKGIAKSRKS

SEQ ID NO: 13924 - protein, 1311 aa, Artificial Sequence
  SARS-CoV-2/bat/Yunnan/RaTG13/2013__EPI_ISL_402131 spike protein (1-1143)(N910C_S1119C) Ferritin construct
MFVFLVLLPLVSSQCVNLTTRTQLPPAYTNSSTRGVYYPDKVFRSSVLHLTQDLFLPFFSNVTWFHAIHVSGTNGIKRFDNPVLPFNDGVYFASTEKSNIIRGWIFGTTLDSKTQSLLIVNNATNVVIKVCEFQFCNDPFLGVYYHKNNKSWMESEFRVYSSANNCTFEYVSQPFLMDLEGKQGNFKNLREFVFKNIDGYFKIYSKHTPINLVRDLPPGFSALEPLVDLPIGINITRFQTLLALHRSYLTPGDSSSGWTAGAAAYYVGYLQPRTFLLKYNENGTITDAVDCALDPLSETKCTLKSFTVEKGIYQTSNFRVQPTDSIVRFPNITNLCPFGEVFNATTFASVYAWNRKRISNCVADYSVLYNSTSFSTFKCYGVSPTKLNDLCFTNVYADSFVITGDEVRQIAPGQTGKIADYNYKLPDDFTGCVIAWNSKHIDAKEGGNFNYLYRLFRKANLKPFERDISTEIYQAGSKPCNGQTGLNCYYPLYRYGFYPTDGVGHQPYRVVVLSFELLNAPATVCGPKKSTNLVKNKCVNFNFNGLTGTGVLTESNKKFLPFQQFGRDIADTTDAVRDPQTLEILDITPCSFGGVSVITPGTNASNQVAVLYQDVNCTEVPVAIHADQLTPTWRVYSTGSNVFQTRAGCLIGAEHVNNSYECDIPIGAGICASYQTQTNSRSVASQSIIAYTMSLGAENSVAYSNNSIAIPTNFTISVTTEILPVSMTKTSVDCTMYICGDSTECSNLLLQYGSFCTQLNRALTGIAVEQDKNTQEVFAQVKQIYKTPPIKDFGGFNFSQILPDPSKPSKRSFIEDLLFNKVTLADAGFIKQYGDCLGDIAARDLICAQKFNGLTVLPPLLTDEMIAQYTSALLAGTITSGWTFGAGAALQIPFAMQMAYRFNGIGVTQCVLYENQKLIANQFNSAIGKIQDSLSSTASALGKLQDVVNQNAQALNTLVKQLSSNFGAISSVLNDILSRLDKVEAEVQIDRLITGRLQSLQTYVTQQLIRAAEIRASANLAATKMSECVLGQSKRVDFCGKGYHLMSFPQSAPHGVVFLHVTYVPAQEKNFTTAPAICHDGKAHFPREGVFVSNGTHWFVTQRNFYEPQIITTDNTFVCGSCDVVIGIVNNTVYDPLQPELDSGGGGSDIIKLLNEQVNKEMQSSNLYMSMSSWCYTHSLDGAGLFLFDHAAEEYEHAKKLIIFLNENNVPVQLTSISAPEHKFEGLTQIFQKAYEHEQHISESINNIVDHAIKSKDHATFNFLQWYVAEQHEEEVLFKDILDKIELIGNENHGLYLADQYVKGIAKSRKS

SEQ ID NO: 13925 - protein, 1315 aa, Artificial Sequence
  SARS-CoV-2/Wuhan/HBCDC-HB-01/2019__EPI_ISL_402132 spike protein (1-1147)(N914C_S1123C) Ferritin construct
MFVFLVLLPLVSSQCVNLTTRTQLPPAYTNSITRGVYYPDKVFRSSVLHSTQDLFLPFFSNVTWFHAIHVSGTNGTKRFDNPVLPFNDGVYFASTEKSNIIRGWIFGTTLDSKTQSLLIVNNATNVVIKVCEFQFCNDPFLGVYYHKNNKSWMESEFRVYSSANNCTFEYVSQPFLMDLEGKQGNFKNLREFVFKNIDGYFKIYSKHTPINLVRDLPQGFSALEPLVDLPIGINITRFQTLLALHRSYLTPGDSSSGWTAGAAAYYVGYLQPRTFLLKYNENGTITDAVDCALDPLSETKCTLKSFTVEKGIYQTSNFRVQPTESIVRFPNITNLCPFGEVFNATRFASVYAWNRKRISNCVADYSVLYNSASFSTFKCYGVSPTKLNDLCFTNVYADSFVIRGDEVRQIAPGQTGKIADYNYKLPDDFTGCVIAWNSNNLDSKVGGNYNYLYRLFRKSNLKPFERDISTEIYQAGSTPCNGVEGFNCYFPLQSYGFQPTNGVGYQPYRVVVLSFELLHAPATVCGPKKSTNLVKNKCVNFNFNGLTGTGVLTESNKKFLPFQQFGRDIADTTDAVRDPQTLEILDITPCSFGGVSVITPGTNTSNQVAVLYQDVNCTEVPVAIHADQLTPTWRVYSTGSNVFQTRAGCLIGAEHVNNSYECDIPIGAGICASYQTQTNSPRRARSVASQSIIAYTMSLGAENSVAYSNNSIAIPTNFTISVTTEILPVSMTKTSVDCTMYICGDSTECSNLLLQYGSFCTQLNRALTGIAVEQDKNTQEVFAQVKQIYKTPPIKDFGGFNFSQILPDPSKPSKRSFIEDLLFNKVTLADAGFIKQYGDCLGDIAARDLICAQKFNGLTVLPPLLTDEMIAQYTSALLAGTITSGWTFGAGAALQIPFAMQMAYRFNGIGVTQCVLYENQKLIANQFNSAIGKIQDSLSSTASALGKLQDVVNQNAQALNTLVKQLSSNFGAISSVLNDILSRLDKVEAEVQIDRLITGRLQSLQTYVTQQLIRAAEIRASANLAATKMSECVLGQSKRVDFCGKGYHLMSFPQSAPHGVVFLHVTYVPAQEKNFTTAPAICHDGKAHFPREGVFVSNGTHWFVTQRNFYEPQIITTDNTFVCGNCDVVIGIVNNTVYDPLQPELDSGGGGSDIIKLLNEQVNKEMQSSNLYMSMSSWCYTHSLDGAGLFLFDHAAEEYEHAKKLIIFLNENNVPVQLTSISAPEHKFEGLTQIFQKAYEHEQHISESINNIVDHAIKSKDHATFNFLQWYVAEQHEEEVLFKDILDKIELIGNENHGLYLADQYVKGIAKSRKS

SEQ ID NO: 13926 - protein, 1315 aa, Artificial Sequence
  SARS-CoV-2/Guangdong/20SF028/2020__EPI_ISL_403936 spike protein (1-1147)(N914C_S1123C) Ferritin construct
MFVFLVLLPLVSSQCVNLTTRTQLPPAYTNSFTRGVYYPDKVFRSSVLYSTQDLFLPFFSNVTWFHAIHVSGTNGTKRFDNPVLPFNDGVYFASTEKSNIIRGWIFGTTLDSKTQSLLIVNNATNVVIKVCEFQFCNDPFLGVYYHKNNKSWMESEFRVYSSANNCTFEYVSQPFLMDLEGKQGNFKNLREFVFKNIDGYFKIYSKHTPINLVRDLPQGFSALEPLVDLPIGINITRFQTLLALHRSYLTPGDSSSGWTAGAAAYYVGYLQPRTFLLKYNENGTITDAVDCALDPLSETKCTLKSFTVEKGIYQTSNFRVQPTESIVRFPNITNLCPFGEVFNATRFASVYAWNRKRISNCVADYSVLYNSASFSTFKCYGVSPTKLNDLCFTNVYADSFVIRGDEVRQIAPGQTGKIADYNYKLPDDFTGCVIAWNSNNLDSKVGGNYNYLYRLFRKSNLKPFERDISTEIYQAGSTPCNGVEGFNCYFPLQSYGFQPTNGVGYQPYRVVVLSFELLHAPATVCGPKKSTNLVKNKCVNFNFNGLTGTGVLTESNKKFLPFQQFGRDIADTTDAVRDPQTLEILDITPCSFGGVSVITPGTNTSNQVAVLYQDVNCTEVPVAIHADQLTPTWRVYSTGSNVFQTRAGCLIGAEHVNNSYECDIPIGAGICASYQTQTNSPRRARSVASQSIIAYTMSLGAENSVAYSNNSIAIPTNFTISVTTEILPVSMTKTSVDCTMYICGDSTECSNLLLQYGSFCTQLNRALTGIAVEQDKNTQEVFAQVKQIYKTPPIKDFGGFNFSQILPDPSKPSKRSFIEDLLFNKVTLADAGFIKQYGDCLGDIAARDLICAQKFNGLTVLPPLLTDEMIAQYTSALLAGTITSGWTFGAGAALQIPFAMQMAYRFNGIGVTQCVLYENQKLIANQFNSAIGKIQDSLSSTASALGKLQDVVNQNAQALNTLVKQLSSNFGAISSVLNDILSRLDKVEAEVQIDRLITGRLQSLQTYVTQQLIRAAEIRASANLAATKMSECVLGQSKRVDFCGKGYHLMSFPQSAPHGVVFLHVTYVPAQEKNFTTAPAICHDGKAHFPREGVFVSNGTHWFVTQRNFYEPQIITTDNTFVCGNCDVVIGIVNNTVYDPLQPELDSGGGGSDIIKLLNEQVNKEMQSSNLYMSMSSWCYTHSLDGAGLFLFDHAAEEYEHAKKLIIFLNENNVPVQLTSISAPEHKFEGLTQIFQKAYEHEQHISESINNIVDHAIKSKDHATFNFLQWYVAEQHEEEVLFKDILDKIELIGNENHGLYLADQYVKGIAKSRKS

SEQ ID NO: 13927 - protein, 1315 aa, Artificial Sequence
  SARS-CoV-2/Shenzhen/SZTH-001/2020__EPI_ISL_406592 spike protein (1-1147)(N914C_S1123C) Ferritin construct
MFVFLVLLPLVSSQCVNLTTRTQLPPAYTNSFTRGVYYPDKVFRSSVLHSTQDLFLPFFSNVTWFHAIHVSGTNGTKRFDNPVLPFNDGVYFASTEKSNIIRGWIFGTTLDSKTQSLLIVNNATNVVIKVCEFQFCNDPFLGVYYHKNNKSWMESEFRVYSSANNCTFEYVSQPFLMDLEGKQGNFKNLREFVFKNIDGYFKIYSKHTPINLVRDLPQGFSALEPLVDLPIGINITRFQTLLALHRSYLTPGDSSSGWTAGAAAYYVGYLQPRTFLLKYNENGTITDAVDCALDPLSETKCTLKSFTVEKGIYQTSNFRVQPTESIVRFPNITNLCPFGEVFNATRFASVYAWNRKRISNCVADYSVLYNSASFSTFKCYGVSPTKLNDLCFTNVYADSFVIRGDEVRQIAPGQTGKIADYNYKLPDDFTGCVIAWNSNNLDSKVGGNYNYLYRLFRKSNLKPFERDISTEIYQAGSTPCNGVEGFNCYFPLQSYGFQPTNGVGYQPYRVVVLSFELLHAPATVCGPKKSTNLVKNKCVNFNFNGLTGTGVLTESNKKFLPFQQFGRDIADTTDAVRDPQTLEILDITPCSFGGVSVITPGTNTSNQVAVLYQDVNCTEVPVAIHADQLTPTWRVYSTGSNVFQTRAGCLIGAEHVNNSYECDIPIGAGICASYQTQTNSPRRARSVASQSIIAYTMSLGAENSVAYSNNSIAIPTNFTISVTTEILPVSMTKTSVDCTMYICGDSTECSNLLLQYGSFCTQLNRALTGIAVEQDKNTQEVFAQVKQIYKTPPIKDFGGFNFSQILPDPSKPSKRSFIEDLLFNKVTLADAGFIKQYGDCLGDIAARDLICAQKFNGLTVLPPLLTDEMIAQYTSALLAGTITSGWTFGAGAALQIPFAMQMAYRFNGIGVTQCVLYENQKLIANQFNSAIGKIQDSLSSTASALGKLQDVVNQNAQALNTLVKQLSSNFGAISSVLNDILSRLDKVEAEVQIDRLITGRLQSLQTYVTQQLIRAAEIRASANLAATKMSECVLGQSKRVDFCGKGYHLMSFPQSAPHGVVFLHVTYVPAQEKNFTTAPAICHDGKAHFPREGVFVSNGTHWFVTQRNFYEPQIITTDNTFVCGNCDVLIGIVNNTVYDPLQPELDSGGGGSDIIKLLNEQVNKEMQSSNLYMSMSSWCYTHSLDGAGLFLFDHAAEEYEHAKKLIIFLNENNVPVQLTSISAPEHKFEGLTQIFQKAYEHEQHISESINNIVDHAIKSKDHATFNFLQWYVAEQHEEEVLFKDILDKIELIGNENHGLYLADQYVKGIAKSRKS

SEQ ID NO: 13928 - protein, 1315 aa, Artificial Sequence
  SARS-CoV-2/Shenzhen/SZTH-004/2020__EPI_ISL_406595 spike protein (1-1147)(N914C_S1123C) Ferritin construct
MFVFLVLLPLVSSQCVNLTTRTQLPPAYTNSFTRGVYYPDKVFRSSVLHSTQDLFLPFFSNVTWFHAIHVSGTNGTKRFDNPVLPFNDGVYFASTEKSNIIRGWIFGTTLDSKTQSLLIVNNATNVVIKVCEFQFCNDPFLGVYYHKNNKSWMESEFRVYSSANNCTFEYVSQPFLMDLEGKQGNFKNLREFVFKNIDGYFKIYSKHTPINLVRDLPQGFSALEPLVDLPIGINITRFQTLLALHRSYLTPGDSSSGWTAGAAAYYVGYLQPRTFLLKYNENGTITDAVDCALDPLSETKCTLKSFTVEKGIYQTSNFRVQPTESIVRFPNITNLCPFGEVFNATRFASVYAWDRKRISNCVAYYSVLYNSASFSTFKCYGVSPTKLNDLCFTNVYADSFVIRGDEVRQIAPGQTGKIADYNYKLPDDFTGCVIAWNSNNLDSKVGGNYNYLYRLFRKSNLKPFERDISTEIYQAGSTPCNGVEGFNCYFPLQSYGFQPTNGVGYQPYRVVVLSFELLHAPATVCGPKKSTNLVKNKCVNFNFNGLTGTGVLTESNKKFLPFQQFGRDIADTTDAVRDPQTLEILDITPCSFGGVSVITPGTNTSNQVAVLYQDVNCTEVPVAIHADQLTPTWRVYSTGSNVFQTRAGCLIGAEHVNNSYECDIPIGAGICASYQTQTNSPRRARSVASQSIIAYTMSLGAENSVAYSNNSIAIPTNFTISVTTEILPVSMTKTSVDCTMYICGDSTECSNLLLQYGSFCTQLNRALTGIAVEQDKNTQEVFAQVKQIYKTPPIKDFGGFNFSQILPDPSKPSKRSFIEDLLFNKVTLADAGFIKQYGDCLGDIAARDLICAQKFNGLTVLPPLLTDEMIAQYTSALLAGTITSGWTFGAGAALQIPFAMQMAYRFNGIGVTQCVLYENQKLIANQFNSAIGKIQDSLSSTASALGKLQDVVNQNAQALNTLVKQLSSNFGAISSVLNDILSRLDKVEAEVQIDRLITGRLQSLQTYVTQQLIRAAEIRASANLAATKMSECVLGQSKRVDFCGKGYHLMSFPQSAPHGVVFLHVTYVPAQEKNFTTAPAICHDGKAHFPREGVFVSNGTHWFVTQRNFYEPQIITTDNTFVCGNCDVVIGIVNNTVYDPLQPELDSGGGGSDIIKLLNEQVNKEMQSSNLYMSMSSWCYTHSLDGAGLFLFDHAAEEYEHAKKLIIFLNENNVPVQLTSISAPEHKFEGLTQIFQKAYEHEQHISESINNIVDHAIKSKDHATFNFLQWYVAEQHEEEVLFKDILDKIELIGNENHGLYLADQYVKGIAKSRKS

SEQ ID NO: 13929 - protein, 1315 aa, Artificial Sequence
  SARS-CoV-2/France/IDF0372/2020__EPI_ISL_406596 spike protein (1-1147)(N914C_S1123C) Ferritin construct
MFVFLVLLPLVSSQCVNLTTRTQLPPAYTNSFTRGVYYPDKVFRSSVLHSTQDLFLPFFSNVTWFHAIHVSGTNGTKRFDNPVLPFNDGVYFASTEKSNIIRGWIFGTTLDSKTQSLLIVNNATNVVIKVCEFQFCNDPFLGVYYHKNNKSWMESEFRVYSSANNCTFEYVSQPFLMDLEGKQGNFKNLREFVFKNIDGYFKIYSKHTPINLVRDLPQGFSALEPLVDLPIGINITRFQTLLALHRSYLTPGDSSSGWTAGAAAYYVGYLQPRTFLLKYNENGTITDAVDCALDPLSETKCTLKSFTVEKGIYQTSNFRVQPTESIVRFPNITNLCPFGEVFNATRFASVYAWNRKRISNCVADYSFLYNSASFSTFKCYGVSPTKLNDLCFTNVYADSFVIRGDEVRQIAPGQTGKIADYNYKLPDDFTGCVIAWNSNNLDSKVGGNYNYLYRLFRKSNLKPFERDISTEIYQAGSTPCNGVEGFNCYFPLQSYGFQPTNGVGYQPYRVVVLSFELLHAPATVCGPKKSTNLVKNKCVNFNFNGLTGTGVLTESNKKFLPFQQFGRDIADTTDAVRDPQTLEILDITPCSFGGVSVITPGTNTSNQVAVLYQDVNCTEVPVAIHADQLTPTWRVYSTGSNVFQTRAGCLIGAEHVNNSYECDIPIGAGICASYQTQTNSPRRARSVASQSIIAYTMSLGAENSVAYSNNSIAIPTNFTISVTTEILPVSMTKTSVDCTMYICGDSTECSNLLLQYGSFCTQLNRALTGIAVEQDKNTQEVFAQVKQIYKTPPIKDFGGFNFSQILPDPSKPSKRSFIEDLLFNKVTLADAGFIKQYGDCLGDIAARDLICAQKFNGLTVLPPLLTDEMIAQYTSALLAGTITSGWTFGAGAALQIPFAMQMAYRFNGIGVTQCVLYENQKLIANQFNSAIGKIQDSLSSTASALGKLQDVVNQNAQALNTLVKQLSSNFGAISSVLNDILSRLDKVEAEVQIDRLITGRLQSLQTYVTQQLIRAAEIRASANLAATKMSECVLGQSKRVDFCGKGYHLMSFPQSAPHGVVFLHVTYVPAQEKNFTTAPAICHDGKAHFPREGVFVSNGTHWFVTQRNFYEPQIITTDNTFVCGNCDVVIGIVNNTVYDPLQPELDSGGGGSDIIKLLNEQVNKEMQSSNLYMSMSSWCYTHSLDGAGLFLFDHAAEEYEHAKKLIIFLNENNVPVQLTSISAPEHKFEGLTQIFQKAYEHEQHISESINNIVDHAIKSKDHATFNFLQWYVAEQHEEEVLFKDILDKIELIGNENHGLYLADQYVKGIAKSRKS

SEQ ID NO: 13930 - protein, 1315 aa, Artificial Sequence
  SARS-CoV-2/Australia/VIC01/2020__EPI_ISL_406844 spike protein (1-1147)(N914C_S1123C) Ferritin construct
MFVFLVLLPLVSSQCVNLTTRTQLPPAYTNSFTRGVYYPDKVFRSSVLHSTQDLFLPFFSNVTWFHAIHVSGTNGTKRFDNPVLPFNDGVYFASTEKSNIIRGWIFGTTLDSKTQSLLIVNNATNVVIKVCEFQFCNDPFLGVYYHKNNKSWMESEFRVYSSANNCTFEYVSQPFLMDLEGKQGNFKNLREFVFKNIDGYFKIYSKHTPINLVRDLPQGFSALEPLVDLPIGINITRFQTLLALHRRYLTPGDSSSGWTAGAAAYYVGYLQPRTFLLKYNENGTITDAVDCALDPLSETKCTLKSFTVEKGIYQTSNFRVQPTESIVRFPNITNLCPFGEVFNATRFASVYAWNRKRISNCVADYSVLYNSASFSTFKCYGVSPTKLNDLCFTNVYADSFVIRGDEVRQIAPGQTGKIADYNYKLPDDFTGCVIAWNSNNLDSKVGGNYNYLYRLFRKSNLKPFERDISTEIYQAGSTPCNGVEGFNCYFPLQSYGFQPTNGVGYQPYRVVVLSFELLHAPATVCGPKKSTNLVKNKCVNFNFNGLTGTGVLTESNKKFLPFQQFGRDIADTTDAVRDPQTLEILDITPCSFGGVSVITPGTNTSNQVAVLYQDVNCTEVPVAIHADQLTPTWRVYSTGSNVFQTRAGCLIGAEHVNNSYECDIPIGAGICASYQTQTNSPRRARSVASQSIIAYTMSLGAENSVAYSNNSIAIPTNFTISVTTEILPVSMTKTSVDCTMYICGDSTECSNLLLQYGSFCTQLNRALTGIAVEQDKNTQEVFAQVKQIYKTPPIKDFGGFNFSQILPDPSKPSKRSFIEDLLFNKVTLADAGFIKQYGDCLGDIAARDLICAQKFNGLTVLPPLLTDEMIAQYTSALLAGTITSGWTFGAGAALQIPFAMQMAYRFNGIGVTQCVLYENQKLIANQFNSAIGKIQDSLSSTASALGKLQDVVNQNAQALNTLVKQLSSNFGAISSVLNDILSRLDKVEAEVQIDRLITGRLQSLQTYVTQQLIRAAEIRASANLAATKMSECVLGQSKRVDFCGKGYHLMSFPQSAPHGVVFLHVTYVPAQEKNFTTAPAICHDGKAHFPREGVFVSNGTHWFVTQRNFYEPQIITTDNTFVCGNCDVVIGIVNNTVYDPLQPELDSGGGGSDIIKLLNEQVNKEMQSSNLYMSMSSWCYTHSLDGAGLFLFDHAAEEYEHAKKLIIFLNENNVPVQLTSISAPEHKFEGLTQIFQKAYEHEQHISESINNIVDHAIKSKDHATFNFLQWYVAEQHEEEVLFKDILDKIELIGNENHGLYLADQYVKGIAKSRKS

SEQ ID NO: 13931 - protein, 1315 aa, Artificial Sequence
  SARS-CoV-2/Germany/BavPat1/2020__EPI_ISL_406862 spike protein (1-1147)(N914C_S1123C) Ferritin construct
MFVFLVLLPLVSSQCVNLTTRTQLPPAYTNSFTRGVYYPDKVFRSSVLHSTQDLFLPFFSNVTWFHAIHVSGTNGTKRFDNPVLPFNDGVYFASTEKSNIIRGWIFGTTLDSKTQSLLIVNNATNVVIKVCEFQFCNDPFLGVYYHKNNKSWMESEFRVYSSANNCTFEYVSQPFLMDLEGKQGNFKNLREFVFKNIDGYFKIYSKHTPINLVRDLPQGFSALEPLVDLPIGINITRFQTLLALHRSYLTPGDSSSGWTAGAAAYYVGYLQPRTFLLKYNENGTITDAVDCALDPLSETKCTLKSFTVEKGIYQTSNFRVQPTESIVRFPNITNLCPFGEVFNATRFASVYAWNRKRISNCVADYSVLYNSASFSTFKCYGVSPTKLNDLCFTNVYADSFVIRGDEVRQIAPGQTGKIADYNYKLPDDFTGCVIAWNSNNLDSKVGGNYNYLYRLFRKSNLKPFERDISTEIYQAGSTPCNGVEGFNCYFPLQSYGFQPTNGVGYQPYRVVVLSFELLHAPATVCGPKKSTNLVKNKCVNFNFNGLTGTGVLTESNKKFLPFQQFGRDIADTTDAVRDPQTLEILDITPCSFGGVSVITPGTNTSNQVAVLYQGVNCTEVPVAIHADQLTPTWRVYSTGSNVFQTRAGCLIGAEHVNNSYECDIPIGAGICASYQTQTNSPRRARSVASQSIIAYTMSLGAENSVAYSNNSIAIPTNFTISVTTEILPVSMTKTSVDCTMYICGDSTECSNLLLQYGSFCTQLNRALTGIAVEQDKNTQEVFAQVKQIYKTPPIKDFGGFNFSQILPDPSKPSKRSFIEDLLFNKVTLADAGFIKQYGDCLGDIAARDLICAQKFNGLTVLPPLLTDEMIAQYTSALLAGTITSGWTFGAGAALQIPFAMQMAYRFNGIGVTQCVLYENQKLIANQFNSAIGKIQDSLSSTASALGKLQDVVNQNAQALNTLVKQLSSNFGAISSVLNDILSRLDKVEAEVQIDRLITGRLQSLQTYVTQQLIRAAEIRASANLAATKMSECVLGQSKRVDFCGKGYHLMSFPQSAPHGVVFLHVTYVPAQEKNFTTAPAICHDGKAHFPREGVFVSNGTHWFVTQRNFYEPQIITTDNTFVCGNCDVVIGIVNNTVYDPLQPELDSGGGGSDIIKLLNEQVNKEMQSSNLYMSMSSWCYTHSLDGAGLFLFDHAAEEYEHAKKLIIFLNENNVPVQLTSISAPEHKFEGLTQIFQKAYEHEQHISESINNIVDHAIKSKDHATFNFLQWYVAEQHEEEVLFKDILDKIELIGNENHGLYLADQYVKGIAKSRKS

SEQ ID NO: 13932 - protein, 1315 aa, Artificial Sequence
  SARS-CoV-2/Wuhan/HBCDC-HB-02/2020__EPI_ISL_412978 spike protein (1-1147)(N914C_S1123C) Ferritin construct
MFVFLVLLPLVSSQCVNLTTRTQLPPAYTNSFTRGVYYPDKVFRSSVLHSTQDLFLPFFSNVTWFHAIHVSGTNGTKRFDNPVLPFNDGVYFASTEKSNIIRGWIFGTTLDSKTQSLLIVNNATNVVIKVCEFQFCNDPFLGVYYHKNNKSWMESEFRVYSSANNCTFEYVSQPFLMDLEGKQGNFKNLREFVFKNIDGYFKIYSKHTPINLVRDLPQGFSALEPLVDLPIGINITRFQTLLALHRSYLTPGDSSSGWTAGAAAYYVGYLQPRTFLLKYNENGTITDAVDCALDPLSETKCTLKSFTVEKGIYQTSNFRVQPTESIVRFPNITNLCPFGEVFNATRFASVYAWNRKRISNCVADYSVLYNSASFSTFKCYGVSPTKLNDLCFTNVYADSFVIRGDEVRQIAPGQTGKIADYNYKLPDDFTGCVIAWNSNNLDSKVGGNYNYLYRLFRKSNLKPFERDISTEIYQAGSTPCNGVEGFNCYFPLQSYGFQPTNGVGYQPYRVVVLSFELLHAPATVCGPKKSTNLVKNKCVNFNFNGLTGTGVLTESNKKFLPFQQFGRDIADTTDAVRDPQTLEILDITPCSFGGVSVITPGTNTSNQVAVLYQDVNCTEVPVAIHADQLTPTWRVYSTGSNVFQTRAGCLIGAEHVNNSYECDIPIGAGICASYQTQTNSPRRARSVASQSIIAYTMSLGAENSVAYSNNSIAIPTNFTISVTTEILPVSMTKTSVDCTMYICGDSTECSNFLLQYGSFCTQLNRALTGIAVEQDKNTQEVFAQVKQIYKTPPIKDFGGFNFSQILPDPSKPSKRSFIEDLLFNKVTLADAGFIKQYGDCLGDIAARDLICAQKFNGLTVLPPLLTDEMIAQYTSALLAGTITSGWTFGAGAALQIPFAMQMAYRFNGIGVTQCVLYENQKLIANQFNSAIGKIQDSLSSTASALGKLQDVVNQNAQALNTLVKQLSSNFGAISSVLNDILSRLDKVEAEVQIDRLITGRLQSLQTYVTQQLIRAAEIRASANLAATKMSECVLGQSKRVDFCGKGYHLMSFPQSAPHGVVFLHVTYVPAQEKNFTTAPAICHDGKAHFPREGVFVSNGTHWFVTQRNFYEPQIITTDNTFVCGNCDVVIGIVNNTVYDPLQPELDSGGGGSDIIKLLNEQVNKEMQSSNLYMSMSSWCYTHSLDGAGLFLFDHAAEEYEHAKKLIIFLNENNVPVQLTSISAPEHKFEGLTQIFQKAYEHEQHISESINNIVDHAIKSKDHATFNFLQWYVAEQHEEEVLFKDILDKIELIGNENHGLYLADQYVKGIAKSRKS

SEQ ID NO: 13933 - protein, 1315 aa, Artificial Sequence
  SARS-CoV-2/Australia/QLD02/2020__EPI_ISL_407896 spike protein (1-1147)(N914C_S1123C) Ferritin construct
MFVFLVLLPLVSSQCVNLTTRTQLPPAYTNSFTRGVYYPDKVFRSSVLHSTQDLFLPFFSNVTWFHAIHVSGTNGTKRFDNPVLPFNDGVYFASTEKSNIIRGWIFGTTLDSKTQSLLIVNNATNVVIKVCEFQFCNDPFLGVYYHKNNKSWMESEFRVYSSANNCTFEYVSQPFLMDLEGKQGNFKNLREFVFKNIDGYFKIYSKHTPINLVRDLPQGFSALEPLVDLPIGINITRFQTLLALHRSYLTPGDSSSGWTAGAAAYYVGYLQPRTFLLKYNENGTITDAVDCALDPLSETKCTLKSFTVEKGIYQTSNFRVQPTESIVRFPNITNLCPFGEVFNATRFASVYAWNRKRISNCVADYSVLYNSASFSTFKCYGVSPTKLNDLCFTNVYADSFVIRGDEVRQIAPGQTGKIADYNYKLPDDFTGCVIAWNSNNLDSKVGGNYNYLYRLFRKSNLKPFERDISTEIYQAGSTPCNGVEGFNCYFPLQSYGFQPTNGVGYQPYRVVVLSFELLHAPATVCGPKKSTNLVKNKCVNFNFNGLTGTGVLTESNKKFLPFQQFGRDIADTTDAVRDPQTLEILDITPCSFGGVSVITPGTNTSNQVAVLYQDVNCTEVPVAIHADQLTPTWRVYSTGSNVFQTRAGCLIGAEHVNNSYECDIPIGAGICASYQTQTNSPRRARSVASQSIIAYTMSLGAENSVAYSNNSIAIPTNFTISVTTEILPVSMTKTSVDCTMYICGDSTECSNLLLQYGSFCTQLNRALTGIAVEQDKNTQEVFAQVKQIYKTPPIKDFGGFNFSQILPDPSKPSKRSFIEDLLFNKVTLADAGFIKQYGDCLGDIAARDLICAQKFNGLTVLPPLLTDEMIAQYTSALLAGTITSGWTFGAGAALQIPFAMQMAYRFNGIGVTQCVLYENQKLIANQFNSAIGKIQDSLSSTASALGKLQDVVNQNAQALNTLVKQLSSNFGAISSVLNDILSRLDKVEAEVQIDRLITGRLQSLQTYVTQQLIRAAEIRASANLAATKMSECVLGQSKRVDFCGKGYHLMSFPQSAPHGVVFLHVTYVPAQEKNFTTAPAICHDGKAHFPREGVFVSNGTHWFVTQRNFYEPQIITTDNTFVCGNCDVVIGIVNNTVYDPLQLELDSGGGGSDIIKLLNEQVNKEMQSSNLYMSMSSWCYTHSLDGAGLFLFDHAAEEYEHAKKLIIFLNENNVPVQLTSISAPEHKFEGLTQIFQKAYEHEQHISESINNIVDHAIKSKDHATFNFLQWYVAEQHEEEVLFKDILDKIELIGNENHGLYLADQYVKGIAKSRKS

SEQ ID NO: 13934 - protein, 1315 aa, Artificial Sequence
  SARS-CoV-2/India/1-31/2020__EPI_ISL_413523 spike protein (1-1147)(N914C_S1123C) Ferritin construct
MFVFLVLLPLVSSQCVNLTTRTQLPPAYTNSFTRGVYYPDKVFRSSVLHSTQDLFLPFFSNVTWFHAIHVSGTNGTKRFDNPVLPFNDGVYFASTEKSNIIRGWIFGTTLDSKTQSLLIVNNATNVVIKVCEFQFCNDPFLGVYYHKNNKSWMESEFRVYSSANNCTFEYVSQPFLMDLEGKQGNFKNLREFVFKNIDGYFKIYSKHTPINLVRDLPQGFSALEPLVDLPIGINITRFQTLLALHRSYLTPGDSSSGWTAGAAAYYVGYLQPRTFLLKYNENGTITDAVDCALDPLSETKCTLKSFTVEKGIYQTSNFRVQPTESIVRFPNITNLCPFGEVFNATRFASVYAWNRKRISNCVADYSVLYNSASFSTFKCYGVSPTKLNDLCFTNVYADSFVIRGDEVRQIAPGQTGKIADYNYKLPDDFTGCVIAWNSNNLDSKVGGNYNYLYRLFRKSNLKPFERDISTEIYQAGSTPCNGVEGFNCYFPLQSYGFQPTNGVGYQPYRVVVLSFELLHAPATVCGPKKSTNLVKNKCVNFNFNGLTGTGVLTESNKKFLPFQQFGRDIADTTDAVRDPQTLEILDITPCSFGGVSVITPGTNTSNQVAVLYQDVNCTEVPVAIHADQLTPTWRVYSTGSNVFQTRAGCLIGAEHVNNSYECDIPIGAGICASYQTQTNSPRRARSVASQSIIAYTMSLGAENSVAYSNNSIAIPTNFTISVTTEILPVSMTKTSVDCTMYICGDSTECSNLLLQYGSFCTQLNRALTGIAVEQDKNTQEVFAQVKQIYKTPPIKDFGGFNFSQILPDPSKPSKRSFIEDLLFNKVTLADAGFIKQYGDCLGDIAARDLICAQKFNGLTVLPPLLTDEMIAQYTSALLAGTITSGWTFGAGAALQIPFAMQMAYRFNGIGVTQCVLYENQKLIANQFNSVIGKIQDSLSSTASALGKLQDVVNQNAQALNTLVKQLSSNFGAISSVLNDILSRLDKVEAEVQIDRLITGRLQSLQTYVTQQLIRAAEIRASANLAATKMSECVLGQSKRVDFCGKGYHLMSFPQSAPHGVVFLHVTYVPAQEKNFTTAPAICHDGKAHFPREGVFVSNGTHWFVTQRNFYEPQIITTDNTFVCGNCDVVIGIVNNTVYDPLQPELDSGGGGSDIIKLLNEQVNKEMQSSNLYMSMSSWCYTHSLDGAGLFLFDHAAEEYEHAKKLIIFLNENNVPVQLTSISAPEHKFEGLTQIFQKAYEHEQHISESINNIVDHAIKSKDHATFNFLQWYVAEQHEEEVLFKDILDKIELIGNENHGLYLADQYVKGIAKSRKS

SEQ ID NO: 13935 - protein, 1315 aa, Artificial Sequence
  SARS-CoV-2/Guangdong/GD2020087-P0008/2020__EPI_ISL_413863 spike protein (1-1147)(N914C_S1123C) Ferritin construct
MFVFLVLLPLVSSQCVNLTTRTQLPPAYTNSFTRGVYYPDKVFRSSVLHSTQDLFLPFFSNVTWFHAIHVSGTNGTKRFDNPVLPFNDGVYFASTEKSNIIRGWIFGTTLDSKTQSLLIVNNATNVVIKVCEFQFCNDPFLGVYYHKNNKSWMESEFRVYSSANNCTFEYVSQPFLMDLEGKQGNFKNLREFVFKNIDGYFKIYSKHTPINLVRDLPQGFSALEPLVDLPIGINITRFQTLLALHRSYLTPGDSSSGWTAGAAAYYVGYLQPRTFLLKYNENGTITDAVDCALDPLSETKCTLKSFTVEKGIYQTSNFRVQPTESIVRFPNITNLCPFGEVFNATRFASVYAWNRKRISNCVADYSVLYNSASFSTFKCYGVSPTKLNDLCFTNVYADSFVIRGDEVREIAPGQTGKIADYNYKLPDDFTGCVIAWNSNNLDSKVGGNYNYLYRLFRKSNLKPFERDISTEIYQAGSTPCNGVEGFNCYFPLQSYGFQPTNGVGYQPYRVVVLSFELLHAPATVCGPKKSTNLVKNKCVNFNFNGLTGTGVLTESNKKFLPFQQFGRDIADTTDAVRDPQTLEILDITPCSFGGVSVITPGTNTSNQVAVLYQDVNCTEVPVAIHADQLTPTWRVYSTGSNVFQTRAGCLIGAEHVNNSYECDIPIGAGICASYQTQTNSPRRARSVASQSIIAYTMSLGAENSVAYSNNSIAIPTNFTISVTTEILPVSMTKTSVDCTMYICGDSTECSNLLLQYGSFCTQLNRALTGIAVEQDKNTQEVFAQVKQIYKTPPIKDFGGFNFSQILPDPSKPSKRSFIEDLLFNKVTLADAGFIKQYGDCLGDIAARDLICAQKFNGLTVLPPLLTDEMIAQYTSALLAGTITSGWTFGAGAALQIPFAMQMAYRFNGIGVTQCVLYENQKLIANQFNSAIGKIQDSLSSTASALGKLQDVVNQNAQALNTLVKQLSSNFGAISSVLNDILSRLDKVEAEVQIDRLITGRLQSLQTYVTQQLIRAAEIRASANLAATKMSECVLGQSKRVDFCGKGYHLMSFPQSAPHGVVFLHVTYVPAQEKNFTTAPAICHDGKAHFPREGVFVSNGTHWFVTQRNFYEPQIITTDNTFVCGNCDVVIGIVNNTVYDPLQPELDSGGGGSDIIKLLNEQVNKEMQSSNLYMSMSSWCYTHSLDGAGLFLFDHAAEEYEHAKKLIIFLNENNVPVQLTSISAPEHKFEGLTQIFQKAYEHEQHISESINNIVDHAIKSKDHATFNFLQWYVAEQHEEEVLFKDILDKIELIGNENHGLYLADQYVKGIAKSRKS

SEQ ID NO: 13936 - protein, 1315 aa, Artificial Sequence
  SARS-CoV-2/Sweden/01/2020__EPI_ISL_411951 spike protein (1-1147)(N914C_S1123C) Ferritin construct
MFVFLVLLPLVSSQCVNLTTRTQLPPAYTNSFTRGVYYPDKVFRSSVLHSTQDLFLPFFSNVTWFHAIHVSGTNGTKRFDNPVLPFNDGVYFASTEKSNIIRGWIFGTTLDSKTQSLLIVNNATNVVIKVCEFQFCNDPFLGVYYHKNNKSWMESEFRVYSSANNCTFEYVSQPFLMDLEGKQGNFKNLREFVFKNIDGYFKIYSKHTPINLVRDLPQGFSALEPLVDLPIGINITRFQTLLALHRSYLTPGDSSSGWTAGAAAYYVGYLQPRTFLLKYNENGTITDAVDCALDPLSETKCTLKSFTVEKGIYQTSNFRVQPTESIVRFPNITNLCPFGEVFNATRFASVYAWNRKRISNCVADYSVLYNSASFSTFKCYGVSPTKLNDLCFTNVYADSFVIRGDEVRQIAPGQTGKIADYNYKLPDDFTGCVIAWNSNNLDSKVGGNYNYLYRLFRKSNLKPFERDISTEIYQAGSTPCNGVEGFNCYFPLQSYGFQPTNGVGYQPYRVVVLSFELLHAPATVCGPKKSTNLVKNKCVNFNFNGLTGTGVLTESNKKFLPFQQFGRDIADTTDAVRDPQTLEILDITPCSFGGVSVITPGTNTSNQVAVLYQDVNCTEVPVAIHADQLTPTWRVYSTGSNVFQTRAGCLIGAEHVNNSYECDIPIGAGICASYQTQTNSPRRARSVASQSIIAYTMSLGAENSVAYSNNSIAIPTNFTISVTTEILPVSMTKTSVDCTMYICGDSTECSNLLLQYGSFCTQLNRALTGIAVEQDKNTQEVFAQVKQIYKTPPIKDCGGFNFSQILPDPSKPSKRSFIEDLLFNKVTLADAGFIKQYGDCLGDIAARDLICAQKFNGLTVLPPLLTDEMIAQYTSALLAGTITSGWTFGAGAALQIPFAMQMAYRFNGIGVTQCVLYENQKLIANQFNSAIGKIQDSLSSTASALGKLQDVVNQNAQALNTLVKQLSSNFGAISSVLNDILSRLDKVEAEVQIDRLITGRLQSLQTYVTQQLIRAAEIRASANLAATKMSECVLGQSKRVDFCGKGYHLMSFPQSAPHGVVFLHVTYVPAQEKNFTTAPAICHDGKAHFPREGVFVSNGTHWFVTQRNFYEPQIITTDNTFVCGNCDVVIGIVNNTVYDPLQPELDSGGGGSDIIKLLNEQVNKEMQSSNLYMSMSSWCYTHSLDGAGLFLFDHAAEEYEHAKKLIIFLNENNVPVQLTSISAPEHKFEGLTQIFQKAYEHEQHISESINNIVDHAIKSKDHATFNFLQWYVAEQHEEEVLFKDILDKIELIGNENHGLYLADQYVKGIAKSRKS

SEQ ID NO: 13937 - protein, 1315 aa, Artificial Sequence
  SARS-CoV-2/Tianmen/HBCDC-HB-07/2020__EPI_ISL_412983 spike protein (1-1147)(N914C_S1123C) Ferritin construct
MFVFLVLLPLVSSQCVNLTTRTQLPPAYTNSFTRGVYYPDKVFRSSVLHSTQDLFLPFFSNVTWFHAIHVSGTNGTKRFDNPVLPFNDGVYFASTEKSNIIRGWIFGTTLDSKTQSLLIVNNATNVVIKVCEFQFCNDPFLGVYYHKNNKSWMESEFRVYSSANNCTFEYVSQPFLMDLEGKQGNFKNLREFVFKNIDGYFKIYSKHTPINLVRDLPQGFSALEPLVDLPIGINITRFQTLLALHRSYLTPGDSSSGWTAGAAAYYVGYLQPRTFLLKYNENGTITDAVDCALDPLSETKCTLKSFTVEKGIYQTSNFRVQPTESIVRFPNITNLCPFGEVFNATRFASVYAWNRKRISNCVADYSVLYNSASFSTFKCYGVSPTKLNDLCFTNVYADSFVIRGDEVRQIAPGQTGKIADYNYKLPDDFTGCVIAWNSNNLDSKVGGNYNYLYRLFRKSNLKPFERDISTEIYQAGSTPCNGVEGFNCYFPLQSYGFQPTNGVGYQPYRVVVLSFELLHAPATVCGPKKSTNLVKNKCVNFNFNGLTGTGVLTESNKKFLPFQQFGRDIADTTDAVRDPQTLEILDITPCSFGGVSVITPGTNTSNQVAVLYQDLNCTEVPVAIHADQLTPTWRVYSTGSNVFQTRAGCLIGAEHVNNSYECDIPIGAGICASYQTQTNSPRRARSVASQSIIAYTMSLGAENSVAYSNNSIAIPTNFTISVTTEILPVSMTKTSVDCTMYICGDSTECSNLLLQYGSFCTQLNRALTGIAVEQDKNTQEVFAQVKQIYKTPPIKDFGGFNFSQILPDPSKPSKRSFIEDLLFNKVTLADAGFIKQYGDCLGDIAARDLICAQKFNGLTVLPPLLTDEMIAQYTSALLAGTITSGWTFGAGAALQIPFAMQMAYRFNGIGVTQCVLYENQKLIANQFNSAIGKIQDSLSSTASALGKLQDVVNQNAQALNTLVKQLSSNFGAISSVLNDILSRLDKVEAEVQIDRLITGRLQSLQTYVTQQLIRAAEIRASANLAATKMSECVLGQSKRVDFCGKGYHLMSFPQSAPHGVVFLHVTYVPAQEKNFTTAPAICHDGKAHFPREGVFVSNGTHWFVTQRNFYEPQIITTDNTFVCGNCDVVIGIVNNTVYDPLQPELDSGGGGSDIIKLLNEQVNKEMQSSNLYMSMSSWCYTHSLDGAGLFLFDHAAEEYEHAKKLIIFLNENNVPVQLTSISAPEHKFEGLTQIFQKAYEHEQHISESINNIVDHAIKSKDHATFNFLQWYVAEQHEEEVLFKDILDKIELIGNENHGLYLADQYVKGIAKSRKS

SEQ ID NO: 13938 - protein, 1315 aa, Artificial Sequence
  SARS-CoV-2/Hong Kong/case42_VM20002493/2020__EPI_ISL_414527 spike protein (1-1147)(N914C_S1123C) Ferritin construct
MFVFLVLLPLVSSQCVNLTTRTQLPPAYTNSFTRGVYYPDKVFRSSVLHSTQDLFLPFFSNVTWFHAIHVSGTNGTKRFDNPVLPFNDGVYFASTEKSNIIRGWIFGTTLDSKTQSLLIVNNATNVVIKVCEFQFCNDPFLGVYYHKNNKSWMESEFRVYSSANNCTFEYVSQPFLMDLEGKQGNFKNLREFVFKNIDGYFKIYSKHTPINLVRDLPQGFSALEPLVDLPIGINITRFQTLLALHRSYLTPGDSSSGWTAGAAAYYVGYLQPRTFLLKYNENGTITDAVDCALDPLSETKCTLKSFTVEKGIYQTSNFRVQPTESIVRFPNITNLCPFGEVFNATRFASVYAWNRKRISNCVADYSVLYNSASFSTFKCYGVSPTKLNDLCFTNVYADSFVIRGDEVRQIAPGQTGKIADYNYKLPDDFTGCVIAWNSNNLDSKVGGNYNYLYRLFRKSNLKPFERDISTEIYQAGSTPCNGVEGFNCYFPLQSYGFQPTNGVGYQPYRVVVLSFELLHAPATVCGPKKSTNLVKNKCVNFNFNGLTGTGVLTESNKKFLPFQQFGRDIADTTDAVRDPQTLEILDITPCSFGGVSVITPGTNTSNQVAVLYQDVNCTEVPVAIHADQLTPTWRVYSTGSNVFQTRAGCLIGAEHVNNSYECDIPIGAGICASYQTQTNSPRRARSVASQSIIAYTMSLGAENSVAYSNNSIAIPTNFAISVTTEILPVSMTKTSVDCTMYICGDSTECSNLLLQYGSFCTQLNRALTGIAVEQDKNTQEVFAQVKQIYKTPPIKDFGGFNFSQILPDPSKPSKRSFIEDLLFNKVTLADAGFIKQYGDCLGDIAARDLICAQKFNGLTVLPPLLTDEMIAQYTSALLAGTITSGWTFGAGAALQIPFAMQMAYRFNGIGVTQCVLYENQKLIANQFNSAIGKIQDSLSSTASALGKLQDVVNQNAQALNTLVKQLSSNFGAISSVLNDILSRLDKVEAEVQIDRLITGRLQSLQTYVTQQLIRAAEIRASANLAATKMSECVLGQSKRVDFCGKGYHLMSFPQSAPHGVVFLHVTYVPAQEKNFTTAPAICHDGKAHFPREGVFVSNGTHWFVTQRNFYEPQIITTDNTFVCGNCDVVIGIVNNTVYDPLQPELDSGGGGSDIIKLLNEQVNKEMQSSNLYMSMSSWCYTHSLDGAGLFLFDHAAEEYEHAKKLIIFLNENNVPVQLTSISAPEHKFEGLTQIFQKAYEHEQHISESINNIVDHAIKSKDHATFNFLQWYVAEQHEEEVLFKDILDKIELIGNENHGLYLADQYVKGIAKSRKS

SEQ ID NO: 13939 - protein, 1315 aa, Artificial Sequence
  SARS-CoV-2/USA/CruiseA-23/2020__EPI_ISL_414482 spike protein (1-1147)(N914C_S1123C) Ferritin construct
MFVFLVLLPLVSSQCVNLTTRTQLPPAYTNSFTRGVYYPDKVFRSSVLHSTQDLFLPFFSNVTWFHAIHVSGTNGTKRFDNPVLPFNDGVYFASTEKSNIIRGWIFGTTLDSKTQSLLIVNNATNVVIKVCEFQFCNDPFLGVYYHKNNKSWMESEFRVYSSANNCTFEYVSQPFLMDLEVKQGNFKNLREFVFKNIDGYFKIYSKHTPINLVRDLPQGFSALEPLVDLPIGINITRFQTLLALHRSYLTPGDSSSGWTAGAAAYYVGYLQPRTFLLKYNENGTITDAVDCALDPLSETKCTLKSFTVEKGIYQTSNFRVQPTESIVRFPNITNLCPFGEVFNATRFASVYAWNRKRISNCVADYSVLYNSASFSTFKCYGVSPTKLNDLCFTNVYADSFVIRGDEVRQIAPGQTGKIADYNYKLPDDFTGCVIAWNSNNLDSKVGGNYNYLYRLFRKSNLKPFERDISTEIYQAGSTPCNGVEGFNCYFPLQSYGFQPTNGVGYQPYRVVVLSFELLHAPATVCGPKKSTNLVKNKCVNFNFNGLTGTGVLTESNKKFLPFQQFGRDIADTTDAVRDPQTLEILDITPCSFGGVSVITPGTNTSNQVAVLYQDVNCTEVPVAIHADQLTPTWRVYSTGSNVFQTRAGCLIGAEHVNNSYECDIPIGAGICASYQTQTNSPRRARSVASQSIIAYTMSLGAENSVAYSNNSIAIPTNFTISVTTEILPVSMTKTSVDCTMYICGDSTECSNLLLQYGSFCTQLNRALTGIAVEQDKNTQEVFAQVKQIYKTPPIKDFGGFNFSQILPDPSKPSKRSFIEDLLFNKVTLADAGFIKQYGDCLGDIAARDLICAQKFNGLTVLPPLLTDEMIAQYTSALLAGTITSGWTFGAGAALQIPFAMQMAYRFNGIGVTQCVLYENQKLIANQFNSAIGKIQDSLSSTASALGKLQDVVNQNAQALNTLVKQLSSNFGAISSVLNDILSRLDKVEAEVQIDRLITGRLQSLQTYVTQQLIRAAEIRASANLAATKMSECVLGQSKRVDFCGKGYHLMSFPQSAPHGVVFLHVTYVPAQEKNFTTAPAICHDGKAHFPREGVFVSNGTHWFVTQRNFYEPQIITTDNTFVCGNCDVVIGIVNNTVYDPLQPELDSGGGGSDIIKLLNEQVNKEMQSSNLYMSMSSWCYTHSLDGAGLFLFDHAAEEYEHAKKLIIFLNENNVPVQLTSISAPEHKFEGLTQIFQKAYEHEQHISESINNIVDHAIKSKDHATFNFLQWYVAEQHEEEVLFKDILDKIELIGNENHGLYLADQYVKGIAKSRKS

SEQ ID NO: 13940 - protein, 1315 aa, Artificial Sequence
  SARS-CoV-2/Hong Kong/case85_VM20002868/2020__EPI_ISL_414519 spike protein (1-1147)(N914C_S1123C) Ferritin construct
MFVFLVLVPLVSSQCVNLTTRTQLPPAYTNSFTRGVYYPDKVFRSSVLHSTQDLFLPFFSNVTWFHAIHVSGTNGTKRFDNPVLPFNDGVYFASTEKSNIIRGWIFGTTLDSKTQSLLIVNNATNVVIKVCEFQFCNDPFLGVYYHKNNKSWMESEFRVYSSANNCTFEYVSQPFLMDLEGKQGNFKNLREFVFKNIDGYFKIYSKHTPINLVRDLPQGFSALEPLVDLPIGINITRFQTLLALHRSYLTPGDSSSGWTAGAAAYYVGYLQPRTFLLKYNENGTITDAVDCALDPLSETKCTLKSFTVEKGIYQTSNFRVQPTESIVRFPNITNLCPFGEVFNATRFASVYAWNRKRISNCVADYSVLYNSASFSTFKCYGVSPTKLNDLCFTNVYADSFVIRGDEVRQIAPGQTGKIADYNYKLPDDFTGCVIAWNSNNLDSKVGGNYNYLYRLFRKSNLKPFERDISTEIYQAGSTPCNGVEGFNCYFPLQSYGFQPTNGVGYQPYRVVVLSFELLHAPATVCGPKKSTNLVKNKCVNFNFNGLTGTGVLTESNKKFLPFQQFGRDIADTTDAVRDPQTLEILDITPCSFGGVSVITPGTNTSNQVAVLYQDVNCTEVPVAIHADQLTPTWRVYSTGSNVFQTRAGCLIGAEHVNNSYECDIPIGAGICASYQTQTNSPRRARSVASQSIIAYTMSLGAENSVAYSNNSIAIPTNFTISVTTEILPVSMTKTSVDCTMYICGDSTECSNLLLQYGSFCTQLNRALTGIAVEQDKNTQEVFAQVKQIYKTPPIKDFGGFNFSQILPDPSKPSKRSFIEDLLFNKVTLADAGFIKQYGDCLGDIAARDLICAQKFNGLTVLPPLLTDEMIAQYTSALLAGTITSGWTFGAGAALQIPFAMQMAYRFNGIGVTQCVLYENQKLIANQFNSAIGKIQDSLSSTASALGKLQDVVNQNAQALNTLVKQLSSNFGAISSVLNDILSRLDKVEAEVQIDRLITGRLQSLQTYVTQQLIRAAEIRASANLAATKMSECVLGQSKRVDFCGKGYHLMSFPQSAPHGVVFLHVTYVPAQEKNFTTAPAICHDGKAHFPREGVFVSNGTHWFVTQRNFYEPQIITTDNTFVCGNCDVVIGIVNNTVYDPLQPELDSGGGGSDIIKLLNEQVNKEMQSSNLYMSMSSWCYTHSLDGAGLFLFDHAAEEYEHAKKLIIFLNENNVPVQLTSISAPEHKFEGLTQIFQKAYEHEQHISESINNIVDHAIKSKDHATFNFLQWYVAEQHEEEVLFKDILDKIELIGNENHGLYLADQYVKGIAKSRKS

SEQ ID NO: 13941 - protein, 1315 aa, Artificial Sequence; identical to SEQ ID NO: 13931
  SARS-CoV-2/England/200990660/2020__EPI_ISL_414523 spike protein (1-1147)(N914C_S1123C) Ferritin construct

SEQ ID NO: 13942 - protein, 1315 aa, Artificial Sequence
  SARS-CoV-2/Australia/NSW09/2020__EPI_ISL_413595 spike protein (1-1147)(N914C_S1123C) Ferritin construct
MFVFLVLLPLVSSQCVNLTTRTQLPPAYTNSFTRGVYYPDKVFRSSVLHSTQDLFLPFFSNVTWFHAIHVSGTNGTKRFDNPVLPFNDGVYFASTEKSNIIRGWIFGTTLDSKTQSLLIVNNATNVVIKVCEFQFCNDPFLGVYYHKNNKSWMESEFRVYSSANNCTFEYVSQPFLMDLEGKQGNFKNLREFVFKNIDGYFKIYSKHTPINLVRDLPQGFSALEPLVDLPIGINITRFQTLLALHRSYLTPGDSSSGWTAGAAAYYVGYLQPRTFLLKYNENGTITDAVDCALDPLSETKCTLKSFTVEKGIYQTSNFRVQPTESIVRFPNITNLCPFGEVFNATRFASVYAWNRKRISNCVADYSVLYNSASFSTFKCYGVSPTKLNDLCFTNVYADSFVIRGDEVRQIAPGQTGKIADYNYKLPDDFTGCVIAWNSNNLDSKVGGNYNYLYRLFRKSNLKPFERDISTEIYQAGSTPCNGVEGFNCYFPLQSYGFQPTNGVGYQPYRVVVLSFELLHAPATVCGPKKSTNLVKNKCVNFNFNGLTGTGVLTESNKKFLPFQQFGRDIADTTDAVRDPQTLEILDITPCSFGGVSVITPGTNTSNQVAVLYQDVNCTEVPVAIHADQLTPTWRVYSTGSNVFQTRAGCLIGAEHVNNSYECDIPIGAGICASYQTQTNSPRRARSVASQSIIAYTMSLGAENSVAYSNNSIAIPTNFTISVTTEILPVSMTKTSVDCTMYICGDSTECSNLLLQYGSFCTQLNRALTGIAVEQDKNTQEVFAQVKQIYKTPPIKDFGGFNFSQILPDPSKPSKRSFIEDLLFNKVTLADAGFIKQYGDCLGDIAARDLICAQKFNGLTVLPPLLTDEMIAQYTSALLAGTITSGWTFGAGAALQIPFAMQMAYRFNGIGVTQCVLYENQKLIANQFNSAIGKIQDSLSFTASALGKLQDVVNQNAQALNTLVKQLSSNFGAISSVLNDILSRLDKVEAEVQIDRLITGRLQSLQTYVTQQLIRAAEIRASANLAATKMSECVLGQSKRVDFCGKGYHLMSFPQSAPHGVVFLHVTYVPAQEKNFTTAPAICHDGKAHFPREGVFVSNGTHWFVTQRNFYEPQIITTDNTFVCGNCDVVIGIVNNTVYDPLQPELDSGGGGSDIIKLLNEQVNKEMQSSNLYMSMSSWCYTHSLDGAGLFLFDHAAEEYEHAKKLIIFLNENNVPVQLTSISAPEHKFEGLTQIFQKAYEHEQHISESINNIVDHAIKSKDHATFNFLQWYVAEQHEEEVLFKDILDKIELIGNENHGLYLADQYVKGIAKSRKS

SEQ ID NO: 13943 - protein, 1315 aa, Artificial Sequence; identical to SEQ ID NO: 13923
  SARS-CoV-2/Australia/NSW10/2020__EPI_ISL_413596 spike protein (1-1147)(N914C_S1123C) Ferritin construct

SEQ ID NO: 13944 - protein, 1315 aa, Artificial Sequence
  SARS-CoV-2/Switzerland/1000477797/2020__EPI_ISL_413023 spike protein (1-1147)(N914C_S1123C) Ferritin construct
MFVFLVLLPLVSSQCVNLTTRTQLPPAYTNSFTRGVYYPDKVFRSSVLHSTQDLFLPFFSNVTWFHAIHVSGTNGTKRFDNPVLPFNDGVYFASTEKSNIIRGWIFGTTLDSKTQSLLIVNNATNVVIKVCEFQFCNDPFLGVYYHKNNKSWMESEFRVYSSANNCTFEYVSQPFLMDLEGKQGNFKNLREFVFKNIDGYFNIYSKHTPINLVRDLPQGFSALEPLVDLPIGINITRFQTLLALHRSYLTPGDSSSGWTAGAAAYYVGYLQPRTFLLKYNENGTITDAVDCALDPLSETKCTLKSFTVEKGIYQTSNFRVQPTESIVRFPNITNLCPFGEVFNATRFASVYAWNRKRISNCVADYSVLYNSASFSTFKCYGVSPTKLNDLCFTNVYADSFVIRGDEVRQIAPGQTGKIADYNYKLPDDFTGCVIAWNSNNLDSKVGGNYNYLYRLFRKSNLKPFERDISTEIYQAGSTPCNGVEGFNCYFPLQSYGFQPTNGVGYQPYRVVVLSFELLHAPATVCGPKKSTNLVKNKCVNFNFNGLTGTGVLTESNKKFLPFQQFGRDIADTTDAVRDPQTLEILDITPCSFGGVSVITPGTNTSNQVAVLYQGVNCTEVPVAIHADQLTPTWRVYSTGSNVFQTRAGCLIGAEHVNNSYECDIPIGAGICASYQTQTNSPRRARSVASQSIIAYTMSLGAENSVAYSNNSIAIPTNFTISVTTEILPVSMTKTSVDCTMYICGDSTECSNLLLQYGSFCTQLNRALTGIAVEQDKNTQEVFAQVKQIYKTPPIKDFGGFNFSQILPDPSKPSKRSFIEDLLFNKVTLADAGFIKQYGDCLGDIAARDLICAQKFNGLTVLPPLLTDEMIAQYTSALLAGTITSGWTFGAGAALQIPFAMQMAYRFNGIGVTQCVLYENQKLIANQFNSAIGKIQDSLSSTASALGKLQDVVNQNAQALNTLVKQLSSNFGAISSVLNDILSRLDKVEAEVQIDRLITGRLQSLQTYVTQQLIRAAEIRASANLAATKMSECVLGQSKRVDFCGKGYHLMSFPQSAPHGVVFLHVTYVPAQEKNFTTAPAICHDGKAHFPREGVFVSNGTHWFVTQRNFYEPQIITTDNTFVCGNCDVVIGIVNNTVYDPLQPELDSGGGGSDIIKLLNEQVNKEMQSSNLYMSMSSWCYTHSLDGAGLFLFDHAAEEYEHAKKLIIFLNENNVPVQLTSISAPEHKFEGLTQIFQKAYEHEQHISESINNIVDHAIKSKDHATFNFLQWYVAEQHEEEVLFKDILDKIELIGNENHGLYLADQYVKGIAKSRKS

SEQ ID NO: 13945 - protein, 1315 aa, Artificial Sequence
  SARS-CoV-2/Belgium/BA-02291/2020__EPI_ISL_415159 spike protein (1-1147)(N914C_S1123C) Ferritin construct
MFVFLVLLPLVSSQCVNLTTRTQLPPAYTNSFTRGVYYPDKVFRSSVLHSTQDLFLPFFSNVTWFHAIHVSGTNGTKRFDNPVLPFNDGVYFASTEKSNIIRGWIFGTTLDSKTQSLLIVNNATNVVIKVCEFQFCNDPFLGVYYHKNNKSWMESEFRVYSSANNCTFEYVSQPFLMDLEGKQGNFKNLREFVFKNIDGYFKIYSKHTPINLVRDLPQGFSALEPLVDLPIGINITRFQTLLALHRSYLTPGDSSSGWTAGAAAYYVGYLQPRTFLLKYNENGTITDAVDCALDPLSETKCTLKSFTVEKGIYQTSNFRVQPTESIVRFPNITNLCPFGEVFNATRFASVYAWNRKRISNCVADYSVLYNSASFSTFKCYGVSPTKLNDLCFTNVYADSFVIRGDEVRQIAPGQTGKIADYNYKLPDDFTGCVIAWNSNNLDSKVGGNYNYLYRLFRRSNLKPFERDISTEIYQAGSTPCNGVEGFNCYFPLQSYGFQPTNGVGYQPYRVVVLSFELLPAPATVCGPKKSTNLVKNKCVNFNFNGLTGTGVLTESNKKFLPFQQFGRDIADTTDAVRDPQTLEILDITPCSFGGVSVITPGTNTSNQVAVLYQGVNCTEVPVAIHADQLTPTWRVYSTGSNVFQTRAGCLIGAEHVNNSYECDIPIGAGICASYQTQTNSPRRARSVASQSIIAYTMSLGAENSVAYSNNSIAIPTNFTISVTTEILPVSMTKTSVDCTMYICGDSTECSNLLLQYGSFCTQLNRALTGIAVEQDKNTQEVFAQVKQIYKTPPIKDFGGFNFSQILPDPSKPSKRSFIEDLLFNKVTLADAGFIKQYGDCLGDIAARDLICAQKFNGLTVLPPLLTDEMIAQYTSALLAGTITSGWTFGAGAALQIPFAMQMAYRFNGIGVTQCVLYENQKLIANQFNSAIGKIQDSLSSAAPALGKLQDVVNQNAQALNTLVKQLSSNFGAISSVLNDILSRLDKVEAEVQIDRLITGRLQSLQTYVTQQLIRAAEIRASANLAATKMSECVLGQSKRVDFCGKGYHLMSFPQSAPHGVVFLHVTYVPAQEKNFTTAPAICHDGKAHFPREGVFVSNGTHWFVTQRNFYEPQIITTDNTFVCGNCDVVIGIVNNTVYDPLQPELDSGGGGSDIIKLLNEQVNKEMQSSNLYMSMSSWCYTHSLDGAGLFLFDHAAEEYEHAKKLIIFLNENNVPVQLTSISAPEHKFEGLTQIFQKAYEHEQHISESINNIVDHAIKSKDHATFNFLQWYVAEQHEEEVLFKDILDKIELIGNENHGLYLADQYVKGIAKSRKS

SEQ ID NO: 13946 - protein, 1315 aa, Artificial Sequence
  SARS-CoV-2/USA/WA8-UW5/2020__EPI_ISL_413486 spike protein (1-1147)(N914C_S1123C) Ferritin construct
MFVFLVLLPLVSSQCVNLTTRTQLPPAYTNSFTRGVYYPDKVFRSSVLHSTQDLFLPFFSNVTWFHAIHVSGTNGTKRFDNPVLPFNDGVYFASTEKSNIIRGWIFGTTLDSKTQSLLIVNNATNVVIKVCEFQFCNDPFLGVYYHKNNKSWMESEFRVYSSANNCTFEYVSQPFLMDLEGKQGNFKNLREFVFKNIDGYFKIYSKHTPINLVRDLPQGFSALEPLVDLPIGINITRFQTLLALHRSYLTPGDSSSGWTAGAAAYYVGYLQPRTFLLKYNENGTITDAVDCALDPLSETKCTLKSFTVEKGIYQTSNFRVQPTESIVRFPNITNLCPFGEVFNATRFASVYAWNRKRISNCVADYSVLYNSASFSTFKCYGVSPTKLNDLCFTNVYADSFVIRGDEVRQIAPGQTGKIADYNYKLPDDFTGCVIAWNSNNLDSKVGGNYNYLYRLFRKSNLKPFERDISTEIYQAGSTPCNGVEGFNCYFPLQSYGFQPTNGVGYQPYRVVVLSFELLHAPATVCGPKKSTNLVKNKCVNFNFNGLTGTGVLTESNKKFLPFQQFGRDIADTTDAVRDPQTLEILDITPCSFGGVSVITPGTNTSNQVAVLYQDVNCTEVPVAIHADQLTPTWRVYSTGSNVFQTRAGCLIGAEYVNNSYECDIPIGAGICASYQTQTNSPRRARSVASQSIIAYTMSLGAENSVAYSNNSIAIPTNFTISVTTEILPVSMTKTSVDCTMYICGDSTECSNLLLQYGSFCTQLNRALTGIAVEQDKNTQEVFAQVKQIYKTPPIKDFGGFNFSQILPDPSKPSKRSFIEDLLFNKVTLADAGFIKQYGDCLGDIAARDLICAQKFNGLTVLPPLLTDEMIAQYTSALLAGTITSGWTFGAGAALQIPFAMQMAYRFNGIGVTQCVLYENQKLIANQFNSAIGKIQDSLSSTASALGKLQDVVNQNAQALNTLVKQLSSNFGAISSVLNDILSRLDKVEAEVQIDRLITGRLQSLQTYVTQQLIRAAEIRASANLAATKMSECVLGQSKRVDFCGKGYHLMSFPQSAPHGVVFLHVTYVPAQEKNFTTAPAICHDGKAHFPREGVFVSNGTHWFVTQRNFYEPQIITTDNTFVCGNCDVVIGIVNNTVYDPLQPELDSGGGGSDIIKLLNEQVNKEMQSSNLYMSMSSWCYTHSLDGAGLFLFDHAAEEYEHAKKLIIFLNENNVPVQLTSISAPEHKFEGLTQIFQKAYEHEQHISESINNIVDHAIKSKDHATFNFLQWYVAEQHEEEVLFKDILDKIELIGNENHGLYLADQYVKGIAKSRKS

SEQ ID NO: 13947 - protein, 1315 aa, Artificial Sequence
  SARS-CoV-2/England/20102000506/2020__EPI_ISL_415147 spike protein (1-1147)(N914C_S1123C) Ferritin construct
MFVFLVLLPLVSSQCVNLTTRTQLPPAYTNSFTRGVYYPDKVFRSSVLHSTQDLFLPFFSNVTWFHAIHVSGTNGTKRFDNPVLPFNDGVYFASTEKSNIIRGWIFGTTLDSKTQSLLIVNNATNVVIKVCEFQFCNDPFLGVYYHKNNKSWMESEFRVYSSANNCTFEYVSQPFLMDLEGKQGNFKNLREFVFKNIDGYFKIYSKHTPINLVRDLPQGFSALEPLVDLPIGINITRFQTLLALHRSYLTPGDSSSGWTAGAAAYYVGYLQPRTFLLKYNENGTITDAVDCALDPLSETKCTLKSFTVEKGIYQTSNFRVQPTESIVRFPNITNLCPFGEVFNATRFASVYAWNRKRISNCVADYSVLYNSASFSTFKCYGVSPTKLNDLCFTNVYADSFVIRGDEVRQIAPGQTGKIADYNYKLPDDFTGCVIAWNSNNLDSKVGGNYNYLYRLFRKSNLKPFERDISTEIYQAGSTPCNGVEGFNCYFPLQSYGFQPTNGVGYQPYRVVVLSFELLHAPATVCGPKKSTNLVKNKCVNFNFNGLTGTGVLTESNKKFLPFQQFGRDIADTTDAVRDPQTLEILDITPCSFGGVSVITPGTNTSNQVAVLYQGVNCTEVPVAIHADQLTPTWRVYSTGSNVFQTRAGCLIGAEHVNNSYECDIPIGAGICASYQTQTNSPRRARSVASQSIIAYTMSLGAENSVAYSNNSIAIPTNFTISVTTEILPVSMTKTSVDCTMYICGDSTECSNLLLQYGSFCTQLNRALTGIAVEQDKNTQEVFAQVKQIYKTPPIKDFGGFNFSQILPDPSKPSKRSFIEDLLFNKVTLADAGFIKQYGYCLGDIAARDLICAQKFNGLTVLPPLLTDEMIAQYTSALLAGTITSGWTFGAGAALQIPFAMQMAYRFNGIGVTQCVLYENQKLIANQFNSAIGKIQDSLSSTASALGKLQDVVNQNAQALNTLVKQLSSNFGAISSVLNDILSRLDKVEAEVQIDRLITGRLQSLQTYVTQQLIRAAEIRASANLAATKMSECVLGQSKRVDFCGKGYHLMSFPQSAPHGVVFLHVTYVPAQEKNFTTAPAICHDGKAHFPREGVFVSNGTHWFVTQRNFYEPQIITTDNTFVCGNCDVVIGIVNNTVYDPLQPELDSGGGGSDIIKLLNEQVNKEMQSSNLYMSMSSWCYTHSLDGAGLFLFDHAAEEYEHAKKLIIFLNENNVPVQLTSISAPEHKFEGLTQIFQKAYEHEQHISESINNIVDHAIKSKDHATFNFLQWYVAEQHEEEVLFKDILDKIELIGNENHGLYLADQYVKGIAKSRKS

SEQ ID NO: 13948 - protein, 1315 aa, Artificial Sequence
  SARS-CoV-2/Belgium/VAG-03013/2020__EPI_ISL_415155 spike protein (1-1147)(N914C_S1123C) Ferritin construct
MFVFLVLLPLVSSQCVNLTTRTQLPPAYTNSFTRGVYYPDKVFRSSVLHSTQDLFLPFFSNVTWFHAIHVSGTNGTKRFDNPVLPFNDGVYFASTEKSNIIRGWIFGTTLDSKTQSLLIVNNATNVVIKVCEFQFCNDPFLGVYYHKNNKSWMESEFRVYSSANNCTFEYVSQPFLMDLEGKQGNFKNLREFVFKNIDGYFKIYSKHTPINLVRDLPQGFSALEPLVDLPIGINITRFQTLLALHRSYLTPGDSSSGWTAGAAAYYVGYLQPRTFLLKYNENGTITDAVDCALDPLSETKCTLKSFTVEKGIYQTSNFRVQPTESIVRFPNITNLCPFGEVFNATRFASVYAWNRKRISNCVADYSVLYNSASFSTFKCYGVSPTKLNDLCFTNVYADSFVIRGDEVRQIAPGQTGKIADYNYKLPDDFTGCVIAWNSNNLDSKVGGNYNYLYRLFRKSNLKPFERDISTEIYQAGSTPCNGVEGFNCYFPLQSYGFQPTNGVGYQPYRVVVLSFELLHAPATVCGPKKSTNLVKNKCVNFNFNGLTGTGVLTESNKKFLPFQQFGRDIADTTDAVRDPQTLEILDITPCSFGGVSVITPGTNTSNQVAVLYQGVNCTEVPVAIHADQLTPTWRVYSTGSNVFQTRAGCLIGAEHVNNSYECDIPIGAGICASYQTQTNSPRRARSVASQSIIAYTMSLGAENSVAYSNNSIAIPTNFTISVTTEILPVSMTKTSVDCTMYICGDSTECSNLLLQYGSFCTQLNRALTGIAVEQDKNTQEVFAQVKQIYKTPPIKDFGGFNFSQILPDPSKPSKRSFIEDLLFNKVTLADAGFIKQYGDCLGDIAARDLICAQKFNGLTVLPPLLTDEMIAQYTSALLAGTITSGWTFGAGAALQIPFAMQMAYRFNGIGVTQCVLYENQKLIANQFNSAIGKIQDSLSSTATALGKLQDVVNQNAQALNTLVKQLSSNFGAISSVLNDILSRLDKVEAEVQIDRLITGRLQSLQTYVTQQLIRAAEIRASANLAATKMSECVLGQSKRVDFCGKGYHLMSFPQSAPHGVVFLHVTYVPAQEKNFTTAPAICHDGKAHFPREGVFVSNGTHWFVTQRNFYEPQIITTDNTFVCGNCDVVIGIVNNTVYDPLQPELDSGGGGSDIIKLLNEQVNKEMQSSNLYMSMSSWCYTHSLDGAGLFLFDHAAEEYEHAKKLIIFLNENNVPVQLTSISAPEHKFEGLTQIFQKAYEHEQHISESINNIVDHAIKSKDHATFNFLQWYVAEQHEEEVLFKDILDKIELIGNENHGLYLADQYVKGIAKSRKS

SEQ ID NO: 13949 - protein, 1315 aa, Artificial Sequence
  SARS-CoV-2/Belgium/BC-03016/2020__EPI_ISL_415157 spike protein (1-1147)(N914C_S1123C) Ferritin construct
MFVFLVLLPLVSSQCVNLTTRTQLPPAYTNSFTRGVYYPDKVFRSSVLHSTQDLFLPFFSNVTWFHAIHVSGTNGTKRFDNPVLPFNDGVYFASTEKSNIIRGWIFGTTLDSKTQSLLIVNNATNVVIKVCEFQFCNDPFLGVYYHKNNKSWMESEFRVYSSANNCTFEYVSQPFLMDLEGKQGNFKNLREFVFKNIDGYFKIYSKHTPINLVRDLPQGFSALEPLVDLPIGINITRFQTLLALHRSYLTPGDSSSGWTAGAAAYYVGYLQPRTFLLKYNENGTITDAVDCALDPLSETKCTLKSFTVEKGIYQTSNFRVQPTESIVRFPNITNLCPFGEVFNATRFASVYAWNRKRISNCVADYSVLYNSASFSTFKCYGVSPTKLNDLCFTNVYADSFVIRGDEVRQIAPGQTGKIADYNYKLPDDFTGCVIAWNSNNLDSKVGGNYNYLYRLFRKSNLKPFERDISTEIYQAGSTPCNGVEGFNCYFPLQSYGFQPTNGVGYQPYRVVVLSFELLHAPATVCGPKKSTNLVKNKCVNFNFNGLTGTGVLTESNKKFLPFQQFGRDIADTTDAVRDPQTLEILDITPCSFGGVSVITPGTNTSNQVAVLYQGVNCTEVPVAIHADQLTPTWRVYSTGSNVFQTRAGCLIGAEHVNNSYECDIPIGAGICASYQTQTNSPRRARSVASQSIIAYTMSLGAENSVAYSNNSIAIPTNFTISVTTEILPVSMTKTSVDCTMYICGDSTECSNLLLQYGSFCTQLNRALTGIAVEQDKNTQEVFAQVKQIYKTPPIKDFGGFNFSQILPDPSKPSKRSFIEDLLFNKVTLADAGFIKQYGDCLGDIAARDLICAQKFNGLTVLPPLLTDEMIAQYTSALLAGTITSGWTFGAGAALQIPFAMQMAYRFNGIGVTQCVLYENQKLIANQFNSAIGKIQDSLSSTAPALGKLQDVVNQNAQALNTLVKQLSSNFGAISSVLNDILSRLDKVEAEVQIDRLITGRLQSLQTYVTQQLIRAAEIRASANLAATKMSECVLGQSKRVDFCGKGYHLMSFPQSAPHGVVFLHVTYVPAQEKNFTTAPAICHDGKAHFPREGVFVSNGTHWFVTQRNFYEPQIITTDNTFVCGNCDVVIGIVNNTVYDPLQPELDSGGGGSDIIKLLNEQVNKEMQSSNLYMSMSSWCYTHSLDGAGLFLFDHAAEEYEHAKKLIIFLNENNVPVQLTSISAPEHKFEGLTQIFQKAYEHEQHISESINNIVDHAIKSKDHATFNFLQWYVAEQHEEEVLFKDILDKIELIGNENHGLYLADQYVKGIAKSRKS

SEQ ID NO: 13950 - protein, 1315 aa, Artificial Sequence
  SARS-CoV-2/Germany/BavPat3/2020__EPI_ISL_414521 spike protein (1-1147)(N914C_S1123C) Ferritin construct
MFVFLVLLPLVSSQCVNLTTRTQLPPAYTNSFTRGVYYPDKVFRSSVLHSTQDLFLPFFSNVTWFHAIHVSGTNGTKRFDNPVLPFNDGVYFASTEKSNIIRGWIFGTTLDSKTQSLLIVNNATNVVIKVCEFQFCNDPFLGVYYHKNNKSWMESEFRVYSSANNCTFEYVSQPFLMDLEGKQGNFKNLREFVFKNIDGYFKIYSKHTPINLVRDLPQGFSALEPLVDLPIGINITRFQTLLALHRSYLTPGDSSSGWTAGAAAYYVGYLQPRTFLLKYNENGTITDAVDCALDPLSETKCTLKSFTVEKGIYQTSNFRVQPTESIVRFPNITNLCPFGEVFNATRFASVYAWNRKRISNCVADYSVLYNSASFSTFKCYGVSPTKLNDLCFTNVYADSFVIRGDEVRQIAPGQTGKIADYNYKLPDDFTGCVIAWNSNNLDSKVGGNYNYLYRLFRKSNLKPFERDISTEIYQAGSTPCNGVEGFNCYFPLQSYGFQPTNGVGYQPYRVVVLSFELLHAPATVCGPKKSTNLVKNKCVNFNFNGLTGTGVLTESNKKFLPFQQFGRDIADTTDAVRDPQTLEILDITPCSFGGVSVITPGTNTSNQVAVLYQDVNCTEVPVAIHADQLTPTWRVYSTGSNVFQTRAGCLIGAEHVNNSYECDIPIGAGICASYQTQTNSPRRARSVASQSIIAYTMSLGAENSVAYSNNSIAIPTNFTISVTTEILPVSMTKTSVDCTMYICGDSTECSNLLLQYGSFCTQLNRALTGIAVEQDKNTQQVFAQVKQIYKTPPIKDFGGFNFSQILPDPSKPSKRSFIEDLLFNKVTLADAGFIKQYGDCLGDIAARDLICAQKFNGLTVLPPLLTDEMIAQYTSALLAGTITSGWTFGAGAALQIPFAMQMAYRFNGIGVTQCVLYENQKLIANQFNSAIGKIQDSLSSTASALGKLQDVVNQNAQALNTLVKQLSSNFGAISSVLNDILSRLDKVEAEVQIDRLITGRLQSLQTYVTQQLIRAAEIRASANLAATKMSECVLGQSKRVDFCGKGYHLMSFPQSAPHGVVFLHVTYVPAQEKNFTTAPAICHDGKAHFPREGVFVSNGTHWFVTQRNFYEPQIITTDNTFVCGNCDVVIGIVNNTVYDPLQPELDSGGGGSDIIKLLNEQVNKEMQSSNLYMSMSSWCYTHSLDGAGLFLFDHAAEEYEHAKKLIIFLNENNVPVQLTSISAPEHKFEGLTQIFQKAYEHEQHISESINNIVDHAIKSKDHATFNFLQWYVAEQHEEEVLFKDILDKIELIGNENHGLYLADQYVKGIAKSRKS

SEQ ID NO: 13951 - protein, 1315 aa, Artificial Sequence
  SARS-CoV-2/France/HF1805/2020__EPI_ISL_414628 spike protein (1-1147)(N914C_S1123C) Ferritin construct
MFVFLVLLPLVSSQCVNLTTRTQLPPAYTNSFTRGVYYPDKVFRSSVLHSTQDLFLPFFSNVTWFHAIHVSGTNGTKRFDNPVLPFNDGVYFASTEKSNIIRGWIFGTTLDSKTQSLLIVNNATNVVIKVCEFQFCNDPFLGVYYHKNNKSWMESEFRVYSSANNCTFEYVSQPFLMDLEGKQGNFKNLREFVFKNIDGYFKIYSKHTPINLVRDLPQGFSALEPLVDLPIGINITRFQTLLALHRSYLTPGDSSSGWTAGAAAYYVGYLQPRTFLLKYNENGTITDAVDCALDPLSETKCTLKSFTVEKGIYQTSNFRVQPTESIVRFPNITNLCPFGEVFNATRFASVYAWNRKRISNCVADYSVLYNSASFSTFKCYGVSPTKLNDLCFTNVYADSFVIRGDEVRQIAPGQTGKIADYNYKLPDDFTGCVIAWNSNNLDSKVGGNYNYLYRLFRKSNLKPFERDISTEIYQAGSTPCNGVEGFNCYFPLQSYGFQPTNGVGYQPYRVVVLSFELLHAPATVCGPKKSTNLVKNKCVNFNFNGLTGTGVLTESNKKFLPFQQFGRDIADTTDAVRDPQTLEILDITPCSFGGVSVITPGTNTSNQVAVLYQGVNCTEVPVAIHADQLTPTWRVYSTGSNVFQTRAGCLIGAEHVNNSYECDIPIGAGICASYQTQTNSPRRARSVASQSIIAYTMSLGAENSVAYSNNSIAIPTNFTISVTTEILPVSMTKTSVDCTMYICGDSTECSNLLLQYGSFCTQLNRALTGIAVEQDKNTQEVFAQVKQIYKTPPIKDFGGFNFSQILPDPSKPSKRSFIEDLLFNKVTLADAGFIKQYGDCLGDIAARDLICAQKFNGLTVLPPLLTDEMIAQYTSALLAGTITSGWTFGAGAALQIPFAMQMAYRFNGIGVTQCVLYENQKLIANQFNSAIGKIQDSLSSTASALGKLQDVVNQNAQALNTLVKQLSSNFGAISSVLNDILSRLDKVEAEVQIDRLITGRLQSLQTYVTQQLIRAAEIRASANLAATKMSECVLGQSKRVDFCGKGYHLMSFPQSAPHGVVFLHVTYVPAQEKNFTTAPAICHDGKAHFPREGVFVSNGTHWFVTQRNFYEPQIITTDNTFVCGNCDVVIGVVNNTVYDPLQPELDSGGGGSDIIKLLNEQVNKEMQSSNLYMSMSSWCYTHSLDGAGLFLFDHAAEEYEHAKKLIIFLNENNVPVQLTSISAPEHKFEGLTQIFQKAYEHEQHISESINNIVDHAIKSKDHATFNFLQWYVAEQHEEEVLFKDILDKIELIGNENHGLYLADQYVKGIAKSRKS

SEQ ID NO: 13952 - protein, 1315 aa, Artificial Sequence
  SARS-CoV-2/Netherlands/ZuidHolland_9/2020__EPI_ISL_414445 spike protein (1-1147)(N914C_S1123C) Ferritin construct
MFVFLVLLPLVSSQCVNLTTRTQLPPAYTNSFTRGVYYPDKVFRSSVLHSTQDLFLPFFSNVTWFHAIHVSGTNGTKRFDNPVLPFNDGVYFASTEKSNIIRGWIFGTTLDSKTQSLLIVNNATNVVIKVCEFQFCNDPFLGVYYHKNNKSWMESEFRVYSSANNCTFEYVSQPFLMDLEGKQGNFKNLREFVFKNIDGYFKIYSKHTPINLVRDLPQGFSALEPLVDLPIGINITRFQTLLALHRSYLTPGDSSSGWTAGAAAYYVGYLQPRTFLLKYNENGTITDAVDCALDPLSETKCTLKSFTVEKGIYQTSNFRVQPTESIVRFPNITNLCPFGEVFNATRFASVYAWNRKRISNCVADYSVLYNSASFSTFKCYGVSPTKLNDLCFTNVYADSFVIRGDEVRQIAPGQTGKIADYNYKLPDDFTGCVIAWNSNNLDSKVGGNYNYLYRLFRKSNLKPFERDISTEIYQAGSTPCNGVEGFNCYFPLQSYGFQPTNGVGYQPYRVVVLSFELLHAPATVCGPKKSTNLVKNKCVNFNFNGLTGTGVLTESNKKFLPFQQFGRDIADTTDAVRDPQTLEILDITPCSFGGVSVITPGTNTSNQVAVLYQGVNCTEVPVAIHADQLTPTWRVYSTGSNVFQTRAGCLIGAEHVNNSYECDIPIGAGICASYQTQTNSPRRARSVASQSIIAYTMSLGAENSVAYSNNSIAIPTNFTISVTTEILPVSMTKTSVDCTMYICGDSTECSNLLLQYGSFCTQLNRALTGIAVEQDKNTQEVFAQVKQIYKTPPIKDFGGFNFSQILPDPSKPSKRSFIEDLLFNKVTLADAGFIKQYGDCLGDIAARDLICVQKFNGLTVLPPLLTDEMIAQYTSALLAGTITSGWTFGAGAALQIPFAMQMAYRFNGIGVTQCVLYENQKLIANQFNSAIGKIQDSLSSTASALGKLQDVVNQNAQALNTLVKQLSSNFGAISSVLNDILSRLDKVEAEVQIDRLITGRLQSLQTYVTQQLIRAAEIRASANLAATKMSECVLGQSKRVDFCGKGYHLMSFPQSAPHGVVFLHVTYVPAQEKNFTTAPAICHDGKAHFPREGVFVSNGTHWFVTQRNFYEPQIITTDNTFVCGNCDVVIGIVNNTVYDPLQPELDSGGGGSDIIKLLNEQVNKEMQSSNLYMSMSSWCYTHSLDGAGLFLFDHAAEEYEHAKKLIIFLNENNVPVQLTSISAPEHKFEGLTQIFQKAYEHEQHISESINNIVDHAIKSKDHATFNFLQWYVAEQHEEEVLFKDILDKIELIGNENHGLYLADQYVKGIAKSRKS

SEQ ID NO: 13953 - protein, 1315 aa, Artificial Sequence
  SARS-CoV-2/Finland/FIN03032020A/2020__EPI_ISL_413602 spike protein (1-1147)(N914C_S1123C) Ferritin construct
MFVFLVLLPLVSSQCVNLTTRTQLPPAYTNSFTRGVYYPDKVFRSSVLHSTQDLFLPFFSNVTWFHAIHVSGTNGTKRFDNPVLPFNDGVYFASTEKSNIIRGWIFGTTLDSKTQSLLIVNNATNVVIKVCEFQFCNDPFLGVYYHKNNKSWMESEFRVYSSANNCTFEYVSQPFLMDLEGKQGNFKNLREFVFKNIDGYFKIYSKHTPINLVRDLPQGFSALEPLVDLPIGINITRFQTLLALHRSYLTPGDSSSGWTAGAAAYYVGYLQPRTFLLKYNENGTITDAVDCALDPLSETKCTLKSFTVEKGIYQTSNFRVQPTESIVRFPNITNLCPFGEVFNATRFASVYAWNRKRISNCVADYSVLYNSASFSTFKCYGVSPTKLNDLCFTNVYADSFVIRGDEVRQIAPGQTGKIADYNYKLPDDFTGCVISWNSNNLDSKVGGNYNYLYRLFRKSNLKPFERDISTEIYQAGSTPCNGVEGFNCYFPLQSYGFQPTNGVGYQPYRVVVLSFELLHAPATVCGPKKSTNLVKNKCVNFNFNGLTGTGVLTESNKKFLPFQQFGRDIADTTDAVRDPQTLEILDITPCSFGGVSVITPGTNTSNQVAVLYQGVNCTEVPVAIHADQLTPTWRVYSTGSNVFQTRAGCLIGAEHVNNSYECDIPIGAGICASYQTQTNSPRRARSVASQSIIAYTMSLGAENSVAYSNNSIAIPTNFTISVTTEILPVSMTKTSVDCTMYICGDSTECSNLLLQYGSFCTQLNRALTGIAVEQDKNTQEVFAQVKQIYKTPPIKDFGGFNFSQILPDPSKPSKRSFIEDLLFNKVTLADAGFIKQYGDCLGDIAARDLICAQKFNGLTVLPPLLTDEMIAQYTSALLAGTITSGWTFGAGAALQIPFAMQMAYRFNGIGVTQCVLYENQKLIANQFNSAIGKIQDSLSSTASALGKLQDVVNQNAQALNTLVKQLSSNFGAISSVLNDILSRLDKVEAEVQIDRLITGRLQSLQTYVTQQLIRAAEIRASANLAATKMSECVLGQSKRVDFCGKGYHLMSFPQSAPHGVVFLHVTYVPAQEKNFTTAPAICHDGKAHFPREGVFVSNGTHWFVTQRNFYEPQIITTDNTFVCGNCDVVIGIVNNTVYDPLQPELDSGGGGSDIIKLLNEQVNKEMQSSNLYMSMSSWCYTHSLDGAGLFLFDHAAEEYEHAKKLIIFLNENNVPVQLTSISAPEHKFEGLTQIFQKAYEHEQHISESINNIVDHAIKSKDHATFNFLQWYVAEQHEEEVLFKDILDKIELIGNENHGLYLADQYVKGIAKSRKS

SEQ ID NO: 13954 - protein, 1315 aa, Artificial Sequence
  SARS-CoV-2/France/GE1977/2020__EPI_ISL_414632 spike protein (1-1147)(N914C_S1123C) Ferritin construct
MFVFLVLLPLVSSQCVNLTTRTQLPPAYTNSFTRGVYYPDKVFRSSVLHSTQDLFLPFFSNVTWFHAIHVSGTNGTKRFDNPVLPFNDGVYFASTEKSNIIRGWIFGTTLDSKTQSLLIVNNATNVVIKVCEFQFCNDPFLGVYYHKNNKSWMESEFRVYSSANNCTFEYVSQPFLMDLEGKQGNFKNLREFVFKNIDGYFKIYSKHTPINLVRDLPQGFSALEPLVDLPIGINITRFQTLLALHRSYLTPGDSSSGWTAGAAAYYVGYLQPRTFLLKYNENGTITDAVDCALDPLSETKCTLKSFTVEKGIYQTSNFRVQPTESIVRFPNITNLCPFGEVFNATRFASVYAWNRKRISNCVADYSVLYNSASFSTFKCYGVSPTKLNDLCFTNVYADSFVIRGDEVRQIAPGQTGKIADYNYKLPDDFTGCVIAWNSNNLDSKVGGNYNYLYRLFRKSNLKPFERDISTEIYQAGSTPCNGVEGFNCYFPLQSYGFQPTNGVGYQPYRVVVLSFELLHAPATVCGPKKSTNLVKNKCVNFNFNGLTGTGVLTESNKKFLPFQQFGRDIADTTDAVRDPQTLEILDITPCSFGGVSVITPGTNTSNQVAVLYQGVNCTEVPVAIHADQLTPTWRVYSTGSNVFQTRAGCLIGAEHVNNSYECDIPIGAGICASYQTQTNSPRRARSVASQSIIAYTMSLGAENSVAYSNNSIAIPTNFTISVTTEILPVSMTKTSVDCTMYICGDSTECSNLLLQYGSFCTQLNRALTGIAVEQDKNTQEVFAQVKQIYKTPPIKDFGGFNFSQILPDPSKPSKRSFIEDLLFNKVTLADAGFIKQYGDCLGDIAARDLICAQKFNGLTVLPPLLTDEMIAQYTSALLAGTITSGWTFGAGAALQIPFAMQMAYRFNGIGVTQCVLYENQKLIANQFNSAIGKIQDSLFSTASALGKLQDVVNQNAQALNTLVKQLSSNFGAISSVLNDILSRLDKVEAEVQIDRLITGRLQSLQTYVTQQLIRAAEIRASANLAATKMSECVLGQSKRVDFCGKGYHLMSFPQSAPHGVVFLHVTYVPAQEKNFTTAPAICHDGKAHFPREGVFVSNGTHWFVTQRNFYEPQIITTDNTFVCGNCDVVIGIVNNTVYDPLQPELDSGGGGSDIIKLLNEQVNKEMQSSNLYMSMSSWCYTHSLDGAGLFLFDHAAEEYEHAKKLIIFLNENNVPVQLTSISAPEHKFEGLTQIFQKAYEHEQHISESINNIVDHAIKSKDHATFNFLQWYVAEQHEEEVLFKDILDKIELIGNENHGLYLADQYVKGIAKSRKS

SEQ ID NO: 13955 - protein, 1315 aa, Artificial Sequence
  SARS-CoV-2/Finland/FIN-313/2020__EPI_ISL_414641 spike protein (1-1147)(N914C_S1123C) Ferritin construct
MFVFLVLLPLVSSQCVNLTTRTQLPPAYTNSFTRGVYYPDKVFRSSVLHSTQDLFLPFFSNVTWFHAIHVSGTNGTKRFDNPVLPFNDGVYFASTEKSNIIRGWIFGTTLDSKTQSLLIVNNATNVVIKVCEFQFCNDPFLGVYYHKNNKSWMESEFRVYSSANNCTFEYVSQPFLMDLEGKQGNFKNLREFVFKNIDGYFKIYSKHTPINLVRDLPQGFSALEPLVDLPIGINITRFKTLLALHRSYLTPGDSSSGWTAGAAAYYVGYLQPRTFLLKYNENGTITDAVDCALDPLSETKCTLKSFTVEKGIYQTSNFRVQPTESIVRFPNITNLCPFGEVFNATRFASVYAWNRKRISNCVADYSVLYNSASFSTFKCYGVSPTKLNDLCFTNVYADSFVIRGDEVRQIAPGQTGKIADYNYKLPDDFTGCVIAWNSNNLDSKVGGNYNYLYRLFRKSNLKPFERDISTEIYQAGSTPCNGVEGFNCYFPLQSYGFQPTNGVGYQPYRVVVLSFELLHAPATVCGPKKSTNLVKNKCVNFNFNGLTGTGVLTESNKKFLPFQQFGRDIADTTDAVRDPQTLEILDITPCSFGGVSVITPGTNTSNQVAVLYQGVNCTEVPVAIHADQLTPTWRVYSTGSNVFQTRAGCLIGAEHVNNSYECDIPIGAGICASYQTQTNSPRRARSVASQSIIAYTMSLGAENSVAYSNNSIAIPTNFTISVTTEILPVSMTKTSVDCTMYICGDSTECSNLLLQYGSFCTQLNRALTGIAVEQDKNTQEVFAQVKQIYKTPPIKDFGGFNFSQILPDPSKPSKRSFIEDLLFNKVTLADAGFIKQYGDCLGDIAARDLICAQKFNGLTVLPPLLTDEMIAQYTSALLAGTITSGWTFGAGAALQIPFAMQMAYRFNGIGVTQCVLYENQKLIANQFNSAIGKIQDSLSSTASALGKLQDVVNQNAQALNTLVKQLSSNFGAISSVLNDILSRLDKVEAEVQIDRLITGRLQSLQTYVTQQLIRAAEIRASANLAATKMSECVLGQSKRVDFCGKGYHLMSFPQSAPHGVVFLHVTYVPAQEKNFTTAPAICHDGKAHFPREGVFVSNGTHWFVTQRNFYEPQIITTDNTFVCGNCDVVIGIVNNTVYDPLQPELDSGGGGSDIIKLLNEQVNKEMQSSNLYMSMSSWCYTHSLDGAGLFLFDHAAEEYEHAKKLIIFLNENNVPVQLTSISAPEHKFEGLTQIFQKAYEHEQHISESINNIVDHAIKSKDHATFNFLQWYVAEQHEEEVLFKDILDKIELIGNENHGLYLADQYVKGIAKSRKS

SEQ ID NO: 13956 - protein, 1315 aa, Artificial Sequence
  SARS-CoV-2/Netherlands/ZuidHolland_2/2020__EPI_ISL_414556 spike protein (1-1147)(N914C_S1123C) Ferritin construct
MFVFLVLLPLVSSQCVNLTTRTQLPPAYTNSFTRGVYYPDKVFRSSVLHSTQDLFLPFFSNVTWFHAIHVSGTNGTKRFDNPVLPFNDGVYFASTEKSNIIRGWIFGTTLDSKTQSLLIVNNATNVVIKVCEFQFCNDPFLGVYYHKNNKSWMESEFRVYSSANNCTFEYVSQPFLMDLEGKQGNFKNLREFVFKNIDGYFKIYSKHTPINLVRDLPQGFSALEPLVDLPIGINITRFQTLLALHRSYLTPGDSSSGWTAGAAAYYVGYLQPRTFLLKYNENGTITDAVDCALDPLSETKCTLKSFTVEKGIYQTSNFRVQPTESIVRFPNITNLCPFGEVFNATRFASVYAWNRKRISNCVADYSVLYNSASFSTFKCYGVSPTKLNDLCFTNVYADSFVIRGDEVRQIAPGQTGKIADYNYKLPDDFTGCVIAWNSNNLDSKVGGNYNYLYRLFRKSNLKPFERDISTEIYQAGSTPCNGVEGFNCYFPLQSYGFQPTNGVGYQPYRVVVLSFELLHAPATVCGPKKSTNLVKNKCVNFNFNGLTGTGVLTESNKKFLPFQQFGRDIADTTDAVRDPQTLEILDITPCSFGGVSVITPGTNTSNQVAVLYQGVNCTEVPVAIHADQLTPTWRVYSTGSNVFQTRAGCLIGAEHVNNSYECDIPIGAGICASYQTQTNSPRRARSVASQSIIAYTMSLGAENSVAYSNNSIAIPTNFTISVTTEILPVSMTKTSVDCTMYICGDSTECSNLLLQYGSFCTQLNRALTGIALEQDKNTQEVFAQVKQIYKTPPIKDFGGFNFSQILPDPSKPSKRSFIEDLLFNKVTLADAGFIKQYGDCLGDIAARDLICAQKFNGLTVLPPLLTDEMIAQYTSALLAGTITSGWTFGAGAALQIPFAMQMAYRFNGIGVTQCVLYENQKLIANQFNSAIGKIQDSLSSTASALGKLQDVVNQNAQALNTLVKQLSSNFGAISSVLNDILSRLDKVEAEVQIDRLITGRLQSLQTYVTQQLIRAAEIRASANLAATKMSECVLGQSKRVDFCGKGYHLMSFPQSAPHGVVFLHVTYVPAQEKNFTTAPAICHDGKAHFPREGVFVSNGTHWFVTQRNFYEPQIITTDNTFVCGNCDVVIGIVNNTVYDPLQPELDSGGGGSDIIKLLNEQVNKEMQSSNLYMSMSSWCYTHSLDGAGLFLFDHAAEEYEHAKKLIIFLNENNVPVQLTSISAPEHKFEGLTQIFQKAYEHEQHISESINNIVDHAIKSKDHATFNFLQWYVAEQHEEEVLFKDILDKIELIGNENHGLYLADQYVKGIAKSRKS

SEQ ID NO: 13957 - protein, 1315 aa, Artificial Sequence
  SARS-CoV-2/USA/WA-UW31/2020__EPI_ISL_414618 spike protein (1-1147)(N914C_S1123C) Ferritin construct
MFVFLVLLPLVSSQCVNLTTRTQLPPAYTNSFTRGVYYPDKVFRSSVLHSTQDLFLPFFSNVTWFHAIHVSGTNGTKRFDNPVLPFNDGVYFASTEKSNIIRGWIFGTTLDSKTQSLLIVNNATNVVIKVCEFQFCNDPFLGVYYHKNNKSWMESEFRVYSSANNCTFEYVSQPFLMDLEGKQGNFKNLREFVFKNIDGYFKIYSKHTPINLVRDLPQGFSALEPLVDLPIGINITRFQTLLALHRSYLTPGDSSSGWTAGAAAYYVGYLQPRTFLLKYNENGTITDAVDCALDPLSETKCTLKSFTVEKGIYQTSNFRVQPTESIVRFPNITNLCPFGEVFNATRFASVYAWNRKRISNCVADYSVLYNSASFSTFKCYGVSPTKLNDLCFTNVYADSFVIRGDEVRQIAPGQTGKIADYNYKLPDDFTGCVIAWNSNNLDSKVGGNYNYLYRLFRKSNLKPFERDISTEIYQAGSTPCNGAEGFNCYFPLQSYGFQPTNGVGYQPYRVVVLSFELLHAPATVCGPKKSTNLVKNKCVNFNFNGLTGTGVLTESNKKFLPFQQFGRDIADTTDAVRDPQTLEILDITPCSFGGVSVITPGTNTSNQVAVLYQDVNCTEVPVAIHADQLTPTWRVYSTGSNVFQTRAGCLIGAEHVNNSYECDIPIGAGICASYQTQTNSPRRARSVASQSIIAYTMSLGAENSVAYSNNSIAIPTNFTISVTTEILPVSMTKTSVDCTMYICGDSTECSNLLLQYGSFCTQLNRALTGIAVEQDKNTQEVFAQVKQIYKTPPIKDFGGFNFSQILPDPSKPSKRSFIEDLLFNKVTLADAGFIKQYGDCLGDIAARDLICAQKFNGLTVLPPLLTDEMIAQYTSALLAGTITSGWTFGAGAALQIPFAMQMAYRFNGIGVTQCVLYENQKLIANQFNSAIGKIQDSLSSTASALGKLQDVVNQNAQALNTLVKQLSSNFGAISSVLNDILSRLDKVEAEVQIDRLITGRLQSLQTYVTQQLIRAAEIRASANLAATKMSECVLGQSKRVDFCGKGYHLMSFPQSAPHGVVFLHVTYVPAQEKNFTTAPAICHDGKAHFPREGVFVSNGTHWFVTQRNFYEPQIITTDNTFVCGNCDVVIGIVNNTVYDPLQPELDSGGGGSDIIKLLNEQVNKEMQSSNLYMSMSSWCYTHSLDGAGLFLFDHAAEEYEHAKKLIIFLNENNVPVQLTSISAPEHKFEGLTQIFQKAYEHEQHISESINNIVDHAIKSKDHATFNFLQWYVAEQHEEEVLFKDILDKIELIGNENHGLYLADQYVKGIAKSRKS

SEQ ID NO: 13958 - protein, 1315 aa, Artificial Sequence
  SARS-CoV-2/South Korea/SNU01/2020__EPI_ISL_411929 spike protein (1-1147)(N914C_S1123C) Ferritin construct
MFVFLVLLPLVSSQCVNLTTRTQLPPAYTNSFTRGVYYPDKVFRSSVLHSTQDLFLPFFSNVTWFHAIHVSGTNGTKRFDNPVLPFNDGVYFASTEKSNIIRGWIFGTTLDSKTQSLLIVNNATNVVIKVCEFQFCNDPFLGVYYHKNNKSWMESEFRVYSSANNCTFEYVSQPFLMDLEGKQGNFKNLREFVFKNIDGYFKIYSKHTPINLVRDLPQGFWALEPLVDLPIGINITRFQTLLALHRSYLTPGDSSSGWTAGAAAYYVGYLQPRTFLLKYNENGTITDAVDCALDPLSETKCTLKSFTVEKGIYQTSNFRVQPTESIVRFPNITNLCPFGEVFNATRFASVYAWNRKRISNCVADYSVLYNSASFSTFKCYGVSPTKLNDLCFTNVYADSFVIRGDEVRQIAPGQTGKIADYNYKLPDDFTGCVIAWNSNNLDSKVGGNYNYLYRLFRKSNLKPFERDISTEIYQAGSTPCNGVEGFNCYFPLQSYGFQPTNGVGYQPYRVVVLSFELLHAPATVCGPKKSTNLVKNKCVNFNFNGLTGTGVLTESNKKFLPFQQFGRDIADTTDAVRDPQTLEILDITPCSFGGVSVITPGTNTSNQVAVLYQDVNCTEVPVAIHADQLTPTWRVYSTGSNVFQTRAGCLIGAEHVNNSYECDIPIGAGICASYQTQTNSPRRARSVASQSIIAYTMSLGAENSVAYSNNSIAIPTNFTISVTTEILPVSMTKTSVDCTMYICGDSTECSNLLLQYGSFCTQLNRALTGIAVEQDKNTQEVFAQVKQIYKTPPIKDFGGFNFSQILPDPSKPSKRSFIEDLLFNKVTLADAGFIKQYGDCLGDIAARDLICAQKFNGLTVLPPLLTDEMIAQYTSALLAGTITSGWTFGAGAALQIPFAMQMAYRFNGIGVTQCVLYENQKLIANQFNSAIGKIQDSLSSTASALGKLQDVVNQNAQALNTLVKQLSSNFGAISSVLNDILSRLDKVEAEVQIDRLITGRLQSLQTYVTQQLIRAAEIRASANLAATKMSECVLGQSKRVDFCGKGYHLMSFPQSAPHGVVFLHVTYVPAQEKNFTTAPAICHDGKAHFPREGVFVSNGTHWFVTQRNFYEPQIITTDNTFVCGNCDVVIGIVNNTVYDPLQPELDSGGGGSDIIKLLNEQVNKEMQSSNLYMSMSSWCYTHSLDGAGLFLFDHAAEEYEHAKKLIIFLNENNVPVQLTSISAPEHKFEGLTQIFQKAYEHEQHISESINNIVDHAIKSKDHATFNFLQWYVAEQHEEEVLFKDILDKIELIGNENHGLYLADQYVKGIAKSRKS

SEQ ID NO: 13959 - protein, 1315 aa, Artificial Sequence
  SARS-CoV-2/China/WF0004/2020__EPI_ISL_413694 spike protein (1-1147)(N914C_S1123C) Ferritin construct
MFVFLVLLPLVSSQCVNLTTRTQLPPAYTNSFTRGVYYPDKVFRSSVLHSTQDLFLPFFSNVTWFHAIHVSGTNGTKRFDNPVLPFNDGVYFASTEKSNIIRGWIFGTTLDSKTQSLLIVNNATNVVIKVCEFQFCNDPFLGVYYHKNNKSWTESEFRVYSSANNCTFEYVSQPFLMDLEGKQGNFKNLREFVFKNIDGYFKIYSKHTPINLVRDLPQGFSALEPLVDLPIGINITRFQTLLALHRSYLTPGDSSSGWTAGAAAYYVGYLQPRTFLLKYNENGTITDAVDCALDPLSETKCTLKSFTVEKGIYQTSNFRVQPTESIVRFPNITNLCPFGEVFNATRFASVYAWNRKRISNCVADYSVLYNSASFSTFKCYGVSPTKLNDLCFTNVYADSFVIRGDEVRQIAPGQTGKIADYNYKLPDDFTGCVIAWNSNNLDSKVGGNYNYLYRLFRKSNLKPFERDISTEIYQAGSTPCNGVEGFNCYFPLQSYGFQPTNGVGYQPYRVVVLSFELLHAPATVCGPKKSTNLVKNKCVNFNFNGLTGTGVLTESNKKFLPFQQFGRDIADTTDAVRDPQTLEILDITPCSFGGVSVITPGTNTSNQVAVLYQDVNCTEVPVAIHADQLTPTWRVYSTGSNVFQTRAGCLIGAEHVNNSYECDIPIGAGICASYQTQTNSPRRARSVASQSIIAYTMSLGAENSVAYSNNSIAIPTNFTISVTTEILPVSMTKTSVDCTMYICGDSTECSNLLLQYGSFCTQLNRALTGIAVEQDKNTQEVFAQVKQIYKTPPIKDFGGFNFSQILPDPSKPSKRSFIEDLLFNKVTLADAGFIKQYGDCLGDIAARDLICAQKFNGLTVLPPLLTDEMIAQYTSALLAGTITSGWTFGAGAALQIPFAMQMAYRFNGIGVTQCVLYENQKLIANQFNSAIGKIQDSLSSTASALGKLQDVVNQNAQALNTLVKQLSSNFGAISSVLNDILSRLDKVEAEVQIDRLITGRLQSLQTYVTQQLIRAAEIRASANLAATKMSECVLGQSKRFDFCGKGYHLMSFPQSAPHGVVFLHVTYVPAQEKNFTTAPAICHDGKAHFPREGVFVSNGTHWFVTQRNFYEPQIITTDNTFVCGNCDVVIGIVNNTVYDPLQPELDSGGGGSDIIKLLNEQVNKEMQSSNLYMSMSSWCYTHSLDGAGLFLFDHAAEEYEHAKKLIIFLNENNVPVQLTSISAPEHKFEGLTQIFQKAYEHEQHISESINNIVDHAIKSKDHATFNFLQWYVAEQHEEEVLFKDILDKIELIGNENHGLYLADQYVKGIAKSRKS

SEQ ID NO: 13960 - protein, 1315 aa, Artificial Sequence
  SARS-CoV-2/China/WF0028/2020__EPI_ISL_413791 spike protein (1-1147)(N914C_S1123C) Ferritin construct
MFVFLVLLPLVSSQCVNLTTRTQLPPAYTNSFTRGVYYPDKVFRSSVLHSTQDLFLPFFSNVTWFHAIHVSGTNGTKRFDNPVLPFNDGVYFASTEKSNIIRGWIFGTTLDSKTQSLLIVNNATNVVIKVCEFQFCNDPFLGVYYHKNNKSWMESEFRVYSSANNCTFEYVSQPFLMDLEGKQGNFKNLREFVFKNIDGYFKIYSKHTPINLVRDLPQGFSALEPLVDLPIGINITRFQTLLALHRSYLTPGDSSSGWTAGAAAYYVGYLQPRTFLLKYNENGTITDAVDCALDPLSETKCTLKSFTVEKGIYQTSNFRVQPTESIVRFPNITNLCPFGEVFNATRFASVYAWNRKRISNCVADYSVLYNSASFSTFKCYGVSPTKLNDLCFTNVYADSFVIRGDEVRQIAPGQTGKIADYNYKLPDDFTGCVIAWNSNNLDSKVGGNYNYLYRLFRKSNLKPFERDISTEIYQAGSTPCNGVEGFNCYFPLQSYGFQPTNGVGYQPYRVVVLSFELLHAPATVCGPKKSTNLVKNKCVNFNFNGLTGTGVLTESNKKFLPFQQFGRDIADTTDAVRDPQTLEILDITPCSFGGVSVITPGTNTSNQVAVLYQDVNCTEVPVAIHADQLTPTWRVYSTGSNVFQTRAGCLIGAEHVNNSYECDIPIGAGICASYQTQTNSPRRARSVASQSIIAYTMSLGAENSVAYSNNSIAIPTNFTISVTTEILPVSMTKTSVDCTMYICGDSTECSNLLLQYGSFCTQLNRALTGIAVEQDKNTQEVFAQVKQIYKTPPIKDFGGFNFSQILPDPSKPSKRSFIEDLLFNKVTLADAGFIKQYGDCLGDIAARDLICAQKFNGLTVLPPLLTDEMIAQYTSALLAGTITSGWTFGAGAALQIPFAMQMAYRFNGIGVTQCVLYENQKLIANQFNSAIGKIQDSLSSTASALGKLQDVVNQNAQALNTLVKQLSSNFGAISSVLNDILSRLDKVEAEVQIDRLITGRLQSLQTYVTQQLIRAAEIRASANLAATKMSECVLGQSKRVDFCGKGYHLMSFPQSAPHGVVFLHVTYVPAQEKNFTTAPAICHDGKAHFPREGVFVSNGTHWFVTQRNFYEPQIITTDNTFVCGNCDVVIGIVNNTVYDPLQPELESGGGGSDIIKLLNEQVNKEMQSSNLYMSMSSWCYTHSLDGAGLFLFDHAAEEYEHAKKLIIFLNENNVPVQLTSISAPEHKFEGLTQIFQKAYEHEQHISESINNIVDHAIKSKDHATFNFLQWYVAEQHEEEVLFKDILDKIELIGNENHGLYLADQYVKGIAKSRKS

SEQ ID NO: 13961 - protein, 1315 aa, Artificial Sequence
  SARS-CoV-2/2019-nCoV/USA-CruiseA-18/2020__MT159716.1 spike protein (1-1147)(N914C_S1123C) Ferritin construct
MFVFLVLLPLVSSQCVNLTTRTQLPPAYTNSFTRGVYYPDKVFRSSVLHSTQDLFLPFFSNVTWFHAIHVSGTNGTKRFDNPVLPFNDGVYFASTEKSNIIRGWIFGTTLDSKTQSLLIVNNATNVVIKVCEFQFCNDPFLGVYYHKNNKSWMESELRVYSSANNCTFEYVSQPFLMDLEGKQGNFKNLREFVFKNIDGYFKIYSKHTPINLVRDLPQGFSALEPLVDLPIGINITRFQTLLALHRSYLTPGDSSSGWTAGAAAYYVGYLQPRTFLLKYNENGTITDAVDCALDPLSETKCTLKSFTVEKGIYQTSNFRVQPTESIVRFPNITNLCPFGEVFNATRFASVYAWNRKRISNCVADYSVLYNSASFSTFKCYGVSPTKLNDLCFTNVYADSFVIRGDEVRQIAPGQTGKIADYNYKLPDDFTGCVIAWNSNNLDSKVGGNYNYLYRLFRKSNLKPFERDISTEIYQAGSTPCNGVEGFNCYFPLQSYGFQPTNGVGYQPYRVVVLSFELLHAPATVCGPKKSTNLVKNKCVNFNFNGLTGTGVLTESNKKFLPFQQFGRDIADTTDAVRDPQTLEILDITPCSFGGVSVITPGTNTSNQVAVLYQDVNCTEVPVAIHADQLTPTWRVYSTGSNVFQTRAGCLIGAEHVNNSYECDIPIGAGICASYQTQTNSPRRARSVASQSIIAYTMSLGAENSVAYSNNSIAIPTNFTISVTTEILPVSMTKTSVDCTMYICGDSTECSNLLLQYGSFCTQLNRALTGIAVEQDKNTQEVFAQVKQIYKTPPIKDFGGFNFSQILPDPSKPSKRSFIEDLLFNKVTLADAGFIKQYGDCLGDIAARDLICAQKFNGLTVLPPLLTDEMIAQYTSALLAGTITSGWTFGAGAALQIPFAMQMAYRFNGIGVTQCVLYENQKLIANQFNSAIGKIQDSLSSTASALGKLQDVVNQNAQALNTLVKQLSSNFGAISSVLNDILSRLDKVEAEVQIDRLITGRLQSLQTYVTQQLIRAAEIRASANLAATKMSECVLGQSKRVDFCGKGYHLMSFPQSAPHGVVFLHVTYVPAQEKNFTTAPAICHDGKAHFPREGVFVSNGTHWFVTQRNFYEPQIITTDNTFVCGNCDVVIGIVNNTVYDPLQPELDSGGGGSDIIKLLNEQVNKEMQSSNLYMSMSSWCYTHSLDGAGLFLFDHAAEEYEHAKKLIIFLNENNVPVQLTSISAPEHKFEGLTQIFQKAYEHEQHISESINNIVDHAIKSKDHATFNFLQWYVAEQHEEEVLFKDILDKIELIGNENHGLYLADQYVKGIAKSRKS

SEQ ID NO: 13962 - protein, 1315 aa, Artificial Sequence
  SARS-CoV-2/SARS-CoV-2/Yunnan-01/human/2020/CHN__MT049951.1 spike protein (1-1147)(N914C_S1123C) Ferritin construct
MFVFLVLLPLVSSQCVNLTTRTQLPPANTNSFTRGVYYPDKVFRSSVLHSTQDLFLPFFSNVTWFHAIHVSGTNGTKRFDNPVLPFNDGVYFASTEKSNIIRGWIFGTTLDSKTQSLLIVNNATNVVIKVCEFQFCNDPFLGVYYHKNNKSWMESEFRVYSSANNCTFEYVSQPFLMDLEGKQGNFKNLREFVFKNIDGYFKIYSKHTPINLVRDLPQGFSALEPLVDLPIGINITRFQTLLALHRSYLTPGDSSSGWTAGAAAYYVGYLQPRTFLLKYNENGTITDAVDCALDPLSETKCTLKSFTVEKGIYQTSNFRVQPTESIVRFPNITNLCPFGEVFNATRFASVYAWNRKRISNCVADYSVLYNSASFSTFKCYGVSPTKLNDLCFTNVYADSFVIRGDEVRQIAPGQTGKIADYNYKLPDDFTGCVIAWNSNNLDSKVGGNYNYLYRLFRKSNLKPFERDISTEIYQAGSTPCNGVEGFNCYFPLQSYGFQPTNGVGYQPYRVVVLSFELLHAPATVCGPKKSTNLVKNKCVNFNFNGLTGTGVLTESNKKFLPFQQFGRDIADTTDAVRDPQTLEILDITPCSFGGVSVITPGTNTSNQVAVLYQDVNCTEVPVAIHADQLTPTWRVYSTGSNVFQTRAGCLIGAEHVNNSYECDIPIGAGICASYQTQTNSPRRARSVASQSIIAYTMSLGAENSVAYSNNSIAIPTNFTISVTTEILPVSMTKTSVDCTMYICGDSTECSNLLLQYGSFCTQLNRALTGIAVEQDKNTQEVFAQVKQIYKTPPIKDFGGFNFSQILPDPSKPSKRSFIEDLLFNKVTLADAGFIKQYGDCLGDIAARDLICAQKFNGLTVLPPLLTDEMIAQYTSALLAGTITSGWTFGAGAALQIPFAMQMAYRFNGIGVTQCVLYENQKLIANQFNSAIGKIQDSLSSTASALGKLQDVVNQNAQALNTLVKQLSSNFGAISSVLNDILSRLDKVEAEVQIDRLITGRLQSLQTYVTQQLIRAAEIRASANLAATKMSECVLGQSKRVDFCGKGYHLMSFPQSAPHGVVFLHVTYVPAQEKNFTTAPAICHDGKAHFPREGVFVSNGTHWFVTQRNFYEPQIITTDNTFVCGNCDVVIGIVNNTVYDPLQPELDSGGGGSDIIKLLNEQVNKEMQSSNLYMSMSSWCYTHSLDGAGLFLFDHAAEEYEHAKKLIIFLNENNVPVQLTSISAPEHKFEGLTQIFQKAYEHEQHISESINNIVDHAIKSKDHATFNFLQWYVAEQHEEEVLFKDILDKIELIGNENHGLYLADQYVKGIAKSRKS

SEQ ID NO: 13963 - protein, 1315 aa, Artificial Sequence
  SARS-CoV-2/USA/WA-UW292/2020__EPI_ISL_418077 spike protein (1-1147)(N914C_S1123C) Ferritin construct
MFVFLVLLPLVSSQCVNLTTRTQLPPAYTNSFTRGVYYPDKVFRSSVLHSTQDLFLPFFSNVTWFHAIHVSGTNGTKRFDNPVLPFNDGVYFASTEKSNIIRGWIFGTTLDSKTQSLLIVNNATNVVIKVCEFQFCNDPFLGVYYHKNNKSWMESEFRVYSSANNCTFEYVSQPFLMDLEGKQGNFKNLREFVFKNIDGYFKIYSKHTPINLVRDLPQGFSALEPLVDLPIGINITRFQTLLALHRSYLTPGDSSSGWTAGAAAYYVGYLQPRTFLLKYNENGTITDAVDCALDPLSETKCTLKSFTVEKGIYQTSNFRVQPTESIVRFPNITNLCPFGEVFNATRFASVYAWNRKRISNCVADYSVLYNSASFSTFKCYGVSPTKLNDLCFTNVYADSFVIRGDEVRQIAPGQTGKIADYNYKLPDDFTGCVIAWNSNNLDSKVGGNYNYLYRLFRKSNLKPFERDISTEIYQASSTPCNGVEGFNCYFPLQSYGFQPTNGVGYQPYRVVVLSFELLHAPATVCGPKKSTNLVKNKCVNFNFNGLTGTGVLTESNKKFLPFQQFGRDIADTTDAVRDPQTLEILDITPCSFGGVSVITPGTNTSNQVAVLYQDVNCTEVPVAIHADQLTPTWRVYSTGSNVFQTRAGCLIGAEHVNNSYECDIPIGAGICASYQTQTNSPRRARSVASQSIIAYTMSLGAENSVAYSNNSIAIPTNFTISVTTEILPVSMTKTSVDCTMYICGDSTECSNLLLQYGSFCTQLNRALTGIAVEQDKNTQEVFAQVKQIYKTPPIKDFGGFNFSQILPDPSKPSKRSFIEDLLFNKVTLADAGFIKQYGDCLGDIAARDLICAQKFNGLTVLPPLLTDEMIAQYTSALLAGTITSGWTFGAGAALQIPFAMQMAYRFNGIGVTQCVLYENQKLIANQFNSAIGKIQDSLSSTASALGKLQDVVNQNAQALNTLVKQLSSNFGAISSVLNDILSRLDKVEAEVQIDRLITGRLQSLQTYVTQQLIRAAEIRASANLAATKMSECVLGQSKRVDFCGKGYHLMSFPQSAPHGVVFLHVTYVPAQEKNFTTAPAICHDGKAHFPREGVFVSNGTHWFVTQRNFYEPQIITTDNTFVCGNCDVVIGIVNNTVYDPLQPELDSGGGGSDIIKLLNEQVNKEMQSSNLYMSMSSWCYTHSLDGAGLFLFDHAAEEYEHAKKLIIFLNENNVPVQLTSISAPEHKFEGLTQIFQKAYEHEQHISESINNIVDHAIKSKDHATFNFLQWYVAEQHEEEVLFKDILDKIELIGNENHGLYLADQYVKGIAKSRKS

SEQ ID NO: 13964 - protein, 1315 aa, Artificial Sequence
  SARS-CoV-2/Iceland/192/2020__EPI_ISL_417819 spike protein (1-1147)(N914C_S1123C) Ferritin construct
MFVFFVLLPLVSSQCVNLTTRTQLPPAYTNSFTRGVYYPDKVFRSSVLHSTQDLFLPFFSNVTWFHAIHVSGTNGTKRFDNPVLPFNDGVYFASTEKSNIIRGWIFGTTLDSKTQSLLIVNNATNVVIKVCEFQFCNDPFLGVYYHKNNKSWMESEFRVYSSANNCTFEYVSQPFLMDLEGKQGNFKNLREFVFKNIDGYFKIYSKHTPINLVRDLPQGFSALEPLVDLPIGINITRFQTLLALHRSYLTPGDSSSGWTAGAAAYYVGYLQPRTFLLKYNENGTITDAVDCALDPLSETKCTLKSFTVEKGIYQTSNFRVQPTESIVRFPNITNLCPFGEVFNATRFASVYAWNRKRISNCVADYSVLYNSASFSTFKCYGVSPTKLNDLCFTNVYADSFVIRGDEVRQIAPGQTGKIADYNYKLPDDFTGCVIAWNSNNLDSKVGGNYNYLYRLFRKSNLKPFERDISTEIYQAGSTPCNGVEGFNCYFPLQSYGFQPTNGVGYQPYRVVVLSFELLHAPATVCGPKKSTNLVKNKCVNFNFNGLTGTGVLTESNKKFLPFQQFGRDIADTTDAVRDPQTLEILDITPCSFGGVSVITPGTNTSNQVAVLYQGVNCTEVPVAIHADQLTPTWRVYSTGSNVFQTRAGCLIGAEHVNNSYECDIPIGAGICASYQTQTNSPRRARSVASQSIIAYTMSLGAENSVAYSNNSIAIPTNFTISVTTEILPVSMTKTSVDCTMYICGDSTECSNLLLQYGSFCTQLNRALTGIAVEQDKNTQEVFAQVKQIYKTPPIKDFGGFNFSQILPDPSKPSKRSFIEDLLFNKVTLADAGFIKQYGDCLGDIAARDLICAQKFNGLTVLPPLLTDEMIAQYTSALLAGTITSGWTFGAGAALQIPFAMQMAYRFNGIGVTQCVLYENQKLIANQFNSAIGKIQDSLSSTASALGKLQDVVNQNAQALNTLVKQLSSNFGAISSVLNDILSRLDKVEAEVQIDRLITGRLQSLQTYVTQQLIRAAEIRASANLAATKMSECVLGQSKRVDFCGKGYHLMSFPQSAPHGVVFLHVTYVPAQEKNFTTAPAICHDGKAHFPREGVFVSNGTHWFVTQRNFYEPQIITTDNTFVCGNCDVVIGIVNNTVYDPLQPELDSGGGGSDIIKLLNEQVNKEMQSSNLYMSMSSWCYTHSLDGAGLFLFDHAAEEYEHAKKLIIFLNENNVPVQLTSISAPEHKFEGLTQIFQKAYEHEQHISESINNIVDHAIKSKDHATFNFLQWYVAEQHEEEVLFKDILDKIELIGNENHGLYLADQYVKGIAKSRKS

SEQ ID NO: 13965 - protein, 1315 aa, Artificial Sequence
  SARS-CoV-2/Belgium/ULG-6939/2020__EPI_ISL_417020 spike protein (1-1147)(N914C_S1123C) Ferritin construct
MFVFLVLLPLVSSQCVNLTTRTQLPPAYTNSFTRGVYYPDKVFRSSVLHSTQDLFLPFFSNVTWFHAIHVSGTNGTKRFDNPVLPFNDGVYFASTEKSNIIRGWIFGTTLDSKTQSLLIVNNATNVVIKVCEFQFCNDPFLGVYYHKNNKSWMESEFRVYSSANNCTFEYVSQPFLMDLEGKQGNFKNLREFVFKNIDGYFKIYSKHTPINLVRDLPQGFSALEPLVDLPIGINITRFQTLLALHRSYLTPGDSSSGWTAGAAAYYVGYLQPRTFLLKYNENGTITDAVDCALDPLSETKCTLKSFTVEKGIYQTSNFRVQPTESIVRFPNITNLCPFGEVFNATRFASVYAWNRKRISNCVADYSVLYNSASFSTFKCYGVSPTKLNDLCFTNVYADSFVIRGDEVRQIAPGQTGKIADYNYKLPDDFTGCVIAWNSNNLDSKVGGNYNYLYRLFRKSNLKPFERDISTEIYQAGSTPCNGVEGFNCYFPLQSYGFQPTNGVGYQPYRVVVLSFELLHAPATVCGPKKSTNLVKNKCVNFNFNGLTGTGVLTESNKKFLPFQQFGRDIADTTDAVRDPQTLEILDITPCSFGGVSVITPGTNTSNQVAVLYQGVNCTEVPVAIHADQLTPTWRVYSTGSNVFQTRAGCLIGAEHVNNSYECDIPIGAGICASYQTQTNSPRRARSVASQSIIAYTMSLGAENSVVYSNNSIAIPTNFTISVTTEILPVSMTKTSVDCTMYICGDSTECSNLLLQYGSFCTQLNRALTGIAVEQDKNTQEVFAQVKQIYKTPPIKDFGGFNFSQILPDPSKPSKRSFIEDLLFNKVTLADAGFIKQYGDCLGDIAARDLICAQKFNGLTVLPPLLTDEMIAQYTSALLAGTITSGWTFGAGAALQIPFAMQMAYRFNGIGVTQCVLYENQKLIANQFNSAIGKIQDSLSSTASALGKLQDVVNQNAQALNTLVKQLSSNFGAISSVLNDILSRLDKVEAEVQIDRLITGRLQSLQTYVTQQLIRAAEIRASANLAATKMSECVLGQSKRVDFCGKGYHLMSFPQSAPHGVVFLHVTYVPAQEKNFTTAPAICHDGKAHFPREGVFVSNGTHWFVTQRNFYEPQIITTDNTFVCGNCDVVIGIVNNTVYDPLQPELDSGGGGSDIIKLLNEQVNKEMQSSNLYMSMSSWCYTHSLDGAGLFLFDHAAEEYEHAKKLIIFLNENNVPVQLTSISAPEHKFEGLTQIFQKAYEHEQHISESINNIVDHAIKSKDHATFNFLQWYVAEQHEEEVLFKDILDKIELIGNENHGLYLADQYVKGIAKSRKS

SEQ ID NO: 13966 - protein, 1315 aa, Artificial Sequence
  SARS-CoV-2/France/HF2496/2020__EPI_ISL_418231 spike protein (1-1147)(N914C_S1123C) Ferritin construct
MFVFLVLLPLVSSQCVNLTTRTQLPPAYTNSFTRGVYYPDKVFRSSVLHSTQDLFLPFFSNVTWFHAIHVSGTNGTKRFDNPVLPFNDGVYFASTEKSNIIRGWIFGTTLDSKTQSLLIVNNATNVVIKVCEFQFCNDPFLGVYYHKNNKSWMESEFRVYSSANNCTFEYVSQPFLMDLEGKQGNFKNLREFVFKNIDGYFKIYSKHTPINLVRDLPQGFSALEPLVDLPIGINITRFQTLLALHRSYLTPGDSSSGWTAGAAAYYVGYLQPRTFLLKYNENGTITDAVDCALDPLSETKCTLKSFTVEKGIYQTSNFRVQPTESIVRFPNITNLCPFGEVFNATRFASVYAWNRKRISNCVADYSVLYNSASFSTFKCYGVSPTKLNDLCFTNVYADSFVIRGDEVRQIAPGQTGKIADYNYKLPDDFTGCVIAWNSNNLDSKVGGNYNYLYRLFRKSNLKPFERDISTEIYQAGSTPCNGVEGFNCYFPLQSYGFQPTNGVGYQPYRVVVLSFELLHAPATVCGPKKSTNLVKNKCVNFNFNGLTGTGVLTESNKKFLPFQQFGRDIADTTDAVRDPQTLEILDITPCSFGGVSVITPGTNTSNQVAVLYQGVNCTEVPVAIHADQLTPTWRVYSTGSNVFQTRAGCLIGAEHVNNSYECDIPIGAGICASYQTQTNSPRRARSVASQSIIAYTMSLGAENSVAYSNNSIAIPTNFTISVTTEILPVSMTKTSVDCTMYICGDSTECSNLLLQYGSFCTQLNRALTGIAVEQDKNTQEVFAQVKQIYKTPPIKDFGGFNFSQILPDPSKPSKRSFIEDLLFNKVTLADAGFIKQYGDCLGDIVARDLICAQKFNGLTVLPPLLTDEMIAQYTSALLAGTITSGWTFGAGAALQIPFAMQMAYRFNGIGVTQCVLYENQKLIANQFNSAIGKIQDSLSSTASALGKLQDVVNQNAQALNTLVKQLSSNFGAISSVLNDILSRLDKVEAEVQIDRLITGRLQSLQTYVTQQLIRAAEIRASANLAATKMSECVLGQSKRVDFCGKGYHLMSFPQSAPHGVVFLHVTYVPAQEKNFTTAPAICHDGKAHFPREGVFVSNGTHWFVTQRNFYEPQIITTDNTFVCGNCDVVIGIVNNTVYDPLQPELDSGGGGSDIIKLLNEQVNKEMQSSNLYMSMSSWCYTHSLDGAGLFLFDHAAEEYEHAKKLIIFLNENNVPVQLTSISAPEHKFEGLTQIFQKAYEHEQHISESINNIVDHAIKSKDHATFNFLQWYVAEQHEEEVLFKDILDKIELIGNENHGLYLADQYVKGIAKSRKS

SEQ ID NO: 13967 - protein, 1315 aa, Artificial Sequence
  SARS-CoV-2/USA/WA-UW291/2020__EPI_ISL_418076 spike protein (1-1147)(N914C_S1123C) Ferritin construct
MFVFLVLLPLVSSQCVNLTTRTQLPPAYTNSFTRGVYYPDKVFRSSVLHSTQDLFLPFFSNVTWFHAIHVSGTNGTKRFDNPVLPFNDGVYFASTEKSNIIRGWIFGTTLDSKTQSLLIVNNATNVVIKVCEFQFCNDPFLGVYYHKNNKSWMESEFRVYSSANNCTFEYVSQPFLMDLEGKQGNFKNLREFVFKNIDGYFKIYSKHTPINLVRDLPQGFSALEPLVDLPIGINITRFQTLLALHRSYLTPGDSSSGWTAGAAAYYVGYLQPRTFLLKYNENGTITDAVDCALDPLSETKCTLKSFTVEKGIYQTSNFRVQPTESIVRFPNITNLCPFGEVFNATRFASVYAWNRKRISNCVADYSVLYNSASFSTFKCYGVSPTKLNDLCFTNVYADSFVIRGDEVRQIAPGQTGKIADYNYKLPDDFTGCVIAWNSNNLDSKVGGNYNYLYRLFRKSNLKPFERDISTEIYQAGSTPCNGVEGFNCYFPLQSYGFQPTNGVGYQPYRVVVLSFELLHAPATVCGPKKSTNLVKNKCVNFNFNGLTGTGVLTESNKKFLPFQQFGRDIADTTDAVRDPQTLEILDITPCSFGGVSVITPGTNTSNQVAVLYQGVNCTEVPVAIHADQLTPTWRVYSTGSNVFQTRAGCLIGAEHVNNSYECDIPIGAGICASYQTQTNSPRRARSVASQSIIAYTMSLGAENSVAYSNNSIAIPTNFTISVTTEILPVSMTKTSVDCTMYICGDSTECSNLLLQYGSFCTQLNRALTGIAVEQDKNTQEVFAQVKQIYKTPPIKDFGGFNFSQILPDPSKPSKRSFIEDLLFNKVTLADAGFIKQYGDCLGDIAARDLICAQKFNGLTVLPPLLTDEMIAQYTSALLAGTITSGWTFGAGAALQIPFAMQMAYRFNGIGVTQCVLYENQKLIANQFNSAIGKIQYSLSSTASALGKLQDVVNQNAQALNTLVKQLSSNFGAISSVLNDILSRLDKVEAEVQIDRLITGRLQSLQTYVTQQLIRAAEIRASANLAATKMSECVLGQSKRVDFCGKGYHLMSFPQSAPHGVVFLHVTYVPAQEKNFTTAPAICHDGKAHFPREGVFVSNGTHWFVTQRNFYEPQIITTDNTFVCGNCDVVIGIVNNTVYDPLQPELDSGGGGSDIIKLLNEQVNKEMQSSNLYMSMSSWCYTHSLDGAGLFLFDHAAEEYEHAKKLIIFLNENNVPVQLTSISAPEHKFEGLTQIFQKAYEHEQHISESINNIVDHAIKSKDHATFNFLQWYVAEQHEEEVLFKDILDKIELIGNENHGLYLADQYVKGIAKSRKS

SEQ ID NO: 13968 - protein, 1315 aa, Artificial Sequence; identical to SEQ ID NO: 13931
  SARS-CoV-2/Portugal/PT0034/2020__EPI_ISL_418019 spike protein (1-1147)(N914C_S1123C) Ferritin construct

SEQ ID NO: 13969 - protein, 1315 aa, Artificial Sequence; identical to SEQ ID NO: 13923
  SARS-CoV-2/Iceland/202/2020__EPI_ISL_417750 spike protein (1-1147)(N914C_S1123C) Ferritin construct

SEQ ID NO: 13970 - protein, 1315 aa, Artificial Sequence
  SARS-CoV-2/USA/WA-UW261/2020__EPI_ISL_418046 spike protein (1-1147)(N914C_S1123C) Ferritin construct
MFVFLVLLPLVSSQCVNLTTRTQLPPAYTNSFTRGVYYPDKVFRSSVLHSTQDLFLPFFSNVTWFHAIHVSGTNGTKRFDNPVLPFNDGVYFASTEKSNIIRGWIFGTTLDSKTQSLLIVNNATNVVIKVCEFQFCNDPFLGVYYHKNNKSWMESEFRVYSSANNCTFEYVSQPFLMDLEGKQGNFKNLREFVFKNIDGYFKIYSKHTPINLVRDLPQGFSALEPLVDLPIGINITRFQTLLALHRSYLTPGDSSSGWTAGAAAYYVGYLQPRTFLLKYNENGTITDAVDCALDPLSETKCTLKSFTVEKGIYQTSNFRVQPTESIVRFPNITNLCPFGEVFNATRFTSVYAWNRKRISNCVADYSVLYNSASFSTFKCYGVSPTKLNDLCFTNVYADSFVIRGDEVRQIAPGQTGKIADYNYKLPDDFTGCVIAWNSNNLDSKVGGNYNYLYRLFRKSNLKPFERDISTEIYQAGSTPCNGVEGFNCYFPLQSYGFQPTNGVGYQPYRVVVLSFELLHAPATVCGPKKSTNLVKNKCVNFNFNGLTGTGVLTESNKKFLPFQQFGRDIADTTDAVRDPQTLEILDITPCSFGGVSVITPGTNTSNQVAVLYQDVNCTEVPVAIHADQLTPTWRVYSTGSNVFQTRAGCLIGAEHVNNSYECDIPIGAGICASYQTQTNSPRRARSVASQSIIAYTMSLGAENSVAYSNNSIAIPTNFTISVTTEILPVSMTKTSVDCTMYICGDSTECSNLLLQYGSFCTQLNRALTGIAVEQDKNTQEVFAQVKQIYKTPPIKDFGGFNFSQILPDPSKPSKRSFIEDLLFNKVTLADAGFIKQYGDCLGDIAARDLICAQKFNGLTVLPPLLTDEMIAQYTSALLAGTITSGWTFGAGAALQIPFAMQMAYRFNGIGVTQCVLYENQKLIANQFNSAIGKIQDSLSSTASALGKLQDVVNQNAQALNTLVKQLSSNFGAISSVLNDILSRLDKVEAEVQIDRLITGRLQSLQTYVTQQLIRAAEIRASANLAATKMSECVLGQSKRVDFCGKGYHLMSFPQSAPHGVVFLHVTYVPAQEKNFTTAPAICHDGKAHFPREGVFVSNGTHWFVTQRNFYEPQIITTDNTFVCGNCDVVIGIVNNTVYDPLQPELDSGGGGSDIIKLLNEQVNKEMQSSNLYMSMSSWCYTHSLDGAGLFLFDHAAEEYEHAKKLIIFLNENNVPVQLTSISAPEHKFEGLTQIFQKAYEHEQHISESINNIVDHAIKSKDHATFNFLQWYVAEQHEEEVLFKDILDKIELIGNENHGLYLADQYVKGIAKSRKS

SEQ ID NO: 13971 - protein, 1315 aa, Artificial Sequence
  SARS-CoV-2/Portugal/PT0035/2020__EPI_ISL_418020 spike protein (1-1147)(N914C_S1123C) Ferritin construct
MFVFLVLLPLVSSQCVNLTTRTQLPPAYTNSFTRGVYYPDKVFRSSVLHSTQDLFLPFFSNVTWFHAIHVSGTNGTKRFDNPVLPFNDGVYFASTEKSNIIRGWIFGTTLDSKTQSLLIVNNATNVVIKVCEFQFCNDPFLGVYYHKNNKSWMESEFRVYSSANNCTFEYVSQPFLMDLEGKQGNFKNLREFVFKNIDGYFKIYSKHTPINLVRDLPQGFSALEPLVDLPIGINITRFQTLLALHRSYLTPGDSSSGWTAGAAAYYVGYLQPRTFLLKYNENGTITDAVDCALDPLSETKCTLKSFTVEKGIYQTSNFRVQPTESIVRFPNITNLCPFGEVFNATRFASVYAWNRKRISNCVADYSVLYNSASFSTFKCYGVSPTKLNDLCFTNVYADSFVIRGDEVRQIAPGQTGKIADYNYKLPDDFTGCVIAWNSNNLDSKVGGNYNYLYRLFRKSNLKPFERDISTEIYQAGSTPCNGVEGFNCYFPLQSYGFQPTNGVGYQPYRVVVLSFELLHAPATVCGPKKSTNLVKNKCVNFNFNGLTGTGVLTESNKKFLPFQQFGRDIADTTDAVRDPQTLEILDITPCSFGGVSVITPGTNTSNQVAVLYQDVNCTEVPVAIHADQLTPTWRVYSTGSNVFQTRAGCLIGAEHVNNSYECDIPIGAGICASYQTQTNSPRRARSVASQSIIAYTMSLGAENSVAYSNNSIAIPTNFTISVTTEILPVSMTKTSVDCTMYICGDSTECSNLLLQYGSFCTQLNRALTGIAVEQDKNTQEVFAQVKQIYKTPPIKDFGGFNFSQILPDPSKPSKRSFIEDLLFNKVTLADAGFIKQYGDCLGDISARDLICAQKFNGLTVLPPLLTDEMIAQYTSALLAGTITSGWTFGAGAALQIPFAMQMAYRFNGIGVTQCVLYENQKLIANQFNSAIGKIQDSLSSTASALGKLQDVVNQNAQALNTLVKQLSSNFGAISSVLNDILSRLDKVEAEVQIDRLITGRLQSLQTYVTQQLIRAAEIRASANLAATKMSECVLGQSKRVDFCGKGYHLMSFPQSAPHGVVFLHVTYVPAQEKNFTTAPAICHDGKAHFPREGVFVSNGTHWFVTQRNFYEPQIITTDNTFVCGNCDVVIGIVNNTVYDPLQPELDSGGGGSDIIKLLNEQVNKEMQSSNLYMSMSSWCYTHSLDGAGLFLFDHAAEEYEHAKKLIIFLNENNVPVQLTSISAPEHKFEGLTQIFQKAYEHEQHISESINNIVDHAIKSKDHATFNFLQWYVAEQHEEEVLFKDILDKIELIGNENHGLYLADQYVKGIAKSRKS

SEQ ID NO: 13972 - protein, 1315 aa, Artificial Sequence
  SARS-CoV-2/USA/NY-NYUMC7/2020__EPI_ISL_418192 spike protein (1-1147)(N914C_S1123C) Ferritin construct
MFVFLVLLPLVSSQCVNLTTRTQLPPAYTNSFTRGVYYPDKVFRSSVLHSTQDLFLPFFSNVTWFHAIHVSGTNGTKRFDNPVLPFNDGVYFASTEKSNIIRGWIFGTTLDSKTQSLLIVNNATNVVIKVCEFQFCNDPFLGVYHHKNNKSWMESEFRVYSSANNCTFEYVSQPFLMDLEGKQGNFKNLREFVFKNIDGYFKIYSKHTPINLVRDLPQGFSALEPLVDLPIGINITRFQTLLALHRSYLTPGDSSSGWTAGAAAYYVGYLQPRTFLLKYNENGTITDAVDCALDPLSETKCTLKSFTVEKGIYQTSNFRVQPTESIVRFPNITNLCPFGEVFNATRFASVYAWNRKRISNCVADYSVLYNSASFSTFKCYGVSPTKLNDLCFTNVYADSFVIRGDEVRQIAPGQTGKIADYNYKLPDDFTGCVIAWNSNNLDSKVGGNYNYLYRLFRKSNLKPFERDISTEIYQAGSTPCNGVEGFNCYFPLQSYGFQPTNGVGYQPYRVVVLSFELLHAPATVCGPKKSTNLVKNKCVNFNFNGLTGTGVLTESNKKFLPFQQFGRDIADTTDAVRDPQTLEILDITPCSFGGVSVITPGTNTSNQVAVLYQGVNCTEVPVAIHADQLTPTWRVYSTGSNVFQTRAGCLIGAEHVNNSYECDIPIGAGICASYQTQTNSPRRARSVASQSIIAYTMSLGAENSVAYSNNSIAIPTNFTISVTTEILPVSMTKTSVDCTMYICGDSTECSNLLLQYGSFCTQLNRALTGIAVEQDKNTQEVFAQVKQIYKTPPIKDFGGFNFSQILPDPSKPSKRSFIEDLLFNKVTLADAGFIKQYGDCLGDIAARDLICAQKFNGLTVLPPLLTDEMIAQYTSALLAGTITSGWTFGAGAALQIPFAMQMAYRFNGIGVTQCVLYENQKLIANQFNSAIGKIQDSLSSTASALGKLQDVVNQNAQALNTLVKQLSSNFGAISSVLNDILSRLDKVEAEVQIDRLITGRLQSLQTYVTQQLIRAAEIRASANLAATKMSECVLGQSKRVDFCGKGYHLMSFPQSAPHGVVFLHVTYVPAQEKNFTTAPAICHDGKAHFPREGVFVSNGTHWFVTQRNFYEPQIITTDNTFVCGNCDVVIGIVNNTVYDPLQPELDSGGGGSDIIKLLNEQVNKEMQSSNLYMSMSSWCYTHSLDGAGLFLFDHAAEEYEHAKKLIIFLNENNVPVQLTSISAPEHKFEGLTQIFQKAYEHEQHISESINNIVDHAIKSKDHATFNFLQWYVAEQHEEEVLFKDILDKIELIGNENHGLYLADQYVKGIAKSRKS

SEQ ID NO: 13973 - protein, 1315 aa, Artificial Sequence
  SARS-CoV-2/Iceland/189/2020__EPI_ISL_417709 spike protein (1-1147)(N914C_S1123C) Ferritin construct
MFVFLVLLPLVSSQCVNLTTRTQLPPAYTNSFTRGVYYPDKVFRSSVLHSTQDLFLPFFSNVTWFHAIHVSGTNGTKRFDNPVLPFNDGVYFASTEKSNIIRGWIFGTTLDSKTQSLLIVNNATNVVIKVCEFQFCNDPFLGVYYHKNNKSWMESEFRVYSSANNCTFEYVSQPFLMDLEGKQGNFKNLREFVFKNIDGYFKIYSKHTPINLVRDLPQGFSALEPLVDLPIGINITRFQTLLALHRSYLTPGDSSSGWTAGAAAYYVGYLQPRTFLLKYNENGTITDAVDCALDPLSETKCTLKSFTVEKGIYQTSNFRVQPTESIVRFPNITNLCPFGEVFNATRFASVYAWNRKRISNCVADYSVLYNSASFSTFKCYGVSPTKLNDLCFTNVYADSFVIRGDEVRQIAPGQTGKIADYNYKLPDDFTGCVIAWNSNNLDSKVGGNYNYLYRLFRKSNLKPFERDISTEIYQAGSTPCNGVEGFNCYFPLQSYGFQPTNGVGYQPYRVVVLSFELLHAPATVCGPKKSTNLVKNKCVNFNFNGLTGTGVLTESNKKFLPFQQFGRDIADTTDAVRDPQTLEILDITPCSFGGVSVITPGTNTSNQVAVLYQGVNCTEVPVAIHADQLTPTWRVYSTGSNVFQTRAGCLIGAEHVNNSYECDIPIGAGICASYQTQTNSPRRARSVASQSIIAYTMSLGAENSVAYSNNSIAIPTNFTISVTTEILPVSMTKTSVDCTMYICGDSTECSNLLLQYGSFCTQLNRALTGIAVEQDKNTQEVFAQVKQIYKTPPIKDFGGFNFSQILPDPSKPSKRSFIEDLLFNKVTLADAGFTKQYGDCLGDIAARDLICAQKFNGLTVLPPLLTDEMIAQYTSALLAGTITSGWTFGAGAALQIPFAMQMAYRFNGIGVTQCVLYENQKLIANQFNSAIGKIQDSLSSTASALGKLQDVVNQNAQALNTLVKQLSSNFGAISSVLNDILSRLDKVEAEVQIDRLITGRLQSLQTYVTQQLIRAAEIRASANLAATKMSECVLGQSKRVDFCGKGYHLMSFPQSAPHGVVFLHVTYVPAQEKNFTTAPAICHDGKAHFPREGVFVSNGTHWFVTQRNFYEPQIITTDNTFVCGNCDVVIGIVNNTVYDPLQPELDSGGGGSDIIKLLNEQVNKEMQSSNLYMSMSSWCYTHSLDGAGLFLFDHAAEEYEHAKKLIIFLNENNVPVQLTSISAPEHKFEGLTQIFQKAYEHEQHISESINNIVDHAIKSKDHATFNFLQWYVAEQHEEEVLFKDILDKIELIGNENHGLYLADQYVKGIAKSRKS

SEQ ID NO: 13974 - protein, 1315 aa, Artificial Sequence
  SARS-CoV-2/Australia/NSW56/2020__EPI_ISL_417408 spike protein (1-1147)(N914C_S1123C) Ferritin construct
MFVFLVLLPLVSSQCVNLTTRTQLPPAYTNSFTRGVYYPDKVFRSSVLHSTQDLFLPFFSNVTWFHAIHVSGTNGTKRFDNPVLPFNDGVYFASTEKSNIIRGWIFGTTLDSKTQSLLIVNNATNVVIKVCEFQFCNDPFLGVYYHKNNKSWMESEFRVYSSANNCTFEYVSQPFLMDLEGKQGNFKNLREFVFKNIDGYFKIYSKHTPINLVRDLPQGFSALEPLVDLPIGINITRFQTLLALHRSYLTPGDSSSGWTAGAAAYYVGYLQPRTFLLKYNENGTITDAVDCALDPLSETKCTLKSFTVEKGIYQTSNFRVQPTESIVRFPNITNLCPFGEVFNATRFASVYAWNRKRISNCVADYSVLYNSASFSTFKCYGVSPTKLNDLCFTNVYADSFVIRGDEVRQIAPGQTGKIADYNYKLPDDFTGCVIAWNSNNLDSKVGGNYNYLYRLFRKSNLKPFERDISTEIYQAGSTPCNGVEGFNCYFPLQSYGFQPTNGVGYQPYRVVVLSFELLHAPATVCGPKKSTNLVKNKCVNFNFNGLTGTGVLTESNKKFLPFQQFGRDIADTTDAVRDPQTLEILDITPCSFGGVSVITPGTNTSNQVAVLYQDVNCTEVPVAIHADQLTPTWRVYSTGSNVFQTRAGCLIGAEHVNNSYECDIPIGAGICASYQTQTNSPRRARSVASQSIIAYTMSLGAENSVAYSNNSIAIPTNFTISVTTEILPVSMTKTSVDCTMYICGDSTECSNLLLQYGSFCTQLNRALTGIAVEQDKNTQEVFAQVKQIYKTPPIKDFGGFNFSQILPDSSKPSKRSFIEDLLFNKVTLADAGFIKQYGDCLGDIAARDLICAQKFNGLTVLPPLLTDEMIAQYTSALLAGTITSGWTFGAGAALQIPFAMQMAYRFNGIGVTQCVLYENQKLIANQFNSAIGKIQDSLSSTASALGKLQDVVNQNAQALNTLVKQLSSNFGAISSVLNDILSRLDKVEAEVQIDRLITGRLQSLQTYVTQQLIRAAEIRASANLAATKMSECVLGQSKRVDFCGKGYHLMSFPQSAPHGVVFLHVTYVPAQEKNFTTAPAICHDGKAHFPREGVFVSNGTHWFVTQRNFYEPQIITTDNTFVCGNCDVVIGIVNNTVYDPLQPELDSGGGGSDIIKLLNEQVNKEMQSSNLYMSMSSWCYTHSLDGAGLFLFDHAAEEYEHAKKLIIFLNENNVPVQLTSISAPEHKFEGLTQIFQKAYEHEQHISESINNIVDHAIKSKDHATFNFLQWYVAEQHEEEVLFKDILDKIELIGNENHGLYLADQYVKGIAKSRKS

SEQ ID NO: 13975 - protein, 1315 aa, Artificial Sequence
  SARS-CoV-2/Iceland/280/2020__EPI_ISL_417608 spike protein (1-1147)(N914C_S1123C) Ferritin construct
MFVFLVLLPLVSSQCVNLTTRTQLPPAYTNSFTRGVYYPDKVFRSSVLHSTQDLFLPFFSNVTWFHAIHVSGTNGTKRFDNPVLPFNDGVYFASTEKSNIIRGWIFGTTLDSKTQSLLIVNNATNVVIKVCEFQFCNDPFLGVYYHKNNKSWMESEFRVYSSANNCTFEYVSQPFLMDLEGKQGNFKNLREFVFKNIDGYFKIYSKHTPINLVRDLPQGFSALEPLVDLPIGINITRFQTLLALHRSYLTPGDSSSGWTAGAAAYYVGYLQPRTFLLKYNENGTITDAVDCALDPLSETKCTLKSFTVEKGIYQTSNFRVQPTESIVRFPNITNLCPFGEVFNATRFASVYAWNRKRISNCVADYSVLYNSASFSTFKCYGVSPTKLNDLCFTNVYADSFVIRGDEVRQIAPGQTGKIADYNYKLPDDFTGCVIAWNSNNLDSKVGGNYNYLYRLFRKSNLKPFERDISTEIYQAGSTPCNGVEGFNCYFPLQSYGFQPTNGVGYQPYRVVVLSFELLHAPATVCGPKKSTNLVKNKCVNFNFNGLTGTGVLTESNKKFLPFQQFGRDIADTTDAVRDPQTLEILDITPCSFGGVSVITPGTNTSNQVAVLYQGVNCTEVPVAIHADQLTPTWRVYSTGSNVFQTRAGCLIGAEHVNNSYECDIPIGAGICASYHTQTNSPRRARSVASQSIIAYTMSLGAENSVAYSNNSIAIPTNFTISVTTEILPVSMTKTSVDCTMYICGDSTECSNLLLQYGSFCTQLNRALTGIAVEQDKNTQEVFAQVKQIYKTPPIKDFGGFNFSQILPDPSKPSKRSFIEDLLFNKVTLADAGFIKQYGDCLGDIAARDLICAQKFNGLTVLPPLLTDEMIAQYTSALLAGTITSGWTFGAGAALQIPFAMQMAYRFNGIGVTQCVLYENQKLIANQFNSAIGKIQDSLSSTASALGKLQDVVNQNAQALNTLVKQLSSNFGAISSVLNDILSRLDKVEAEVQIDRLITGRLQSLQTYVTQQLIRAAEIRASANLAATKMSECVLGQSKRVDFCGKGYHLMSFPQSAPHGVVFLHVTYVPAQEKNFTTAPAICHDGKAHFPREGVFVSNGTHWFVTQRNFYEPQIITTDNTFVCGNCDVVIGIVNNTVYDPLQPELDSGGGGSDIIKLLNEQVNKEMQSSNLYMSMSSWCYTHSLDGAGLFLFDHAAEEYEHAKKLIIFLNENNVPVQLTSISAPEHKFEGLTQIFQKAYEHEQHISESINNIVDHAIKSKDHATFNFLQWYVAEQHEEEVLFKDILDKIELIGNENHGLYLADQYVKGIAKSRKS

SEQ ID NO: 13976 - protein, 1315 aa, Artificial Sequence; identical to SEQ ID NO: 13931
  SARS-CoV-2/Iceland/247/2020__EPI_ISL_417575 spike protein (1-1147)(N914C_S1123C) Ferritin construct

SEQ ID NO: 13977 - protein, 1315 aa, Artificial Sequence
  SARS-CoV-2/Iceland/238/2020__EPI_ISL_417566 spike protein (1-1147)(N914C_S1123C) Ferritin construct
MFVFLVLLPLVSSQCVNLTTRTQLPPAYTNSFTRGVYYPDKVFRSSVLHSTQDLFLPFFSNVTWFHAIHVSGTNGTKRFDNPVLPFNDGVYFASTEKSNIIRGWIFGTTLDSKTQSLLIVNNATNVVIKVCEFQFCNDPFLGVYYHKNNKSWMESEFRVYSSANNCTFEYVSQPFLMDLEGKQGNFKNLREFVFKNIDGYFKIYSKHTPINLVRDLPQGFSALEPLVDLPIGINITRFQTLLALHRSYLTPGDSSSGWTAGAAAYYVGYLQPRTFLLKYNENGTITDAVDCALDPLSETKCTLKSFTVEKGIYQTSNFRVQPTESIVRFPNITNLCPFGEVFNATRFASVYAWNRKRISNCVADYSVLYNSASFSTFKCYGVSPTKLNDLCFTNVYADSFVIRGDEVRQIAPGQTGKIADYNYKLPDDFTGCVIAWNSNNLDSKVGGNYNYLYRLFRKSNLKPFERDISTEIYQAGSTPCNGVEGFNCYFPLQSYGFQPTNGVGYQPYRVVVLSFELLHAPATVCGPKKSTNLVKNKCVNFNFNGLTGTGVLTESNKKFLPFQQFGRDIADTTDAVRDPQTLEILDITPCSFGGVSVITPGTNTSNQVAVLYQGVNCTEVPVAIHADQLTPTWRVYSTGSNVFQTRAGCLIGAEHVNNSYECDIPIGAGICASYQTQTNSPRRARSVASQSIIAYTMSLGAENSVAYSNNSIAIPTNFTISVTTEILPVSMTKTSVDCTMYICGDSTECSNLLLQYGSFCTQLNRALTGIAVEQDKNTQEVFAQVKQIYKTPPIKDFGGFNFSQILPDPSKPSKRSFIEDLLFNKVTLADVGFIKQYGDCLGDIAARDLICAQKFNGLTVLPPLLTDEMIAQYTSALLAGTITSGWTFGAGAALQIPFAMQMAYRFNGIGVTQCVLYENQKLIANQFNSAIGKIQDSLSSTASALGKLQDVVNQNAQALNTLVKQLSSNFGAISSVLNDILSRLDKVEAEVQIDRLITGRLQSLQTYVTQQLIRAAEIRASANLAATKMSECVLGQSKRVDFCGKGYHLMSFPQSAPHGVVFLHVTYVPAQEKNFTTAPAICHDGKAHFPREGVFVSNGTHWFVTQRNFYEPQIITTDNTFVCGNCDVVIGIVNNTVYDPLQPELDSGGGGSDIIKLLNEQVNKEMQSSNLYMSMSSWCYTHSLDGAGLFLFDHAAEEYEHAKKLIIFLNENNVPVQLTSISAPEHKFEGLTQIFQKAYEHEQHISESINNIVDHAIKSKDHATFNFLQWYVAEQHEEEVLFKDILDKIELIGNENHGLYLADQYVKGIAKSRKS

SEQ ID NO: 13978 - protein, 1315 aa, Artificial Sequence
  SARS-CoV-2/Greece/16/2020__EPI_ISL_418265 spike protein (1-1147)(N914C_S1123C) Ferritin construct
MFVFLVLLPLVSSQCVNLTTRTQLPPAYTNSFTRGVYYPDKVFRSSVLHSTQDLFLPFFSNVTWFHAIHVSGTNGTKRFDNPVLPFNDGVYFASTEKSNIIRGWIFGTTLDSKTQSLLIVNNATNVVIKVCEFQFCNDPFLGVYYHKNNKSWMESEFRVYSSANNCTFEYVSQPFLMDLEGKQGNFKNLREFVFKNVDGYFKIYSKHTPINLVRDLPQGFSALEPLVDLPIGINITRFQTLLALHRSYLTPGDSSSGWTAGAAAYYVGYLQPRTFLLKYNENGTITDAVDCALDPLSETKCTLKSFTVEKGIYQTSNFRVQPTESIVRFPNITNLCPFGEVFNATRFASVYAWNRKRISNCVADYSVLYNSASFSTFKCYGVSPTKLNDLCFTNVYADSFVIRGDEVRQIAPGQTGKIADYNYKLPDDFTGCVIAWNSNNLDSKVGGNYNYLYRLFRKSNLKPFERDISTEIYQAGSTPCNGVEGFNCYFPLQSYGFQPTNGVGYQPYRVVVLSFELLHAPATVCGPKKSTNLVKNKCVNFNFNGLTGTGVLTESNKKFLPFQQFGRDIADTTDAVRDPQTLEILDITPCSFGGVSVITPGTNTSNQVAVLYQDVNCTEVPVAIHADQLTPTWRVYSTGSNVFQTRAGCLIGAEHVNNSYECDIPIGAGICASYQTQTNSPRRARSVASQSIIAYTMSLGAENSVAYSNNSIAIPTNFTISVTTEILPVSMTKTSVDCTMYICGDSTECSNLLLQYGSFCTQLNRALTGIAVEQDKNTQEVFAQVKQIYKTPPIKDFGGFNFSQILPDPSKPSKRSFIEDLLFNKVTLADAGFIKQYGDCLGDIAARDLICAQKFNGLTVLPPLLTDEMIAQYTSALLAGTITSGWTFGAGAALQIPFAMQMAYRFNGIGVTQCVLYENQKLIANQFNSAIGKIQDSLSSTASALGKLQDVVNQNAQALNTLVKQLSSNFGAISSVLNDILSRLDKVEAEVQIDRLITGRLQSLQTYVTQQLIRAAEIRASANLAATKMSECVLGQSKRVDFCGKGYHLMSFPQSAPHGVVFLHVTYVPAQEKNFTTAPAICHDGKAHFPREGVFVSNGTHWFVTQRNFYEPQIITTDNTFVCGNCDVVIGIVNNTVYDPLQPELDSGGGGSDIIKLLNEQVNKEMQSSNLYMSMSSWCYTHSLDGAGLFLFDHAAEEYEHAKKLIIFLNENNVPVQLTSISAPEHKFEGLTQIFQKAYEHEQHISESINNIVDHAIKSKDHATFNFLQWYVAEQHEEEVLFKDILDKIELIGNENHGLYLADQYVKGIAKSRKS

SEQ ID NO: 13979 - protein, 1315 aa, Artificial Sequence
  SARS-CoV-2/Iceland/319/2020__EPI_ISL_417648 spike protein (1-1147)(N914C_S1123C) Ferritin construct
MFVFLVLLPLVSSQCVNLTTRTQLPPAYTNSFTRGVYYPDKVFRSSVLHSTQDLFLPFFSNVTWFHAIHVSGTNGTKRFDNPVLPFNDGVYFASTEKSNIIRGWIFGTTLDSKTQSLLIVNNATNVVIKVCEFQFCNDPFLGVYYHKNNKSWMESEFRVYSSANNCTFEYVSQPFLIDLEGKQGNFKNLREFVFKNIDGYFKIYSKHTPINLVRDLPQGFSALEPLVDLPIGINITRFQTLLALHRSYLTPGDSSSGWTAGAAAYYVGYLQPRTFLLKYNENGTITDAVDCALDPLSETKCTLKSFTVEKGIYQTSNFRVQPTESIVRFPNITNLCPFGEVFNATRFASVYAWNRKRISNCVADYSVLYNSASFSTFKCYGVSPTKLNDLCFTNVYADSFVIRGDEVRQIAPGQTGKIADYNYKLPDDFTGCVIAWNSNNLDSKVGGNYNYLYRLFRKSNLKPFERDISTEIYQAGSTPCNGVEGFNCYFPLQSYGFQPTNGVGYQPYRVVVLSFELLHAPATVCGPKKSTNLVKNKCVNFNFNGLTGTGVLTESNKKFLPFQQFGRDIADTTDAVRDPQTLEILDITPCSFGGVSVITPGTNTSNQVAVLYQGVNCTEVPVAIHADQLTPTWRVYSTGSNVFQTRAGCLIGAEHVNNSYECDIPIGAGICASYQTQTNSPRRARSVASQSIIAYTMSLGAENSVAYSNNSIAIPTNFTISVTTEILPVSMTKTSVDCTMYICGDSTECSNLLLQYGSFCTQLNRALTGIAVEQDKNTQEVFAQVKQIYKTPPIKDFGGFNFSQILPDPSKPSKRSFIEDLLFNKVTLADAGFIKQYGDCLGDIAARDLICAQKFNGLTVLPPLLTDEMIAQYTSALLAGTITSGWTFGAGAALQIPFAMQMAYRFNGIGVTQCVLYENQKLIANQFNSAIGKIQDSLSSTASALGKLQDVVNQNAQALNTLVKQLSSNFGAISSVLNDILSRLDKVEAEVQIDRLITGRLQSLQTYVTQQLIRAAEIRASANLAATKMSECVLGQSKRVDFCGKGYHLMSFPQSAPHGVVFLHVTYVPAQEKNFTTAPAICHDGKAHFPREGVFVSNGTHWFVTQRNFYEPQIITTDNTFVCGNCDVVIGIVNNTVYDPLQPELDSGGGGSDIIKLLNEQVNKEMQSSNLYMSMSSWCYTHSLDGAGLFLFDHAAEEYEHAKKLIIFLNENNVPVQLTSISAPEHKFEGLTQIFQKAYEHEQHISESINNIVDHAIKSKDHATFNFLQWYVAEQHEEEVLFKDILDKIELIGNENHGLYLADQYVKGIAKSRKS

SEQ ID NO: 13980 - protein, 1315 aa, Artificial Sequence
  SARS-CoV-2/Congo/94/2020__EPI_ISL_417947 spike protein (1-1147)(N914C_S1123C) Ferritin construct
MFVFLVLLPLVSSQCVNLTTRTQLPPAYTNSFTRGVYYPDKVFRSSVLHSTQDLFLPFFSNVTWFHAIHVSGTNGTKRFDNPVLPFNDGVYFASTEKSNIIRGWIFGTTLDSKTQSLLIVNNATNVVIKVCEFQFCNDPFLGVYYHKNNKSWMESEFRVYSSANNCTFEYVSQPFLMDLEGKQGNFKNLREFVFKNIDGYFKIYSKHTPINLVRDLPQGFSALEPLVDLPIGINITRFQTLLALHRSYLTPGDSSSGWTAGAAAYYVGYLQPRTFLLKYNENGTITDAVDCALDPLSETKCTLKSFTVEKGIYQTSNFRVQPTESIVRFPNITNLCPFGEVFNATRFASVYAWNRKRISNCVADYSVLYNSASFSTFKCYGVSPTKLNDLCFTNVYADSFVIRGDEVRQIAPGQTGKIADYNYKLPDDFTGCVIAWNSNNLDSKVGGNYNYLYRLFRKSNLKPFERDISTEIYQAGSTPCNGVEGFNCYFPLQSYGFQPTNGVGYQPYRVVVLSFELLHAPATVCGPKKSTNLVKNKCVNFNFNGLTGTGVLTESNKKFLPFQQFGRDIADTTDAVRDPQTLEILDITPCSFGGVSVITPGTNTSNQVAVLYQGVNCTEVPVAIHADQLTPTWRVYSTGSNVFQTRAGCLIGAEHVNNSYECDIPIGAGICASYQTQTNSPRRARSVASQSIIAYTMSLGAENSVAYSNNSIAIPTNFTISVTTEILPVSMTKTSVDCTMYICGDSTECSNLLLQYGSFCTQLNRALTGIAVEQDKNTQEVFAQVKQIYKTPPIKDFGGFNFSQILPDPSKPSKRSFIEDILFNKVTLADAGFIKQYGDCLGDIAARDLICAQKFNGLTVLPPLLTDEMIAQYTSALLAGTITSGWTFGAGAALQIPFAMQMAYRFNGIGVTQCVLYENQKLIANQFNSAIGKIQDSLSSTASALGKLQDVVNQNAQALNTLVKQLSSNFGAISSVLNDILSRLDKVEAEVQIDRLITGRLQSLQTYVTQQLIRAAEIRASANLAATKMSECVLGQSKRVDFCGKGYHLMSFPQSAPHGVVFLHVTYVPAQEKNFTTAPAICHDGKAHFPREGVFVSNGTHWFVTQRNFYEPQIITTDNTFVCGNCDVVIGIVNNTVYDPLQPELDSGGGGSDIIKLLNEQVNKEMQSSNLYMSMSSWCYTHSLDGAGLFLFDHAAEEYEHAKKLIIFLNENNVPVQLTSISAPEHKFEGLTQIFQKAYEHEQHISESINNIVDHAIKSKDHATFNFLQWYVAEQHEEEVLFKDILDKIELIGNENHGLYLADQYVKGIAKSRKS

SEQ ID NO: 13981 - protein, 1315 aa, Artificial Sequence
  SARS-CoV-2/Congo/158/2020__EPI_ISL_417950 spike protein (1-1147)(N914C_S1123C) Ferritin construct
MFVFLVLLPLVSSQCVNLTTRTQLPPAYTNSFTRGVYYPDKVFRSSVLHSTQDLFLPFFSNVTWFHAIHVSGTNGTKRFDNPVLPFNDGVYFASTEKSNIIRGWIFGTTLDSKTQSLLIVNNATNVVIKVCEFQFCNDPFLGVYYHKNNKSWMESEFRVYSSANNCTFEYVSQPFLMDLEGKQGNFKNLREFVFKNIDGYFKIYSKHTPINLVRDLPQGFSALEPLVDLPIGINITRFQTLLALHRSYLTPGDSSSGWTAGAAAYYVGYLQPRTFLLKYNENGTITDAVDCALDPLSETKCTLKSFTVEKGIYQTSNFRVQPTESIVRFPNITNLCPFGEVFNATRFASVYAWNRKRISNCVADYSVLYNSASFSTFKCYGVSPTKLNDLCFTNVYADSFVIRGDEVRQIAPGQTGKIADYNYKLPDDFTGCVIAWNSNNLDSKVGGNYNYLYRLFRKSNLKPFERDISTEIYQAGSTPCNGVEGFNCYFPLQSYGFQPTNGVGYQPYRVVVLSFELLHAPATVCGPKKSTNLVKNKCVNFNFNGLTGTGVLTESNKKFLPFQQFGRDIADTTDAVRDPQTLEILDITPCSFGGVSVITPGTNTSNQVAVLYQDVNCTEVPVAIHADQLTPTWRVYSTGSNVFQTRAGCLIGAEHVNNSYECDIPIGAGICASYQTQTNSPRRARSVASQSIIAYTMSLGAENSVAYSNNSIAIPTNFTISVTTEILPVSMTKTSVDCTMYICGDSTECSNLLLQYGSFCTQLNRALTGIAVEQDKNTQEVFAQVKQIYKTPPIKDFGGFNFSQILPDPSKPSKRSFIEDLLFNKVTLADAGFIKQYGDCLGDIAARDLICAQKFNGLTVLPPLLTDEMIAQYTSALLAGTITSGWTFGAGAALQIPFAMQMAYRFNGIGVTQCVLYENQKLIANQFNSAIGKIQDSLSSTASALGKLQDVVNQNAQALNTLVKQLSSNFGAISSVLNDILSRLDKVEAEVQIDRLITGRLQSLQTYVTQQLIRAAEIRASANLAATKMSECVLGQSKRVDFCGKGYHLMSFPQSAPHGVVFLHVTYVPAQEKNFTTAPAICHDGKAHFPREGVFVSNGTHWFVTQRNFYEPQIITTDNTFLCGNCDVVIGIVNNTVYDPLQPELDSGGGGSDIIKLLNEQVNKEMQSSNLYMSMSSWCYTHSLDGAGLFLFDHAAEEYEHAKKLIIFLNENNVPVQLTSISAPEHKFEGLTQIFQKAYEHEQHISESINNIVDHAIKSKDHATFNFLQWYVAEQHEEEVLFKDILDKIELIGNENHGLYLADQYVKGIAKSRKS

SEQ ID NO: 13982 - protein, 1315 aa, Artificial Sequence
  SARS-CoV-2/USA/UT-00034/2020__EPI_ISL_417977 spike protein (1-1147)(N914C_S1123C) Ferritin construct
MFVFLVLLPLVSSQCVNLTTRTQLPPAYTNSFTRGVYYPDKVFRSSVLHSTQDLFLPFFSNVTWFHAIHVSGTNGTKRFDNPVLPFNDGVYFASTEKSNIIRGWIFGTTLDSKTQSLLIVNNATNVVIKVCEFQFCNDPFLGVYYYKNNKSWMESEFRVYSSANNCTFEYVSQPFLMDLEGKQGNFKNLREFVFKNIDGYFKIYSKHTPINLVRDLPQGFSALEPLVDLPIGINITRFQTLLALHRSYLTPGDSSSGWTAGAAAYYVGYLQPRTFLLKYNENGTITDAVDCALDPLSETKCTLKSFTVEKGIYQTSNFRVQPTESIVRFPNITNLCPFGEVFNATRFASVYAWNRKRISNCVADYSVLYNSASFSTFKCYGVSPTKLNDLCFTNVYADSFVIRGDEVRQIAPGQTGKIADYNYKLPDDFTGCVIAWNSNNLDSKVGGNYNYLYRLFRKSNLKPFERDISTEIYQAGSTPCNGVEGFNCYFPLQSYGFQPTNGVGYQPYRVVVLSFELLHAPATVCGPKKSTNLVKNKCVNFNFNGLTGTGVLTESNKKFLPFQQFGRDIADTTDAVRDPQTLEILDITPCSFGGVSVITPGTNTSNQVAVLYQGVNCTEVPVAIHADQLTPTWRVYSTGSNVFQTRAGCLIGAEHVNNSYECDIPIGAGICASYQTQTNSPRRARSVASQSIIAYTMSLGAENSVAYSNNSIAIPTNFTISVTTEILPVSMTKTSVDCTMYICGDSTECSNLLLQYGSFCTQLNRALTGIAVEQDKNTQEVFAQVKQIYKTPPIKDFGGFNFSQILPDPSKPSKRSFIEDLLFNKVTLADAGFIKQYGDCLGDIAARDLICAQKFNGLTVLPPLLTDEMIAQYTSALLAGTITSGWTFGAGAALQIPFAMQMAYRFNGIGVTQCVLYENQKLIANQFNSAIGKIQDSLSSTASALGKLQDVVNQNAQALNTLVKQLSSNFGAISSVLNDILSRLDKVEAEVQIDRLITGRLQSLQTYVTQQLIRAAEIRASANLAATKMSECVLGQSKRVDFCGKGYHLMSFPQSAPHGVVFLHVTYVPAQEKNFTTAPAICHDGKAHFPREGVFVSNGTHWFVTQRNFYEPQIITTDNTFVCGNCDVVIGIVNNTVYDPLQPELDSGGGGSDIIKLLNEQVNKEMQSSNLYMSMSSWCYTHSLDGAGLFLFDHAAEEYEHAKKLIIFLNENNVPVQLTSISAPEHKFEGLTQIFQKAYEHEQHISESINNIVDHAIKSKDHATFNFLQWYVAEQHEEEVLFKDILDKIELIGNENHGLYLADQYVKGIAKSRKS

SEQ ID NO: 13983 - protein, 1315 aa, Artificial Sequence
  SARS-CoV-2/USA/UT-00033/2020__EPI_ISL_417976 spike protein (1-1147)(N914C_S1123C) Ferritin construct
MFVFLVLLPLVSSQCVNLTTRTQLPPAYTNSFTRGVYYPDKVFRSSVLHSTQDLFLPFFSNVTWFHAIHVSGTNGTKRFDNPVLPFNDGVYFASTEKSNIIRGWIFGTTLDSKTQSLLIVNNATNVVIKVCEFQFCNDPFLGVYYHKNNKSWMESEFRVYSSANNCTFEYVSQPFLMDLEGKQGNFKNLREFVFKNIDGYFKIYSKHTPINLVRDLPQGFSALEPLVDLPIGINITRFQTLLALHRSYLTPGDSSSGLTAGAAAYYVGYLQPRTFLLKYNENGTITDAVDCALDPLSETKCTLKSFTVEKGIYQTSNFRVQPTESIVRFPNITNLCPFGEVFNATRFASVYAWNRKRISNCVADYSVLYNSASFSTFKCYGVSPTKLNDLCFTNVYADSFVIRGDEVRQIAPGQTGKIADYNYKLPDDFTGCVIAWNSNNLDSKVGGNYNYLYRLFRKSNLKPFERDISTEIYQAGSTPCNGVEGFNCYFPLQSYGFQPTNGVGYQPYRVVVLSFELLHAPATVCGPKKSTNLVKNKCVNFNFNGLTGTGVLTESNKKFLPFQQFGRDIADTTDAVRDPQTLEILDITPCSFGGVSVITPGTNTSNQVAVLYQGVNCTEVPVAIHADQLTPTWRVYSTGSNVFQTRAGCLIGAEHVNNSYECDIPIGAGICASYQTQTNSPRRARSVASQSIIAYTMSLGAENSVAYSNNSIAIPTNFTISVTTEILPVSMTKTSVDCTMYICGDSTECSNLLLQYGSFCTQLNRALTGIAVEQDKNTQEVFAQVKQIYKTPPIKDFGGFNFSQILPDPSKPSKRSFIEDLLFNKVTLADAGFIKQYGDCLGDIAARDLICAQKFNGLTVLPPLLTDEMIAQYTSALLAGTITSGWTFGAGAALQIPFAMQMAYRFNGIGVTQCVLYENQKLIANQFNSAIGKIQDSLSSTASALGKLQDVVNQNAQALNTLVKQLSSNFGAISSVLNDILSRLDKVEAEVQIDRLITGRLQSLQTYVTQQLIRAAEIRASANLAATKMSECVLGQSKRVDFCGKGYHLMSFPQSAPHGVVFLHVTYVPAQEKNFTTAPAICHDGKAHFPREGVFVSNGTHWFVTQRNFYEPQIITTDNTFVCGNCDVVIGIVNNTVYDPLQPELDSGGGGSDIIKLLNEQVNKEMQSSNLYMSMSSWCYTHSLDGAGLFLFDHAAEEYEHAKKLIIFLNENNVPVQLTSISAPEHKFEGLTQIFQKAYEHEQHISESINNIVDHAIKSKDHATFNFLQWYVAEQHEEEVLFKDILDKIELIGNENHGLYLADQYVKGIAKSRKS

SEQ ID NO: 13984 - protein, 1315 aa, Artificial Sequence
  SARS-CoV-2/USA/WI-13/2020__EPI_ISL_417516 spike protein (1-1147)(N914C_S1123C) Ferritin construct
MFVFLVLLPLVSSQCVNLTTRTQLPPAYTNSFTRGVYYPDKVFRSSVLHSTQDLFLPFFSNVTWFHAIHVSGTNGTKRFDNPVLPFNDGVYFASTEKSNIIRGWIFGTTLDSKTQSLLIVNNATNVVIKVCEFQFCNDPFLGVYYHKNNKSWMESEFRVYSSANNCTFEYVSQPFLMDLEGKQGNFKNLREFVFKNIDGYFKIYSKHTPINLVRDLPQGFSALEPLVDLPIGINITRFQTLLALHRSYLTPGDSSSGWTAGAAAYYVGYLQPRTFLLKYNENGTITDAVDCALDPLSETKCTLKSFTVEKGIYQTSNFRVLPTESIVRFPNITNLCPFGEVFNATRFASVYAWNRKRISNCVADYSVLYNSASFSTFKCYGVSPTKLNDLCFTNVYADSFVIRGDEVRQIAPGQTGKIADYNYKLPDDFTGCVIAWNSNNLDSKVGGNYNYLYRLFRKSNLKPFERDISTEIYQAGSTPCNGVEGFNCYFPLQSYGFQPTNGVGYQPYRVVVLSFELLHAPATVCGPKKSTNLVKNKCVNFNFNGLTGTGVLTESNKKFLPFQQFGRDIADTTDAVRDPQTLEILDITPCSFGGVSVITPGTNTSNQVAVLYQGVNCTEVPVAIHADQLTPTWRVYSTGSNVFQTRAGCLIGAEHVNNSYECDIPIGAGICASYQTQTNSPRRARSVASQSIIAYTMSLGAENSVAYSNNSIAIPTNFTISVTTEILPVSMTKTSVDCTMYICGDSTECSNLLLQYGSFCTQLNRALTGIAVEQDKNTQEVFAQVKQIYKTPPIKDFGGFNFSQILPDPSKPSKRSFIEDLLFNKVTLADAGFIKQYGDCLGDIAARDLICAQKFNGLTVLPPLLTDEMIAQYTSALLAGTITSGWTFGAGAALQIPFAMQMAYRFNGIGVTQCVLYENQKLIANQFNSAIGKIQDSLSSTASALGKLQDVVNQNAQALNTLVKQLSSNFGAISSVLNDILSRLDKVEAEVQIDRLITGRLQSLQTYVTQQLIRAAEIRASANLAATKMSECVLGQSKRVDFCGKGYHLMSFPQSAPHGVVFLHVTYVPAQEKNFTTAPAICHDGKAHFPREGVFVSNGTHWFVTQRNFYEPQIITTDNTFVCGNCDVVIGIVNNTVYDPLQPELDSGGGGSDIIKLLNEQVNKEMQSSNLYMSMSSWCYTHSLDGAGLFLFDHAAEEYEHAKKLIIFLNENNVPVQLTSISAPEHKFEGLTQIFQKAYEHEQHISESINNIVDHAIKSKDHATFNFLQWYVAEQHEEEVLFKDILDKIELIGNENHGLYLADQYVKGIAKSRKS

SEQ ID NO: 13985 - protein, 1314 aa, Artificial Sequence
  SARS-CoV-2/India/1-27/2020__EPI_ISL_413522 spike protein (1-1146)(N913C_S1122C) Ferritin construct
MFVFLVLLPLVSSQCVNLTTRTQLPPAYTNSFTRGVYYPDKVFRSSVLHSTQDLFLPFFSNVTWFHAIHVSGTNGTKRFDNPVLPFNDGVYFASTEKSNIIRGWIFGTTLDSKTQSLLIVNNATNVVIKVCEFQFCNDPFLGVYHKNNKSWMESEFRVYSSANNCTFEYVSQPFLMDLEGKQGNFKNLREFVFKNIDGYFKIYSKHTPINLVRDLPQGFSALEPLVDLPIGINITRFQTLLALHRSYLTPGDSSSGWTAGAAAYYVGYLQPRTFLLKYNENGTITDAVDCALDPLSETKCTLKSFTVEKGIYQTSNFRVQPTESIVRFPNITNLCPFGEVFNATRFASVYAWNRKRISNCVADYSVLYNSASFSTFKCYGVSPTKLNDLCFTNVYADSFVIRGDEVIQIAPGQTGKIADYNYKLPDDFTGCVIAWNSNNLDSKVGGNYNYLYRLFRKSNLKPFERDISTEIYQAGSTPCNGVEGFNCYFPLQSYGFQPTNGVGYQPYRVVVLSFELLHAPATVCGPKKSTNLVKNKCVNFNFNGLTGTGVLTESNKKFLPFQQFGRDIADTTDAVRDPQTLEILDITPCSFGGVSVITPGTNTSNQVAVLYQDVNCTEVPVAIHADQLTPTWRVYSTGSNVFQTRAGCLIGAEHVNNSYECDIPIGAGICASYQTQTNSPRRARSVASQSIIAYTMSLGAENSVAYSNNSIAIPTNFTISVTTEILPVSMTKTSVDCTMYICGDSTECSNLLLQYGSFCTQLNRALTGIAVEQDKNTQEVFAQVKQIYKTPPIKDFGGFNFSQILPDPSKPSKRSFIEDLLFNKVTLADAGFIKQYGDCLGDIAARDLICAQKFNGLTVLPPLLTDEMIAQYTSALLAGTITSGWTFGAGAALQIPFAMQMAYRFNGIGVTQCVLYENQKLIANQFNSAIGKIQDSLSSTASALGKLQDVVNQNAQALNTLVKQLSSNFGAISSVLNDILSRLDKVEAEVQIDRLITGRLQSLQTYVTQQLIRAAEIRASANLAATKMSECVLGQSKRVDFCGKGYHLMSFPQSAPHGVVFLHVTYVPAQEKNFTTAPAICHDGKAHFPREGVFVSNGTHWFVTQRNFYEPQIITTDNTFVCGNCDVVIGIVNNTVYDPLQPELDSGGGGSDIIKLLNEQVNKEMQSSNLYMSMSSWCYTHSLDGAGLFLFDHAAEEYEHAKKLIIFLNENNVPVQLTSISAPEHKFEGLTQIFQKAYEHEQHISESINNIVDHAIKSKDHATFNFLQWYVAEQHEEEVLFKDILDKIELIGNENHGLYLADQYVKGIAKSRKS

SEQ ID NO: 13986 - protein, 1309 aa, Artificial Sequence
  SARS-CoV-2/pangolin/Guangxi/P4L/2017__EPI_ISL_410538 spike protein (1-1141)(N908C_S1117C) Ferritin construct
MFVFLFVLPLVSSQCVNLTTRTGIPPGYTNSSTRGVYYPDKVFRSSILHLTQDLFLPFFSNVTWFNTINYQGGFKKFDNPVLPFNDGVYFASTEKSNIIRGWIFGTTLDARTQSLLIVNNATNVVIKVCEFQFCTDPFLGVYYHNNNKTWVENEFRVYSSANNCTFEYISQPFLMDLEGKQGNFKNLREFVFKNVDGYFKIYSKHTPIDLVRDLPRGFAALEPLVDLPIGINITRFQTLLALHRSYLTPGNLESGWTTGAAAYYVGYLQQRTFLLSYNQNGTITDAVDCSLDPLSETKCTLKSLTVEKGIYQTSNFRVQPTISIVRFPNITNLCPFGEVFNASKFASVYAWNRKRISNCVADYSVLYNSTSFSTFKCYGVSPTKLNDLCFTNVYADSFVVKGDEVRQIAPGQTGVIADYNYKLPDDFTGCVIAWNSVKQDALTGGNYGYLYRLFRKSKLKPFERDISTEIYQAGSTPCNGQVGLNCYYPLERYGFHPTTGVNYQPFRVVVLSFELLNGPATVCGPKLSTTLVKDKCVNFNFNGLTGTGVLTTSKKQFLPFQQFGRDISDTTDAVRDPQTLEILDITPCSFGGVSVITPGTNTSNQVAVLYQDVNCTEVPMAIHAEQLTPAWRVYSAGANVFQTRAGCLVGAEHVNNSYECDIPVGAGICASYHSMSSLRSVNQRSIIAYTMSLGAENSVAYSNNSIAIPTNFTISVTTEILPVSMTKTSVDCTMYICGDSIECSNLLLQYGSFCTQLNRALTGIAVEQDKNTQEVFAQVKQIYKTPPIKDFGGFNFSQILPDPSKPSKRSFIEDLLFNKVTLADAGFIKQYGDCLGDIAARDLICAQKFNGLTVLPPLLTDEMIAQYTSALLAGTITSGWTFGAGAALQIPFAMQMAYRFNGIGVTQCVLYENQKLIANQFNSAIGKIQDSLSSTASALGKLQDVVNQNAQALNTLVKQLSSNFGAISSVLNDILSRLDKVEAEVQIDRLITGRLQSLQTYVTQQLIRAAEIRASANLAATKMSECVLGQSKRVDFCGKGYHLMSFPQSAPHGVVFLHVTYVPAQEKNFTTAPAICHEGKAHFPREGVFVSNGTHWFITQRNFYEPQIITTDNTFVCGSCDVVIGIVNNTVYDPLQPELDSGGGGSDIIKLLNEQVNKEMQSSNLYMSMSSWCYTHSLDGAGLFLFDHAAEEYEHAKKLIIFLNENNVPVQLTSISAPEHKFEGLTQIFQKAYEHEQHISESINNIVDHAIKSKDHATFNFLQWYVAEQHEEEVLFKDILDKIELIGNENHGLYLADQYVKGIAKSRKS

SEQ ID NO: 13987 - protein, 1309 aa, Artificial Sequence
  SARS-CoV-2/pangolin/Guangxi/P5L/2017__EPI_ISL_410540 spike protein (1-1141)(N908C_S1117C) Ferritin construct
MFVFLFVLPLVSSQCVNLTTRTGIPPGYTNSSTRGVYYPDKVFRSSILHLTQDLFLPFFSNVTWFNTINYQGGFKKFDNPVLPFNDGVYFASTEKSNIIRGWIFGTTLDARTQSLLIVNNATNVVIKVCEFQFCTDPFLGVYYHNNNKTWVENEFRVYSSANNCTFEYISQPFLMDLEGKQGNFKNLREFVFKNVDGYFKIYSKHTPIDLVRDLPRGFAALEPLVDLPIGINITRFQTLLALHRSYLTPGKLESGWTTGAAAYYVGYLQQRTFLLSYNQNGTITDAVDCSLDPLSETKCTLKSLTVEKGIYQTSNFRVQPTISIVRFPNITNLCPFGEVFNASKFASVYAWNRKRISNCVADYSVLYNSTSFSTFKCYGVSPTKLNDLCFTNVYADSFVVKGDEVRQIAPGQTGVIADYNYKLPDDFTGCVIAWNSVKQDALTGGNYGYLYRLFRKSKLKPFERDISTEIYQAGSTPCNGQVGLNCYYPLERYGFHPTTGVNYQPFRVVVLSFELLNGPATVCGPKLSTTLVKDKCVNFNFNGLTGTGVLTTSKKQFLPFQQFGRDISDTTDAVRDPQTLEILDITPCSFGGVSVITPGTNTSNQVAVLYQDVNCTEVPMAIHAEQLTPAWRVYSAGANVFQTRAGCLVGAEHVNNSYECDIPVGAGICASYHSMSSFRSVNQRSIIAYTMSLGAENSVAYSNNSIAIPTNFTISVTTEILPVSMTKTSVDCTMYICGDSIECSNLLLQYGSFCTQLNRALTGIAVEQDKNTQEVFAQVKQIYKTPPIKDFGGFNFSQILPDPSKPSKRSFIEDLLFNKVTLADAGFIKQYGDCLGDIAARDLICAQKFNGLTVLPPLLTDEMIAQYTSALLAGTITSGWTFGAGAALQIPFAMQMAYRFNGIGVTQCVLYENQKLIANQFNSAIGKIQDSLSSTASALGKLQDVVNQNAQALNTLVKQLSSNFGAISSVLNDILSRLDKVEAEVQIDRLITGRLQSLQTYVTQQLIRAAEIRASANLAATKMSECVLGQSKRVDFCGKGYHLMSFPQSAPHGVVFLHVTYVPAQEKNFTTAPAICHEGKAHFPREGVFVSNGTHWFITQRNFYEPQIITTDNTFVCGSCDVVIGIVNNTVYDPLQPELDSGGGGSDIIKLLNEQVNKEMQSSNLYMSMSSWCYTHSLDGAGLFLFDHAAEEYEHAKKLIIFLNENNVPVQLTSISAPEHKFEGLTQIFQKAYEHEQHISESINNIVDHAIKSKDHATFNFLQWYVAEQHEEEVLFKDILDKIELIGNENHGLYLADQYVKGIAKSRKS

SEQ ID NO: 13988 - protein, 1309 aa, Artificial Sequence
  SARS-CoV-2/pangolin/Guangxi/P5E/2017__EPI_ISL_410541 spike protein (1-1141)(N908C_S1117C) Ferritin construct
MFVFLFVLPLVSSQCVNLTTRTGIPPGYTNSSTRGVYYPDKVFRSSILHLTQDLFLPFFSNVTWFNTITYQGGSKKFDNPVLPFNDGVYFASTEKSNIIRGWIFGTTLDARTQSLLIVNNATNVVIKVCEFQFCTDPFLGVYYHNNNKTWVENEFRVYSSANNCTFEYISQPFLMDLEGKQGNFKNLREFVFKNVDGYFKIYSKHTPIDLVRDLPRGFAALEPLVDLPIGINITRFQTLLALHRSYLTPGKLESGWTTGAAAYYVGYLQQRTFLLSYNQNGTITDAVDCSLDPLSETKCTLKSLTVEKGIYQTSNFRVQPTISIVRFPNITNLCPFGEVFNASKFASVYAWNRKRISNCVADYSVLYNSTSFSTFKCYGVSPTKLNDLCFTNVYADSFVVKGDEVRQIAPGQTGVIADYNYKLPDDFTGCVIAWNSVKQDALTGDNYGYLYRLFRKSKLKPFERDISTEIYQAGSTPCNGQVGLNCYYPLERYGFHPTTGVNYQPFRVVVLSFELLNGPATVCGPKLSTTLVKDKCVNFNFNGLTGTGVLTTSKKQFLPFQQFGRDISDTTDAVRDPQTLEILDITPCSFGGVSVITPGTNTSNQVAVLYQDVNCTEVPMAIHAEQLTPAWRVYSAGANVFQTRAGCLVGAEHVNNSYECDIPVGAGICASYHSMSSFRSVNQRSIIAYTMSLGAENSVAYSNNSIAIPTNFTISVTTEILPVSMTKTSVDCTMYICGDSIECSNLLLQYGSFCTQLNRALTGIAVEQDKNTQEVFAQVKQIYKTPPIKDFGGFNFSQILPDPSKPSKRSFIEDLLFNKVTLADAGFIKQYGDCLGDIAARDLICAQKFNGLTVLPPLLTDEMIAQYTSALLAGTITSGWTFGAGAALQIPFAMQMAYRFNGIGVTQCVLYENQKLIANQFNSAIGKIQDSLSSTASALGKLQDVVNQNAQALNTLVKQLSSNFGAISSVLNDILSRLDKVEAEVQIDRLITGRLQSLQTYVTQQLIRAAEIRASANLAATKMSECVLGQSKRVDFCGKGYHLMSFPQSAPHGVVFLHVTYVPAQEKNFTTAPAICHEGKAHFPREGVFVSNGTHWFITQRNFYEPQIITTDNTFVCGSCDVVIGIVNNTVYDPLQPELDSGGGGSDIIKLLNEQVNKEMQSSNLYMSMSSWCYTHSLDGAGLFLFDHAAEEYEHAKKLIIFLNENNVPVQLTSISAPEHKFEGLTQIFQKAYEHEQHISESINNIVDHAIKSKDHATFNFLQWYVAEQHEEEVLFKDILDKIELIGNENHGLYLADQYVKGIAKSRKS

SEQ ID NO: 13989 - protein, 1307 aa, Artificial Sequence
  SARS-CoV-2/pangolin/Guangxi/P1E/2017__EPI_ISL_410539 spike protein (1-1139)(N906C_S1115C) Ferritin construct
MFVFLFVLPLVSSQCVNLTTRTGIQPGYTNSSTRGVYYPDKVFRSSILHLTQDLFLPFFSNVTWFNTINYQGGFKKFDNPVLPFNDGVYFASTEKSNIIRGWIFGTTLDARTQSLLIVNNATNVVIKVCEFQFCTDPFLGVYYHNNNKTWVENEFRVYSSANNCTFEYISQPFLMDLEGKQGNFKNLREFVFKNVDGYFKIYSKHTPIDLVRDLPRGFAALEPLVDLPIGINITRFQTLLALHRSYLTPGKLESGWTTGAAAYYVGYLQQRTFLLSYNQNGTITDAVDCSLDPLSETKCTLKSLTVEKGIYQTSNFRVQPTISIVRFPNITNLCPFGEVFNASKFASVYAWNRKRISNCVADYSVLYNSTSFSTFKCYGVSPTKLNDLCFTNVYADSFVVKGDEVRQIAPGQTGVIADYNYKLPDDFTGCVIAWNSVKQDALTGGNYLYRLFRKSKLKPFERDISTEIYQAGSTPCNGQVGLNCYYPLERYGFHPTTGVNYQPFRVVVLSFELLNGPATVCGPKLSTTLVKDKCVNFNFNGLTGTGVLTTSKKQFLPFQQFGRDISDTTDAVRDPQTLEILDITPCSFGGVSVITPGTNTSNQVAVLYQDVNCTEVPMAIHAEQLTPAWRVYSAGANVFQTRAGCLVGAEHVNNSYECDIPVGAGICASYHSMSSLRSVNQRSIIAYTMSLGAENSVAYSNNSIAIPTNFTISVTTEILPVSMTKTSVDCTMYICGDSIECSNLLLQYGSFCTQLNRALTGIAVEQDKNTQEVFAQVKQIYKTPPIKDFGGFNFSQILPDPSKPSKRSFIEDLLFNKVTLADAGFIKQYGDCLGDIAARDLICAQKFNGLTVLPPLLTDEMIAQYTSALLAGTITSGWTFGAGAALQIPFAMQMAYRFNGIGVTQCVLYENQKLIANQFNSAIGKIQDSLSSTASALGKLQDVVNQNAQALNTLVKQLSSNFGAISSVLNDILSRLDKVEAEVQIDRLITGRLQSLQTYVTQQLIRAAEIRASANLAATKMSECVLGQSKRVDFCGKGYHLMSFPQSAPHGVVFLHVTYVPAQEKNFTTAPAICHEGKAHFPREGVFVSNGTHWFITQRNFYEPQIITTDNTFVCGSCDVVIGIVNNTVYDPLQPELDSGGGGSDIIKLLNEQVNKEMQSSNLYMSMSSWCYTHSLDGAGLFLFDHAAEEYEHAKKLIIFLNENNVPVQLTSISAPEHKFEGLTQIFQKAYEHEQHISESINNIVDHAIKSKDHATFNFLQWYVAEQHEEEVLFKDILDKIELIGNENHGLYLADQYVKGIAKSRKS

SEQ ID NO: 13990 - protein, 1177 aa, Artificial Sequence
  SARS-CoV-2/Wuhan/WIV05/2019__EPI_ISL_402128 spike protein (1-1147)(N914C_S1123C) Foldon construct
MFVFLVLLPLVSSQCVNLTTRTQLPPAYTNSFTRGVYYPDKVFRSSVLHSTQDLFLPFFSNVTWFHAIHVSGTNGTKRFDNPVLPFNDGVYFASTEKSNIIRGWIFGTTLDSKTQSLLIVNNATNVVIKVCEFQFCNDPFLGVYYHKNNKSWMESEFRVYSSANNCTFEYVSQPFLMDLEGKQGNFKNLREFVFKNIDGYFKIYSKHTPINLVRDLPQGFSALEPLVDLPIGINITRFQTLLALHRSYLTPGDSSSGWTAGAAAYYVGYLQPRTFLLKYNENGTITDAVDCALDPLSETKCTLKSFTVEKGIYQTSNFRVQPTESIVRFPNITNLCPFGEVFNATRFASVYAWNRKRISNCVADYSVLYNSASFSTFKCYGVSPTKLNDLCFTNVYADSFVIRGDEVRQIAPGQTGKIADYNYKLPDDFTGCVIAWNSNNLDSKVGGNYNYLYRLFRKSNLKPFERDISTEIYQAGSTPCNGVEGFNCYFPLQSYGFQPTNGVGYQPYRVVVLSFELLHAPATVCGPKKSTNLVKNKCVNFNFNGLTGTGVLTESNKKFLPFQQFGRDIADTTDAVRDPQTLEILDITPCSFGGVSVITPGTNTSNQVAVLYQDVNCTEVPVAIHADQLTPTWRVYSTGSNVFQTRAGCLIGAEHVNNSYECDIPIGAGICASYQTQTNSPRRARSVASQSIIAYTMSLGAENSVAYSNNSIAIPTNFTISVTTEILPVSMTKTSVDCTMYICGDSTECSNLLLQYGSFCTQLNRALTGIAVEQDKNTQEVFAQVKQIYKTPPIKDFGGFNFSQILPDPSKPSKRSFIEDLLFNKVTLADAGFIKQYGDCLGDIAARDLICAQKFNGLTVLPPLLTDEMIAQYTSALLAGTITSGWTFGAGAALQIPFAMQMAYRFNGIGVTQCVLYENQKLIANQFNSAIGKIQDSLSSTASALGKLQDVVNQNAQALNTLVKQLSSNFGAISSVLNDILSRLDKVEAEVQIDRLITGRLQSLQTYVTQQLIRAAEIRASANLAATKMSECVLGQSKRVDFCGKGYHLMSFPQSAPHGVVFLHVTYVPAQEKNFTTAPAICHDGKAHFPREGVFVSNGTHWFVTQRNFYEPQIITTDNTFVCGNCDVVIGIVNNTVYDPLQPELDSGGSGYIPEAPRDGQAYVRKDGEWVLLSTFL

SEQ ID NO: 13991 - protein, 1173 aa, Artificial Sequence
  SARS-CoV-2/bat/Yunnan/RaTG13/2013__EPI_ISL_402131 spike protein (1-1143)(N910C_S1119C) Foldon construct
MFVFLVLLPLVSSQCVNLTTRTQLPPAYTNSSTRGVYYPDKVFRSSVLHLTQDLFLPFFSNVTWFHAIHVSGTNGIKRFDNPVLPFNDGVYFASTEKSNIIRGWIFGTTLDSKTQSLLIVNNATNVVIKVCEFQFCNDPFLGVYYHKNNKSWMESEFRVYSSANNCTFEYVSQPFLMDLEGKQGNFKNLREFVFKNIDGYFKIYSKHTPINLVRDLPPGFSALEPLVDLPIGINITRFQTLLALHRSYLTPGDSSSGWTAGAAAYYVGYLQPRTFLLKYNENGTITDAVDCALDPLSETKCTLKSFTVEKGIYQTSNFRVQPTDSIVRFPNITNLCPFGEVFNATTFASVYAWNRKRISNCVADYSVLYNSTSFSTFKCYGVSPTKLNDLCFTNVYADSFVITGDEVRQIAPGQTGKIADYNYKLPDDFTGCVIAWNSKHIDAKEGGNFNYLYRLFRKANLKPFERDISTEIYQAGSKPCNGQTGLNCYYPLYRYGFYPTDGVGHQPYRVVVLSFELLNAPATVCGPKKSTNLVKNKCVNFNFNGLTGTGVLTESNKKFLPFQQFGRDIADTTDAVRDPQTLEILDITPCSFGGVSVITPGTNASNQVAVLYQDVNCTEVPVAIHADQLTPTWRVYSTGSNVFQTRAGCLIGAEHVNNSYECDIPIGAGICASYQTQTNSRSVASQSIIAYTMSLGAENSVAYSNNSIAIPTNFTISVTTEILPVSMTKTSVDCTMYICGDSTECSNLLLQYGSFCTQLNRALTGIAVEQDKNTQEVFAQVKQIYKTPPIKDFGGFNFSQILPDPSKPSKRSFIEDLLFNKVTLADAGFIKQYGDCLGDIAARDLICAQKFNGLTVLPPLLTDEMIAQYTSALLAGTITSGWTFGAGAALQIPFAMQMAYRFNGIGVTQCVLYENQKLIANQFNSAIGKIQDSLSSTASALGKLQDVVNQNAQALNTLVKQLSSNFGAISSVLNDILSRLDKVEAEVQIDRLITGRLQSLQTYVTQQLIRAAEIRASANLAATKMSECVLGQSKRVDFCGKGYHLMSFPQSAPHGVVFLHVTYVPAQEKNFTTAPAICHDGKAHFPREGVFVSNGTHWFVTQRNFYEPQIITTDNTFVCGSCDVVIGIVNNTVYDPLQPELDSGGSGYIPEAPRDGQAYVRKDGEWVLLSTFL

SEQ ID NO: 13992 - protein, 1177 aa, Artificial Sequence
  SARS-CoV-2/Wuhan/HBCDC-HB-01/2019__EPI_ISL_402132 spike protein (1-1147)(N914C_S1123C) Foldon construct
MFVFLVLLPLVSSQCVNLTTRTQLPPAYTNSITRGVYYPDKVFRSSVLHSTQDLFLPFFSNVTWFHAIHVSGTNGTKRFDNPVLPFNDGVYFASTEKSNIIRGWIFGTTLDSKTQSLLIVNNATNVVIKVCEFQFCNDPFLGVYYHKNNKSWMESEFRVYSSANNCTFEYVSQPFLMDLEGKQGNFKNLREFVFKNIDGYFKIYSKHTPINLVRDLPQGFSALEPLVDLPIGINITRFQTLLALHRSYLTPGDSSSGWTAGAAAYYVGYLQPRTFLLKYNENGTITDAVDCALDPLSETKCTLKSFTVEKGIYQTSNFRVQPTESIVRFPNITNLCPFGEVFNATRFASVYAWNRKRISNCVADYSVLYNSASFSTFKCYGVSPTKLNDLCFTNVYADSFVIRGDEVRQIAPGQTGKIADYNYKLPDDFTGCVIAWNSNNLDSKVGGNYNYLYRLFRKSNLKPFERDISTEIYQAGSTPCNGVEGFNCYFPLQSYGFQPTNGVGYQPYRVVVLSFELLHAPATVCGPKKSTNLVKNKCVNFNFNGLTGTGVLTESNKKFLPFQQFGRDIADTTDAVRDPQTLEILDITPCSFGGVSVITPGTNTSNQVAVLYQDVNCTEVPVAIHADQLTPTWRVYSTGSNVFQTRAGCLIGAEHVNNSYECDIPIGAGICASYQTQTNSPRRARSVASQSIIAYTMSLGAENSVAYSNNSIAIPTNFTISVTTEILPVSMTKTSVDCTMYICGDSTECSNLLLQYGSFCTQLNRALTGIAVEQDKNTQEVFAQVKQIYKTPPIKDFGGFNFSQILPDPSKPSKRSFIEDLLFNKVTLADAGFIKQYGDCLGDIAARDLICAQKFNGLTVLPPLLTDEMIAQYTSALLAGTITSGWTFGAGAALQIPFAMQMAYRFNGIGVTQCVLYENQKLIANQFNSAIGKIQDSLSSTASALGKLQDVVNQNAQALNTLVKQLSSNFGAISSVLNDILSRLDKVEAEVQIDRLITGRLQSLQTYVTQQLIRAAEIRASANLAATKMSECVLGQSKRVDFCGKGYHLMSFPQSAPHGVVFLHVTYVPAQEKNFTTAPAICHDGKAHFPREGVFVSNGTHWFVTQRNFYEPQIITTDNTFVCGNCDVVIGIVNNTVYDPLQPELDSGGSGYIPEAPRDGQAYVRKDGEWVLLSTFL

SEQ ID NO: 13993 - protein, 1177 aa, Artificial Sequence
  SARS-CoV-2/Guangdong/20SF028/2020__EPI_ISL_403936 spike protein (1-1147)(N914C_S1123C) Foldon construct
MFVFLVLLPLVSSQCVNLTTRTQLPPAYTNSFTRGVYYPDKVFRSSVLYSTQDLFLPFFSNVTWFHAIHVSGTNGTKRFDNPVLPFNDGVYFASTEKSNIIRGWIFGTTLDSKTQSLLIVNNATNVVIKVCEFQFCNDPFLGVYYHKNNKSWMESEFRVYSSANNCTFEYVSQPFLMDLEGKQGNFKNLREFVFKNIDGYFKIYSKHTPINLVRDLPQGFSALEPLVDLPIGINITRFQTLLALHRSYLTPGDSSSGWTAGAAAYYVGYLQPRTFLLKYNENGTITDAVDCALDPLSETKCTLKSFTVEKGIYQTSNFRVQPTESIVRFPNITNLCPFGEVFNATRFASVYAWNRKRISNCVADYSVLYNSASFSTFKCYGVSPTKLNDLCFTNVYADSFVIRGDEVRQIAPGQTGKIADYNYKLPDDFTGCVIAWNSNNLDSKVGGNYNYLYRLFRKSNLKPFERDISTEIYQAGSTPCNGVEGFNCYFPLQSYGFQPTNGVGYQPYRVVVLSFELLHAPATVCGPKKSTNLVKNKCVNFNFNGLTGTGVLTESNKKFLPFQQFGRDIADTTDAVRDPQTLEILDITPCSFGGVSVITPGTNTSNQVAVLYQDVNCTEVPVAIHADQLTPTWRVYSTGSNVFQTRAGCLIGAEHVNNSYECDIPIGAGICASYQTQTNSPRRARSVASQSIIAYTMSLGAENSVAYSNNSIAIPTNFTISVTTEILPVSMTKTSVDCTMYICGDSTECSNLLLQYGSFCTQLNRALTGIAVEQDKNTQEVFAQVKQIYKTPPIKDFGGFNFSQILPDPSKPSKRSFIEDLLFNKVTLADAGFIKQYGDCLGDIAARDLICAQKFNGLTVLPPLLTDEMIAQYTSALLAGTITSGWTFGAGAALQIPFAMQMAYRFNGIGVTQCVLYENQKLIANQFNSAIGKIQDSLSSTASALGKLQDVVNQNAQALNTLVKQLSSNFGAISSVLNDILSRLDKVEAEVQIDRLITGRLQSLQTYVTQQLIRAAEIRASANLAATKMSECVLGQSKRVDFCGKGYHLMSFPQSAPHGVVFLHVTYVPAQEKNFTTAPAICHDGKAHFPREGVFVSNGTHWFVTQRNFYEPQIITTDNTFVCGNCDVVIGIVNNTVYDPLQPELDSGGSGYIPEAPRDGQAYVRKDGEWVLLSTFL

SEQ ID NO: 13994 - protein, 1177 aa, Artificial Sequence
  SARS-CoV-2/Shenzhen/SZTH-001/2020__EPI_ISL_406592 spike protein (1-1147)(N914C_S1123C) Foldon construct
MFVFLVLLPLVSSQCVNLTTRTQLPPAYTNSFTRGVYYPDKVFRSSVLHSTQDLFLPFFSNVTWFHAIHVSGTNGTKRFDNPVLPFNDGVYFASTEKSNIIRGWIFGTTLDSKTQSLLIVNNATNVVIKVCEFQFCNDPFLGVYYHKNNKSWMESEFRVYSSANNCTFEYVSQPFLMDLEGKQGNFKNLREFVFKNIDGYFKIYSKHTPINLVRDLPQGFSALEPLVDLPIGINITRFQTLLALHRSYLTPGDSSSGWTAGAAAYYVGYLQPRTFLLKYNENGTITDAVDCALDPLSETKCTLKSFTVEKGIYQTSNFRVQPTESIVRFPNITNLCPFGEVFNATRFASVYAWNRKRISNCVADYSVLYNSASFSTFKCYGVSPTKLNDLCFTNVYADSFVIRGDEVRQIAPGQTGKIADYNYKLPDDFTGCVIAWNSNNLDSKVGGNYNYLYRLFRKSNLKPFERDISTEIYQAGSTPCNGVEGFNCYFPLQSYGFQPTNGVGYQPYRVVVLSFELLHAPATVCGPKKSTNLVKNKCVNFNFNGLTGTGVLTESNKKFLPFQQFGRDIADTTDAVRDPQTLEILDITPCSFGGVSVITPGTNTSNQVAVLYQDVNCTEVPVAIHADQLTPTWRVYSTGSNVFQTRAGCLIGAEHVNNSYECDIPIGAGICASYQTQTNSPRRARSVASQSIIAYTMSLGAENSVAYSNNSIAIPTNFTISVTTEILPVSMTKTSVDCTMYICGDSTECSNLLLQYGSFCTQLNRALTGIAVEQDKNTQEVFAQVKQIYKTPPIKDFGGFNFSQILPDPSKPSKRSFIEDLLFNKVTLADAGFIKQYGDCLGDIAARDLICAQKFNGLTVLPPLLTDEMIAQYTSALLAGTITSGWTFGAGAALQIPFAMQMAYRFNGIGVTQCVLYENQKLIANQFNSAIGKIQDSLSSTASALGKLQDVVNQNAQALNTLVKQLSSNFGAISSVLNDILSRLDKVEAEVQIDRLITGRLQSLQTYVTQQLIRAAEIRASANLAATKMSECVLGQSKRVDFCGKGYHLMSFPQSAPHGVVFLHVTYVPAQEKNFTTAPAICHDGKAHFPREGVFVSNGTHWFVTQRNFYEPQIITTDNTFVCGNCDVLIGIVNNTVYDPLQPELDSGGSGYIPEAPRDGQAYVRKDGEWVLLSTFL

SEQ ID NO: 13995 - protein, 1177 aa, Artificial Sequence
  SARS-CoV-2/Shenzhen/SZTH-004/2020__EPI_ISL_406595 spike protein (1-1147)(N914C_S1123C) Foldon construct
MFVFLVLLPLVSSQCVNLTTRTQLPPAYTNSFTRGVYYPDKVFRSSVLHSTQDLFLPFFSNVTWFHAIHVSGTNGTKRFDNPVLPFNDGVYFASTEKSNIIRGWIFGTTLDSKTQSLLIVNNATNVVIKVCEFQFCNDPFLGVYYHKNNKSWMESEFRVYSSANNCTFEYVSQPFLMDLEGKQGNFKNLREFVFKNIDGYFKIYSKHTPINLVRDLPQGFSALEPLVDLPIGINITRFQTLLALHRSYLTPGDSSSGWTAGAAAYYVGYLQPRTFLLKYNENGTITDAVDCALDPLSETKCTLKSFTVEKGIYQTSNFRVQPTESIVRFPNITNLCPFGEVFNATRFASVYAWDRKRISNCVAYYSVLYNSASFSTFKCYGVSPTKLNDLCFTNVYADSFVIRGDEVRQIAPGQTGKIADYNYKLPDDFTGCVIAWNSNNLDSKVGGNYNYLYRLFRKSNLKPFERDISTEIYQAGSTPCNGVEGFNCYFPLQSYGFQPTNGVGYQPYRVVVLSFELLHAPATVCGPKKSTNLVKNKCVNFNFNGLTGTGVLTESNKKFLPFQQFGRDIADTTDAVRDPQTLEILDITPCSFGGVSVITPGTNTSNQVAVLYQDVNCTEVPVAIHADQLTPTWRVYSTGSNVFQTRAGCLIGAEHVNNSYECDIPIGAGICASYQTQTNSPRRARSVASQSIIAYTMSLGAENSVAYSNNSIAIPTNFTISVTTEILPVSMTKTSVDCTMYICGDSTECSNLLLQYGSFCTQLNRALTGIAVEQDKNTQEVFAQVKQIYKTPPIKDFGGFNFSQILPDPSKPSKRSFIEDLLFNKVTLADAGFIKQYGDCLGDIAARDLICAQKFNGLTVLPPLLTDEMIAQYTSALLAGTITSGWTFGAGAALQIPFAMQMAYRFNGIGVTQCVLYENQKLIANQFNSAIGKIQDSLSSTASALGKLQDVVNQNAQALNTLVKQLSSNFGAISSVLNDILSRLDKVEAEVQIDRLITGRLQSLQTYVTQQLIRAAEIRASANLAATKMSECVLGQSKRVDFCGKGYHLMSFPQSAPHGVVFLHVTYVPAQEKNFTTAPAICHDGKAHFPREGVFVSNGTHWFVTQRNFYEPQIITTDNTFVCGNCDVVIGIVNNTVYDPLQPELDSGGSGYIPEAPRDGQAYVRKDGEWVLLSTFL

SEQ ID NO: 13996 - protein, 1177 aa, Artificial Sequence
  SARS-CoV-2/France/IDF0372/2020__EPI_ISL_406596 spike protein (1-1147)(N914C_S1123C) Foldon construct
MFVFLVLLPLVSSQCVNLTTRTQLPPAYTNSFTRGVYYPDKVFRSSVLHSTQDLFLPFFSNVTWFHAIHVSGTNGTKRFDNPVLPFNDGVYFASTEKSNIIRGWIFGTTLDSKTQSLLIVNNATNVVIKVCEFQFCNDPFLGVYYHKNNKSWMESEFRVYSSANNCTFEYVSQPFLMDLEGKQGNFKNLREFVFKNIDGYFKIYSKHTPINLVRDLPQGFSALEPLVDLPIGINITRFQTLLALHRSYLTPGDSSSGWTAGAAAYYVGYLQPRTFLLKYNENGTITDAVDCALDPLSETKCTLKSFTVEKGIYQTSNFRVQPTESIVRFPNITNLCPFGEVFNATRFASVYAWNRKRISNCVADYSFLYNSASFSTFKCYGVSPTKLNDLCFTNVYADSFVIRGDEVRQIAPGQTGKIADYNYKLPDDFTGCVIAWNSNNLDSKVGGNYNYLYRLFRKSNLKPFERDISTEIYQAGSTPCNGVEGFNCYFPLQSYGFQPTNGVGYQPYRVVVLSFELLHAPATVCGPKKSTNLVKNKCVNFNFNGLTGTGVLTESNKKFLPFQQFGRDIADTTDAVRDPQTLEILDITPCSFGGVSVITPGTNTSNQVAVLYQDVNCTEVPVAIHADQLTPTWRVYSTGSNVFQTRAGCLIGAEHVNNSYECDIPIGAGICASYQTQTNSPRRARSVASQSIIAYTMSLGAENSVAYSNNSIAIPTNFTISVTTEILPVSMTKTSVDCTMYICGDSTECSNLLLQYGSFCTQLNRALTGIAVEQDKNTQEVFAQVKQIYKTPPIKDFGGFNFSQILPDPSKPSKRSFIEDLLFNKVTLADAGFIKQYGDCLGDIAARDLICAQKFNGLTVLPPLLTDEMIAQYTSALLAGTITSGWTFGAGAALQIPFAMQMAYRFNGIGVTQCVLYENQKLIANQFNSAIGKIQDSLSSTASALGKLQDVVNQNAQALNTLVKQLSSNFGAISSVLNDILSRLDKVEAEVQIDRLITGRLQSLQTYVTQQLIRAAEIRASANLAATKMSECVLGQSKRVDFCGKGYHLMSFPQSAPHGVVFLHVTYVPAQEKNFTTAPAICHDGKAHFPREGVFVSNGTHWFVTQRNFYEPQIITTDNTFVCGNCDVVIGIVNNTVYDPLQPELDSGGSGYIPEAPRDGQAYVRKDGEWVLLSTFL

SEQ ID NO: 13997 - protein, 1177 aa, Artificial Sequence
  SARS-CoV-2/Australia/VIC01/2020__EPI_ISL_406844 spike protein (1-1147)(N914C_S1123C) Foldon construct
MFVFLVLLPLVSSQCVNLTTRTQLPPAYTNSFTRGVYYPDKVFRSSVLHSTQDLFLPFFSNVTWFHAIHVSGTNGTKRFDNPVLPFNDGVYFASTEKSNIIRGWIFGTTLDSKTQSLLIVNNATNVVIKVCEFQFCNDPFLGVYYHKNNKSWMESEFRVYSSANNCTFEYVSQPFLMDLEGKQGNFKNLREFVFKNIDGYFKIYSKHTPINLVRDLPQGFSALEPLVDLPIGINITRFQTLLALHRRYLTPGDSSSGWTAGAAAYYVGYLQPRTFLLKYNENGTITDAVDCALDPLSETKCTLKSFTVEKGIYQTSNFRVQPTESIVRFPNITNLCPFGEVFNATRFASVYAWNRKRISNCVADYSVLYNSASFSTFKCYGVSPTKLNDLCFTNVYADSFVIRGDEVRQIAPGQTGKIADYNYKLPDDFTGCVIAWNSNNLDSKVGGNYNYLYRLFRKSNLKPFERDISTEIYQAGSTPCNGVEGFNCYFPLQSYGFQPTNGVGYQPYRVVVLSFELLHAPATVCGPKKSTNLVKNKCVNFNFNGLTGTGVLTESNKKFLPFQQFGRDIADTTDAVRDPQTLEILDITPCSFGGVSVITPGTNTSNQVAVLYQDVNCTEVPVAIHADQLTPTWRVYSTGSNVFQTRAGCLIGAEHVNNSYECDIPIGAGICASYQTQTNSPRRARSVASQSIIAYTMSLGAENSVAYSNNSIAIPTNFTISVTTEILPVSMTKTSVDCTMYICGDSTECSNLLLQYGSFCTQLNRALTGIAVEQDKNTQEVFAQVKQIYKTPPIKDFGGFNFSQILPDPSKPSKRSFIEDLLFNKVTLADAGFIKQYGDCLGDIAARDLICAQKFNGLTVLPPLLTDEMIAQYTSALLAGTITSGWTFGAGAALQIPFAMQMAYRFNGIGVTQCVLYENQKLIANQFNSAIGKIQDSLSSTASALGKLQDVVNQNAQALNTLVKQLSSNFGAISSVLNDILSRLDKVEAEVQIDRLITGRLQSLQTYVTQQLIRAAEIRASANLAATKMSECVLGQSKRVDFCGKGYHLMSFPQSAPHGVVFLHVTYVPAQEKNFTTAPAICHDGKAHFPREGVFVSNGTHWFVTQRNFYEPQIITTDNTFVCGNCDVVIGIVNNTVYDPLQPELDSGGSGYIPEAPRDGQAYVRKDGEWVLLSTFL

SEQ ID NO: 13998 - protein, 1177 aa, Artificial Sequence
  SARS-CoV-2/Germany/BavPat1/2020__EPI_ISL_406862 spike protein (1-1147)(N914C_S1123C) Foldon construct
MFVFLVLLPLVSSQCVNLTTRTQLPPAYTNSFTRGVYYPDKVFRSSVLHSTQDLFLPFFSNVTWFHAIHVSGTNGTKRFDNPVLPFNDGVYFASTEKSNIIRGWIFGTTLDSKTQSLLIVNNATNVVIKVCEFQFCNDPFLGVYYHKNNKSWMESEFRVYSSANNCTFEYVSQPFLMDLEGKQGNFKNLREFVFKNIDGYFKIYSKHTPINLVRDLPQGFSALEPLVDLPIGINITRFQTLLALHRSYLTPGDSSSGWTAGAAAYYVGYLQPRTFLLKYNENGTITDAVDCALDPLSETKCTLKSFTVEKGIYQTSNFRVQPTESIVRFPNITNLCPFGEVFNATRFASVYAWNRKRISNCVADYSVLYNSASFSTFKCYGVSPTKLNDLCFTNVYADSFVIRGDEVRQIAPGQTGKIADYNYKLPDDFTGCVIAWNSNNLDSKVGGNYNYLYRLFRKSNLKPFERDISTEIYQAGSTPCNGVEGFNCYFPLQSYGFQPTNGVGYQPYRVVVLSFELLHAPATVCGPKKSTNLVKNKCVNFNFNGLTGTGVLTESNKKFLPFQQFGRDIADTTDAVRDPQTLEILDITPCSFGGVSVITPGTNTSNQVAVLYQGVNCTEVPVAIHADQLTPTWRVYSTGSNVFQTRAGCLIGAEHVNNSYECDIPIGAGICASYQTQTNSPRRARSVASQSIIAYTMSLGAENSVAYSNNSIAIPTNFTISVTTEILPVSMTKTSVDCTMYICGDSTECSNLLLQYGSFCTQLNRALTGIAVEQDKNTQEVFAQVKQIYKTPPIKDFGGFNFSQILPDPSKPSKRSFIEDLLFNKVTLADAGFIKQYGDCLGDIAARDLICAQKFNGLTVLPPLLTDEMIAQYTSALLAGTITSGWTFGAGAALQIPFAMQMAYRFNGIGVTQCVLYENQKLIANQFNSAIGKIQDSLSSTASALGKLQDVVNQNAQALNTLVKQLSSNFGAISSVLNDILSRLDKVEAEVQIDRLITGRLQSLQTYVTQQLIRAAEIRASANLAATKMSECVLGQSKRVDFCGKGYHLMSFPQSAPHGVVFLHVTYVPAQEKNFTTAPAICHDGKAHFPREGVFVSNGTHWFVTQRNFYEPQIITTDNTFVCGNCDVVIGIVNNTVYDPLQPELDSGGSGYIPEAPRDGQAYVRKDGEWVLLSTFL

SEQ ID NO: 13999 - protein, 1177 aa, Artificial Sequence
  SARS-CoV-2/Wuhan/HBCDC-HB-02/2020__EPI_ISL_412978 spike protein (1-1147)(N914C_S1123C) Foldon construct
MFVFLVLLPLVSSQCVNLTTRTQLPPAYTNSFTRGVYYPDKVFRSSVLHSTQDLFLPFFSNVTWFHAIHVSGTNGTKRFDNPVLPFNDGVYFASTEKSNIIRGWIFGTTLDSKTQSLLIVNNATNVVIKVCEFQFCNDPFLGVYYHKNNKSWMESEFRVYSSANNCTFEYVSQPFLMDLEGKQGNFKNLREFVFKNIDGYFKIYSKHTPINLVRDLPQGFSALEPLVDLPIGINITRFQTLLALHRSYLTPGDSSSGWTAGAAAYYVGYLQPRTFLLKYNENGTITDAVDCALDPLSETKCTLKSFTVEKGIYQTSNFRVQPTESIVRFPNITNLCPFGEVFNATRFASVYAWNRKRISNCVADYSVLYNSASFSTFKCYGVSPTKLNDLCFTNVYADSFVIRGDEVRQIAPGQTGKIADYNYKLPDDFTGCVIAWNSNNLDSKVGGNYNYLYRLFRKSNLKPFERDISTEIYQAGSTPCNGVEGFNCYFPLQSYGFQPTNGVGYQPYRVVVLSFELLHAPATVCGPKKSTNLVKNKCVNFNFNGLTGTGVLTESNKKFLPFQQFGRDIADTTDAVRDPQTLEILDITPCSFGGVSVITPGTNTSNQVAVLYQDVNCTEVPVAIHADQLTPTWRVYSTGSNVFQTRAGCLIGAEHVNNSYECDIPIGAGICASYQTQTNSPRRARSVASQSIIAYTMSLGAENSVAYSNNSIAIPTNFTISVTTEILPVSMTKTSVDCTMYICGDSTECSNFLLQYGSFCTQLNRALTGIAVEQDKNTQEVFAQVKQIYKTPPIKDFGGFNFSQILPDPSKPSKRSFIEDLLFNKVTLADAGFIKQYGDCLGDIAARDLICAQKFNGLTVLPPLLTDEMIAQYTSALLAGTITSGWTFGAGAALQIPFAMQMAYRFNGIGVTQCVLYENQKLIANQFNSAIGKIQDSLSSTASALGKLQDVVNQNAQALNTLVKQLSSNFGAISSVLNDILSRLDKVEAEVQIDRLITGRLQSLQTYVTQQLIRAAEIRASANLAATKMSECVLGQSKRVDFCGKGYHLMSFPQSAPHGVVFLHVTYVPAQEKNFTTAPAICHDGKAHFPREGVFVSNGTHWFVTQRNFYEPQIITTDNTFVCGNCDVVIGIVNNTVYDPLQPELDSGGSGYIPEAPRDGQAYVRKDGEWVLLSTFL

SEQ ID NO: 14000 - protein, 1177 aa, Artificial Sequence
  SARS-CoV-2/Australia/QLD02/2020__EPI_ISL_407896 spike protein (1-1147)(N914C_S1123C) Foldon construct
MFVFLVLLPLVSSQCVNLTTRTQLPPAYTNSFTRGVYYPDKVFRSSVLHSTQDLFLPFFSNVTWFHAIHVSGTNGTKRFDNPVLPFNDGVYFASTEKSNIIRGWIFGTTLDSKTQSLLIVNNATNVVIKVCEFQFCNDPFLGVYYHKNNKSWMESEFRVYSSANNCTFEYVSQPFLMDLEGKQGNFKNLREFVFKNIDGYFKIYSKHTPINLVRDLPQGFSALEPLVDLPIGINITRFQTLLALHRSYLTPGDSSSGWTAGAAAYYVGYLQPRTFLLKYNENGTITDAVDCALDPLSETKCTLKSFTVEKGIYQTSNFRVQPTESIVRFPNITNLCPFGEVFNATRFASVYAWNRKRISNCVADYSVLYNSASFSTFKCYGVSPTKLNDLCFTNVYADSFVIRGDEVRQIAPGQTGKIADYNYKLPDDFTGCVIAWNSNNLDSKVGGNYNYLYRLFRKSNLKPFERDISTEIYQAGSTPCNGVEGFNCYFPLQSYGFQPTNGVGYQPYRVVVLSFELLHAPATVCGPKKSTNLVKNKCVNFNFNGLTGTGVLTESNKKFLPFQQFGRDIADTTDAVRDPQTLEILDITPCSFGGVSVITPGTNTSNQVAVLYQDVNCTEVPVAIHADQLTPTWRVYSTGSNVFQTRAGCLIGAEHVNNSYECDIPIGAGICASYQTQTNSPRRARSVASQSIIAYTMSLGAENSVAYSNNSIAIPTNFTISVTTEILPVSMTKTSVDCTMYICGDSTECSNLLLQYGSFCTQLNRALTGIAVEQDKNTQEVFAQVKQIYKTPPIKDFGGFNFSQILPDPSKPSKRSFIEDLLFNKVTLADAGFIKQYGDCLGDIAARDLICAQKFNGLTVLPPLLTDEMIAQYTSALLAGTITSGWTFGAGAALQIPFAMQMAYRFNGIGVTQCVLYENQKLIANQFNSAIGKIQDSLSSTASALGKLQDVVNQNAQALNTLVKQLSSNFGAISSVLNDILSRLDKVEAEVQIDRLITGRLQSLQTYVTQQLIRAAEIRASANLAATKMSECVLGQSKRVDFCGKGYHLMSFPQSAPHGVVFLHVTYVPAQEKNFTTAPAICHDGKAHFPREGVFVSNGTHWFVTQRNFYEPQIITTDNTFVCGNCDVVIGIVNNTVYDPLQLELDSGGSGYIPEAPRDGQAYVRKDGEWVLLSTFL

SEQ ID NO: 14001 - protein, 1177 aa, Artificial Sequence
  SARS-CoV-2/India/1-31/2020__EPI_ISL_413523 spike protein (1-1147)(N914C_S1123C) Foldon construct
MFVFLVLLPLVSSQCVNLTTRTQLPPAYTNSFTRGVYYPDKVFRSSVLHSTQDLFLPFFSNVTWFHAIHVSGTNGTKRFDNPVLPFNDGVYFASTEKSNIIRGWIFGTTLDSKTQSLLIVNNATNVVIKVCEFQFCNDPFLGVYYHKNNKSWMESEFRVYSSANNCTFEYVSQPFLMDLEGKQGNFKNLREFVFKNIDGYFKIYSKHTPINLVRDLPQGFSALEPLVDLPIGINITRFQTLLALHRSYLTPGDSSSGWTAGAAAYYVGYLQPRTFLLKYNENGTITDAVDCALDPLSETKCTLKSFTVEKGIYQTSNFRVQPTESIVRFPNITNLCPFGEVFNATRFASVYAWNRKRISNCVADYSVLYNSASFSTFKCYGVSPTKLNDLCFTNVYADSFVIRGDEVRQIAPGQTGKIADYNYKLPDDFTGCVIAWNSNNLDSKVGGNYNYLYRLFRKSNLKPFERDISTEIYQAGSTPCNGVEGFNCYFPLQSYGFQPTNGVGYQPYRVVVLSFELLHAPATVCGPKKSTNLVKNKCVNFNFNGLTGTGVLTESNKKFLPFQQFGRDIADTTDAVRDPQTLEILDITPCSFGGVSVITPGTNTSNQVAVLYQDVNCTEVPVAIHADQLTPTWRVYSTGSNVFQTRAGCLIGAEHVNNSYECDIPIGAGICASYQTQTNSPRRARSVASQSIIAYTMSLGAENSVAYSNNSIAIPTNFTISVTTEILPVSMTKTSVDCTMYICGDSTECSNLLLQYGSFCTQLNRALTGIAVEQDKNTQEVFAQVKQIYKTPPIKDFGGFNFSQILPDPSKPSKRSFIEDLLFNKVTLADAGFIKQYGDCLGDIAARDLICAQKFNGLTVLPPLLTDEMIAQYTSALLAGTITSGWTFGAGAALQIPFAMQMAYRFNGIGVTQCVLYENQKLIANQFNSVIGKIQDSLSSTASALGKLQDVVNQNAQALNTLVKQLSSNFGAISSVLNDILSRLDKVEAEVQIDRLITGRLQSLQTYVTQQLIRAAEIRASANLAATKMSECVLGQSKRVDFCGKGYHLMSFPQSAPHGVVFLHVTYVPAQEKNFTTAPAICHDGKAHFPREGVFVSNGTHWFVTQRNFYEPQIITTDNTFVCGNCDVVIGIVNNTVYDPLQPELDSGGSGYIPEAPRDGQAYVRKDGEWVLLSTFL

SEQ ID NO: 14002 - protein, 1177 aa, Artificial Sequence
  SARS-CoV-2/Guangdong/GD2020087-P0008/2020__EPI_ISL_413863 spike protein (1-1147)(N914C_S1123C) Foldon construct
MFVFLVLLPLVSSQCVNLTTRTQLPPAYTNSFTRGVYYPDKVFRSSVLHSTQDLFLPFFSNVTWFHAIHVSGTNGTKRFDNPVLPFNDGVYFASTEKSNIIRGWIFGTTLDSKTQSLLIVNNATNVVIKVCEFQFCNDPFLGVYYHKNNKSWMESEFRVYSSANNCTFEYVSQPFLMDLEGKQGNFKNLREFVFKNIDGYFKIYSKHTPINLVRDLPQGFSALEPLVDLPIGINITRFQTLLALHRSYLTPGDSSSGWTAGAAAYYVGYLQPRTFLLKYNENGTITDAVDCALDPLSETKCTLKSFTVEKGIYQTSNFRVQPTESIVRFPNITNLCPFGEVFNATRFASVYAWNRKRISNCVADYSVLYNSASFSTFKCYGVSPTKLNDLCFTNVYADSFVIRGDEVREIAPGQTGKIADYNYKLPDDFTGCVIAWNSNNLDSKVGGNYNYLYRLFRKSNLKPFERDISTEIYQAGSTPCNGVEGFNCYFPLQSYGFQPTNGVGYQPYRVVVLSFELLHAPATVCGPKKSTNLVKNKCVNFNFNGLTGTGVLTESNKKFLPFQQFGRDIADTTDAVRDPQTLEILDITPCSFGGVSVITPGTNTSNQVAVLYQDVNCTEVPVAIHADQLTPTWRVYSTGSNVFQTRAGCLIGAEHVNNSYECDIPIGAGICASYQTQTNSPRRARSVASQSIIAYTMSLGAENSVAYSNNSIAIPTNFTISVTTEILPVSMTKTSVDCTMYICGDSTECSNLLLQYGSFCTQLNRALTGIAVEQDKNTQEVFAQVKQIYKTPPIKDFGGFNFSQILPDPSKPSKRSFIEDLLFNKVTLADAGFIKQYGDCLGDIAARDLICAQKFNGLTVLPPLLTDEMIAQYTSALLAGTITSGWTFGAGAALQIPFAMQMAYRFNGIGVTQCVLYENQKLIANQFNSAIGKIQDSLSSTASALGKLQDVVNQNAQALNTLVKQLSSNFGAISSVLNDILSRLDKVEAEVQIDRLITGRLQSLQTYVTQQLIRAAEIRASANLAATKMSECVLGQSKRVDFCGKGYHLMSFPQSAPHGVVFLHVTYVPAQEKNFTTAPAICHDGKAHFPREGVFVSNGTHWFVTQRNFYEPQIITTDNTFVCGNCDVVIGIVNNTVYDPLQPELDSGGSGYIPEAPRDGQAYVRKDGEWVLLSTFL

SEQ ID NO: 14003 - protein, 1177 aa, Artificial Sequence
  SARS-CoV-2/Sweden/01/2020__EPI_ISL_411951 spike protein (1-1147)(N914C_S1123C) Foldon construct
MFVFLVLLPLVSSQCVNLTTRTQLPPAYTNSFTRGVYYPDKVFRSSVLHSTQDLFLPFFSNVTWFHAIHVSGTNGTKRFDNPVLPFNDGVYFASTEKSNIIRGWIFGTTLDSKTQSLLIVNNATNVVIKVCEFQFCNDPFLGVYYHKNNKSWMESEFRVYSSANNCTFEYVSQPFLMDLEGKQGNFKNLREFVFKNIDGYFKIYSKHTPINLVRDLPQGFSALEPLVDLPIGINITRFQTLLALHRSYLTPGDSSSGWTAGAAAYYVGYLQPRTFLLKYNENGTITDAVDCALDPLSETKCTLKSFTVEKGIYQTSNFRVQPTESIVRFPNITNLCPFGEVFNATRFASVYAWNRKRISNCVADYSVLYNSASFSTFKCYGVSPTKLNDLCFTNVYADSFVIRGDEVRQIAPGQTGKIADYNYKLPDDFTGCVIAWNSNNLDSKVGGNYNYLYRLFRKSNLKPFERDISTEIYQAGSTPCNGVEGFNCYFPLQSYGFQPTNGVGYQPYRVVVLSFELLHAPATVCGPKKSTNLVKNKCVNFNFNGLTGTGVLTESNKKFLPFQQFGRDIADTTDAVRDPQTLEILDITPCSFGGVSVITPGTNTSNQVAVLYQDVNCTEVPVAIHADQLTPTWRVYSTGSNVFQTRAGCLIGAEHVNNSYECDIPIGAGICASYQTQTNSPRRARSVASQSIIAYTMSLGAENSVAYSNNSIAIPTNFTISVTTEILPVSMTKTSVDCTMYICGDSTECSNLLLQYGSFCTQLNRALTGIAVEQDKNTQEVFAQVKQIYKTPPIKDCGGFNFSQILPDPSKPSKRSFIEDLLFNKVTLADAGFIKQYGDCLGDIAARDLICAQKFNGLTVLPPLLTDEMIAQYTSALLAGTITSGWTFGAGAALQIPFAMQMAYRFNGIGVTQCVLYENQKLIANQFNSAIGKIQDSLSSTASALGKLQDVVNQNAQALNTLVKQLSSNFGAISSVLNDILSRLDKVEAEVQIDRLITGRLQSLQTYVTQQLIRAAEIRASANLAATKMSECVLGQSKRVDFCGKGYHLMSFPQSAPHGVVFLHVTYVPAQEKNFTTAPAICHDGKAHFPREGVFVSNGTHWFVTQRNFYEPQIITTDNTFVCGNCDVVIGIVNNTVYDPLQPELDSGGSGYIPEAPRDGQAYVRKDGEWVLLSTFL

SEQ ID NO: 14004 - protein, 1177 aa, Artificial Sequence
  SARS-CoV-2/Tianmen/HBCDC-HB-07/2020__EPI_ISL_412983 spike protein (1-1147)(N914C_S1123C) Foldon construct
MFVFLVLLPLVSSQCVNLTTRTQLPPAYTNSFTRGVYYPDKVFRSSVLHSTQDLFLPFFSNVTWFHAIHVSGTNGTKRFDNPVLPFNDGVYFASTEKSNIIRGWIFGTTLDSKTQSLLIVNNATNVVIKVCEFQFCNDPFLGVYYHKNNKSWMESEFRVYSSANNCTFEYVSQPFLMDLEGKQGNFKNLREFVFKNIDGYFKIYSKHTPINLVRDLPQGFSALEPLVDLPIGINITRFQTLLALHRSYLTPGDSSSGWTAGAAAYYVGYLQPRTFLLKYNENGTITDAVDCALDPLSETKCTLKSFTVEKGIYQTSNFRVQPTESIVRFPNITNLCPFGEVFNATRFASVYAWNRKRISNCVADYSVLYNSASFSTFKCYGVSPTKLNDLCFTNVYADSFVIRGDEVRQIAPGQTGKIADYNYKLPDDFTGCVIAWNSNNLDSKVGGNYNYLYRLFRKSNLKPFERDISTEIYQAGSTPCNGVEGFNCYFPLQSYGFQPTNGVGYQPYRVVVLSFELLHAPATVCGPKKSTNLVKNKCVNFNFNGLTGTGVLTESNKKFLPFQQFGRDIADTTDAVRDPQTLEILDITPCSFGGVSVITPGTNTSNQVAVLYQDLNCTEVPVAIHADQLTPTWRVYSTGSNVFQTRAGCLIGAEHVNNSYECDIPIGAGICASYQTQTNSPRRARSVASQSIIAYTMSLGAENSVAYSNNSIAIPTNFTISVTTEILPVSMTKTSVDCTMYICGDSTECSNLLLQYGSFCTQLNRALTGIAVEQDKNTQEVFAQVKQIYKTPPIKDFGGFNFSQILPDPSKPSKRSFIEDLLFNKVTLADAGFIKQYGDCLGDIAARDLICAQKFNGLTVLPPLLTDEMIAQYTSALLAGTITSGWTFGAGAALQIPFAMQMAYRFNGIGVTQCVLYENQKLIANQFNSAIGKIQDSLSSTASALGKLQDVVNQNAQALNTLVKQLSSNFGAISSVLNDILSRLDKVEAEVQIDRLITGRLQSLQTYVTQQLIRAAEIRASANLAATKMSECVLGQSKRVDFCGKGYHLMSFPQSAPHGVVFLHVTYVPAQEKNFTTAPAICHDGKAHFPREGVFVSNGTHWFVTQRNFYEPQIITTDNTFVCGNCDVVIGIVNNTVYDPLQPELDSGGSGYIPEAPRDGQAYVRKDGEWVLLSTFL

SEQ ID NO: 14005 - protein, 1177 aa, Artificial Sequence
  SARS-CoV-2/Hong Kong/case42_VM20002493/2020__EPI_ISL_414527 spike protein (1-1147)(N914C_S1123C) Foldon construct
MFVFLVLLPLVSSQCVNLTTRTQLPPAYTNSFTRGVYYPDKVFRSSVLHSTQDLFLPFFSNVTWFHAIHVSGTNGTKRFDNPVLPFNDGVYFASTEKSNIIRGWIFGTTLDSKTQSLLIVNNATNVVIKVCEFQFCNDPFLGVYYHKNNKSWMESEFRVYSSANNCTFEYVSQPFLMDLEGKQGNFKNLREFVFKNIDGYFKIYSKHTPINLVRDLPQGFSALEPLVDLPIGINITRFQTLLALHRSYLTPGDSSSGWTAGAAAYYVGYLQPRTFLLKYNENGTITDAVDCALDPLSETKCTLKSFTVEKGIYQTSNFRVQPTESIVRFPNITNLCPFGEVFNATRFASVYAWNRKRISNCVADYSVLYNSASFSTFKCYGVSPTKLNDLCFTNVYADSFVIRGDEVRQIAPGQTGKIADYNYKLPDDFTGCVIAWNSNNLDSKVGGNYNYLYRLFRKSNLKPFERDISTEIYQAGSTPCNGVEGFNCYFPLQSYGFQPTNGVGYQPYRVVVLSFELLHAPATVCGPKKSTNLVKNKCVNFNFNGLTGTGVLTESNKKFLPFQQFGRDIADTTDAVRDPQTLEILDITPCSFGGVSVITPGTNTSNQVAVLYQDVNCTEVPVAIHADQLTPTWRVYSTGSNVFQTRAGCLIGAEHVNNSYECDIPIGAGICASYQTQTNSPRRARSVASQSIIAYTMSLGAENSVAYSNNSIAIPTNFAISVTTEILPVSMTKTSVDCTMYICGDSTECSNLLLQYGSFCTQLNRALTGIAVEQDKNTQEVFAQVKQIYKTPPIKDFGGFNFSQILPDPSKPSKRSFIEDLLFNKVTLADAGFIKQYGDCLGDIAARDLICAQKFNGLTVLPPLLTDEMIAQYTSALLAGTITSGWTFGAGAALQIPFAMQMAYRFNGIGVTQCVLYENQKLIANQFNSAIGKIQDSLSSTASALGKLQDVVNQNAQALNTLVKQLSSNFGAISSVLNDILSRLDKVEAEVQIDRLITGRLQSLQTYVTQQLIRAAEIRASANLAATKMSECVLGQSKRVDFCGKGYHLMSFPQSAPHGVVFLHVTYVPAQEKNFTTAPAICHDGKAHFPREGVFVSNGTHWFVTQRNFYEPQIITTDNTFVCGNCDVVIGIVNNTVYDPLQPELDSGGSGYIPEAPRDGQAYVRKDGEWVLLSTFL

SEQ ID NO: 14006 - protein, 1177 aa, Artificial Sequence
  SARS-CoV-2/USA/CruiseA-23/2020__EPI_ISL_414482 spike protein (1-1147)(N914C_S1123C) Foldon construct
MFVFLVLLPLVSSQCVNLTTRTQLPPAYTNSFTRGVYYPDKVFRSSVLHSTQDLFLPFFSNVTWFHAIHVSGTNGTKRFDNPVLPFNDGVYFASTEKSNIIRGWIFGTTLDSKTQSLLIVNNATNVVIKVCEFQFCNDPFLGVYYHKNNKSWMESEFRVYSSANNCTFEYVSQPFLMDLEVKQGNFKNLREFVFKNIDGYFKIYSKHTPINLVRDLPQGFSALEPLVDLPIGINITRFQTLLALHRSYLTPGDSSSGWTAGAAAYYVGYLQPRTFLLKYNENGTITDAVDCALDPLSETKCTLKSFTVEKGIYQTSNFRVQPTESIVRFPNITNLCPFGEVFNATRFASVYAWNRKRISNCVADYSVLYNSASFSTFKCYGVSPTKLNDLCFTNVYADSFVIRGDEVRQIAPGQTGKIADYNYKLPDDFTGCVIAWNSNNLDSKVGGNYNYLYRLFRKSNLKPFERDISTEIYQAGSTPCNGVEGFNCYFPLQSYGFQPTNGVGYQPYRVVVLSFELLHAPATVCGPKKSTNLVKNKCVNFNFNGLTGTGVLTESNKKFLPFQQFGRDIADTTDAVRDPQTLEILDITPCSFGGVSVITPGTNTSNQVAVLYQDVNCTEVPVAIHADQLTPTWRVYSTGSNVFQTRAGCLIGAEHVNNSYECDIPIGAGICASYQTQTNSPRRARSVASQSIIAYTMSLGAENSVAYSNNSIAIPTNFTISVTTEILPVSMTKTSVDCTMYICGDSTECSNLLLQYGSFCTQLNRALTGIAVEQDKNTQEVFAQVKQIYKTPPIKDFGGFNFSQILPDPSKPSKRSFIEDLLFNKVTLADAGFIKQYGDCLGDIAARDLICAQKFNGLTVLPPLLTDEMIAQYTSALLAGTITSGWTFGAGAALQIPFAMQMAYRFNGIGVTQCVLYENQKLIANQFNSAIGKIQDSLSSTASALGKLQDVVNQNAQALNTLVKQLSSNFGAISSVLNDILSRLDKVEAEVQIDRLITGRLQSLQTYVTQQLIRAAEIRASANLAATKMSECVLGQSKRVDFCGKGYHLMSFPQSAPHGVVFLHVTYVPAQEKNFTTAPAICHDGKAHFPREGVFVSNGTHWFVTQRNFYEPQIITTDNTFVCGNCDVVIGIVNNTVYDPLQPELDSGGSGYIPEAPRDGQAYVRKDGEWVLLSTFL

SEQ ID NO: 14007 - protein, 1177 aa, Artificial Sequence
  SARS-CoV-2/Hong Kong/case85_VM20002868/2020__EPI_ISL_414519 spike protein (1-1147)(N914C_S1123C) Foldon construct
MFVFLVLVPLVSSQCVNLTTRTQLPPAYTNSFTRGVYYPDKVFRSSVLHSTQDLFLPFFSNVTWFHAIHVSGTNGTKRFDNPVLPFNDGVYFASTEKSNIIRGWIFGTTLDSKTQSLLIVNNATNVVIKVCEFQFCNDPFLGVYYHKNNKSWMESEFRVYSSANNCTFEYVSQPFLMDLEGKQGNFKNLREFVFKNIDGYFKIYSKHTPINLVRDLPQGFSALEPLVDLPIGINITRFQTLLALHRSYLTPGDSSSGWTAGAAAYYVGYLQPRTFLLKYNENGTITDAVDCALDPLSETKCTLKSFTVEKGIYQTSNFRVQPTESIVRFPNITNLCPFGEVFNATRFASVYAWNRKRISNCVADYSVLYNSASFSTFKCYGVSPTKLNDLCFTNVYADSFVIRGDEVRQIAPGQTGKIADYNYKLPDDFTGCVIAWNSNNLDSKVGGNYNYLYRLFRKSNLKPFERDISTEIYQAGSTPCNGVEGFNCYFPLQSYGFQPTNGVGYQPYRVVVLSFELLHAPATVCGPKKSTNLVKNKCVNFNFNGLTGTGVLTESNKKFLPFQQFGRDIADTTDAVRDPQTLEILDITPCSFGGVSVITPGTNTSNQVAVLYQDVNCTEVPVAIHADQLTPTWRVYSTGSNVFQTRAGCLIGAEHVNNSYECDIPIGAGICASYQTQTNSPRRARSVASQSIIAYTMSLGAENSVAYSNNSIAIPTNFTISVTTEILPVSMTKTSVDCTMYICGDSTECSNLLLQYGSFCTQLNRALTGIAVEQDKNTQEVFAQVKQIYKTPPIKDFGGFNFSQILPDPSKPSKRSFIEDLLFNKVTLADAGFIKQYGDCLGDIAARDLICAQKFNGLTVLPPLLTDEMIAQYTSALLAGTITSGWTFGAGAALQIPFAMQMAYRFNGIGVTQCVLYENQKLIANQFNSAIGKIQDSLSSTASALGKLQDVVNQNAQALNTLVKQLSSNFGAISSVLNDILSRLDKVEAEVQIDRLITGRLQSLQTYVTQQLIRAAEIRASANLAATKMSECVLGQSKRVDFCGKGYHLMSFPQSAPHGVVFLHVTYVPAQEKNFTTAPAICHDGKAHFPREGVFVSNGTHWFVTQRNFYEPQIITTDNTFVCGNCDVVIGIVNNTVYDPLQPELDSGGSGYIPEAPRDGQAYVRKDGEWVLLSTFL

SEQ ID NO: 14008 - protein, 1177 aa, Artificial Sequence; identical to SEQ ID NO: 13998
  SARS-CoV-2/England/200990660/2020__EPI_ISL_414523 spike protein (1-1147)(N914C_S1123C) Foldon construct

SEQ ID NO: 14009 - protein, 1177 aa, Artificial Sequence
  SARS-CoV-2/Australia/NSW09/2020__EPI_ISL_413595 spike protein (1-1147)(N914C_S1123C) Foldon construct
MFVFLVLLPLVSSQCVNLTTRTQLPPAYTNSFTRGVYYPDKVFRSSVLHSTQDLFLPFFSNVTWFHAIHVSGTNGTKRFDNPVLPFNDGVYFASTEKSNIIRGWIFGTTLDSKTQSLLIVNNATNVVIKVCEFQFCNDPFLGVYYHKNNKSWMESEFRVYSSANNCTFEYVSQPFLMDLEGKQGNFKNLREFVFKNIDGYFKIYSKHTPINLVRDLPQGFSALEPLVDLPIGINITRFQTLLALHRSYLTPGDSSSGWTAGAAAYYVGYLQPRTFLLKYNENGTITDAVDCALDPLSETKCTLKSFTVEKGIYQTSNFRVQPTESIVRFPNITNLCPFGEVFNATRFASVYAWNRKRISNCVADYSVLYNSASFSTFKCYGVSPTKLNDLCFTNVYADSFVIRGDEVRQIAPGQTGKIADYNYKLPDDFTGCVIAWNSNNLDSKVGGNYNYLYRLFRKSNLKPFERDISTEIYQAGSTPCNGVEGFNCYFPLQSYGFQPTNGVGYQPYRVVVLSFELLHAPATVCGPKKSTNLVKNKCVNFNFNGLTGTGVLTESNKKFLPFQQFGRDIADTTDAVRDPQTLEILDITPCSFGGVSVITPGTNTSNQVAVLYQDVNCTEVPVAIHADQLTPTWRVYSTGSNVFQTRAGCLIGAEHVNNSYECDIPIGAGICASYQTQTNSPRRARSVASQSIIAYTMSLGAENSVAYSNNSIAIPTNFTISVTTEILPVSMTKTSVDCTMYICGDSTECSNLLLQYGSFCTQLNRALTGIAVEQDKNTQEVFAQVKQIYKTPPIKDFGGFNFSQILPDPSKPSKRSFIEDLLFNKVTLADAGFIKQYGDCLGDIAARDLICAQKFNGLTVLPPLLTDEMIAQYTSALLAGTITSGWTFGAGAALQIPFAMQMAYRFNGIGVTQCVLYENQKLIANQFNSAIGKIQDSLSFTASALGKLQDVVNQNAQALNTLVKQLSSNFGAISSVLNDILSRLDKVEAEVQIDRLITGRLQSLQTYVTQQLIRAAEIRASANLAATKMSECVLGQSKRVDFCGKGYHLMSFPQSAPHGVVFLHVTYVPAQEKNFTTAPAICHDGKAHFPREGVFVSNGTHWFVTQRNFYEPQIITTDNTFVCGNCDVVIGIVNNTVYDPLQPELDSGGSGYIPEAPRDGQAYVRKDGEWVLLSTFL

SEQ ID NO: 14010 - protein, 1177 aa, Artificial Sequence; identical to SEQ ID NO: 13990
  SARS-CoV-2/Australia/NSW10/2020__EPI_ISL_413596 spike protein (1-1147)(N914C_S1123C) Foldon construct

SEQ ID NO: 14011 - protein, 1177 aa, Artificial Sequence
  SARS-CoV-2/Switzerland/1000477797/2020__EPI_ISL_413023 spike protein (1-1147)(N914C_S1123C) Foldon construct
MFVFLVLLPLVSSQCVNLTTRTQLPPAYTNSFTRGVYYPDKVFRSSVLHSTQDLFLPFFSNVTWFHAIHVSGTNGTKRFDNPVLPFNDGVYFASTEKSNIIRGWIFGTTLDSKTQSLLIVNNATNVVIKVCEFQFCNDPFLGVYYHKNNKSWMESEFRVYSSANNCTFEYVSQPFLMDLEGKQGNFKNLREFVFKNIDGYFNIYSKHTPINLVRDLPQGFSALEPLVDLPIGINITRFQTLLALHRSYLTPGDSSSGWTAGAAAYYVGYLQPRTFLLKYNENGTITDAVDCALDPLSETKCTLKSFTVEKGIYQTSNFRVQPTESIVRFPNITNLCPFGEVFNATRFASVYAWNRKRISNCVADYSVLYNSASFSTFKCYGVSPTKLNDLCFTNVYADSFVIRGDEVRQIAPGQTGKIADYNYKLPDDFTGCVIAWNSNNLDSKVGGNYNYLYRLFRKSNLKPFERDISTEIYQAGSTPCNGVEGFNCYFPLQSYGFQPTNGVGYQPYRVVVLSFELLHAPATVCGPKKSTNLVKNKCVNFNFNGLTGTGVLTESNKKFLPFQQFGRDIADTTDAVRDPQTLEILDITPCSFGGVSVITPGTNTSNQVAVLYQGVNCTEVPVAIHADQLTPTWRVYSTGSNVFQTRAGCLIGAEHVNNSYECDIPIGAGICASYQTQTNSPRRARSVASQSIIAYTMSLGAENSVAYSNNSIAIPTNFTISVTTEILPVSMTKTSVDCTMYICGDSTECSNLLLQYGSFCTQLNRALTGIAVEQDKNTQEVFAQVKQIYKTPPIKDFGGFNFSQILPDPSKPSKRSFIEDLLFNKVTLADAGFIKQYGDCLGDIAARDLICAQKFNGLTVLPPLLTDEMIAQYTSALLAGTITSGWTFGAGAALQIPFAMQMAYRFNGIGVTQCVLYENQKLIANQFNSAIGKIQDSLSSTASALGKLQDVVNQNAQALNTLVKQLSSNFGAISSVLNDILSRLDKVEAEVQIDRLITGRLQSLQTYVTQQLIRAAEIRASANLAATKMSECVLGQSKRVDFCGKGYHLMSFPQSAPHGVVFLHVTYVPAQEKNFTTAPAICHDGKAHFPREGVFVSNGTHWFVTQRNFYEPQIITTDNTFVCGNCDVVIGIVNNTVYDPLQPELDSGGSGYIPEAPRDGQAYVRKDGEWVLLSTFL

SEQ ID NO: 14012 - protein, 1177 aa, Artificial Sequence
  SARS-CoV-2/Belgium/BA-02291/2020__EPI_ISL_415159 spike protein (1-1147)(N914C_S1123C) Foldon construct
MFVFLVLLPLVSSQCVNLTTRTQLPPAYTNSFTRGVYYPDKVFRSSVLHSTQDLFLPFFSNVTWFHAIHVSGTNGTKRFDNPVLPFNDGVYFASTEKSNIIRGWIFGTTLDSKTQSLLIVNNATNVVIKVCEFQFCNDPFLGVYYHKNNKSWMESEFRVYSSANNCTFEYVSQPFLMDLEGKQGNFKNLREFVFKNIDGYFKIYSKHTPINLVRDLPQGFSALEPLVDLPIGINITRFQTLLALHRSYLTPGDSSSGWTAGAAAYYVGYLQPRTFLLKYNENGTITDAVDCALDPLSETKCTLKSFTVEKGIYQTSNFRVQPTESIVRFPNITNLCPFGEVFNATRFASVYAWNRKRISNCVADYSVLYNSASFSTFKCYGVSPTKLNDLCFTNVYADSFVIRGDEVRQIAPGQTGKIADYNYKLPDDFTGCVIAWNSNNLDSKVGGNYNYLYRLFRRSNLKPFERDISTEIYQAGSTPCNGVEGFNCYFPLQSYGFQPTNGVGYQPYRVVVLSFELLPAPATVCGPKKSTNLVKNKCVNFNFNGLTGTGVLTESNKKFLPFQQFGRDIADTTDAVRDPQTLEILDITPCSFGGVSVITPGTNTSNQVAVLYQGVNCTEVPVAIHADQLTPTWRVYSTGSNVFQTRAGCLIGAEHVNNSYECDIPIGAGICASYQTQTNSPRRARSVASQSIIAYTMSLGAENSVAYSNNSIAIPTNFTISVTTEILPVSMTKTSVDCTMYICGDSTECSNLLLQYGSFCTQLNRALTGIAVEQDKNTQEVFAQVKQIYKTPPIKDFGGFNFSQILPDPSKPSKRSFIEDLLFNKVTLADAGFIKQYGDCLGDIAARDLICAQKFNGLTVLPPLLTDEMIAQYTSALLAGTITSGWTFGAGAALQIPFAMQMAYRFNGIGVTQCVLYENQKLIANQFNSAIGKIQDSLSSAAPALGKLQDVVNQNAQALNTLVKQLSSNFGAISSVLNDILSRLDKVEAEVQIDRLITGRLQSLQTYVTQQLIRAAEIRASANLAATKMSECVLGQSKRVDFCGKGYHLMSFPQSAPHGVVFLHVTYVPAQEKNFTTAPAICHDGKAHFPREGVFVSNGTHWFVTQRNFYEPQIITTDNTFVCGNCDVVIGIVNNTVYDPLQPELDSGGSGYIPEAPRDGQAYVRKDGEWVLLSTFL

SEQ ID NO: 14013 - protein, 1177 aa, Artificial Sequence
  SARS-CoV-2/USA/WA8-UW5/2020__EPI_ISL_413486 spike protein (1-1147)(N914C_S1123C) Foldon construct
MFVFLVLLPLVSSQCVNLTTRTQLPPAYTNSFTRGVYYPDKVFRSSVLHSTQDLFLPFFSNVTWFHAIHVSGTNGTKRFDNPVLPFNDGVYFASTEKSNIIRGWIFGTTLDSKTQSLLIVNNATNVVIKVCEFQFCNDPFLGVYYHKNNKSWMESEFRVYSSANNCTFEYVSQPFLMDLEGKQGNFKNLREFVFKNIDGYFKIYSKHTPINLVRDLPQGFSALEPLVDLPIGINITRFQTLLALHRSYLTPGDSSSGWTAGAAAYYVGYLQPRTFLLKYNENGTITDAVDCALDPLSETKCTLKSFTVEKGIYQTSNFRVQPTESIVRFPNITNLCPFGEVFNATRFASVYAWNRKRISNCVADYSVLYNSASFSTFKCYGVSPTKLNDLCFTNVYADSFVIRGDEVRQIAPGQTGKIADYNYKLPDDFTGCVIAWNSNNLDSKVGGNYNYLYRLFRKSNLKPFERDISTEIYQAGSTPCNGVEGFNCYFPLQSYGFQPTNGVGYQPYRVVVLSFELLHAPATVCGPKKSTNLVKNKCVNFNFNGLTGTGVLTESNKKFLPFQQFGRDIADTTDAVRDPQTLEILDITPCSFGGVSVITPGTNTSNQVAVLYQDVNCTEVPVAIHADQLTPTWRVYSTGSNVFQTRAGCLIGAEYVNNSYECDIPIGAGICASYQTQTNSPRRARSVASQSIIAYTMSLGAENSVAYSNNSIAIPTNFTISVTTEILPVSMTKTSVDCTMYICGDSTECSNLLLQYGSFCTQLNRALTGIAVEQDKNTQEVFAQVKQIYKTPPIKDFGGFNFSQILPDPSKPSKRSFIEDLLFNKVTLADAGFIKQYGDCLGDIAARDLICAQKFNGLTVLPPLLTDEMIAQYTSALLAGTITSGWTFGAGAALQIPFAMQMAYRFNGIGVTQCVLYENQKLIANQFNSAIGKIQDSLSSTASALGKLQDVVNQNAQALNTLVKQLSSNFGAISSVLNDILSRLDKVEAEVQIDRLITGRLQSLQTYVTQQLIRAAEIRASANLAATKMSECVLGQSKRVDFCGKGYHLMSFPQSAPHGVVFLHVTYVPAQEKNFTTAPAICHDGKAHFPREGVFVSNGTHWFVTQRNFYEPQIITTDNTFVCGNCDVVIGIVNNTVYDPLQPELDSGGSGYIPEAPRDGQAYVRKDGEWVLLSTFL

SEQ ID NO: 14014 - protein, 1177 aa, Artificial Sequence
  SARS-CoV-2/England/20102000506/2020__EPI_ISL_415147 spike protein (1-1147)(N914C_S1123C) Foldon construct
MFVFLVLLPLVSSQCVNLTTRTQLPPAYTNSFTRGVYYPDKVFRSSVLHSTQDLFLPFFSNVTWFHAIHVSGTNGTKRFDNPVLPFNDGVYFASTEKSNIIRGWIFGTTLDSKTQSLLIVNNATNVVIKVCEFQFCNDPFLGVYYHKNNKSWMESEFRVYSSANNCTFEYVSQPFLMDLEGKQGNFKNLREFVFKNIDGYFKIYSKHTPINLVRDLPQGFSALEPLVDLPIGINITRFQTLLALHRSYLTPGDSSSGWTAGAAAYYVGYLQPRTFLLKYNENGTITDAVDCALDPLSETKCTLKSFTVEKGIYQTSNFRVQPTESIVRFPNITNLCPFGEVFNATRFASVYAWNRKRISNCVADYSVLYNSASFSTFKCYGVSPTKLNDLCFTNVYADSFVIRGDEVRQIAPGQTGKIADYNYKLPDDFTGCVIAWNSNNLDSKVGGNYNYLYRLFRKSNLKPFERDISTEIYQAGSTPCNGVEGFNCYFPLQSYGFQPTNGVGYQPYRVVVLSFELLHAPATVCGPKKSTNLVKNKCVNFNFNGLTGTGVLTESNKKFLPFQQFGRDIADTTDAVRDPQTLEILDITPCSFGGVSVITPGTNTSNQVAVLYQGVNCTEVPVAIHADQLTPTWRVYSTGSNVFQTRAGCLIGAEHVNNSYECDIPIGAGICASYQTQTNSPRRARSVASQSIIAYTMSLGAENSVAYSNNSIAIPTNFTISVTTEILPVSMTKTSVDCTMYICGDSTECSNLLLQYGSFCTQLNRALTGIAVEQDKNTQEVFAQVKQIYKTPPIKDFGGFNFSQILPDPSKPSKRSFIEDLLFNKVTLADAGFIKQYGYCLGDIAARDLICAQKFNGLTVLPPLLTDEMIAQYTSALLAGTITSGWTFGAGAALQIPFAMQMAYRFNGIGVTQCVLYENQKLIANQFNSAIGKIQDSLSSTASALGKLQDVVNQNAQALNTLVKQLSSNFGAISSVLNDILSRLDKVEAEVQIDRLITGRLQSLQTYVTQQLIRAAEIRASANLAATKMSECVLGQSKRVDFCGKGYHLMSFPQSAPHGVVFLHVTYVPAQEKNFTTAPAICHDGKAHFPREGVFVSNGTHWFVTQRNFYEPQIITTDNTFVCGNCDVVIGIVNNTVYDPLQPELDSGGSGYIPEAPRDGQAYVRKDGEWVLLSTFL

SEQ ID NO: 14015 - protein, 1177 aa, Artificial Sequence
  SARS-CoV-2/Belgium/VAG-03013/2020__EPI_ISL_415155 spike protein (1-1147)(N914C_S1123C) Foldon construct
MFVFLVLLPLVSSQCVNLTTRTQLPPAYTNSFTRGVYYPDKVFRSSVLHSTQDLFLPFFSNVTWFHAIHVSGTNGTKRFDNPVLPFNDGVYFASTEKSNIIRGWIFGTTLDSKTQSLLIVNNATNVVIKVCEFQFCNDPFLGVYYHKNNKSWMESEFRVYSSANNCTFEYVSQPFLMDLEGKQGNFKNLREFVFKNIDGYFKIYSKHTPINLVRDLPQGFSALEPLVDLPIGINITRFQTLLALHRSYLTPGDSSSGWTAGAAAYYVGYLQPRTFLLKYNENGTITDAVDCALDPLSETKCTLKSFTVEKGIYQTSNFRVQPTESIVRFPNITNLCPFGEVFNATRFASVYAWNRKRISNCVADYSVLYNSASFSTFKCYGVSPTKLNDLCFTNVYADSFVIRGDEVRQIAPGQTGKIADYNYKLPDDFTGCVIAWNSNNLDSKVGGNYNYLYRLFRKSNLKPFERDISTEIYQAGSTPCNGVEGFNCYFPLQSYGFQPTNGVGYQPYRVVVLSFELLHAPATVCGPKKSTNLVKNKCVNFNFNGLTGTGVLTESNKKFLPFQQFGRDIADTTDAVRDPQTLEILDITPCSFGGVSVITPGTNTSNQVAVLYQGVNCTEVPVAIHADQLTPTWRVYSTGSNVFQTRAGCLIGAEHVNNSYECDIPIGAGICASYQTQTNSPRRARSVASQSIIAYTMSLGAENSVAYSNNSIAIPTNFTISVTTEILPVSMTKTSVDCTMYICGDSTECSNLLLQYGSFCTQLNRALTGIAVEQDKNTQEVFAQVKQIYKTPPIKDFGGFNFSQILPDPSKPSKRSFIEDLLFNKVTLADAGFIKQYGDCLGDIAARDLICAQKFNGLTVLPPLLTDEMIAQYTSALLAGTITSGWTFGAGAALQIPFAMQMAYRFNGIGVTQCVLYENQKLIANQFNSAIGKIQDSLSSTATALGKLQDVVNQNAQALNTLVKQLSSNFGAISSVLNDILSRLDKVEAEVQIDRLITGRLQSLQTYVTQQLIRAAEIRASANLAATKMSECVLGQSKRVDFCGKGYHLMSFPQSAPHGVVFLHVTYVPAQEKNFTTAPAICHDGKAHFPREGVFVSNGTHWFVTQRNFYEPQIITTDNTFVCGNCDVVIGIVNNTVYDPLQPELDSGGSGYIPEAPRDGQAYVRKDGEWVLLSTFL

SEQ ID NO: 14016 - protein, 1177 aa, Artificial Sequence
  SARS-CoV-2/Belgium/BC-03016/2020__EPI_ISL_415157 spike protein (1-1147)(N914C_S1123C) Foldon construct
MFVFLVLLPLVSSQCVNLTTRTQLPPAYTNSFTRGVYYPDKVFRSSVLHSTQDLFLPFFSNVTWFHAIHVSGTNGTKRFDNPVLPFNDGVYFASTEKSNIIRGWIFGTTLDSKTQSLLIVNNATNVVIKVCEFQFCNDPFLGVYYHKNNKSWMESEFRVYSSANNCTFEYVSQPFLMDLEGKQGNFKNLREFVFKNIDGYFKIYSKHTPINLVRDLPQGFSALEPLVDLPIGINITRFQTLLALHRSYLTPGDSSSGWTAGAAAYYVGYLQPRTFLLKYNENGTITDAVDCALDPLSETKCTLKSFTVEKGIYQTSNFRVQPTESIVRFPNITNLCPFGEVFNATRFASVYAWNRKRISNCVADYSVLYNSASFSTFKCYGVSPTKLNDLCFTNVYADSFVIRGDEVRQIAPGQTGKIADYNYKLPDDFTGCVIAWNSNNLDSKVGGNYNYLYRLFRKSNLKPFERDISTEIYQAGSTPCNGVEGFNCYFPLQSYGFQPTNGVGYQPYRVVVLSFELLHAPATVCGPKKSTNLVKNKCVNFNFNGLTGTGVLTESNKKFLPFQQFGRDIADTTDAVRDPQTLEILDITPCSFGGVSVITPGTNTSNQVAVLYQGVNCTEVPVAIHADQLTPTWRVYSTGSNVFQTRAGCLIGAEHVNNSYECDIPIGAGICASYQTQTNSPRRARSVASQSIIAYTMSLGAENSVAYSNNSIAIPTNFTISVTTEILPVSMTKTSVDCTMYICGDSTECSNLLLQYGSFCTQLNRALTGIAVEQDKNTQEVFAQVKQIYKTPPIKDFGGFNFSQILPDPSKPSKRSFIEDLLFNKVTLADAGFIKQYGDCLGDIAARDLICAQKFNGLTVLPPLLTDEMIAQYTSALLAGTITSGWTFGAGAALQIPFAMQMAYRFNGIGVTQCVLYENQKLIANQFNSAIGKIQDSLSSTAPALGKLQDVVNQNAQALNTLVKQLSSNFGAISSVLNDILSRLDKVEAEVQIDRLITGRLQSLQTYVTQQLIRAAEIRASANLAATKMSECVLGQSKRVDFCGKGYHLMSFPQSAPHGVVFLHVTYVPAQEKNFTTAPAICHDGKAHFPREGVFVSNGTHWFVTQRNFYEPQIITTDNTFVCGNCDVVIGIVNNTVYDPLQPELDSGGSGYIPEAPRDGQAYVRKDGEWVLLSTFL

SEQ ID NO: 14017 - protein, 1177 aa, Artificial Sequence
  SARS-CoV-2/Germany/BavPat3/2020__EPI_ISL_414521 spike protein (1-1147)(N914C_S1123C) Foldon construct
MFVFLVLLPLVSSQCVNLTTRTQLPPAYTNSFTRGVYYPDKVFRSSVLHSTQDLFLPFFSNVTWFHAIHVSGTNGTKRFDNPVLPFNDGVYFASTEKSNIIRGWIFGTTLDSKTQSLLIVNNATNVVIKVCEFQFCNDPFLGVYYHKNNKSWMESEFRVYSSANNCTFEYVSQPFLMDLEGKQGNFKNLREFVFKNIDGYFKIYSKHTPINLVRDLPQGFSALEPLVDLPIGINITRFQTLLALHRSYLTPGDSSSGWTAGAAAYYVGYLQPRTFLLKYNENGTITDAVDCALDPLSETKCTLKSFTVEKGIYQTSNFRVQPTESIVRFPNITNLCPFGEVFNATRFASVYAWNRKRISNCVADYSVLYNSASFSTFKCYGVSPTKLNDLCFTNVYADSFVIRGDEVRQIAPGQTGKIADYNYKLPDDFTGCVIAWNSNNLDSKVGGNYNYLYRLFRKSNLKPFERDISTEIYQAGSTPCNGVEGFNCYFPLQSYGFQPTNGVGYQPYRVVVLSFELLHAPATVCGPKKSTNLVKNKCVNFNFNGLTGTGVLTESNKKFLPFQQFGRDIADTTDAVRDPQTLEILDITPCSFGGVSVITPGTNTSNQVAVLYQDVNCTEVPVAIHADQLTPTWRVYSTGSNVFQTRAGCLIGAEHVNNSYECDIPIGAGICASYQTQTNSPRRARSVASQSIIAYTMSLGAENSVAYSNNSIAIPTNFTISVTTEILPVSMTKTSVDCTMYICGDSTECSNLLLQYGSFCTQLNRALTGIAVEQDKNTQQVFAQVKQIYKTPPIKDFGGFNFSQILPDPSKPSKRSFIEDLLFNKVTLADAGFIKQYGDCLGDIAARDLICAQKFNGLTVLPPLLTDEMIAQYTSALLAGTITSGWTFGAGAALQIPFAMQMAYRFNGIGVTQCVLYENQKLIANQFNSAIGKIQDSLSSTASALGKLQDVVNQNAQALNTLVKQLSSNFGAISSVLNDILSRLDKVEAEVQIDRLITGRLQSLQTYVTQQLIRAAEIRASANLAATKMSECVLGQSKRVDFCGKGYHLMSFPQSAPHGVVFLHVTYVPAQEKNFTTAPAICHDGKAHFPREGVFVSNGTHWFVTQRNFYEPQIITTDNTFVCGNCDVVIGIVNNTVYDPLQPELDSGGSGYIPEAPRDGQAYVRKDGEWVLLSTFL

SEQ ID NO: 14018 - protein, 1177 aa, Artificial Sequence
  SARS-CoV-2/France/HF1805/2020__EPI_ISL_414628 spike protein (1-1147)(N914C_S1123C) Foldon construct
MFVFLVLLPLVSSQCVNLTTRTQLPPAYTNSFTRGVYYPDKVFRSSVLHSTQDLFLPFFSNVTWFHAIHVSGTNGTKRFDNPVLPFNDGVYFASTEKSNIIRGWIFGTTLDSKTQSLLIVNNATNVVIKVCEFQFCNDPFLGVYYHKNNKSWMESEFRVYSSANNCTFEYVSQPFLMDLEGKQGNFKNLREFVFKNIDGYFKIYSKHTPINLVRDLPQGFSALEPLVDLPIGINITRFQTLLALHRSYLTPGDSSSGWTAGAAAYYVGYLQPRTFLLKYNENGTITDAVDCALDPLSETKCTLKSFTVEKGIYQTSNFRVQPTESIVRFPNITNLCPFGEVFNATRFASVYAWNRKRISNCVADYSVLYNSASFSTFKCYGVSPTKLNDLCFTNVYADSFVIRGDEVRQIAPGQTGKIADYNYKLPDDFTGCVIAWNSNNLDSKVGGNYNYLYRLFRKSNLKPFERDISTEIYQAGSTPCNGVEGFNCYFPLQSYGFQPTNGVGYQPYRVVVLSFELLHAPATVCGPKKSTNLVKNKCVNFNFNGLTGTGVLTESNKKFLPFQQFGRDIADTTDAVRDPQTLEILDITPCSFGGVSVITPGTNTSNQVAVLYQGVNCTEVPVAIHADQLTPTWRVYSTGSNVFQTRAGCLIGAEHVNNSYECDIPIGAGICASYQTQTNSPRRARSVASQSIIAYTMSLGAENSVAYSNNSIAIPTNFTISVTTEILPVSMTKTSVDCTMYICGDSTECSNLLLQYGSFCTQLNRALTGIAVEQDKNTQEVFAQVKQIYKTPPIKDFGGFNFSQILPDPSKPSKRSFIEDLLFNKVTLADAGFIKQYGDCLGDIAARDLICAQKFNGLTVLPPLLTDEMIAQYTSALLAGTITSGWTFGAGAALQIPFAMQMAYRFNGIGVTQCVLYENQKLIANQFNSAIGKIQDSLSSTASALGKLQDVVNQNAQALNTLVKQLSSNFGAISSVLNDILSRLDKVEAEVQIDRLITGRLQSLQTYVTQQLIRAAEIRASANLAATKMSECVLGQSKRVDFCGKGYHLMSFPQSAPHGVVFLHVTYVPAQEKNFTTAPAICHDGKAHFPREGVFVSNGTHWFVTQRNFYEPQIITTDNTFVCGNCDVVIGVVNNTVYDPLQPELDSGGSGYIPEAPRDGQAYVRKDGEWVLLSTFL

SEQ ID NO: 14019 - protein, 1177 aa, Artificial Sequence
  SARS-CoV-2/Netherlands/ZuidHolland_9/2020__EPI_ISL_414445 spike protein (1-1147)(N914C_S1123C) Foldon construct
MFVFLVLLPLVSSQCVNLTTRTQLPPAYTNSFTRGVYYPDKVFRSSVLHSTQDLFLPFFSNVTWFHAIHVSGTNGTKRFDNPVLPFNDGVYFASTEKSNIIRGWIFGTTLDSKTQSLLIVNNATNVVIKVCEFQFCNDPFLGVYYHKNNKSWMESEFRVYSSANNCTFEYVSQPFLMDLEGKQGNFKNLREFVFKNIDGYFKIYSKHTPINLVRDLPQGFSALEPLVDLPIGINITRFQTLLALHRSYLTPGDSSSGWTAGAAAYYVGYLQPRTFLLKYNENGTITDAVDCALDPLSETKCTLKSFTVEKGIYQTSNFRVQPTESIVRFPNITNLCPFGEVFNATRFASVYAWNRKRISNCVADYSVLYNSASFSTFKCYGVSPTKLNDLCFTNVYADSFVIRGDEVRQIAPGQTGKIADYNYKLPDDFTGCVIAWNSNNLDSKVGGNYNYLYRLFRKSNLKPFERDISTEIYQAGSTPCNGVEGFNCYFPLQSYGFQPTNGVGYQPYRVVVLSFELLHAPATVCGPKKSTNLVKNKCVNFNFNGLTGTGVLTESNKKFLPFQQFGRDIADTTDAVRDPQTLEILDITPCSFGGVSVITPGTNTSNQVAVLYQGVNCTEVPVAIHADQLTPTWRVYSTGSNVFQTRAGCLIGAEHVNNSYECDIPIGAGICASYQTQTNSPRRARSVASQSIIAYTMSLGAENSVAYSNNSIAIPTNFTISVTTEILPVSMTKTSVDCTMYICGDSTECSNLLLQYGSFCTQLNRALTGIAVEQDKNTQEVFAQVKQIYKTPPIKDFGGFNFSQILPDPSKPSKRSFIEDLLFNKVTLADAGFIKQYGDCLGDIAARDLICVQKFNGLTVLPPLLTDEMIAQYTSALLAGTITSGWTFGAGAALQIPFAMQMAYRFNGIGVTQCVLYENQKLIANQFNSAIGKIQDSLSSTASALGKLQDVVNQNAQALNTLVKQLSSNFGAISSVLNDILSRLDKVEAEVQIDRLITGRLQSLQTYVTQQLIRAAEIRASANLAATKMSECVLGQSKRVDFCGKGYHLMSFPQSAPHGVVFLHVTYVPAQEKNFTTAPAICHDGKAHFPREGVFVSNGTHWFVTQRNFYEPQIITTDNTFVCGNCDVVIGIVNNTVYDPLQPELDSGGSGYIPEAPRDGQAYVRKDGEWVLLSTFL

SEQ ID NO: 14020 - protein, 1177 aa, Artificial Sequence
  SARS-CoV-2/Finland/FIN03032020A/2020__EPI_ISL_413602 spike protein (1-1147)(N914C_S1123C) Foldon construct
MFVFLVLLPLVSSQCVNLTTRTQLPPAYTNSFTRGVYYPDKVFRSSVLHSTQDLFLPFFSNVTWFHAIHVSGTNGTKRFDNPVLPFNDGVYFASTEKSNIIRGWIFGTTLDSKTQSLLIVNNATNVVIKVCEFQFCNDPFLGVYYHKNNKSWMESEFRVYSSANNCTFEYVSQPFLMDLEGKQGNFKNLREFVFKNIDGYFKIYSKHTPINLVRDLPQGFSALEPLVDLPIGINITRFQTLLALHRSYLTPGDSSSGWTAGAAAYYVGYLQPRTFLLKYNENGTITDAVDCALDPLSETKCTLKSFTVEKGIYQTSNFRVQPTESIVRFPNITNLCPFGEVFNATRFASVYAWNRKRISNCVADYSVLYNSASFSTFKCYGVSPTKLNDLCFTNVYADSFVIRGDEVRQIAPGQTGKIADYNYKLPDDFTGCVISWNSNNLDSKVGGNYNYLYRLFRKSNLKPFERDISTEIYQAGSTPCNGVEGFNCYFPLQSYGFQPTNGVGYQPYRVVVLSFELLHAPATVCGPKKSTNLVKNKCVNFNFNGLTGTGVLTESNKKFLPFQQFGRDIADTTDAVRDPQTLEILDITPCSFGGVSVITPGTNTSNQVAVLYQGVNCTEVPVAIHADQLTPTWRVYSTGSNVFQTRAGCLIGAEHVNNSYECDIPIGAGICASYQTQTNSPRRARSVASQSIIAYTMSLGAENSVAYSNNSIAIPTNFTISVTTEILPVSMTKTSVDCTMYICGDSTECSNLLLQYGSFCTQLNRALTGIAVEQDKNTQEVFAQVKQIYKTPPIKDFGGFNFSQILPDPSKPSKRSFIEDLLFNKVTLADAGFIKQYGDCLGDIAARDLICAQKFNGLTVLPPLLTDEMIAQYTSALLAGTITSGWTFGAGAALQIPFAMQMAYRFNGIGVTQCVLYENQKLIANQFNSAIGKIQDSLSSTASALGKLQDVVNQNAQALNTLVKQLSSNFGAISSVLNDILSRLDKVEAEVQIDRLITGRLQSLQTYVTQQLIRAAEIRASANLAATKMSECVLGQSKRVDFCGKGYHLMSFPQSAPHGVVFLHVTYVPAQEKNFTTAPAICHDGKAHFPREGVFVSNGTHWFVTQRNFYEPQIITTDNTFVCGNCDVVIGIVNNTVYDPLQPELDSGGSGYIPEAPRDGQAYVRKDGEWVLLSTFL

SEQ ID NO: 14021 - protein, 1177 aa, Artificial Sequence
  SARS-CoV-2/France/GE1977/2020__EPI_ISL_414632 spike protein (1-1147)(N914C_S1123C) Foldon construct
MFVFLVLLPLVSSQCVNLTTRTQLPPAYTNSFTRGVYYPDKVFRSSVLHSTQDLFLPFFSNVTWFHAIHVSGTNGTKRFDNPVLPFNDGVYFASTEKSNIIRGWIFGTTLDSKTQSLLIVNNATNVVIKVCEFQFCNDPFLGVYYHKNNKSWMESEFRVYSSANNCTFEYVSQPFLMDLEGKQGNFKNLREFVFKNIDGYFKIYSKHTPINLVRDLPQGFSALEPLVDLPIGINITRFQTLLALHRSYLTPGDSSSGWTAGAAAYYVGYLQPRTFLLKYNENGTITDAVDCALDPLSETKCTLKSFTVEKGIYQTSNFRVQPTESIVRFPNITNLCPFGEVFNATRFASVYAWNRKRISNCVADYSVLYNSASFSTFKCYGVSPTKLNDLCFTNVYADSFVIRGDEVRQIAPGQTGKIADYNYKLPDDFTGCVIAWNSNNLDSKVGGNYNYLYRLFRKSNLKPFERDISTEIYQAGSTPCNGVEGFNCYFPLQSYGFQPTNGVGYQPYRVVVLSFELLHAPATVCGPKKSTNLVKNKCVNFNFNGLTGTGVLTESNKKFLPFQQFGRDIADTTDAVRDPQTLEILDITPCSFGGVSVITPGTNTSNQVAVLYQGVNCTEVPVAIHADQLTPTWRVYSTGSNVFQTRAGCLIGAEHVNNSYECDIPIGAGICASYQTQTNSPRRARSVASQSIIAYTMSLGAENSVAYSNNSIAIPTNFTISVTTEILPVSMTKTSVDCTMYICGDSTECSNLLLQYGSFCTQLNRALTGIAVEQDKNTQEVFAQVKQIYKTPPIKDFGGFNFSQILPDPSKPSKRSFIEDLLFNKVTLADAGFIKQYGDCLGDIAARDLICAQKFNGLTVLPPLLTDEMIAQYTSALLAGTITSGWTFGAGAALQIPFAMQMAYRFNGIGVTQCVLYENQKLIANQFNSAIGKIQDSLFSTASALGKLQDVVNQNAQALNTLVKQLSSNFGAISSVLNDILSRLDKVEAEVQIDRLITGRLQSLQTYVTQQLIRAAEIRASANLAATKMSECVLGQSKRVDFCGKGYHLMSFPQSAPHGVVFLHVTYVPAQEKNFTTAPAICHDGKAHFPREGVFVSNGTHWFVTQRNFYEPQIITTDNTFVCGNCDVVIGIVNNTVYDPLQPELDSGGSGYIPEAPRDGQAYVRKDGEWVLLSTFL

SEQ ID NO: 14022 - protein, 1177 aa, Artificial Sequence
  SARS-CoV-2/Finland/FIN-313/2020__EPI_ISL_414641 spike protein (1-1147)(N914C_S1123C) Foldon construct
MFVFLVLLPLVSSQCVNLTTRTQLPPAYTNSFTRGVYYPDKVFRSSVLHSTQDLFLPFFSNVTWFHAIHVSGTNGTKRFDNPVLPFNDGVYFASTEKSNIIRGWIFGTTLDSKTQSLLIVNNATNVVIKVCEFQFCNDPFLGVYYHKNNKSWMESEFRVYSSANNCTFEYVSQPFLMDLEGKQGNFKNLREFVFKNIDGYFKIYSKHTPINLVRDLPQGFSALEPLVDLPIGINITRFKTLLALHRSYLTPGDSSSGWTAGAAAYYVGYLQPRTFLLKYNENGTITDAVDCALDPLSETKCTLKSFTVEKGIYQTSNFRVQPTESIVRFPNITNLCPFGEVFNATRFASVYAWNRKRISNCVADYSVLYNSASFSTFKCYGVSPTKLNDLCFTNVYADSFVIRGDEVRQIAPGQTGKIADYNYKLPDDFTGCVIAWNSNNLDSKVGGNYNYLYRLFRKSNLKPFERDISTEIYQAGSTPCNGVEGFNCYFPLQSYGFQPTNGVGYQPYRVVVLSFELLHAPATVCGPKKSTNLVKNKCVNFNFNGLTGTGVLTESNKKFLPFQQFGRDIADTTDAVRDPQTLEILDITPCSFGGVSVITPGTNTSNQVAVLYQGVNCTEVPVAIHADQLTPTWRVYSTGSNVFQTRAGCLIGAEHVNNSYECDIPIGAGICASYQTQTNSPRRARSVASQSIIAYTMSLGAENSVAYSNNSIAIPTNFTISVTTEILPVSMTKTSVDCTMYICGDSTECSNLLLQYGSFCTQLNRALTGIAVEQDKNTQEVFAQVKQIYKTPPIKDFGGFNFSQILPDPSKPSKRSFIEDLLFNKVTLADAGFIKQYGDCLGDIAARDLICAQKFNGLTVLPPLLTDEMIAQYTSALLAGTITSGWTFGAGAALQIPFAMQMAYRFNGIGVTQCVLYENQKLIANQFNSAIGKIQDSLSSTASALGKLQDVVNQNAQALNTLVKQLSSNFGAISSVLNDILSRLDKVEAEVQIDRLITGRLQSLQTYVTQQLIRAAEIRASANLAATKMSECVLGQSKRVDFCGKGYHLMSFPQSAPHGVVFLHVTYVPAQEKNFTTAPAICHDGKAHFPREGVFVSNGTHWFVTQRNFYEPQIITTDNTFVCGNCDVVIGIVNNTVYDPLQPELDSGGSGYIPEAPRDGQAYVRKDGEWVLLSTFL

SEQ ID NO: 14023 - protein, 1177 aa, Artificial Sequence
  SARS-CoV-2/Netherlands/ZuidHolland_2/2020__EPI_ISL_414556 spike protein (1-1147)(N914C_S1123C) Foldon construct
MFVFLVLLPLVSSQCVNLTTRTQLPPAYTNSFTRGVYYPDKVFRSSVLHSTQDLFLPFFSNVTWFHAIHVSGTNGTKRFDNPVLPFNDGVYFASTEKSNIIRGWIFGTTLDSKTQSLLIVNNATNVVIKVCEFQFCNDPFLGVYYHKNNKSWMESEFRVYSSANNCTFEYVSQPFLMDLEGKQGNFKNLREFVFKNIDGYFKIYSKHTPINLVRDLPQGFSALEPLVDLPIGINITRFQTLLALHRSYLTPGDSSSGWTAGAAAYYVGYLQPRTFLLKYNENGTITDAVDCALDPLSETKCTLKSFTVEKGIYQTSNFRVQPTESIVRFPNITNLCPFGEVFNATRFASVYAWNRKRISNCVADYSVLYNSASFSTFKCYGVSPTKLNDLCFTNVYADSFVIRGDEVRQIAPGQTGKIADYNYKLPDDFTGCVIAWNSNNLDSKVGGNYNYLYRLFRKSNLKPFERDISTEIYQAGSTPCNGVEGFNCYFPLQSYGFQPTNGVGYQPYRVVVLSFELLHAPATVCGPKKSTNLVKNKCVNFNFNGLTGTGVLTESNKKFLPFQQFGRDIADTTDAVRDPQTLEILDITPCSFGGVSVITPGTNTSNQVAVLYQGVNCTEVPVAIHADQLTPTWRVYSTGSNVFQTRAGCLIGAEHVNNSYECDIPIGAGICASYQTQTNSPRRARSVASQSIIAYTMSLGAENSVAYSNNSIAIPTNFTISVTTEILPVSMTKTSVDCTMYICGDSTECSNLLLQYGSFCTQLNRALTGIALEQDKNTQEVFAQVKQIYKTPPIKDFGGFNFSQILPDPSKPSKRSFIEDLLFNKVTLADAGFIKQYGDCLGDIAARDLICAQKFNGLTVLPPLLTDEMIAQYTSALLAGTITSGWTFGAGAALQIPFAMQMAYRFNGIGVTQCVLYENQKLIANQFNSAIGKIQDSLSSTASALGKLQDVVNQNAQALNTLVKQLSSNFGAISSVLNDILSRLDKVEAEVQIDRLITGRLQSLQTYVTQQLIRAAEIRASANLAATKMSECVLGQSKRVDFCGKGYHLMSFPQSAPHGVVFLHVTYVPAQEKNFTTAPAICHDGKAHFPREGVFVSNGTHWFVTQRNFYEPQIITTDNTFVCGNCDVVIGIVNNTVYDPLQPELDSGGSGYIPEAPRDGQAYVRKDGEWVLLSTFL

SEQ ID NO: 14024 - protein, 1177 aa, Artificial Sequence
  SARS-CoV-2/USA/WA-UW31/2020__EPI_ISL_414618 spike protein (1-1147)(N914C_S1123C) Foldon construct
MFVFLVLLPLVSSQCVNLTTRTQLPPAYTNSFTRGVYYPDKVFRSSVLHSTQDLFLPFFSNVTWFHAIHVSGTNGTKRFDNPVLPFNDGVYFASTEKSNIIRGWIFGTTLDSKTQSLLIVNNATNVVIKVCEFQFCNDPFLGVYYHKNNKSWMESEFRVYSSANNCTFEYVSQPFLMDLEGKQGNFKNLREFVFKNIDGYFKIYSKHTPINLVRDLPQGFSALEPLVDLPIGINITRFQTLLALHRSYLTPGDSSSGWTAGAAAYYVGYLQPRTFLLKYNENGTITDAVDCALDPLSETKCTLKSFTVEKGIYQTSNFRVQPTESIVRFPNITNLCPFGEVFNATRFASVYAWNRKRISNCVADYSVLYNSASFSTFKCYGVSPTKLNDLCFTNVYADSFVIRGDEVRQIAPGQTGKIADYNYKLPDDFTGCVIAWNSNNLDSKVGGNYNYLYRLFRKSNLKPFERDISTEIYQAGSTPCNGAEGFNCYFPLQSYGFQPTNGVGYQPYRVVVLSFELLHAPATVCGPKKSTNLVKNKCVNFNFNGLTGTGVLTESNKKFLPFQQFGRDIADTTDAVRDPQTLEILDITPCSFGGVSVITPGTNTSNQVAVLYQDVNCTEVPVAIHADQLTPTWRVYSTGSNVFQTRAGCLIGAEHVNNSYECDIPIGAGICASYQTQTNSPRRARSVASQSIIAYTMSLGAENSVAYSNNSIAIPTNFTISVTTEILPVSMTKTSVDCTMYICGDSTECSNLLLQYGSFCTQLNRALTGIAVEQDKNTQEVFAQVKQIYKTPPIKDFGGFNFSQILPDPSKPSKRSFIEDLLFNKVTLADAGFIKQYGDCLGDIAARDLICAQKFNGLTVLPPLLTDEMIAQYTSALLAGTITSGWTFGAGAALQIPFAMQMAYRFNGIGVTQCVLYENQKLIANQFNSAIGKIQDSLSSTASALGKLQDVVNQNAQALNTLVKQLSSNFGAISSVLNDILSRLDKVEAEVQIDRLITGRLQSLQTYVTQQLIRAAEIRASANLAATKMSECVLGQSKRVDFCGKGYHLMSFPQSAPHGVVFLHVTYVPAQEKNFTTAPAICHDGKAHFPREGVFVSNGTHWFVTQRNFYEPQIITTDNTFVCGNCDVVIGIVNNTVYDPLQPELDSGGSGYIPEAPRDGQAYVRKDGEWVLLSTFL

SEQ ID NO: 14025 - protein, 1177 aa, Artificial Sequence
  SARS-CoV-2/South Korea/SNU01/2020__EPI_ISL_411929 spike protein (1-1147)(N914C_S1123C) Foldon construct
MFVFLVLLPLVSSQCVNLTTRTQLPPAYTNSFTRGVYYPDKVFRSSVLHSTQDLFLPFFSNVTWFHAIHVSGTNGTKRFDNPVLPFNDGVYFASTEKSNIIRGWIFGTTLDSKTQSLLIVNNATNVVIKVCEFQFCNDPFLGVYYHKNNKSWMESEFRVYSSANNCTFEYVSQPFLMDLEGKQGNFKNLREFVFKNIDGYFKIYSKHTPINLVRDLPQGFWALEPLVDLPIGINITRFQTLLALHRSYLTPGDSSSGWTAGAAAYYVGYLQPRTFLLKYNENGTITDAVDCALDPLSETKCTLKSFTVEKGIYQTSNFRVQPTESIVRFPNITNLCPFGEVFNATRFASVYAWNRKRISNCVADYSVLYNSASFSTFKCYGVSPTKLNDLCFTNVYADSFVIRGDEVRQIAPGQTGKIADYNYKLPDDFTGCVIAWNSNNLDSKVGGNYNYLYRLFRKSNLKPFERDISTEIYQAGSTPCNGVEGFNCYFPLQSYGFQPTNGVGYQPYRVVVLSFELLHAPATVCGPKKSTNLVKNKCVNFNFNGLTGTGVLTESNKKFLPFQQFGRDIADTTDAVRDPQTLEILDITPCSFGGVSVITPGTNTSNQVAVLYQDVNCTEVPVAIHADQLTPTWRVYSTGSNVFQTRAGCLIGAEHVNNSYECDIPIGAGICASYQTQTNSPRRARSVASQSIIAYTMSLGAENSVAYSNNSIAIPTNFTISVTTEILPVSMTKTSVDCTMYICGDSTECSNLLLQYGSFCTQLNRALTGIAVEQDKNTQEVFAQVKQIYKTPPIKDFGGFNFSQILPDPSKPSKRSFIEDLLFNKVTLADAGFIKQYGDCLGDIAARDLICAQKFNGLTVLPPLLTDEMIAQYTSALLAGTITSGWTFGAGAALQIPFAMQMAYRFNGIGVTQCVLYENQKLIANQFNSAIGKIQDSLSSTASALGKLQDVVNQNAQALNTLVKQLSSNFGAISSVLNDILSRLDKVEAEVQIDRLITGRLQSLQTYVTQQLIRAAEIRASANLAATKMSECVLGQSKRVDFCGKGYHLMSFPQSAPHGVVFLHVTYVPAQEKNFTTAPAICHDGKAHFPREGVFVSNGTHWFVTQRNFYEPQIITTDNTFVCGNCDVVIGIVNNTVYDPLQPELDSGGSGYIPEAPRDGQAYVRKDGEWVLLSTFL

SEQ ID NO: 14026 - protein, 1177 aa, Artificial Sequence
  SARS-CoV-2/China/WF0004/2020__EPI_ISL_413694 spike protein (1-1147)(N914C_S1123C) Foldon construct
MFVFLVLLPLVSSQCVNLTTRTQLPPAYTNSFTRGVYYPDKVFRSSVLHSTQDLFLPFFSNVTWFHAIHVSGTNGTKRFDNPVLPFNDGVYFASTEKSNIIRGWIFGTTLDSKTQSLLIVNNATNVVIKVCEFQFCNDPFLGVYYHKNNKSWTESEFRVYSSANNCTFEYVSQPFLMDLEGKQGNFKNLREFVFKNIDGYFKIYSKHTPINLVRDLPQGFSALEPLVDLPIGINITRFQTLLALHRSYLTPGDSSSGWTAGAAAYYVGYLQPRTFLLKYNENGTITDAVDCALDPLSETKCTLKSFTVEKGIYQTSNFRVQPTESIVRFPNITNLCPFGEVFNATRFASVYAWNRKRISNCVADYSVLYNSASFSTFKCYGVSPTKLNDLCFTNVYADSFVIRGDEVRQIAPGQTGKIADYNYKLPDDFTGCVIAWNSNNLDSKVGGNYNYLYRLFRKSNLKPFERDISTEIYQAGSTPCNGVEGFNCYFPLQSYGFQPTNGVGYQPYRVVVLSFELLHAPATVCGPKKSTNLVKNKCVNFNFNGLTGTGVLTESNKKFLPFQQFGRDIADTTDAVRDPQTLEILDITPCSFGGVSVITPGTNTSNQVAVLYQDVNCTEVPVAIHADQLTPTWRVYSTGSNVFQTRAGCLIGAEHVNNSYECDIPIGAGICASYQTQTNSPRRARSVASQSIIAYTMSLGAENSVAYSNNSIAIPTNFTISVTTEILPVSMTKTSVDCTMYICGDSTECSNLLLQYGSFCTQLNRALTGIAVEQDKNTQEVFAQVKQIYKTPPIKDFGGFNFSQILPDPSKPSKRSFIEDLLFNKVTLADAGFIKQYGDCLGDIAARDLICAQKFNGLTVLPPLLTDEMIAQYTSALLAGTITSGWTFGAGAALQIPFAMQMAYRFNGIGVTQCVLYENQKLIANQFNSAIGKIQDSLSSTASALGKLQDVVNQNAQALNTLVKQLSSNFGAISSVLNDILSRLDKVEAEVQIDRLITGRLQSLQTYVTQQLIRAAEIRASANLAATKMSECVLGQSKRFDFCGKGYHLMSFPQSAPHGVVFLHVTYVPAQEKNFTTAPAICHDGKAHFPREGVFVSNGTHWFVTQRNFYEPQIITTDNTFVCGNCDVVIGIVNNTVYDPLQPELDSGGSGYIPEAPRDGQAYVRKDGEWVLLSTFL

SEQ ID NO: 14027 - protein, 1177 aa, Artificial Sequence
  SARS-CoV-2/China/WF0028/2020__EPI_ISL_413791 spike protein (1-1147)(N914C_S1123C) Foldon construct
MFVFLVLLPLVSSQCVNLTTRTQLPPAYTNSFTRGVYYPDKVFRSSVLHSTQDLFLPFFSNVTWFHAIHVSGTNGTKRFDNPVLPFNDGVYFASTEKSNIIRGWIFGTTLDSKTQSLLIVNNATNVVIKVCEFQFCNDPFLGVYYHKNNKSWMESEFRVYSSANNCTFEYVSQPFLMDLEGKQGNFKNLREFVFKNIDGYFKIYSKHTPINLVRDLPQGFSALEPLVDLPIGINITRFQTLLALHRSYLTPGDSSSGWTAGAAAYYVGYLQPRTFLLKYNENGTITDAVDCALDPLSETKCTLKSFTVEKGIYQTSNFRVQPTESIVRFPNITNLCPFGEVFNATRFASVYAWNRKRISNCVADYSVLYNSASFSTFKCYGVSPTKLNDLCFTNVYADSFVIRGDEVRQIAPGQTGKIADYNYKLPDDFTGCVIAWNSNNLDSKVGGNYNYLYRLFRKSNLKPFERDISTEIYQAGSTPCNGVEGFNCYFPLQSYGFQPTNGVGYQPYRVVVLSFELLHAPATVCGPKKSTNLVKNKCVNFNFNGLTGTGVLTESNKKFLPFQQFGRDIADTTDAVRDPQTLEILDITPCSFGGVSVITPGTNTSNQVAVLYQDVNCTEVPVAIHADQLTPTWRVYSTGSNVFQTRAGCLIGAEHVNNSYECDIPIGAGICASYQTQTNSPRRARSVASQSIIAYTMSLGAENSVAYSNNSIAIPTNFTISVTTEILPVSMTKTSVDCTMYICGDSTECSNLLLQYGSFCTQLNRALTGIAVEQDKNTQEVFAQVKQIYKTPPIKDFGGFNFSQILPDPSKPSKRSFIEDLLFNKVTLADAGFIKQYGDCLGDIAARDLICAQKFNGLTVLPPLLTDEMIAQYTSALLAGTITSGWTFGAGAALQIPFAMQMAYRFNGIGVTQCVLYENQKLIANQFNSAIGKIQDSLSSTASALGKLQDVVNQNAQALNTLVKQLSSNFGAISSVLNDILSRLDKVEAEVQIDRLITGRLQSLQTYVTQQLIRAAEIRASANLAATKMSECVLGQSKRVDFCGKGYHLMSFPQSAPHGVVFLHVTYVPAQEKNFTTAPAICHDGKAHFPREGVFVSNGTHWFVTQRNFYEPQIITTDNTFVCGNCDVVIGIVNNTVYDPLQPELESGGSGYIPEAPRDGQAYVRKDGEWVLLSTFL

SEQ ID NO: 14028 - protein, 1177 aa, Artificial Sequence
  SARS-CoV-2/2019-nCoV/USA-CruiseA-18/2020__MT159716.1 spike protein (1-1147)(N914C_S1123C) Foldon construct
MFVFLVLLPLVSSQCVNLTTRTQLPPAYTNSFTRGVYYPDKVFRSSVLHSTQDLFLPFFSNVTWFHAIHVSGTNGTKRFDNPVLPFNDGVYFASTEKSNIIRGWIFGTTLDSKTQSLLIVNNATNVVIKVCEFQFCNDPFLGVYYHKNNKSWMESELRVYSSANNCTFEYVSQPFLMDLEGKQGNFKNLREFVFKNIDGYFKIYSKHTPINLVRDLPQGFSALEPLVDLPIGINITRFQTLLALHRSYLTPGDSSSGWTAGAAAYYVGYLQPRTFLLKYNENGTITDAVDCALDPLSETKCTLKSFTVEKGIYQTSNFRVQPTESIVRFPNITNLCPFGEVFNATRFASVYAWNRKRISNCVADYSVLYNSASFSTFKCYGVSPTKLNDLCFTNVYADSFVIRGDEVRQIAPGQTGKIADYNYKLPDDFTGCVIAWNSNNLDSKVGGNYNYLYRLFRKSNLKPFERDISTEIYQAGSTPCNGVEGFNCYFPLQSYGFQPTNGVGYQPYRVVVLSFELLHAPATVCGPKKSTNLVKNKCVNFNFNGLTGTGVLTESNKKFLPFQQFGRDIADTTDAVRDPQTLEILDITPCSFGGVSVITPGTNTSNQVAVLYQDVNCTEVPVAIHADQLTPTWRVYSTGSNVFQTRAGCLIGAEHVNNSYECDIPIGAGICASYQTQTNSPRRARSVASQSIIAYTMSLGAENSVAYSNNSIAIPTNFTISVTTEILPVSMTKTSVDCTMYICGDSTECSNLLLQYGSFCTQLNRALTGIAVEQDKNTQEVFAQVKQIYKTPPIKDFGGFNFSQILPDPSKPSKRSFIEDLLFNKVTLADAGFIKQYGDCLGDIAARDLICAQKFNGLTVLPPLLTDEMIAQYTSALLAGTITSGWTFGAGAALQIPFAMQMAYRFNGIGVTQCVLYENQKLIANQFNSAIGKIQDSLSSTASALGKLQDVVNQNAQALNTLVKQLSSNFGAISSVLNDILSRLDKVEAEVQIDRLITGRLQSLQTYVTQQLIRAAEIRASANLAATKMSECVLGQSKRVDFCGKGYHLMSFPQSAPHGVVFLHVTYVPAQEKNFTTAPAICHDGKAHFPREGVFVSNGTHWFVTQRNFYEPQIITTDNTFVCGNCDVVIGIVNNTVYDPLQPELDSGGSGYIPEAPRDGQAYVRKDGEWVLLSTFL

SEQ ID NO: 14029 - protein, 1177 aa, Artificial Sequence
  SARS-CoV-2/SARS-CoV-2/Yunnan-01/human/2020/CHN__MT049951.1 spike protein (1-1147)(N914C_S1123C) Foldon construct
MFVFLVLLPLVSSQCVNLTTRTQLPPANTNSFTRGVYYPDKVFRSSVLHSTQDLFLPFFSNVTWFHAIHVSGTNGTKRFDNPVLPFNDGVYFASTEKSNIIRGWIFGTTLDSKTQSLLIVNNATNVVIKVCEFQFCNDPFLGVYYHKNNKSWMESEFRVYSSANNCTFEYVSQPFLMDLEGKQGNFKNLREFVFKNIDGYFKIYSKHTPINLVRDLPQGFSALEPLVDLPIGINITRFQTLLALHRSYLTPGDSSSGWTAGAAAYYVGYLQPRTFLLKYNENGTITDAVDCALDPLSETKCTLKSFTVEKGIYQTSNFRVQPTESIVRFPNITNLCPFGEVFNATRFASVYAWNRKRISNCVADYSVLYNSASFSTFKCYGVSPTKLNDLCFTNVYADSFVIRGDEVRQIAPGQTGKIADYNYKLPDDFTGCVIAWNSNNLDSKVGGNYNYLYRLFRKSNLKPFERDISTEIYQAGSTPCNGVEGFNCYFPLQSYGFQPTNGVGYQPYRVVVLSFELLHAPATVCGPKKSTNLVKNKCVNFNFNGLTGTGVLTESNKKFLPFQQFGRDIADTTDAVRDPQTLEILDITPCSFGGVSVITPGTNTSNQVAVLYQDVNCTEVPVAIHADQLTPTWRVYSTGSNVFQTRAGCLIGAEHVNNSYECDIPIGAGICASYQTQTNSPRRARSVASQSIIAYTMSLGAENSVAYSNNSIAIPTNFTISVTTEILPVSMTKTSVDCTMYICGDSTECSNLLLQYGSFCTQLNRALTGIAVEQDKNTQEVFAQVKQIYKTPPIKDFGGFNFSQILPDPSKPSKRSFIEDLLFNKVTLADAGFIKQYGDCLGDIAARDLICAQKFNGLTVLPPLLTDEMIAQYTSALLAGTITSGWTFGAGAALQIPFAMQMAYRFNGIGVTQCVLYENQKLIANQFNSAIGKIQDSLSSTASALGKLQDVVNQNAQALNTLVKQLSSNFGAISSVLNDILSRLDKVEAEVQIDRLITGRLQSLQTYVTQQLIRAAEIRASANLAATKMSECVLGQSKRVDFCGKGYHLMSFPQSAPHGVVFLHVTYVPAQEKNFTTAPAICHDGKAHFPREGVFVSNGTHWFVTQRNFYEPQIITTDNTFVCGNCDVVIGIVNNTVYDPLQPELDSGGSGYIPEAPRDGQAYVRKDGEWVLLSTFL

SEQ ID NO: 14030 - protein, 1177 aa, Artificial Sequence
  SARS-CoV-2/USA/WA-UW292/2020__EPI_ISL_418077 spike protein (1-1147)(N914C_S1123C) Foldon construct
MFVFLVLLPLVSSQCVNLTTRTQLPPAYTNSFTRGVYYPDKVFRSSVLHSTQDLFLPFFSNVTWFHAIHVSGTNGTKRFDNPVLPFNDGVYFASTEKSNIIRGWIFGTTLDSKTQSLLIVNNATNVVIKVCEFQFCNDPFLGVYYHKNNKSWMESEFRVYSSANNCTFEYVSQPFLMDLEGKQGNFKNLREFVFKNIDGYFKIYSKHTPINLVRDLPQGFSALEPLVDLPIGINITRFQTLLALHRSYLTPGDSSSGWTAGAAAYYVGYLQPRTFLLKYNENGTITDAVDCALDPLSETKCTLKSFTVEKGIYQTSNFRVQPTESIVRFPNITNLCPFGEVFNATRFASVYAWNRKRISNCVADYSVLYNSASFSTFKCYGVSPTKLNDLCFTNVYADSFVIRGDEVRQIAPGQTGKIADYNYKLPDDFTGCVIAWNSNNLDSKVGGNYNYLYRLFRKSNLKPFERDISTEIYQASSTPCNGVEGFNCYFPLQSYGFQPTNGVGYQPYRVVVLSFELLHAPATVCGPKKSTNLVKNKCVNFNFNGLTGTGVLTESNKKFLPFQQFGRDIADTTDAVRDPQTLEILDITPCSFGGVSVITPGTNTSNQVAVLYQDVNCTEVPVAIHADQLTPTWRVYSTGSNVFQTRAGCLIGAEHVNNSYECDIPIGAGICASYQTQTNSPRRARSVASQSIIAYTMSLGAENSVAYSNNSIAIPTNFTISVTTEILPVSMTKTSVDCTMYICGDSTECSNLLLQYGSFCTQLNRALTGIAVEQDKNTQEVFAQVKQIYKTPPIKDFGGFNFSQILPDPSKPSKRSFIEDLLFNKVTLADAGFIKQYGDCLGDIAARDLICAQKFNGLTVLPPLLTDEMIAQYTSALLAGTITSGWTFGAGAALQIPFAMQMAYRFNGIGVTQCVLYENQKLIANQFNSAIGKIQDSLSSTASALGKLQDVVNQNAQALNTLVKQLSSNFGAISSVLNDILSRLDKVEAEVQIDRLITGRLQSLQTYVTQQLIRAAEIRASANLAATKMSECVLGQSKRVDFCGKGYHLMSFPQSAPHGVVFLHVTYVPAQEKNFTTAPAICHDGKAHFPREGVFVSNGTHWFVTQRNFYEPQIITTDNTFVCGNCDVVIGIVNNTVYDPLQPELDSGGSGYIPEAPRDGQAYVRKDGEWVLLSTFL

SEQ ID NO: 14031 - protein, 1177 aa, Artificial Sequence
  SARS-CoV-2/Iceland/192/2020__EPI_ISL_417819 spike protein (1-1147)(N914C_S1123C) Foldon construct
MFVFFVLLPLVSSQCVNLTTRTQLPPAYTNSFTRGVYYPDKVFRSSVLHSTQDLFLPFFSNVTWFHAIHVSGTNGTKRFDNPVLPFNDGVYFASTEKSNIIRGWIFGTTLDSKTQSLLIVNNATNVVIKVCEFQFCNDPFLGVYYHKNNKSWMESEFRVYSSANNCTFEYVSQPFLMDLEGKQGNFKNLREFVFKNIDGYFKIYSKHTPINLVRDLPQGFSALEPLVDLPIGINITRFQTLLALHRSYLTPGDSSSGWTAGAAAYYVGYLQPRTFLLKYNENGTITDAVDCALDPLSETKCTLKSFTVEKGIYQTSNFRVQPTESIVRFPNITNLCPFGEVFNATRFASVYAWNRKRISNCVADYSVLYNSASFSTFKCYGVSPTKLNDLCFTNVYADSFVIRGDEVRQIAPGQTGKIADYNYKLPDDFTGCVIAWNSNNLDSKVGGNYNYLYRLFRKSNLKPFERDISTEIYQAGSTPCNGVEGFNCYFPLQSYGFQPTNGVGYQPYRVVVLSFELLHAPATVCGPKKSTNLVKNKCVNFNFNGLTGTGVLTESNKKFLPFQQFGRDIADTTDAVRDPQTLEILDITPCSFGGVSVITPGTNTSNQVAVLYQGVNCTEVPVAIHADQLTPTWRVYSTGSNVFQTRAGCLIGAEHVNNSYECDIPIGAGICASYQTQTNSPRRARSVASQSIIAYTMSLGAENSVAYSNNSIAIPTNFTISVTTEILPVSMTKTSVDCTMYICGDSTECSNLLLQYGSFCTQLNRALTGIAVEQDKNTQEVFAQVKQIYKTPPIKDFGGFNFSQILPDPSKPSKRSFIEDLLFNKVTLADAGFIKQYGDCLGDIAARDLICAQKFNGLTVLPPLLTDEMIAQYTSALLAGTITSGWTFGAGAALQIPFAMQMAYRFNGIGVTQCVLYENQKLIANQFNSAIGKIQDSLSSTASALGKLQDVVNQNAQALNTLVKQLSSNFGAISSVLNDILSRLDKVEAEVQIDRLITGRLQSLQTYVTQQLIRAAEIRASANLAATKMSECVLGQSKRVDFCGKGYHLMSFPQSAPHGVVFLHVTYVPAQEKNFTTAPAICHDGKAHFPREGVFVSNGTHWFVTQRNFYEPQIITTDNTFVCGNCDVVIGIVNNTVYDPLQPELDSGGSGYIPEAPRDGQAYVRKDGEWVLLSTFL

SEQ ID NO: 14032 - protein, 1177 aa, Artificial Sequence
  SARS-CoV-2/Belgium/ULG-6939/2020__EPI_ISL_417020 spike protein (1-1147)(N914C_S1123C) Foldon construct
MFVFLVLLPLVSSQCVNLTTRTQLPPAYTNSFTRGVYYPDKVFRSSVLHSTQDLFLPFFSNVTWFHAIHVSGTNGTKRFDNPVLPFNDGVYFASTEKSNIIRGWIFGTTLDSKTQSLLIVNNATNVVIKVCEFQFCNDPFLGVYYHKNNKSWMESEFRVYSSANNCTFEYVSQPFLMDLEGKQGNFKNLREFVFKNIDGYFKIYSKHTPINLVRDLPQGFSALEPLVDLPIGINITRFQTLLALHRSYLTPGDSSSGWTAGAAAYYVGYLQPRTFLLKYNENGTITDAVDCALDPLSETKCTLKSFTVEKGIYQTSNFRVQPTESIVRFPNITNLCPFGEVFNATRFASVYAWNRKRISNCVADYSVLYNSASFSTFKCYGVSPTKLNDLCFTNVYADSFVIRGDEVRQIAPGQTGKIADYNYKLPDDFTGCVIAWNSNNLDSKVGGNYNYLYRLFRKSNLKPFERDISTEIYQAGSTPCNGVEGFNCYFPLQSYGFQPTNGVGYQPYRVVVLSFELLHAPATVCGPKKSTNLVKNKCVNFNFNGLTGTGVLTESNKKFLPFQQFGRDIADTTDAVRDPQTLEILDITPCSFGGVSVITPGTNTSNQVAVLYQGVNCTEVPVAIHADQLTPTWRVYSTGSNVFQTRAGCLIGAEHVNNSYECDIPIGAGICASYQTQTNSPRRARSVASQSIIAYTMSLGAENSVVYSNNSIAIPTNFTISVTTEILPVSMTKTSVDCTMYICGDSTECSNLLLQYGSFCTQLNRALTGIAVEQDKNTQEVFAQVKQIYKTPPIKDFGGFNFSQILPDPSKPSKRSFIEDLLFNKVTLADAGFIKQYGDCLGDIAARDLICAQKFNGLTVLPPLLTDEMIAQYTSALLAGTITSGWTFGAGAALQIPFAMQMAYRFNGIGVTQCVLYENQKLIANQFNSAIGKIQDSLSSTASALGKLQDVVNQNAQALNTLVKQLSSNFGAISSVLNDILSRLDKVEAEVQIDRLITGRLQSLQTYVTQQLIRAAEIRASANLAATKMSECVLGQSKRVDFCGKGYHLMSFPQSAPHGVVFLHVTYVPAQEKNFTTAPAICHDGKAHFPREGVFVSNGTHWFVTQRNFYEPQIITTDNTFVCGNCDVVIGIVNNTVYDPLQPELDSGGSGYIPEAPRDGQAYVRKDGEWVLLSTFL

SEQ ID NO: 14033 - protein, 1177 aa, Artificial Sequence
  SARS-CoV-2/France/HF2496/2020__EPI_ISL_418231 spike protein (1-1147)(N914C_S1123C) Foldon construct
MFVFLVLLPLVSSQCVNLTTRTQLPPAYTNSFTRGVYYPDKVFRSSVLHSTQDLFLPFFSNVTWFHAIHVSGTNGTKRFDNPVLPFNDGVYFASTEKSNIIRGWIFGTTLDSKTQSLLIVNNATNVVIKVCEFQFCNDPFLGVYYHKNNKSWMESEFRVYSSANNCTFEYVSQPFLMDLEGKQGNFKNLREFVFKNIDGYFKIYSKHTPINLVRDLPQGFSALEPLVDLPIGINITRFQTLLALHRSYLTPGDSSSGWTAGAAAYYVGYLQPRTFLLKYNENGTITDAVDCALDPLSETKCTLKSFTVEKGIYQTSNFRVQPTESIVRFPNITNLCPFGEVFNATRFASVYAWNRKRISNCVADYSVLYNSASFSTFKCYGVSPTKLNDLCFTNVYADSFVIRGDEVRQIAPGQTGKIADYNYKLPDDFTGCVIAWNSNNLDSKVGGNYNYLYRLFRKSNLKPFERDISTEIYQAGSTPCNGVEGFNCYFPLQSYGFQPTNGVGYQPYRVVVLSFELLHAPATVCGPKKSTNLVKNKCVNFNFNGLTGTGVLTESNKKFLPFQQFGRDIADTTDAVRDPQTLEILDITPCSFGGVSVITPGTNTSNQVAVLYQGVNCTEVPVAIHADQLTPTWRVYSTGSNVFQTRAGCLIGAEHVNNSYECDIPIGAGICASYQTQTNSPRRARSVASQSIIAYTMSLGAENSVAYSNNSIAIPTNFTISVTTEILPVSMTKTSVDCTMYICGDSTECSNLLLQYGSFCTQLNRALTGIAVEQDKNTQEVFAQVKQIYKTPPIKDFGGFNFSQILPDPSKPSKRSFIEDLLFNKVTLADAGFIKQYGDCLGDIVARDLICAQKFNGLTVLPPLLTDEMIAQYTSALLAGTITSGWTFGAGAALQIPFAMQMAYRFNGIGVTQCVLYENQKLIANQFNSAIGKIQDSLSSTASALGKLQDVVNQNAQALNTLVKQLSSNFGAISSVLNDILSRLDKVEAEVQIDRLITGRLQSLQTYVTQQLIRAAEIRASANLAATKMSECVLGQSKRVDFCGKGYHLMSFPQSAPHGVVFLHVTYVPAQEKNFTTAPAICHDGKAHFPREGVFVSNGTHWFVTQRNFYEPQIITTDNTFVCGNCDVVIGIVNNTVYDPLQPELDSGGSGYIPEAPRDGQAYVRKDGEWVLLSTFL

SEQ ID NO: 14034 - protein, 1177 aa, Artificial Sequence
  SARS-CoV-2/USA/WA-UW291/2020__EPI_ISL_418076 spike protein (1-1147)(N914C_S1123C) Foldon construct
MFVFLVLLPLVSSQCVNLTTRTQLPPAYTNSFTRGVYYPDKVFRSSVLHSTQDLFLPFFSNVTWFHAIHVSGTNGTKRFDNPVLPFNDGVYFASTEKSNIIRGWIFGTTLDSKTQSLLIVNNATNVVIKVCEFQFCNDPFLGVYYHKNNKSWMESEFRVYSSANNCTFEYVSQPFLMDLEGKQGNFKNLREFVFKNIDGYFKIYSKHTPINLVRDLPQGFSALEPLVDLPIGINITRFQTLLALHRSYLTPGDSSSGWTAGAAAYYVGYLQPRTFLLKYNENGTITDAVDCALDPLSETKCTLKSFTVEKGIYQTSNFRVQPTESIVRFPNITNLCPFGEVFNATRFASVYAWNRKRISNCVADYSVLYNSASFSTFKCYGVSPTKLNDLCFTNVYADSFVIRGDEVRQIAPGQTGKIADYNYKLPDDFTGCVIAWNSNNLDSKVGGNYNYLYRLFRKSNLKPFERDISTEIYQAGSTPCNGVEGFNCYFPLQSYGFQPTNGVGYQPYRVVVLSFELLHAPATVCGPKKSTNLVKNKCVNFNFNGLTGTGVLTESNKKFLPFQQFGRDIADTTDAVRDPQTLEILDITPCSFGGVSVITPGTNTSNQVAVLYQGVNCTEVPVAIHADQLTPTWRVYSTGSNVFQTRAGCLIGAEHVNNSYECDIPIGAGICASYQTQTNSPRRARSVASQSIIAYTMSLGAENSVAYSNNSIAIPTNFTISVTTEILPVSMTKTSVDCTMYICGDSTECSNLLLQYGSFCTQLNRALTGIAVEQDKNTQEVFAQVKQIYKTPPIKDFGGFNFSQILPDPSKPSKRSFIEDLLFNKVTLADAGFIKQYGDCLGDIAARDLICAQKFNGLTVLPPLLTDEMIAQYTSALLAGTITSGWTFGAGAALQIPFAMQMAYRFNGIGVTQCVLYENQKLIANQFNSAIGKIQYSLSSTASALGKLQDVVNQNAQALNTLVKQLSSNFGAISSVLNDILSRLDKVEAEVQIDRLITGRLQSLQTYVTQQLIRAAEIRASANLAATKMSECVLGQSKRVDFCGKGYHLMSFPQSAPHGVVFLHVTYVPAQEKNFTTAPAICHDGKAHFPREGVFVSNGTHWFVTQRNFYEPQIITTDNTFVCGNCDVVIGIVNNTVYDPLQPELDSGGSGYIPEAPRDGQAYVRKDGEWVLLSTFL

SEQ ID NO: 14035 - protein, 1177 aa, Artificial Sequence; identical to SEQ ID NO: 13998
  SARS-CoV-2/Portugal/PT0034/2020__EPI_ISL_418019 spike protein (1-1147)(N914C_S1123C) Foldon construct

SEQ ID NO: 14036 - protein, 1177 aa, Artificial Sequence; identical to SEQ ID NO: 13990
  SARS-CoV-2/Iceland/202/2020__EPI_ISL_417750 spike protein (1-1147)(N914C_S1123C) Foldon construct

SEQ ID NO: 14037 - protein, 1177 aa, Artificial Sequence
  SARS-CoV-2/USA/WA-UW261/2020__EPI_ISL_418046 spike protein (1-1147)(N914C_S1123C) Foldon construct
MFVFLVLLPLVSSQCVNLTTRTQLPPAYTNSFTRGVYYPDKVFRSSVLHSTQDLFLPFFSNVTWFHAIHVSGTNGTKRFDNPVLPFNDGVYFASTEKSNIIRGWIFGTTLDSKTQSLLIVNNATNVVIKVCEFQFCNDPFLGVYYHKNNKSWMESEFRVYSSANNCTFEYVSQPFLMDLEGKQGNFKNLREFVFKNIDGYFKIYSKHTPINLVRDLPQGFSALEPLVDLPIGINITRFQTLLALHRSYLTPGDSSSGWTAGAAAYYVGYLQPRTFLLKYNENGTITDAVDCALDPLSETKCTLKSFTVEKGIYQTSNFRVQPTESIVRFPNITNLCPFGEVFNATRFTSVYAWNRKRISNCVADYSVLYNSASFSTFKCYGVSPTKLNDLCFTNVYADSFVIRGDEVRQIAPGQTGKIADYNYKLPDDFTGCVIAWNSNNLDSKVGGNYNYLYRLFRKSNLKPFERDISTEIYQAGSTPCNGVEGFNCYFPLQSYGFQPTNGVGYQPYRVVVLSFELLHAPATVCGPKKSTNLVKNKCVNFNFNGLTGTGVLTESNKKFLPFQQFGRDIADTTDAVRDPQTLEILDITPCSFGGVSVITPGTNTSNQVAVLYQDVNCTEVPVAIHADQLTPTWRVYSTGSNVFQTRAGCLIGAEHVNNSYECDIPIGAGICASYQTQTNSPRRARSVASQSIIAYTMSLGAENSVAYSNNSIAIPTNFTISVTTEILPVSMTKTSVDCTMYICGDSTECSNLLLQYGSFCTQLNRALTGIAVEQDKNTQEVFAQVKQIYKTPPIKDFGGFNFSQILPDPSKPSKRSFIEDLLFNKVTLADAGFIKQYGDCLGDIAARDLICAQKFNGLTVLPPLLTDEMIAQYTSALLAGTITSGWTFGAGAALQIPFAMQMAYRFNGIGVTQCVLYENQKLIANQFNSAIGKIQDSLSSTASALGKLQDVVNQNAQALNTLVKQLSSNFGAISSVLNDILSRLDKVEAEVQIDRLITGRLQSLQTYVTQQLIRAAEIRASANLAATKMSECVLGQSKRVDFCGKGYHLMSFPQSAPHGVVFLHVTYVPAQEKNFTTAPAICHDGKAHFPREGVFVSNGTHWFVTQRNFYEPQIITTDNTFVCGNCDVVIGIVNNTVYDPLQPELDSGGSGYIPEAPRDGQAYVRKDGEWVLLSTFL

SEQ ID NO: 14038 - protein, 1177 aa, Artificial Sequence
  SARS-CoV-2/Portugal/PT0035/2020__EPI_ISL_418020 spike protein (1-1147)(N914C_S1123C) Foldon construct
MFVFLVLLPLVSSQCVNLTTRTQLPPAYTNSFTRGVYYPDKVFRSSVLHSTQDLFLPFFSNVTWFHAIHVSGTNGTKRFDNPVLPFNDGVYFASTEKSNIIRGWIFGTTLDSKTQSLLIVNNATNVVIKVCEFQFCNDPFLGVYYHKNNKSWMESEFRVYSSANNCTFEYVSQPFLMDLEGKQGNFKNLREFVFKNIDGYFKIYSKHTPINLVRDLPQGFSALEPLVDLPIGINITRFQTLLALHRSYLTPGDSSSGWTAGAAAYYVGYLQPRTFLLKYNENGTITDAVDCALDPLSETKCTLKSFTVEKGIYQTSNFRVQPTESIVRFPNITNLCPFGEVFNATRFASVYAWNRKRISNCVADYSVLYNSASFSTFKCYGVSPTKLNDLCFTNVYADSFVIRGDEVRQIAPGQTGKIADYNYKLPDDFTGCVIAWNSNNLDSKVGGNYNYLYRLFRKSNLKPFERDISTEIYQAGSTPCNGVEGFNCYFPLQSYGFQPTNGVGYQPYRVVVLSFELLHAPATVCGPKKSTNLVKNKCVNFNFNGLTGTGVLTESNKKFLPFQQFGRDIADTTDAVRDPQTLEILDITPCSFGGVSVITPGTNTSNQVAVLYQDVNCTEVPVAIHADQLTPTWRVYSTGSNVFQTRAGCLIGAEHVNNSYECDIPIGAGICASYQTQTNSPRRARSVASQSIIAYTMSLGAENSVAYSNNSIAIPTNFTISVTTEILPVSMTKTSVDCTMYICGDSTECSNLLLQYGSFCTQLNRALTGIAVEQDKNTQEVFAQVKQIYKTPPIKDFGGFNFSQILPDPSKPSKRSFIEDLLFNKVTLADAGFIKQYGDCLGDISARDLICAQKFNGLTVLPPLLTDEMIAQYTSALLAGTITSGWTFGAGAALQIPFAMQMAYRFNGIGVTQCVLYENQKLIANQFNSAIGKIQDSLSSTASALGKLQDVVNQNAQALNTLVKQLSSNFGAISSVLNDILSRLDKVEAEVQIDRLITGRLQSLQTYVTQQLIRAAEIRASANLAATKMSECVLGQSKRVDFCGKGYHLMSFPQSAPHGVVFLHVTYVPAQEKNFTTAPAICHDGKAHFPREGVFVSNGTHWFVTQRNFYEPQIITTDNTFVCGNCDVVIGIVNNTVYDPLQPELDSGGSGYIPEAPRDGQAYVRKDGEWVLLSTFL

SEQ ID NO: 14039 - protein, 1177 aa, Artificial Sequence
  SARS-CoV-2/USA/NY-NYUMC7/2020__EPI_ISL_418192 spike protein (1-1147)(N914C_S1123C) Foldon construct
MFVFLVLLPLVSSQCVNLTTRTQLPPAYTNSFTRGVYYPDKVFRSSVLHSTQDLFLPFFSNVTWFHAIHVSGTNGTKRFDNPVLPFNDGVYFASTEKSNIIRGWIFGTTLDSKTQSLLIVNNATNVVIKVCEFQFCNDPFLGVYHHKNNKSWMESEFRVYSSANNCTFEYVSQPFLMDLEGKQGNFKNLREFVFKNIDGYFKIYSKHTPINLVRDLPQGFSALEPLVDLPIGINITRFQTLLALHRSYLTPGDSSSGWTAGAAAYYVGYLQPRTFLLKYNENGTITDAVDCALDPLSETKCTLKSFTVEKGIYQTSNFRVQPTESIVRFPNITNLCPFGEVFNATRFASVYAWNRKRISNCVADYSVLYNSASFSTFKCYGVSPTKLNDLCFTNVYADSFVIRGDEVRQIAPGQTGKIADYNYKLPDDFTGCVIAWNSNNLDSKVGGNYNYLYRLFRKSNLKPFERDISTEIYQAGSTPCNGVEGFNCYFPLQSYGFQPTNGVGYQPYRVVVLSFELLHAPATVCGPKKSTNLVKNKCVNFNFNGLTGTGVLTESNKKFLPFQQFGRDIADTTDAVRDPQTLEILDITPCSFGGVSVITPGTNTSNQVAVLYQGVNCTEVPVAIHADQLTPTWRVYSTGSNVFQTRAGCLIGAEHVNNSYECDIPIGAGICASYQTQTNSPRRARSVASQSIIAYTMSLGAENSVAYSNNSIAIPTNFTISVTTEILPVSMTKTSVDCTMYICGDSTECSNLLLQYGSFCTQLNRALTGIAVEQDKNTQEVFAQVKQIYKTPPIKDFGGFNFSQILPDPSKPSKRSFIEDLLFNKVTLADAGFIKQYGDCLGDIAARDLICAQKFNGLTVLPPLLTDEMIAQYTSALLAGTITSGWTFGAGAALQIPFAMQMAYRFNGIGVTQCVLYENQKLIANQFNSAIGKIQDSLSSTASALGKLQDVVNQNAQALNTLVKQLSSNFGAISSVLNDILSRLDKVEAEVQIDRLITGRLQSLQTYVTQQLIRAAEIRASANLAATKMSECVLGQSKRVDFCGKGYHLMSFPQSAPHGVVFLHVTYVPAQEKNFTTAPAICHDGKAHFPREGVFVSNGTHWFVTQRNFYEPQIITTDNTFVCGNCDVVIGIVNNTVYDPLQPELDSGGSGYIPEAPRDGQAYVRKDGEWVLLSTFL

SEQ ID NO: 14040 - protein, 1177 aa, Artificial Sequence
  SARS-CoV-2/Iceland/189/2020__EPI_ISL_417709 spike protein (1-1147)(N914C_S1123C) Foldon construct
MFVFLVLLPLVSSQCVNLTTRTQLPPAYTNSFTRGVYYPDKVFRSSVLHSTQDLFLPFFSNVTWFHAIHVSGTNGTKRFDNPVLPFNDGVYFASTEKSNIIRGWIFGTTLDSKTQSLLIVNNATNVVIKVCEFQFCNDPFLGVYYHKNNKSWMESEFRVYSSANNCTFEYVSQPFLMDLEGKQGNFKNLREFVFKNIDGYFKIYSKHTPINLVRDLPQGFSALEPLVDLPIGINITRFQTLLALHRSYLTPGDSSSGWTAGAAAYYVGYLQPRTFLLKYNENGTITDAVDCALDPLSETKCTLKSFTVEKGIYQTSNFRVQPTESIVRFPNITNLCPFGEVFNATRFASVYAWNRKRISNCVADYSVLYNSASFSTFKCYGVSPTKLNDLCFTNVYADSFVIRGDEVRQIAPGQTGKIADYNYKLPDDFTGCVIAWNSNNLDSKVGGNYNYLYRLFRKSNLKPFERDISTEIYQAGSTPCNGVEGFNCYFPLQSYGFQPTNGVGYQPYRVVVLSFELLHAPATVCGPKKSTNLVKNKCVNFNFNGLTGTGVLTESNKKFLPFQQFGRDIADTTDAVRDPQTLEILDITPCSFGGVSVITPGTNTSNQVAVLYQGVNCTEVPVAIHADQLTPTWRVYSTGSNVFQTRAGCLIGAEHVNNSYECDIPIGAGICASYQTQTNSPRRARSVASQSIIAYTMSLGAENSVAYSNNSIAIPTNFTISVTTEILPVSMTKTSVDCTMYICGDSTECSNLLLQYGSFCTQLNRALTGIAVEQDKNTQEVFAQVKQIYKTPPIKDFGGFNFSQILPDPSKPSKRSFIEDLLFNKVTLADAGFTKQYGDCLGDIAARDLICAQKFNGLTVLPPLLTDEMIAQYTSALLAGTITSGWTFGAGAALQIPFAMQMAYRFNGIGVTQCVLYENQKLIANQFNSAIGKIQDSLSSTASALGKLQDVVNQNAQALNTLVKQLSSNFGAISSVLNDILSRLDKVEAEVQIDRLITGRLQSLQTYVTQQLIRAAEIRASANLAATKMSECVLGQSKRVDFCGKGYHLMSFPQSAPHGVVFLHVTYVPAQEKNFTTAPAICHDGKAHFPREGVFVSNGTHWFVTQRNFYEPQIITTDNTFVCGNCDVVIGIVNNTVYDPLQPELDSGGSGYIPEAPRDGQAYVRKDGEWVLLSTFL

SEQ ID NO: 14041 - protein, 1177 aa, Artificial Sequence
  SARS-CoV-2/Australia/NSW56/2020__EPI_ISL_417408 spike protein (1-1147)(N914C_S1123C) Foldon construct
MFVFLVLLPLVSSQCVNLTTRTQLPPAYTNSFTRGVYYPDKVFRSSVLHSTQDLFLPFFSNVTWFHAIHVSGTNGTKRFDNPVLPFNDGVYFASTEKSNIIRGWIFGTTLDSKTQSLLIVNNATNVVIKVCEFQFCNDPFLGVYYHKNNKSWMESEFRVYSSANNCTFEYVSQPFLMDLEGKQGNFKNLREFVFKNIDGYFKIYSKHTPINLVRDLPQGFSALEPLVDLPIGINITRFQTLLALHRSYLTPGDSSSGWTAGAAAYYVGYLQPRTFLLKYNENGTITDAVDCALDPLSETKCTLKSFTVEKGIYQTSNFRVQPTESIVRFPNITNLCPFGEVFNATRFASVYAWNRKRISNCVADYSVLYNSASFSTFKCYGVSPTKLNDLCFTNVYADSFVIRGDEVRQIAPGQTGKIADYNYKLPDDFTGCVIAWNSNNLDSKVGGNYNYLYRLFRKSNLKPFERDISTEIYQAGSTPCNGVEGFNCYFPLQSYGFQPTNGVGYQPYRVVVLSFELLHAPATVCGPKKSTNLVKNKCVNFNFNGLTGTGVLTESNKKFLPFQQFGRDIADTTDAVRDPQTLEILDITPCSFGGVSVITPGTNTSNQVAVLYQDVNCTEVPVAIHADQLTPTWRVYSTGSNVFQTRAGCLIGAEHVNNSYECDIPIGAGICASYQTQTNSPRRARSVASQSIIAYTMSLGAENSVAYSNNSIAIPTNFTISVTTEILPVSMTKTSVDCTMYICGDSTECSNLLLQYGSFCTQLNRALTGIAVEQDKNTQEVFAQVKQIYKTPPIKDFGGFNFSQILPDSSKPSKRSFIEDLLFNKVTLADAGFIKQYGDCLGDIAARDLICAQKFNGLTVLPPLLTDEMIAQYTSALLAGTITSGWTFGAGAALQIPFAMQMAYRFNGIGVTQCVLYENQKLIANQFNSAIGKIQDSLSSTASALGKLQDVVNQNAQALNTLVKQLSSNFGAISSVLNDILSRLDKVEAEVQIDRLITGRLQSLQTYVTQQLIRAAEIRASANLAATKMSECVLGQSKRVDFCGKGYHLMSFPQSAPHGVVFLHVTYVPAQEKNFTTAPAICHDGKAHFPREGVFVSNGTHWFVTQRNFYEPQIITTDNTFVCGNCDVVIGIVNNTVYDPLQPELDSGGSGYIPEAPRDGQAYVRKDGEWVLLSTFL

SEQ ID NO: 14042 - protein, 1177 aa, Artificial Sequence
  SARS-CoV-2/Iceland/280/2020__EPI_ISL_417608 spike protein (1-1147)(N914C_S1123C) Foldon construct
MFVFLVLLPLVSSQCVNLTTRTQLPPAYTNSFTRGVYYPDKVFRSSVLHSTQDLFLPFFSNVTWFHAIHVSGTNGTKRFDNPVLPFNDGVYFASTEKSNIIRGWIFGTTLDSKTQSLLIVNNATNVVIKVCEFQFCNDPFLGVYYHKNNKSWMESEFRVYSSANNCTFEYVSQPFLMDLEGKQGNFKNLREFVFKNIDGYFKIYSKHTPINLVRDLPQGFSALEPLVDLPIGINITRFQTLLALHRSYLTPGDSSSGWTAGAAAYYVGYLQPRTFLLKYNENGTITDAVDCALDPLSETKCTLKSFTVEKGIYQTSNFRVQPTESIVRFPNITNLCPFGEVFNATRFASVYAWNRKRISNCVADYSVLYNSASFSTFKCYGVSPTKLNDLCFTNVYADSFVIRGDEVRQIAPGQTGKIADYNYKLPDDFTGCVIAWNSNNLDSKVGGNYNYLYRLFRKSNLKPFERDISTEIYQAGSTPCNGVEGFNCYFPLQSYGFQPTNGVGYQPYRVVVLSFELLHAPATVCGPKKSTNLVKNKCVNFNFNGLTGTGVLTESNKKFLPFQQFGRDIADTTDAVRDPQTLEILDITPCSFGGVSVITPGTNTSNQVAVLYQGVNCTEVPVAIHADQLTPTWRVYSTGSNVFQTRAGCLIGAEHVNNSYECDIPIGAGICASYHTQTNSPRRARSVASQSIIAYTMSLGAENSVAYSNNSIAIPTNFTISVTTEILPVSMTKTSVDCTMYICGDSTECSNLLLQYGSFCTQLNRALTGIAVEQDKNTQEVFAQVKQIYKTPPIKDFGGFNFSQILPDPSKPSKRSFIEDLLFNKVTLADAGFIKQYGDCLGDIAARDLICAQKFNGLTVLPPLLTDEMIAQYTSALLAGTITSGWTFGAGAALQIPFAMQMAYRFNGIGVTQCVLYENQKLIANQFNSAIGKIQDSLSSTASALGKLQDVVNQNAQALNTLVKQLSSNFGAISSVLNDILSRLDKVEAEVQIDRLITGRLQSLQTYVTQQLIRAAEIRASANLAATKMSECVLGQSKRVDFCGKGYHLMSFPQSAPHGVVFLHVTYVPAQEKNFTTAPAICHDGKAHFPREGVFVSNGTHWFVTQRNFYEPQIITTDNTFVCGNCDVVIGIVNNTVYDPLQPELDSGGSGYIPEAPRDGQAYVRKDGEWVLLSTFL

SEQ ID NO: 14043 - protein, 1177 aa, Artificial Sequence; identical to SEQ ID NO: 13998
  SARS-CoV-2/Iceland/247/2020__EPI_ISL_417575 spike protein (1-1147)(N914C_S1123C) Foldon construct

SEQ ID NO: 14044 - protein, 1177 aa, Artificial Sequence
  SARS-CoV-2/Iceland/238/2020__EPI_ISL_417566 spike protein (1-1147)(N914C_S1123C) Foldon construct
MFVFLVLLPLVSSQCVNLTTRTQLPPAYTNSFTRGVYYPDKVFRSSVLHSTQDLFLPFFSNVTWFHAIHVSGTNGTKRFDNPVLPFNDGVYFASTEKSNIIRGWIFGTTLDSKTQSLLIVNNATNVVIKVCEFQFCNDPFLGVYYHKNNKSWMESEFRVYSSANNCTFEYVSQPFLMDLEGKQGNFKNLREFVFKNIDGYFKIYSKHTPINLVRDLPQGFSALEPLVDLPIGINITRFQTLLALHRSYLTPGDSSSGWTAGAAAYYVGYLQPRTFLLKYNENGTITDAVDCALDPLSETKCTLKSFTVEKGIYQTSNFRVQPTESIVRFPNITNLCPFGEVFNATRFASVYAWNRKRISNCVADYSVLYNSASFSTFKCYGVSPTKLNDLCFTNVYADSFVIRGDEVRQIAPGQTGKIADYNYKLPDDFTGCVIAWNSNNLDSKVGGNYNYLYRLFRKSNLKPFERDISTEIYQAGSTPCNGVEGFNCYFPLQSYGFQPTNGVGYQPYRVVVLSFELLHAPATVCGPKKSTNLVKNKCVNFNFNGLTGTGVLTESNKKFLPFQQFGRDIADTTDAVRDPQTLEILDITPCSFGGVSVITPGTNTSNQVAVLYQGVNCTEVPVAIHADQLTPTWRVYSTGSNVFQTRAGCLIGAEHVNNSYECDIPIGAGICASYQTQTNSPRRARSVASQSIIAYTMSLGAENSVAYSNNSIAIPTNFTISVTTEILPVSMTKTSVDCTMYICGDSTECSNLLLQYGSFCTQLNRALTGIAVEQDKNTQEVFAQVKQIYKTPPIKDFGGFNFSQILPDPSKPSKRSFIEDLLFNKVTLADVGFIKQYGDCLGDIAARDLICAQKFNGLTVLPPLLTDEMIAQYTSALLAGTITSGWTFGAGAALQIPFAMQMAYRFNGIGVTQCVLYENQKLIANQFNSAIGKIQDSLSSTASALGKLQDVVNQNAQALNTLVKQLSSNFGAISSVLNDILSRLDKVEAEVQIDRLITGRLQSLQTYVTQQLIRAAEIRASANLAATKMSECVLGQSKRVDFCGKGYHLMSFPQSAPHGVVFLHVTYVPAQEKNFTTAPAICHDGKAHFPREGVFVSNGTHWFVTQRNFYEPQIITTDNTFVCGNCDVVIGIVNNTVYDPLQPELDSGGSGYIPEAPRDGQAYVRKDGEWVLLSTFL

SEQ ID NO: 14045 - protein, 1177 aa, Artificial Sequence
  SARS-CoV-2/Greece/16/2020__EPI_ISL_418265 spike protein (1-1147)(N914C_S1123C) Foldon construct
MFVFLVLLPLVSSQCVNLTTRTQLPPAYTNSFTRGVYYPDKVFRSSVLHSTQDLFLPFFSNVTWFHAIHVSGTNGTKRFDNPVLPFNDGVYFASTEKSNIIRGWIFGTTLDSKTQSLLIVNNATNVVIKVCEFQFCNDPFLGVYYHKNNKSWMESEFRVYSSANNCTFEYVSQPFLMDLEGKQGNFKNLREFVFKNVDGYFKIYSKHTPINLVRDLPQGFSALEPLVDLPIGINITRFQTLLALHRSYLTPGDSSSGWTAGAAAYYVGYLQPRTFLLKYNENGTITDAVDCALDPLSETKCTLKSFTVEKGIYQTSNFRVQPTESIVRFPNITNLCPFGEVFNATRFASVYAWNRKRISNCVADYSVLYNSASFSTFKCYGVSPTKLNDLCFTNVYADSFVIRGDEVRQIAPGQTGKIADYNYKLPDDFTGCVIAWNSNNLDSKVGGNYNYLYRLFRKSNLKPFERDISTEIYQAGSTPCNGVEGFNCYFPLQSYGFQPTNGVGYQPYRVVVLSFELLHAPATVCGPKKSTNLVKNKCVNFNFNGLTGTGVLTESNKKFLPFQQFGRDIADTTDAVRDPQTLEILDITPCSFGGVSVITPGTNTSNQVAVLYQDVNCTEVPVAIHADQLTPTWRVYSTGSNVFQTRAGCLIGAEHVNNSYECDIPIGAGICASYQTQTNSPRRARSVASQSIIAYTMSLGAENSVAYSNNSIAIPTNFTISVTTEILPVSMTKTSVDCTMYICGDSTECSNLLLQYGSFCTQLNRALTGIAVEQDKNTQEVFAQVKQIYKTPPIKDFGGFNFSQILPDPSKPSKRSFIEDLLFNKVTLADAGFIKQYGDCLGDIAARDLICAQKFNGLTVLPPLLTDEMIAQYTSALLAGTITSGWTFGAGAALQIPFAMQMAYRFNGIGVTQCVLYENQKLIANQFNSAIGKIQDSLSSTASALGKLQDVVNQNAQALNTLVKQLSSNFGAISSVLNDILSRLDKVEAEVQIDRLITGRLQSLQTYVTQQLIRAAEIRASANLAATKMSECVLGQSKRVDFCGKGYHLMSFPQSAPHGVVFLHVTYVPAQEKNFTTAPAICHDGKAHFPREGVFVSNGTHWFVTQRNFYEPQIITTDNTFVCGNCDVVIGIVNNTVYDPLQPELDSGGSGYIPEAPRDGQAYVRKDGEWVLLSTFL

SEQ ID NO: 14046 - protein, 1177 aa, Artificial Sequence
  SARS-CoV-2/Iceland/319/2020__EPI_ISL_417648 spike protein (1-1147)(N914C_S1123C) Foldon construct
MFVFLVLLPLVSSQCVNLTTRTQLPPAYTNSFTRGVYYPDKVFRSSVLHSTQDLFLPFFSNVTWFHAIHVSGTNGTKRFDNPVLPFNDGVYFASTEKSNIIRGWIFGTTLDSKTQSLLIVNNATNVVIKVCEFQFCNDPFLGVYYHKNNKSWMESEFRVYSSANNCTFEYVSQPFLIDLEGKQGNFKNLREFVFKNIDGYFKIYSKHTPINLVRDLPQGFSALEPLVDLPIGINITRFQTLLALHRSYLTPGDSSSGWTAGAAAYYVGYLQPRTFLLKYNENGTITDAVDCALDPLSETKCTLKSFTVEKGIYQTSNFRVQPTESIVRFPNITNLCPFGEVFNATRFASVYAWNRKRISNCVADYSVLYNSASFSTFKCYGVSPTKLNDLCFTNVYADSFVIRGDEVRQIAPGQTGKIADYNYKLPDDFTGCVIAWNSNNLDSKVGGNYNYLYRLFRKSNLKPFERDISTEIYQAGSTPCNGVEGFNCYFPLQSYGFQPTNGVGYQPYRVVVLSFELLHAPATVCGPKKSTNLVKNKCVNFNFNGLTGTGVLTESNKKFLPFQQFGRDIADTTDAVRDPQTLEILDITPCSFGGVSVITPGTNTSNQVAVLYQGVNCTEVPVAIHADQLTPTWRVYSTGSNVFQTRAGCLIGAEHVNNSYECDIPIGAGICASYQTQTNSPRRARSVASQSIIAYTMSLGAENSVAYSNNSIAIPTNFTISVTTEILPVSMTKTSVDCTMYICGDSTECSNLLLQYGSFCTQLNRALTGIAVEQDKNTQEVFAQVKQIYKTPPIKDFGGFNFSQILPDPSKPSKRSFIEDLLFNKVTLADAGFIKQYGDCLGDIAARDLICAQKFNGLTVLPPLLTDEMIAQYTSALLAGTITSGWTFGAGAALQIPFAMQMAYRFNGIGVTQCVLYENQKLIANQFNSAIGKIQDSLSSTASALGKLQDVVNQNAQALNTLVKQLSSNFGAISSVLNDILSRLDKVEAEVQIDRLITGRLQSLQTYVTQQLIRAAEIRASANLAATKMSECVLGQSKRVDFCGKGYHLMSFPQSAPHGVVFLHVTYVPAQEKNFTTAPAICHDGKAHFPREGVFVSNGTHWFVTQRNFYEPQIITTDNTFVCGNCDVVIGIVNNTVYDPLQPELDSGGSGYIPEAPRDGQAYVRKDGEWVLLSTFL

SEQ ID NO: 14047 - protein, 1177 aa, Artificial Sequence
  SARS-CoV-2/Congo/94/2020__EPI_ISL_417947 spike protein (1-1147)(N914C_S1123C) Foldon construct
MFVFLVLLPLVSSQCVNLTTRTQLPPAYTNSFTRGVYYPDKVFRSSVLHSTQDLFLPFFSNVTWFHAIHVSGTNGTKRFDNPVLPFNDGVYFASTEKSNIIRGWIFGTTLDSKTQSLLIVNNATNVVIKVCEFQFCNDPFLGVYYHKNNKSWMESEFRVYSSANNCTFEYVSQPFLMDLEGKQGNFKNLREFVFKNIDGYFKIYSKHTPINLVRDLPQGFSALEPLVDLPIGINITRFQTLLALHRSYLTPGDSSSGWTAGAAAYYVGYLQPRTFLLKYNENGTITDAVDCALDPLSETKCTLKSFTVEKGIYQTSNFRVQPTESIVRFPNITNLCPFGEVFNATRFASVYAWNRKRISNCVADYSVLYNSASFSTFKCYGVSPTKLNDLCFTNVYADSFVIRGDEVRQIAPGQTGKIADYNYKLPDDFTGCVIAWNSNNLDSKVGGNYNYLYRLFRKSNLKPFERDISTEIYQAGSTPCNGVEGFNCYFPLQSYGFQPTNGVGYQPYRVVVLSFELLHAPATVCGPKKSTNLVKNKCVNFNFNGLTGTGVLTESNKKFLPFQQFGRDIADTTDAVRDPQTLEILDITPCSFGGVSVITPGTNTSNQVAVLYQGVNCTEVPVAIHADQLTPTWRVYSTGSNVFQTRAGCLIGAEHVNNSYECDIPIGAGICASYQTQTNSPRRARSVASQSIIAYTMSLGAENSVAYSNNSIAIPTNFTISVTTEILPVSMTKTSVDCTMYICGDSTECSNLLLQYGSFCTQLNRALTGIAVEQDKNTQEVFAQVKQIYKTPPIKDFGGFNFSQILPDPSKPSKRSFIEDILFNKVTLADAGFIKQYGDCLGDIAARDLICAQKFNGLTVLPPLLTDEMIAQYTSALLAGTITSGWTFGAGAALQIPFAMQMAYRFNGIGVTQCVLYENQKLIANQFNSAIGKIQDSLSSTASALGKLQDVVNQNAQALNTLVKQLSSNFGAISSVLNDILSRLDKVEAEVQIDRLITGRLQSLQTYVTQQLIRAAEIRASANLAATKMSECVLGQSKRVDFCGKGYHLMSFPQSAPHGVVFLHVTYVPAQEKNFTTAPAICHDGKAHFPREGVFVSNGTHWFVTQRNFYEPQIITTDNTFVCGNCDVVIGIVNNTVYDPLQPELDSGGSGYIPEAPRDGQAYVRKDGEWVLLSTFL

SEQ ID NO: 14048 - protein, 1177 aa, Artificial Sequence
  SARS-CoV-2/Congo/158/2020__EPI_ISL_417950 spike protein (1-1147)(N914C_S1123C) Foldon construct
MFVFLVLLPLVSSQCVNLTTRTQLPPAYTNSFTRGVYYPDKVFRSSVLHSTQDLFLPFFSNVTWFHAIHVSGTNGTKRFDNPVLPFNDGVYFASTEKSNIIRGWIFGTTLDSKTQSLLIVNNATNVVIKVCEFQFCNDPFLGVYYHKNNKSWMESEFRVYSSANNCTFEYVSQPFLMDLEGKQGNFKNLREFVFKNIDGYFKIYSKHTPINLVRDLPQGFSALEPLVDLPIGINITRFQTLLALHRSYLTPGDSSSGWTAGAAAYYVGYLQPRTFLLKYNENGTITDAVDCALDPLSETKCTLKSFTVEKGIYQTSNFRVQPTESIVRFPNITNLCPFGEVFNATRFASVYAWNRKRISNCVADYSVLYNSASFSTFKCYGVSPTKLNDLCFTNVYADSFVIRGDEVRQIAPGQTGKIADYNYKLPDDFTGCVIAWNSNNLDSKVGGNYNYLYRLFRKSNLKPFERDISTEIYQAGSTPCNGVEGFNCYFPLQSYGFQPTNGVGYQPYRVVVLSFELLHAPATVCGPKKSTNLVKNKCVNFNFNGLTGTGVLTESNKKFLPFQQFGRDIADTTDAVRDPQTLEILDITPCSFGGVSVITPGTNTSNQVAVLYQDVNCTEVPVAIHADQLTPTWRVYSTGSNVFQTRAGCLIGAEHVNNSYECDIPIGAGICASYQTQTNSPRRARSVASQSIIAYTMSLGAENSVAYSNNSIAIPTNFTISVTTEILPVSMTKTSVDCTMYICGDSTECSNLLLQYGSFCTQLNRALTGIAVEQDKNTQEVFAQVKQIYKTPPIKDFGGFNFSQILPDPSKPSKRSFIEDLLFNKVTLADAGFIKQYGDCLGDIAARDLICAQKFNGLTVLPPLLTDEMIAQYTSALLAGTITSGWTFGAGAALQIPFAMQMAYRFNGIGVTQCVLYENQKLIANQFNSAIGKIQDSLSSTASALGKLQDVVNQNAQALNTLVKQLSSNFGAISSVLNDILSRLDKVEAEVQIDRLITGRLQSLQTYVTQQLIRAAEIRASANLAATKMSECVLGQSKRVDFCGKGYHLMSFPQSAPHGVVFLHVTYVPAQEKNFTTAPAICHDGKAHFPREGVFVSNGTHWFVTQRNFYEPQIITTDNTFLCGNCDVVIGIVNNTVYDPLQPELDSGGSGYIPEAPRDGQAYVRKDGEWVLLSTFL

SEQ ID NO: 14049 - protein, 1177 aa, Artificial Sequence
  SARS-CoV-2/USA/UT-00034/2020__EPI_ISL_417977 spike protein (1-1147)(N914C_S1123C) Foldon construct
MFVFLVLLPLVSSQCVNLTTRTQLPPAYTNSFTRGVYYPDKVFRSSVLHSTQDLFLPFFSNVTWFHAIHVSGTNGTKRFDNPVLPFNDGVYFASTEKSNIIRGWIFGTTLDSKTQSLLIVNNATNVVIKVCEFQFCNDPFLGVYYYKNNKSWMESEFRVYSSANNCTFEYVSQPFLMDLEGKQGNFKNLREFVFKNIDGYFKIYSKHTPINLVRDLPQGFSALEPLVDLPIGINITRFQTLLALHRSYLTPGDSSSGWTAGAAAYYVGYLQPRTFLLKYNENGTITDAVDCALDPLSETKCTLKSFTVEKGIYQTSNFRVQPTESIVRFPNITNLCPFGEVFNATRFASVYAWNRKRISNCVADYSVLYNSASFSTFKCYGVSPTKLNDLCFTNVYADSFVIRGDEVRQIAPGQTGKIADYNYKLPDDFTGCVIAWNSNNLDSKVGGNYNYLYRLFRKSNLKPFERDISTEIYQAGSTPCNGVEGFNCYFPLQSYGFQPTNGVGYQPYRVVVLSFELLHAPATVCGPKKSTNLVKNKCVNFNFNGLTGTGVLTESNKKFLPFQQFGRDIADTTDAVRDPQTLEILDITPCSFGGVSVITPGTNTSNQVAVLYQGVNCTEVPVAIHADQLTPTWRVYSTGSNVFQTRAGCLIGAEHVNNSYECDIPIGAGICASYQTQTNSPRRARSVASQSIIAYTMSLGAENSVAYSNNSIAIPTNFTISVTTEILPVSMTKTSVDCTMYICGDSTECSNLLLQYGSFCTQLNRALTGIAVEQDKNTQEVFAQVKQIYKTPPIKDFGGFNFSQILPDPSKPSKRSFIEDLLFNKVTLADAGFIKQYGDCLGDIAARDLICAQKFNGLTVLPPLLTDEMIAQYTSALLAGTITSGWTFGAGAALQIPFAMQMAYRFNGIGVTQCVLYENQKLIANQFNSAIGKIQDSLSSTASALGKLQDVVNQNAQALNTLVKQLSSNFGAISSVLNDILSRLDKVEAEVQIDRLITGRLQSLQTYVTQQLIRAAEIRASANLAATKMSECVLGQSKRVDFCGKGYHLMSFPQSAPHGVVFLHVTYVPAQEKNFTTAPAICHDGKAHFPREGVFVSNGTHWFVTQRNFYEPQIITTDNTFVCGNCDVVIGIVNNTVYDPLQPELDSGGSGYIPEAPRDGQAYVRKDGEWVLLSTFL

SEQ ID NO: 14050 - protein, 1177 aa, Artificial Sequence
  SARS-CoV-2/USA/UT-00033/2020__EPI_ISL_417976 spike protein (1-1147)(N914C_S1123C) Foldon construct
MFVFLVLLPLVSSQCVNLTTRTQLPPAYTNSFTRGVYYPDKVFRSSVLHSTQDLFLPFFSNVTWFHAIHVSGTNGTKRFDNPVLPFNDGVYFASTEKSNIIRGWIFGTTLDSKTQSLLIVNNATNVVIKVCEFQFCNDPFLGVYYHKNNKSWMESEFRVYSSANNCTFEYVSQPFLMDLEGKQGNFKNLREFVFKNIDGYFKIYSKHTPINLVRDLPQGFSALEPLVDLPIGINITRFQTLLALHRSYLTPGDSSSGLTAGAAAYYVGYLQPRTFLLKYNENGTITDAVDCALDPLSETKCTLKSFTVEKGIYQTSNFRVQPTESIVRFPNITNLCPFGEVFNATRFASVYAWNRKRISNCVADYSVLYNSASFSTFKCYGVSPTKLNDLCFTNVYADSFVIRGDEVRQIAPGQTGKIADYNYKLPDDFTGCVIAWNSNNLDSKVGGNYNYLYRLFRKSNLKPFERDISTEIYQAGSTPCNGVEGFNCYFPLQSYGFQPTNGVGYQPYRVVVLSFELLHAPATVCGPKKSTNLVKNKCVNFNFNGLTGTGVLTESNKKFLPFQQFGRDIADTTDAVRDPQTLEILDITPCSFGGVSVITPGTNTSNQVAVLYQGVNCTEVPVAIHADQLTPTWRVYSTGSNVFQTRAGCLIGAEHVNNSYECDIPIGAGICASYQTQTNSPRRARSVASQSIIAYTMSLGAENSVAYSNNSIAIPTNFTISVTTEILPVSMTKTSVDCTMYICGDSTECSNLLLQYGSFCTQLNRALTGIAVEQDKNTQEVFAQVKQIYKTPPIKDFGGFNFSQILPDPSKPSKRSFIEDLLFNKVTLADAGFIKQYGDCLGDIAARDLICAQKFNGLTVLPPLLTDEMIAQYTSALLAGTITSGWTFGAGAALQIPFAMQMAYRFNGIGVTQCVLYENQKLIANQFNSAIGKIQDSLSSTASALGKLQDVVNQNAQALNTLVKQLSSNFGAISSVLNDILSRLDKVEAEVQIDRLITGRLQSLQTYVTQQLIRAAEIRASANLAATKMSECVLGQSKRVDFCGKGYHLMSFPQSAPHGVVFLHVTYVPAQEKNFTTAPAICHDGKAHFPREGVFVSNGTHWFVTQRNFYEPQIITTDNTFVCGNCDVVIGIVNNTVYDPLQPELDSGGSGYIPEAPRDGQAYVRKDGEWVLLSTFL

SEQ ID NO: 14051 - protein, 1177 aa, Artificial Sequence
  SARS-CoV-2/USA/WI-13/2020__EPI_ISL_417516 spike protein (1-1147)(N914C_S1123C) Foldon construct
MFVFLVLLPLVSSQCVNLTTRTQLPPAYTNSFTRGVYYPDKVFRSSVLHSTQDLFLPFFSNVTWFHAIHVSGTNGTKRFDNPVLPFNDGVYFASTEKSNIIRGWIFGTTLDSKTQSLLIVNNATNVVIKVCEFQFCNDPFLGVYYHKNNKSWMESEFRVYSSANNCTFEYVSQPFLMDLEGKQGNFKNLREFVFKNIDGYFKIYSKHTPINLVRDLPQGFSALEPLVDLPIGINITRFQTLLALHRSYLTPGDSSSGWTAGAAAYYVGYLQPRTFLLKYNENGTITDAVDCALDPLSETKCTLKSFTVEKGIYQTSNFRVLPTESIVRFPNITNLCPFGEVFNATRFASVYAWNRKRISNCVADYSVLYNSASFSTFKCYGVSPTKLNDLCFTNVYADSFVIRGDEVRQIAPGQTGKIADYNYKLPDDFTGCVIAWNSNNLDSKVGGNYNYLYRLFRKSNLKPFERDISTEIYQAGSTPCNGVEGFNCYFPLQSYGFQPTNGVGYQPYRVVVLSFELLHAPATVCGPKKSTNLVKNKCVNFNFNGLTGTGVLTESNKKFLPFQQFGRDIADTTDAVRDPQTLEILDITPCSFGGVSVITPGTNTSNQVAVLYQGVNCTEVPVAIHADQLTPTWRVYSTGSNVFQTRAGCLIGAEHVNNSYECDIPIGAGICASYQTQTNSPRRARSVASQSIIAYTMSLGAENSVAYSNNSIAIPTNFTISVTTEILPVSMTKTSVDCTMYICGDSTECSNLLLQYGSFCTQLNRALTGIAVEQDKNTQEVFAQVKQIYKTPPIKDFGGFNFSQILPDPSKPSKRSFIEDLLFNKVTLADAGFIKQYGDCLGDIAARDLICAQKFNGLTVLPPLLTDEMIAQYTSALLAGTITSGWTFGAGAALQIPFAMQMAYRFNGIGVTQCVLYENQKLIANQFNSAIGKIQDSLSSTASALGKLQDVVNQNAQALNTLVKQLSSNFGAISSVLNDILSRLDKVEAEVQIDRLITGRLQSLQTYVTQQLIRAAEIRASANLAATKMSECVLGQSKRVDFCGKGYHLMSFPQSAPHGVVFLHVTYVPAQEKNFTTAPAICHDGKAHFPREGVFVSNGTHWFVTQRNFYEPQIITTDNTFVCGNCDVVIGIVNNTVYDPLQPELDSGGSGYIPEAPRDGQAYVRKDGEWVLLSTFL

SEQ ID NO: 14052 - protein, 1176 aa, Artificial Sequence
  SARS-CoV-2/India/1-27/2020__EPI_ISL_413522 spike protein (1-1146)(N913C_S1122C) Foldon construct
MFVFLVLLPLVSSQCVNLTTRTQLPPAYTNSFTRGVYYPDKVFRSSVLHSTQDLFLPFFSNVTWFHAIHVSGTNGTKRFDNPVLPFNDGVYFASTEKSNIIRGWIFGTTLDSKTQSLLIVNNATNVVIKVCEFQFCNDPFLGVYHKNNKSWMESEFRVYSSANNCTFEYVSQPFLMDLEGKQGNFKNLREFVFKNIDGYFKIYSKHTPINLVRDLPQGFSALEPLVDLPIGINITRFQTLLALHRSYLTPGDSSSGWTAGAAAYYVGYLQPRTFLLKYNENGTITDAVDCALDPLSETKCTLKSFTVEKGIYQTSNFRVQPTESIVRFPNITNLCPFGEVFNATRFASVYAWNRKRISNCVADYSVLYNSASFSTFKCYGVSPTKLNDLCFTNVYADSFVIRGDEVIQIAPGQTGKIADYNYKLPDDFTGCVIAWNSNNLDSKVGGNYNYLYRLFRKSNLKPFERDISTEIYQAGSTPCNGVEGFNCYFPLQSYGFQPTNGVGYQPYRVVVLSFELLHAPATVCGPKKSTNLVKNKCVNFNFNGLTGTGVLTESNKKFLPFQQFGRDIADTTDAVRDPQTLEILDITPCSFGGVSVITPGTNTSNQVAVLYQDVNCTEVPVAIHADQLTPTWRVYSTGSNVFQTRAGCLIGAEHVNNSYECDIPIGAGICASYQTQTNSPRRARSVASQSIIAYTMSLGAENSVAYSNNSIAIPTNFTISVTTEILPVSMTKTSVDCTMYICGDSTECSNLLLQYGSFCTQLNRALTGIAVEQDKNTQEVFAQVKQIYKTPPIKDFGGFNFSQILPDPSKPSKRSFIEDLLFNKVTLADAGFIKQYGDCLGDIAARDLICAQKFNGLTVLPPLLTDEMIAQYTSALLAGTITSGWTFGAGAALQIPFAMQMAYRFNGIGVTQCVLYENQKLIANQFNSAIGKIQDSLSSTASALGKLQDVVNQNAQALNTLVKQLSSNFGAISSVLNDILSRLDKVEAEVQIDRLITGRLQSLQTYVTQQLIRAAEIRASANLAATKMSECVLGQSKRVDFCGKGYHLMSFPQSAPHGVVFLHVTYVPAQEKNFTTAPAICHDGKAHFPREGVFVSNGTHWFVTQRNFYEPQIITTDNTFVCGNCDVVIGIVNNTVYDPLQPELDSGGSGYIPEAPRDGQAYVRKDGEWVLLSTFL

SEQ ID NO: 14053 - protein, 1171 aa, Artificial Sequence
  SARS-CoV-2/pangolin/Guangxi/P4L/2017__EPI_ISL_410538 spike protein (1-1141)(N908C_S1117C) Foldon construct
MFVFLFVLPLVSSQCVNLTTRTGIPPGYTNSSTRGVYYPDKVFRSSILHLTQDLFLPFFSNVTWFNTINYQGGFKKFDNPVLPFNDGVYFASTEKSNIIRGWIFGTTLDARTQSLLIVNNATNVVIKVCEFQFCTDPFLGVYYHNNNKTWVENEFRVYSSANNCTFEYISQPFLMDLEGKQGNFKNLREFVFKNVDGYFKIYSKHTPIDLVRDLPRGFAALEPLVDLPIGINITRFQTLLALHRSYLTPGNLESGWTTGAAAYYVGYLQQRTFLLSYNQNGTITDAVDCSLDPLSETKCTLKSLTVEKGIYQTSNFRVQPTISIVRFPNITNLCPFGEVFNASKFASVYAWNRKRISNCVADYSVLYNSTSFSTFKCYGVSPTKLNDLCFTNVYADSFVVKGDEVRQIAPGQTGVIADYNYKLPDDFTGCVIAWNSVKQDALTGGNYGYLYRLFRKSKLKPFERDISTEIYQAGSTPCNGQVGLNCYYPLERYGFHPTTGVNYQPFRVVVLSFELLNGPATVCGPKLSTTLVKDKCVNFNFNGLTGTGVLTTSKKQFLPFQQFGRDISDTTDAVRDPQTLEILDITPCSFGGVSVITPGTNTSNQVAVLYQDVNCTEVPMAIHAEQLTPAWRVYSAGANVFQTRAGCLVGAEHVNNSYECDIPVGAGICASYHSMSSLRSVNQRSIIAYTMSLGAENSVAYSNNSIAIPTNFTISVTTEILPVSMTKTSVDCTMYICGDSIECSNLLLQYGSFCTQLNRALTGIAVEQDKNTQEVFAQVKQIYKTPPIKDFGGFNFSQILPDPSKPSKRSFIEDLLFNKVTLADAGFIKQYGDCLGDIAARDLICAQKFNGLTVLPPLLTDEMIAQYTSALLAGTITSGWTFGAGAALQIPFAMQMAYRFNGIGVTQCVLYENQKLIANQFNSAIGKIQDSLSSTASALGKLQDVVNQNAQALNTLVKQLSSNFGAISSVLNDILSRLDKVEAEVQIDRLITGRLQSLQTYVTQQLIRAAEIRASANLAATKMSECVLGQSKRVDFCGKGYHLMSFPQSAPHGVVFLHVTYVPAQEKNFTTAPAICHEGKAHFPREGVFVSNGTHWFITQRNFYEPQIITTDNTFVCGSCDVVIGIVNNTVYDPLQPELDSGGSGYIPEAPRDGQAYVRKDGEWVLLSTFL

SEQ ID NO: 14054 - protein, 1171 aa, Artificial Sequence
  SARS-CoV-2/pangolin/Guangxi/P5L/2017__EPI_ISL_410540 spike protein (1-1141)(N908C_S1117C) Foldon construct
MFVFLFVLPLVSSQCVNLTTRTGIPPGYTNSSTRGVYYPDKVFRSSILHLTQDLFLPFFSNVTWFNTINYQGGFKKFDNPVLPFNDGVYFASTEKSNIIRGWIFGTTLDARTQSLLIVNNATNVVIKVCEFQFCTDPFLGVYYHNNNKTWVENEFRVYSSANNCTFEYISQPFLMDLEGKQGNFKNLREFVFKNVDGYFKIYSKHTPIDLVRDLPRGFAALEPLVDLPIGINITRFQTLLALHRSYLTPGKLESGWTTGAAAYYVGYLQQRTFLLSYNQNGTITDAVDCSLDPLSETKCTLKSLTVEKGIYQTSNFRVQPTISIVRFPNITNLCPFGEVFNASKFASVYAWNRKRISNCVADYSVLYNSTSFSTFKCYGVSPTKLNDLCFTNVYADSFVVKGDEVRQIAPGQTGVIADYNYKLPDDFTGCVIAWNSVKQDALTGGNYGYLYRLFRKSKLKPFERDISTEIYQAGSTPCNGQVGLNCYYPLERYGFHPTTGVNYQPFRVVVLSFELLNGPATVCGPKLSTTLVKDKCVNFNFNGLTGTGVLTTSKKQFLPFQQFGRDISDTTDAVRDPQTLEILDITPCSFGGVSVITPGTNTSNQVAVLYQDVNCTEVPMAIHAEQLTPAWRVYSAGANVFQTRAGCLVGAEHVNNSYECDIPVGAGICASYHSMSSFRSVNQRSIIAYTMSLGAENSVAYSNNSIAIPTNFTISVTTEILPVSMTKTSVDCTMYICGDSIECSNLLLQYGSFCTQLNRALTGIAVEQDKNTQEVFAQVKQIYKTPPIKDFGGFNFSQILPDPSKPSKRSFIEDLLFNKVTLADAGFIKQYGDCLGDIAARDLICAQKFNGLTVLPPLLTDEMIAQYTSALLAGTITSGWTFGAGAALQIPFAMQMAYRFNGIGVTQCVLYENQKLIANQFNSAIGKIQDSLSSTASALGKLQDVVNQNAQALNTLVKQLSSNFGAISSVLNDILSRLDKVEAEVQIDRLITGRLQSLQTYVTQQLIRAAEIRASANLAATKMSECVLGQSKRVDFCGKGYHLMSFPQSAPHGVVFLHVTYVPAQEKNFTTAPAICHEGKAHFPREGVFVSNGTHWFITQRNFYEPQIITTDNTFVCGSCDVVIGIVNNTVYDPLQPELDSGGSGYIPEAPRDGQAYVRKDGEWVLLSTFL

SEQ ID NO: 14055 - protein, 1171 aa, Artificial Sequence
  SARS-CoV-2/pangolin/Guangxi/P5E/2017__EPI_ISL_410541 spike protein (1-1141)(N908C_S1117C) Foldon construct
MFVFLFVLPLVSSQCVNLTTRTGIPPGYTNSSTRGVYYPDKVFRSSILHLTQDLFLPFFSNVTWFNTITYQGGSKKFDNPVLPFNDGVYFASTEKSNIIRGWIFGTTLDARTQSLLIVNNATNVVIKVCEFQFCTDPFLGVYYHNNNKTWVENEFRVYSSANNCTFEYISQPFLMDLEGKQGNFKNLREFVFKNVDGYFKIYSKHTPIDLVRDLPRGFAALEPLVDLPIGINITRFQTLLALHRSYLTPGKLESGWTTGAAAYYVGYLQQRTFLLSYNQNGTITDAVDCSLDPLSETKCTLKSLTVEKGIYQTSNFRVQPTISIVRFPNITNLCPFGEVFNASKFASVYAWNRKRISNCVADYSVLYNSTSFSTFKCYGVSPTKLNDLCFTNVYADSFVVKGDEVRQIAPGQTGVIADYNYKLPDDFTGCVIAWNSVKQDALTGDNYGYLYRLFRKSKLKPFERDISTEIYQAGSTPCNGQVGLNCYYPLERYGFHPTTGVNYQPFRVVVLSFELLNGPATVCGPKLSTTLVKDKCVNFNFNGLTGTGVLTTSKKQFLPFQQFGRDISDTTDAVRDPQTLEILDITPCSFGGVSVITPGTNTSNQVAVLYQDVNCTEVPMAIHAEQLTPAWRVYSAGANVFQTRAGCLVGAEHVNNSYECDIPVGAGICASYHSMSSFRSVNQRSIIAYTMSLGAENSVAYSNNSIAIPTNFTISVTTEILPVSMTKTSVDCTMYICGDSIECSNLLLQYGSFCTQLNRALTGIAVEQDKNTQEVFAQVKQIYKTPPIKDFGGFNFSQILPDPSKPSKRSFIEDLLFNKVTLADAGFIKQYGDCLGDIAARDLICAQKFNGLTVLPPLLTDEMIAQYTSALLAGTITSGWTFGAGAALQIPFAMQMAYRFNGIGVTQCVLYENQKLIANQFNSAIGKIQDSLSSTASALGKLQDVVNQNAQALNTLVKQLSSNFGAISSVLNDILSRLDKVEAEVQIDRLITGRLQSLQTYVTQQLIRAAEIRASANLAATKMSECVLGQSKRVDFCGKGYHLMSFPQSAPHGVVFLHVTYVPAQEKNFTTAPAICHEGKAHFPREGVFVSNGTHWFITQRNFYEPQIITTDNTFVCGSCDVVIGIVNNTVYDPLQPELDSGGSGYIPEAPRDGQAYVRKDGEWVLLSTFL

SEQ ID NO: 14056 - protein, 1169 aa, Artificial Sequence
  SARS-CoV-2/pangolin/Guangxi/P1E/2017__EPI_ISL_410539 spike protein (1-1139)(N906C_S1115C) Foldon construct
MFVFLFVLPLVSSQCVNLTTRTGIQPGYTNSSTRGVYYPDKVFRSSILHLTQDLFLPFFSNVTWFNTINYQGGFKKFDNPVLPFNDGVYFASTEKSNIIRGWIFGTTLDARTQSLLIVNNATNVVIKVCEFQFCTDPFLGVYYHNNNKTWVENEFRVYSSANNCTFEYISQPFLMDLEGKQGNFKNLREFVFKNVDGYFKIYSKHTPIDLVRDLPRGFAALEPLVDLPIGINITRFQTLLALHRSYLTPGKLESGWTTGAAAYYVGYLQQRTFLLSYNQNGTITDAVDCSLDPLSETKCTLKSLTVEKGIYQTSNFRVQPTISIVRFPNITNLCPFGEVFNASKFASVYAWNRKRISNCVADYSVLYNSTSFSTFKCYGVSPTKLNDLCFTNVYADSFVVKGDEVRQIAPGQTGVIADYNYKLPDDFTGCVIAWNSVKQDALTGGNYLYRLFRKSKLKPFERDISTEIYQAGSTPCNGQVGLNCYYPLERYGFHPTTGVNYQPFRVVVLSFELLNGPATVCGPKLSTTLVKDKCVNFNFNGLTGTGVLTTSKKQFLPFQQFGRDISDTTDAVRDPQTLEILDITPCSFGGVSVITPGTNTSNQVAVLYQDVNCTEVPMAIHAEQLTPAWRVYSAGANVFQTRAGCLVGAEHVNNSYECDIPVGAGICASYHSMSSLRSVNQRSIIAYTMSLGAENSVAYSNNSIAIPTNFTISVTTEILPVSMTKTSVDCTMYICGDSIECSNLLLQYGSFCTQLNRALTGIAVEQDKNTQEVFAQVKQIYKTPPIKDFGGFNFSQILPDPSKPSKRSFIEDLLFNKVTLADAGFIKQYGDCLGDIAARDLICAQKFNGLTVLPPLLTDEMIAQYTSALLAGTITSGWTFGAGAALQIPFAMQMAYRFNGIGVTQCVLYENQKLIANQFNSAIGKIQDSLSSTASALGKLQDVVNQNAQALNTLVKQLSSNFGAISSVLNDILSRLDKVEAEVQIDRLITGRLQSLQTYVTQQLIRAAEIRASANLAATKMSECVLGQSKRVDFCGKGYHLMSFPQSAPHGVVFLHVTYVPAQEKNFTTAPAICHEGKAHFPREGVFVSNGTHWFITQRNFYEPQIITTDNTFVCGSCDVVIGIVNNTVYDPLQPELDSGGSGYIPEAPRDGQAYVRKDGEWVLLSTFL

SEQ ID NO: 14057 - protein, 1301 aa, Artificial Sequence
  SARS-CoV-2/Wuhan/WIV05/2019__EPI_ISL_402128 spike protein (1-1147)(N914C_S1123C) WhcAg construct
MFVFLVLLPLVSSQCVNLTTRTQLPPAYTNSFTRGVYYPDKVFRSSVLHSTQDLFLPFFSNVTWFHAIHVSGTNGTKRFDNPVLPFNDGVYFASTEKSNIIRGWIFGTTLDSKTQSLLIVNNATNVVIKVCEFQFCNDPFLGVYYHKNNKSWMESEFRVYSSANNCTFEYVSQPFLMDLEGKQGNFKNLREFVFKNIDGYFKIYSKHTPINLVRDLPQGFSALEPLVDLPIGINITRFQTLLALHRSYLTPGDSSSGWTAGAAAYYVGYLQPRTFLLKYNENGTITDAVDCALDPLSETKCTLKSFTVEKGIYQTSNFRVQPTESIVRFPNITNLCPFGEVFNATRFASVYAWNRKRISNCVADYSVLYNSASFSTFKCYGVSPTKLNDLCFTNVYADSFVIRGDEVRQIAPGQTGKIADYNYKLPDDFTGCVIAWNSNNLDSKVGGNYNYLYRLFRKSNLKPFERDISTEIYQAGSTPCNGVEGFNCYFPLQSYGFQPTNGVGYQPYRVVVLSFELLHAPATVCGPKKSTNLVKNKCVNFNFNGLTGTGVLTESNKKFLPFQQFGRDIADTTDAVRDPQTLEILDITPCSFGGVSVITPGTNTSNQVAVLYQDVNCTEVPVAIHADQLTPTWRVYSTGSNVFQTRAGCLIGAEHVNNSYECDIPIGAGICASYQTQTNSPRRARSVASQSIIAYTMSLGAENSVAYSNNSIAIPTNFTISVTTEILPVSMTKTSVDCTMYICGDSTECSNLLLQYGSFCTQLNRALTGIAVEQDKNTQEVFAQVKQIYKTPPIKDFGGFNFSQILPDPSKPSKRSFIEDLLFNKVTLADAGFIKQYGDCLGDIAARDLICAQKFNGLTVLPPLLTDEMIAQYTSALLAGTITSGWTFGAGAALQIPFAMQMAYRFNGIGVTQCVLYENQKLIANQFNSAIGKIQDSLSSTASALGKLQDVVNQNAQALNTLVKQLSSNFGAISSVLNDILSRLDKVEAEVQIDRLITGRLQSLQTYVTQQLIRAAEIRASANLAATKMSECVLGQSKRVDFCGKGYHLMSFPQSAPHGVVFLHVTYVPAQEKNFTTAPAICHDGKAHFPREGVFVSNGTHWFVTQRNFYEPQIITTDNTFVCGNCDVVIGIVNNTVYDPLQPELDSGGGGSDIDPYKEFGSSYQLLNFLPLDFFPDLNALVDTATALYEEELTGREHCSPHHTAIRQALVCWDELTKLIAWMSSNITSEQVRTIIVNHVNDTWGLKVRQSLWFHLSCLTFGQHTVQEFLVSFGVWIRTPAPYRPPNAPILSTLPEHTVIC

SEQ ID NO: 14058 - protein, 1297 aa, Artificial Sequence
  SARS-CoV-2/bat/Yunnan/RaTG13/2013__EPI_ISL_402131 spike protein (1-1143)(N910C_S1119C) WhcAg construct
MFVFLVLLPLVSSQCVNLTTRTQLPPAYTNSSTRGVYYPDKVFRSSVLHLTQDLFLPFFSNVTWFHAIHVSGTNGIKRFDNPVLPFNDGVYFASTEKSNIIRGWIFGTTLDSKTQSLLIVNNATNVVIKVCEFQFCNDPFLGVYYHKNNKSWMESEFRVYSSANNCTFEYVSQPFLMDLEGKQGNFKNLREFVFKNIDGYFKIYSKHTPINLVRDLPPGFSALEPLVDLPIGINITRFQTLLALHRSYLTPGDSSSGWTAGAAAYYVGYLQPRTFLLKYNENGTITDAVDCALDPLSETKCTLKSFTVEKGIYQTSNFRVQPTDSIVRFPNITNLCPFGEVFNATTFASVYAWNRKRISNCVADYSVLYNSTSFSTFKCYGVSPTKLNDLCFTNVYADSFVITGDEVRQIAPGQTGKIADYNYKLPDDFTGCVIAWNSKHIDAKEGGNFNYLYRLFRKANLKPFERDISTEIYQAGSKPCNGQTGLNCYYPLYRYGFYPTDGVGHQPYRVVVLSFELLNAPATVCGPKKSTNLVKNKCVNFNFNGLTGTGVLTESNKKFLPFQQFGRDIADTTDAVRDPQTLEILDITPCSFGGVSVITPGTNASNQVAVLYQDVNCTEVPVAIHADQLTPTWRVYSTGSNVFQTRAGCLIGAEHVNNSYECDIPIGAGICASYQTQTNSRSVASQSIIAYTMSLGAENSVAYSNNSIAIPTNFTISVTTEILPVSMTKTSVDCTMYICGDSTECSNLLLQYGSFCTQLNRALTGIAVEQDKNTQEVFAQVKQIYKTPPIKDFGGFNFSQILPDPSKPSKRSFIEDLLFNKVTLADAGFIKQYGDCLGDIAARDLICAQKFNGLTVLPPLLTDEMIAQYTSALLAGTITSGWTFGAGAALQIPFAMQMAYRFNGIGVTQCVLYENQKLIANQFNSAIGKIQDSLSSTASALGKLQDVVNQNAQALNTLVKQLSSNFGAISSVLNDILSRLDKVEAEVQIDRLITGRLQSLQTYVTQQLIRAAEIRASANLAATKMSECVLGQSKRVDFCGKGYHLMSFPQSAPHGVVFLHVTYVPAQEKNFTTAPAICHDGKAHFPREGVFVSNGTHWFVTQRNFYEPQIITTDNTFVCGSCDVVIGIVNNTVYDPLQPELDSGGGGSDIDPYKEFGSSYQLLNFLPLDFFPDLNALVDTATALYEEELTGREHCSPHHTAIRQALVCWDELTKLIAWMSSNITSEQVRTIIVNHVNDTWGLKVRQSLWFHLSCLTFGQHTVQEFLVSFGVWIRTPAPYRPPNAPILSTLPEHTVIC

SEQ ID NO: 14059 - protein, 1301 aa, Artificial Sequence
  SARS-CoV-2/Wuhan/HBCDC-HB-01/2019__EPI_ISL_402132 spike protein (1-1147)(N914C_S1123C) WhcAg construct
MFVFLVLLPLVSSQCVNLTTRTQLPPAYTNSITRGVYYPDKVFRSSVLHSTQDLFLPFFSNVTWFHAIHVSGTNGTKRFDNPVLPFNDGVYFASTEKSNIIRGWIFGTTLDSKTQSLLIVNNATNVVIKVCEFQFCNDPFLGVYYHKNNKSWMESEFRVYSSANNCTFEYVSQPFLMDLEGKQGNFKNLREFVFKNIDGYFKIYSKHTPINLVRDLPQGFSALEPLVDLPIGINITRFQTLLALHRSYLTPGDSSSGWTAGAAAYYVGYLQPRTFLLKYNENGTITDAVDCALDPLSETKCTLKSFTVEKGIYQTSNFRVQPTESIVRFPNITNLCPFGEVFNATRFASVYAWNRKRISNCVADYSVLYNSASFSTFKCYGVSPTKLNDLCFTNVYADSFVIRGDEVRQIAPGQTGKIADYNYKLPDDFTGCVIAWNSNNLDSKVGGNYNYLYRLFRKSNLKPFERDISTEIYQAGSTPCNGVEGFNCYFPLQSYGFQPTNGVGYQPYRVVVLSFELLHAPATVCGPKKSTNLVKNKCVNFNFNGLTGTGVLTESNKKFLPFQQFGRDIADTTDAVRDPQTLEILDITPCSFGGVSVITPGTNTSNQVAVLYQDVNCTEVPVAIHADQLTPTWRVYSTGSNVFQTRAGCLIGAEHVNNSYECDIPIGAGICASYQTQTNSPRRARSVASQSIIAYTMSLGAENSVAYSNNSIAIPTNFTISVTTEILPVSMTKTSVDCTMYICGDSTECSNLLLQYGSFCTQLNRALTGIAVEQDKNTQEVFAQVKQIYKTPPIKDFGGFNFSQILPDPSKPSKRSFIEDLLFNKVTLADAGFIKQYGDCLGDIAARDLICAQKFNGLTVLPPLLTDEMIAQYTSALLAGTITSGWTFGAGAALQIPFAMQMAYRFNGIGVTQCVLYENQKLIANQFNSAIGKIQDSLSSTASALGKLQDVVNQNAQALNTLVKQLSSNFGAISSVLNDILSRLDKVEAEVQIDRLITGRLQSLQTYVTQQLIRAAEIRASANLAATKMSECVLGQSKRVDFCGKGYHLMSFPQSAPHGVVFLHVTYVPAQEKNFTTAPAICHDGKAHFPREGVFVSNGTHWFVTQRNFYEPQIITTDNTFVCGNCDVVIGIVNNTVYDPLQPELDSGGGGSDIDPYKEFGSSYQLLNFLPLDFFPDLNALVDTATALYEEELTGREHCSPHHTAIRQALVCWDELTKLIAWMSSNITSEQVRTIIVNHVNDTWGLKVRQSLWFHLSCLTFGQHTVQEFLVSFGVWIRTPAPYRPPNAPILSTLPEHTVIC

SEQ ID NO: 14060 - protein, 1301 aa, Artificial Sequence
  SARS-CoV-2/Guangdong/20SF028/2020__EPI_ISL_403936 spike protein (1-1147)(N914C_S1123C) WhcAg construct
MFVFLVLLPLVSSQCVNLTTRTQLPPAYTNSFTRGVYYPDKVFRSSVLYSTQDLFLPFFSNVTWFHAIHVSGTNGTKRFDNPVLPFNDGVYFASTEKSNIIRGWIFGTTLDSKTQSLLIVNNATNVVIKVCEFQFCNDPFLGVYYHKNNKSWMESEFRVYSSANNCTFEYVSQPFLMDLEGKQGNFKNLREFVFKNIDGYFKIYSKHTPINLVRDLPQGFSALEPLVDLPIGINITRFQTLLALHRSYLTPGDSSSGWTAGAAAYYVGYLQPRTFLLKYNENGTITDAVDCALDPLSETKCTLKSFTVEKGIYQTSNFRVQPTESIVRFPNITNLCPFGEVFNATRFASVYAWNRKRISNCVADYSVLYNSASFSTFKCYGVSPTKLNDLCFTNVYADSFVIRGDEVRQIAPGQTGKIADYNYKLPDDFTGCVIAWNSNNLDSKVGGNYNYLYRLFRKSNLKPFERDISTEIYQAGSTPCNGVEGFNCYFPLQSYGFQPTNGVGYQPYRVVVLSFELLHAPATVCGPKKSTNLVKNKCVNFNFNGLTGTGVLTESNKKFLPFQQFGRDIADTTDAVRDPQTLEILDITPCSFGGVSVITPGTNTSNQVAVLYQDVNCTEVPVAIHADQLTPTWRVYSTGSNVFQTRAGCLIGAEHVNNSYECDIPIGAGICASYQTQTNSPRRARSVASQSIIAYTMSLGAENSVAYSNNSIAIPTNFTISVTTEILPVSMTKTSVDCTMYICGDSTECSNLLLQYGSFCTQLNRALTGIAVEQDKNTQEVFAQVKQIYKTPPIKDFGGFNFSQILPDPSKPSKRSFIEDLLFNKVTLADAGFIKQYGDCLGDIAARDLICAQKFNGLTVLPPLLTDEMIAQYTSALLAGTITSGWTFGAGAALQIPFAMQMAYRFNGIGVTQCVLYENQKLIANQFNSAIGKIQDSLSSTASALGKLQDVVNQNAQALNTLVKQLSSNFGAISSVLNDILSRLDKVEAEVQIDRLITGRLQSLQTYVTQQLIRAAEIRASANLAATKMSECVLGQSKRVDFCGKGYHLMSFPQSAPHGVVFLHVTYVPAQEKNFTTAPAICHDGKAHFPREGVFVSNGTHWFVTQRNFYEPQIITTDNTFVCGNCDVVIGIVNNTVYDPLQPELDSGGGGSDIDPYKEFGSSYQLLNFLPLDFFPDLNALVDTATALYEEELTGREHCSPHHTAIRQALVCWDELTKLIAWMSSNITSEQVRTIIVNHVNDTWGLKVRQSLWFHLSCLTFGQHTVQEFLVSFGVWIRTPAPYRPPNAPILSTLPEHTVIC

SEQ ID NO: 14061 - protein, 1301 aa, Artificial Sequence
  SARS-CoV-2/Shenzhen/SZTH-001/2020__EPI_ISL_406592 spike protein (1-1147)(N914C_S1123C) WhcAg construct
MFVFLVLLPLVSSQCVNLTTRTQLPPAYTNSFTRGVYYPDKVFRSSVLHSTQDLFLPFFSNVTWFHAIHVSGTNGTKRFDNPVLPFNDGVYFASTEKSNIIRGWIFGTTLDSKTQSLLIVNNATNVVIKVCEFQFCNDPFLGVYYHKNNKSWMESEFRVYSSANNCTFEYVSQPFLMDLEGKQGNFKNLREFVFKNIDGYFKIYSKHTPINLVRDLPQGFSALEPLVDLPIGINITRFQTLLALHRSYLTPGDSSSGWTAGAAAYYVGYLQPRTFLLKYNENGTITDAVDCALDPLSETKCTLKSFTVEKGIYQTSNFRVQPTESIVRFPNITNLCPFGEVFNATRFASVYAWNRKRISNCVADYSVLYNSASFSTFKCYGVSPTKLNDLCFTNVYADSFVIRGDEVRQIAPGQTGKIADYNYKLPDDFTGCVIAWNSNNLDSKVGGNYNYLYRLFRKSNLKPFERDISTEIYQAGSTPCNGVEGFNCYFPLQSYGFQPTNGVGYQPYRVVVLSFELLHAPATVCGPKKSTNLVKNKCVNFNFNGLTGTGVLTESNKKFLPFQQFGRDIADTTDAVRDPQTLEILDITPCSFGGVSVITPGTNTSNQVAVLYQDVNCTEVPVAIHADQLTPTWRVYSTGSNVFQTRAGCLIGAEHVNNSYECDIPIGAGICASYQTQTNSPRRARSVASQSIIAYTMSLGAENSVAYSNNSIAIPTNFTISVTTEILPVSMTKTSVDCTMYICGDSTECSNLLLQYGSFCTQLNRALTGIAVEQDKNTQEVFAQVKQIYKTPPIKDFGGFNFSQILPDPSKPSKRSFIEDLLFNKVTLADAGFIKQYGDCLGDIAARDLICAQKFNGLTVLPPLLTDEMIAQYTSALLAGTITSGWTFGAGAALQIPFAMQMAYRFNGIGVTQCVLYENQKLIANQFNSAIGKIQDSLSSTASALGKLQDVVNQNAQALNTLVKQLSSNFGAISSVLNDILSRLDKVEAEVQIDRLITGRLQSLQTYVTQQLIRAAEIRASANLAATKMSECVLGQSKRVDFCGKGYHLMSFPQSAPHGVVFLHVTYVPAQEKNFTTAPAICHDGKAHFPREGVFVSNGTHWFVTQRNFYEPQIITTDNTFVCGNCDVLIGIVNNTVYDPLQPELDSGGGGSDIDPYKEFGSSYQLLNFLPLDFFPDLNALVDTATALYEEELTGREHCSPHHTAIRQALVCWDELTKLIAWMSSNITSEQVRTIIVNHVNDTWGLKVRQSLWFHLSCLTFGQHTVQEFLVSFGVWIRTPAPYRPPNAPILSTLPEHTVIC

SEQ ID NO: 14062 - protein, 1301 aa, Artificial Sequence
  SARS-CoV-2/Shenzhen/SZTH-004/2020__EPI_ISL_406595 spike protein (1-1147)(N914C_S1123C) WhcAg construct
MFVFLVLLPLVSSQCVNLTTRTQLPPAYTNSFTRGVYYPDKVFRSSVLHSTQDLFLPFFSNVTWFHAIHVSGTNGTKRFDNPVLPFNDGVYFASTEKSNIIRGWIFGTTLDSKTQSLLIVNNATNVVIKVCEFQFCNDPFLGVYYHKNNKSWMESEFRVYSSANNCTFEYVSQPFLMDLEGKQGNFKNLREFVFKNIDGYFKIYSKHTPINLVRDLPQGFSALEPLVDLPIGINITRFQTLLALHRSYLTPGDSSSGWTAGAAAYYVGYLQPRTFLLKYNENGTITDAVDCALDPLSETKCTLKSFTVEKGIYQTSNFRVQPTESIVRFPNITNLCPFGEVFNATRFASVYAWDRKRISNCVAYYSVLYNSASFSTFKCYGVSPTKLNDLCFTNVYADSFVIRGDEVRQIAPGQTGKIADYNYKLPDDFTGCVIAWNSNNLDSKVGGNYNYLYRLFRKSNLKPFERDISTEIYQAGSTPCNGVEGFNCYFPLQSYGFQPTNGVGYQPYRVVVLSFELLHAPATVCGPKKSTNLVKNKCVNFNFNGLTGTGVLTESNKKFLPFQQFGRDIADTTDAVRDPQTLEILDITPCSFGGVSVITPGTNTSNQVAVLYQDVNCTEVPVAIHADQLTPTWRVYSTGSNVFQTRAGCLIGAEHVNNSYECDIPIGAGICASYQTQTNSPRRARSVASQSIIAYTMSLGAENSVAYSNNSIAIPTNFTISVTTEILPVSMTKTSVDCTMYICGDSTECSNLLLQYGSFCTQLNRALTGIAVEQDKNTQEVFAQVKQIYKTPPIKDFGGFNFSQILPDPSKPSKRSFIEDLLFNKVTLADAGFIKQYGDCLGDIAARDLICAQKFNGLTVLPPLLTDEMIAQYTSALLAGTITSGWTFGAGAALQIPFAMQMAYRFNGIGVTQCVLYENQKLIANQFNSAIGKIQDSLSSTASALGKLQDVVNQNAQALNTLVKQLSSNFGAISSVLNDILSRLDKVEAEVQIDRLITGRLQSLQTYVTQQLIRAAEIRASANLAATKMSECVLGQSKRVDFCGKGYHLMSFPQSAPHGVVFLHVTYVPAQEKNFTTAPAICHDGKAHFPREGVFVSNGTHWFVTQRNFYEPQIITTDNTFVCGNCDVVIGIVNNTVYDPLQPELDSGGGGSDIDPYKEFGSSYQLLNFLPLDFFPDLNALVDTATALYEEELTGREHCSPHHTAIRQALVCWDELTKLIAWMSSNITSEQVRTIIVNHVNDTWGLKVRQSLWFHLSCLTFGQHTVQEFLVSFGVWIRTPAPYRPPNAPILSTLPEHTVIC

SEQ ID NO: 14063 - protein, 1301 aa, Artificial Sequence
  SARS-CoV-2/France/IDF0372/2020__EPI_ISL_406596 spike protein (1-1147)(N914C_S1123C) WhcAg construct
MFVFLVLLPLVSSQCVNLTTRTQLPPAYTNSFTRGVYYPDKVFRSSVLHSTQDLFLPFFSNVTWFHAIHVSGTNGTKRFDNPVLPFNDGVYFASTEKSNIIRGWIFGTTLDSKTQSLLIVNNATNVVIKVCEFQFCNDPFLGVYYHKNNKSWMESEFRVYSSANNCTFEYVSQPFLMDLEGKQGNFKNLREFVFKNIDGYFKIYSKHTPINLVRDLPQGFSALEPLVDLPIGINITRFQTLLALHRSYLTPGDSSSGWTAGAAAYYVGYLQPRTFLLKYNENGTITDAVDCALDPLSETKCTLKSFTVEKGIYQTSNFRVQPTESIVRFPNITNLCPFGEVFNATRFASVYAWNRKRISNCVADYSFLYNSASFSTFKCYGVSPTKLNDLCFTNVYADSFVIRGDEVRQIAPGQTGKIADYNYKLPDDFTGCVIAWNSNNLDSKVGGNYNYLYRLFRKSNLKPFERDISTEIYQAGSTPCNGVEGFNCYFPLQSYGFQPTNGVGYQPYRVVVLSFELLHAPATVCGPKKSTNLVKNKCVNFNFNGLTGTGVLTESNKKFLPFQQFGRDIADTTDAVRDPQTLEILDITPCSFGGVSVITPGTNTSNQVAVLYQDVNCTEVPVAIHADQLTPTWRVYSTGSNVFQTRAGCLIGAEHVNNSYECDIPIGAGICASYQTQTNSPRRARSVASQSIIAYTMSLGAENSVAYSNNSIAIPTNFTISVTTEILPVSMTKTSVDCTMYICGDSTECSNLLLQYGSFCTQLNRALTGIAVEQDKNTQEVFAQVKQIYKTPPIKDFGGFNFSQILPDPSKPSKRSFIEDLLFNKVTLADAGFIKQYGDCLGDIAARDLICAQKFNGLTVLPPLLTDEMIAQYTSALLAGTITSGWTFGAGAALQIPFAMQMAYRFNGIGVTQCVLYENQKLIANQFNSAIGKIQDSLSSTASALGKLQDVVNQNAQALNTLVKQLSSNFGAISSVLNDILSRLDKVEAEVQIDRLITGRLQSLQTYVTQQLIRAAEIRASANLAATKMSECVLGQSKRVDFCGKGYHLMSFPQSAPHGVVFLHVTYVPAQEKNFTTAPAICHDGKAHFPREGVFVSNGTHWFVTQRNFYEPQIITTDNTFVCGNCDVVIGIVNNTVYDPLQPELDSGGGGSDIDPYKEFGSSYQLLNFLPLDFFPDLNALVDTATALYEEELTGREHCSPHHTAIRQALVCWDELTKLIAWMSSNITSEQVRTIIVNHVNDTWGLKVRQSLWFHLSCLTFGQHTVQEFLVSFGVWIRTPAPYRPPNAPILSTLPEHTVIC

SEQ ID NO: 14064 - protein, 1301 aa, Artificial Sequence
  SARS-CoV-2/Australia/VIC01/2020__EPI_ISL_406844 spike protein (1-1147)(N914C_S1123C) WhcAg construct
MFVFLVLLPLVSSQCVNLTTRTQLPPAYTNSFTRGVYYPDKVFRSSVLHSTQDLFLPFFSNVTWFHAIHVSGTNGTKRFDNPVLPFNDGVYFASTEKSNIIRGWIFGTTLDSKTQSLLIVNNATNVVIKVCEFQFCNDPFLGVYYHKNNKSWMESEFRVYSSANNCTFEYVSQPFLMDLEGKQGNFKNLREFVFKNIDGYFKIYSKHTPINLVRDLPQGFSALEPLVDLPIGINITRFQTLLALHRRYLTPGDSSSGWTAGAAAYYVGYLQPRTFLLKYNENGTITDAVDCALDPLSETKCTLKSFTVEKGIYQTSNFRVQPTESIVRFPNITNLCPFGEVFNATRFASVYAWNRKRISNCVADYSVLYNSASFSTFKCYGVSPTKLNDLCFTNVYADSFVIRGDEVRQIAPGQTGKIADYNYKLPDDFTGCVIAWNSNNLDSKVGGNYNYLYRLFRKSNLKPFERDISTEIYQAGSTPCNGVEGFNCYFPLQSYGFQPTNGVGYQPYRVVVLSFELLHAPATVCGPKKSTNLVKNKCVNFNFNGLTGTGVLTESNKKFLPFQQFGRDIADTTDAVRDPQTLEILDITPCSFGGVSVITPGTNTSNQVAVLYQDVNCTEVPVAIHADQLTPTWRVYSTGSNVFQTRAGCLIGAEHVNNSYECDIPIGAGICASYQTQTNSPRRARSVASQSIIAYTMSLGAENSVAYSNNSIAIPTNFTISVTTEILPVSMTKTSVDCTMYICGDSTECSNLLLQYGSFCTQLNRALTGIAVEQDKNTQEVFAQVKQIYKTPPIKDFGGFNFSQILPDPSKPSKRSFIEDLLFNKVTLADAGFIKQYGDCLGDIAARDLICAQKFNGLTVLPPLLTDEMIAQYTSALLAGTITSGWTFGAGAALQIPFAMQMAYRFNGIGVTQCVLYENQKLIANQFNSAIGKIQDSLSSTASALGKLQDVVNQNAQALNTLVKQLSSNFGAISSVLNDILSRLDKVEAEVQIDRLITGRLQSLQTYVTQQLIRAAEIRASANLAATKMSECVLGQSKRVDFCGKGYHLMSFPQSAPHGVVFLHVTYVPAQEKNFTTAPAICHDGKAHFPREGVFVSNGTHWFVTQRNFYEPQIITTDNTFVCGNCDVVIGIVNNTVYDPLQPELDSGGGGSDIDPYKEFGSSYQLLNFLPLDFFPDLNALVDTATALYEEELTGREHCSPHHTAIRQALVCWDELTKLIAWMSSNITSEQVRTIIVNHVNDTWGLKVRQSLWFHLSCLTFGQHTVQEFLVSFGVWIRTPAPYRPPNAPILSTLPEHTVIC

SEQ ID NO: 14065 - protein, 1301 aa, Artificial Sequence
  SARS-CoV-2/Germany/BavPat1/2020__EPI_ISL_406862 spike protein (1-1147)(N914C_S1123C) WhcAg construct
MFVFLVLLPLVSSQCVNLTTRTQLPPAYTNSFTRGVYYPDKVFRSSVLHSTQDLFLPFFSNVTWFHAIHVSGTNGTKRFDNPVLPFNDGVYFASTEKSNIIRGWIFGTTLDSKTQSLLIVNNATNVVIKVCEFQFCNDPFLGVYYHKNNKSWMESEFRVYSSANNCTFEYVSQPFLMDLEGKQGNFKNLREFVFKNIDGYFKIYSKHTPINLVRDLPQGFSALEPLVDLPIGINITRFQTLLALHRSYLTPGDSSSGWTAGAAAYYVGYLQPRTFLLKYNENGTITDAVDCALDPLSETKCTLKSFTVEKGIYQTSNFRVQPTESIVRFPNITNLCPFGEVFNATRFASVYAWNRKRISNCVADYSVLYNSASFSTFKCYGVSPTKLNDLCFTNVYADSFVIRGDEVRQIAPGQTGKIADYNYKLPDDFTGCVIAWNSNNLDSKVGGNYNYLYRLFRKSNLKPFERDISTEIYQAGSTPCNGVEGFNCYFPLQSYGFQPTNGVGYQPYRVVVLSFELLHAPATVCGPKKSTNLVKNKCVNFNFNGLTGTGVLTESNKKFLPFQQFGRDIADTTDAVRDPQTLEILDITPCSFGGVSVITPGTNTSNQVAVLYQGVNCTEVPVAIHADQLTPTWRVYSTGSNVFQTRAGCLIGAEHVNNSYECDIPIGAGICASYQTQTNSPRRARSVASQSIIAYTMSLGAENSVAYSNNSIAIPTNFTISVTTEILPVSMTKTSVDCTMYICGDSTECSNLLLQYGSFCTQLNRALTGIAVEQDKNTQEVFAQVKQIYKTPPIKDFGGFNFSQILPDPSKPSKRSFIEDLLFNKVTLADAGFIKQYGDCLGDIAARDLICAQKFNGLTVLPPLLTDEMIAQYTSALLAGTITSGWTFGAGAALQIPFAMQMAYRFNGIGVTQCVLYENQKLIANQFNSAIGKIQDSLSSTASALGKLQDVVNQNAQALNTLVKQLSSNFGAISSVLNDILSRLDKVEAEVQIDRLITGRLQSLQTYVTQQLIRAAEIRASANLAATKMSECVLGQSKRVDFCGKGYHLMSFPQSAPHGVVFLHVTYVPAQEKNFTTAPAICHDGKAHFPREGVFVSNGTHWFVTQRNFYEPQIITTDNTFVCGNCDVVIGIVNNTVYDPLQPELDSGGGGSDIDPYKEFGSSYQLLNFLPLDFFPDLNALVDTATALYEEELTGREHCSPHHTAIRQALVCWDELTKLIAWMSSNITSEQVRTIIVNHVNDTWGLKVRQSLWFHLSCLTFGQHTVQEFLVSFGVWIRTPAPYRPPNAPILSTLPEHTVIC

SEQ ID NO: 14066 - protein, 1301 aa, Artificial Sequence
  SARS-CoV-2/Wuhan/HBCDC-HB-02/2020__EPI_ISL_412978 spike protein (1-1147)(N914C_S1123C) WhcAg construct
MFVFLVLLPLVSSQCVNLTTRTQLPPAYTNSFTRGVYYPDKVFRSSVLHSTQDLFLPFFSNVTWFHAIHVSGTNGTKRFDNPVLPFNDGVYFASTEKSNIIRGWIFGTTLDSKTQSLLIVNNATNVVIKVCEFQFCNDPFLGVYYHKNNKSWMESEFRVYSSANNCTFEYVSQPFLMDLEGKQGNFKNLREFVFKNIDGYFKIYSKHTPINLVRDLPQGFSALEPLVDLPIGINITRFQTLLALHRSYLTPGDSSSGWTAGAAAYYVGYLQPRTFLLKYNENGTITDAVDCALDPLSETKCTLKSFTVEKGIYQTSNFRVQPTESIVRFPNITNLCPFGEVFNATRFASVYAWNRKRISNCVADYSVLYNSASFSTFKCYGVSPTKLNDLCFTNVYADSFVIRGDEVRQIAPGQTGKIADYNYKLPDDFTGCVIAWNSNNLDSKVGGNYNYLYRLFRKSNLKPFERDISTEIYQAGSTPCNGVEGFNCYFPLQSYGFQPTNGVGYQPYRVVVLSFELLHAPATVCGPKKSTNLVKNKCVNFNFNGLTGTGVLTESNKKFLPFQQFGRDIADTTDAVRDPQTLEILDITPCSFGGVSVITPGTNTSNQVAVLYQDVNCTEVPVAIHADQLTPTWRVYSTGSNVFQTRAGCLIGAEHVNNSYECDIPIGAGICASYQTQTNSPRRARSVASQSIIAYTMSLGAENSVAYSNNSIAIPTNFTISVTTEILPVSMTKTSVDCTMYICGDSTECSNFLLQYGSFCTQLNRALTGIAVEQDKNTQEVFAQVKQIYKTPPIKDFGGFNFSQILPDPSKPSKRSFIEDLLFNKVTLADAGFIKQYGDCLGDIAARDLICAQKFNGLTVLPPLLTDEMIAQYTSALLAGTITSGWTFGAGAALQIPFAMQMAYRFNGIGVTQCVLYENQKLIANQFNSAIGKIQDSLSSTASALGKLQDVVNQNAQALNTLVKQLSSNFGAISSVLNDILSRLDKVEAEVQIDRLITGRLQSLQTYVTQQLIRAAEIRASANLAATKMSECVLGQSKRVDFCGKGYHLMSFPQSAPHGVVFLHVTYVPAQEKNFTTAPAICHDGKAHFPREGVFVSNGTHWFVTQRNFYEPQIITTDNTFVCGNCDVVIGIVNNTVYDPLQPELDSGGGGSDIDPYKEFGSSYQLLNFLPLDFFPDLNALVDTATALYEEELTGREHCSPHHTAIRQALVCWDELTKLIAWMSSNITSEQVRTIIVNHVNDTWGLKVRQSLWFHLSCLTFGQHTVQEFLVSFGVWIRTPAPYRPPNAPILSTLPEHTVIC

SEQ ID NO: 14067 - protein, 1301 aa, Artificial Sequence
  SARS-CoV-2/Australia/QLD02/2020__EPI_ISL_407896 spike protein (1-1147)(N914C_S1123C) WhcAg construct
MFVFLVLLPLVSSQCVNLTTRTQLPPAYTNSFTRGVYYPDKVFRSSVLHSTQDLFLPFFSNVTWFHAIHVSGTNGTKRFDNPVLPFNDGVYFASTEKSNIIRGWIFGTTLDSKTQSLLIVNNATNVVIKVCEFQFCNDPFLGVYYHKNNKSWMESEFRVYSSANNCTFEYVSQPFLMDLEGKQGNFKNLREFVFKNIDGYFKIYSKHTPINLVRDLPQGFSALEPLVDLPIGINITRFQTLLALHRSYLTPGDSSSGWTAGAAAYYVGYLQPRTFLLKYNENGTITDAVDCALDPLSETKCTLKSFTVEKGIYQTSNFRVQPTESIVRFPNITNLCPFGEVFNATRFASVYAWNRKRISNCVADYSVLYNSASFSTFKCYGVSPTKLNDLCFTNVYADSFVIRGDEVRQIAPGQTGKIADYNYKLPDDFTGCVIAWNSNNLDSKVGGNYNYLYRLFRKSNLKPFERDISTEIYQAGSTPCNGVEGFNCYFPLQSYGFQPTNGVGYQPYRVVVLSFELLHAPATVCGPKKSTNLVKNKCVNFNFNGLTGTGVLTESNKKFLPFQQFGRDIADTTDAVRDPQTLEILDITPCSFGGVSVITPGTNTSNQVAVLYQDVNCTEVPVAIHADQLTPTWRVYSTGSNVFQTRAGCLIGAEHVNNSYECDIPIGAGICASYQTQTNSPRRARSVASQSIIAYTMSLGAENSVAYSNNSIAIPTNFTISVTTEILPVSMTKTSVDCTMYICGDSTECSNLLLQYGSFCTQLNRALTGIAVEQDKNTQEVFAQVKQIYKTPPIKDFGGFNFSQILPDPSKPSKRSFIEDLLFNKVTLADAGFIKQYGDCLGDIAARDLICAQKFNGLTVLPPLLTDEMIAQYTSALLAGTITSGWTFGAGAALQIPFAMQMAYRFNGIGVTQCVLYENQKLIANQFNSAIGKIQDSLSSTASALGKLQDVVNQNAQALNTLVKQLSSNFGAISSVLNDILSRLDKVEAEVQIDRLITGRLQSLQTYVTQQLIRAAEIRASANLAATKMSECVLGQSKRVDFCGKGYHLMSFPQSAPHGVVFLHVTYVPAQEKNFTTAPAICHDGKAHFPREGVFVSNGTHWFVTQRNFYEPQIITTDNTFVCGNCDVVIGIVNNTVYDPLQLELDSGGGGSDIDPYKEFGSSYQLLNFLPLDFFPDLNALVDTATALYEEELTGREHCSPHHTAIRQALVCWDELTKLIAWMSSNITSEQVRTIIVNHVNDTWGLKVRQSLWFHLSCLTFGQHTVQEFLVSFGVWIRTPAPYRPPNAPILSTLPEHTVIC

SEQ ID NO: 14068 - protein, 1301 aa, Artificial Sequence
  SARS-CoV-2/India/1-31/2020__EPI_ISL_413523 spike protein (1-1147)(N914C_S1123C) WhcAg construct
MFVFLVLLPLVSSQCVNLTTRTQLPPAYTNSFTRGVYYPDKVFRSSVLHSTQDLFLPFFSNVTWFHAIHVSGTNGTKRFDNPVLPFNDGVYFASTEKSNIIRGWIFGTTLDSKTQSLLIVNNATNVVIKVCEFQFCNDPFLGVYYHKNNKSWMESEFRVYSSANNCTFEYVSQPFLMDLEGKQGNFKNLREFVFKNIDGYFKIYSKHTPINLVRDLPQGFSALEPLVDLPIGINITRFQTLLALHRSYLTPGDSSSGWTAGAAAYYVGYLQPRTFLLKYNENGTITDAVDCALDPLSETKCTLKSFTVEKGIYQTSNFRVQPTESIVRFPNITNLCPFGEVFNATRFASVYAWNRKRISNCVADYSVLYNSASFSTFKCYGVSPTKLNDLCFTNVYADSFVIRGDEVRQIAPGQTGKIADYNYKLPDDFTGCVIAWNSNNLDSKVGGNYNYLYRLFRKSNLKPFERDISTEIYQAGSTPCNGVEGFNCYFPLQSYGFQPTNGVGYQPYRVVVLSFELLHAPATVCGPKKSTNLVKNKCVNFNFNGLTGTGVLTESNKKFLPFQQFGRDIADTTDAVRDPQTLEILDITPCSFGGVSVITPGTNTSNQVAVLYQDVNCTEVPVAIHADQLTPTWRVYSTGSNVFQTRAGCLIGAEHVNNSYECDIPIGAGICASYQTQTNSPRRARSVASQSIIAYTMSLGAENSVAYSNNSIAIPTNFTISVTTEILPVSMTKTSVDCTMYICGDSTECSNLLLQYGSFCTQLNRALTGIAVEQDKNTQEVFAQVKQIYKTPPIKDFGGFNFSQILPDPSKPSKRSFIEDLLFNKVTLADAGFIKQYGDCLGDIAARDLICAQKFNGLTVLPPLLTDEMIAQYTSALLAGTITSGWTFGAGAALQIPFAMQMAYRFNGIGVTQCVLYENQKLIANQFNSVIGKIQDSLSSTASALGKLQDVVNQNAQALNTLVKQLSSNFGAISSVLNDILSRLDKVEAEVQIDRLITGRLQSLQTYVTQQLIRAAEIRASANLAATKMSECVLGQSKRVDFCGKGYHLMSFPQSAPHGVVFLHVTYVPAQEKNFTTAPAICHDGKAHFPREGVFVSNGTHWFVTQRNFYEPQIITTDNTFVCGNCDVVIGIVNNTVYDPLQPELDSGGGGSDIDPYKEFGSSYQLLNFLPLDFFPDLNALVDTATALYEEELTGREHCSPHHTAIRQALVCWDELTKLIAWMSSNITSEQVRTIIVNHVNDTWGLKVRQSLWFHLSCLTFGQHTVQEFLVSFGVWIRTPAPYRPPNAPILSTLPEHTVIC

SEQ ID NO: 14069 - protein, 1301 aa, Artificial Sequence
  SARS-CoV-2/Guangdong/GD2020087-P0008/2020__EPI_ISL_413863 spike protein (1-1147)(N914C_S1123C) WhcAg construct
MFVFLVLLPLVSSQCVNLTTRTQLPPAYTNSFTRGVYYPDKVFRSSVLHSTQDLFLPFFSNVTWFHAIHVSGTNGTKRFDNPVLPFNDGVYFASTEKSNIIRGWIFGTTLDSKTQSLLIVNNATNVVIKVCEFQFCNDPFLGVYYHKNNKSWMESEFRVYSSANNCTFEYVSQPFLMDLEGKQGNFKNLREFVFKNIDGYFKIYSKHTPINLVRDLPQGFSALEPLVDLPIGINITRFQTLLALHRSYLTPGDSSSGWTAGAAAYYVGYLQPRTFLLKYNENGTITDAVDCALDPLSETKCTLKSFTVEKGIYQTSNFRVQPTESIVRFPNITNLCPFGEVFNATRFASVYAWNRKRISNCVADYSVLYNSASFSTFKCYGVSPTKLNDLCFTNVYADSFVIRGDEVREIAPGQTGKIADYNYKLPDDFTGCVIAWNSNNLDSKVGGNYNYLYRLFRKSNLKPFERDISTEIYQAGSTPCNGVEGFNCYFPLQSYGFQPTNGVGYQPYRVVVLSFELLHAPATVCGPKKSTNLVKNKCVNFNFNGLTGTGVLTESNKKFLPFQQFGRDIADTTDAVRDPQTLEILDITPCSFGGVSVITPGTNTSNQVAVLYQDVNCTEVPVAIHADQLTPTWRVYSTGSNVFQTRAGCLIGAEHVNNSYECDIPIGAGICASYQTQTNSPRRARSVASQSIIAYTMSLGAENSVAYSNNSIAIPTNFTISVTTEILPVSMTKTSVDCTMYICGDSTECSNLLLQYGSFCTQLNRALTGIAVEQDKNTQEVFAQVKQIYKTPPIKDFGGFNFSQILPDPSKPSKRSFIEDLLFNKVTLADAGFIKQYGDCLGDIAARDLICAQKFNGLTVLPPLLTDEMIAQYTSALLAGTITSGWTFGAGAALQIPFAMQMAYRFNGIGVTQCVLYENQKLIANQFNSAIGKIQDSLSSTASALGKLQDVVNQNAQALNTLVKQLSSNFGAISSVLNDILSRLDKVEAEVQIDRLITGRLQSLQTYVTQQLIRAAEIRASANLAATKMSECVLGQSKRVDFCGKGYHLMSFPQSAPHGVVFLHVTYVPAQEKNFTTAPAICHDGKAHFPREGVFVSNGTHWFVTQRNFYEPQIITTDNTFVCGNCDVVIGIVNNTVYDPLQPELDSGGGGSDIDPYKEFGSSYQLLNFLPLDFFPDLNALVDTATALYEEELTGREHCSPHHTAIRQALVCWDELTKLIAWMSSNITSEQVRTIIVNHVNDTWGLKVRQSLWFHLSCLTFGQHTVQEFLVSFGVWIRTPAPYRPPNAPILSTLPEHTVIC

SEQ ID NO: 14070 - protein, 1301 aa, Artificial Sequence
  SARS-CoV-2/Sweden/01/2020__EPI_ISL_411951 spike protein (1-1147)(N914C_S1123C) WhcAg construct
MFVFLVLLPLVSSQCVNLTTRTQLPPAYTNSFTRGVYYPDKVFRSSVLHSTQDLFLPFFSNVTWFHAIHVSGTNGTKRFDNPVLPFNDGVYFASTEKSNIIRGWIFGTTLDSKTQSLLIVNNATNVVIKVCEFQFCNDPFLGVYYHKNNKSWMESEFRVYSSANNCTFEYVSQPFLMDLEGKQGNFKNLREFVFKNIDGYFKIYSKHTPINLVRDLPQGFSALEPLVDLPIGINITRFQTLLALHRSYLTPGDSSSGWTAGAAAYYVGYLQPRTFLLKYNENGTITDAVDCALDPLSETKCTLKSFTVEKGIYQTSNFRVQPTESIVRFPNITNLCPFGEVFNATRFASVYAWNRKRISNCVADYSVLYNSASFSTFKCYGVSPTKLNDLCFTNVYADSFVIRGDEVRQIAPGQTGKIADYNYKLPDDFTGCVIAWNSNNLDSKVGGNYNYLYRLFRKSNLKPFERDISTEIYQAGSTPCNGVEGFNCYFPLQSYGFQPTNGVGYQPYRVVVLSFELLHAPATVCGPKKSTNLVKNKCVNFNFNGLTGTGVLTESNKKFLPFQQFGRDIADTTDAVRDPQTLEILDITPCSFGGVSVITPGTNTSNQVAVLYQDVNCTEVPVAIHADQLTPTWRVYSTGSNVFQTRAGCLIGAEHVNNSYECDIPIGAGICASYQTQTNSPRRARSVASQSIIAYTMSLGAENSVAYSNNSIAIPTNFTISVTTEILPVSMTKTSVDCTMYICGDSTECSNLLLQYGSFCTQLNRALTGIAVEQDKNTQEVFAQVKQIYKTPPIKDCGGFNFSQILPDPSKPSKRSFIEDLLFNKVTLADAGFIKQYGDCLGDIAARDLICAQKFNGLTVLPPLLTDEMIAQYTSALLAGTITSGWTFGAGAALQIPFAMQMAYRFNGIGVTQCVLYENQKLIANQFNSAIGKIQDSLSSTASALGKLQDVVNQNAQALNTLVKQLSSNFGAISSVLNDILSRLDKVEAEVQIDRLITGRLQSLQTYVTQQLIRAAEIRASANLAATKMSECVLGQSKRVDFCGKGYHLMSFPQSAPHGVVFLHVTYVPAQEKNFTTAPAICHDGKAHFPREGVFVSNGTHWFVTQRNFYEPQIITTDNTFVCGNCDVVIGIVNNTVYDPLQPELDSGGGGSDIDPYKEFGSSYQLLNFLPLDFFPDLNALVDTATALYEEELTGREHCSPHHTAIRQALVCWDELTKLIAWMSSNITSEQVRTIIVNHVNDTWGLKVRQSLWFHLSCLTFGQHTVQEFLVSFGVWIRTPAPYRPPNAPILSTLPEHTVIC

SEQ ID NO: 14071 - protein, 1301 aa, Artificial Sequence
  SARS-CoV-2/Tianmen/HBCDC-HB-07/2020__EPI_ISL_412983 spike protein (1-1147)(N914C_S1123C) WhcAg construct
MFVFLVLLPLVSSQCVNLTTRTQLPPAYTNSFTRGVYYPDKVFRSSVLHSTQDLFLPFFSNVTWFHAIHVSGTNGTKRFDNPVLPFNDGVYFASTEKSNIIRGWIFGTTLDSKTQSLLIVNNATNVVIKVCEFQFCNDPFLGVYYHKNNKSWMESEFRVYSSANNCTFEYVSQPFLMDLEGKQGNFKNLREFVFKNIDGYFKIYSKHTPINLVRDLPQGFSALEPLVDLPIGINITRFQTLLALHRSYLTPGDSSSGWTAGAAAYYVGYLQPRTFLLKYNENGTITDAVDCALDPLSETKCTLKSFTVEKGIYQTSNFRVQPTESIVRFPNITNLCPFGEVFNATRFASVYAWNRKRISNCVADYSVLYNSASFSTFKCYGVSPTKLNDLCFTNVYADSFVIRGDEVRQIAPGQTGKIADYNYKLPDDFTGCVIAWNSNNLDSKVGGNYNYLYRLFRKSNLKPFERDISTEIYQAGSTPCNGVEGFNCYFPLQSYGFQPTNGVGYQPYRVVVLSFELLHAPATVCGPKKSTNLVKNKCVNFNFNGLTGTGVLTESNKKFLPFQQFGRDIADTTDAVRDPQTLEILDITPCSFGGVSVITPGTNTSNQVAVLYQDLNCTEVPVAIHADQLTPTWRVYSTGSNVFQTRAGCLIGAEHVNNSYECDIPIGAGICASYQTQTNSPRRARSVASQSIIAYTMSLGAENSVAYSNNSIAIPTNFTISVTTEILPVSMTKTSVDCTMYICGDSTECSNLLLQYGSFCTQLNRALTGIAVEQDKNTQEVFAQVKQIYKTPPIKDFGGFNFSQILPDPSKPSKRSFIEDLLFNKVTLADAGFIKQYGDCLGDIAARDLICAQKFNGLTVLPPLLTDEMIAQYTSALLAGTITSGWTFGAGAALQIPFAMQMAYRFNGIGVTQCVLYENQKLIANQFNSAIGKIQDSLSSTASALGKLQDVVNQNAQALNTLVKQLSSNFGAISSVLNDILSRLDKVEAEVQIDRLITGRLQSLQTYVTQQLIRAAEIRASANLAATKMSECVLGQSKRVDFCGKGYHLMSFPQSAPHGVVFLHVTYVPAQEKNFTTAPAICHDGKAHFPREGVFVSNGTHWFVTQRNFYEPQIITTDNTFVCGNCDVVIGIVNNTVYDPLQPELDSGGGGSDIDPYKEFGSSYQLLNFLPLDFFPDLNALVDTATALYEEELTGREHCSPHHTAIRQALVCWDELTKLIAWMSSNITSEQVRTIIVNHVNDTWGLKVRQSLWFHLSCLTFGQHTVQEFLVSFGVWIRTPAPYRPPNAPILSTLPEHTVIC

SEQ ID NO: 14072 - protein, 1301 aa, Artificial Sequence
  SARS-CoV-2/Hong Kong/case42_VM20002493/2020__EPI_ISL_414527 spike protein (1-1147)(N914C_S1123C) WhcAg construct
MFVFLVLLPLVSSQCVNLTTRTQLPPAYTNSFTRGVYYPDKVFRSSVLHSTQDLFLPFFSNVTWFHAIHVSGTNGTKRFDNPVLPFNDGVYFASTEKSNIIRGWIFGTTLDSKTQSLLIVNNATNVVIKVCEFQFCNDPFLGVYYHKNNKSWMESEFRVYSSANNCTFEYVSQPFLMDLEGKQGNFKNLREFVFKNIDGYFKIYSKHTPINLVRDLPQGFSALEPLVDLPIGINITRFQTLLALHRSYLTPGDSSSGWTAGAAAYYVGYLQPRTFLLKYNENGTITDAVDCALDPLSETKCTLKSFTVEKGIYQTSNFRVQPTESIVRFPNITNLCPFGEVFNATRFASVYAWNRKRISNCVADYSVLYNSASFSTFKCYGVSPTKLNDLCFTNVYADSFVIRGDEVRQIAPGQTGKIADYNYKLPDDFTGCVIAWNSNNLDSKVGGNYNYLYRLFRKSNLKPFERDISTEIYQAGSTPCNGVEGFNCYFPLQSYGFQPTNGVGYQPYRVVVLSFELLHAPATVCGPKKSTNLVKNKCVNFNFNGLTGTGVLTESNKKFLPFQQFGRDIADTTDAVRDPQTLEILDITPCSFGGVSVITPGTNTSNQVAVLYQDVNCTEVPVAIHADQLTPTWRVYSTGSNVFQTRAGCLIGAEHVNNSYECDIPIGAGICASYQTQTNSPRRARSVASQSIIAYTMSLGAENSVAYSNNSIAIPTNFAISVTTEILPVSMTKTSVDCTMYICGDSTECSNLLLQYGSFCTQLNRALTGIAVEQDKNTQEVFAQVKQIYKTPPIKDFGGFNFSQILPDPSKPSKRSFIEDLLFNKVTLADAGFIKQYGDCLGDIAARDLICAQKFNGLTVLPPLLTDEMIAQYTSALLAGTITSGWTFGAGAALQIPFAMQMAYRFNGIGVTQCVLYENQKLIANQFNSAIGKIQDSLSSTASALGKLQDVVNQNAQALNTLVKQLSSNFGAISSVLNDILSRLDKVEAEVQIDRLITGRLQSLQTYVTQQLIRAAEIRASANLAATKMSECVLGQSKRVDFCGKGYHLMSFPQSAPHGVVFLHVTYVPAQEKNFTTAPAICHDGKAHFPREGVFVSNGTHWFVTQRNFYEPQIITTDNTFVCGNCDVVIGIVNNTVYDPLQPELDSGGGGSDIDPYKEFGSSYQLLNFLPLDFFPDLNALVDTATALYEEELTGREHCSPHHTAIRQALVCWDELTKLIAWMSSNITSEQVRTIIVNHVNDTWGLKVRQSLWFHLSCLTFGQHTVQEFLVSFGVWIRTPAPYRPPNAPILSTLPEHTVIC

SEQ ID NO: 14073 - protein, 1301 aa, Artificial Sequence
  SARS-CoV-2/USA/CruiseA-23/2020__EPI_ISL_414482 spike protein (1-1147)(N914C_S1123C) WhcAg construct
MFVFLVLLPLVSSQCVNLTTRTQLPPAYTNSFTRGVYYPDKVFRSSVLHSTQDLFLPFFSNVTWFHAIHVSGTNGTKRFDNPVLPFNDGVYFASTEKSNIIRGWIFGTTLDSKTQSLLIVNNATNVVIKVCEFQFCNDPFLGVYYHKNNKSWMESEFRVYSSANNCTFEYVSQPFLMDLEVKQGNFKNLREFVFKNIDGYFKIYSKHTPINLVRDLPQGFSALEPLVDLPIGINITRFQTLLALHRSYLTPGDSSSGWTAGAAAYYVGYLQPRTFLLKYNENGTITDAVDCALDPLSETKCTLKSFTVEKGIYQTSNFRVQPTESIVRFPNITNLCPFGEVFNATRFASVYAWNRKRISNCVADYSVLYNSASFSTFKCYGVSPTKLNDLCFTNVYADSFVIRGDEVRQIAPGQTGKIADYNYKLPDDFTGCVIAWNSNNLDSKVGGNYNYLYRLFRKSNLKPFERDISTEIYQAGSTPCNGVEGFNCYFPLQSYGFQPTNGVGYQPYRVVVLSFELLHAPATVCGPKKSTNLVKNKCVNFNFNGLTGTGVLTESNKKFLPFQQFGRDIADTTDAVRDPQTLEILDITPCSFGGVSVITPGTNTSNQVAVLYQDVNCTEVPVAIHADQLTPTWRVYSTGSNVFQTRAGCLIGAEHVNNSYECDIPIGAGICASYQTQTNSPRRARSVASQSIIAYTMSLGAENSVAYSNNSIAIPTNFTISVTTEILPVSMTKTSVDCTMYICGDSTECSNLLLQYGSFCTQLNRALTGIAVEQDKNTQEVFAQVKQIYKTPPIKDFGGFNFSQILPDPSKPSKRSFIEDLLFNKVTLADAGFIKQYGDCLGDIAARDLICAQKFNGLTVLPPLLTDEMIAQYTSALLAGTITSGWTFGAGAALQIPFAMQMAYRFNGIGVTQCVLYENQKLIANQFNSAIGKIQDSLSSTASALGKLQDVVNQNAQALNTLVKQLSSNFGAISSVLNDILSRLDKVEAEVQIDRLITGRLQSLQTYVTQQLIRAAEIRASANLAATKMSECVLGQSKRVDFCGKGYHLMSFPQSAPHGVVFLHVTYVPAQEKNFTTAPAICHDGKAHFPREGVFVSNGTHWFVTQRNFYEPQIITTDNTFVCGNCDVVIGIVNNTVYDPLQPELDSGGGGSDIDPYKEFGSSYQLLNFLPLDFFPDLNALVDTATALYEEELTGREHCSPHHTAIRQALVCWDELTKLIAWMSSNITSEQVRTIIVNHVNDTWGLKVRQSLWFHLSCLTFGQHTVQEFLVSFGVWIRTPAPYRPPNAPILSTLPEHTVIC

SEQ ID NO: 14074 - protein, 1301 aa, Artificial Sequence
  SARS-CoV-2/Hong Kong/case85_VM20002868/2020__EPI_ISL_414519 spike protein (1-1147)(N914C_S1123C) WhcAg construct
MFVFLVLVPLVSSQCVNLTTRTQLPPAYTNSFTRGVYYPDKVFRSSVLHSTQDLFLPFFSNVTWFHAIHVSGTNGTKRFDNPVLPFNDGVYFASTEKSNIIRGWIFGTTLDSKTQSLLIVNNATNVVIKVCEFQFCNDPFLGVYYHKNNKSWMESEFRVYSSANNCTFEYVSQPFLMDLEGKQGNFKNLREFVFKNIDGYFKIYSKHTPINLVRDLPQGFSALEPLVDLPIGINITRFQTLLALHRSYLTPGDSSSGWTAGAAAYYVGYLQPRTFLLKYNENGTITDAVDCALDPLSETKCTLKSFTVEKGIYQTSNFRVQPTESIVRFPNITNLCPFGEVFNATRFASVYAWNRKRISNCVADYSVLYNSASFSTFKCYGVSPTKLNDLCFTNVYADSFVIRGDEVRQIAPGQTGKIADYNYKLPDDFTGCVIAWNSNNLDSKVGGNYNYLYRLFRKSNLKPFERDISTEIYQAGSTPCNGVEGFNCYFPLQSYGFQPTNGVGYQPYRVVVLSFELLHAPATVCGPKKSTNLVKNKCVNFNFNGLTGTGVLTESNKKFLPFQQFGRDIADTTDAVRDPQTLEILDITPCSFGGVSVITPGTNTSNQVAVLYQDVNCTEVPVAIHADQLTPTWRVYSTGSNVFQTRAGCLIGAEHVNNSYECDIPIGAGICASYQTQTNSPRRARSVASQSIIAYTMSLGAENSVAYSNNSIAIPTNFTISVTTEILPVSMTKTSVDCTMYICGDSTECSNLLLQYGSFCTQLNRALTGIAVEQDKNTQEVFAQVKQIYKTPPIKDFGGFNFSQILPDPSKPSKRSFIEDLLFNKVTLADAGFIKQYGDCLGDIAARDLICAQKFNGLTVLPPLLTDEMIAQYTSALLAGTITSGWTFGAGAALQIPFAMQMAYRFNGIGVTQCVLYENQKLIANQFNSAIGKIQDSLSSTASALGKLQDVVNQNAQALNTLVKQLSSNFGAISSVLNDILSRLDKVEAEVQIDRLITGRLQSLQTYVTQQLIRAAEIRASANLAATKMSECVLGQSKRVDFCGKGYHLMSFPQSAPHGVVFLHVTYVPAQEKNFTTAPAICHDGKAHFPREGVFVSNGTHWFVTQRNFYEPQIITTDNTFVCGNCDVVIGIVNNTVYDPLQPELDSGGGGSDIDPYKEFGSSYQLLNFLPLDFFPDLNALVDTATALYEEELTGREHCSPHHTAIRQALVCWDELTKLIAWMSSNITSEQVRTIIVNHVNDTWGLKVRQSLWFHLSCLTFGQHTVQEFLVSFGVWIRTPAPYRPPNAPILSTLPEHTVIC

SEQ ID NO: 14075 - protein, 1301 aa, Artificial Sequence; identical to SEQ ID NO: 14065
  SARS-CoV-2/England/200990660/2020__EPI_ISL_414523 spike protein (1-1147)(N914C_S1123C) WhcAg construct

SEQ ID NO: 14076 - protein, 1301 aa, Artificial Sequence
  SARS-CoV-2/Australia/NSW09/2020__EPI_ISL_413595 spike protein (1-1147)(N914C_S1123C) WhcAg construct
MFVFLVLLPLVSSQCVNLTTRTQLPPAYTNSFTRGVYYPDKVFRSSVLHSTQDLFLPFFSNVTWFHAIHVSGTNGTKRFDNPVLPFNDGVYFASTEKSNIIRGWIFGTTLDSKTQSLLIVNNATNVVIKVCEFQFCNDPFLGVYYHKNNKSWMESEFRVYSSANNCTFEYVSQPFLMDLEGKQGNFKNLREFVFKNIDGYFKIYSKHTPINLVRDLPQGFSALEPLVDLPIGINITRFQTLLALHRSYLTPGDSSSGWTAGAAAYYVGYLQPRTFLLKYNENGTITDAVDCALDPLSETKCTLKSFTVEKGIYQTSNFRVQPTESIVRFPNITNLCPFGEVFNATRFASVYAWNRKRISNCVADYSVLYNSASFSTFKCYGVSPTKLNDLCFTNVYADSFVIRGDEVRQIAPGQTGKIADYNYKLPDDFTGCVIAWNSNNLDSKVGGNYNYLYRLFRKSNLKPFERDISTEIYQAGSTPCNGVEGFNCYFPLQSYGFQPTNGVGYQPYRVVVLSFELLHAPATVCGPKKSTNLVKNKCVNFNFNGLTGTGVLTESNKKFLPFQQFGRDIADTTDAVRDPQTLEILDITPCSFGGVSVITPGTNTSNQVAVLYQDVNCTEVPVAIHADQLTPTWRVYSTGSNVFQTRAGCLIGAEHVNNSYECDIPIGAGICASYQTQTNSPRRARSVASQSIIAYTMSLGAENSVAYSNNSIAIPTNFTISVTTEILPVSMTKTSVDCTMYICGDSTECSNLLLQYGSFCTQLNRALTGIAVEQDKNTQEVFAQVKQIYKTPPIKDFGGFNFSQILPDPSKPSKRSFIEDLLFNKVTLADAGFIKQYGDCLGDIAARDLICAQKFNGLTVLPPLLTDEMIAQYTSALLAGTITSGWTFGAGAALQIPFAMQMAYRFNGIGVTQCVLYENQKLIANQFNSAIGKIQDSLSFTASALGKLQDVVNQNAQALNTLVKQLSSNFGAISSVLNDILSRLDKVEAEVQIDRLITGRLQSLQTYVTQQLIRAAEIRASANLAATKMSECVLGQSKRVDFCGKGYHLMSFPQSAPHGVVFLHVTYVPAQEKNFTTAPAICHDGKAHFPREGVFVSNGTHWFVTQRNFYEPQIITTDNTFVCGNCDVVIGIVNNTVYDPLQPELDSGGGGSDIDPYKEFGSSYQLLNFLPLDFFPDLNALVDTATALYEEELTGREHCSPHHTAIRQALVCWDELTKLIAWMSSNITSEQVRTIIVNHVNDTWGLKVRQSLWFHLSCLTFGQHTVQEFLVSFGVWIRTPAPYRPPNAPILSTLPEHTVIC

SEQ ID NO: 14077 - protein, 1301 aa, Artificial Sequence; identical to SEQ ID NO: 14057
  SARS-CoV-2/Australia/NSW10/2020__EPI_ISL_413596 spike protein (1-1147)(N914C_S1123C) WhcAg construct

SEQ ID NO: 14078 - protein, 1301 aa, Artificial Sequence
  SARS-CoV-2/Switzerland/1000477797/2020__EPI_ISL_413023 spike protein (1-1147)(N914C_S1123C) WhcAg construct
MFVFLVLLPLVSSQCVNLTTRTQLPPAYTNSFTRGVYYPDKVFRSSVLHSTQDLFLPFFSNVTWFHAIHVSGTNGTKRFDNPVLPFNDGVYFASTEKSNIIRGWIFGTTLDSKTQSLLIVNNATNVVIKVCEFQFCNDPFLGVYYHKNNKSWMESEFRVYSSANNCTFEYVSQPFLMDLEGKQGNFKNLREFVFKNIDGYFNIYSKHTPINLVRDLPQGFSALEPLVDLPIGINITRFQTLLALHRSYLTPGDSSSGWTAGAAAYYVGYLQPRTFLLKYNENGTITDAVDCALDPLSETKCTLKSFTVEKGIYQTSNFRVQPTESIVRFPNITNLCPFGEVFNATRFASVYAWNRKRISNCVADYSVLYNSASFSTFKCYGVSPTKLNDLCFTNVYADSFVIRGDEVRQIAPGQTGKIADYNYKLPDDFTGCVIAWNSNNLDSKVGGNYNYLYRLFRKSNLKPFERDISTEIYQAGSTPCNGVEGFNCYFPLQSYGFQPTNGVGYQPYRVVVLSFELLHAPATVCGPKKSTNLVKNKCVNFNFNGLTGTGVLTESNKKFLPFQQFGRDIADTTDAVRDPQTLEILDITPCSFGGVSVITPGTNTSNQVAVLYQGVNCTEVPVAIHADQLTPTWRVYSTGSNVFQTRAGCLIGAEHVNNSYECDIPIGAGICASYQTQTNSPRRARSVASQSIIAYTMSLGAENSVAYSNNSIAIPTNFTISVTTEILPVSMTKTSVDCTMYICGDSTECSNLLLQYGSFCTQLNRALTGIAVEQDKNTQEVFAQVKQIYKTPPIKDFGGFNFSQILPDPSKPSKRSFIEDLLFNKVTLADAGFIKQYGDCLGDIAARDLICAQKFNGLTVLPPLLTDEMIAQYTSALLAGTITSGWTFGAGAALQIPFAMQMAYRFNGIGVTQCVLYENQKLIANQFNSAIGKIQDSLSSTASALGKLQDVVNQNAQALNTLVKQLSSNFGAISSVLNDILSRLDKVEAEVQIDRLITGRLQSLQTYVTQQLIRAAEIRASANLAATKMSECVLGQSKRVDFCGKGYHLMSFPQSAPHGVVFLHVTYVPAQEKNFTTAPAICHDGKAHFPREGVFVSNGTHWFVTQRNFYEPQIITTDNTFVCGNCDVVIGIVNNTVYDPLQPELDSGGGGSDIDPYKEFGSSYQLLNFLPLDFFPDLNALVDTATALYEEELTGREHCSPHHTAIRQALVCWDELTKLIAWMSSNITSEQVRTIIVNHVNDTWGLKVRQSLWFHLSCLTFGQHTVQEFLVSFGVWIRTPAPYRPPNAPILSTLPEHTVIC

SEQ ID NO: 14079 - protein, 1301 aa, Artificial Sequence
  SARS-CoV-2/Belgium/BA-02291/2020__EPI_ISL_415159 spike protein (1-1147)(N914C_S1123C) WhcAg construct
MFVFLVLLPLVSSQCVNLTTRTQLPPAYTNSFTRGVYYPDKVFRSSVLHSTQDLFLPFFSNVTWFHAIHVSGTNGTKRFDNPVLPFNDGVYFASTEKSNIIRGWIFGTTLDSKTQSLLIVNNATNVVIKVCEFQFCNDPFLGVYYHKNNKSWMESEFRVYSSANNCTFEYVSQPFLMDLEGKQGNFKNLREFVFKNIDGYFKIYSKHTPINLVRDLPQGFSALEPLVDLPIGINITRFQTLLALHRSYLTPGDSSSGWTAGAAAYYVGYLQPRTFLLKYNENGTITDAVDCALDPLSETKCTLKSFTVEKGIYQTSNFRVQPTESIVRFPNITNLCPFGEVFNATRFASVYAWNRKRISNCVADYSVLYNSASFSTFKCYGVSPTKLNDLCFTNVYADSFVIRGDEVRQIAPGQTGKIADYNYKLPDDFTGCVIAWNSNNLDSKVGGNYNYLYRLFRRSNLKPFERDISTEIYQAGSTPCNGVEGFNCYFPLQSYGFQPTNGVGYQPYRVVVLSFELLPAPATVCGPKKSTNLVKNKCVNFNFNGLTGTGVLTESNKKFLPFQQFGRDIADTTDAVRDPQTLEILDITPCSFGGVSVITPGTNTSNQVAVLYQGVNCTEVPVAIHADQLTPTWRVYSTGSNVFQTRAGCLIGAEHVNNSYECDIPIGAGICASYQTQTNSPRRARSVASQSIIAYTMSLGAENSVAYSNNSIAIPTNFTISVTTEILPVSMTKTSVDCTMYICGDSTECSNLLLQYGSFCTQLNRALTGIAVEQDKNTQEVFAQVKQIYKTPPIKDFGGFNFSQILPDPSKPSKRSFIEDLLFNKVTLADAGFIKQYGDCLGDIAARDLICAQKFNGLTVLPPLLTDEMIAQYTSALLAGTITSGWTFGAGAALQIPFAMQMAYRFNGIGVTQCVLYENQKLIANQFNSAIGKIQDSLSSAAPALGKLQDVVNQNAQALNTLVKQLSSNFGAISSVLNDILSRLDKVEAEVQIDRLITGRLQSLQTYVTQQLIRAAEIRASANLAATKMSECVLGQSKRVDFCGKGYHLMSFPQSAPHGVVFLHVTYVPAQEKNFTTAPAICHDGKAHFPREGVFVSNGTHWFVTQRNFYEPQIITTDNTFVCGNCDVVIGIVNNTVYDPLQPELDSGGGGSDIDPYKEFGSSYQLLNFLPLDFFPDLNALVDTATALYEEELTGREHCSPHHTAIRQALVCWDELTKLIAWMSSNITSEQVRTIIVNHVNDTWGLKVRQSLWFHLSCLTFGQHTVQEFLVSFGVWIRTPAPYRPPNAPILSTLPEHTVIC

SEQ ID NO: 14080 - protein, 1301 aa, Artificial Sequence
  SARS-CoV-2/USA/WA8-UW5/2020__EPI_ISL_413486 spike protein (1-1147)(N914C_S1123C) WhcAg construct
MFVFLVLLPLVSSQCVNLTTRTQLPPAYTNSFTRGVYYPDKVFRSSVLHSTQDLFLPFFSNVTWFHAIHVSGTNGTKRFDNPVLPFNDGVYFASTEKSNIIRGWIFGTTLDSKTQSLLIVNNATNVVIKVCEFQFCNDPFLGVYYHKNNKSWMESEFRVYSSANNCTFEYVSQPFLMDLEGKQGNFKNLREFVFKNIDGYFKIYSKHTPINLVRDLPQGFSALEPLVDLPIGINITRFQTLLALHRSYLTPGDSSSGWTAGAAAYYVGYLQPRTFLLKYNENGTITDAVDCALDPLSETKCTLKSFTVEKGIYQTSNFRVQPTESIVRFPNITNLCPFGEVFNATRFASVYAWNRKRISNCVADYSVLYNSASFSTFKCYGVSPTKLNDLCFTNVYADSFVIRGDEVRQIAPGQTGKIADYNYKLPDDFTGCVIAWNSNNLDSKVGGNYNYLYRLFRKSNLKPFERDISTEIYQAGSTPCNGVEGFNCYFPLQSYGFQPTNGVGYQPYRVVVLSFELLHAPATVCGPKKSTNLVKNKCVNFNFNGLTGTGVLTESNKKFLPFQQFGRDIADTTDAVRDPQTLEILDITPCSFGGVSVITPGTNTSNQVAVLYQDVNCTEVPVAIHADQLTPTWRVYSTGSNVFQTRAGCLIGAEYVNNSYECDIPIGAGICASYQTQTNSPRRARSVASQSIIAYTMSLGAENSVAYSNNSIAIPTNFTISVTTEILPVSMTKTSVDCTMYICGDSTECSNLLLQYGSFCTQLNRALTGIAVEQDKNTQEVFAQVKQIYKTPPIKDFGGFNFSQILPDPSKPSKRSFIEDLLFNKVTLADAGFIKQYGDCLGDIAARDLICAQKFNGLTVLPPLLTDEMIAQYTSALLAGTITSGWTFGAGAALQIPFAMQMAYRFNGIGVTQCVLYENQKLIANQFNSAIGKIQDSLSSTASALGKLQDVVNQNAQALNTLVKQLSSNFGAISSVLNDILSRLDKVEAEVQIDRLITGRLQSLQTYVTQQLIRAAEIRASANLAATKMSECVLGQSKRVDFCGKGYHLMSFPQSAPHGVVFLHVTYVPAQEKNFTTAPAICHDGKAHFPREGVFVSNGTHWFVTQRNFYEPQIITTDNTFVCGNCDVVIGIVNNTVYDPLQPELDSGGGGSDIDPYKEFGSSYQLLNFLPLDFFPDLNALVDTATALYEEELTGREHCSPHHTAIRQALVCWDELTKLIAWMSSNITSEQVRTIIVNHVNDTWGLKVRQSLWFHLSCLTFGQHTVQEFLVSFGVWIRTPAPYRPPNAPILSTLPEHTVIC

SEQ ID NO: 14081 - protein, 1301 aa, Artificial Sequence
  SARS-CoV-2/England/20102000506/2020__EPI_ISL_415147 spike protein (1-1147)(N914C_S1123C) WhcAg construct
MFVFLVLLPLVSSQCVNLTTRTQLPPAYTNSFTRGVYYPDKVFRSSVLHSTQDLFLPFFSNVTWFHAIHVSGTNGTKRFDNPVLPFNDGVYFASTEKSNIIRGWIFGTTLDSKTQSLLIVNNATNVVIKVCEFQFCNDPFLGVYYHKNNKSWMESEFRVYSSANNCTFEYVSQPFLMDLEGKQGNFKNLREFVFKNIDGYFKIYSKHTPINLVRDLPQGFSALEPLVDLPIGINITRFQTLLALHRSYLTPGDSSSGWTAGAAAYYVGYLQPRTFLLKYNENGTITDAVDCALDPLSETKCTLKSFTVEKGIYQTSNFRVQPTESIVRFPNITNLCPFGEVFNATRFASVYAWNRKRISNCVADYSVLYNSASFSTFKCYGVSPTKLNDLCFTNVYADSFVIRGDEVRQIAPGQTGKIADYNYKLPDDFTGCVIAWNSNNLDSKVGGNYNYLYRLFRKSNLKPFERDISTEIYQAGSTPCNGVEGFNCYFPLQSYGFQPTNGVGYQPYRVVVLSFELLHAPATVCGPKKSTNLVKNKCVNFNFNGLTGTGVLTESNKKFLPFQQFGRDIADTTDAVRDPQTLEILDITPCSFGGVSVITPGTNTSNQVAVLYQGVNCTEVPVAIHADQLTPTWRVYSTGSNVFQTRAGCLIGAEHVNNSYECDIPIGAGICASYQTQTNSPRRARSVASQSIIAYTMSLGAENSVAYSNNSIAIPTNFTISVTTEILPVSMTKTSVDCTMYICGDSTECSNLLLQYGSFCTQLNRALTGIAVEQDKNTQEVFAQVKQIYKTPPIKDFGGFNFSQILPDPSKPSKRSFIEDLLFNKVTLADAGFIKQYGYCLGDIAARDLICAQKFNGLTVLPPLLTDEMIAQYTSALLAGTITSGWTFGAGAALQIPFAMQMAYRFNGIGVTQCVLYENQKLIANQFNSAIGKIQDSLSSTASALGKLQDVVNQNAQALNTLVKQLSSNFGAISSVLNDILSRLDKVEAEVQIDRLITGRLQSLQTYVTQQLIRAAEIRASANLAATKMSECVLGQSKRVDFCGKGYHLMSFPQSAPHGVVFLHVTYVPAQEKNFTTAPAICHDGKAHFPREGVFVSNGTHWFVTQRNFYEPQIITTDNTFVCGNCDVVIGIVNNTVYDPLQPELDSGGGGSDIDPYKEFGSSYQLLNFLPLDFFPDLNALVDTATALYEEELTGREHCSPHHTAIRQALVCWDELTKLIAWMSSNITSEQVRTIIVNHVNDTWGLKVRQSLWFHLSCLTFGQHTVQEFLVSFGVWIRTPAPYRPPNAPILSTLPEHTVIC

SEQ ID NO: 14082 - protein, 1301 aa, Artificial Sequence
  SARS-CoV-2/Belgium/VAG-03013/2020__EPI_ISL_415155 spike protein (1-1147)(N914C_S1123C) WhcAg construct
MFVFLVLLPLVSSQCVNLTTRTQLPPAYTNSFTRGVYYPDKVFRSSVLHSTQDLFLPFFSNVTWFHAIHVSGTNGTKRFDNPVLPFNDGVYFASTEKSNIIRGWIFGTTLDSKTQSLLIVNNATNVVIKVCEFQFCNDPFLGVYYHKNNKSWMESEFRVYSSANNCTFEYVSQPFLMDLEGKQGNFKNLREFVFKNIDGYFKIYSKHTPINLVRDLPQGFSALEPLVDLPIGINITRFQTLLALHRSYLTPGDSSSGWTAGAAAYYVGYLQPRTFLLKYNENGTITDAVDCALDPLSETKCTLKSFTVEKGIYQTSNFRVQPTESIVRFPNITNLCPFGEVFNATRFASVYAWNRKRISNCVADYSVLYNSASFSTFKCYGVSPTKLNDLCFTNVYADSFVIRGDEVRQIAPGQTGKIADYNYKLPDDFTGCVIAWNSNNLDSKVGGNYNYLYRLFRKSNLKPFERDISTEIYQAGSTPCNGVEGFNCYFPLQSYGFQPTNGVGYQPYRVVVLSFELLHAPATVCGPKKSTNLVKNKCVNFNFNGLTGTGVLTESNKKFLPFQQFGRDIADTTDAVRDPQTLEILDITPCSFGGVSVITPGTNTSNQVAVLYQGVNCTEVPVAIHADQLTPTWRVYSTGSNVFQTRAGCLIGAEHVNNSYECDIPIGAGICASYQTQTNSPRRARSVASQSIIAYTMSLGAENSVAYSNNSIAIPTNFTISVTTEILPVSMTKTSVDCTMYICGDSTECSNLLLQYGSFCTQLNRALTGIAVEQDKNTQEVFAQVKQIYKTPPIKDFGGFNFSQILPDPSKPSKRSFIEDLLFNKVTLADAGFIKQYGDCLGDIAARDLICAQKFNGLTVLPPLLTDEMIAQYTSALLAGTITSGWTFGAGAALQIPFAMQMAYRFNGIGVTQCVLYENQKLIANQFNSAIGKIQDSLSSTATALGKLQDVVNQNAQALNTLVKQLSSNFGAISSVLNDILSRLDKVEAEVQIDRLITGRLQSLQTYVTQQLIRAAEIRASANLAATKMSECVLGQSKRVDFCGKGYHLMSFPQSAPHGVVFLHVTYVPAQEKNFTTAPAICHDGKAHFPREGVFVSNGTHWFVTQRNFYEPQIITTDNTFVCGNCDVVIGIVNNTVYDPLQPELDSGGGGSDIDPYKEFGSSYQLLNFLPLDFFPDLNALVDTATALYEEELTGREHCSPHHTAIRQALVCWDELTKLIAWMSSNITSEQVRTIIVNHVNDTWGLKVRQSLWFHLSCLTFGQHTVQEFLVSFGVWIRTPAPYRPPNAPILSTLPEHTVIC

SEQ ID NO: 14083 - protein, 1301 aa, Artificial Sequence
  SARS-CoV-2/Belgium/BC-03016/2020__EPI_ISL_415157 spike protein (1-1147)(N914C_S1123C) WhcAg construct
MFVFLVLLPLVSSQCVNLTTRTQLPPAYTNSFTRGVYYPDKVFRSSVLHSTQDLFLPFFSNVTWFHAIHVSGTNGTKRFDNPVLPFNDGVYFASTEKSNIIRGWIFGTTLDSKTQSLLIVNNATNVVIKVCEFQFCNDPFLGVYYHKNNKSWMESEFRVYSSANNCTFEYVSQPFLMDLEGKQGNFKNLREFVFKNIDGYFKIYSKHTPINLVRDLPQGFSALEPLVDLPIGINITRFQTLLALHRSYLTPGDSSSGWTAGAAAYYVGYLQPRTFLLKYNENGTITDAVDCALDPLSETKCTLKSFTVEKGIYQTSNFRVQPTESIVRFPNITNLCPFGEVFNATRFASVYAWNRKRISNCVADYSVLYNSASFSTFKCYGVSPTKLNDLCFTNVYADSFVIRGDEVRQIAPGQTGKIADYNYKLPDDFTGCVIAWNSNNLDSKVGGNYNYLYRLFRKSNLKPFERDISTEIYQAGSTPCNGVEGFNCYFPLQSYGFQPTNGVGYQPYRVVVLSFELLHAPATVCGPKKSTNLVKNKCVNFNFNGLTGTGVLTESNKKFLPFQQFGRDIADTTDAVRDPQTLEILDITPCSFGGVSVITPGTNTSNQVAVLYQGVNCTEVPVAIHADQLTPTWRVYSTGSNVFQTRAGCLIGAEHVNNSYECDIPIGAGICASYQTQTNSPRRARSVASQSIIAYTMSLGAENSVAYSNNSIAIPTNFTISVTTEILPVSMTKTSVDCTMYICGDSTECSNLLLQYGSFCTQLNRALTGIAVEQDKNTQEVFAQVKQIYKTPPIKDFGGFNFSQILPDPSKPSKRSFIEDLLFNKVTLADAGFIKQYGDCLGDIAARDLICAQKFNGLTVLPPLLTDEMIAQYTSALLAGTITSGWTFGAGAALQIPFAMQMAYRFNGIGVTQCVLYENQKLIANQFNSAIGKIQDSLSSTAPALGKLQDVVNQNAQALNTLVKQLSSNFGAISSVLNDILSRLDKVEAEVQIDRLITGRLQSLQTYVTQQLIRAAEIRASANLAATKMSECVLGQSKRVDFCGKGYHLMSFPQSAPHGVVFLHVTYVPAQEKNFTTAPAICHDGKAHFPREGVFVSNGTHWFVTQRNFYEPQIITTDNTFVCGNCDVVIGIVNNTVYDPLQPELDSGGGGSDIDPYKEFGSSYQLLNFLPLDFFPDLNALVDTATALYEEELTGREHCSPHHTAIRQALVCWDELTKLIAWMSSNITSEQVRTIIVNHVNDTWGLKVRQSLWFHLSCLTFGQHTVQEFLVSFGVWIRTPAPYRPPNAPILSTLPEHTVIC

SEQ ID NO: 14084 - protein, 1301 aa, Artificial Sequence
  SARS-CoV-2/Germany/BavPat3/2020__EPI_ISL_414521 spike protein (1-1147)(N914C_S1123C) WhcAg construct
MFVFLVLLPLVSSQCVNLTTRTQLPPAYTNSFTRGVYYPDKVFRSSVLHSTQDLFLPFFSNVTWFHAIHVSGTNGTKRFDNPVLPFNDGVYFASTEKSNIIRGWIFGTTLDSKTQSLLIVNNATNVVIKVCEFQFCNDPFLGVYYHKNNKSWMESEFRVYSSANNCTFEYVSQPFLMDLEGKQGNFKNLREFVFKNIDGYFKIYSKHTPINLVRDLPQGFSALEPLVDLPIGINITRFQTLLALHRSYLTPGDSSSGWTAGAAAYYVGYLQPRTFLLKYNENGTITDAVDCALDPLSETKCTLKSFTVEKGIYQTSNFRVQPTESIVRFPNITNLCPFGEVFNATRFASVYAWNRKRISNCVADYSVLYNSASFSTFKCYGVSPTKLNDLCFTNVYADSFVIRGDEVRQIAPGQTGKIADYNYKLPDDFTGCVIAWNSNNLDSKVGGNYNYLYRLFRKSNLKPFERDISTEIYQAGSTPCNGVEGFNCYFPLQSYGFQPTNGVGYQPYRVVVLSFELLHAPATVCGPKKSTNLVKNKCVNFNFNGLTGTGVLTESNKKFLPFQQFGRDIADTTDAVRDPQTLEILDITPCSFGGVSVITPGTNTSNQVAVLYQDVNCTEVPVAIHADQLTPTWRVYSTGSNVFQTRAGCLIGAEHVNNSYECDIPIGAGICASYQTQTNSPRRARSVASQSIIAYTMSLGAENSVAYSNNSIAIPTNFTISVTTEILPVSMTKTSVDCTMYICGDSTECSNLLLQYGSFCTQLNRALTGIAVEQDKNTQQVFAQVKQIYKTPPIKDFGGFNFSQILPDPSKPSKRSFIEDLLFNKVTLADAGFIKQYGDCLGDIAARDLICAQKFNGLTVLPPLLTDEMIAQYTSALLAGTITSGWTFGAGAALQIPFAMQMAYRFNGIGVTQCVLYENQKLIANQFNSAIGKIQDSLSSTASALGKLQDVVNQNAQALNTLVKQLSSNFGAISSVLNDILSRLDKVEAEVQIDRLITGRLQSLQTYVTQQLIRAAEIRASANLAATKMSECVLGQSKRVDFCGKGYHLMSFPQSAPHGVVFLHVTYVPAQEKNFTTAPAICHDGKAHFPREGVFVSNGTHWFVTQRNFYEPQIITTDNTFVCGNCDVVIGIVNNTVYDPLQPELDSGGGGSDIDPYKEFGSSYQLLNFLPLDFFPDLNALVDTATALYEEELTGREHCSPHHTAIRQALVCWDELTKLIAWMSSNITSEQVRTIIVNHVNDTWGLKVRQSLWFHLSCLTFGQHTVQEFLVSFGVWIRTPAPYRPPNAPILSTLPEHTVIC

SEQ ID NO: 14085 - protein, 1301 aa, Artificial Sequence
  SARS-CoV-2/France/HF1805/2020__EPI_ISL_414628 spike protein (1-1147)(N914C_S1123C) WhcAg construct
MFVFLVLLPLVSSQCVNLTTRTQLPPAYTNSFTRGVYYPDKVFRSSVLHSTQDLFLPFFSNVTWFHAIHVSGTNGTKRFDNPVLPFNDGVYFASTEKSNIIRGWIFGTTLDSKTQSLLIVNNATNVVIKVCEFQFCNDPFLGVYYHKNNKSWMESEFRVYSSANNCTFEYVSQPFLMDLEGKQGNFKNLREFVFKNIDGYFKIYSKHTPINLVRDLPQGFSALEPLVDLPIGINITRFQTLLALHRSYLTPGDSSSGWTAGAAAYYVGYLQPRTFLLKYNENGTITDAVDCALDPLSETKCTLKSFTVEKGIYQTSNFRVQPTESIVRFPNITNLCPFGEVFNATRFASVYAWNRKRISNCVADYSVLYNSASFSTFKCYGVSPTKLNDLCFTNVYADSFVIRGDEVRQIAPGQTGKIADYNYKLPDDFTGCVIAWNSNNLDSKVGGNYNYLYRLFRKSNLKPFERDISTEIYQAGSTPCNGVEGFNCYFPLQSYGFQPTNGVGYQPYRVVVLSFELLHAPATVCGPKKSTNLVKNKCVNFNFNGLTGTGVLTESNKKFLPFQQFGRDIADTTDAVRDPQTLEILDITPCSFGGVSVITPGTNTSNQVAVLYQGVNCTEVPVAIHADQLTPTWRVYSTGSNVFQTRAGCLIGAEHVNNSYECDIPIGAGICASYQTQTNSPRRARSVASQSIIAYTMSLGAENSVAYSNNSIAIPTNFTISVTTEILPVSMTKTSVDCTMYICGDSTECSNLLLQYGSFCTQLNRALTGIAVEQDKNTQEVFAQVKQIYKTPPIKDFGGFNFSQILPDPSKPSKRSFIEDLLFNKVTLADAGFIKQYGDCLGDIAARDLICAQKFNGLTVLPPLLTDEMIAQYTSALLAGTITSGWTFGAGAALQIPFAMQMAYRFNGIGVTQCVLYENQKLIANQFNSAIGKIQDSLSSTASALGKLQDVVNQNAQALNTLVKQLSSNFGAISSVLNDILSRLDKVEAEVQIDRLITGRLQSLQTYVTQQLIRAAEIRASANLAATKMSECVLGQSKRVDFCGKGYHLMSFPQSAPHGVVFLHVTYVPAQEKNFTTAPAICHDGKAHFPREGVFVSNGTHWFVTQRNFYEPQIITTDNTFVCGNCDVVIGVVNNTVYDPLQPELDSGGGGSDIDPYKEFGSSYQLLNFLPLDFFPDLNALVDTATALYEEELTGREHCSPHHTAIRQALVCWDELTKLIAWMSSNITSEQVRTIIVNHVNDTWGLKVRQSLWFHLSCLTFGQHTVQEFLVSFGVWIRTPAPYRPPNAPILSTLPEHTVIC

SEQ ID NO: 14086 - protein, 1301 aa, Artificial Sequence
  SARS-CoV-2/Netherlands/ZuidHolland_9/2020__EPI_ISL_414445 spike protein (1-1147)(N914C_S1123C) WhcAg construct
MFVFLVLLPLVSSQCVNLTTRTQLPPAYTNSFTRGVYYPDKVFRSSVLHSTQDLFLPFFSNVTWFHAIHVSGTNGTKRFDNPVLPFNDGVYFASTEKSNIIRGWIFGTTLDSKTQSLLIVNNATNVVIKVCEFQFCNDPFLGVYYHKNNKSWMESEFRVYSSANNCTFEYVSQPFLMDLEGKQGNFKNLREFVFKNIDGYFKIYSKHTPINLVRDLPQGFSALEPLVDLPIGINITRFQTLLALHRSYLTPGDSSSGWTAGAAAYYVGYLQPRTFLLKYNENGTITDAVDCALDPLSETKCTLKSFTVEKGIYQTSNFRVQPTESIVRFPNITNLCPFGEVFNATRFASVYAWNRKRISNCVADYSVLYNSASFSTFKCYGVSPTKLNDLCFTNVYADSFVIRGDEVRQIAPGQTGKIADYNYKLPDDFTGCVIAWNSNNLDSKVGGNYNYLYRLFRKSNLKPFERDISTEIYQAGSTPCNGVEGFNCYFPLQSYGFQPTNGVGYQPYRVVVLSFELLHAPATVCGPKKSTNLVKNKCVNFNFNGLTGTGVLTESNKKFLPFQQFGRDIADTTDAVRDPQTLEILDITPCSFGGVSVITPGTNTSNQVAVLYQGVNCTEVPVAIHADQLTPTWRVYSTGSNVFQTRAGCLIGAEHVNNSYECDIPIGAGICASYQTQTNSPRRARSVASQSIIAYTMSLGAENSVAYSNNSIAIPTNFTISVTTEILPVSMTKTSVDCTMYICGDSTECSNLLLQYGSFCTQLNRALTGIAVEQDKNTQEVFAQVKQIYKTPPIKDFGGFNFSQILPDPSKPSKRSFIEDLLFNKVTLADAGFIKQYGDCLGDIAARDLICVQKFNGLTVLPPLLTDEMIAQYTSALLAGTITSGWTFGAGAALQIPFAMQMAYRFNGIGVTQCVLYENQKLIANQFNSAIGKIQDSLSSTASALGKLQDVVNQNAQALNTLVKQLSSNFGAISSVLNDILSRLDKVEAEVQIDRLITGRLQSLQTYVTQQLIRAAEIRASANLAATKMSECVLGQSKRVDFCGKGYHLMSFPQSAPHGVVFLHVTYVPAQEKNFTTAPAICHDGKAHFPREGVFVSNGTHWFVTQRNFYEPQIITTDNTFVCGNCDVVIGIVNNTVYDPLQPELDSGGGGSDIDPYKEFGSSYQLLNFLPLDFFPDLNALVDTATALYEEELTGREHCSPHHTAIRQALVCWDELTKLIAWMSSNITSEQVRTIIVNHVNDTWGLKVRQSLWFHLSCLTFGQHTVQEFLVSFGVWIRTPAPYRPPNAPILSTLPEHTVIC

SEQ ID NO: 14087 - protein, 1301 aa, Artificial Sequence
  SARS-CoV-2/Finland/FIN03032020A/2020__EPI_ISL_413602 spike protein (1-1147)(N914C_S1123C) WhcAg construct
MFVFLVLLPLVSSQCVNLTTRTQLPPAYTNSFTRGVYYPDKVFRSSVLHSTQDLFLPFFSNVTWFHAIHVSGTNGTKRFDNPVLPFNDGVYFASTEKSNIIRGWIFGTTLDSKTQSLLIVNNATNVVIKVCEFQFCNDPFLGVYYHKNNKSWMESEFRVYSSANNCTFEYVSQPFLMDLEGKQGNFKNLREFVFKNIDGYFKIYSKHTPINLVRDLPQGFSALEPLVDLPIGINITRFQTLLALHRSYLTPGDSSSGWTAGAAAYYVGYLQPRTFLLKYNENGTITDAVDCALDPLSETKCTLKSFTVEKGIYQTSNFRVQPTESIVRFPNITNLCPFGEVFNATRFASVYAWNRKRISNCVADYSVLYNSASFSTFKCYGVSPTKLNDLCFTNVYADSFVIRGDEVRQIAPGQTGKIADYNYKLPDDFTGCVISWNSNNLDSKVGGNYNYLYRLFRKSNLKPFERDISTEIYQAGSTPCNGVEGFNCYFPLQSYGFQPTNGVGYQPYRVVVLSFELLHAPATVCGPKKSTNLVKNKCVNFNFNGLTGTGVLTESNKKFLPFQQFGRDIADTTDAVRDPQTLEILDITPCSFGGVSVITPGTNTSNQVAVLYQGVNCTEVPVAIHADQLTPTWRVYSTGSNVFQTRAGCLIGAEHVNNSYECDIPIGAGICASYQTQTNSPRRARSVASQSIIAYTMSLGAENSVAYSNNSIAIPTNFTISVTTEILPVSMTKTSVDCTMYICGDSTECSNLLLQYGSFCTQLNRALTGIAVEQDKNTQEVFAQVKQIYKTPPIKDFGGFNFSQILPDPSKPSKRSFIEDLLFNKVTLADAGFIKQYGDCLGDIAARDLICAQKFNGLTVLPPLLTDEMIAQYTSALLAGTITSGWTFGAGAALQIPFAMQMAYRFNGIGVTQCVLYENQKLIANQFNSAIGKIQDSLSSTASALGKLQDVVNQNAQALNTLVKQLSSNFGAISSVLNDILSRLDKVEAEVQIDRLITGRLQSLQTYVTQQLIRAAEIRASANLAATKMSECVLGQSKRVDFCGKGYHLMSFPQSAPHGVVFLHVTYVPAQEKNFTTAPAICHDGKAHFPREGVFVSNGTHWFVTQRNFYEPQIITTDNTFVCGNCDVVIGIVNNTVYDPLQPELDSGGGGSDIDPYKEFGSSYQLLNFLPLDFFPDLNALVDTATALYEEELTGREHCSPHHTAIRQALVCWDELTKLIAWMSSNITSEQVRTIIVNHVNDTWGLKVRQSLWFHLSCLTFGQHTVQEFLVSFGVWIRTPAPYRPPNAPILSTLPEHTVIC

SEQ ID NO: 14088 - protein, 1301 aa, Artificial Sequence
  SARS-CoV-2/France/GE1977/2020__EPI_ISL_414632 spike protein (1-1147)(N914C_S1123C) WhcAg construct
MFVFLVLLPLVSSQCVNLTTRTQLPPAYTNSFTRGVYYPDKVFRSSVLHSTQDLFLPFFSNVTWFHAIHVSGTNGTKRFDNPVLPFNDGVYFASTEKSNIIRGWIFGTTLDSKTQSLLIVNNATNVVIKVCEFQFCNDPFLGVYYHKNNKSWMESEFRVYSSANNCTFEYVSQPFLMDLEGKQGNFKNLREFVFKNIDGYFKIYSKHTPINLVRDLPQGFSALEPLVDLPIGINITRFQTLLALHRSYLTPGDSSSGWTAGAAAYYVGYLQPRTFLLKYNENGTITDAVDCALDPLSETKCTLKSFTVEKGIYQTSNFRVQPTESIVRFPNITNLCPFGEVFNATRFASVYAWNRKRISNCVADYSVLYNSASFSTFKCYGVSPTKLNDLCFTNVYADSFVIRGDEVRQIAPGQTGKIADYNYKLPDDFTGCVIAWNSNNLDSKVGGNYNYLYRLFRKSNLKPFERDISTEIYQAGSTPCNGVEGFNCYFPLQSYGFQPTNGVGYQPYRVVVLSFELLHAPATVCGPKKSTNLVKNKCVNFNFNGLTGTGVLTESNKKFLPFQQFGRDIADTTDAVRDPQTLEILDITPCSFGGVSVITPGTNTSNQVAVLYQGVNCTEVPVAIHADQLTPTWRVYSTGSNVFQTRAGCLIGAEHVNNSYECDIPIGAGICASYQTQTNSPRRARSVASQSIIAYTMSLGAENSVAYSNNSIAIPTNFTISVTTEILPVSMTKTSVDCTMYICGDSTECSNLLLQYGSFCTQLNRALTGIAVEQDKNTQEVFAQVKQIYKTPPIKDFGGFNFSQILPDPSKPSKRSFIEDLLFNKVTLADAGFIKQYGDCLGDIAARDLICAQKFNGLTVLPPLLTDEMIAQYTSALLAGTITSGWTFGAGAALQIPFAMQMAYRFNGIGVTQCVLYENQKLIANQFNSAIGKIQDSLFSTASALGKLQDVVNQNAQALNTLVKQLSSNFGAISSVLNDILSRLDKVEAEVQIDRLITGRLQSLQTYVTQQLIRAAEIRASANLAATKMSECVLGQSKRVDFCGKGYHLMSFPQSAPHGVVFLHVTYVPAQEKNFTTAPAICHDGKAHFPREGVFVSNGTHWFVTQRNFYEPQIITTDNTFVCGNCDVVIGIVNNTVYDPLQPELDSGGGGSDIDPYKEFGSSYQLLNFLPLDFFPDLNALVDTATALYEEELTGREHCSPHHTAIRQALVCWDELTKLIAWMSSNITSEQVRTIIVNHVNDTWGLKVRQSLWFHLSCLTFGQHTVQEFLVSFGVWIRTPAPYRPPNAPILSTLPEHTVIC

SEQ ID NO: 14089 - protein, 1301 aa, Artificial Sequence
  SARS-CoV-2/Finland/FIN-313/2020__EPI_ISL_414641 spike protein (1-1147)(N914C_S1123C) WhcAg construct
MFVFLVLLPLVSSQCVNLTTRTQLPPAYTNSFTRGVYYPDKVFRSSVLHSTQDLFLPFFSNVTWFHAIHVSGTNGTKRFDNPVLPFNDGVYFASTEKSNIIRGWIFGTTLDSKTQSLLIVNNATNVVIKVCEFQFCNDPFLGVYYHKNNKSWMESEFRVYSSANNCTFEYVSQPFLMDLEGKQGNFKNLREFVFKNIDGYFKIYSKHTPINLVRDLPQGFSALEPLVDLPIGINITRFKTLLALHRSYLTPGDSSSGWTAGAAAYYVGYLQPRTFLLKYNENGTITDAVDCALDPLSETKCTLKSFTVEKGIYQTSNFRVQPTESIVRFPNITNLCPFGEVFNATRFASVYAWNRKRISNCVADYSVLYNSASFSTFKCYGVSPTKLNDLCFTNVYADSFVIRGDEVRQIAPGQTGKIADYNYKLPDDFTGCVIAWNSNNLDSKVGGNYNYLYRLFRKSNLKPFERDISTEIYQAGSTPCNGVEGFNCYFPLQSYGFQPTNGVGYQPYRVVVLSFELLHAPATVCGPKKSTNLVKNKCVNFNFNGLTGTGVLTESNKKFLPFQQFGRDIADTTDAVRDPQTLEILDITPCSFGGVSVITPGTNTSNQVAVLYQGVNCTEVPVAIHADQLTPTWRVYSTGSNVFQTRAGCLIGAEHVNNSYECDIPIGAGICASYQTQTNSPRRARSVASQSIIAYTMSLGAENSVAYSNNSIAIPTNFTISVTTEILPVSMTKTSVDCTMYICGDSTECSNLLLQYGSFCTQLNRALTGIAVEQDKNTQEVFAQVKQIYKTPPIKDFGGFNFSQILPDPSKPSKRSFIEDLLFNKVTLADAGFIKQYGDCLGDIAARDLICAQKFNGLTVLPPLLTDEMIAQYTSALLAGTITSGWTFGAGAALQIPFAMQMAYRFNGIGVTQCVLYENQKLIANQFNSAIGKIQDSLSSTASALGKLQDVVNQNAQALNTLVKQLSSNFGAISSVLNDILSRLDKVEAEVQIDRLITGRLQSLQTYVTQQLIRAAEIRASANLAATKMSECVLGQSKRVDFCGKGYHLMSFPQSAPHGVVFLHVTYVPAQEKNFTTAPAICHDGKAHFPREGVFVSNGTHWFVTQRNFYEPQIITTDNTFVCGNCDVVIGIVNNTVYDPLQPELDSGGGGSDIDPYKEFGSSYQLLNFLPLDFFPDLNALVDTATALYEEELTGREHCSPHHTAIRQALVCWDELTKLIAWMSSNITSEQVRTIIVNHVNDTWGLKVRQSLWFHLSCLTFGQHTVQEFLVSFGVWIRTPAPYRPPNAPILSTLPEHTVIC

SEQ ID NO: 14090 - protein, 1301 aa, Artificial Sequence
  SARS-CoV-2/Netherlands/ZuidHolland_2/2020__EPI_ISL_414556 spike protein (1-1147)(N914C_S1123C) WhcAg construct
MFVFLVLLPLVSSQCVNLTTRTQLPPAYTNSFTRGVYYPDKVFRSSVLHSTQDLFLPFFSNVTWFHAIHVSGTNGTKRFDNPVLPFNDGVYFASTEKSNIIRGWIFGTTLDSKTQSLLIVNNATNVVIKVCEFQFCNDPFLGVYYHKNNKSWMESEFRVYSSANNCTFEYVSQPFLMDLEGKQGNFKNLREFVFKNIDGYFKIYSKHTPINLVRDLPQGFSALEPLVDLPIGINITRFQTLLALHRSYLTPGDSSSGWTAGAAAYYVGYLQPRTFLLKYNENGTITDAVDCALDPLSETKCTLKSFTVEKGIYQTSNFRVQPTESIVRFPNITNLCPFGEVFNATRFASVYAWNRKRISNCVADYSVLYNSASFSTFKCYGVSPTKLNDLCFTNVYADSFVIRGDEVRQIAPGQTGKIADYNYKLPDDFTGCVIAWNSNNLDSKVGGNYNYLYRLFRKSNLKPFERDISTEIYQAGSTPCNGVEGFNCYFPLQSYGFQPTNGVGYQPYRVVVLSFELLHAPATVCGPKKSTNLVKNKCVNFNFNGLTGTGVLTESNKKFLPFQQFGRDIADTTDAVRDPQTLEILDITPCSFGGVSVITPGTNTSNQVAVLYQGVNCTEVPVAIHADQLTPTWRVYSTGSNVFQTRAGCLIGAEHVNNSYECDIPIGAGICASYQTQTNSPRRARSVASQSIIAYTMSLGAENSVAYSNNSIAIPTNFTISVTTEILPVSMTKTSVDCTMYICGDSTECSNLLLQYGSFCTQLNRALTGIALEQDKNTQEVFAQVKQIYKTPPIKDFGGFNFSQILPDPSKPSKRSFIEDLLFNKVTLADAGFIKQYGDCLGDIAARDLICAQKFNGLTVLPPLLTDEMIAQYTSALLAGTITSGWTFGAGAALQIPFAMQMAYRFNGIGVTQCVLYENQKLIANQFNSAIGKIQDSLSSTASALGKLQDVVNQNAQALNTLVKQLSSNFGAISSVLNDILSRLDKVEAEVQIDRLITGRLQSLQTYVTQQLIRAAEIRASANLAATKMSECVLGQSKRVDFCGKGYHLMSFPQSAPHGVVFLHVTYVPAQEKNFTTAPAICHDGKAHFPREGVFVSNGTHWFVTQRNFYEPQIITTDNTFVCGNCDVVIGIVNNTVYDPLQPELDSGGGGSDIDPYKEFGSSYQLLNFLPLDFFPDLNALVDTATALYEEELTGREHCSPHHTAIRQALVCWDELTKLIAWMSSNITSEQVRTIIVNHVNDTWGLKVRQSLWFHLSCLTFGQHTVQEFLVSFGVWIRTPAPYRPPNAPILSTLPEHTVIC

SEQ ID NO: 14091 - protein, 1301 aa, Artificial Sequence
  SARS-CoV-2/USA/WA-UW31/2020__EPI_ISL_414618 spike protein (1-1147)(N914C_S1123C) WhcAg construct
MFVFLVLLPLVSSQCVNLTTRTQLPPAYTNSFTRGVYYPDKVFRSSVLHSTQDLFLPFFSNVTWFHAIHVSGTNGTKRFDNPVLPFNDGVYFASTEKSNIIRGWIFGTTLDSKTQSLLIVNNATNVVIKVCEFQFCNDPFLGVYYHKNNKSWMESEFRVYSSANNCTFEYVSQPFLMDLEGKQGNFKNLREFVFKNIDGYFKIYSKHTPINLVRDLPQGFSALEPLVDLPIGINITRFQTLLALHRSYLTPGDSSSGWTAGAAAYYVGYLQPRTFLLKYNENGTITDAVDCALDPLSETKCTLKSFTVEKGIYQTSNFRVQPTESIVRFPNITNLCPFGEVFNATRFASVYAWNRKRISNCVADYSVLYNSASFSTFKCYGVSPTKLNDLCFTNVYADSFVIRGDEVRQIAPGQTGKIADYNYKLPDDFTGCVIAWNSNNLDSKVGGNYNYLYRLFRKSNLKPFERDISTEIYQAGSTPCNGAEGFNCYFPLQSYGFQPTNGVGYQPYRVVVLSFELLHAPATVCGPKKSTNLVKNKCVNFNFNGLTGTGVLTESNKKFLPFQQFGRDIADTTDAVRDPQTLEILDITPCSFGGVSVITPGTNTSNQVAVLYQDVNCTEVPVAIHADQLTPTWRVYSTGSNVFQTRAGCLIGAEHVNNSYECDIPIGAGICASYQTQTNSPRRARSVASQSIIAYTMSLGAENSVAYSNNSIAIPTNFTISVTTEILPVSMTKTSVDCTMYICGDSTECSNLLLQYGSFCTQLNRALTGIAVEQDKNTQEVFAQVKQIYKTPPIKDFGGFNFSQILPDPSKPSKRSFIEDLLFNKVTLADAGFIKQYGDCLGDIAARDLICAQKFNGLTVLPPLLTDEMIAQYTSALLAGTITSGWTFGAGAALQIPFAMQMAYRFNGIGVTQCVLYENQKLIANQFNSAIGKIQDSLSSTASALGKLQDVVNQNAQALNTLVKQLSSNFGAISSVLNDILSRLDKVEAEVQIDRLITGRLQSLQTYVTQQLIRAAEIRASANLAATKMSECVLGQSKRVDFCGKGYHLMSFPQSAPHGVVFLHVTYVPAQEKNFTTAPAICHDGKAHFPREGVFVSNGTHWFVTQRNFYEPQIITTDNTFVCGNCDVVIGIVNNTVYDPLQPELDSGGGGSDIDPYKEFGSSYQLLNFLPLDFFPDLNALVDTATALYEEELTGREHCSPHHTAIRQALVCWDELTKLIAWMSSNITSEQVRTIIVNHVNDTWGLKVRQSLWFHLSCLTFGQHTVQEFLVSFGVWIRTPAPYRPPNAPILSTLPEHTVIC

SEQ ID NO: 14092 - protein, 1301 aa, Artificial Sequence
  SARS-CoV-2/South Korea/SNU01/2020__EPI_ISL_411929 spike protein (1-1147)(N914C_S1123C) WhcAg construct
MFVFLVLLPLVSSQCVNLTTRTQLPPAYTNSFTRGVYYPDKVFRSSVLHSTQDLFLPFFSNVTWFHAIHVSGTNGTKRFDNPVLPFNDGVYFASTEKSNIIRGWIFGTTLDSKTQSLLIVNNATNVVIKVCEFQFCNDPFLGVYYHKNNKSWMESEFRVYSSANNCTFEYVSQPFLMDLEGKQGNFKNLREFVFKNIDGYFKIYSKHTPINLVRDLPQGFWALEPLVDLPIGINITRFQTLLALHRSYLTPGDSSSGWTAGAAAYYVGYLQPRTFLLKYNENGTITDAVDCALDPLSETKCTLKSFTVEKGIYQTSNFRVQPTESIVRFPNITNLCPFGEVFNATRFASVYAWNRKRISNCVADYSVLYNSASFSTFKCYGVSPTKLNDLCFTNVYADSFVIRGDEVRQIAPGQTGKIADYNYKLPDDFTGCVIAWNSNNLDSKVGGNYNYLYRLFRKSNLKPFERDISTEIYQAGSTPCNGVEGFNCYFPLQSYGFQPTNGVGYQPYRVVVLSFELLHAPATVCGPKKSTNLVKNKCVNFNFNGLTGTGVLTESNKKFLPFQQFGRDIADTTDAVRDPQTLEILDITPCSFGGVSVITPGTNTSNQVAVLYQDVNCTEVPVAIHADQLTPTWRVYSTGSNVFQTRAGCLIGAEHVNNSYECDIPIGAGICASYQTQTNSPRRARSVASQSIIAYTMSLGAENSVAYSNNSIAIPTNFTISVTTEILPVSMTKTSVDCTMYICGDSTECSNLLLQYGSFCTQLNRALTGIAVEQDKNTQEVFAQVKQIYKTPPIKDFGGFNFSQILPDPSKPSKRSFIEDLLFNKVTLADAGFIKQYGDCLGDIAARDLICAQKFNGLTVLPPLLTDEMIAQYTSALLAGTITSGWTFGAGAALQIPFAMQMAYRFNGIGVTQCVLYENQKLIANQFNSAIGKIQDSLSSTASALGKLQDVVNQNAQALNTLVKQLSSNFGAISSVLNDILSRLDKVEAEVQIDRLITGRLQSLQTYVTQQLIRAAEIRASANLAATKMSECVLGQSKRVDFCGKGYHLMSFPQSAPHGVVFLHVTYVPAQEKNFTTAPAICHDGKAHFPREGVFVSNGTHWFVTQRNFYEPQIITTDNTFVCGNCDVVIGIVNNTVYDPLQPELDSGGGGSDIDPYKEFGSSYQLLNFLPLDFFPDLNALVDTATALYEEELTGREHCSPHHTAIRQALVCWDELTKLIAWMSSNITSEQVRTIIVNHVNDTWGLKVRQSLWFHLSCLTFGQHTVQEFLVSFGVWIRTPAPYRPPNAPILSTLPEHTVIC

SEQ ID NO: 14093 - protein, 1301 aa, Artificial Sequence
  SARS-CoV-2/China/WF0004/2020__EPI_ISL_413694 spike protein (1-1147)(N914C_S1123C) WhcAg construct
MFVFLVLLPLVSSQCVNLTTRTQLPPAYTNSFTRGVYYPDKVFRSSVLHSTQDLFLPFFSNVTWFHAIHVSGTNGTKRFDNPVLPFNDGVYFASTEKSNIIRGWIFGTTLDSKTQSLLIVNNATNVVIKVCEFQFCNDPFLGVYYHKNNKSWTESEFRVYSSANNCTFEYVSQPFLMDLEGKQGNFKNLREFVFKNIDGYFKIYSKHTPINLVRDLPQGFSALEPLVDLPIGINITRFQTLLALHRSYLTPGDSSSGWTAGAAAYYVGYLQPRTFLLKYNENGTITDAVDCALDPLSETKCTLKSFTVEKGIYQTSNFRVQPTESIVRFPNITNLCPFGEVFNATRFASVYAWNRKRISNCVADYSVLYNSASFSTFKCYGVSPTKLNDLCFTNVYADSFVIRGDEVRQIAPGQTGKIADYNYKLPDDFTGCVIAWNSNNLDSKVGGNYNYLYRLFRKSNLKPFERDISTEIYQAGSTPCNGVEGFNCYFPLQSYGFQPTNGVGYQPYRVVVLSFELLHAPATVCGPKKSTNLVKNKCVNFNFNGLTGTGVLTESNKKFLPFQQFGRDIADTTDAVRDPQTLEILDITPCSFGGVSVITPGTNTSNQVAVLYQDVNCTEVPVAIHADQLTPTWRVYSTGSNVFQTRAGCLIGAEHVNNSYECDIPIGAGICASYQTQTNSPRRARSVASQSIIAYTMSLGAENSVAYSNNSIAIPTNFTISVTTEILPVSMTKTSVDCTMYICGDSTECSNLLLQYGSFCTQLNRALTGIAVEQDKNTQEVFAQVKQIYKTPPIKDFGGFNFSQILPDPSKPSKRSFIEDLLFNKVTLADAGFIKQYGDCLGDIAARDLICAQKFNGLTVLPPLLTDEMIAQYTSALLAGTITSGWTFGAGAALQIPFAMQMAYRFNGIGVTQCVLYENQKLIANQFNSAIGKIQDSLSSTASALGKLQDVVNQNAQALNTLVKQLSSNFGAISSVLNDILSRLDKVEAEVQIDRLITGRLQSLQTYVTQQLIRAAEIRASANLAATKMSECVLGQSKRFDFCGKGYHLMSFPQSAPHGVVFLHVTYVPAQEKNFTTAPAICHDGKAHFPREGVFVSNGTHWFVTQRNFYEPQIITTDNTFVCGNCDVVIGIVNNTVYDPLQPELDSGGGGSDIDPYKEFGSSYQLLNFLPLDFFPDLNALVDTATALYEEELTGREHCSPHHTAIRQALVCWDELTKLIAWMSSNITSEQVRTIIVNHVNDTWGLKVRQSLWFHLSCLTFGQHTVQEFLVSFGVWIRTPAPYRPPNAPILSTLPEHTVIC

SEQ ID NO: 14094 - protein, 1301 aa, Artificial Sequence
  SARS-CoV-2/China/WF0028/2020__EPI_ISL_413791 spike protein (1-1147)(N914C_S1123C) WhcAg construct
MFVFLVLLPLVSSQCVNLTTRTQLPPAYTNSFTRGVYYPDKVFRSSVLHSTQDLFLPFFSNVTWFHAIHVSGTNGTKRFDNPVLPFNDGVYFASTEKSNIIRGWIFGTTLDSKTQSLLIVNNATNVVIKVCEFQFCNDPFLGVYYHKNNKSWMESEFRVYSSANNCTFEYVSQPFLMDLEGKQGNFKNLREFVFKNIDGYFKIYSKHTPINLVRDLPQGFSALEPLVDLPIGINITRFQTLLALHRSYLTPGDSSSGWTAGAAAYYVGYLQPRTFLLKYNENGTITDAVDCALDPLSETKCTLKSFTVEKGIYQTSNFRVQPTESIVRFPNITNLCPFGEVFNATRFASVYAWNRKRISNCVADYSVLYNSASFSTFKCYGVSPTKLNDLCFTNVYADSFVIRGDEVRQIAPGQTGKIADYNYKLPDDFTGCVIAWNSNNLDSKVGGNYNYLYRLFRKSNLKPFERDISTEIYQAGSTPCNGVEGFNCYFPLQSYGFQPTNGVGYQPYRVVVLSFELLHAPATVCGPKKSTNLVKNKCVNFNFNGLTGTGVLTESNKKFLPFQQFGRDIADTTDAVRDPQTLEILDITPCSFGGVSVITPGTNTSNQVAVLYQDVNCTEVPVAIHADQLTPTWRVYSTGSNVFQTRAGCLIGAEHVNNSYECDIPIGAGICASYQTQTNSPRRARSVASQSIIAYTMSLGAENSVAYSNNSIAIPTNFTISVTTEILPVSMTKTSVDCTMYICGDSTECSNLLLQYGSFCTQLNRALTGIAVEQDKNTQEVFAQVKQIYKTPPIKDFGGFNFSQILPDPSKPSKRSFIEDLLFNKVTLADAGFIKQYGDCLGDIAARDLICAQKFNGLTVLPPLLTDEMIAQYTSALLAGTITSGWTFGAGAALQIPFAMQMAYRFNGIGVTQCVLYENQKLIANQFNSAIGKIQDSLSSTASALGKLQDVVNQNAQALNTLVKQLSSNFGAISSVLNDILSRLDKVEAEVQIDRLITGRLQSLQTYVTQQLIRAAEIRASANLAATKMSECVLGQSKRVDFCGKGYHLMSFPQSAPHGVVFLHVTYVPAQEKNFTTAPAICHDGKAHFPREGVFVSNGTHWFVTQRNFYEPQIITTDNTFVCGNCDVVIGIVNNTVYDPLQPELESGGGGSDIDPYKEFGSSYQLLNFLPLDFFPDLNALVDTATALYEEELTGREHCSPHHTAIRQALVCWDELTKLIAWMSSNITSEQVRTIIVNHVNDTWGLKVRQSLWFHLSCLTFGQHTVQEFLVSFGVWIRTPAPYRPPNAPILSTLPEHTVIC

SEQ ID NO: 14095 - protein, 1301 aa, Artificial Sequence
  SARS-CoV-2/2019-nCoV/USA-CruiseA-18/2020__MT159716.1 spike protein (1-1147)(N914C_S1123C) WhcAg construct
MFVFLVLLPLVSSQCVNLTTRTQLPPAYTNSFTRGVYYPDKVFRSSVLHSTQDLFLPFFSNVTWFHAIHVSGTNGTKRFDNPVLPFNDGVYFASTEKSNIIRGWIFGTTLDSKTQSLLIVNNATNVVIKVCEFQFCNDPFLGVYYHKNNKSWMESELRVYSSANNCTFEYVSQPFLMDLEGKQGNFKNLREFVFKNIDGYFKIYSKHTPINLVRDLPQGFSALEPLVDLPIGINITRFQTLLALHRSYLTPGDSSSGWTAGAAAYYVGYLQPRTFLLKYNENGTITDAVDCALDPLSETKCTLKSFTVEKGIYQTSNFRVQPTESIVRFPNITNLCPFGEVFNATRFASVYAWNRKRISNCVADYSVLYNSASFSTFKCYGVSPTKLNDLCFTNVYADSFVIRGDEVRQIAPGQTGKIADYNYKLPDDFTGCVIAWNSNNLDSKVGGNYNYLYRLFRKSNLKPFERDISTEIYQAGSTPCNGVEGFNCYFPLQSYGFQPTNGVGYQPYRVVVLSFELLHAPATVCGPKKSTNLVKNKCVNFNFNGLTGTGVLTESNKKFLPFQQFGRDIADTTDAVRDPQTLEILDITPCSFGGVSVITPGTNTSNQVAVLYQDVNCTEVPVAIHADQLTPTWRVYSTGSNVFQTRAGCLIGAEHVNNSYECDIPIGAGICASYQTQTNSPRRARSVASQSIIAYTMSLGAENSVAYSNNSIAIPTNFTISVTTEILPVSMTKTSVDCTMYICGDSTECSNLLLQYGSFCTQLNRALTGIAVEQDKNTQEVFAQVKQIYKTPPIKDFGGFNFSQILPDPSKPSKRSFIEDLLFNKVTLADAGFIKQYGDCLGDIAARDLICAQKFNGLTVLPPLLTDEMIAQYTSALLAGTITSGWTFGAGAALQIPFAMQMAYRFNGIGVTQCVLYENQKLIANQFNSAIGKIQDSLSSTASALGKLQDVVNQNAQALNTLVKQLSSNFGAISSVLNDILSRLDKVEAEVQIDRLITGRLQSLQTYVTQQLIRAAEIRASANLAATKMSECVLGQSKRVDFCGKGYHLMSFPQSAPHGVVFLHVTYVPAQEKNFTTAPAICHDGKAHFPREGVFVSNGTHWFVTQRNFYEPQIITTDNTFVCGNCDVVIGIVNNTVYDPLQPELDSGGGGSDIDPYKEFGSSYQLLNFLPLDFFPDLNALVDTATALYEEELTGREHCSPHHTAIRQALVCWDELTKLIAWMSSNITSEQVRTIIVNHVNDTWGLKVRQSLWFHLSCLTFGQHTVQEFLVSFGVWIRTPAPYRPPNAPILSTLPEHTVIC

SEQ ID NO: 14096 - protein, 1301 aa, Artificial Sequence
  SARS-CoV-2/SARS-CoV-2/Yunnan-01/human/2020/CHN__MT049951.1 spike protein (1-1147)(N914C_S1123C) WhcAg construct
MFVFLVLLPLVSSQCVNLTTRTQLPPANTNSFTRGVYYPDKVFRSSVLHSTQDLFLPFFSNVTWFHAIHVSGTNGTKRFDNPVLPFNDGVYFASTEKSNIIRGWIFGTTLDSKTQSLLIVNNATNVVIKVCEFQFCNDPFLGVYYHKNNKSWMESEFRVYSSANNCTFEYVSQPFLMDLEGKQGNFKNLREFVFKNIDGYFKIYSKHTPINLVRDLPQGFSALEPLVDLPIGINITRFQTLLALHRSYLTPGDSSSGWTAGAAAYYVGYLQPRTFLLKYNENGTITDAVDCALDPLSETKCTLKSFTVEKGIYQTSNFRVQPTESIVRFPNITNLCPFGEVFNATRFASVYAWNRKRISNCVADYSVLYNSASFSTFKCYGVSPTKLNDLCFTNVYADSFVIRGDEVRQIAPGQTGKIADYNYKLPDDFTGCVIAWNSNNLDSKVGGNYNYLYRLFRKSNLKPFERDISTEIYQAGSTPCNGVEGFNCYFPLQSYGFQPTNGVGYQPYRVVVLSFELLHAPATVCGPKKSTNLVKNKCVNFNFNGLTGTGVLTESNKKFLPFQQFGRDIADTTDAVRDPQTLEILDITPCSFGGVSVITPGTNTSNQVAVLYQDVNCTEVPVAIHADQLTPTWRVYSTGSNVFQTRAGCLIGAEHVNNSYECDIPIGAGICASYQTQTNSPRRARSVASQSIIAYTMSLGAENSVAYSNNSIAIPTNFTISVTTEILPVSMTKTSVDCTMYICGDSTECSNLLLQYGSFCTQLNRALTGIAVEQDKNTQEVFAQVKQIYKTPPIKDFGGFNFSQILPDPSKPSKRSFIEDLLFNKVTLADAGFIKQYGDCLGDIAARDLICAQKFNGLTVLPPLLTDEMIAQYTSALLAGTITSGWTFGAGAALQIPFAMQMAYRFNGIGVTQCVLYENQKLIANQFNSAIGKIQDSLSSTASALGKLQDVVNQNAQALNTLVKQLSSNFGAISSVLNDILSRLDKVEAEVQIDRLITGRLQSLQTYVTQQLIRAAEIRASANLAATKMSECVLGQSKRVDFCGKGYHLMSFPQSAPHGVVFLHVTYVPAQEKNFTTAPAICHDGKAHFPREGVFVSNGTHWFVTQRNFYEPQIITTDNTFVCGNCDVVIGIVNNTVYDPLQPELDSGGGGSDIDPYKEFGSSYQLLNFLPLDFFPDLNALVDTATALYEEELTGREHCSPHHTAIRQALVCWDELTKLIAWMSSNITSEQVRTIIVNHVNDTWGLKVRQSLWFHLSCLTFGQHTVQEFLVSFGVWIRTPAPYRPPNAPILSTLPEHTVIC

SEQ ID NO: 14097 - protein, 1301 aa, Artificial Sequence
  SARS-CoV-2/USA/WA-UW292/2020__EPI_ISL_418077 spike protein (1-1147)(N914C_S1123C) WhcAg construct
MFVFLVLLPLVSSQCVNLTTRTQLPPAYTNSFTRGVYYPDKVFRSSVLHSTQDLFLPFFSNVTWFHAIHVSGTNGTKRFDNPVLPFNDGVYFASTEKSNIIRGWIFGTTLDSKTQSLLIVNNATNVVIKVCEFQFCNDPFLGVYYHKNNKSWMESEFRVYSSANNCTFEYVSQPFLMDLEGKQGNFKNLREFVFKNIDGYFKIYSKHTPINLVRDLPQGFSALEPLVDLPIGINITRFQTLLALHRSYLTPGDSSSGWTAGAAAYYVGYLQPRTFLLKYNENGTITDAVDCALDPLSETKCTLKSFTVEKGIYQTSNFRVQPTESIVRFPNITNLCPFGEVFNATRFASVYAWNRKRISNCVADYSVLYNSASFSTFKCYGVSPTKLNDLCFTNVYADSFVIRGDEVRQIAPGQTGKIADYNYKLPDDFTGCVIAWNSNNLDSKVGGNYNYLYRLFRKSNLKPFERDISTEIYQASSTPCNGVEGFNCYFPLQSYGFQPTNGVGYQPYRVVVLSFELLHAPATVCGPKKSTNLVKNKCVNFNFNGLTGTGVLTESNKKFLPFQQFGRDIADTTDAVRDPQTLEILDITPCSFGGVSVITPGTNTSNQVAVLYQDVNCTEVPVAIHADQLTPTWRVYSTGSNVFQTRAGCLIGAEHVNNSYECDIPIGAGICASYQTQTNSPRRARSVASQSIIAYTMSLGAENSVAYSNNSIAIPTNFTISVTTEILPVSMTKTSVDCTMYICGDSTECSNLLLQYGSFCTQLNRALTGIAVEQDKNTQEVFAQVKQIYKTPPIKDFGGFNFSQILPDPSKPSKRSFIEDLLFNKVTLADAGFIKQYGDCLGDIAARDLICAQKFNGLTVLPPLLTDEMIAQYTSALLAGTITSGWTFGAGAALQIPFAMQMAYRFNGIGVTQCVLYENQKLIANQFNSAIGKIQDSLSSTASALGKLQDVVNQNAQALNTLVKQLSSNFGAISSVLNDILSRLDKVEAEVQIDRLITGRLQSLQTYVTQQLIRAAEIRASANLAATKMSECVLGQSKRVDFCGKGYHLMSFPQSAPHGVVFLHVTYVPAQEKNFTTAPAICHDGKAHFPREGVFVSNGTHWFVTQRNFYEPQIITTDNTFVCGNCDVVIGIVNNTVYDPLQPELDSGGGGSDIDPYKEFGSSYQLLNFLPLDFFPDLNALVDTATALYEEELTGREHCSPHHTAIRQALVCWDELTKLIAWMSSNITSEQVRTIIVNHVNDTWGLKVRQSLWFHLSCLTFGQHTVQEFLVSFGVWIRTPAPYRPPNAPILSTLPEHTVIC

SEQ ID NO: 14098 - protein, 1301 aa, Artificial Sequence
  SARS-CoV-2/Iceland/192/2020__EPI_ISL_417819 spike protein (1-1147)(N914C_S1123C) WhcAg construct
MFVFFVLLPLVSSQCVNLTTRTQLPPAYTNSFTRGVYYPDKVFRSSVLHSTQDLFLPFFSNVTWFHAIHVSGTNGTKRFDNPVLPFNDGVYFASTEKSNIIRGWIFGTTLDSKTQSLLIVNNATNVVIKVCEFQFCNDPFLGVYYHKNNKSWMESEFRVYSSANNCTFEYVSQPFLMDLEGKQGNFKNLREFVFKNIDGYFKIYSKHTPINLVRDLPQGFSALEPLVDLPIGINITRFQTLLALHRSYLTPGDSSSGWTAGAAAYYVGYLQPRTFLLKYNENGTITDAVDCALDPLSETKCTLKSFTVEKGIYQTSNFRVQPTESIVRFPNITNLCPFGEVFNATRFASVYAWNRKRISNCVADYSVLYNSASFSTFKCYGVSPTKLNDLCFTNVYADSFVIRGDEVRQIAPGQTGKIADYNYKLPDDFTGCVIAWNSNNLDSKVGGNYNYLYRLFRKSNLKPFERDISTEIYQAGSTPCNGVEGFNCYFPLQSYGFQPTNGVGYQPYRVVVLSFELLHAPATVCGPKKSTNLVKNKCVNFNFNGLTGTGVLTESNKKFLPFQQFGRDIADTTDAVRDPQTLEILDITPCSFGGVSVITPGTNTSNQVAVLYQGVNCTEVPVAIHADQLTPTWRVYSTGSNVFQTRAGCLIGAEHVNNSYECDIPIGAGICASYQTQTNSPRRARSVASQSIIAYTMSLGAENSVAYSNNSIAIPTNFTISVTTEILPVSMTKTSVDCTMYICGDSTECSNLLLQYGSFCTQLNRALTGIAVEQDKNTQEVFAQVKQIYKTPPIKDFGGFNFSQILPDPSKPSKRSFIEDLLFNKVTLADAGFIKQYGDCLGDIAARDLICAQKFNGLTVLPPLLTDEMIAQYTSALLAGTITSGWTFGAGAALQIPFAMQMAYRFNGIGVTQCVLYENQKLIANQFNSAIGKIQDSLSSTASALGKLQDVVNQNAQALNTLVKQLSSNFGAISSVLNDILSRLDKVEAEVQIDRLITGRLQSLQTYVTQQLIRAAEIRASANLAATKMSECVLGQSKRVDFCGKGYHLMSFPQSAPHGVVFLHVTYVPAQEKNFTTAPAICHDGKAHFPREGVFVSNGTHWFVTQRNFYEPQIITTDNTFVCGNCDVVIGIVNNTVYDPLQPELDSGGGGSDIDPYKEFGSSYQLLNFLPLDFFPDLNALVDTATALYEEELTGREHCSPHHTAIRQALVCWDELTKLIAWMSSNITSEQVRTIIVNHVNDTWGLKVRQSLWFHLSCLTFGQHTVQEFLVSFGVWIRTPAPYRPPNAPILSTLPEHTVIC

SEQ ID NO: 14099 - protein, 1301 aa, Artificial Sequence
  SARS-CoV-2/Belgium/ULG-6939/2020__EPI_ISL_417020 spike protein (1-1147)(N914C_S1123C) WhcAg construct
MFVFLVLLPLVSSQCVNLTTRTQLPPAYTNSFTRGVYYPDKVFRSSVLHSTQDLFLPFFSNVTWFHAIHVSGTNGTKRFDNPVLPFNDGVYFASTEKSNIIRGWIFGTTLDSKTQSLLIVNNATNVVIKVCEFQFCNDPFLGVYYHKNNKSWMESEFRVYSSANNCTFEYVSQPFLMDLEGKQGNFKNLREFVFKNIDGYFKIYSKHTPINLVRDLPQGFSALEPLVDLPIGINITRFQTLLALHRSYLTPGDSSSGWTAGAAAYYVGYLQPRTFLLKYNENGTITDAVDCALDPLSETKCTLKSFTVEKGIYQTSNFRVQPTESIVRFPNITNLCPFGEVFNATRFASVYAWNRKRISNCVADYSVLYNSASFSTFKCYGVSPTKLNDLCFTNVYADSFVIRGDEVRQIAPGQTGKIADYNYKLPDDFTGCVIAWNSNNLDSKVGGNYNYLYRLFRKSNLKPFERDISTEIYQAGSTPCNGVEGFNCYFPLQSYGFQPTNGVGYQPYRVVVLSFELLHAPATVCGPKKSTNLVKNKCVNFNFNGLTGTGVLTESNKKFLPFQQFGRDIADTTDAVRDPQTLEILDITPCSFGGVSVITPGTNTSNQVAVLYQGVNCTEVPVAIHADQLTPTWRVYSTGSNVFQTRAGCLIGAEHVNNSYECDIPIGAGICASYQTQTNSPRRARSVASQSIIAYTMSLGAENSVVYSNNSIAIPTNFTISVTTEILPVSMTKTSVDCTMYICGDSTECSNLLLQYGSFCTQLNRALTGIAVEQDKNTQEVFAQVKQIYKTPPIKDFGGFNFSQILPDPSKPSKRSFIEDLLFNKVTLADAGFIKQYGDCLGDIAARDLICAQKFNGLTVLPPLLTDEMIAQYTSALLAGTITSGWTFGAGAALQIPFAMQMAYRFNGIGVTQCVLYENQKLIANQFNSAIGKIQDSLSSTASALGKLQDVVNQNAQALNTLVKQLSSNFGAISSVLNDILSRLDKVEAEVQIDRLITGRLQSLQTYVTQQLIRAAEIRASANLAATKMSECVLGQSKRVDFCGKGYHLMSFPQSAPHGVVFLHVTYVPAQEKNFTTAPAICHDGKAHFPREGVFVSNGTHWFVTQRNFYEPQIITTDNTFVCGNCDVVIGIVNNTVYDPLQPELDSGGGGSDIDPYKEFGSSYQLLNFLPLDFFPDLNALVDTATALYEEELTGREHCSPHHTAIRQALVCWDELTKLIAWMSSNITSEQVRTIIVNHVNDTWGLKVRQSLWFHLSCLTFGQHTVQEFLVSFGVWIRTPAPYRPPNAPILSTLPEHTVIC

SEQ ID NO: 14100 - protein, 1301 aa, Artificial Sequence
  SARS-CoV-2/France/HF2496/2020__EPI_ISL_418231 spike protein (1-1147)(N914C_S1123C) WhcAg construct
MFVFLVLLPLVSSQCVNLTTRTQLPPAYTNSFTRGVYYPDKVFRSSVLHSTQDLFLPFFSNVTWFHAIHVSGTNGTKRFDNPVLPFNDGVYFASTEKSNIIRGWIFGTTLDSKTQSLLIVNNATNVVIKVCEFQFCNDPFLGVYYHKNNKSWMESEFRVYSSANNCTFEYVSQPFLMDLEGKQGNFKNLREFVFKNIDGYFKIYSKHTPINLVRDLPQGFSALEPLVDLPIGINITRFQTLLALHRSYLTPGDSSSGWTAGAAAYYVGYLQPRTFLLKYNENGTITDAVDCALDPLSETKCTLKSFTVEKGIYQTSNFRVQPTESIVRFPNITNLCPFGEVFNATRFASVYAWNRKRISNCVADYSVLYNSASFSTFKCYGVSPTKLNDLCFTNVYADSFVIRGDEVRQIAPGQTGKIADYNYKLPDDFTGCVIAWNSNNLDSKVGGNYNYLYRLFRKSNLKPFERDISTEIYQAGSTPCNGVEGFNCYFPLQSYGFQPTNGVGYQPYRVVVLSFELLHAPATVCGPKKSTNLVKNKCVNFNFNGLTGTGVLTESNKKFLPFQQFGRDIADTTDAVRDPQTLEILDITPCSFGGVSVITPGTNTSNQVAVLYQGVNCTEVPVAIHADQLTPTWRVYSTGSNVFQTRAGCLIGAEHVNNSYECDIPIGAGICASYQTQTNSPRRARSVASQSIIAYTMSLGAENSVAYSNNSIAIPTNFTISVTTEILPVSMTKTSVDCTMYICGDSTECSNLLLQYGSFCTQLNRALTGIAVEQDKNTQEVFAQVKQIYKTPPIKDFGGFNFSQILPDPSKPSKRSFIEDLLFNKVTLADAGFIKQYGDCLGDIVARDLICAQKFNGLTVLPPLLTDEMIAQYTSALLAGTITSGWTFGAGAALQIPFAMQMAYRFNGIGVTQCVLYENQKLIANQFNSAIGKIQDSLSSTASALGKLQDVVNQNAQALNTLVKQLSSNFGAISSVLNDILSRLDKVEAEVQIDRLITGRLQSLQTYVTQQLIRAAEIRASANLAATKMSECVLGQSKRVDFCGKGYHLMSFPQSAPHGVVFLHVTYVPAQEKNFTTAPAICHDGKAHFPREGVFVSNGTHWFVTQRNFYEPQIITTDNTFVCGNCDVVIGIVNNTVYDPLQPELDSGGGGSDIDPYKEFGSSYQLLNFLPLDFFPDLNALVDTATALYEEELTGREHCSPHHTAIRQALVCWDELTKLIAWMSSNITSEQVRTIIVNHVNDTWGLKVRQSLWFHLSCLTFGQHTVQEFLVSFGVWIRTPAPYRPPNAPILSTLPEHTVIC

SEQ ID NO: 14101 - protein, 1301 aa, Artificial Sequence
  SARS-CoV-2/USA/WA-UW291/2020__EPI_ISL_418076 spike protein (1-1147)(N914C_S1123C) WhcAg construct
MFVFLVLLPLVSSQCVNLTTRTQLPPAYTNSFTRGVYYPDKVFRSSVLHSTQDLFLPFFSNVTWFHAIHVSGTNGTKRFDNPVLPFNDGVYFASTEKSNIIRGWIFGTTLDSKTQSLLIVNNATNVVIKVCEFQFCNDPFLGVYYHKNNKSWMESEFRVYSSANNCTFEYVSQPFLMDLEGKQGNFKNLREFVFKNIDGYFKIYSKHTPINLVRDLPQGFSALEPLVDLPIGINITRFQTLLALHRSYLTPGDSSSGWTAGAAAYYVGYLQPRTFLLKYNENGTITDAVDCALDPLSETKCTLKSFTVEKGIYQTSNFRVQPTESIVRFPNITNLCPFGEVFNATRFASVYAWNRKRISNCVADYSVLYNSASFSTFKCYGVSPTKLNDLCFTNVYADSFVIRGDEVRQIAPGQTGKIADYNYKLPDDFTGCVIAWNSNNLDSKVGGNYNYLYRLFRKSNLKPFERDISTEIYQAGSTPCNGVEGFNCYFPLQSYGFQPTNGVGYQPYRVVVLSFELLHAPATVCGPKKSTNLVKNKCVNFNFNGLTGTGVLTESNKKFLPFQQFGRDIADTTDAVRDPQTLEILDITPCSFGGVSVITPGTNTSNQVAVLYQGVNCTEVPVAIHADQLTPTWRVYSTGSNVFQTRAGCLIGAEHVNNSYECDIPIGAGICASYQTQTNSPRRARSVASQSIIAYTMSLGAENSVAYSNNSIAIPTNFTISVTTEILPVSMTKTSVDCTMYICGDSTECSNLLLQYGSFCTQLNRALTGIAVEQDKNTQEVFAQVKQIYKTPPIKDFGGFNFSQILPDPSKPSKRSFIEDLLFNKVTLADAGFIKQYGDCLGDIAARDLICAQKFNGLTVLPPLLTDEMIAQYTSALLAGTITSGWTFGAGAALQIPFAMQMAYRFNGIGVTQCVLYENQKLIANQFNSAIGKIQYSLSSTASALGKLQDVVNQNAQALNTLVKQLSSNFGAISSVLNDILSRLDKVEAEVQIDRLITGRLQSLQTYVTQQLIRAAEIRASANLAATKMSECVLGQSKRVDFCGKGYHLMSFPQSAPHGVVFLHVTYVPAQEKNFTTAPAICHDGKAHFPREGVFVSNGTHWFVTQRNFYEPQIITTDNTFVCGNCDVVIGIVNNTVYDPLQPELDSGGGGSDIDPYKEFGSSYQLLNFLPLDFFPDLNALVDTATALYEEELTGREHCSPHHTAIRQALVCWDELTKLIAWMSSNITSEQVRTIIVNHVNDTWGLKVRQSLWFHLSCLTFGQHTVQEFLVSFGVWIRTPAPYRPPNAPILSTLPEHTVIC

SEQ ID NO: 14102 - protein, 1301 aa, Artificial Sequence; identical to SEQ ID NO: 14065
  SARS-CoV-2/Portugal/PT0034/2020__EPI_ISL_418019 spike protein (1-1147)(N914C_S1123C) WhcAg construct

SEQ ID NO: 14103 - protein, 1301 aa, Artificial Sequence; identical to SEQ ID NO: 14057
  SARS-CoV-2/Iceland/202/2020__EPI_ISL_417750 spike protein (1-1147)(N914C_S1123C) WhcAg construct

SEQ ID NO: 14104 - protein, 1301 aa, Artificial Sequence
  SARS-CoV-2/USA/WA-UW261/2020__EPI_ISL_418046 spike protein (1-1147)(N914C_S1123C) WhcAg construct
MFVFLVLLPLVSSQCVNLTTRTQLPPAYTNSFTRGVYYPDKVFRSSVLHSTQDLFLPFFSNVTWFHAIHVSGTNGTKRFDNPVLPFNDGVYFASTEKSNIIRGWIFGTTLDSKTQSLLIVNNATNVVIKVCEFQFCNDPFLGVYYHKNNKSWMESEFRVYSSANNCTFEYVSQPFLMDLEGKQGNFKNLREFVFKNIDGYFKIYSKHTPINLVRDLPQGFSALEPLVDLPIGINITRFQTLLALHRSYLTPGDSSSGWTAGAAAYYVGYLQPRTFLLKYNENGTITDAVDCALDPLSETKCTLKSFTVEKGIYQTSNFRVQPTESIVRFPNITNLCPFGEVFNATRFTSVYAWNRKRISNCVADYSVLYNSASFSTFKCYGVSPTKLNDLCFTNVYADSFVIRGDEVRQIAPGQTGKIADYNYKLPDDFTGCVIAWNSNNLDSKVGGNYNYLYRLFRKSNLKPFERDISTEIYQAGSTPCNGVEGFNCYFPLQSYGFQPTNGVGYQPYRVVVLSFELLHAPATVCGPKKSTNLVKNKCVNFNFNGLTGTGVLTESNKKFLPFQQFGRDIADTTDAVRDPQTLEILDITPCSFGGVSVITPGTNTSNQVAVLYQDVNCTEVPVAIHADQLTPTWRVYSTGSNVFQTRAGCLIGAEHVNNSYECDIPIGAGICASYQTQTNSPRRARSVASQSIIAYTMSLGAENSVAYSNNSIAIPTNFTISVTTEILPVSMTKTSVDCTMYICGDSTECSNLLLQYGSFCTQLNRALTGIAVEQDKNTQEVFAQVKQIYKTPPIKDFGGFNFSQILPDPSKPSKRSFIEDLLFNKVTLADAGFIKQYGDCLGDIAARDLICAQKFNGLTVLPPLLTDEMIAQYTSALLAGTITSGWTFGAGAALQIPFAMQMAYRFNGIGVTQCVLYENQKLIANQFNSAIGKIQDSLSSTASALGKLQDVVNQNAQALNTLVKQLSSNFGAISSVLNDILSRLDKVEAEVQIDRLITGRLQSLQTYVTQQLIRAAEIRASANLAATKMSECVLGQSKRVDFCGKGYHLMSFPQSAPHGVVFLHVTYVPAQEKNFTTAPAICHDGKAHFPREGVFVSNGTHWFVTQRNFYEPQIITTDNTFVCGNCDVVIGIVNNTVYDPLQPELDSGGGGSDIDPYKEFGSSYQLLNFLPLDFFPDLNALVDTATALYEEELTGREHCSPHHTAIRQALVCWDELTKLIAWMSSNITSEQVRTIIVNHVNDTWGLKVRQSLWFHLSCLTFGQHTVQEFLVSFGVWIRTPAPYRPPNAPILSTLPEHTVIC

SEQ ID NO: 14105 - protein, 1301 aa, Artificial Sequence
  SARS-CoV-2/Portugal/PT0035/2020__EPI_ISL_418020 spike protein (1-1147)(N914C_S1123C) WhcAg construct
MFVFLVLLPLVSSQCVNLTTRTQLPPAYTNSFTRGVYYPDKVFRSSVLHSTQDLFLPFFSNVTWFHAIHVSGTNGTKRFDNPVLPFNDGVYFASTEKSNIIRGWIFGTTLDSKTQSLLIVNNATNVVIKVCEFQFCNDPFLGVYYHKNNKSWMESEFRVYSSANNCTFEYVSQPFLMDLEGKQGNFKNLREFVFKNIDGYFKIYSKHTPINLVRDLPQGFSALEPLVDLPIGINITRFQTLLALHRSYLTPGDSSSGWTAGAAAYYVGYLQPRTFLLKYNENGTITDAVDCALDPLSETKCTLKSFTVEKGIYQTSNFRVQPTESIVRFPNITNLCPFGEVFNATRFASVYAWNRKRISNCVADYSVLYNSASFSTFKCYGVSPTKLNDLCFTNVYADSFVIRGDEVRQIAPGQTGKIADYNYKLPDDFTGCVIAWNSNNLDSKVGGNYNYLYRLFRKSNLKPFERDISTEIYQAGSTPCNGVEGFNCYFPLQSYGFQPTNGVGYQPYRVVVLSFELLHAPATVCGPKKSTNLVKNKCVNFNFNGLTGTGVLTESNKKFLPFQQFGRDIADTTDAVRDPQTLEILDITPCSFGGVSVITPGTNTSNQVAVLYQDVNCTEVPVAIHADQLTPTWRVYSTGSNVFQTRAGCLIGAEHVNNSYECDIPIGAGICASYQTQTNSPRRARSVASQSIIAYTMSLGAENSVAYSNNSIAIPTNFTISVTTEILPVSMTKTSVDCTMYICGDSTECSNLLLQYGSFCTQLNRALTGIAVEQDKNTQEVFAQVKQIYKTPPIKDFGGFNFSQILPDPSKPSKRSFIEDLLFNKVTLADAGFIKQYGDCLGDISARDLICAQKFNGLTVLPPLLTDEMIAQYTSALLAGTITSGWTFGAGAALQIPFAMQMAYRFNGIGVTQCVLYENQKLIANQFNSAIGKIQDSLSSTASALGKLQDVVNQNAQALNTLVKQLSSNFGAISSVLNDILSRLDKVEAEVQIDRLITGRLQSLQTYVTQQLIRAAEIRASANLAATKMSECVLGQSKRVDFCGKGYHLMSFPQSAPHGVVFLHVTYVPAQEKNFTTAPAICHDGKAHFPREGVFVSNGTHWFVTQRNFYEPQIITTDNTFVCGNCDVVIGIVNNTVYDPLQPELDSGGGGSDIDPYKEFGSSYQLLNFLPLDFFPDLNALVDTATALYEEELTGREHCSPHHTAIRQALVCWDELTKLIAWMSSNITSEQVRTIIVNHVNDTWGLKVRQSLWFHLSCLTFGQHTVQEFLVSFGVWIRTPAPYRPPNAPILSTLPEHTVIC

SEQ ID NO: 14106 - protein, 1301 aa, Artificial Sequence
  SARS-CoV-2/USA/NY-NYUMC7/2020__EPI_ISL_418192 spike protein (1-1147)(N914C_S1123C) WhcAg construct
MFVFLVLLPLVSSQCVNLTTRTQLPPAYTNSFTRGVYYPDKVFRSSVLHSTQDLFLPFFSNVTWFHAIHVSGTNGTKRFDNPVLPFNDGVYFASTEKSNIIRGWIFGTTLDSKTQSLLIVNNATNVVIKVCEFQFCNDPFLGVYHHKNNKSWMESEFRVYSSANNCTFEYVSQPFLMDLEGKQGNFKNLREFVFKNIDGYFKIYSKHTPINLVRDLPQGFSALEPLVDLPIGINITRFQTLLALHRSYLTPGDSSSGWTAGAAAYYVGYLQPRTFLLKYNENGTITDAVDCALDPLSETKCTLKSFTVEKGIYQTSNFRVQPTESIVRFPNITNLCPFGEVFNATRFASVYAWNRKRISNCVADYSVLYNSASFSTFKCYGVSPTKLNDLCFTNVYADSFVIRGDEVRQIAPGQTGKIADYNYKLPDDFTGCVIAWNSNNLDSKVGGNYNYLYRLFRKSNLKPFERDISTEIYQAGSTPCNGVEGFNCYFPLQSYGFQPTNGVGYQPYRVVVLSFELLHAPATVCGPKKSTNLVKNKCVNFNFNGLTGTGVLTESNKKFLPFQQFGRDIADTTDAVRDPQTLEILDITPCSFGGVSVITPGTNTSNQVAVLYQGVNCTEVPVAIHADQLTPTWRVYSTGSNVFQTRAGCLIGAEHVNNSYECDIPIGAGICASYQTQTNSPRRARSVASQSIIAYTMSLGAENSVAYSNNSIAIPTNFTISVTTEILPVSMTKTSVDCTMYICGDSTECSNLLLQYGSFCTQLNRALTGIAVEQDKNTQEVFAQVKQIYKTPPIKDFGGFNFSQILPDPSKPSKRSFIEDLLFNKVTLADAGFIKQYGDCLGDIAARDLICAQKFNGLTVLPPLLTDEMIAQYTSALLAGTITSGWTFGAGAALQIPFAMQMAYRFNGIGVTQCVLYENQKLIANQFNSAIGKIQDSLSSTASALGKLQDVVNQNAQALNTLVKQLSSNFGAISSVLNDILSRLDKVEAEVQIDRLITGRLQSLQTYVTQQLIRAAEIRASANLAATKMSECVLGQSKRVDFCGKGYHLMSFPQSAPHGVVFLHVTYVPAQEKNFTTAPAICHDGKAHFPREGVFVSNGTHWFVTQRNFYEPQIITTDNTFVCGNCDVVIGIVNNTVYDPLQPELDSGGGGSDIDPYKEFGSSYQLLNFLPLDFFPDLNALVDTATALYEEELTGREHCSPHHTAIRQALVCWDELTKLIAWMSSNITSEQVRTIIVNHVNDTWGLKVRQSLWFHLSCLTFGQHTVQEFLVSFGVWIRTPAPYRPPNAPILSTLPEHTVIC

SEQ ID NO: 14107 - protein, 1301 aa, Artificial Sequence
  SARS-CoV-2/Iceland/189/2020__EPI_ISL_417709 spike protein (1-1147)(N914C_S1123C) WhcAg construct
MFVFLVLLPLVSSQCVNLTTRTQLPPAYTNSFTRGVYYPDKVFRSSVLHSTQDLFLPFFSNVTWFHAIHVSGTNGTKRFDNPVLPFNDGVYFASTEKSNIIRGWIFGTTLDSKTQSLLIVNNATNVVIKVCEFQFCNDPFLGVYYHKNNKSWMESEFRVYSSANNCTFEYVSQPFLMDLEGKQGNFKNLREFVFKNIDGYFKIYSKHTPINLVRDLPQGFSALEPLVDLPIGINITRFQTLLALHRSYLTPGDSSSGWTAGAAAYYVGYLQPRTFLLKYNENGTITDAVDCALDPLSETKCTLKSFTVEKGIYQTSNFRVQPTESIVRFPNITNLCPFGEVFNATRFASVYAWNRKRISNCVADYSVLYNSASFSTFKCYGVSPTKLNDLCFTNVYADSFVIRGDEVRQIAPGQTGKIADYNYKLPDDFTGCVIAWNSNNLDSKVGGNYNYLYRLFRKSNLKPFERDISTEIYQAGSTPCNGVEGFNCYFPLQSYGFQPTNGVGYQPYRVVVLSFELLHAPATVCGPKKSTNLVKNKCVNFNFNGLTGTGVLTESNKKFLPFQQFGRDIADTTDAVRDPQTLEILDITPCSFGGVSVITPGTNTSNQVAVLYQGVNCTEVPVAIHADQLTPTWRVYSTGSNVFQTRAGCLIGAEHVNNSYECDIPIGAGICASYQTQTNSPRRARSVASQSIIAYTMSLGAENSVAYSNNSIAIPTNFTISVTTEILPVSMTKTSVDCTMYICGDSTECSNLLLQYGSFCTQLNRALTGIAVEQDKNTQEVFAQVKQIYKTPPIKDFGGFNFSQILPDPSKPSKRSFIEDLLFNKVTLADAGFTKQYGDCLGDIAARDLICAQKFNGLTVLPPLLTDEMIAQYTSALLAGTITSGWTFGAGAALQIPFAMQMAYRFNGIGVTQCVLYENQKLIANQFNSAIGKIQDSLSSTASALGKLQDVVNQNAQALNTLVKQLSSNFGAISSVLNDILSRLDKVEAEVQIDRLITGRLQSLQTYVTQQLIRAAEIRASANLAATKMSECVLGQSKRVDFCGKGYHLMSFPQSAPHGVVFLHVTYVPAQEKNFTTAPAICHDGKAHFPREGVFVSNGTHWFVTQRNFYEPQIITTDNTFVCGNCDVVIGIVNNTVYDPLQPELDSGGGGSDIDPYKEFGSSYQLLNFLPLDFFPDLNALVDTATALYEEELTGREHCSPHHTAIRQALVCWDELTKLIAWMSSNITSEQVRTIIVNHVNDTWGLKVRQSLWFHLSCLTFGQHTVQEFLVSFGVWIRTPAPYRPPNAPILSTLPEHTVIC

SEQ ID NO: 14108 - protein, 1301 aa, Artificial Sequence
  SARS-CoV-2/Australia/NSW56/2020__EPI_ISL_417408 spike protein (1-1147)(N914C_S1123C) WhcAg construct
MFVFLVLLPLVSSQCVNLTTRTQLPPAYTNSFTRGVYYPDKVFRSSVLHSTQDLFLPFFSNVTWFHAIHVSGTNGTKRFDNPVLPFNDGVYFASTEKSNIIRGWIFGTTLDSKTQSLLIVNNATNVVIKVCEFQFCNDPFLGVYYHKNNKSWMESEFRVYSSANNCTFEYVSQPFLMDLEGKQGNFKNLREFVFKNIDGYFKIYSKHTPINLVRDLPQGFSALEPLVDLPIGINITRFQTLLALHRSYLTPGDSSSGWTAGAAAYYVGYLQPRTFLLKYNENGTITDAVDCALDPLSETKCTLKSFTVEKGIYQTSNFRVQPTESIVRFPNITNLCPFGEVFNATRFASVYAWNRKRISNCVADYSVLYNSASFSTFKCYGVSPTKLNDLCFTNVYADSFVIRGDEVRQIAPGQTGKIADYNYKLPDDFTGCVIAWNSNNLDSKVGGNYNYLYRLFRKSNLKPFERDISTEIYQAGSTPCNGVEGFNCYFPLQSYGFQPTNGVGYQPYRVVVLSFELLHAPATVCGPKKSTNLVKNKCVNFNFNGLTGTGVLTESNKKFLPFQQFGRDIADTTDAVRDPQTLEILDITPCSFGGVSVITPGTNTSNQVAVLYQDVNCTEVPVAIHADQLTPTWRVYSTGSNVFQTRAGCLIGAEHVNNSYECDIPIGAGICASYQTQTNSPRRARSVASQSIIAYTMSLGAENSVAYSNNSIAIPTNFTISVTTEILPVSMTKTSVDCTMYICGDSTECSNLLLQYGSFCTQLNRALTGIAVEQDKNTQEVFAQVKQIYKTPPIKDFGGFNFSQILPDSSKPSKRSFIEDLLFNKVTLADAGFIKQYGDCLGDIAARDLICAQKFNGLTVLPPLLTDEMIAQYTSALLAGTITSGWTFGAGAALQIPFAMQMAYRFNGIGVTQCVLYENQKLIANQFNSAIGKIQDSLSSTASALGKLQDVVNQNAQALNTLVKQLSSNFGAISSVLNDILSRLDKVEAEVQIDRLITGRLQSLQTYVTQQLIRAAEIRASANLAATKMSECVLGQSKRVDFCGKGYHLMSFPQSAPHGVVFLHVTYVPAQEKNFTTAPAICHDGKAHFPREGVFVSNGTHWFVTQRNFYEPQIITTDNTFVCGNCDVVIGIVNNTVYDPLQPELDSGGGGSDIDPYKEFGSSYQLLNFLPLDFFPDLNALVDTATALYEEELTGREHCSPHHTAIRQALVCWDELTKLIAWMSSNITSEQVRTIIVNHVNDTWGLKVRQSLWFHLSCLTFGQHTVQEFLVSFGVWIRTPAPYRPPNAPILSTLPEHTVIC

SEQ ID NO: 14109 - protein, 1301 aa, Artificial Sequence
  SARS-CoV-2/Iceland/280/2020__EPI_ISL_417608 spike protein (1-1147)(N914C_S1123C) WhcAg construct
MFVFLVLLPLVSSQCVNLTTRTQLPPAYTNSFTRGVYYPDKVFRSSVLHSTQDLFLPFFSNVTWFHAIHVSGTNGTKRFDNPVLPFNDGVYFASTEKSNIIRGWIFGTTLDSKTQSLLIVNNATNVVIKVCEFQFCNDPFLGVYYHKNNKSWMESEFRVYSSANNCTFEYVSQPFLMDLEGKQGNFKNLREFVFKNIDGYFKIYSKHTPINLVRDLPQGFSALEPLVDLPIGINITRFQTLLALHRSYLTPGDSSSGWTAGAAAYYVGYLQPRTFLLKYNENGTITDAVDCALDPLSETKCTLKSFTVEKGIYQTSNFRVQPTESIVRFPNITNLCPFGEVFNATRFASVYAWNRKRISNCVADYSVLYNSASFSTFKCYGVSPTKLNDLCFTNVYADSFVIRGDEVRQIAPGQTGKIADYNYKLPDDFTGCVIAWNSNNLDSKVGGNYNYLYRLFRKSNLKPFERDISTEIYQAGSTPCNGVEGFNCYFPLQSYGFQPTNGVGYQPYRVVVLSFELLHAPATVCGPKKSTNLVKNKCVNFNFNGLTGTGVLTESNKKFLPFQQFGRDIADTTDAVRDPQTLEILDITPCSFGGVSVITPGTNTSNQVAVLYQGVNCTEVPVAIHADQLTPTWRVYSTGSNVFQTRAGCLIGAEHVNNSYECDIPIGAGICASYHTQTNSPRRARSVASQSIIAYTMSLGAENSVAYSNNSIAIPTNFTISVTTEILPVSMTKTSVDCTMYICGDSTECSNLLLQYGSFCTQLNRALTGIAVEQDKNTQEVFAQVKQIYKTPPIKDFGGFNFSQILPDPSKPSKRSFIEDLLFNKVTLADAGFIKQYGDCLGDIAARDLICAQKFNGLTVLPPLLTDEMIAQYTSALLAGTITSGWTFGAGAALQIPFAMQMAYRFNGIGVTQCVLYENQKLIANQFNSAIGKIQDSLSSTASALGKLQDVVNQNAQALNTLVKQLSSNFGAISSVLNDILSRLDKVEAEVQIDRLITGRLQSLQTYVTQQLIRAAEIRASANLAATKMSECVLGQSKRVDFCGKGYHLMSFPQSAPHGVVFLHVTYVPAQEKNFTTAPAICHDGKAHFPREGVFVSNGTHWFVTQRNFYEPQIITTDNTFVCGNCDVVIGIVNNTVYDPLQPELDSGGGGSDIDPYKEFGSSYQLLNFLPLDFFPDLNALVDTATALYEEELTGREHCSPHHTAIRQALVCWDELTKLIAWMSSNITSEQVRTIIVNHVNDTWGLKVRQSLWFHLSCLTFGQHTVQEFLVSFGVWIRTPAPYRPPNAPILSTLPEHTVIC

SEQ ID NO: 14110 - protein, 1301 aa, Artificial Sequence; identical to SEQ ID NO: 14065
  SARS-CoV-2/Iceland/247/2020__EPI_ISL_417575 spike protein (1-1147)(N914C_S1123C) WhcAg construct

SEQ ID NO: 14111 - protein, 1301 aa, Artificial Sequence
  SARS-CoV-2/Iceland/238/2020__EPI_ISL_417566 spike protein (1-1147)(N914C_S1123C) WhcAg construct
MFVFLVLLPLVSSQCVNLTTRTQLPPAYTNSFTRGVYYPDKVFRSSVLHSTQDLFLPFFSNVTWFHAIHVSGTNGTKRFDNPVLPFNDGVYFASTEKSNIIRGWIFGTTLDSKTQSLLIVNNATNVVIKVCEFQFCNDPFLGVYYHKNNKSWMESEFRVYSSANNCTFEYVSQPFLMDLEGKQGNFKNLREFVFKNIDGYFKIYSKHTPINLVRDLPQGFSALEPLVDLPIGINITRFQTLLALHRSYLTPGDSSSGWTAGAAAYYVGYLQPRTFLLKYNENGTITDAVDCALDPLSETKCTLKSFTVEKGIYQTSNFRVQPTESIVRFPNITNLCPFGEVFNATRFASVYAWNRKRISNCVADYSVLYNSASFSTFKCYGVSPTKLNDLCFTNVYADSFVIRGDEVRQIAPGQTGKIADYNYKLPDDFTGCVIAWNSNNLDSKVGGNYNYLYRLFRKSNLKPFERDISTEIYQAGSTPCNGVEGFNCYFPLQSYGFQPTNGVGYQPYRVVVLSFELLHAPATVCGPKKSTNLVKNKCVNFNFNGLTGTGVLTESNKKFLPFQQFGRDIADTTDAVRDPQTLEILDITPCSFGGVSVITPGTNTSNQVAVLYQGVNCTEVPVAIHADQLTPTWRVYSTGSNVFQTRAGCLIGAEHVNNSYECDIPIGAGICASYQTQTNSPRRARSVASQSIIAYTMSLGAENSVAYSNNSIAIPTNFTISVTTEILPVSMTKTSVDCTMYICGDSTECSNLLLQYGSFCTQLNRALTGIAVEQDKNTQEVFAQVKQIYKTPPIKDFGGFNFSQILPDPSKPSKRSFIEDLLFNKVTLADVGFIKQYGDCLGDIAARDLICAQKFNGLTVLPPLLTDEMIAQYTSALLAGTITSGWTFGAGAALQIPFAMQMAYRFNGIGVTQCVLYENQKLIANQFNSAIGKIQDSLSSTASALGKLQDVVNQNAQALNTLVKQLSSNFGAISSVLNDILSRLDKVEAEVQIDRLITGRLQSLQTYVTQQLIRAAEIRASANLAATKMSECVLGQSKRVDFCGKGYHLMSFPQSAPHGVVFLHVTYVPAQEKNFTTAPAICHDGKAHFPREGVFVSNGTHWFVTQRNFYEPQIITTDNTFVCGNCDVVIGIVNNTVYDPLQPELDSGGGGSDIDPYKEFGSSYQLLNFLPLDFFPDLNALVDTATALYEEELTGREHCSPHHTAIRQALVCWDELTKLIAWMSSNITSEQVRTIIVNHVNDTWGLKVRQSLWFHLSCLTFGQHTVQEFLVSFGVWIRTPAPYRPPNAPILSTLPEHTVIC

SEQ ID NO: 14112 - protein, 1301 aa, Artificial Sequence
  SARS-CoV-2/Greece/16/2020__EPI_ISL_418265 spike protein (1-1147)(N914C_S1123C) WhcAg construct
MFVFLVLLPLVSSQCVNLTTRTQLPPAYTNSFTRGVYYPDKVFRSSVLHSTQDLFLPFFSNVTWFHAIHVSGTNGTKRFDNPVLPFNDGVYFASTEKSNIIRGWIFGTTLDSKTQSLLIVNNATNVVIKVCEFQFCNDPFLGVYYHKNNKSWMESEFRVYSSANNCTFEYVSQPFLMDLEGKQGNFKNLREFVFKNVDGYFKIYSKHTPINLVRDLPQGFSALEPLVDLPIGINITRFQTLLALHRSYLTPGDSSSGWTAGAAAYYVGYLQPRTFLLKYNENGTITDAVDCALDPLSETKCTLKSFTVEKGIYQTSNFRVQPTESIVRFPNITNLCPFGEVFNATRFASVYAWNRKRISNCVADYSVLYNSASFSTFKCYGVSPTKLNDLCFTNVYADSFVIRGDEVRQIAPGQTGKIADYNYKLPDDFTGCVIAWNSNNLDSKVGGNYNYLYRLFRKSNLKPFERDISTEIYQAGSTPCNGVEGFNCYFPLQSYGFQPTNGVGYQPYRVVVLSFELLHAPATVCGPKKSTNLVKNKCVNFNFNGLTGTGVLTESNKKFLPFQQFGRDIADTTDAVRDPQTLEILDITPCSFGGVSVITPGTNTSNQVAVLYQDVNCTEVPVAIHADQLTPTWRVYSTGSNVFQTRAGCLIGAEHVNNSYECDIPIGAGICASYQTQTNSPRRARSVASQSIIAYTMSLGAENSVAYSNNSIAIPTNFTISVTTEILPVSMTKTSVDCTMYICGDSTECSNLLLQYGSFCTQLNRALTGIAVEQDKNTQEVFAQVKQIYKTPPIKDFGGFNFSQILPDPSKPSKRSFIEDLLFNKVTLADAGFIKQYGDCLGDIAARDLICAQKFNGLTVLPPLLTDEMIAQYTSALLAGTITSGWTFGAGAALQIPFAMQMAYRFNGIGVTQCVLYENQKLIANQFNSAIGKIQDSLSSTASALGKLQDVVNQNAQALNTLVKQLSSNFGAISSVLNDILSRLDKVEAEVQIDRLITGRLQSLQTYVTQQLIRAAEIRASANLAATKMSECVLGQSKRVDFCGKGYHLMSFPQSAPHGVVFLHVTYVPAQEKNFTTAPAICHDGKAHFPREGVFVSNGTHWFVTQRNFYEPQIITTDNTFVCGNCDVVIGIVNNTVYDPLQPELDSGGGGSDIDPYKEFGSSYQLLNFLPLDFFPDLNALVDTATALYEEELTGREHCSPHHTAIRQALVCWDELTKLIAWMSSNITSEQVRTIIVNHVNDTWGLKVRQSLWFHLSCLTFGQHTVQEFLVSFGVWIRTPAPYRPPNAPILSTLPEHTVIC

SEQ ID NO: 14113 - protein, 1301 aa, Artificial Sequence
  SARS-CoV-2/Iceland/319/2020__EPI_ISL_417648 spike protein (1-1147)(N914C_S1123C) WhcAg construct
MFVFLVLLPLVSSQCVNLTTRTQLPPAYTNSFTRGVYYPDKVFRSSVLHSTQDLFLPFFSNVTWFHAIHVSGTNGTKRFDNPVLPFNDGVYFASTEKSNIIRGWIFGTTLDSKTQSLLIVNNATNVVIKVCEFQFCNDPFLGVYYHKNNKSWMESEFRVYSSANNCTFEYVSQPFLIDLEGKQGNFKNLREFVFKNIDGYFKIYSKHTPINLVRDLPQGFSALEPLVDLPIGINITRFQTLLALHRSYLTPGDSSSGWTAGAAAYYVGYLQPRTFLLKYNENGTITDAVDCALDPLSETKCTLKSFTVEKGIYQTSNFRVQPTESIVRFPNITNLCPFGEVFNATRFASVYAWNRKRISNCVADYSVLYNSASFSTFKCYGVSPTKLNDLCFTNVYADSFVIRGDEVRQIAPGQTGKIADYNYKLPDDFTGCVIAWNSNNLDSKVGGNYNYLYRLFRKSNLKPFERDISTEIYQAGSTPCNGVEGFNCYFPLQSYGFQPTNGVGYQPYRVVVLSFELLHAPATVCGPKKSTNLVKNKCVNFNFNGLTGTGVLTESNKKFLPFQQFGRDIADTTDAVRDPQTLEILDITPCSFGGVSVITPGTNTSNQVAVLYQGVNCTEVPVAIHADQLTPTWRVYSTGSNVFQTRAGCLIGAEHVNNSYECDIPIGAGICASYQTQTNSPRRARSVASQSIIAYTMSLGAENSVAYSNNSIAIPTNFTISVTTEILPVSMTKTSVDCTMYICGDSTECSNLLLQYGSFCTQLNRALTGIAVEQDKNTQEVFAQVKQIYKTPPIKDFGGFNFSQILPDPSKPSKRSFIEDLLFNKVTLADAGFIKQYGDCLGDIAARDLICAQKFNGLTVLPPLLTDEMIAQYTSALLAGTITSGWTFGAGAALQIPFAMQMAYRFNGIGVTQCVLYENQKLIANQFNSAIGKIQDSLSSTASALGKLQDVVNQNAQALNTLVKQLSSNFGAISSVLNDILSRLDKVEAEVQIDRLITGRLQSLQTYVTQQLIRAAEIRASANLAATKMSECVLGQSKRVDFCGKGYHLMSFPQSAPHGVVFLHVTYVPAQEKNFTTAPAICHDGKAHFPREGVFVSNGTHWFVTQRNFYEPQIITTDNTFVCGNCDVVIGIVNNTVYDPLQPELDSGGGGSDIDPYKEFGSSYQLLNFLPLDFFPDLNALVDTATALYEEELTGREHCSPHHTAIRQALVCWDELTKLIAWMSSNITSEQVRTIIVNHVNDTWGLKVRQSLWFHLSCLTFGQHTVQEFLVSFGVWIRTPAPYRPPNAPILSTLPEHTVIC

SEQ ID NO: 14114 - protein, 1301 aa, Artificial Sequence
  SARS-CoV-2/Congo/94/2020__EPI_ISL_417947 spike protein (1-1147)(N914C_S1123C) WhcAg construct
MFVFLVLLPLVSSQCVNLTTRTQLPPAYTNSFTRGVYYPDKVFRSSVLHSTQDLFLPFFSNVTWFHAIHVSGTNGTKRFDNPVLPFNDGVYFASTEKSNIIRGWIFGTTLDSKTQSLLIVNNATNVVIKVCEFQFCNDPFLGVYYHKNNKSWMESEFRVYSSANNCTFEYVSQPFLMDLEGKQGNFKNLREFVFKNIDGYFKIYSKHTPINLVRDLPQGFSALEPLVDLPIGINITRFQTLLALHRSYLTPGDSSSGWTAGAAAYYVGYLQPRTFLLKYNENGTITDAVDCALDPLSETKCTLKSFTVEKGIYQTSNFRVQPTESIVRFPNITNLCPFGEVFNATRFASVYAWNRKRISNCVADYSVLYNSASFSTFKCYGVSPTKLNDLCFTNVYADSFVIRGDEVRQIAPGQTGKIADYNYKLPDDFTGCVIAWNSNNLDSKVGGNYNYLYRLFRKSNLKPFERDISTEIYQAGSTPCNGVEGFNCYFPLQSYGFQPTNGVGYQPYRVVVLSFELLHAPATVCGPKKSTNLVKNKCVNFNFNGLTGTGVLTESNKKFLPFQQFGRDIADTTDAVRDPQTLEILDITPCSFGGVSVITPGTNTSNQVAVLYQGVNCTEVPVAIHADQLTPTWRVYSTGSNVFQTRAGCLIGAEHVNNSYECDIPIGAGICASYQTQTNSPRRARSVASQSIIAYTMSLGAENSVAYSNNSIAIPTNFTISVTTEILPVSMTKTSVDCTMYICGDSTECSNLLLQYGSFCTQLNRALTGIAVEQDKNTQEVFAQVKQIYKTPPIKDFGGFNFSQILPDPSKPSKRSFIEDILFNKVTLADAGFIKQYGDCLGDIAARDLICAQKFNGLTVLPPLLTDEMIAQYTSALLAGTITSGWTFGAGAALQIPFAMQMAYRFNGIGVTQCVLYENQKLIANQFNSAIGKIQDSLSSTASALGKLQDVVNQNAQALNTLVKQLSSNFGAISSVLNDILSRLDKVEAEVQIDRLITGRLQSLQTYVTQQLIRAAEIRASANLAATKMSECVLGQSKRVDFCGKGYHLMSFPQSAPHGVVFLHVTYVPAQEKNFTTAPAICHDGKAHFPREGVFVSNGTHWFVTQRNFYEPQIITTDNTFVCGNCDVVIGIVNNTVYDPLQPELDSGGGGSDIDPYKEFGSSYQLLNFLPLDFFPDLNALVDTATALYEEELTGREHCSPHHTAIRQALVCWDELTKLIAWMSSNITSEQVRTIIVNHVNDTWGLKVRQSLWFHLSCLTFGQHTVQEFLVSFGVWIRTPAPYRPPNAPILSTLPEHTVIC

SEQ ID NO: 14115 - protein, 1301 aa, Artificial Sequence
  SARS-CoV-2/Congo/158/2020__EPI_ISL_417950 spike protein (1-1147)(N914C_S1123C) WhcAg construct
MFVFLVLLPLVSSQCVNLTTRTQLPPAYTNSFTRGVYYPDKVFRSSVLHSTQDLFLPFFSNVTWFHAIHVSGTNGTKRFDNPVLPFNDGVYFASTEKSNIIRGWIFGTTLDSKTQSLLIVNNATNVVIKVCEFQFCNDPFLGVYYHKNNKSWMESEFRVYSSANNCTFEYVSQPFLMDLEGKQGNFKNLREFVFKNIDGYFKIYSKHTPINLVRDLPQGFSALEPLVDLPIGINITRFQTLLALHRSYLTPGDSSSGWTAGAAAYYVGYLQPRTFLLKYNENGTITDAVDCALDPLSETKCTLKSFTVEKGIYQTSNFRVQPTESIVRFPNITNLCPFGEVFNATRFASVYAWNRKRISNCVADYSVLYNSASFSTFKCYGVSPTKLNDLCFTNVYADSFVIRGDEVRQIAPGQTGKIADYNYKLPDDFTGCVIAWNSNNLDSKVGGNYNYLYRLFRKSNLKPFERDISTEIYQAGSTPCNGVEGFNCYFPLQSYGFQPTNGVGYQPYRVVVLSFELLHAPATVCGPKKSTNLVKNKCVNFNFNGLTGTGVLTESNKKFLPFQQFGRDIADTTDAVRDPQTLEILDITPCSFGGVSVITPGTNTSNQVAVLYQDVNCTEVPVAIHADQLTPTWRVYSTGSNVFQTRAGCLIGAEHVNNSYECDIPIGAGICASYQTQTNSPRRARSVASQSIIAYTMSLGAENSVAYSNNSIAIPTNFTISVTTEILPVSMTKTSVDCTMYICGDSTECSNLLLQYGSFCTQLNRALTGIAVEQDKNTQEVFAQVKQIYKTPPIKDFGGFNFSQILPDPSKPSKRSFIEDLLFNKVTLADAGFIKQYGDCLGDIAARDLICAQKFNGLTVLPPLLTDEMIAQYTSALLAGTITSGWTFGAGAALQIPFAMQMAYRFNGIGVTQCVLYENQKLIANQFNSAIGKIQDSLSSTASALGKLQDVVNQNAQALNTLVKQLSSNFGAISSVLNDILSRLDKVEAEVQIDRLITGRLQSLQTYVTQQLIRAAEIRASANLAATKMSECVLGQSKRVDFCGKGYHLMSFPQSAPHGVVFLHVTYVPAQEKNFTTAPAICHDGKAHFPREGVFVSNGTHWFVTQRNFYEPQIITTDNTFLCGNCDVVIGIVNNTVYDPLQPELDSGGGGSDIDPYKEFGSSYQLLNFLPLDFFPDLNALVDTATALYEEELTGREHCSPHHTAIRQALVCWDELTKLIAWMSSNITSEQVRTIIVNHVNDTWGLKVRQSLWFHLSCLTFGQHTVQEFLVSFGVWIRTPAPYRPPNAPILSTLPEHTVIC

SEQ ID NO: 14116 - protein, 1301 aa, Artificial Sequence
  SARS-CoV-2/USA/UT-00034/2020__EPI_ISL_417977 spike protein (1-1147)(N914C_S1123C) WhcAg construct
MFVFLVLLPLVSSQCVNLTTRTQLPPAYTNSFTRGVYYPDKVFRSSVLHSTQDLFLPFFSNVTWFHAIHVSGTNGTKRFDNPVLPFNDGVYFASTEKSNIIRGWIFGTTLDSKTQSLLIVNNATNVVIKVCEFQFCNDPFLGVYYYKNNKSWMESEFRVYSSANNCTFEYVSQPFLMDLEGKQGNFKNLREFVFKNIDGYFKIYSKHTPINLVRDLPQGFSALEPLVDLPIGINITRFQTLLALHRSYLTPGDSSSGWTAGAAAYYVGYLQPRTFLLKYNENGTITDAVDCALDPLSETKCTLKSFTVEKGIYQTSNFRVQPTESIVRFPNITNLCPFGEVFNATRFASVYAWNRKRISNCVADYSVLYNSASFSTFKCYGVSPTKLNDLCFTNVYADSFVIRGDEVRQIAPGQTGKIADYNYKLPDDFTGCVIAWNSNNLDSKVGGNYNYLYRLFRKSNLKPFERDISTEIYQAGSTPCNGVEGFNCYFPLQSYGFQPTNGVGYQPYRVVVLSFELLHAPATVCGPKKSTNLVKNKCVNFNFNGLTGTGVLTESNKKFLPFQQFGRDIADTTDAVRDPQTLEILDITPCSFGGVSVITPGTNTSNQVAVLYQGVNCTEVPVAIHADQLTPTWRVYSTGSNVFQTRAGCLIGAEHVNNSYECDIPIGAGICASYQTQTNSPRRARSVASQSIIAYTMSLGAENSVAYSNNSIAIPTNFTISVTTEILPVSMTKTSVDCTMYICGDSTECSNLLLQYGSFCTQLNRALTGIAVEQDKNTQEVFAQVKQIYKTPPIKDFGGFNFSQILPDPSKPSKRSFIEDLLFNKVTLADAGFIKQYGDCLGDIAARDLICAQKFNGLTVLPPLLTDEMIAQYTSALLAGTITSGWTFGAGAALQIPFAMQMAYRFNGIGVTQCVLYENQKLIANQFNSAIGKIQDSLSSTASALGKLQDVVNQNAQALNTLVKQLSSNFGAISSVLNDILSRLDKVEAEVQIDRLITGRLQSLQTYVTQQLIRAAEIRASANLAATKMSECVLGQSKRVDFCGKGYHLMSFPQSAPHGVVFLHVTYVPAQEKNFTTAPAICHDGKAHFPREGVFVSNGTHWFVTQRNFYEPQIITTDNTFVCGNCDVVIGIVNNTVYDPLQPELDSGGGGSDIDPYKEFGSSYQLLNFLPLDFFPDLNALVDTATALYEEELTGREHCSPHHTAIRQALVCWDELTKLIAWMSSNITSEQVRTIIVNHVNDTWGLKVRQSLWFHLSCLTFGQHTVQEFLVSFGVWIRTPAPYRPPNAPILSTLPEHTVIC

SEQ ID NO: 14117 - protein, 1301 aa, Artificial Sequence
  SARS-CoV-2/USA/UT-00033/2020__EPI_ISL_417976 spike protein (1-1147)(N914C_S1123C) WhcAg construct
MFVFLVLLPLVSSQCVNLTTRTQLPPAYTNSFTRGVYYPDKVFRSSVLHSTQDLFLPFFSNVTWFHAIHVSGTNGTKRFDNPVLPFNDGVYFASTEKSNIIRGWIFGTTLDSKTQSLLIVNNATNVVIKVCEFQFCNDPFLGVYYHKNNKSWMESEFRVYSSANNCTFEYVSQPFLMDLEGKQGNFKNLREFVFKNIDGYFKIYSKHTPINLVRDLPQGFSALEPLVDLPIGINITRFQTLLALHRSYLTPGDSSSGLTAGAAAYYVGYLQPRTFLLKYNENGTITDAVDCALDPLSETKCTLKSFTVEKGIYQTSNFRVQPTESIVRFPNITNLCPFGEVFNATRFASVYAWNRKRISNCVADYSVLYNSASFSTFKCYGVSPTKLNDLCFTNVYADSFVIRGDEVRQIAPGQTGKIADYNYKLPDDFTGCVIAWNSNNLDSKVGGNYNYLYRLFRKSNLKPFERDISTEIYQAGSTPCNGVEGFNCYFPLQSYGFQPTNGVGYQPYRVVVLSFELLHAPATVCGPKKSTNLVKNKCVNFNFNGLTGTGVLTESNKKFLPFQQFGRDIADTTDAVRDPQTLEILDITPCSFGGVSVITPGTNTSNQVAVLYQGVNCTEVPVAIHADQLTPTWRVYSTGSNVFQTRAGCLIGAEHVNNSYECDIPIGAGICASYQTQTNSPRRARSVASQSIIAYTMSLGAENSVAYSNNSIAIPTNFTISVTTEILPVSMTKTSVDCTMYICGDSTECSNLLLQYGSFCTQLNRALTGIAVEQDKNTQEVFAQVKQIYKTPPIKDFGGFNFSQILPDPSKPSKRSFIEDLLFNKVTLADAGFIKQYGDCLGDIAARDLICAQKFNGLTVLPPLLTDEMIAQYTSALLAGTITSGWTFGAGAALQIPFAMQMAYRFNGIGVTQCVLYENQKLIANQFNSAIGKIQDSLSSTASALGKLQDVVNQNAQALNTLVKQLSSNFGAISSVLNDILSRLDKVEAEVQIDRLITGRLQSLQTYVTQQLIRAAEIRASANLAATKMSECVLGQSKRVDFCGKGYHLMSFPQSAPHGVVFLHVTYVPAQEKNFTTAPAICHDGKAHFPREGVFVSNGTHWFVTQRNFYEPQIITTDNTFVCGNCDVVIGIVNNTVYDPLQPELDSGGGGSDIDPYKEFGSSYQLLNFLPLDFFPDLNALVDTATALYEEELTGREHCSPHHTAIRQALVCWDELTKLIAWMSSNITSEQVRTIIVNHVNDTWGLKVRQSLWFHLSCLTFGQHTVQEFLVSFGVWIRTPAPYRPPNAPILSTLPEHTVIC

SEQ ID NO: 14118 - protein, 1301 aa, Artificial Sequence
  SARS-CoV-2/USA/WI-13/2020__EPI_ISL_417516 spike protein (1-1147)(N914C_S1123C) WhcAg construct
MFVFLVLLPLVSSQCVNLTTRTQLPPAYTNSFTRGVYYPDKVFRSSVLHSTQDLFLPFFSNVTWFHAIHVSGTNGTKRFDNPVLPFNDGVYFASTEKSNIIRGWIFGTTLDSKTQSLLIVNNATNVVIKVCEFQFCNDPFLGVYYHKNNKSWMESEFRVYSSANNCTFEYVSQPFLMDLEGKQGNFKNLREFVFKNIDGYFKIYSKHTPINLVRDLPQGFSALEPLVDLPIGINITRFQTLLALHRSYLTPGDSSSGWTAGAAAYYVGYLQPRTFLLKYNENGTITDAVDCALDPLSETKCTLKSFTVEKGIYQTSNFRVLPTESIVRFPNITNLCPFGEVFNATRFASVYAWNRKRISNCVADYSVLYNSASFSTFKCYGVSPTKLNDLCFTNVYADSFVIRGDEVRQIAPGQTGKIADYNYKLPDDFTGCVIAWNSNNLDSKVGGNYNYLYRLFRKSNLKPFERDISTEIYQAGSTPCNGVEGFNCYFPLQSYGFQPTNGVGYQPYRVVVLSFELLHAPATVCGPKKSTNLVKNKCVNFNFNGLTGTGVLTESNKKFLPFQQFGRDIADTTDAVRDPQTLEILDITPCSFGGVSVITPGTNTSNQVAVLYQGVNCTEVPVAIHADQLTPTWRVYSTGSNVFQTRAGCLIGAEHVNNSYECDIPIGAGICASYQTQTNSPRRARSVASQSIIAYTMSLGAENSVAYSNNSIAIPTNFTISVTTEILPVSMTKTSVDCTMYICGDSTECSNLLLQYGSFCTQLNRALTGIAVEQDKNTQEVFAQVKQIYKTPPIKDFGGFNFSQILPDPSKPSKRSFIEDLLFNKVTLADAGFIKQYGDCLGDIAARDLICAQKFNGLTVLPPLLTDEMIAQYTSALLAGTITSGWTFGAGAALQIPFAMQMAYRFNGIGVTQCVLYENQKLIANQFNSAIGKIQDSLSSTASALGKLQDVVNQNAQALNTLVKQLSSNFGAISSVLNDILSRLDKVEAEVQIDRLITGRLQSLQTYVTQQLIRAAEIRASANLAATKMSECVLGQSKRVDFCGKGYHLMSFPQSAPHGVVFLHVTYVPAQEKNFTTAPAICHDGKAHFPREGVFVSNGTHWFVTQRNFYEPQIITTDNTFVCGNCDVVIGIVNNTVYDPLQPELDSGGGGSDIDPYKEFGSSYQLLNFLPLDFFPDLNALVDTATALYEEELTGREHCSPHHTAIRQALVCWDELTKLIAWMSSNITSEQVRTIIVNHVNDTWGLKVRQSLWFHLSCLTFGQHTVQEFLVSFGVWIRTPAPYRPPNAPILSTLPEHTVIC

SEQ ID NO: 14119 - protein, 1300 aa, Artificial Sequence
  SARS-CoV-2/India/1-27/2020__EPI_ISL_413522 spike protein (1-1146)(N913C_S1122C) WhcAg construct
MFVFLVLLPLVSSQCVNLTTRTQLPPAYTNSFTRGVYYPDKVFRSSVLHSTQDLFLPFFSNVTWFHAIHVSGTNGTKRFDNPVLPFNDGVYFASTEKSNIIRGWIFGTTLDSKTQSLLIVNNATNVVIKVCEFQFCNDPFLGVYHKNNKSWMESEFRVYSSANNCTFEYVSQPFLMDLEGKQGNFKNLREFVFKNIDGYFKIYSKHTPINLVRDLPQGFSALEPLVDLPIGINITRFQTLLALHRSYLTPGDSSSGWTAGAAAYYVGYLQPRTFLLKYNENGTITDAVDCALDPLSETKCTLKSFTVEKGIYQTSNFRVQPTESIVRFPNITNLCPFGEVFNATRFASVYAWNRKRISNCVADYSVLYNSASFSTFKCYGVSPTKLNDLCFTNVYADSFVIRGDEVIQIAPGQTGKIADYNYKLPDDFTGCVIAWNSNNLDSKVGGNYNYLYRLFRKSNLKPFERDISTEIYQAGSTPCNGVEGFNCYFPLQSYGFQPTNGVGYQPYRVVVLSFELLHAPATVCGPKKSTNLVKNKCVNFNFNGLTGTGVLTESNKKFLPFQQFGRDIADTTDAVRDPQTLEILDITPCSFGGVSVITPGTNTSNQVAVLYQDVNCTEVPVAIHADQLTPTWRVYSTGSNVFQTRAGCLIGAEHVNNSYECDIPIGAGICASYQTQTNSPRRARSVASQSIIAYTMSLGAENSVAYSNNSIAIPTNFTISVTTEILPVSMTKTSVDCTMYICGDSTECSNLLLQYGSFCTQLNRALTGIAVEQDKNTQEVFAQVKQIYKTPPIKDFGGFNFSQILPDPSKPSKRSFIEDLLFNKVTLADAGFIKQYGDCLGDIAARDLICAQKFNGLTVLPPLLTDEMIAQYTSALLAGTITSGWTFGAGAALQIPFAMQMAYRFNGIGVTQCVLYENQKLIANQFNSAIGKIQDSLSSTASALGKLQDVVNQNAQALNTLVKQLSSNFGAISSVLNDILSRLDKVEAEVQIDRLITGRLQSLQTYVTQQLIRAAEIRASANLAATKMSECVLGQSKRVDFCGKGYHLMSFPQSAPHGVVFLHVTYVPAQEKNFTTAPAICHDGKAHFPREGVFVSNGTHWFVTQRNFYEPQIITTDNTFVCGNCDVVIGIVNNTVYDPLQPELDSGGGGSDIDPYKEFGSSYQLLNFLPLDFFPDLNALVDTATALYEEELTGREHCSPHHTAIRQALVCWDELTKLIAWMSSNITSEQVRTIIVNHVNDTWGLKVRQSLWFHLSCLTFGQHTVQEFLVSFGVWIRTPAPYRPPNAPILSTLPEHTVIC

SEQ ID NO: 14120 - protein, 1295 aa, Artificial Sequence
  SARS-CoV-2/pangolin/Guangxi/P4L/2017__EPI_ISL_410538 spike protein (1-1141)(N908C_S1117C) WhcAg construct
MFVFLFVLPLVSSQCVNLTTRTGIPPGYTNSSTRGVYYPDKVFRSSILHLTQDLFLPFFSNVTWFNTINYQGGFKKFDNPVLPFNDGVYFASTEKSNIIRGWIFGTTLDARTQSLLIVNNATNVVIKVCEFQFCTDPFLGVYYHNNNKTWVENEFRVYSSANNCTFEYISQPFLMDLEGKQGNFKNLREFVFKNVDGYFKIYSKHTPIDLVRDLPRGFAALEPLVDLPIGINITRFQTLLALHRSYLTPGNLESGWTTGAAAYYVGYLQQRTFLLSYNQNGTITDAVDCSLDPLSETKCTLKSLTVEKGIYQTSNFRVQPTISIVRFPNITNLCPFGEVFNASKFASVYAWNRKRISNCVADYSVLYNSTSFSTFKCYGVSPTKLNDLCFTNVYADSFVVKGDEVRQIAPGQTGVIADYNYKLPDDFTGCVIAWNSVKQDALTGGNYGYLYRLFRKSKLKPFERDISTEIYQAGSTPCNGQVGLNCYYPLERYGFHPTTGVNYQPFRVVVLSFELLNGPATVCGPKLSTTLVKDKCVNFNFNGLTGTGVLTTSKKQFLPFQQFGRDISDTTDAVRDPQTLEILDITPCSFGGVSVITPGTNTSNQVAVLYQDVNCTEVPMAIHAEQLTPAWRVYSAGANVFQTRAGCLVGAEHVNNSYECDIPVGAGICASYHSMSSLRSVNQRSIIAYTMSLGAENSVAYSNNSIAIPTNFTISVTTEILPVSMTKTSVDCTMYICGDSIECSNLLLQYGSFCTQLNRALTGIAVEQDKNTQEVFAQVKQIYKTPPIKDFGGFNFSQILPDPSKPSKRSFIEDLLFNKVTLADAGFIKQYGDCLGDIAARDLICAQKFNGLTVLPPLLTDEMIAQYTSALLAGTITSGWTFGAGAALQIPFAMQMAYRFNGIGVTQCVLYENQKLIANQFNSAIGKIQDSLSSTASALGKLQDVVNQNAQALNTLVKQLSSNFGAISSVLNDILSRLDKVEAEVQIDRLITGRLQSLQTYVTQQLIRAAEIRASANLAATKMSECVLGQSKRVDFCGKGYHLMSFPQSAPHGVVFLHVTYVPAQEKNFTTAPAICHEGKAHFPREGVFVSNGTHWFITQRNFYEPQIITTDNTFVCGSCDVVIGIVNNTVYDPLQPELDSGGGGSDIDPYKEFGSSYQLLNFLPLDFFPDLNALVDTATALYEEELTGREHCSPHHTAIRQALVCWDELTKLIAWMSSNITSEQVRTIIVNHVNDTWGLKVRQSLWFHLSCLTFGQHTVQEFLVSFGVWIRTPAPYRPPNAPILSTLPEHTVIC

SEQ ID NO: 14121 - protein, 1295 aa, Artificial Sequence
  SARS-CoV-2/pangolin/Guangxi/P5L/2017__EPI_ISL_410540 spike protein (1-1141)(N908C_S1117C) WhcAg construct
MFVFLFVLPLVSSQCVNLTTRTGIPPGYTNSSTRGVYYPDKVFRSSILHLTQDLFLPFFSNVTWFNTINYQGGFKKFDNPVLPFNDGVYFASTEKSNIIRGWIFGTTLDARTQSLLIVNNATNVVIKVCEFQFCTDPFLGVYYHNNNKTWVENEFRVYSSANNCTFEYISQPFLMDLEGKQGNFKNLREFVFKNVDGYFKIYSKHTPIDLVRDLPRGFAALEPLVDLPIGINITRFQTLLALHRSYLTPGKLESGWTTGAAAYYVGYLQQRTFLLSYNQNGTITDAVDCSLDPLSETKCTLKSLTVEKGIYQTSNFRVQPTISIVRFPNITNLCPFGEVFNASKFASVYAWNRKRISNCVADYSVLYNSTSFSTFKCYGVSPTKLNDLCFTNVYADSFVVKGDEVRQIAPGQTGVIADYNYKLPDDFTGCVIAWNSVKQDALTGGNYGYLYRLFRKSKLKPFERDISTEIYQAGSTPCNGQVGLNCYYPLERYGFHPTTGVNYQPFRVVVLSFELLNGPATVCGPKLSTTLVKDKCVNFNFNGLTGTGVLTTSKKQFLPFQQFGRDISDTTDAVRDPQTLEILDITPCSFGGVSVITPGTNTSNQVAVLYQDVNCTEVPMAIHAEQLTPAWRVYSAGANVFQTRAGCLVGAEHVNNSYECDIPVGAGICASYHSMSSFRSVNQRSIIAYTMSLGAENSVAYSNNSIAIPTNFTISVTTEILPVSMTKTSVDCTMYICGDSIECSNLLLQYGSFCTQLNRALTGIAVEQDKNTQEVFAQVKQIYKTPPIKDFGGFNFSQILPDPSKPSKRSFIEDLLFNKVTLADAGFIKQYGDCLGDIAARDLICAQKFNGLTVLPPLLTDEMIAQYTSALLAGTITSGWTFGAGAALQIPFAMQMAYRFNGIGVTQCVLYENQKLIANQFNSAIGKIQDSLSSTASALGKLQDVVNQNAQALNTLVKQLSSNFGAISSVLNDILSRLDKVEAEVQIDRLITGRLQSLQTYVTQQLIRAAEIRASANLAATKMSECVLGQSKRVDFCGKGYHLMSFPQSAPHGVVFLHVTYVPAQEKNFTTAPAICHEGKAHFPREGVFVSNGTHWFITQRNFYEPQIITTDNTFVCGSCDVVIGIVNNTVYDPLQPELDSGGGGSDIDPYKEFGSSYQLLNFLPLDFFPDLNALVDTATALYEEELTGREHCSPHHTAIRQALVCWDELTKLIAWMSSNITSEQVRTIIVNHVNDTWGLKVRQSLWFHLSCLTFGQHTVQEFLVSFGVWIRTPAPYRPPNAPILSTLPEHTVIC

SEQ ID NO: 14122 - protein, 1295 aa, Artificial Sequence
  SARS-CoV-2/pangolin/Guangxi/P5E/2017__EPI_ISL_410541 spike protein (1-1141)(N908C_S1117C) WhcAg construct
MFVFLFVLPLVSSQCVNLTTRTGIPPGYTNSSTRGVYYPDKVFRSSILHLTQDLFLPFFSNVTWFNTITYQGGSKKFDNPVLPFNDGVYFASTEKSNIIRGWIFGTTLDARTQSLLIVNNATNVVIKVCEFQFCTDPFLGVYYHNNNKTWVENEFRVYSSANNCTFEYISQPFLMDLEGKQGNFKNLREFVFKNVDGYFKIYSKHTPIDLVRDLPRGFAALEPLVDLPIGINITRFQTLLALHRSYLTPGKLESGWTTGAAAYYVGYLQQRTFLLSYNQNGTITDAVDCSLDPLSETKCTLKSLTVEKGIYQTSNFRVQPTISIVRFPNITNLCPFGEVFNASKFASVYAWNRKRISNCVADYSVLYNSTSFSTFKCYGVSPTKLNDLCFTNVYADSFVVKGDEVRQIAPGQTGVIADYNYKLPDDFTGCVIAWNSVKQDALTGDNYGYLYRLFRKSKLKPFERDISTEIYQAGSTPCNGQVGLNCYYPLERYGFHPTTGVNYQPFRVVVLSFELLNGPATVCGPKLSTTLVKDKCVNFNFNGLTGTGVLTTSKKQFLPFQQFGRDISDTTDAVRDPQTLEILDITPCSFGGVSVITPGTNTSNQVAVLYQDVNCTEVPMAIHAEQLTPAWRVYSAGANVFQTRAGCLVGAEHVNNSYECDIPVGAGICASYHSMSSFRSVNQRSIIAYTMSLGAENSVAYSNNSIAIPTNFTISVTTEILPVSMTKTSVDCTMYICGDSIECSNLLLQYGSFCTQLNRALTGIAVEQDKNTQEVFAQVKQIYKTPPIKDFGGFNFSQILPDPSKPSKRSFIEDLLFNKVTLADAGFIKQYGDCLGDIAARDLICAQKFNGLTVLPPLLTDEMIAQYTSALLAGTITSGWTFGAGAALQIPFAMQMAYRFNGIGVTQCVLYENQKLIANQFNSAIGKIQDSLSSTASALGKLQDVVNQNAQALNTLVKQLSSNFGAISSVLNDILSRLDKVEAEVQIDRLITGRLQSLQTYVTQQLIRAAEIRASANLAATKMSECVLGQSKRVDFCGKGYHLMSFPQSAPHGVVFLHVTYVPAQEKNFTTAPAICHEGKAHFPREGVFVSNGTHWFITQRNFYEPQIITTDNTFVCGSCDVVIGIVNNTVYDPLQPELDSGGGGSDIDPYKEFGSSYQLLNFLPLDFFPDLNALVDTATALYEEELTGREHCSPHHTAIRQALVCWDELTKLIAWMSSNITSEQVRTIIVNHVNDTWGLKVRQSLWFHLSCLTFGQHTVQEFLVSFGVWIRTPAPYRPPNAPILSTLPEHTVIC

SEQ ID NO: 14123 - protein, 1293 aa, Artificial Sequence
  SARS-CoV-2/pangolin/Guangxi/P1E/2017__EPI_ISL_410539 spike protein (1-1139)(N906C_S1115C) WhcAg construct
MFVFLFVLPLVSSQCVNLTTRTGIQPGYTNSSTRGVYYPDKVFRSSILHLTQDLFLPFFSNVTWFNTINYQGGFKKFDNPVLPFNDGVYFASTEKSNIIRGWIFGTTLDARTQSLLIVNNATNVVIKVCEFQFCTDPFLGVYYHNNNKTWVENEFRVYSSANNCTFEYISQPFLMDLEGKQGNFKNLREFVFKNVDGYFKIYSKHTPIDLVRDLPRGFAALEPLVDLPIGINITRFQTLLALHRSYLTPGKLESGWTTGAAAYYVGYLQQRTFLLSYNQNGTITDAVDCSLDPLSETKCTLKSLTVEKGIYQTSNFRVQPTISIVRFPNITNLCPFGEVFNASKFASVYAWNRKRISNCVADYSVLYNSTSFSTFKCYGVSPTKLNDLCFTNVYADSFVVKGDEVRQIAPGQTGVIADYNYKLPDDFTGCVIAWNSVKQDALTGGNYLYRLFRKSKLKPFERDISTEIYQAGSTPCNGQVGLNCYYPLERYGFHPTTGVNYQPFRVVVLSFELLNGPATVCGPKLSTTLVKDKCVNFNFNGLTGTGVLTTSKKQFLPFQQFGRDISDTTDAVRDPQTLEILDITPCSFGGVSVITPGTNTSNQVAVLYQDVNCTEVPMAIHAEQLTPAWRVYSAGANVFQTRAGCLVGAEHVNNSYECDIPVGAGICASYHSMSSLRSVNQRSIIAYTMSLGAENSVAYSNNSIAIPTNFTISVTTEILPVSMTKTSVDCTMYICGDSIECSNLLLQYGSFCTQLNRALTGIAVEQDKNTQEVFAQVKQIYKTPPIKDFGGFNFSQILPDPSKPSKRSFIEDLLFNKVTLADAGFIKQYGDCLGDIAARDLICAQKFNGLTVLPPLLTDEMIAQYTSALLAGTITSGWTFGAGAALQIPFAMQMAYRFNGIGVTQCVLYENQKLIANQFNSAIGKIQDSLSSTASALGKLQDVVNQNAQALNTLVKQLSSNFGAISSVLNDILSRLDKVEAEVQIDRLITGRLQSLQTYVTQQLIRAAEIRASANLAATKMSECVLGQSKRVDFCGKGYHLMSFPQSAPHGVVFLHVTYVPAQEKNFTTAPAICHEGKAHFPREGVFVSNGTHWFITQRNFYEPQIITTDNTFVCGSCDVVIGIVNNTVYDPLQPELDSGGGGSDIDPYKEFGSSYQLLNFLPLDFFPDLNALVDTATALYEEELTGREHCSPHHTAIRQALVCWDELTKLIAWMSSNITSEQVRTIIVNHVNDTWGLKVRQSLWFHLSCLTFGQHTVQEFLVSFGVWIRTPAPYRPPNAPILSTLPEHTVIC

SEQ ID NO: 14124 - RNA, 3822 nt, Artificial Sequence
  SARS-CoV-2/Wuhan/WIV05/2019__EPI_ISL_402128 spike protein CDS gc (1-1273)(N914C_S1123C)
auguucguguuccugguccuccugccccuggugagcucccagugcgugaaccucaccacccgcacgcagcugccgcccgccuacaccaacagcuucacccggggcgucuacuaccccgacaagguguuccgcuccagcgugcugcacuccacccaggaccucuuccugcccuucuucagcaacgucacgugguuccacgccauccacguguccgggaccaacggcaccaagcgguucgacaacccggugcugcccuucaacgacggggucuacuucgcgagcaccgagaaguccaacaucauccgcggcuggaucuucgggacgacccucgacagcaagacccagucccugcugaucgugaacaacgccaccaacguggucaucaaggugugcgaguuccaguucugcaacgaccccuuccucggcguguacuaccacaagaacaacaagagcuggauggaguccgaguuccgggucuacagcuccgccaacaacugcacguucgaguacgugagccagcccuuccugauggaccuggagggcaagcaggggaacuucaagaaccuccgcgaguucguguucaagaacaucgacggcuacuucaagaucuacuccaagcacaccccgaucaaccugguccgggaccugccccagggguucagcgcccucgagccccugguggaccugcccaucggcaucaacaucacccgcuuccagacccuccuggcccugcaccgguccuaccucacgccgggggacagcagcuccggcuggaccgcgggcgccgccgccuacuacgugggguaccugcagccccgcaccuuccugcucaaguacaacgagaacggcaccaucacggacgcggucgacugcgcccuggacccccugagcgagaccaagugcacccucaaguccuucaccguggagaaggggaucuaccagacgagcaacuuccgggugcagcccaccgaguccaucguccgcuucccgaacaucaccaaccugugccccuucggcgagguguucaacgccacccgguucgccagcgucuacgccuggaaccgcaagcggaucuccaacugcguggcggacuacagcgugcuguacaacuccgccagcuucuccacguucaagugcuacggcgucagccccaccaagcucaacgaccugugcuucaccaacguguacgccgacuccuucgugauccgcggggacgagguccggcagaucgcccccggccagaccgggaagaucgccgacuacaacuacaagcugccggacgacuucacgggcugcgugaucgcguggaacagcaacaaccucgacuccaaggucgggggcaacuacaacuaccuguaccgccuguuccgcaagagcaaccucaagcccuucgagcgggacaucuccaccgagaucuaccaggccggcagcacccccugcaacgggguggagggcuucaacugcuacuucccccugcaguccuacggguuccagccgaccaacggcgugggguaccagcccuaccggguggucgugcugagcuucgagcuccugcacgcccccgccacggugugcggccccaagaaguccaccaaccuggucaagaacaagugcgugaacuucaacuucaacggccucaccgggaccggcgugcugaccgagagcaacaagaaguuccugccguuccagcaguucgggcgcgacaucgccgacacgaccgacgcgguccgcgacccccagacccuggagauccucgacaucacccccugcagcuucggcgggguguccgugaucacgccgggcaccaacaccagcaaccaggucgccgugcuguaccaggacgugaacugcaccgagguccccguggccauccacgccgaccagcugacgcccaccuggcggguguacuccaccggcagcaacgucuuccagacccgcgccgggugccucaucggcgcggagcacgugaacaacuccuacgagugcgacauccccaucggggccggcaucugcgccagcuaccagacgcagaccaacuccccgcggcgcgcccggagcguggcgucccagagcaucaucgccuacaccaugucccugggcgccgagaacagcgucgccuacuccaacaacagcaucgccauccccaccaacuucacgaucuccgugaccaccgagauccugcccgugagcaugaccaagacgagcgucgacugcaccauguacaucugcggggacuccaccgagugcagcaaccuccugcugcaguacggcuccuucugcacccagcucaaccgcgcgcugacggggaucgccguggagcaggacaagaacacccaggagguguucgcccaggucaagcagaucuacaagacgcccccgaucaaggacuucggcggguucaacuucagccagauccugcccgaccccuccaagcccagcaagcgguccuucaucgaggaccuccuguucaacaaggugacccuggccgacgccggcuucaucaagcaguacggcgacugccucggggacaucgcggcccgcgaccugaucugcgcccagaaguucaacggccugaccgugcucccgccccugcugaccgacgagaugaucgcccaguacaccagcgcccuccuggcggggaccaucacguccggcuggaccuucggggccggcgccgcccugcagauccccuucgcgaugcagauggccuaccgguucaacggcaucggggucacccagugcgugcucuacgagaaccagaagcugaucgccaaccaguucaacagcgccaucggcaagauccaggacucccugagcuccaccgccagcgcgcucgggaagcugcaggacguggucaaccagaacgcccaggcccugaacacgcucgugaagcagcuguccagcaacuucggcgccaucuccagcgugcugaacgacauccucucccgccuggacaaggucgaggccgaggugcagaucgaccggcugaucaccgggcgccuccagagccugcagaccuacgugacccagcagcugauccgggcggccgagauccgcgccagcgccaaccucgccgcgaccaagauguccgagugcguccugggccagagcaagcggguggacuucugcggcaagggguaccaccugauguccuucccccagagcgccccgcacggcguggucuuccuccacgugacguacguccccgcccaggagaagaacuucaccaccgcccccgcgaucugccacgacgggaaggcccacuucccccgcgagggcguguucguguccaacgggacccacugguucgucacgcagcggaacuucuacgagccgcagaucaucaccaccgacaacaccuucgugugcggcaacugcgacguggucaucggcaucgugaacaacacgguguacgacccccugcagcccgagcuggacuccuucaaggaggagcucgacaaguacuucaagaaccacaccagccccgacgucgaccugggggacaucuccggcaucaacgccagcguggugaacauccagaaggagaucgaccgccugaacgaggucgccaagaaccucaacgagucccugaucgaccugcaggagcucgggaaguacgagcaguacaucaaguggccgugguacaucuggcugggcuucaucgccggccugaucgcgaucgugauggugaccaucaugcucugcugcaugaccagcugcugcuccugccugaaggggugcugcagcugcggcuccugcugcaaguucgacgaggacgacagcgagcccguccugaagggggugaagcuccacuacacguga

SEQ ID NO: 14125 - RNA, 4116 nt, Artificial Sequence
  SARS-CoV-2/Wuhan/WIV05/2019__EPI_ISL_402128 spike protein CDS gc (1-1211)(N914C_S1123C) LumSynth construct
auguucguguuccugguccuccugccccuggugagcucccagugcgugaaccucaccacccgcacgcagcugccgcccgccuacaccaacagcuucacccggggcgucuacuaccccgacaagguguuccgcuccagcgugcugcacuccacccaggaccucuuccugcccuucuucagcaacgucacgugguuccacgccauccacguguccgggaccaacggcaccaagcgguucgacaacccggugcugcccuucaacgacggggucuacuucgcgagcaccgagaaguccaacaucauccgcggcuggaucuucgggacgacccucgacagcaagacccagucccugcugaucgugaacaacgccaccaacguggucaucaaggugugcgaguuccaguucugcaacgaccccuuccucggcguguacuaccacaagaacaacaagagcuggauggaguccgaguuccgggucuacagcuccgccaacaacugcacguucgaguacgugagccagcccuuccugauggaccuggagggcaagcaggggaacuucaagaaccuccgcgaguucguguucaagaacaucgacggcuacuucaagaucuacuccaagcacaccccgaucaaccugguccgggaccugccccagggguucagcgcccucgagccccugguggaccugcccaucggcaucaacaucacccgcuuccagacccuccuggcccugcaccgguccuaccucacgccgggggacagcagcuccggcuggaccgcgggcgccgccgccuacuacgugggguaccugcagccccgcaccuuccugcucaaguacaacgagaacggcaccaucacggacgcggucgacugcgcccuggacccccugagcgagaccaagugcacccucaaguccuucaccguggagaaggggaucuaccagacgagcaacuuccgggugcagcccaccgaguccaucguccgcuucccgaacaucaccaaccugugccccuucggcgagguguucaacgccacccgguucgccagcgucuacgccuggaaccgcaagcggaucuccaacugcguggcggacuacagcgugcuguacaacuccgccagcuucuccacguucaagugcuacggcgucagccccaccaagcucaacgaccugugcuucaccaacguguacgccgacuccuucgugauccgcggggacgagguccggcagaucgcccccggccagaccgggaagaucgccgacuacaacuacaagcugccggacgacuucacgggcugcgugaucgcguggaacagcaacaaccucgacuccaaggucgggggcaacuacaacuaccuguaccgccuguuccgcaagagcaaccucaagcccuucgagcgggacaucuccaccgagaucuaccaggccggcagcacccccugcaacgggguggagggcuucaacugcuacuucccccugcaguccuacggguuccagccgaccaacggcgugggguaccagcccuaccggguggucgugcugagcuucgagcuccugcacgcccccgccacggugugcggccccaagaaguccaccaaccuggucaagaacaagugcgugaacuucaacuucaacggccucaccgggaccggcgugcugaccgagagcaacaagaaguuccugccguuccagcaguucgggcgcgacaucgccgacacgaccgacgcgguccgcgacccccagacccuggagauccucgacaucacccccugcagcuucggcgggguguccgugaucacgccgggcaccaacaccagcaaccaggucgccgugcuguaccaggacgugaacugcaccgagguccccguggccauccacgccgaccagcugacgcccaccuggcggguguacuccaccggcagcaacgucuuccagacccgcgccgggugccucaucggcgcggagcacgugaacaacuccuacgagugcgacauccccaucggggccggcaucugcgccagcuaccagacgcagaccaacuccccgcggcgcgcccggagcguggcgucccagagcaucaucgccuacaccaugucccugggcgccgagaacagcgucgccuacuccaacaacagcaucgccauccccaccaacuucacgaucuccgugaccaccgagauccugcccgugagcaugaccaagacgagcgucgacugcaccauguacaucugcggggacuccaccgagugcagcaaccuccugcugcaguacggcuccuucugcacccagcucaaccgcgcgcugacggggaucgccguggagcaggacaagaacacccaggagguguucgcccaggucaagcagaucuacaagacgcccccgaucaaggacuucggcggguucaacuucagccagauccugcccgaccccuccaagcccagcaagcgguccuucaucgaggaccuccuguucaacaaggugacccuggccgacgccggcuucaucaagcaguacggcgacugccucggggacaucgcggcccgcgaccugaucugcgcccagaaguucaacggccugaccgugcucccgccccugcugaccgacgagaugaucgcccaguacaccagcgcccuccuggcggggaccaucacguccggcuggaccuucggggccggcgccgcccugcagauccccuucgcgaugcagauggccuaccgguucaacggcaucggggucacccagugcgugcucuacgagaaccagaagcugaucgccaaccaguucaacagcgccaucggcaagauccaggacucccugagcuccaccgccagcgcgcucgggaagcugcaggacguggucaaccagaacgcccaggcccugaacacgcucgugaagcagcuguccagcaacuucggcgccaucuccagcgugcugaacgacauccucucccgccuggacaaggucgaggccgaggugcagaucgaccggcugaucaccgggcgccuccagagccugcagaccuacgugacccagcagcugauccgggcggccgagauccgcgccagcgccaaccucgccgcgaccaagauguccgagugcguccugggccagagcaagcggguggacuucugcggcaagggguaccaccugauguccuucccccagagcgccccgcacggcguggucuuccuccacgugacguacguccccgcccaggagaagaacuucaccaccgcccccgcgaucugccacgacgggaaggcccacuucccccgcgagggcguguucguguccaacgggacccacugguucgucacgcagcggaacuucuacgagccgcagaucaucaccaccgacaacaccuucgugugcggcaacugcgacguggucaucggcaucgugaacaacacgguguacgacccccugcagcccgagcuggacuccuucaaggaggagcucgacaaguacuucaagaaccacaccagccccgacgucgaccugggggacaucuccggcaucaacgccagcguggugaacauccagaaggagaucgaccgccugaacgaggucgccaagaaccucaacgagucccugaucgaccugcaggagcucgggaaguacgagcaguacaucaagggcggcgggagcgggggcgggcagaucuacgagggcaagcugaccgccgaggggcuccgcuucggcaucguggccagccgguucaaccacgcgcuggucgaccgccugguggagggggccaucgacgccaucgugcggcacggcgggcgcgaggaggacaucacccucguccgggugcccggcuccugggagaucccgguggccgccggcgagcuggcccgcaaggaggacaucgacgcggucaucgccaucggggugcugauccggggcgccacgccccacuucgacuacaucgccagcgagguguccaaggggcucgcggaccugagccuggagcuccgcaagcccaucaccuucggcgucaucaccgccgacacccuggagcaggccaucgagcgggccgggacgaagcacggcaacaagggcugggaggccgcgcuguccgccaucgagauggccaaccucuucaagagccugcgcuga

SEQ ID NO: 14126 - RNA, 4140 nt, Artificial Sequence
  SARS-CoV-2/Wuhan/WIV05/2019__EPI_ISL_402128 spike protein CDS gc (1-1211)(N914C_S1123C) Ferritin construct
auguucguguuccugguccuccugccccuggugagcucccagugcgugaaccucaccacccgcacgcagcugccgcccgccuacaccaacagcuucacccggggcgucuacuaccccgacaagguguuccgcuccagcgugcugcacuccacccaggaccucuuccugcccuucuucagcaacgucacgugguuccacgccauccacguguccgggaccaacggcaccaagcgguucgacaacccggugcugcccuucaacgacggggucuacuucgcgagcaccgagaaguccaacaucauccgcggcuggaucuucgggacgacccucgacagcaagacccagucccugcugaucgugaacaacgccaccaacguggucaucaaggugugcgaguuccaguucugcaacgaccccuuccucggcguguacuaccacaagaacaacaagagcuggauggaguccgaguuccgggucuacagcuccgccaacaacugcacguucgaguacgugagccagcccuuccugauggaccuggagggcaagcaggggaacuucaagaaccuccgcgaguucguguucaagaacaucgacggcuacuucaagaucuacuccaagcacaccccgaucaaccugguccgggaccugccccagggguucagcgcccucgagccccugguggaccugcccaucggcaucaacaucacccgcuuccagacccuccuggcccugcaccgguccuaccucacgccgggggacagcagcuccggcuggaccgcgggcgccgccgccuacuacgugggguaccugcagccccgcaccuuccugcucaaguacaacgagaacggcaccaucacggacgcggucgacugcgcccuggacccccugagcgagaccaagugcacccucaaguccuucaccguggagaaggggaucuaccagacgagcaacuuccgggugcagcccaccgaguccaucguccgcuucccgaacaucaccaaccugugccccuucggcgagguguucaacgccacccgguucgccagcgucuacgccuggaaccgcaagcggaucuccaacugcguggcggacuacagcgugcuguacaacuccgccagcuucuccacguucaagugcuacggcgucagccccaccaagcucaacgaccugugcuucaccaacguguacgccgacuccuucgugauccgcggggacgagguccggcagaucgcccccggccagaccgggaagaucgccgacuacaacuacaagcugccggacgacuucacgggcugcgugaucgcguggaacagcaacaaccucgacuccaaggucgggggcaacuacaacuaccuguaccgccuguuccgcaagagcaaccucaagcccuucgagcgggacaucuccaccgagaucuaccaggccggcagcacccccugcaacgggguggagggcuucaacugcuacuucccccugcaguccuacggguuccagccgaccaacggcgugggguaccagcccuaccggguggucgugcugagcuucgagcuccugcacgcccccgccacggugugcggccccaagaaguccaccaaccuggucaagaacaagugcgugaacuucaacuucaacggccucaccgggaccggcgugcugaccgagagcaacaagaaguuccugccguuccagcaguucgggcgcgacaucgccgacacgaccgacgcgguccgcgacccccagacccuggagauccucgacaucacccccugcagcuucggcgggguguccgugaucacgccgggcaccaacaccagcaaccaggucgccgugcuguaccaggacgugaacugcaccgagguccccguggccauccacgccgaccagcugacgcccaccuggcggguguacuccaccggcagcaacgucuuccagacccgcgccgggugccucaucggcgcggagcacgugaacaacuccuacgagugcgacauccccaucggggccggcaucugcgccagcuaccagacgcagaccaacuccccgcggcgcgcccggagcguggcgucccagagcaucaucgccuacaccaugucccugggcgccgagaacagcgucgccuacuccaacaacagcaucgccauccccaccaacuucacgaucuccgugaccaccgagauccugcccgugagcaugaccaagacgagcgucgacugcaccauguacaucugcggggacuccaccgagugcagcaaccuccugcugcaguacggcuccuucugcacccagcucaaccgcgcgcugacggggaucgccguggagcaggacaagaacacccaggagguguucgcccaggucaagcagaucuacaagacgcccccgaucaaggacuucggcggguucaacuucagccagauccugcccgaccccuccaagcccagcaagcgguccuucaucgaggaccuccuguucaacaaggugacccuggccgacgccggcuucaucaagcaguacggcgacugccucggggacaucgcggcccgcgaccugaucugcgcccagaaguucaacggccugaccgugcucccgccccugcugaccgacgagaugaucgcccaguacaccagcgcccuccuggcggggaccaucacguccggcuggaccuucggggccggcgccgcccugcagauccccuucgcgaugcagauggccuaccgguucaacggcaucggggucacccagugcgugcucuacgagaaccagaagcugaucgccaaccaguucaacagcgccaucggcaagauccaggacucccugagcuccaccgccagcgcgcucgggaagcugcaggacguggucaaccagaacgcccaggcccugaacacgcucgugaagcagcuguccagcaacuucggcgccaucuccagcgugcugaacgacauccucucccgccuggacaaggucgaggccgaggugcagaucgaccggcugaucaccgggcgccuccagagccugcagaccuacgugacccagcagcugauccgggcggccgagauccgcgccagcgccaaccucgccgcgaccaagauguccgagugcguccugggccagagcaagcggguggacuucugcggcaagggguaccaccugauguccuucccccagagcgccccgcacggcguggucuuccuccacgugacguacguccccgcccaggagaagaacuucaccaccgcccccgcgaucugccacgacgggaaggcccacuucccccgcgagggcguguucguguccaacgggacccacugguucgucacgcagcggaacuucuacgagccgcagaucaucaccaccgacaacaccuucgugugcggcaacugcgacguggucaucggcaucgugaacaacacgguguacgacccccugcagcccgagcuggacuccuucaaggaggagcucgacaaguacuucaagaaccacaccagccccgacgucgaccugggggacaucuccggcaucaacgccagcguggugaacauccagaaggagaucgaccgccugaacgaggucgccaagaaccucaacgagucccugaucgaccugcaggagcucgggaaguacgagcaguacaucaagggcgggggcgggagcgacaucaucaagcuccugaacgagcaggucaacaaggagaugcaguccagcaaccuguacauguccaugagcuccuggugcuacacccacagccucgacggcgccgggcuguuccuguucgaccacgccgcggaggaguacgagcacgccaagaagcucaucaucuuccugaacgagaacaacgugcccgugcagcugaccuccaucagcgccccggagcacaaguucgagggccucacgcagaucuuccagaaggccuacgagcacgagcagcacaucuccgagagcaucaacaacaucguggaccacgccaucaaguccaaggaccacgcgaccuucaacuuccugcagugguacgucgccgagcagcacgaggaggaggugcuguucaaggacauccucgacaagaucgagcugaucgggaacgagaaccacggccuguaccucgccgaccaguacgugaaggggaucgccaagagccgcaaguccuga

SEQ ID NO: 14127 - RNA, 3726 nt, Artificial Sequence
  SARS-CoV-2/Wuhan/WIV05/2019__EPI_ISL_402128 spike protein CDS gc (1-1211)(N914C_S1123C) Foldon construct
auguucguguuccugguccuccugccccuggugagcucccagugcgugaaccucaccacccgcacgcagcugccgcccgccuacaccaacagcuucacccggggcgucuacuaccccgacaagguguuccgcuccagcgugcugcacuccacccaggaccucuuccugcccuucuucagcaacgucacgugguuccacgccauccacguguccgggaccaacggcaccaagcgguucgacaacccggugcugcccuucaacgacggggucuacuucgcgagcaccgagaaguccaacaucauccgcggcuggaucuucgggacgacccucgacagcaagacccagucccugcugaucgugaacaacgccaccaacguggucaucaaggugugcgaguuccaguucugcaacgaccccuuccucggcguguacuaccacaagaacaacaagagcuggauggaguccgaguuccgggucuacagcuccgccaacaacugcacguucgaguacgugagccagcccuuccugauggaccuggagggcaagcaggggaacuucaagaaccuccgcgaguucguguucaagaacaucgacggcuacuucaagaucuacuccaagcacaccccgaucaaccugguccgggaccugccccagggguucagcgcccucgagccccugguggaccugcccaucggcaucaacaucacccgcuuccagacccuccuggcccugcaccgguccuaccucacgccgggggacagcagcuccggcuggaccgcgggcgccgccgccuacuacgugggguaccugcagccccgcaccuuccugcucaaguacaacgagaacggcaccaucacggacgcggucgacugcgcccuggacccccugagcgagaccaagugcacccucaaguccuucaccguggagaaggggaucuaccagacgagcaacuuccgggugcagcccaccgaguccaucguccgcuucccgaacaucaccaaccugugccccuucggcgagguguucaacgccacccgguucgccagcgucuacgccuggaaccgcaagcggaucuccaacugcguggcggacuacagcgugcuguacaacuccgccagcuucuccacguucaagugcuacggcgucagccccaccaagcucaacgaccugugcuucaccaacguguacgccgacuccuucgugauccgcggggacgagguccggcagaucgcccccggccagaccgggaagaucgccgacuacaacuacaagcugccggacgacuucacgggcugcgugaucgcguggaacagcaacaaccucgacuccaaggucgggggcaacuacaacuaccuguaccgccuguuccgcaagagcaaccucaagcccuucgagcgggacaucuccaccgagaucuaccaggccggcagcacccccugcaacgggguggagggcuucaacugcuacuucccccugcaguccuacggguuccagccgaccaacggcgugggguaccagcccuaccggguggucgugcugagcuucgagcuccugcacgcccccgccacggugugcggccccaagaaguccaccaaccuggucaagaacaagugcgugaacuucaacuucaacggccucaccgggaccggcgugcugaccgagagcaacaagaaguuccugccguuccagcaguucgggcgcgacaucgccgacacgaccgacgcgguccgcgacccccagacccuggagauccucgacaucacccccugcagcuucggcgggguguccgugaucacgccgggcaccaacaccagcaaccaggucgccgugcuguaccaggacgugaacugcaccgagguccccguggccauccacgccgaccagcugacgcccaccuggcggguguacuccaccggcagcaacgucuuccagacccgcgccgggugccucaucggcgcggagcacgugaacaacuccuacgagugcgacauccccaucggggccggcaucugcgccagcuaccagacgcagaccaacuccccgcggcgcgcccggagcguggcgucccagagcaucaucgccuacaccaugucccugggcgccgagaacagcgucgccuacuccaacaacagcaucgccauccccaccaacuucacgaucuccgugaccaccgagauccugcccgugagcaugaccaagacgagcgucgacugcaccauguacaucugcggggacuccaccgagugcagcaaccuccugcugcaguacggcuccuucugcacccagcucaaccgcgcgcugacggggaucgccguggagcaggacaagaacacccaggagguguucgcccaggucaagcagaucuacaagacgcccccgaucaaggacuucggcggguucaacuucagccagauccugcccgaccccuccaagcccagcaagcgguccuucaucgaggaccuccuguucaacaaggugacccuggccgacgccggcuucaucaagcaguacggcgacugccucggggacaucgcggcccgcgaccugaucugcgcccagaaguucaacggccugaccgugcucccgccccugcugaccgacgagaugaucgcccaguacaccagcgcccuccuggcggggaccaucacguccggcuggaccuucggggccggcgccgcccugcagauccccuucgcgaugcagauggccuaccgguucaacggcaucggggucacccagugcgugcucuacgagaaccagaagcugaucgccaaccaguucaacagcgccaucggcaagauccaggacucccugagcuccaccgccagcgcgcucgggaagcugcaggacguggucaaccagaacgcccaggcccugaacacgcucgugaagcagcuguccagcaacuucggcgccaucuccagcgugcugaacgacauccucucccgccuggacaaggucgaggccgaggugcagaucgaccggcugaucaccgggcgccuccagagccugcagaccuacgugacccagcagcugauccgggcggccgagauccgcgccagcgccaaccucgccgcgaccaagauguccgagugcguccugggccagagcaagcggguggacuucugcggcaagggguaccaccugauguccuucccccagagcgccccgcacggcguggucuuccuccacgugacguacguccccgcccaggagaagaacuucaccaccgcccccgcgaucugccacgacgggaaggcccacuucccccgcgagggcguguucguguccaacgggacccacugguucgucacgcagcggaacuucuacgagccgcagaucaucaccaccgacaacaccuucgugugcggcaacugcgacguggucaucggcaucgugaacaacacgguguacgacccccugcagcccgagcuggacuccuucaaggaggagcucgacaaguacuucaagaaccacaccagccccgacgucgaccugggggacaucuccggcaucaacgccagcguggugaacauccagaaggagaucgaccgccugaacgaggucgccaagaaccucaacgagucccugaucgaccugcaggagcucgggaaguacgagcaguacaucaagggcgggagcggcuacauccccgaggccccgcgcgacgggcaggccuacgugcggaaggacggcgaguggguccugcucagcaccuuccuguga

SEQ ID NO: 14128 - RNA, 4098 nt, Artificial Sequence
  SARS-CoV-2/Wuhan/WIV05/2019__EPI_ISL_402128 spike protein CDS gc (1-1211)(N914C_S1123C) WhcAg construct
auguucguguuccugguccuccugccccuggugagcucccagugcgugaaccucaccacccgcacgcagcugccgcccgccuacaccaacagcuucacccggggcgucuacuaccccgacaagguguuccgcuccagcgugcugcacuccacccaggaccucuuccugcccuucuucagcaacgucacgugguuccacgccauccacguguccgggaccaacggcaccaagcgguucgacaacccggugcugcccuucaacgacggggucuacuucgcgagcaccgagaaguccaacaucauccgcggcuggaucuucgggacgacccucgacagcaagacccagucccugcugaucgugaacaacgccaccaacguggucaucaaggugugcgaguuccaguucugcaacgaccccuuccucggcguguacuaccacaagaacaacaagagcuggauggaguccgaguuccgggucuacagcuccgccaacaacugcacguucgaguacgugagccagcccuuccugauggaccuggagggcaagcaggggaacuucaagaaccuccgcgaguucguguucaagaacaucgacggcuacuucaagaucuacuccaagcacaccccgaucaaccugguccgggaccugccccagggguucagcgcccucgagccccugguggaccugcccaucggcaucaacaucacccgcuuccagacccuccuggcccugcaccgguccuaccucacgccgggggacagcagcuccggcuggaccgcgggcgccgccgccuacuacgugggguaccugcagccccgcaccuuccugcucaaguacaacgagaacggcaccaucacggacgcggucgacugcgcccuggacccccugagcgagaccaagugcacccucaaguccuucaccguggagaaggggaucuaccagacgagcaacuuccgggugcagcccaccgaguccaucguccgcuucccgaacaucaccaaccugugccccuucggcgagguguucaacgccacccgguucgccagcgucuacgccuggaaccgcaagcggaucuccaacugcguggcggacuacagcgugcuguacaacuccgccagcuucuccacguucaagugcuacggcgucagccccaccaagcucaacgaccugugcuucaccaacguguacgccgacuccuucgugauccgcggggacgagguccggcagaucgcccccggccagaccgggaagaucgccgacuacaacuacaagcugccggacgacuucacgggcugcgugaucgcguggaacagcaacaaccucgacuccaaggucgggggcaacuacaacuaccuguaccgccuguuccgcaagagcaaccucaagcccuucgagcgggacaucuccaccgagaucuaccaggccggcagcacccccugcaacgggguggagggcuucaacugcuacuucccccugcaguccuacggguuccagccgaccaacggcgugggguaccagcccuaccggguggucgugcugagcuucgagcuccugcacgcccccgccacggugugcggccccaagaaguccaccaaccuggucaagaacaagugcgugaacuucaacuucaacggccucaccgggaccggcgugcugaccgagagcaacaagaaguuccugccguuccagcaguucgggcgcgacaucgccgacacgaccgacgcgguccgcgacccccagacccuggagauccucgacaucacccccugcagcuucggcgggguguccgugaucacgccgggcaccaacaccagcaaccaggucgccgugcuguaccaggacgugaacugcaccgagguccccguggccauccacgccgaccagcugacgcccaccuggcggguguacuccaccggcagcaacgucuuccagacccgcgccgggugccucaucggcgcggagcacgugaacaacuccuacgagugcgacauccccaucggggccggcaucugcgccagcuaccagacgcagaccaacuccccgcggcgcgcccggagcguggcgucccagagcaucaucgccuacaccaugucccugggcgccgagaacagcgucgccuacuccaacaacagcaucgccauccccaccaacuucacgaucuccgugaccaccgagauccugcccgugagcaugaccaagacgagcgucgacugcaccauguacaucugcggggacuccaccgagugcagcaaccuccugcugcaguacggcuccuucugcacccagcucaaccgcgcgcugacggggaucgccguggagcaggacaagaacacccaggagguguucgcccaggucaagcagaucuacaagacgcccccgaucaaggacuucggcggguucaacuucagccagauccugcccgaccccuccaagcccagcaagcgguccuucaucgaggaccuccuguucaacaaggugacccuggccgacgccggcuucaucaagcaguacggcgacugccucggggacaucgcggcccgcgaccugaucugcgcccagaaguucaacggccugaccgugcucccgccccugcugaccgacgagaugaucgcccaguacaccagcgcccuccuggcggggaccaucacguccggcuggaccuucggggccggcgccgcccugcagauccccuucgcgaugcagauggccuaccgguucaacggcaucggggucacccagugcgugcucuacgagaaccagaagcugaucgccaaccaguucaacagcgccaucggcaagauccaggacucccugagcuccaccgccagcgcgcucgggaagcugcaggacguggucaaccagaacgcccaggcccugaacacgcucgugaagcagcuguccagcaacuucggcgccaucuccagcgugcugaacgacauccucucccgccuggacaaggucgaggccgaggugcagaucgaccggcugaucaccgggcgccuccagagccugcagaccuacgugacccagcagcugauccgggcggccgagauccgcgccagcgccaaccucgccgcgaccaagauguccgagugcguccugggccagagcaagcggguggacuucugcggcaagggguaccaccugauguccuucccccagagcgccccgcacggcguggucuuccuccacgugacguacguccccgcccaggagaagaacuucaccaccgcccccgcgaucugccacgacgggaaggcccacuucccccgcgagggcguguucguguccaacgggacccacugguucgucacgcagcggaacuucuacgagccgcagaucaucaccaccgacaacaccuucgugugcggcaacugcgacguggucaucggcaucgugaacaacacgguguacgacccccugcagcccgagcuggacuccuucaaggaggagcucgacaaguacuucaagaaccacaccagccccgacgucgaccugggggacaucuccggcaucaacgccagcguggugaacauccagaaggagaucgaccgccugaacgaggucgccaagaaccucaacgagucccugaucgaccugcaggagcucgggaaguacgagcaguacaucaagggcgggggcgggagcgacaucgaccccuacaaggaguucggcagcuccuaccagcugcucaacuuccugccccuggacuucuuccccgaccucaacgcccugguggacaccgccaccgcgcuguacgaggaggagcucacggggcgcgagcacugcagcccccaccacaccgccauccggcaggcccuggucugcugggacgagcugaccaagcucaucgccuggauguccagcaacaucaccuccgagcagguccgcacgaucaucgugaaccacgucaacgacaccuggggccugaaggugcggcagagccugugguuccaccucuccugccugaccuucgggcagcacaccgugcaggaguuccuggucagcuucggcguguggauccgcacgcccgccccguaccggccgcccaacgcgccgauccucuccacccugccggagcacaccgugaucugcuga

SEQ ID NO: 14129 - RNA, 3924 nt, Artificial Sequence
  SARS-CoV-2/Wuhan/WIV05/2019__EPI_ISL_402128 spike protein CDS gc (1-1147)(N914C_S1123C) LumSynth construct
auguucguguuccugguccuccugccccuggugagcucccagugcgugaaccucaccacccgcacgcagcugccgcccgccuacaccaacagcuucacccggggcgucuacuaccccgacaagguguuccgcuccagcgugcugcacuccacccaggaccucuuccugcccuucuucagcaacgucacgugguuccacgccauccacguguccgggaccaacggcaccaagcgguucgacaacccggugcugcccuucaacgacggggucuacuucgcgagcaccgagaaguccaacaucauccgcggcuggaucuucgggacgacccucgacagcaagacccagucccugcugaucgugaacaacgccaccaacguggucaucaaggugugcgaguuccaguucugcaacgaccccuuccucggcguguacuaccacaagaacaacaagagcuggauggaguccgaguuccgggucuacagcuccgccaacaacugcacguucgaguacgugagccagcccuuccugauggaccuggagggcaagcaggggaacuucaagaaccuccgcgaguucguguucaagaacaucgacggcuacuucaagaucuacuccaagcacaccccgaucaaccugguccgggaccugccccagggguucagcgcccucgagccccugguggaccugcccaucggcaucaacaucacccgcuuccagacccuccuggcccugcaccgguccuaccucacgccgggggacagcagcuccggcuggaccgcgggcgccgccgccuacuacgugggguaccugcagccccgcaccuuccugcucaaguacaacgagaacggcaccaucacggacgcggucgacugcgcccuggacccccugagcgagaccaagugcacccucaaguccuucaccguggagaaggggaucuaccagacgagcaacuuccgggugcagcccaccgaguccaucguccgcuucccgaacaucaccaaccugugccccuucggcgagguguucaacgccacccgguucgccagcgucuacgccuggaaccgcaagcggaucuccaacugcguggcggacuacagcgugcuguacaacuccgccagcuucuccacguucaagugcuacggcgucagccccaccaagcucaacgaccugugcuucaccaacguguacgccgacuccuucgugauccgcggggacgagguccggcagaucgcccccggccagaccgggaagaucgccgacuacaacuacaagcugccggacgacuucacgggcugcgugaucgcguggaacagcaacaaccucgacuccaaggucgggggcaacuacaacuaccuguaccgccuguuccgcaagagcaaccucaagcccuucgagcgggacaucuccaccgagaucuaccaggccggcagcacccccugcaacgggguggagggcuucaacugcuacuucccccugcaguccuacggguuccagccgaccaacggcgugggguaccagcccuaccggguggucgugcugagcuucgagcuccugcacgcccccgccacggugugcggccccaagaaguccaccaaccuggucaagaacaagugcgugaacuucaacuucaacggccucaccgggaccggcgugcugaccgagagcaacaagaaguuccugccguuccagcaguucgggcgcgacaucgccgacacgaccgacgcgguccgcgacccccagacccuggagauccucgacaucacccccugcagcuucggcgggguguccgugaucacgccgggcaccaacaccagcaaccaggucgccgugcuguaccaggacgugaacugcaccgagguccccguggccauccacgccgaccagcugacgcccaccuggcggguguacuccaccggcagcaacgucuuccagacccgcgccgggugccucaucggcgcggagcacgugaacaacuccuacgagugcgacauccccaucggggccggcaucugcgccagcuaccagacgcagaccaacuccccgcggcgcgcccggagcguggcgucccagagcaucaucgccuacaccaugucccugggcgccgagaacagcgucgccuacuccaacaacagcaucgccauccccaccaacuucacgaucuccgugaccaccgagauccugcccgugagcaugaccaagacgagcgucgacugcaccauguacaucugcggggacuccaccgagugcagcaaccuccugcugcaguacggcuccuucugcacccagcucaaccgcgcgcugacggggaucgccguggagcaggacaagaacacccaggagguguucgcccaggucaagcagaucuacaagacgcccccgaucaaggacuucggcggguucaacuucagccagauccugcccgaccccuccaagcccagcaagcgguccuucaucgaggaccuccuguucaacaaggugacccuggccgacgccggcuucaucaagcaguacggcgacugccucggggacaucgcggcccgcgaccugaucugcgcccagaaguucaacggccugaccgugcucccgccccugcugaccgacgagaugaucgcccaguacaccagcgcccuccuggcggggaccaucacguccggcuggaccuucggggccggcgccgcccugcagauccccuucgcgaugcagauggccuaccgguucaacggcaucggggucacccagugcgugcucuacgagaaccagaagcugaucgccaaccaguucaacagcgccaucggcaagauccaggacucccugagcuccaccgccagcgcgcucgggaagcugcaggacguggucaaccagaacgcccaggcccugaacacgcucgugaagcagcuguccagcaacuucggcgccaucuccagcgugcugaacgacauccucucccgccuggacaaggucgaggccgaggugcagaucgaccggcugaucaccgggcgccuccagagccugcagaccuacgugacccagcagcugauccgggcggccgagauccgcgccagcgccaaccucgccgcgaccaagauguccgagugcguccugggccagagcaagcggguggacuucugcggcaagggguaccaccugauguccuucccccagagcgccccgcacggcguggucuuccuccacgugacguacguccccgcccaggagaagaacuucaccaccgcccccgcgaucugccacgacgggaaggcccacuucccccgcgagggcguguucguguccaacgggacccacugguucgucacgcagcggaacuucuacgagccgcagaucaucaccaccgacaacaccuucgugugcggcaacugcgacguggucaucggcaucgugaacaacacgguguacgacccccugcagcccgagcuggacuccggcggcgggagcgggggcgggcagaucuacgagggcaagcugaccgccgaggggcuccgcuucggcaucguggccagccgguucaaccacgcgcuggucgaccgccugguggagggggccaucgacgccaucgugcggcacggcgggcgcgaggaggacaucacccucguccgggugcccggcuccugggagaucccgguggccgccggcgagcuggcccgcaaggaggacaucgacgcggucaucgccaucggggugcugauccggggcgccacgccccacuucgacuacaucgccagcgagguguccaaggggcucgcggaccugagccuggagcuccgcaagcccaucaccuucggcgucaucaccgccgacacccuggagcaggccaucgagcgggccgggacgaagcacggcaacaagggcugggaggccgcgcuguccgccaucgagauggccaaccucuucaagagccugcgcuga

SEQ ID NO: 14130 - RNA, 3948 nt, Artificial Sequence
  SARS-CoV-2/Wuhan/WIV05/2019__EPI_ISL_402128 spike protein CDS gc (1-1147)(N914C_S1123C) Ferritin construct
auguucguguuccugguccuccugccccuggugagcucccagugcgugaaccucaccacccgcacgcagcugccgcccgccuacaccaacagcuucacccggggcgucuacuaccccgacaagguguuccgcuccagcgugcugcacuccacccaggaccucuuccugcccuucuucagcaacgucacgugguuccacgccauccacguguccgggaccaacggcaccaagcgguucgacaacccggugcugcccuucaacgacggggucuacuucgcgagcaccgagaaguccaacaucauccgcggcuggaucuucgggacgacccucgacagcaagacccagucccugcugaucgugaacaacgccaccaacguggucaucaaggugugcgaguuccaguucugcaacgaccccuuccucggcguguacuaccacaagaacaacaagagcuggauggaguccgaguuccgggucuacagcuccgccaacaacugcacguucgaguacgugagccagcccuuccugauggaccuggagggcaagcaggggaacuucaagaaccuccgcgaguucguguucaagaacaucgacggcuacuucaagaucuacuccaagcacaccccgaucaaccugguccgggaccugccccagggguucagcgcccucgagccccugguggaccugcccaucggcaucaacaucacccgcuuccagacccuccuggcccugcaccgguccuaccucacgccgggggacagcagcuccggcuggaccgcgggcgccgccgccuacuacgugggguaccugcagccccgcaccuuccugcucaaguacaacgagaacggcaccaucacggacgcggucgacugcgcccuggacccccugagcgagaccaagugcacccucaaguccuucaccguggagaaggggaucuaccagacgagcaacuuccgggugcagcccaccgaguccaucguccgcuucccgaacaucaccaaccugugccccuucggcgagguguucaacgccacccgguucgccagcgucuacgccuggaaccgcaagcggaucuccaacugcguggcggacuacagcgugcuguacaacuccgccagcuucuccacguucaagugcuacggcgucagccccaccaagcucaacgaccugugcuucaccaacguguacgccgacuccuucgugauccgcggggacgagguccggcagaucgcccccggccagaccgggaagaucgccgacuacaacuacaagcugccggacgacuucacgggcugcgugaucgcguggaacagcaacaaccucgacuccaaggucgggggcaacuacaacuaccuguaccgccuguuccgcaagagcaaccucaagcccuucgagcgggacaucuccaccgagaucuaccaggccggcagcacccccugcaacgggguggagggcuucaacugcuacuucccccugcaguccuacggguuccagccgaccaacggcgugggguaccagcccuaccggguggucgugcugagcuucgagcuccugcacgcccccgccacggugugcggccccaagaaguccaccaaccuggucaagaacaagugcgugaacuucaacuucaacggccucaccgggaccggcgugcugaccgagagcaacaagaaguuccugccguuccagcaguucgggcgcgacaucgccgacacgaccgacgcgguccgcgacccccagacccuggagauccucgacaucacccccugcagcuucggcgggguguccgugaucacgccgggcaccaacaccagcaaccaggucgccgugcuguaccaggacgugaacugcaccgagguccccguggccauccacgccgaccagcugacgcccaccuggcggguguacuccaccggcagcaacgucuuccagacccgcgccgggugccucaucggcgcggagcacgugaacaacuccuacgagugcgacauccccaucggggccggcaucugcgccagcuaccagacgcagaccaacuccccgcggcgcgcccggagcguggcgucccagagcaucaucgccuacaccaugucccugggcgccgagaacagcgucgccuacuccaacaacagcaucgccauccccaccaacuucacgaucuccgugaccaccgagauccugcccgugagcaugaccaagacgagcgucgacugcaccauguacaucugcggggacuccaccgagugcagcaaccuccugcugcaguacggcuccuucugcacccagcucaaccgcgcgcugacggggaucgccguggagcaggacaagaacacccaggagguguucgcccaggucaagcagaucuacaagacgcccccgaucaaggacuucggcggguucaacuucagccagauccugcccgaccccuccaagcccagcaagcgguccuucaucgaggaccuccuguucaacaaggugacccuggccgacgccggcuucaucaagcaguacggcgacugccucggggacaucgcggcccgcgaccugaucugcgcccagaaguucaacggccugaccgugcucccgccccugcugaccgacgagaugaucgcccaguacaccagcgcccuccuggcggggaccaucacguccggcuggaccuucggggccggcgccgcccugcagauccccuucgcgaugcagauggccuaccgguucaacggcaucggggucacccagugcgugcucuacgagaaccagaagcugaucgccaaccaguucaacagcgccaucggcaagauccaggacucccugagcuccaccgccagcgcgcucgggaagcugcaggacguggucaaccagaacgcccaggcccugaacacgcucgugaagcagcuguccagcaacuucggcgccaucuccagcgugcugaacgacauccucucccgccuggacaaggucgaggccgaggugcagaucgaccggcugaucaccgggcgccuccagagccugcagaccuacgugacccagcagcugauccgggcggccgagauccgcgccagcgccaaccucgccgcgaccaagauguccgagugcguccugggccagagcaagcggguggacuucugcggcaagggguaccaccugauguccuucccccagagcgccccgcacggcguggucuuccuccacgugacguacguccccgcccaggagaagaacuucaccaccgcccccgcgaucugccacgacgggaaggcccacuucccccgcgagggcguguucguguccaacgggacccacugguucgucacgcagcggaacuucuacgagccgcagaucaucaccaccgacaacaccuucgugugcggcaacugcgacguggucaucggcaucgugaacaacacgguguacgacccccugcagcccgagcuggacuccggcgggggcgggagcgacaucaucaagcuccugaacgagcaggucaacaaggagaugcaguccagcaaccuguacauguccaugagcuccuggugcuacacccacagccucgacggcgccgggcuguuccuguucgaccacgccgcggaggaguacgagcacgccaagaagcucaucaucuuccugaacgagaacaacgugcccgugcagcugaccuccaucagcgccccggagcacaaguucgagggccucacgcagaucuuccagaaggccuacgagcacgagcagcacaucuccgagagcaucaacaacaucguggaccacgccaucaaguccaaggaccacgcgaccuucaacuuccugcagugguacgucgccgagcagcacgaggaggaggugcuguucaaggacauccucgacaagaucgagcugaucgggaacgagaaccacggccuguaccucgccgaccaguacgugaaggggaucgccaagagccgcaaguccuga

SEQ ID NO: 14131 - RNA, 3534 nt, Artificial Sequence
  SARS-CoV-2/Wuhan/WIV05/2019__EPI_ISL_402128 spike protein CDS gc (1-1147)(N914C_S1123C) Foldon construct
auguucguguuccugguccuccugccccuggugagcucccagugcgugaaccucaccacccgcacgcagcugccgcccgccuacaccaacagcuucacccggggcgucuacuaccccgacaagguguuccgcuccagcgugcugcacuccacccaggaccucuuccugcccuucuucagcaacgucacgugguuccacgccauccacguguccgggaccaacggcaccaagcgguucgacaacccggugcugcccuucaacgacggggucuacuucgcgagcaccgagaaguccaacaucauccgcggcuggaucuucgggacgacccucgacagcaagacccagucccugcugaucgugaacaacgccaccaacguggucaucaaggugugcgaguuccaguucugcaacgaccccuuccucggcguguacuaccacaagaacaacaagagcuggauggaguccgaguuccgggucuacagcuccgccaacaacugcacguucgaguacgugagccagcccuuccugauggaccuggagggcaagcaggggaacuucaagaaccuccgcgaguucguguucaagaacaucgacggcuacuucaagaucuacuccaagcacaccccgaucaaccugguccgggaccugccccagggguucagcgcccucgagccccugguggaccugcccaucggcaucaacaucacccgcuuccagacccuccuggcccugcaccgguccuaccucacgccgggggacagcagcuccggcuggaccgcgggcgccgccgccuacuacgugggguaccugcagccccgcaccuuccugcucaaguacaacgagaacggcaccaucacggacgcggucgacugcgcccuggacccccugagcgagaccaagugcacccucaaguccuucaccguggagaaggggaucuaccagacgagcaacuuccgggugcagcccaccgaguccaucguccgcuucccgaacaucaccaaccugugccccuucggcgagguguucaacgccacccgguucgccagcgucuacgccuggaaccgcaagcggaucuccaacugcguggcggacuacagcgugcuguacaacuccgccagcuucuccacguucaagugcuacggcgucagccccaccaagcucaacgaccugugcuucaccaacguguacgccgacuccuucgugauccgcggggacgagguccggcagaucgcccccggccagaccgggaagaucgccgacuacaacuacaagcugccggacgacuucacgggcugcgugaucgcguggaacagcaacaaccucgacuccaaggucgggggcaacuacaacuaccuguaccgccuguuccgcaagagcaaccucaagcccuucgagcgggacaucuccaccgagaucuaccaggccggcagcacccccugcaacgggguggagggcuucaacugcuacuucccccugcaguccuacggguuccagccgaccaacggcgugggguaccagcccuaccggguggucgugcugagcuucgagcuccugcacgcccccgccacggugugcggccccaagaaguccaccaaccuggucaagaacaagugcgugaacuucaacuucaacggccucaccgggaccggcgugcugaccgagagcaacaagaaguuccugccguuccagcaguucgggcgcgacaucgccgacacgaccgacgcgguccgcgacccccagacccuggagauccucgacaucacccccugcagcuucggcgggguguccgugaucacgccgggcaccaacaccagcaaccaggucgccgugcuguaccaggacgugaacugcaccgagguccccguggccauccacgccgaccagcugacgcccaccuggcggguguacuccaccggcagcaacgucuuccagacccgcgccgggugccucaucggcgcggagcacgugaacaacuccuacgagugcgacauccccaucggggccggcaucugcgccagcuaccagacgcagaccaacuccccgcggcgcgcccggagcguggcgucccagagcaucaucgccuacaccaugucccugggcgccgagaacagcgucgccuacuccaacaacagcaucgccauccccaccaacuucacgaucuccgugaccaccgagauccugcccgugagcaugaccaagacgagcgucgacugcaccauguacaucugcggggacuccaccgagugcagcaaccuccugcugcaguacggcuccuucugcacccagcucaaccgcgcgcugacggggaucgccguggagcaggacaagaacacccaggagguguucgcccaggucaagcagaucuacaagacgcccccgaucaaggacuucggcggguucaacuucagccagauccugcccgaccccuccaagcccagcaagcgguccuucaucgaggaccuccuguucaacaaggugacccuggccgacgccggcuucaucaagcaguacggcgacugccucggggacaucgcggcccgcgaccugaucugcgcccagaaguucaacggccugaccgugcucccgccccugcugaccgacgagaugaucgcccaguacaccagcgcccuccuggcggggaccaucacguccggcuggaccuucggggccggcgccgcccugcagauccccuucgcgaugcagauggccuaccgguucaacggcaucggggucacccagugcgugcucuacgagaaccagaagcugaucgccaaccaguucaacagcgccaucggcaagauccaggacucccugagcuccaccgccagcgcgcucgggaagcugcaggacguggucaaccagaacgcccaggcccugaacacgcucgugaagcagcuguccagcaacuucggcgccaucuccagcgugcugaacgacauccucucccgccuggacaaggucgaggccgaggugcagaucgaccggcugaucaccgggcgccuccagagccugcagaccuacgugacccagcagcugauccgggcggccgagauccgcgccagcgccaaccucgccgcgaccaagauguccgagugcguccugggccagagcaagcggguggacuucugcggcaagggguaccaccugauguccuucccccagagcgccccgcacggcguggucuuccuccacgugacguacguccccgcccaggagaagaacuucaccaccgcccccgcgaucugccacgacgggaaggcccacuucccccgcgagggcguguucguguccaacgggacccacugguucgucacgcagcggaacuucuacgagccgcagaucaucaccaccgacaacaccuucgugugcggcaacugcgacguggucaucggcaucgugaacaacacgguguacgacccccugcagcccgagcuggacuccggcgggagcggcuacauccccgaggccccgcgcgacgggcaggccuacgugcggaaggacggcgaguggguccugcucagcaccuuccuguga

SEQ ID NO: 14132 - RNA, 3906 nt, Artificial Sequence
  SARS-CoV-2/Wuhan/WIV05/2019__EPI_ISL_402128 spike protein CDS gc (1-1147)(N914C_S1123C) WhcAg construct
auguucguguuccugguccuccugccccuggugagcucccagugcgugaaccucaccacccgcacgcagcugccgcccgccuacaccaacagcuucacccggggcgucuacuaccccgacaagguguuccgcuccagcgugcugcacuccacccaggaccucuuccugcccuucuucagcaacgucacgugguuccacgccauccacguguccgggaccaacggcaccaagcgguucgacaacccggugcugcccuucaacgacggggucuacuucgcgagcaccgagaaguccaacaucauccgcggcuggaucuucgggacgacccucgacagcaagacccagucccugcugaucgugaacaacgccaccaacguggucaucaaggugugcgaguuccaguucugcaacgaccccuuccucggcguguacuaccacaagaacaacaagagcuggauggaguccgaguuccgggucuacagcuccgccaacaacugcacguucgaguacgugagccagcccuuccugauggaccuggagggcaagcaggggaacuucaagaaccuccgcgaguucguguucaagaacaucgacggcuacuucaagaucuacuccaagcacaccccgaucaaccugguccgggaccugccccagggguucagcgcccucgagccccugguggaccugcccaucggcaucaacaucacccgcuuccagacccuccuggcccugcaccgguccuaccucacgccgggggacagcagcuccggcuggaccgcgggcgccgccgccuacuacgugggguaccugcagccccgcaccuuccugcucaaguacaacgagaacggcaccaucacggacgcggucgacugcgcccuggacccccugagcgagaccaagugcacccucaaguccuucaccguggagaaggggaucuaccagacgagcaacuuccgggugcagcccaccgaguccaucguccgcuucccgaacaucaccaaccugugccccuucggcgagguguucaacgccacccgguucgccagcgucuacgccuggaaccgcaagcggaucuccaacugcguggcggacuacagcgugcuguacaacuccgccagcuucuccacguucaagugcuacggcgucagccccaccaagcucaacgaccugugcuucaccaacguguacgccgacuccuucgugauccgcggggacgagguccggcagaucgcccccggccagaccgggaagaucgccgacuacaacuacaagcugccggacgacuucacgggcugcgugaucgcguggaacagcaacaaccucgacuccaaggucgggggcaacuacaacuaccuguaccgccuguuccgcaagagcaaccucaagcccuucgagcgggacaucuccaccgagaucuaccaggccggcagcacccccugcaacgggguggagggcuucaacugcuacuucccccugcaguccuacggguuccagccgaccaacggcgugggguaccagcccuaccggguggucgugcugagcuucgagcuccugcacgcccccgccacggugugcggccccaagaaguccaccaaccuggucaagaacaagugcgugaacuucaacuucaacggccucaccgggaccggcgugcugaccgagagcaacaagaaguuccugccguuccagcaguucgggcgcgacaucgccgacacgaccgacgcgguccgcgacccccagacccuggagauccucgacaucacccccugcagcuucggcgggguguccgugaucacgccgggcaccaacaccagcaaccaggucgccgugcuguaccaggacgugaacugcaccgagguccccguggccauccacgccgaccagcugacgcccaccuggcggguguacuccaccggcagcaacgucuuccagacccgcgccgggugccucaucggcgcggagcacgugaacaacuccuacgagugcgacauccccaucggggccggcaucugcgccagcuaccagacgcagaccaacuccccgcggcgcgcccggagcguggcgucccagagcaucaucgccuacaccaugucccugggcgccgagaacagcgucgccuacuccaacaacagcaucgccauccccaccaacuucacgaucuccgugaccaccgagauccugcccgugagcaugaccaagacgagcgucgacugcaccauguacaucugcggggacuccaccgagugcagcaaccuccugcugcaguacggcuccuucugcacccagcucaaccgcgcgcugacggggaucgccguggagcaggacaagaacacccaggagguguucgcccaggucaagcagaucuacaagacgcccccgaucaaggacuucggcggguucaacuucagccagauccugcccgaccccuccaagcccagcaagcgguccuucaucgaggaccuccuguucaacaaggugacccuggccgacgccggcuucaucaagcaguacggcgacugccucggggacaucgcggcccgcgaccugaucugcgcccagaaguucaacggccugaccgugcucccgccccugcugaccgacgagaugaucgcccaguacaccagcgcccuccuggcggggaccaucacguccggcuggaccuucggggccggcgccgcccugcagauccccuucgcgaugcagauggccuaccgguucaacggcaucggggucacccagugcgugcucuacgagaaccagaagcugaucgccaaccaguucaacagcgccaucggcaagauccaggacucccugagcuccaccgccagcgcgcucgggaagcugcaggacguggucaaccagaacgcccaggcccugaacacgcucgugaagcagcuguccagcaacuucggcgccaucuccagcgugcugaacgacauccucucccgccuggacaaggucgaggccgaggugcagaucgaccggcugaucaccgggcgccuccagagccugcagaccuacgugacccagcagcugauccgggcggccgagauccgcgccagcgccaaccucgccgcgaccaagauguccgagugcguccugggccagagcaagcggguggacuucugcggcaagggguaccaccugauguccuucccccagagcgccccgcacggcguggucuuccuccacgugacguacguccccgcccaggagaagaacuucaccaccgcccccgcgaucugccacgacgggaaggcccacuucccccgcgagggcguguucguguccaacgggacccacugguucgucacgcagcggaacuucuacgagccgcagaucaucaccaccgacaacaccuucgugugcggcaacugcgacguggucaucggcaucgugaacaacacgguguacgacccccugcagcccgagcuggacuccggcgggggcgggagcgacaucgaccccuacaaggaguucggcagcuccuaccagcugcucaacuuccugccccuggacuucuuccccgaccucaacgcccugguggacaccgccaccgcgcuguacgaggaggagcucacggggcgcgagcacugcagcccccaccacaccgccauccggcaggcccuggucugcugggacgagcugaccaagcucaucgccuggauguccagcaacaucaccuccgagcagguccgcacgaucaucgugaaccacgucaacgacaccuggggccugaaggugcggcagagccugugguuccaccucuccugccugaccuucgggcagcacaccgugcaggaguuccuggucagcuucggcguguggauccgcacgcccgccccguaccggccgcccaacgcgccgauccucuccacccugccggagcacaccgugaucugcuga

SEQ ID NO: 14133 - RNA, 3822 nt, Artificial Sequence
  SARS-CoV-2/Wuhan/WIV05/2019__EPI_ISL_402128 spike protein CDS gc mod (1-1273)(N914C_S1123C)
auguucguguuucuggugcugcugccccugguguccagccagugugugaaccugaccaccagaacacagcugccuccagccuacaccaacagcuucaccagaggcguguacuaccccgacaagguguucagauccagcgugcugcacucuacccaggaccuguuccugccuuucuucagcaacgugaccugguuccacgccauccacguguccggcaccaauggcaccaagagauucgacaaccccgugcugcccuucaacgacgggguguacuuugccagcaccgagaaguccaacaucaucagaggcuggaucuucggcaccacacuggacagcaagacccagagccugcugaucgugaacaacgccaccaacguggucaucaaagugugcgaguuccaguucugcaacgaccccuuccugggcgucuacuaccacaagaacaacaagagcuggauggaaagcgaguuccggguguacagcagcgccaacaacugcaccuucgaguacgugucccagccuuuccugauggaccuggaaggcaagcagggcaacuucaagaaccugcgcgaguucguguucaagaacaucgacggcuacuucaaaaucuacagcaagcacaccccuaucaaccucgugcgggaucugccucagggcuucucugcucuggaaccccugguggaucugcccaucggcaucaacaucacccgguuucagacacugcuggcccugcacagaagcuaccugacaccuggcgauagcagcagcggauggacagcuggugccgccgcuuacuaugugggcuaccugcagccuagaaccuuccugcugaaguacaacgagaacggcaccaucaccgacgccguggauugugcucuggauccucugagcgagacaaagugcacccugaaguccuucaccguggaaaagggcaucuaccagaccagcaacuuccgggugcagcccaccgaauccaucgugcgguuccccaauaucaccaaucugugccccuucggcgagguguucaaugccaccagauucgccucuguguacgccuggaaccggaagcggaucagcaauugcguggccgacuacuccgugcuguacaacuccgccagcuucagcaccuucaagugcuacggcguguccccuaccaagcugaacgaccugugcuucacaaacguguacgccgacagcuucgugauccggggagaugaagugcggcagauugccccuggacagacaggcaagaucgccgacuacaacuacaagcugcccgacgacuucaccggcugugugauugccuggaacagcaacaaccuggacuccaaagucggcggcaacuacaauuaccuguaccggcuguuccggaaguccaaucugaagcccuucgagcgggacaucagcaccgaaaucuaucaggccggcagcaccccuugcaacggcguggaaggcuucaacugcuacuucccacugcaguccuacggcuuucagcccacaaauggcgugggcuaucagcccuacagagugguggugcugagcuucgaacugcugcaugcuccugccacagugugcggcccuaagaaaagcaccaaucucgugaagaacaaaugcgugaacuucaacuucaacggccugaccggcaccggcgugcugacagagagcaacaagaaguuccugccauuccagcaguuuggccgggauaucgccgauaccacagacgccguuagagauccccagacacuggaaauccuggacaucaccccaugcagcuucggcggagugucugugaucaccccuggcaccaacaccagcaaucagguggcagugcuguaccaggacgugaacuguaccgaagugcccguggccauucacgccgaucagcugacaccuacauggcggguguacuccaccggcagcaauguguuucagaccagagccggcugucugaucggagccgagcacgugaacaauagcuacgagugcgacauccccaucggcgcuggcaucugugccagcuaccagacacagacaaacagccccagacgggcuagaagcguggccagccagagcaucauugccuacacaaugucucugggcgccgagaacagcguggccuacuccaacaacucuaucgcuauccccaccaacuucaccaucagcgugaccaccgagauccugccuguguccaugaccaagaccagcguggacugcaccauguacaucugcggcgauuccaccgagugcuccaaccugcugcugcaguacggcagcuucugcacccagcugaauagagcccugacagggaucgccguggaacaggacaagaacacccaagagguguucgcccaagugaagcaaaucuacaagaccccuccuaucaaggacuucggcggcuucaauuucagccagauucugcccgauccuagcaagcccagcaagcggagcuucaucgaggaccugcuguucaacaaagugacacuggccgacgccggcuucaucaagcaguauggcgauugucugggcgacauugccgccagggaucugauuugcgcccagaaguuuaacggacugacagugcugccuccucugcugaccgaugagaugaucgcccaguacacaucugcccugcuggccggcacaaucacaagcggcuggacauuuggagcuggcgccgcucugcagauccccuuugcuaugcagauggccuaccgguucaacggcaucggagugacccagugcgugcuguacgagaaccagaagcugaucgccaaccaguucaacagcgccaucggcaagauccaggacagccugagcagcacagcaagcgcccugggaaagcugcaggacguggucaaccagaaugcccaggcacugaacacccuggucaagcagcuguccuccaacuucggcgccaucagcucugugcugaacgauauccugagcagacuggacaaggucgaggccgaggugcagaucgacagacugaucacaggcagacugcagagccuccagacauacgugacccagcagcugaucagagccgccgagauuagagccucugccaaucuggccgccaccaagaugucugagugugugcugggccagagcaagagaguggacuuuugcggcaagggcuaccaccugaugagcuucccucagucugccccucacggcgugguguuucugcacgugacauaugugcccgcucaagagaagaauuucaccaccgcuccagccaucugccacgacggcaaagcccacuuuccuagagaaggcguguucguguccaacggcacccauugguucgugacacagcggaacuucuacgagccccagaucaucaccaccgacaacaccuucguguguggcaacugcgacguugugaucggcauugugaacaauaccguguacgacccucugcagcccgagcuggacagcuucaaagaggaacuggacaaguacuuuaagaaccacacaagccccgacguggaccugggcgauaucagcggaaucaaugccagcgucgugaacauccagaaagagaucgaccggcugaacgagguggccaagaaucugaacgagagccugaucgaccugcaagaacuggggaaguacgagcaguacaucaaguggcccugguacaucuggcugggcuuuaucgccggacugauugccaucgugauggucacaaucaugcuguguugcaugaccagcugcuguagcugccugaagggcuguuguagcuguggcagcugcugcaaguucgacgaggacgauucugagcccgugcugaagggcgugaaacugcacuacaccuga

SEQ ID NO: 14134 - RNA, 4116 nt, Artificial Sequence
  SARS-CoV-2/Wuhan/WIV05/2019__EPI_ISL_402128 spike protein CDS gc mod (1-1211)(N914C_S1123C) LumSynth construct
auguucguguuucuggugcugcugccccugguguccagccagugugugaaccugaccaccagaacacagcugccuccagccuacaccaacagcuucaccagaggcguguacuaccccgacaagguguucagauccagcgugcugcacucuacccaggaccuguuccugccuuucuucagcaacgugaccugguuccacgccauccacguguccggcaccaauggcaccaagagauucgacaaccccgugcugcccuucaacgacgggguguacuuugccagcaccgagaaguccaacaucaucagaggcuggaucuucggcaccacacuggacagcaagacccagagccugcugaucgugaacaacgccaccaacguggucaucaaagugugcgaguuccaguucugcaacgaccccuuccugggcgucuacuaccacaagaacaacaagagcuggauggaaagcgaguuccggguguacagcagcgccaacaacugcaccuucgaguacgugucccagccuuuccugauggaccuggaaggcaagcagggcaacuucaagaaccugcgcgaguucguguucaagaacaucgacggcuacuucaaaaucuacagcaagcacaccccuaucaaccucgugcgggaucugccucagggcuucucugcucuggaaccccugguggaucugcccaucggcaucaacaucacccgguuucagacacugcuggcccugcacagaagcuaccugacaccuggcgauagcagcagcggauggacagcuggugccgccgcuuacuaugugggcuaccugcagccuagaaccuuccugcugaaguacaacgagaacggcaccaucaccgacgccguggauugugcucuggauccucugagcgagacaaagugcacccugaaguccuucaccguggaaaagggcaucuaccagaccagcaacuuccgggugcagcccaccgaauccaucgugcgguuccccaauaucaccaaucugugccccuucggcgagguguucaaugccaccagauucgccucuguguacgccuggaaccggaagcggaucagcaauugcguggccgacuacuccgugcuguacaacuccgccagcuucagcaccuucaagugcuacggcguguccccuaccaagcugaacgaccugugcuucacaaacguguacgccgacagcuucgugauccggggagaugaagugcggcagauugccccuggacagacaggcaagaucgccgacuacaacuacaagcugcccgacgacuucaccggcugugugauugccuggaacagcaacaaccuggacuccaaagucggcggcaacuacaauuaccuguaccggcuguuccggaaguccaaucugaagcccuucgagcgggacaucagcaccgaaaucuaucaggccggcagcaccccuugcaacggcguggaaggcuucaacugcuacuucccacugcaguccuacggcuuucagcccacaaauggcgugggcuaucagcccuacagagugguggugcugagcuucgaacugcugcaugcuccugccacagugugcggcccuaagaaaagcaccaaucucgugaagaacaaaugcgugaacuucaacuucaacggccugaccggcaccggcgugcugacagagagcaacaagaaguuccugccauuccagcaguuuggccgggauaucgccgauaccacagacgccguuagagauccccagacacuggaaauccuggacaucaccccaugcagcuucggcggagugucugugaucaccccuggcaccaacaccagcaaucagguggcagugcuguaccaggacgugaacuguaccgaagugcccguggccauucacgccgaucagcugacaccuacauggcggguguacuccaccggcagcaauguguuucagaccagagccggcugucugaucggagccgagcacgugaacaauagcuacgagugcgacauccccaucggcgcuggcaucugugccagcuaccagacacagacaaacagccccagacgggcuagaagcguggccagccagagcaucauugccuacacaaugucucugggcgccgagaacagcguggccuacuccaacaacucuaucgcuauccccaccaacuucaccaucagcgugaccaccgagauccugccuguguccaugaccaagaccagcguggacugcaccauguacaucugcggcgauuccaccgagugcuccaaccugcugcugcaguacggcagcuucugcacccagcugaauagagcccugacagggaucgccguggaacaggacaagaacacccaagagguguucgcccaagugaagcaaaucuacaagaccccuccuaucaaggacuucggcggcuucaauuucagccagauucugcccgauccuagcaagcccagcaagcggagcuucaucgaggaccugcuguucaacaaagugacacuggccgacgccggcuucaucaagcaguauggcgauugucugggcgacauugccgccagggaucugauuugcgcccagaaguuuaacggacugacagugcugccuccucugcugaccgaugagaugaucgcccaguacacaucugcccugcuggccggcacaaucacaagcggcuggacauuuggagcuggcgccgcucugcagauccccuuugcuaugcagauggccuaccgguucaacggcaucggagugacccagugcgugcuguacgagaaccagaagcugaucgccaaccaguucaacagcgccaucggcaagauccaggacagccugagcagcacagcaagcgcccugggaaagcugcaggacguggucaaccagaaugcccaggcacugaacacccuggucaagcagcuguccuccaacuucggcgccaucagcucugugcugaacgauauccugagcagacuggacaaggucgaggccgaggugcagaucgacagacugaucacaggcagacugcagagccuccagacauacgugacccagcagcugaucagagccgccgagauuagagccucugccaaucuggccgccaccaagaugucugagugugugcugggccagagcaagagaguggacuuuugcggcaagggcuaccaccugaugagcuucccucagucugccccucacggcgugguguuucugcacgugacauaugugcccgcucaagagaagaauuucaccaccgcuccagccaucugccacgacggcaaagcccacuuuccuagagaaggcguguucguguccaacggcacccauugguucgugacacagcggaacuucuacgagccccagaucaucaccaccgacaacaccuucguguguggcaacugcgacguugugaucggcauugugaacaauaccguguacgacccucugcagcccgagcuggacagcuucaaagaggaacuggacaaguacuuuaagaaccacacaagccccgacguggaccugggcgauaucagcggaaucaaugccagcgucgugaacauccagaaagagaucgaccggcugaacgagguggccaagaaucugaacgagagccugaucgaccugcaagaacuggggaaguacgagcaguacaucaagggcggaggaucuggcggaggacagaucuacgagggcaagcugacagccgagggccugagauuuggaaucguggccagccgguucaaucacgcccugguggauagacugguggaaggcgccaucgaugccauugucagacacggcggcagagaagaggacaucacccucguuagagugcccggcucuugggagauuccuguggcugcuggcgagcuggcccggaaagaagauaucgacgccguuaucgccaucggcgugcugaucagaggcgccacaccucacuucgacuauaucgccagcgagguguccaaaggccuggccgaucugagccuggaacugagaaagcccaucaccuucggcgugaucaccgcugacacacuggaacaggccauugagagagccggcaccaagcacggcaacaaaggaugggaagccgcucuguccgccaucgagauggccaaccuguucaagagccugcgguga

SEQ ID NO: 14135 - RNA, 4140 nt, Artificial Sequence
  SARS-CoV-2/Wuhan/WIV05/2019__EPI_ISL_402128 spike protein CDS gc mod (1-1211)(N914C_S1123C) Ferritin construct
auguucguguuucuggugcugcugccccugguguccagccagugugugaaccugaccaccagaacacagcugccuccagccuacaccaacagcuucaccagaggcguguacuaccccgacaagguguucagauccagcgugcugcacucuacccaggaccuguuccugccuuucuucagcaacgugaccugguuccacgccauccacguguccggcaccaauggcaccaagagauucgacaaccccgugcugcccuucaacgacgggguguacuuugccagcaccgagaaguccaacaucaucagaggcuggaucuucggcaccacacuggacagcaagacccagagccugcugaucgugaacaacgccaccaacguggucaucaaagugugcgaguuccaguucugcaacgaccccuuccugggcgucuacuaccacaagaacaacaagagcuggauggaaagcgaguuccggguguacagcagcgccaacaacugcaccuucgaguacgugucccagccuuuccugauggaccuggaaggcaagcagggcaacuucaagaaccugcgcgaguucguguucaagaacaucgacggcuacuucaaaaucuacagcaagcacaccccuaucaaccucgugcgggaucugccucagggcuucucugcucuggaaccccugguggaucugcccaucggcaucaacaucacccgguuucagacacugcuggcccugcacagaagcuaccugacaccuggcgauagcagcagcggauggacagcuggugccgccgcuuacuaugugggcuaccugcagccuagaaccuuccugcugaaguacaacgagaacggcaccaucaccgacgccguggauugugcucuggauccucugagcgagacaaagugcacccugaaguccuucaccguggaaaagggcaucuaccagaccagcaacuuccgggugcagcccaccgaauccaucgugcgguuccccaauaucaccaaucugugccccuucggcgagguguucaaugccaccagauucgccucuguguacgccuggaaccggaagcggaucagcaauugcguggccgacuacuccgugcuguacaacuccgccagcuucagcaccuucaagugcuacggcguguccccuaccaagcugaacgaccugugcuucacaaacguguacgccgacagcuucgugauccggggagaugaagugcggcagauugccccuggacagacaggcaagaucgccgacuacaacuacaagcugcccgacgacuucaccggcugugugauugccuggaacagcaacaaccuggacuccaaagucggcggcaacuacaauuaccuguaccggcuguuccggaaguccaaucugaagcccuucgagcgggacaucagcaccgaaaucuaucaggccggcagcaccccuugcaacggcguggaaggcuucaacugcuacuucccacugcaguccuacggcuuucagcccacaaauggcgugggcuaucagcccuacagagugguggugcugagcuucgaacugcugcaugcuccugccacagugugcggcccuaagaaaagcaccaaucucgugaagaacaaaugcgugaacuucaacuucaacggccugaccggcaccggcgugcugacagagagcaacaagaaguuccugccauuccagcaguuuggccgggauaucgccgauaccacagacgccguuagagauccccagacacuggaaauccuggacaucaccccaugcagcuucggcggagugucugugaucaccccuggcaccaacaccagcaaucagguggcagugcuguaccaggacgugaacuguaccgaagugcccguggccauucacgccgaucagcugacaccuacauggcggguguacuccaccggcagcaauguguuucagaccagagccggcugucugaucggagccgagcacgugaacaauagcuacgagugcgacauccccaucggcgcuggcaucugugccagcuaccagacacagacaaacagccccagacgggcuagaagcguggccagccagagcaucauugccuacacaaugucucugggcgccgagaacagcguggccuacuccaacaacucuaucgcuauccccaccaacuucaccaucagcgugaccaccgagauccugccuguguccaugaccaagaccagcguggacugcaccauguacaucugcggcgauuccaccgagugcuccaaccugcugcugcaguacggcagcuucugcacccagcugaauagagcccugacagggaucgccguggaacaggacaagaacacccaagagguguucgcccaagugaagcaaaucuacaagaccccuccuaucaaggacuucggcggcuucaauuucagccagauucugcccgauccuagcaagcccagcaagcggagcuucaucgaggaccugcuguucaacaaagugacacuggccgacgccggcuucaucaagcaguauggcgauugucugggcgacauugccgccagggaucugauuugcgcccagaaguuuaacggacugacagugcugccuccucugcugaccgaugagaugaucgcccaguacacaucugcccugcuggccggcacaaucacaagcggcuggacauuuggagcuggcgccgcucugcagauccccuuugcuaugcagauggccuaccgguucaacggcaucggagugacccagugcgugcuguacgagaaccagaagcugaucgccaaccaguucaacagcgccaucggcaagauccaggacagccugagcagcacagcaagcgcccugggaaagcugcaggacguggucaaccagaaugcccaggcacugaacacccuggucaagcagcuguccuccaacuucggcgccaucagcucugugcugaacgauauccugagcagacuggacaaggucgaggccgaggugcagaucgacagacugaucacaggcagacugcagagccuccagacauacgugacccagcagcugaucagagccgccgagauuagagccucugccaaucuggccgccaccaagaugucugagugugugcugggccagagcaagagaguggacuuuugcggcaagggcuaccaccugaugagcuucccucagucugccccucacggcgugguguuucugcacgugacauaugugcccgcucaagagaagaauuucaccaccgcuccagccaucugccacgacggcaaagcccacuuuccuagagaaggcguguucguguccaacggcacccauugguucgugacacagcggaacuucuacgagccccagaucaucaccaccgacaacaccuucguguguggcaacugcgacguugugaucggcauugugaacaauaccguguacgacccucugcagcccgagcuggacagcuucaaagaggaacuggacaaguacuuuaagaaccacacaagccccgacguggaccugggcgauaucagcggaaucaaugccagcgucgugaacauccagaaagagaucgaccggcugaacgagguggccaagaaucugaacgagagccugaucgaccugcaagaacuggggaaguacgagcaguacaucaagggaggcggaggaucugacaucaucaagcugcugaacgagcaagugaacaaagagaugcagagcagcaaccuguacaugagcaugagcagcuggugcuacacccacagccuugauggcgccggacuguuccuguuugaucacgccgccgaggaauacgagcacgccaagaagcugaucaucuuccugaacgagaacaacgugcccgugcagcugaccagcauuucugccccugagcacaaguucgagggccugacacagaucuuccagaaggccuacgaacacgagcagcacaucagcgagagcaucaacaacaucguggaccacgccauuaagagcaaggaucacgccaccuucaacuuucugcagugguacguggccgaacagcacgaggaagaggugcuguucaaggacauccuggacaagaucgagcugaucggcaacgagaaccacggccuguaucuggccgaccaguacgugaagggaaucgccaagagcagaaagagcuga

SEQ ID NO: 14136 - RNA, 3726 nt, Artificial Sequence
  SARS-CoV-2/Wuhan/WIV05/2019__EPI_ISL_402128 spike protein CDS gc mod (1-1211)(N914C_S1123C) Foldon construct
auguucguguuucuggugcugcugccccugguguccagccagugugugaaccugaccaccagaacacagcugccuccagccuacaccaacagcuucaccagaggcguguacuaccccgacaagguguucagauccagcgugcugcacucuacccaggaccuguuccugccuuucuucagcaacgugaccugguuccacgccauccacguguccggcaccaauggcaccaagagauucgacaaccccgugcugcccuucaacgacgggguguacuuugccagcaccgagaaguccaacaucaucagaggcuggaucuucggcaccacacuggacagcaagacccagagccugcugaucgugaacaacgccaccaacguggucaucaaagugugcgaguuccaguucugcaacgaccccuuccugggcgucuacuaccacaagaacaacaagagcuggauggaaagcgaguuccggguguacagcagcgccaacaacugcaccuucgaguacgugucccagccuuuccugauggaccuggaaggcaagcagggcaacuucaagaaccugcgcgaguucguguucaagaacaucgacggcuacuucaaaaucuacagcaagcacaccccuaucaaccucgugcgggaucugccucagggcuucucugcucuggaaccccugguggaucugcccaucggcaucaacaucacccgguuucagacacugcuggcccugcacagaagcuaccugacaccuggcgauagcagcagcggauggacagcuggugccgccgcuuacuaugugggcuaccugcagccuagaaccuuccugcugaaguacaacgagaacggcaccaucaccgacgccguggauugugcucuggauccucugagcgagacaaagugcacccugaaguccuucaccguggaaaagggcaucuaccagaccagcaacuuccgggugcagcccaccgaauccaucgugcgguuccccaauaucaccaaucugugccccuucggcgagguguucaaugccaccagauucgccucuguguacgccuggaaccggaagcggaucagcaauugcguggccgacuacuccgugcuguacaacuccgccagcuucagcaccuucaagugcuacggcguguccccuaccaagcugaacgaccugugcuucacaaacguguacgccgacagcuucgugauccggggagaugaagugcggcagauugccccuggacagacaggcaagaucgccgacuacaacuacaagcugcccgacgacuucaccggcugugugauugccuggaacagcaacaaccuggacuccaaagucggcggcaacuacaauuaccuguaccggcuguuccggaaguccaaucugaagcccuucgagcgggacaucagcaccgaaaucuaucaggccggcagcaccccuugcaacggcguggaaggcuucaacugcuacuucccacugcaguccuacggcuuucagcccacaaauggcgugggcuaucagcccuacagagugguggugcugagcuucgaacugcugcaugcuccugccacagugugcggcccuaagaaaagcaccaaucucgugaagaacaaaugcgugaacuucaacuucaacggccugaccggcaccggcgugcugacagagagcaacaagaaguuccugccauuccagcaguuuggccgggauaucgccgauaccacagacgccguuagagauccccagacacuggaaauccuggacaucaccccaugcagcuucggcggagugucugugaucaccccuggcaccaacaccagcaaucagguggcagugcuguaccaggacgugaacuguaccgaagugcccguggccauucacgccgaucagcugacaccuacauggcggguguacuccaccggcagcaauguguuucagaccagagccggcugucugaucggagccgagcacgugaacaauagcuacgagugcgacauccccaucggcgcuggcaucugugccagcuaccagacacagacaaacagccccagacgggcuagaagcguggccagccagagcaucauugccuacacaaugucucugggcgccgagaacagcguggccuacuccaacaacucuaucgcuauccccaccaacuucaccaucagcgugaccaccgagauccugccuguguccaugaccaagaccagcguggacugcaccauguacaucugcggcgauuccaccgagugcuccaaccugcugcugcaguacggcagcuucugcacccagcugaauagagcccugacagggaucgccguggaacaggacaagaacacccaagagguguucgcccaagugaagcaaaucuacaagaccccuccuaucaaggacuucggcggcuucaauuucagccagauucugcccgauccuagcaagcccagcaagcggagcuucaucgaggaccugcuguucaacaaagugacacuggccgacgccggcuucaucaagcaguauggcgauugucugggcgacauugccgccagggaucugauuugcgcccagaaguuuaacggacugacagugcugccuccucugcugaccgaugagaugaucgcccaguacacaucugcccugcuggccggcacaaucacaagcggcuggacauuuggagcuggcgccgcucugcagauccccuuugcuaugcagauggccuaccgguucaacggcaucggagugacccagugcgugcuguacgagaaccagaagcugaucgccaaccaguucaacagcgccaucggcaagauccaggacagccugagcagcacagcaagcgcccugggaaagcugcaggacguggucaaccagaaugcccaggcacugaacacccuggucaagcagcuguccuccaacuucggcgccaucagcucugugcugaacgauauccugagcagacuggacaaggucgaggccgaggugcagaucgacagacugaucacaggcagacugcagagccuccagacauacgugacccagcagcugaucagagccgccgagauuagagccucugccaaucuggccgccaccaagaugucugagugugugcugggccagagcaagagaguggacuuuugcggcaagggcuaccaccugaugagcuucccucagucugccccucacggcgugguguuucugcacgugacauaugugcccgcucaagagaagaauuucaccaccgcuccagccaucugccacgacggcaaagcccacuuuccuagagaaggcguguucguguccaacggcacccauugguucgugacacagcggaacuucuacgagccccagaucaucaccaccgacaacaccuucguguguggcaacugcgacguugugaucggcauugugaacaauaccguguacgacccucugcagcccgagcuggacagcuucaaagaggaacuggacaaguacuuuaagaaccacacaagccccgacguggaccugggcgauaucagcggaaucaaugccagcgucgugaacauccagaaagagaucgaccggcugaacgagguggccaagaaucugaacgagagccugaucgaccugcaagaacuggggaaguacgagcaguacaucaagggaggaucuggcuauauccccgaggcuccuagagauggccaggccuauguucggaaggauggcgaaugggugcugcugagcaccuuccuuuga

SEQ ID NO: 14137 - RNA, 4098 nt, Artificial Sequence
  SARS-CoV-2/Wuhan/WIV05/2019__EPI_ISL_402128 spike protein CDS gc mod (1-1211)(N914C_S1123C) WhcAg construct
auguucguguuucuggugcugcugccccugguguccagccagugugugaaccugaccaccagaacacagcugccuccagccuacaccaacagcuucaccagaggcguguacuaccccgacaagguguucagauccagcgugcugcacucuacccaggaccuguuccugccuuucuucagcaacgugaccugguuccacgccauccacguguccggcaccaauggcaccaagagauucgacaaccccgugcugcccuucaacgacgggguguacuuugccagcaccgagaaguccaacaucaucagaggcuggaucuucggcaccacacuggacagcaagacccagagccugcugaucgugaacaacgccaccaacguggucaucaaagugugcgaguuccaguucugcaacgaccccuuccugggcgucuacuaccacaagaacaacaagagcuggauggaaagcgaguuccggguguacagcagcgccaacaacugcaccuucgaguacgugucccagccuuuccugauggaccuggaaggcaagcagggcaacuucaagaaccugcgcgaguucguguucaagaacaucgacggcuacuucaaaaucuacagcaagcacaccccuaucaaccucgugcgggaucugccucagggcuucucugcucuggaaccccugguggaucugcccaucggcaucaacaucacccgguuucagacacugcuggcccugcacagaagcuaccugacaccuggcgauagcagcagcggauggacagcuggugccgccgcuuacuaugugggcuaccugcagccuagaaccuuccugcugaaguacaacgagaacggcaccaucaccgacgccguggauugugcucuggauccucugagcgagacaaagugcacccugaaguccuucaccguggaaaagggcaucuaccagaccagcaacuuccgggugcagcccaccgaauccaucgugcgguuccccaauaucaccaaucugugccccuucggcgagguguucaaugccaccagauucgccucuguguacgccuggaaccggaagcggaucagcaauugcguggccgacuacuccgugcuguacaacuccgccagcuucagcaccuucaagugcuacggcguguccccuaccaagcugaacgaccugugcuucacaaacguguacgccgacagcuucgugauccggggagaugaagugcggcagauugccccuggacagacaggcaagaucgccgacuacaacuacaagcugcccgacgacuucaccggcugugugauugccuggaacagcaacaaccuggacuccaaagucggcggcaacuacaauuaccuguaccggcuguuccggaaguccaaucugaagcccuucgagcgggacaucagcaccgaaaucuaucaggccggcagcaccccuugcaacggcguggaaggcuucaacugcuacuucccacugcaguccuacggcuuucagcccacaaauggcgugggcuaucagcccuacagagugguggugcugagcuucgaacugcugcaugcuccugccacagugugcggcccuaagaaaagcaccaaucucgugaagaacaaaugcgugaacuucaacuucaacggccugaccggcaccggcgugcugacagagagcaacaagaaguuccugccauuccagcaguuuggccgggauaucgccgauaccacagacgccguuagagauccccagacacuggaaauccuggacaucaccccaugcagcuucggcggagugucugugaucaccccuggcaccaacaccagcaaucagguggcagugcuguaccaggacgugaacuguaccgaagugcccguggccauucacgccgaucagcugacaccuacauggcggguguacuccaccggcagcaauguguuucagaccagagccggcugucugaucggagccgagcacgugaacaauagcuacgagugcgacauccccaucggcgcuggcaucugugccagcuaccagacacagacaaacagccccagacgggcuagaagcguggccagccagagcaucauugccuacacaaugucucugggcgccgagaacagcguggccuacuccaacaacucuaucgcuauccccaccaacuucaccaucagcgugaccaccgagauccugccuguguccaugaccaagaccagcguggacugcaccauguacaucugcggcgauuccaccgagugcuccaaccugcugcugcaguacggcagcuucugcacccagcugaauagagcccugacagggaucgccguggaacaggacaagaacacccaagagguguucgcccaagugaagcaaaucuacaagaccccuccuaucaaggacuucggcggcuucaauuucagccagauucugcccgauccuagcaagcccagcaagcggagcuucaucgaggaccugcuguucaacaaagugacacuggccgacgccggcuucaucaagcaguauggcgauugucugggcgacauugccgccagggaucugauuugcgcccagaaguuuaacggacugacagugcugccuccucugcugaccgaugagaugaucgcccaguacacaucugcccugcuggccggcacaaucacaagcggcuggacauuuggagcuggcgccgcucugcagauccccuuugcuaugcagauggccuaccgguucaacggcaucggagugacccagugcgugcuguacgagaaccagaagcugaucgccaaccaguucaacagcgccaucggcaagauccaggacagccugagcagcacagcaagcgcccugggaaagcugcaggacguggucaaccagaaugcccaggcacugaacacccuggucaagcagcuguccuccaacuucggcgccaucagcucugugcugaacgauauccugagcagacuggacaaggucgaggccgaggugcagaucgacagacugaucacaggcagacugcagagccuccagacauacgugacccagcagcugaucagagccgccgagauuagagccucugccaaucuggccgccaccaagaugucugagugugugcugggccagagcaagagaguggacuuuugcggcaagggcuaccaccugaugagcuucccucagucugccccucacggcgugguguuucugcacgugacauaugugcccgcucaagagaagaauuucaccaccgcuccagccaucugccacgacggcaaagcccacuuuccuagagaaggcguguucguguccaacggcacccauugguucgugacacagcggaacuucuacgagccccagaucaucaccaccgacaacaccuucguguguggcaacugcgacguugugaucggcauugugaacaauaccguguacgacccucugcagcccgagcuggacagcuucaaagaggaacuggacaaguacuuuaagaaccacacaagccccgacguggaccugggcgauaucagcggaaucaaugccagcgucgugaacauccagaaagagaucgaccggcugaacgagguggccaagaaucugaacgagagccugaucgaccugcaagaacuggggaaguacgagcaguacaucaagggaggcggaggaucugacaucgaccccuacaaagaguucggcagcagcuaccagcugcugaacuuccugccucuggacuucuuccccgaccugaacgcccugguggauacagccacagcucuguacgaggaagaacugaccggcagagagcacugcagcccucaccacacagccauuagacaggcccucgugugcugggacgagcugacaaaacugaucgccuggaugagcagcaacaucaccagcgagcaagugcggaccaucaucgugaaccacgugaacgauaccuggggccugaaagugcggcagagccugugguuucaccugagcugucugaccuucggccagcacaccgugcaagaguuucugguguccuucggcguguggaucagaaccccugcuccauacagaccuccaaacgcucccauccugagcacccugccugagcacacagugaucuguuga

SEQ ID NO: 14138 - RNA, 3924 nt, Artificial Sequence
  SARS-CoV-2/Wuhan/WIV05/2019__EPI_ISL_402128 spike protein CDS gc mod (1-1147)(N914C_S1123C) LumSynth construct
auguucguguuucuggugcugcugccccugguguccagccagugugugaaccugaccaccagaacacagcugccuccagccuacaccaacagcuucaccagaggcguguacuaccccgacaagguguucagauccagcgugcugcacucuacccaggaccuguuccugccuuucuucagcaacgugaccugguuccacgccauccacguguccggcaccaauggcaccaagagauucgacaaccccgugcugcccuucaacgacgggguguacuuugccagcaccgagaaguccaacaucaucagaggcuggaucuucggcaccacacuggacagcaagacccagagccugcugaucgugaacaacgccaccaacguggucaucaaagugugcgaguuccaguucugcaacgaccccuuccugggcgucuacuaccacaagaacaacaagagcuggauggaaagcgaguuccggguguacagcagcgccaacaacugcaccuucgaguacgugucccagccuuuccugauggaccuggaaggcaagcagggcaacuucaagaaccugcgcgaguucguguucaagaacaucgacggcuacuucaaaaucuacagcaagcacaccccuaucaaccucgugcgggaucugccucagggcuucucugcucuggaaccccugguggaucugcccaucggcaucaacaucacccgguuucagacacugcuggcccugcacagaagcuaccugacaccuggcgauagcagcagcggauggacagcuggugccgccgcuuacuaugugggcuaccugcagccuagaaccuuccugcugaaguacaacgagaacggcaccaucaccgacgccguggauugugcucuggauccucugagcgagacaaagugcacccugaaguccuucaccguggaaaagggcaucuaccagaccagcaacuuccgggugcagcccaccgaauccaucgugcgguuccccaauaucaccaaucugugccccuucggcgagguguucaaugccaccagauucgccucuguguacgccuggaaccggaagcggaucagcaauugcguggccgacuacuccgugcuguacaacuccgccagcuucagcaccuucaagugcuacggcguguccccuaccaagcugaacgaccugugcuucacaaacguguacgccgacagcuucgugauccggggagaugaagugcggcagauugccccuggacagacaggcaagaucgccgacuacaacuacaagcugcccgacgacuucaccggcugugugauugccuggaacagcaacaaccuggacuccaaagucggcggcaacuacaauuaccuguaccggcuguuccggaaguccaaucugaagcccuucgagcgggacaucagcaccgaaaucuaucaggccggcagcaccccuugcaacggcguggaaggcuucaacugcuacuucccacugcaguccuacggcuuucagcccacaaauggcgugggcuaucagcccuacagagugguggugcugagcuucgaacugcugcaugcuccugccacagugugcggcccuaagaaaagcaccaaucucgugaagaacaaaugcgugaacuucaacuucaacggccugaccggcaccggcgugcugacagagagcaacaagaaguuccugccauuccagcaguuuggccgggauaucgccgauaccacagacgccguuagagauccccagacacuggaaauccuggacaucaccccaugcagcuucggcggagugucugugaucaccccuggcaccaacaccagcaaucagguggcagugcuguaccaggacgugaacuguaccgaagugcccguggccauucacgccgaucagcugacaccuacauggcggguguacuccaccggcagcaauguguuucagaccagagccggcugucugaucggagccgagcacgugaacaauagcuacgagugcgacauccccaucggcgcuggcaucugugccagcuaccagacacagacaaacagccccagacgggcuagaagcguggccagccagagcaucauugccuacacaaugucucugggcgccgagaacagcguggccuacuccaacaacucuaucgcuauccccaccaacuucaccaucagcgugaccaccgagauccugccuguguccaugaccaagaccagcguggacugcaccauguacaucugcggcgauuccaccgagugcuccaaccugcugcugcaguacggcagcuucugcacccagcugaauagagcccugacagggaucgccguggaacaggacaagaacacccaagagguguucgcccaagugaagcaaaucuacaagaccccuccuaucaaggacuucggcggcuucaauuucagccagauucugcccgauccuagcaagcccagcaagcggagcuucaucgaggaccugcuguucaacaaagugacacuggccgacgccggcuucaucaagcaguauggcgauugucugggcgacauugccgccagggaucugauuugcgcccagaaguuuaacggacugacagugcugccuccucugcugaccgaugagaugaucgcccaguacacaucugcccugcuggccggcacaaucacaagcggcuggacauuuggagcuggcgccgcucugcagauccccuuugcuaugcagauggccuaccgguucaacggcaucggagugacccagugcgugcuguacgagaaccagaagcugaucgccaaccaguucaacagcgccaucggcaagauccaggacagccugagcagcacagcaagcgcccugggaaagcugcaggacguggucaaccagaaugcccaggcacugaacacccuggucaagcagcuguccuccaacuucggcgccaucagcucugugcugaacgauauccugagcagacuggacaaggucgaggccgaggugcagaucgacagacugaucacaggcagacugcagagccuccagacauacgugacccagcagcugaucagagccgccgagauuagagccucugccaaucuggccgccaccaagaugucugagugugugcugggccagagcaagagaguggacuuuugcggcaagggcuaccaccugaugagcuucccucagucugccccucacggcgugguguuucugcacgugacauaugugcccgcucaagagaagaauuucaccaccgcuccagccaucugccacgacggcaaagcccacuuuccuagagaaggcguguucguguccaacggcacccauugguucgugacacagcggaacuucuacgagccccagaucaucaccaccgacaacaccuucguguguggcaacugcgacguugugaucggcauugugaacaauaccguguacgacccucugcagcccgagcuggacagcggcggaggaucuggcggaggacagaucuacgagggcaagcugacagccgagggccugagauuuggaaucguggccagccgguucaaucacgcccugguggauagacugguggaaggcgccaucgaugccauugucagacacggcggcagagaagaggacaucacccucguuagagugcccggcucuugggagauuccuguggcugcuggcgagcuggcccggaaagaagauaucgacgccguuaucgccaucggcgugcugaucagaggcgccacaccucacuucgacuauaucgccagcgagguguccaaaggccuggccgaucugagccuggaacugagaaagcccaucaccuucggcgugaucaccgcugacacacuggaacaggccauugagagagccggcaccaagcacggcaacaaaggaugggaagccgcucuguccgccaucgagauggccaaccuguucaagagccugcgguga

SEQ ID NO: 14139 - RNA, 3948 nt, Artificial Sequence
  SARS-CoV-2/Wuhan/WIV05/2019__EPI_ISL_402128 spike protein CDS gc mod (1-1147)(N914C_S1123C) Ferritin construct
auguucguguuucuggugcugcugccccugguguccagccagugugugaaccugaccaccagaacacagcugccuccagccuacaccaacagcuucaccagaggcguguacuaccccgacaagguguucagauccagcgugcugcacucuacccaggaccuguuccugccuuucuucagcaacgugaccugguuccacgccauccacguguccggcaccaauggcaccaagagauucgacaaccccgugcugcccuucaacgacgggguguacuuugccagcaccgagaaguccaacaucaucagaggcuggaucuucggcaccacacuggacagcaagacccagagccugcugaucgugaacaacgccaccaacguggucaucaaagugugcgaguuccaguucugcaacgaccccuuccugggcgucuacuaccacaagaacaacaagagcuggauggaaagcgaguuccggguguacagcagcgccaacaacugcaccuucgaguacgugucccagccuuuccugauggaccuggaaggcaagcagggcaacuucaagaaccugcgcgaguucguguucaagaacaucgacggcuacuucaaaaucuacagcaagcacaccccuaucaaccucgugcgggaucugccucagggcuucucugcucuggaaccccugguggaucugcccaucggcaucaacaucacccgguuucagacacugcuggcccugcacagaagcuaccugacaccuggcgauagcagcagcggauggacagcuggugccgccgcuuacuaugugggcuaccugcagccuagaaccuuccugcugaaguacaacgagaacggcaccaucaccgacgccguggauugugcucuggauccucugagcgagacaaagugcacccugaaguccuucaccguggaaaagggcaucuaccagaccagcaacuuccgggugcagcccaccgaauccaucgugcgguuccccaauaucaccaaucugugccccuucggcgagguguucaaugccaccagauucgccucuguguacgccuggaaccggaagcggaucagcaauugcguggccgacuacuccgugcuguacaacuccgccagcuucagcaccuucaagugcuacggcguguccccuaccaagcugaacgaccugugcuucacaaacguguacgccgacagcuucgugauccggggagaugaagugcggcagauugccccuggacagacaggcaagaucgccgacuacaacuacaagcugcccgacgacuucaccggcugugugauugccuggaacagcaacaaccuggacuccaaagucggcggcaacuacaauuaccuguaccggcuguuccggaaguccaaucugaagcccuucgagcgggacaucagcaccgaaaucuaucaggccggcagcaccccuugcaacggcguggaaggcuucaacugcuacuucccacugcaguccuacggcuuucagcccacaaauggcgugggcuaucagcccuacagagugguggugcugagcuucgaacugcugcaugcuccugccacagugugcggcccuaagaaaagcaccaaucucgugaagaacaaaugcgugaacuucaacuucaacggccugaccggcaccggcgugcugacagagagcaacaagaaguuccugccauuccagcaguuuggccgggauaucgccgauaccacagacgccguuagagauccccagacacuggaaauccuggacaucaccccaugcagcuucggcggagugucugugaucaccccuggcaccaacaccagcaaucagguggcagugcuguaccaggacgugaacuguaccgaagugcccguggccauucacgccgaucagcugacaccuacauggcggguguacuccaccggcagcaauguguuucagaccagagccggcugucugaucggagccgagcacgugaacaauagcuacgagugcgacauccccaucggcgcuggcaucugugccagcuaccagacacagacaaacagccccagacgggcuagaagcguggccagccagagcaucauugccuacacaaugucucugggcgccgagaacagcguggccuacuccaacaacucuaucgcuauccccaccaacuucaccaucagcgugaccaccgagauccugccuguguccaugaccaagaccagcguggacugcaccauguacaucugcggcgauuccaccgagugcuccaaccugcugcugcaguacggcagcuucugcacccagcugaauagagcccugacagggaucgccguggaacaggacaagaacacccaagagguguucgcccaagugaagcaaaucuacaagaccccuccuaucaaggacuucggcggcuucaauuucagccagauucugcccgauccuagcaagcccagcaagcggagcuucaucgaggaccugcuguucaacaaagugacacuggccgacgccggcuucaucaagcaguauggcgauugucugggcgacauugccgccagggaucugauuugcgcccagaaguuuaacggacugacagugcugccuccucugcugaccgaugagaugaucgcccaguacacaucugcccugcuggccggcacaaucacaagcggcuggacauuuggagcuggcgccgcucugcagauccccuuugcuaugcagauggccuaccgguucaacggcaucggagugacccagugcgugcuguacgagaaccagaagcugaucgccaaccaguucaacagcgccaucggcaagauccaggacagccugagcagcacagcaagcgcccugggaaagcugcaggacguggucaaccagaaugcccaggcacugaacacccuggucaagcagcuguccuccaacuucggcgccaucagcucugugcugaacgauauccugagcagacuggacaaggucgaggccgaggugcagaucgacagacugaucacaggcagacugcagagccuccagacauacgugacccagcagcugaucagagccgccgagauuagagccucugccaaucuggccgccaccaagaugucugagugugugcugggccagagcaagagaguggacuuuugcggcaagggcuaccaccugaugagcuucccucagucugccccucacggcgugguguuucugcacgugacauaugugcccgcucaagagaagaauuucaccaccgcuccagccaucugccacgacggcaaagcccacuuuccuagagaaggcguguucguguccaacggcacccauugguucgugacacagcggaacuucuacgagccccagaucaucaccaccgacaacaccuucguguguggcaacugcgacguugugaucggcauugugaacaauaccguguacgacccucugcagcccgagcuggacagcggaggcggaggaucugacaucaucaagcugcugaacgagcaagugaacaaagagaugcagagcagcaaccuguacaugagcaugagcagcuggugcuacacccacagccuugauggcgccggacuguuccuguuugaucacgccgccgaggaauacgagcacgccaagaagcugaucaucuuccugaacgagaacaacgugcccgugcagcugaccagcauuucugccccugagcacaaguucgagggccugacacagaucuuccagaaggccuacgaacacgagcagcacaucagcgagagcaucaacaacaucguggaccacgccauuaagagcaaggaucacgccaccuucaacuuucugcagugguacguggccgaacagcacgaggaagaggugcuguucaaggacauccuggacaagaucgagcugaucggcaacgagaaccacggccuguaucuggccgaccaguacgugaagggaaucgccaagagcagaaagagcuga

SEQ ID NO: 14140 - RNA, 3534 nt, Artificial Sequence
  SARS-CoV-2/Wuhan/WIV05/2019__EPI_ISL_402128 spike protein CDS gc mod (1-1147)(N914C_S1123C) Foldon construct
auguucguguuucuggugcugcugccccugguguccagccagugugugaaccugaccaccagaacacagcugccuccagccuacaccaacagcuucaccagaggcguguacuaccccgacaagguguucagauccagcgugcugcacucuacccaggaccuguuccugccuuucuucagcaacgugaccugguuccacgccauccacguguccggcaccaauggcaccaagagauucgacaaccccgugcugcccuucaacgacgggguguacuuugccagcaccgagaaguccaacaucaucagaggcuggaucuucggcaccacacuggacagcaagacccagagccugcugaucgugaacaacgccaccaacguggucaucaaagugugcgaguuccaguucugcaacgaccccuuccugggcgucuacuaccacaagaacaacaagagcuggauggaaagcgaguuccggguguacagcagcgccaacaacugcaccuucgaguacgugucccagccuuuccugauggaccuggaaggcaagcagggcaacuucaagaaccugcgcgaguucguguucaagaacaucgacggcuacuucaaaaucuacagcaagcacaccccuaucaaccucgugcgggaucugccucagggcuucucugcucuggaaccccugguggaucugcccaucggcaucaacaucacccgguuucagacacugcuggcccugcacagaagcuaccugacaccuggcgauagcagcagcggauggacagcuggugccgccgcuuacuaugugggcuaccugcagccuagaaccuuccugcugaaguacaacgagaacggcaccaucaccgacgccguggauugugcucuggauccucugagcgagacaaagugcacccugaaguccuucaccguggaaaagggcaucuaccagaccagcaacuuccgggugcagcccaccgaauccaucgugcgguuccccaauaucaccaaucugugccccuucggcgagguguucaaugccaccagauucgccucuguguacgccuggaaccggaagcggaucagcaauugcguggccgacuacuccgugcuguacaacuccgccagcuucagcaccuucaagugcuacggcguguccccuaccaagcugaacgaccugugcuucacaaacguguacgccgacagcuucgugauccggggagaugaagugcggcagauugccccuggacagacaggcaagaucgccgacuacaacuacaagcugcccgacgacuucaccggcugugugauugccuggaacagcaacaaccuggacuccaaagucggcggcaacuacaauuaccuguaccggcuguuccggaaguccaaucugaagcccuucgagcgggacaucagcaccgaaaucuaucaggccggcagcaccccuugcaacggcguggaaggcuucaacugcuacuucccacugcaguccuacggcuuucagcccacaaauggcgugggcuaucagcccuacagagugguggugcugagcuucgaacugcugcaugcuccugccacagugugcggcccuaagaaaagcaccaaucucgugaagaacaaaugcgugaacuucaacuucaacggccugaccggcaccggcgugcugacagagagcaacaagaaguuccugccauuccagcaguuuggccgggauaucgccgauaccacagacgccguuagagauccccagacacuggaaauccuggacaucaccccaugcagcuucggcggagugucugugaucaccccuggcaccaacaccagcaaucagguggcagugcuguaccaggacgugaacuguaccgaagugcccguggccauucacgccgaucagcugacaccuacauggcggguguacuccaccggcagcaauguguuucagaccagagccggcugucugaucggagccgagcacgugaacaauagcuacgagugcgacauccccaucggcgcuggcaucugugccagcuaccagacacagacaaacagccccagacgggcuagaagcguggccagccagagcaucauugccuacacaaugucucugggcgccgagaacagcguggccuacuccaacaacucuaucgcuauccccaccaacuucaccaucagcgugaccaccgagauccugccuguguccaugaccaagaccagcguggacugcaccauguacaucugcggcgauuccaccgagugcuccaaccugcugcugcaguacggcagcuucugcacccagcugaauagagcccugacagggaucgccguggaacaggacaagaacacccaagagguguucgcccaagugaagcaaaucuacaagaccccuccuaucaaggacuucggcggcuucaauuucagccagauucugcccgauccuagcaagcccagcaagcggagcuucaucgaggaccugcuguucaacaaagugacacuggccgacgccggcuucaucaagcaguauggcgauugucugggcgacauugccgccagggaucugauuugcgcccagaaguuuaacggacugacagugcugccuccucugcugaccgaugagaugaucgcccaguacacaucugcccugcuggccggcacaaucacaagcggcuggacauuuggagcuggcgccgcucugcagauccccuuugcuaugcagauggccuaccgguucaacggcaucggagugacccagugcgugcuguacgagaaccagaagcugaucgccaaccaguucaacagcgccaucggcaagauccaggacagccugagcagcacagcaagcgcccugggaaagcugcaggacguggucaaccagaaugcccaggcacugaacacccuggucaagcagcuguccuccaacuucggcgccaucagcucugugcugaacgauauccugagcagacuggacaaggucgaggccgaggugcagaucgacagacugaucacaggcagacugcagagccuccagacauacgugacccagcagcugaucagagccgccgagauuagagccucugccaaucuggccgccaccaagaugucugagugugugcugggccagagcaagagaguggacuuuugcggcaagggcuaccaccugaugagcuucccucagucugccccucacggcgugguguuucugcacgugacauaugugcccgcucaagagaagaauuucaccaccgcuccagccaucugccacgacggcaaagcccacuuuccuagagaaggcguguucguguccaacggcacccauugguucgugacacagcggaacuucuacgagccccagaucaucaccaccgacaacaccuucguguguggcaacugcgacguugugaucggcauugugaacaauaccguguacgacccucugcagcccgagcuggacagcggaggaucuggcuauauccccgaggcuccuagagauggccaggccuauguucggaaggauggcgaaugggugcugcugagcaccuuccuuuga

SEQ ID NO: 14141 - RNA, 3906 nt, Artificial Sequence
  SARS-CoV-2/Wuhan/WIV05/2019__EPI_ISL_402128 spike protein CDS gc mod (1-1147)(N914C_S1123C) WhcAg construct
auguucguguuucuggugcugcugccccugguguccagccagugugugaaccugaccaccagaacacagcugccuccagccuacaccaacagcuucaccagaggcguguacuaccccgacaagguguucagauccagcgugcugcacucuacccaggaccuguuccugccuuucuucagcaacgugaccugguuccacgccauccacguguccggcaccaauggcaccaagagauucgacaaccccgugcugcccuucaacgacgggguguacuuugccagcaccgagaaguccaacaucaucagaggcuggaucuucggcaccacacuggacagcaagacccagagccugcugaucgugaacaacgccaccaacguggucaucaaagugugcgaguuccaguucugcaacgaccccuuccugggcgucuacuaccacaagaacaacaagagcuggauggaaagcgaguuccggguguacagcagcgccaacaacugcaccuucgaguacgugucccagccuuuccugauggaccuggaaggcaagcagggcaacuucaagaaccugcgcgaguucguguucaagaacaucgacggcuacuucaaaaucuacagcaagcacaccccuaucaaccucgugcgggaucugccucagggcuucucugcucuggaaccccugguggaucugcccaucggcaucaacaucacccgguuucagacacugcuggcccugcacagaagcuaccugacaccuggcgauagcagcagcggauggacagcuggugccgccgcuuacuaugugggcuaccugcagccuagaaccuuccugcugaaguacaacgagaacggcaccaucaccgacgccguggauugugcucuggauccucugagcgagacaaagugcacccugaaguccuucaccguggaaaagggcaucuaccagaccagcaacuuccgggugcagcccaccgaauccaucgugcgguuccccaauaucaccaaucugugccccuucggcgagguguucaaugccaccagauucgccucuguguacgccuggaaccggaagcggaucagcaauugcguggccgacuacuccgugcuguacaacuccgccagcuucagcaccuucaagugcuacggcguguccccuaccaagcugaacgaccugugcuucacaaacguguacgccgacagcuucgugauccggggagaugaagugcggcagauugccccuggacagacaggcaagaucgccgacuacaacuacaagcugcccgacgacuucaccggcugugugauugccuggaacagcaacaaccuggacuccaaagucggcggcaacuacaauuaccuguaccggcuguuccggaaguccaaucugaagcccuucgagcgggacaucagcaccgaaaucuaucaggccggcagcaccccuugcaacggcguggaaggcuucaacugcuacuucccacugcaguccuacggcuuucagcccacaaauggcgugggcuaucagcccuacagagugguggugcugagcuucgaacugcugcaugcuccugccacagugugcggcccuaagaaaagcaccaaucucgugaagaacaaaugcgugaacuucaacuucaacggccugaccggcaccggcgugcugacagagagcaacaagaaguuccugccauuccagcaguuuggccgggauaucgccgauaccacagacgccguuagagauccccagacacuggaaauccuggacaucaccccaugcagcuucggcggagugucugugaucaccccuggcaccaacaccagcaaucagguggcagugcuguaccaggacgugaacuguaccgaagugcccguggccauucacgccgaucagcugacaccuacauggcggguguacuccaccggcagcaauguguuucagaccagagccggcugucugaucggagccgagcacgugaacaauagcuacgagugcgacauccccaucggcgcuggcaucugugccagcuaccagacacagacaaacagccccagacgggcuagaagcguggccagccagagcaucauugccuacacaaugucucugggcgccgagaacagcguggccuacuccaacaacucuaucgcuauccccaccaacuucaccaucagcgugaccaccgagauccugccuguguccaugaccaagaccagcguggacugcaccauguacaucugcggcgauuccaccgagugcuccaaccugcugcugcaguacggcagcuucugcacccagcugaauagagcccugacagggaucgccguggaacaggacaagaacacccaagagguguucgcccaagugaagcaaaucuacaagaccccuccuaucaaggacuucggcggcuucaauuucagccagauucugcccgauccuagcaagcccagcaagcggagcuucaucgaggaccugcuguucaacaaagugacacuggccgacgccggcuucaucaagcaguauggcgauugucugggcgacauugccgccagggaucugauuugcgcccagaaguuuaacggacugacagugcugccuccucugcugaccgaugagaugaucgcccaguacacaucugcccugcuggccggcacaaucacaagcggcuggacauuuggagcuggcgccgcucugcagauccccuuugcuaugcagauggccuaccgguucaacggcaucggagugacccagugcgugcuguacgagaaccagaagcugaucgccaaccaguucaacagcgccaucggcaagauccaggacagccugagcagcacagcaagcgcccugggaaagcugcaggacguggucaaccagaaugcccaggcacugaacacccuggucaagcagcuguccuccaacuucggcgccaucagcucugugcugaacgauauccugagcagacuggacaaggucgaggccgaggugcagaucgacagacugaucacaggcagacugcagagccuccagacauacgugacccagcagcugaucagagccgccgagauuagagccucugccaaucuggccgccaccaagaugucugagugugugcugggccagagcaagagaguggacuuuugcggcaagggcuaccaccugaugagcuucccucagucugccccucacggcgugguguuucugcacgugacauaugugcccgcucaagagaagaauuucaccaccgcuccagccaucugccacgacggcaaagcccacuuuccuagagaaggcguguucguguccaacggcacccauugguucgugacacagcggaacuucuacgagccccagaucaucaccaccgacaacaccuucguguguggcaacugcgacguugugaucggcauugugaacaauaccguguacgacccucugcagcccgagcuggacagcggaggcggaggaucugacaucgaccccuacaaagaguucggcagcagcuaccagcugcugaacuuccugccucuggacuucuuccccgaccugaacgcccugguggauacagccacagcucuguacgaggaagaacugaccggcagagagcacugcagcccucaccacacagccauuagacaggcccucgugugcugggacgagcugacaaaacugaucgccuggaugagcagcaacaucaccagcgagcaagugcggaccaucaucgugaaccacgugaacgauaccuggggccugaaagugcggcagagccugugguuucaccugagcugucugaccuucggccagcacaccgugcaagaguuucugguguccuucggcguguggaucagaaccccugcuccauacagaccuccaaacgcucccauccugagcacccugccugagcacacagugaucuguuga

SEQ ID NO: 14142 - RNA, 4094 nt, Artificial Sequence
  SARS-CoV-2/Wuhan/WIV05/2019__EPI_ISL_402128 spike protein mRNA gc (1-1273)(N914C_S1123C)
aggagagucccgcagucggcguccagcggcucugcuuguucgugugugugucguugcaggccuuauucaagcuuaccauguucguguuccugguccuccugccccuggugagcucccagugcgugaaccucaccacccgcacgcagcugccgcccgccuacaccaacagcuucacccggggcgucuacuaccccgacaagguguuccgcuccagcgugcugcacuccacccaggaccucuuccugcccuucuucagcaacgucacgugguuccacgccauccacguguccgggaccaacggcaccaagcgguucgacaacccggugcugcccuucaacgacggggucuacuucgcgagcaccgagaaguccaacaucauccgcggcuggaucuucgggacgacccucgacagcaagacccagucccugcugaucgugaacaacgccaccaacguggucaucaaggugugcgaguuccaguucugcaacgaccccuuccucggcguguacuaccacaagaacaacaagagcuggauggaguccgaguuccgggucuacagcuccgccaacaacugcacguucgaguacgugagccagcccuuccugauggaccuggagggcaagcaggggaacuucaagaaccuccgcgaguucguguucaagaacaucgacggcuacuucaagaucuacuccaagcacaccccgaucaaccugguccgggaccugccccagggguucagcgcccucgagccccugguggaccugcccaucggcaucaacaucacccgcuuccagacccuccuggcccugcaccgguccuaccucacgccgggggacagcagcuccggcuggaccgcgggcgccgccgccuacuacgugggguaccugcagccccgcaccuuccugcucaaguacaacgagaacggcaccaucacggacgcggucgacugcgcccuggacccccugagcgagaccaagugcacccucaaguccuucaccguggagaaggggaucuaccagacgagcaacuuccgggugcagcccaccgaguccaucguccgcuucccgaacaucaccaaccugugccccuucggcgagguguucaacgccacccgguucgccagcgucuacgccuggaaccgcaagcggaucuccaacugcguggcggacuacagcgugcuguacaacuccgccagcuucuccacguucaagugcuacggcgucagccccaccaagcucaacgaccugugcuucaccaacguguacgccgacuccuucgugauccgcggggacgagguccggcagaucgcccccggccagaccgggaagaucgccgacuacaacuacaagcugccggacgacuucacgggcugcgugaucgcguggaacagcaacaaccucgacuccaaggucgggggcaacuacaacuaccuguaccgccuguuccgcaagagcaaccucaagcccuucgagcgggacaucuccaccgagaucuaccaggccggcagcacccccugcaacgggguggagggcuucaacugcuacuucccccugcaguccuacggguuccagccgaccaacggcgugggguaccagcccuaccggguggucgugcugagcuucgagcuccugcacgcccccgccacggugugcggccccaagaaguccaccaaccuggucaagaacaagugcgugaacuucaacuucaacggccucaccgggaccggcgugcugaccgagagcaacaagaaguuccugccguuccagcaguucgggcgcgacaucgccgacacgaccgacgcgguccgcgacccccagacccuggagauccucgacaucacccccugcagcuucggcgggguguccgugaucacgccgggcaccaacaccagcaaccaggucgccgugcuguaccaggacgugaacugcaccgagguccccguggccauccacgccgaccagcugacgcccaccuggcggguguacuccaccggcagcaacgucuuccagacccgcgccgggugccucaucggcgcggagcacgugaacaacuccuacgagugcgacauccccaucggggccggcaucugcgccagcuaccagacgcagaccaacuccccgcggcgcgcccggagcguggcgucccagagcaucaucgccuacaccaugucccugggcgccgagaacagcgucgccuacuccaacaacagcaucgccauccccaccaacuucacgaucuccgugaccaccgagauccugcccgugagcaugaccaagacgagcgucgacugcaccauguacaucugcggggacuccaccgagugcagcaaccuccugcugcaguacggcuccuucugcacccagcucaaccgcgcgcugacggggaucgccguggagcaggacaagaacacccaggagguguucgcccaggucaagcagaucuacaagacgcccccgaucaaggacuucggcggguucaacuucagccagauccugcccgaccccuccaagcccagcaagcgguccuucaucgaggaccuccuguucaacaaggugacccuggccgacgccggcuucaucaagcaguacggcgacugccucggggacaucgcggcccgcgaccugaucugcgcccagaaguucaacggccugaccgugcucccgccccugcugaccgacgagaugaucgcccaguacaccagcgcccuccuggcggggaccaucacguccggcuggaccuucggggccggcgccgcccugcagauccccuucgcgaugcagauggccuaccgguucaacggcaucggggucacccagugcgugcucuacgagaaccagaagcugaucgccaaccaguucaacagcgccaucggcaagauccaggacucccugagcuccaccgccagcgcgcucgggaagcugcaggacguggucaaccagaacgcccaggcccugaacacgcucgugaagcagcuguccagcaacuucggcgccaucuccagcgugcugaacgacauccucucccgccuggacaaggucgaggccgaggugcagaucgaccggcugaucaccgggcgccuccagagccugcagaccuacgugacccagcagcugauccgggcggccgagauccgcgccagcgccaaccucgccgcgaccaagauguccgagugcguccugggccagagcaagcggguggacuucugcggcaagggguaccaccugauguccuucccccagagcgccccgcacggcguggucuuccuccacgugacguacguccccgcccaggagaagaacuucaccaccgcccccgcgaucugccacgacgggaaggcccacuucccccgcgagggcguguucguguccaacgggacccacugguucgucacgcagcggaacuucuacgagccgcagaucaucaccaccgacaacaccuucgugugcggcaacugcgacguggucaucggcaucgugaacaacacgguguacgacccccugcagcccgagcuggacuccuucaaggaggagcucgacaaguacuucaagaaccacaccagccccgacgucgaccugggggacaucuccggcaucaacgccagcguggugaacauccagaaggagaucgaccgccugaacgaggucgccaagaaccucaacgagucccugaucgaccugcaggagcucgggaaguacgagcaguacaucaaguggccgugguacaucuggcugggcuucaucgccggccugaucgcgaucgugauggugaccaucaugcucugcugcaugaccagcugcugcuccugccugaaggggugcugcagcugcggcuccugcugcaaguucgacgaggacgacagcgagcccguccugaagggggugaagcuccacuacacgugaggacuagucccuguucccagagcccacuuuuuuuucuuuuuuugaaauaaaauagccugucuuucagaucucaaaggcucuuuucagagccaccaaaaaaaaaaaaaaaaaaaaaaaaaaaaaaaaaaaaaaaaaaaaaaaaaaaaaaaaaaaaaaaaaaaaaaaaaaaaaaaaaaaaaaaaaaaaaaaaaaaaa

SEQ ID NO: 14143 - RNA, 4388 nt, Artificial Sequence
  SARS-CoV-2/Wuhan/WIV05/2019__EPI_ISL_402128 spike protein mRNA gc (1-1211)(N914C_S1123C) LumSynth construct
aggagagucccgcagucggcguccagcggcucugcuuguucgugugugugucguugcaggccuuauucaagcuuaccauguucguguuccugguccuccugccccuggugagcucccagugcgugaaccucaccacccgcacgcagcugccgcccgccuacaccaacagcuucacccggggcgucuacuaccccgacaagguguuccgcuccagcgugcugcacuccacccaggaccucuuccugcccuucuucagcaacgucacgugguuccacgccauccacguguccgggaccaacggcaccaagcgguucgacaacccggugcugcccuucaacgacggggucuacuucgcgagcaccgagaaguccaacaucauccgcggcuggaucuucgggacgacccucgacagcaagacccagucccugcugaucgugaacaacgccaccaacguggucaucaaggugugcgaguuccaguucugcaacgaccccuuccucggcguguacuaccacaagaacaacaagagcuggauggaguccgaguuccgggucuacagcuccgccaacaacugcacguucgaguacgugagccagcccuuccugauggaccuggagggcaagcaggggaacuucaagaaccuccgcgaguucguguucaagaacaucgacggcuacuucaagaucuacuccaagcacaccccgaucaaccugguccgggaccugccccagggguucagcgcccucgagccccugguggaccugcccaucggcaucaacaucacccgcuuccagacccuccuggcccugcaccgguccuaccucacgccgggggacagcagcuccggcuggaccgcgggcgccgccgccuacuacgugggguaccugcagccccgcaccuuccugcucaaguacaacgagaacggcaccaucacggacgcggucgacugcgcccuggacccccugagcgagaccaagugcacccucaaguccuucaccguggagaaggggaucuaccagacgagcaacuuccgggugcagcccaccgaguccaucguccgcuucccgaacaucaccaaccugugccccuucggcgagguguucaacgccacccgguucgccagcgucuacgccuggaaccgcaagcggaucuccaacugcguggcggacuacagcgugcuguacaacuccgccagcuucuccacguucaagugcuacggcgucagccccaccaagcucaacgaccugugcuucaccaacguguacgccgacuccuucgugauccgcggggacgagguccggcagaucgcccccggccagaccgggaagaucgccgacuacaacuacaagcugccggacgacuucacgggcugcgugaucgcguggaacagcaacaaccucgacuccaaggucgggggcaacuacaacuaccuguaccgccuguuccgcaagagcaaccucaagcccuucgagcgggacaucuccaccgagaucuaccaggccggcagcacccccugcaacgggguggagggcuucaacugcuacuucccccugcaguccuacggguuccagccgaccaacggcgugggguaccagcccuaccggguggucgugcugagcuucgagcuccugcacgcccccgccacggugugcggccccaagaaguccaccaaccuggucaagaacaagugcgugaacuucaacuucaacggccucaccgggaccggcgugcugaccgagagcaacaagaaguuccugccguuccagcaguucgggcgcgacaucgccgacacgaccgacgcgguccgcgacccccagacccuggagauccucgacaucacccccugcagcuucggcgggguguccgugaucacgccgggcaccaacaccagcaaccaggucgccgugcuguaccaggacgugaacugcaccgagguccccguggccauccacgccgaccagcugacgcccaccuggcggguguacuccaccggcagcaacgucuuccagacccgcgccgggugccucaucggcgcggagcacgugaacaacuccuacgagugcgacauccccaucggggccggcaucugcgccagcuaccagacgcagaccaacuccccgcggcgcgcccggagcguggcgucccagagcaucaucgccuacaccaugucccugggcgccgagaacagcgucgccuacuccaacaacagcaucgccauccccaccaacuucacgaucuccgugaccaccgagauccugcccgugagcaugaccaagacgagcgucgacugcaccauguacaucugcggggacuccaccgagugcagcaaccuccugcugcaguacggcuccuucugcacccagcucaaccgcgcgcugacggggaucgccguggagcaggacaagaacacccaggagguguucgcccaggucaagcagaucuacaagacgcccccgaucaaggacuucggcggguucaacuucagccagauccugcccgaccccuccaagcccagcaagcgguccuucaucgaggaccuccuguucaacaaggugacccuggccgacgccggcuucaucaagcaguacggcgacugccucggggacaucgcggcccgcgaccugaucugcgcccagaaguucaacggccugaccgugcucccgccccugcugaccgacgagaugaucgcccaguacaccagcgcccuccuggcggggaccaucacguccggcuggaccuucggggccggcgccgcccugcagauccccuucgcgaugcagauggccuaccgguucaacggcaucggggucacccagugcgugcucuacgagaaccagaagcugaucgccaaccaguucaacagcgccaucggcaagauccaggacucccugagcuccaccgccagcgcgcucgggaagcugcaggacguggucaaccagaacgcccaggcccugaacacgcucgugaagcagcuguccagcaacuucggcgccaucuccagcgugcugaacgacauccucucccgccuggacaaggucgaggccgaggugcagaucgaccggcugaucaccgggcgccuccagagccugcagaccuacgugacccagcagcugauccgggcggccgagauccgcgccagcgccaaccucgccgcgaccaagauguccgagugcguccugggccagagcaagcggguggacuucugcggcaagggguaccaccugauguccuucccccagagcgccccgcacggcguggucuuccuccacgugacguacguccccgcccaggagaagaacuucaccaccgcccccgcgaucugccacgacgggaaggcccacuucccccgcgagggcguguucguguccaacgggacccacugguucgucacgcagcggaacuucuacgagccgcagaucaucaccaccgacaacaccuucgugugcggcaacugcgacguggucaucggcaucgugaacaacacgguguacgacccccugcagcccgagcuggacuccuucaaggaggagcucgacaaguacuucaagaaccacaccagccccgacgucgaccugggggacaucuccggcaucaacgccagcguggugaacauccagaaggagaucgaccgccugaacgaggucgccaagaaccucaacgagucccugaucgaccugcaggagcucgggaaguacgagcaguacaucaagggcggcgggagcgggggcgggcagaucuacgagggcaagcugaccgccgaggggcuccgcuucggcaucguggccagccgguucaaccacgcgcuggucgaccgccugguggagggggccaucgacgccaucgugcggcacggcgggcgcgaggaggacaucacccucguccgggugcccggcuccugggagaucccgguggccgccggcgagcuggcccgcaaggaggacaucgacgcggucaucgccaucggggugcugauccggggcgccacgccccacuucgacuacaucgccagcgagguguccaaggggcucgcggaccugagccuggagcuccgcaagcccaucaccuucggcgucaucaccgccgacacccuggagcaggccaucgagcgggccgggacgaagcacggcaacaagggcugggaggccgcgcuguccgccaucgagauggccaaccucuucaagagccugcgcugaggacuagucccuguucccagagcccacuuuuuuuucuuuuuuugaaauaaaauagccugucuuucagaucucaaaggcucuuuucagagccaccaaaaaaaaaaaaaaaaaaaaaaaaaaaaaaaaaaaaaaaaaaaaaaaaaaaaaaaaaaaaaaaaaaaaaaaaaaaaaaaaaaaaaaaaaaaaaaaaaaaaa

SEQ ID NO: 14144 - RNA, 4412 nt, Artificial Sequence
  SARS-CoV-2/Wuhan/WIV05/2019__EPI_ISL_402128 spike protein mRNA gc (1-1211)(N914C_S1123C) Ferritin construct
aggagagucccgcagucggcguccagcggcucugcuuguucgugugugugucguugcaggccuuauucaagcuuaccauguucguguuccugguccuccugccccuggugagcucccagugcgugaaccucaccacccgcacgcagcugccgcccgccuacaccaacagcuucacccggggcgucuacuaccccgacaagguguuccgcuccagcgugcugcacuccacccaggaccucuuccugcccuucuucagcaacgucacgugguuccacgccauccacguguccgggaccaacggcaccaagcgguucgacaacccggugcugcccuucaacgacggggucuacuucgcgagcaccgagaaguccaacaucauccgcggcuggaucuucgggacgacccucgacagcaagacccagucccugcugaucgugaacaacgccaccaacguggucaucaaggugugcgaguuccaguucugcaacgaccccuuccucggcguguacuaccacaagaacaacaagagcuggauggaguccgaguuccgggucuacagcuccgccaacaacugcacguucgaguacgugagccagcccuuccugauggaccuggagggcaagcaggggaacuucaagaaccuccgcgaguucguguucaagaacaucgacggcuacuucaagaucuacuccaagcacaccccgaucaaccugguccgggaccugccccagggguucagcgcccucgagccccugguggaccugcccaucggcaucaacaucacccgcuuccagacccuccuggcccugcaccgguccuaccucacgccgggggacagcagcuccggcuggaccgcgggcgccgccgccuacuacgugggguaccugcagccccgcaccuuccugcucaaguacaacgagaacggcaccaucacggacgcggucgacugcgcccuggacccccugagcgagaccaagugcacccucaaguccuucaccguggagaaggggaucuaccagacgagcaacuuccgggugcagcccaccgaguccaucguccgcuucccgaacaucaccaaccugugccccuucggcgagguguucaacgccacccgguucgccagcgucuacgccuggaaccgcaagcggaucuccaacugcguggcggacuacagcgugcuguacaacuccgccagcuucuccacguucaagugcuacggcgucagccccaccaagcucaacgaccugugcuucaccaacguguacgccgacuccuucgugauccgcggggacgagguccggcagaucgcccccggccagaccgggaagaucgccgacuacaacuacaagcugccggacgacuucacgggcugcgugaucgcguggaacagcaacaaccucgacuccaaggucgggggcaacuacaacuaccuguaccgccuguuccgcaagagcaaccucaagcccuucgagcgggacaucuccaccgagaucuaccaggccggcagcacccccugcaacgggguggagggcuucaacugcuacuucccccugcaguccuacggguuccagccgaccaacggcgugggguaccagcccuaccggguggucgugcugagcuucgagcuccugcacgcccccgccacggugugcggccccaagaaguccaccaaccuggucaagaacaagugcgugaacuucaacuucaacggccucaccgggaccggcgugcugaccgagagcaacaagaaguuccugccguuccagcaguucgggcgcgacaucgccgacacgaccgacgcgguccgcgacccccagacccuggagauccucgacaucacccccugcagcuucggcgggguguccgugaucacgccgggcaccaacaccagcaaccaggucgccgugcuguaccaggacgugaacugcaccgagguccccguggccauccacgccgaccagcugacgcccaccuggcggguguacuccaccggcagcaacgucuuccagacccgcgccgggugccucaucggcgcggagcacgugaacaacuccuacgagugcgacauccccaucggggccggcaucugcgccagcuaccagacgcagaccaacuccccgcggcgcgcccggagcguggcgucccagagcaucaucgccuacaccaugucccugggcgccgagaacagcgucgccuacuccaacaacagcaucgccauccccaccaacuucacgaucuccgugaccaccgagauccugcccgugagcaugaccaagacgagcgucgacugcaccauguacaucugcggggacuccaccgagugcagcaaccuccugcugcaguacggcuccuucugcacccagcucaaccgcgcgcugacggggaucgccguggagcaggacaagaacacccaggagguguucgcccaggucaagcagaucuacaagacgcccccgaucaaggacuucggcggguucaacuucagccagauccugcccgaccccuccaagcccagcaagcgguccuucaucgaggaccuccuguucaacaaggugacccuggccgacgccggcuucaucaagcaguacggcgacugccucggggacaucgcggcccgcgaccugaucugcgcccagaaguucaacggccugaccgugcucccgccccugcugaccgacgagaugaucgcccaguacaccagcgcccuccuggcggggaccaucacguccggcuggaccuucggggccggcgccgcccugcagauccccuucgcgaugcagauggccuaccgguucaacggcaucggggucacccagugcgugcucuacgagaaccagaagcugaucgccaaccaguucaacagcgccaucggcaagauccaggacucccugagcuccaccgccagcgcgcucgggaagcugcaggacguggucaaccagaacgcccaggcccugaacacgcucgugaagcagcuguccagcaacuucggcgccaucuccagcgugcugaacgacauccucucccgccuggacaaggucgaggccgaggugcagaucgaccggcugaucaccgggcgccuccagagccugcagaccuacgugacccagcagcugauccgggcggccgagauccgcgccagcgccaaccucgccgcgaccaagauguccgagugcguccugggccagagcaagcggguggacuucugcggcaagggguaccaccugauguccuucccccagagcgccccgcacggcguggucuuccuccacgugacguacguccccgcccaggagaagaacuucaccaccgcccccgcgaucugccacgacgggaaggcccacuucccccgcgagggcguguucguguccaacgggacccacugguucgucacgcagcggaacuucuacgagccgcagaucaucaccaccgacaacaccuucgugugcggcaacugcgacguggucaucggcaucgugaacaacacgguguacgacccccugcagcccgagcuggacuccuucaaggaggagcucgacaaguacuucaagaaccacaccagccccgacgucgaccugggggacaucuccggcaucaacgccagcguggugaacauccagaaggagaucgaccgccugaacgaggucgccaagaaccucaacgagucccugaucgaccugcaggagcucgggaaguacgagcaguacaucaagggcgggggcgggagcgacaucaucaagcuccugaacgagcaggucaacaaggagaugcaguccagcaaccuguacauguccaugagcuccuggugcuacacccacagccucgacggcgccgggcuguuccuguucgaccacgccgcggaggaguacgagcacgccaagaagcucaucaucuuccugaacgagaacaacgugcccgugcagcugaccuccaucagcgccccggagcacaaguucgagggccucacgcagaucuuccagaaggccuacgagcacgagcagcacaucuccgagagcaucaacaacaucguggaccacgccaucaaguccaaggaccacgcgaccuucaacuuccugcagugguacgucgccgagcagcacgaggaggaggugcuguucaaggacauccucgacaagaucgagcugaucgggaacgagaaccacggccuguaccucgccgaccaguacgugaaggggaucgccaagagccgcaaguccugaggacuagucccuguucccagagcccacuuuuuuuucuuuuuuugaaauaaaauagccugucuuucagaucucaaaggcucuuuucagagccaccaaaaaaaaaaaaaaaaaaaaaaaaaaaaaaaaaaaaaaaaaaaaaaaaaaaaaaaaaaaaaaaaaaaaaaaaaaaaaaaaaaaaaaaaaaaaaaaaaaaaa

SEQ ID NO: 14145 - RNA, 3998 nt, Artificial Sequence
  SARS-CoV-2/Wuhan/WIV05/2019__EPI_ISL_402128 spike protein mRNA gc (1-1211)(N914C_S1123C) Foldon construct
aggagagucccgcagucggcguccagcggcucugcuuguucgugugugugucguugcaggccuuauucaagcuuaccauguucguguuccugguccuccugccccuggugagcucccagugcgugaaccucaccacccgcacgcagcugccgcccgccuacaccaacagcuucacccggggcgucuacuaccccgacaagguguuccgcuccagcgugcugcacuccacccaggaccucuuccugcccuucuucagcaacgucacgugguuccacgccauccacguguccgggaccaacggcaccaagcgguucgacaacccggugcugcccuucaacgacggggucuacuucgcgagcaccgagaaguccaacaucauccgcggcuggaucuucgggacgacccucgacagcaagacccagucccugcugaucgugaacaacgccaccaacguggucaucaaggugugcgaguuccaguucugcaacgaccccuuccucggcguguacuaccacaagaacaacaagagcuggauggaguccgaguuccgggucuacagcuccgccaacaacugcacguucgaguacgugagccagcccuuccugauggaccuggagggcaagcaggggaacuucaagaaccuccgcgaguucguguucaagaacaucgacggcuacuucaagaucuacuccaagcacaccccgaucaaccugguccgggaccugccccagggguucagcgcccucgagccccugguggaccugcccaucggcaucaacaucacccgcuuccagacccuccuggcccugcaccgguccuaccucacgccgggggacagcagcuccggcuggaccgcgggcgccgccgccuacuacgugggguaccugcagccccgcaccuuccugcucaaguacaacgagaacggcaccaucacggacgcggucgacugcgcccuggacccccugagcgagaccaagugcacccucaaguccuucaccguggagaaggggaucuaccagacgagcaacuuccgggugcagcccaccgaguccaucguccgcuucccgaacaucaccaaccugugccccuucggcgagguguucaacgccacccgguucgccagcgucuacgccuggaaccgcaagcggaucuccaacugcguggcggacuacagcgugcuguacaacuccgccagcuucuccacguucaagugcuacggcgucagccccaccaagcucaacgaccugugcuucaccaacguguacgccgacuccuucgugauccgcggggacgagguccggcagaucgcccccggccagaccgggaagaucgccgacuacaacuacaagcugccggacgacuucacgggcugcgugaucgcguggaacagcaacaaccucgacuccaaggucgggggcaacuacaacuaccuguaccgccuguuccgcaagagcaaccucaagcccuucgagcgggacaucuccaccgagaucuaccaggccggcagcacccccugcaacgggguggagggcuucaacugcuacuucccccugcaguccuacggguuccagccgaccaacggcgugggguaccagcccuaccggguggucgugcugagcuucgagcuccugcacgcccccgccacggugugcggccccaagaaguccaccaaccuggucaagaacaagugcgugaacuucaacuucaacggccucaccgggaccggcgugcugaccgagagcaacaagaaguuccugccguuccagcaguucgggcgcgacaucgccgacacgaccgacgcgguccgcgacccccagacccuggagauccucgacaucacccccugcagcuucggcgggguguccgugaucacgccgggcaccaacaccagcaaccaggucgccgugcuguaccaggacgugaacugcaccgagguccccguggccauccacgccgaccagcugacgcccaccuggcggguguacuccaccggcagcaacgucuuccagacccgcgccgggugccucaucggcgcggagcacgugaacaacuccuacgagugcgacauccccaucggggccggcaucugcgccagcuaccagacgcagaccaacuccccgcggcgcgcccggagcguggcgucccagagcaucaucgccuacaccaugucccugggcgccgagaacagcgucgccuacuccaacaacagcaucgccauccccaccaacuucacgaucuccgugaccaccgagauccugcccgugagcaugaccaagacgagcgucgacugcaccauguacaucugcggggacuccaccgagugcagcaaccuccugcugcaguacggcuccuucugcacccagcucaaccgcgcgcugacggggaucgccguggagcaggacaagaacacccaggagguguucgcccaggucaagcagaucuacaagacgcccccgaucaaggacuucggcggguucaacuucagccagauccugcccgaccccuccaagcccagcaagcgguccuucaucgaggaccuccuguucaacaaggugacccuggccgacgccggcuucaucaagcaguacggcgacugccucggggacaucgcggcccgcgaccugaucugcgcccagaaguucaacggccugaccgugcucccgccccugcugaccgacgagaugaucgcccaguacaccagcgcccuccuggcggggaccaucacguccggcuggaccuucggggccggcgccgcccugcagauccccuucgcgaugcagauggccuaccgguucaacggcaucggggucacccagugcgugcucuacgagaaccagaagcugaucgccaaccaguucaacagcgccaucggcaagauccaggacucccugagcuccaccgccagcgcgcucgggaagcugcaggacguggucaaccagaacgcccaggcccugaacacgcucgugaagcagcuguccagcaacuucggcgccaucuccagcgugcugaacgacauccucucccgccuggacaaggucgaggccgaggugcagaucgaccggcugaucaccgggcgccuccagagccugcagaccuacgugacccagcagcugauccgggcggccgagauccgcgccagcgccaaccucgccgcgaccaagauguccgagugcguccugggccagagcaagcggguggacuucugcggcaagggguaccaccugauguccuucccccagagcgccccgcacggcguggucuuccuccacgugacguacguccccgcccaggagaagaacuucaccaccgcccccgcgaucugccacgacgggaaggcccacuucccccgcgagggcguguucguguccaacgggacccacugguucgucacgcagcggaacuucuacgagccgcagaucaucaccaccgacaacaccuucgugugcggcaacugcgacguggucaucggcaucgugaacaacacgguguacgacccccugcagcccgagcuggacuccuucaaggaggagcucgacaaguacuucaagaaccacaccagccccgacgucgaccugggggacaucuccggcaucaacgccagcguggugaacauccagaaggagaucgaccgccugaacgaggucgccaagaaccucaacgagucccugaucgaccugcaggagcucgggaaguacgagcaguacaucaagggcgggagcggcuacauccccgaggccccgcgcgacgggcaggccuacgugcggaaggacggcgaguggguccugcucagcaccuuccugugaggacuagucccuguucccagagcccacuuuuuuuucuuuuuuugaaauaaaauagccugucuuucagaucucaaaggcucuuuucagagccaccaaaaaaaaaaaaaaaaaaaaaaaaaaaaaaaaaaaaaaaaaaaaaaaaaaaaaaaaaaaaaaaaaaaaaaaaaaaaaaaaaaaaaaaaaaaaaaaaaaaaa

SEQ ID NO: 14146 - RNA, 4370 nt, Artificial Sequence
  SARS-CoV-2/Wuhan/WIV05/2019__EPI_ISL_402128 spike protein mRNA gc (1-1211)(N914C_S1123C) WhcAg construct
aggagagucccgcagucggcguccagcggcucugcuuguucgugugugugucguugcaggccuuauucaagcuuaccauguucguguuccugguccuccugccccuggugagcucccagugcgugaaccucaccacccgcacgcagcugccgcccgccuacaccaacagcuucacccggggcgucuacuaccccgacaagguguuccgcuccagcgugcugcacuccacccaggaccucuuccugcccuucuucagcaacgucacgugguuccacgccauccacguguccgggaccaacggcaccaagcgguucgacaacccggugcugcccuucaacgacggggucuacuucgcgagcaccgagaaguccaacaucauccgcggcuggaucuucgggacgacccucgacagcaagacccagucccugcugaucgugaacaacgccaccaacguggucaucaaggugugcgaguuccaguucugcaacgaccccuuccucggcguguacuaccacaagaacaacaagagcuggauggaguccgaguuccgggucuacagcuccgccaacaacugcacguucgaguacgugagccagcccuuccugauggaccuggagggcaagcaggggaacuucaagaaccuccgcgaguucguguucaagaacaucgacggcuacuucaagaucuacuccaagcacaccccgaucaaccugguccgggaccugccccagggguucagcgcccucgagccccugguggaccugcccaucggcaucaacaucacccgcuuccagacccuccuggcccugcaccgguccuaccucacgccgggggacagcagcuccggcuggaccgcgggcgccgccgccuacuacgugggguaccugcagccccgcaccuuccugcucaaguacaacgagaacggcaccaucacggacgcggucgacugcgcccuggacccccugagcgagaccaagugcacccucaaguccuucaccguggagaaggggaucuaccagacgagcaacuuccgggugcagcccaccgaguccaucguccgcuucccgaacaucaccaaccugugccccuucggcgagguguucaacgccacccgguucgccagcgucuacgccuggaaccgcaagcggaucuccaacugcguggcggacuacagcgugcuguacaacuccgccagcuucuccacguucaagugcuacggcgucagccccaccaagcucaacgaccugugcuucaccaacguguacgccgacuccuucgugauccgcggggacgagguccggcagaucgcccccggccagaccgggaagaucgccgacuacaacuacaagcugccggacgacuucacgggcugcgugaucgcguggaacagcaacaaccucgacuccaaggucgggggcaacuacaacuaccuguaccgccuguuccgcaagagcaaccucaagcccuucgagcgggacaucuccaccgagaucuaccaggccggcagcacccccugcaacgggguggagggcuucaacugcuacuucccccugcaguccuacggguuccagccgaccaacggcgugggguaccagcccuaccggguggucgugcugagcuucgagcuccugcacgcccccgccacggugugcggccccaagaaguccaccaaccuggucaagaacaagugcgugaacuucaacuucaacggccucaccgggaccggcgugcugaccgagagcaacaagaaguuccugccguuccagcaguucgggcgcgacaucgccgacacgaccgacgcgguccgcgacccccagacccuggagauccucgacaucacccccugcagcuucggcgggguguccgugaucacgccgggcaccaacaccagcaaccaggucgccgugcuguaccaggacgugaacugcaccgagguccccguggccauccacgccgaccagcugacgcccaccuggcggguguacuccaccggcagcaacgucuuccagacccgcgccgggugccucaucggcgcggagcacgugaacaacuccuacgagugcgacauccccaucggggccggcaucugcgccagcuaccagacgcagaccaacuccccgcggcgcgcccggagcguggcgucccagagcaucaucgccuacaccaugucccugggcgccgagaacagcgucgccuacuccaacaacagcaucgccauccccaccaacuucacgaucuccgugaccaccgagauccugcccgugagcaugaccaagacgagcgucgacugcaccauguacaucugcggggacuccaccgagugcagcaaccuccugcugcaguacggcuccuucugcacccagcucaaccgcgcgcugacggggaucgccguggagcaggacaagaacacccaggagguguucgcccaggucaagcagaucuacaagacgcccccgaucaaggacuucggcggguucaacuucagccagauccugcccgaccccuccaagcccagcaagcgguccuucaucgaggaccuccuguucaacaaggugacccuggccgacgccggcuucaucaagcaguacggcgacugccucggggacaucgcggcccgcgaccugaucugcgcccagaaguucaacggccugaccgugcucccgccccugcugaccgacgagaugaucgcccaguacaccagcgcccuccuggcggggaccaucacguccggcuggaccuucggggccggcgccgcccugcagauccccuucgcgaugcagauggccuaccgguucaacggcaucggggucacccagugcgugcucuacgagaaccagaagcugaucgccaaccaguucaacagcgccaucggcaagauccaggacucccugagcuccaccgccagcgcgcucgggaagcugcaggacguggucaaccagaacgcccaggcccugaacacgcucgugaagcagcuguccagcaacuucggcgccaucuccagcgugcugaacgacauccucucccgccuggacaaggucgaggccgaggugcagaucgaccggcugaucaccgggcgccuccagagccugcagaccuacgugacccagcagcugauccgggcggccgagauccgcgccagcgccaaccucgccgcgaccaagauguccgagugcguccugggccagagcaagcggguggacuucugcggcaagggguaccaccugauguccuucccccagagcgccccgcacggcguggucuuccuccacgugacguacguccccgcccaggagaagaacuucaccaccgcccccgcgaucugccacgacgggaaggcccacuucccccgcgagggcguguucguguccaacgggacccacugguucgucacgcagcggaacuucuacgagccgcagaucaucaccaccgacaacaccuucgugugcggcaacugcgacguggucaucggcaucgugaacaacacgguguacgacccccugcagcccgagcuggacuccuucaaggaggagcucgacaaguacuucaagaaccacaccagccccgacgucgaccugggggacaucuccggcaucaacgccagcguggugaacauccagaaggagaucgaccgccugaacgaggucgccaagaaccucaacgagucccugaucgaccugcaggagcucgggaaguacgagcaguacaucaagggcgggggcgggagcgacaucgaccccuacaaggaguucggcagcuccuaccagcugcucaacuuccugccccuggacuucuuccccgaccucaacgcccugguggacaccgccaccgcgcuguacgaggaggagcucacggggcgcgagcacugcagcccccaccacaccgccauccggcaggcccuggucugcugggacgagcugaccaagcucaucgccuggauguccagcaacaucaccuccgagcagguccgcacgaucaucgugaaccacgucaacgacaccuggggccugaaggugcggcagagccugugguuccaccucuccugccugaccuucgggcagcacaccgugcaggaguuccuggucagcuucggcguguggauccgcacgcccgccccguaccggccgcccaacgcgccgauccucuccacccugccggagcacaccgugaucugcugaggacuagucccuguucccagagcccacuuuuuuuucuuuuuuugaaauaaaauagccugucuuucagaucucaaaggcucuuuucagagccaccaaaaaaaaaaaaaaaaaaaaaaaaaaaaaaaaaaaaaaaaaaaaaaaaaaaaaaaaaaaaaaaaaaaaaaaaaaaaaaaaaaaaaaaaaaaaaaaaaaaaa

SEQ ID NO: 14147 - RNA, 4196 nt, Artificial Sequence
  SARS-CoV-2/Wuhan/WIV05/2019__EPI_ISL_402128 spike protein mRNA gc (1-1147)(N914C_S1123C) LumSynth construct
aggagagucccgcagucggcguccagcggcucugcuuguucgugugugugucguugcaggccuuauucaagcuuaccauguucguguuccugguccuccugccccuggugagcucccagugcgugaaccucaccacccgcacgcagcugccgcccgccuacaccaacagcuucacccggggcgucuacuaccccgacaagguguuccgcuccagcgugcugcacuccacccaggaccucuuccugcccuucuucagcaacgucacgugguuccacgccauccacguguccgggaccaacggcaccaagcgguucgacaacccggugcugcccuucaacgacggggucuacuucgcgagcaccgagaaguccaacaucauccgcggcuggaucuucgggacgacccucgacagcaagacccagucccugcugaucgugaacaacgccaccaacguggucaucaaggugugcgaguuccaguucugcaacgaccccuuccucggcguguacuaccacaagaacaacaagagcuggauggaguccgaguuccgggucuacagcuccgccaacaacugcacguucgaguacgugagccagcccuuccugauggaccuggagggcaagcaggggaacuucaagaaccuccgcgaguucguguucaagaacaucgacggcuacuucaagaucuacuccaagcacaccccgaucaaccugguccgggaccugccccagggguucagcgcccucgagccccugguggaccugcccaucggcaucaacaucacccgcuuccagacccuccuggcccugcaccgguccuaccucacgccgggggacagcagcuccggcuggaccgcgggcgccgccgccuacuacgugggguaccugcagccccgcaccuuccugcucaaguacaacgagaacggcaccaucacggacgcggucgacugcgcccuggacccccugagcgagaccaagugcacccucaaguccuucaccguggagaaggggaucuaccagacgagcaacuuccgggugcagcccaccgaguccaucguccgcuucccgaacaucaccaaccugugccccuucggcgagguguucaacgccacccgguucgccagcgucuacgccuggaaccgcaagcggaucuccaacugcguggcggacuacagcgugcuguacaacuccgccagcuucuccacguucaagugcuacggcgucagccccaccaagcucaacgaccugugcuucaccaacguguacgccgacuccuucgugauccgcggggacgagguccggcagaucgcccccggccagaccgggaagaucgccgacuacaacuacaagcugccggacgacuucacgggcugcgugaucgcguggaacagcaacaaccucgacuccaaggucgggggcaacuacaacuaccuguaccgccuguuccgcaagagcaaccucaagcccuucgagcgggacaucuccaccgagaucuaccaggccggcagcacccccugcaacgggguggagggcuucaacugcuacuucccccugcaguccuacggguuccagccgaccaacggcgugggguaccagcccuaccggguggucgugcugagcuucgagcuccugcacgcccccgccacggugugcggccccaagaaguccaccaaccuggucaagaacaagugcgugaacuucaacuucaacggccucaccgggaccggcgugcugaccgagagcaacaagaaguuccugccguuccagcaguucgggcgcgacaucgccgacacgaccgacgcgguccgcgacccccagacccuggagauccucgacaucacccccugcagcuucggcgggguguccgugaucacgccgggcaccaacaccagcaaccaggucgccgugcuguaccaggacgugaacugcaccgagguccccguggccauccacgccgaccagcugacgcccaccuggcggguguacuccaccggcagcaacgucuuccagacccgcgccgggugccucaucggcgcggagcacgugaacaacuccuacgagugcgacauccccaucggggccggcaucugcgccagcuaccagacgcagaccaacuccccgcggcgcgcccggagcguggcgucccagagcaucaucgccuacaccaugucccugggcgccgagaacagcgucgccuacuccaacaacagcaucgccauccccaccaacuucacgaucuccgugaccaccgagauccugcccgugagcaugaccaagacgagcgucgacugcaccauguacaucugcggggacuccaccgagugcagcaaccuccugcugcaguacggcuccuucugcacccagcucaaccgcgcgcugacggggaucgccguggagcaggacaagaacacccaggagguguucgcccaggucaagcagaucuacaagacgcccccgaucaaggacuucggcggguucaacuucagccagauccugcccgaccccuccaagcccagcaagcgguccuucaucgaggaccuccuguucaacaaggugacccuggccgacgccggcuucaucaagcaguacggcgacugccucggggacaucgcggcccgcgaccugaucugcgcccagaaguucaacggccugaccgugcucccgccccugcugaccgacgagaugaucgcccaguacaccagcgcccuccuggcggggaccaucacguccggcuggaccuucggggccggcgccgcccugcagauccccuucgcgaugcagauggccuaccgguucaacggcaucggggucacccagugcgugcucuacgagaaccagaagcugaucgccaaccaguucaacagcgccaucggcaagauccaggacucccugagcuccaccgccagcgcgcucgggaagcugcaggacguggucaaccagaacgcccaggcccugaacacgcucgugaagcagcuguccagcaacuucggcgccaucuccagcgugcugaacgacauccucucccgccuggacaaggucgaggccgaggugcagaucgaccggcugaucaccgggcgccuccagagccugcagaccuacgugacccagcagcugauccgggcggccgagauccgcgccagcgccaaccucgccgcgaccaagauguccgagugcguccugggccagagcaagcggguggacuucugcggcaagggguaccaccugauguccuucccccagagcgccccgcacggcguggucuuccuccacgugacguacguccccgcccaggagaagaacuucaccaccgcccccgcgaucugccacgacgggaaggcccacuucccccgcgagggcguguucguguccaacgggacccacugguucgucacgcagcggaacuucuacgagccgcagaucaucaccaccgacaacaccuucgugugcggcaacugcgacguggucaucggcaucgugaacaacacgguguacgacccccugcagcccgagcuggacuccggcggcgggagcgggggcgggcagaucuacgagggcaagcugaccgccgaggggcuccgcuucggcaucguggccagccgguucaaccacgcgcuggucgaccgccugguggagggggccaucgacgccaucgugcggcacggcgggcgcgaggaggacaucacccucguccgggugcccggcuccugggagaucccgguggccgccggcgagcuggcccgcaaggaggacaucgacgcggucaucgccaucggggugcugauccggggcgccacgccccacuucgacuacaucgccagcgagguguccaaggggcucgcggaccugagccuggagcuccgcaagcccaucaccuucggcgucaucaccgccgacacccuggagcaggccaucgagcgggccgggacgaagcacggcaacaagggcugggaggccgcgcuguccgccaucgagauggccaaccucuucaagagccugcgcugaggacuagucccuguucccagagcccacuuuuuuuucuuuuuuugaaauaaaauagccugucuuucagaucucaaaggcucuuuucagagccaccaaaaaaaaaaaaaaaaaaaaaaaaaaaaaaaaaaaaaaaaaaaaaaaaaaaaaaaaaaaaaaaaaaaaaaaaaaaaaaaaaaaaaaaaaaaaaaaaaaaaa

SEQ ID NO: 14148 - RNA, 4220 nt, Artificial Sequence
  SARS-CoV-2/Wuhan/WIV05/2019__EPI_ISL_402128 spike protein mRNA gc (1-1147)(N914C_S1123C) Ferritin construct
aggagagucccgcagucggcguccagcggcucugcuuguucgugugugugucguugcaggccuuauucaagcuuaccauguucguguuccugguccuccugccccuggugagcucccagugcgugaaccucaccacccgcacgcagcugccgcccgccuacaccaacagcuucacccggggcgucuacuaccccgacaagguguuccgcuccagcgugcugcacuccacccaggaccucuuccugcccuucuucagcaacgucacgugguuccacgccauccacguguccgggaccaacggcaccaagcgguucgacaacccggugcugcccuucaacgacggggucuacuucgcgagcaccgagaaguccaacaucauccgcggcuggaucuucgggacgacccucgacagcaagacccagucccugcugaucgugaacaacgccaccaacguggucaucaaggugugcgaguuccaguucugcaacgaccccuuccucggcguguacuaccacaagaacaacaagagcuggauggaguccgaguuccgggucuacagcuccgccaacaacugcacguucgaguacgugagccagcccuuccugauggaccuggagggcaagcaggggaacuucaagaaccuccgcgaguucguguucaagaacaucgacggcuacuucaagaucuacuccaagcacaccccgaucaaccugguccgggaccugccccagggguucagcgcccucgagccccugguggaccugcccaucggcaucaacaucacccgcuuccagacccuccuggcccugcaccgguccuaccucacgccgggggacagcagcuccggcuggaccgcgggcgccgccgccuacuacgugggguaccugcagccccgcaccuuccugcucaaguacaacgagaacggcaccaucacggacgcggucgacugcgcccuggacccccugagcgagaccaagugcacccucaaguccuucaccguggagaaggggaucuaccagacgagcaacuuccgggugcagcccaccgaguccaucguccgcuucccgaacaucaccaaccugugccccuucggcgagguguucaacgccacccgguucgccagcgucuacgccuggaaccgcaagcggaucuccaacugcguggcggacuacagcgugcuguacaacuccgccagcuucuccacguucaagugcuacggcgucagccccaccaagcucaacgaccugugcuucaccaacguguacgccgacuccuucgugauccgcggggacgagguccggcagaucgcccccggccagaccgggaagaucgccgacuacaacuacaagcugccggacgacuucacgggcugcgugaucgcguggaacagcaacaaccucgacuccaaggucgggggcaacuacaacuaccuguaccgccuguuccgcaagagcaaccucaagcccuucgagcgggacaucuccaccgagaucuaccaggccggcagcacccccugcaacgggguggagggcuucaacugcuacuucccccugcaguccuacggguuccagccgaccaacggcgugggguaccagcccuaccggguggucgugcugagcuucgagcuccugcacgcccccgccacggugugcggccccaagaaguccaccaaccuggucaagaacaagugcgugaacuucaacuucaacggccucaccgggaccggcgugcugaccgagagcaacaagaaguuccugccguuccagcaguucgggcgcgacaucgccgacacgaccgacgcgguccgcgacccccagacccuggagauccucgacaucacccccugcagcuucggcgggguguccgugaucacgccgggcaccaacaccagcaaccaggucgccgugcuguaccaggacgugaacugcaccgagguccccguggccauccacgccgaccagcugacgcccaccuggcggguguacuccaccggcagcaacgucuuccagacccgcgccgggugccucaucggcgcggagcacgugaacaacuccuacgagugcgacauccccaucggggccggcaucugcgccagcuaccagacgcagaccaacuccccgcggcgcgcccggagcguggcgucccagagcaucaucgccuacaccaugucccugggcgccgagaacagcgucgccuacuccaacaacagcaucgccauccccaccaacuucacgaucuccgugaccaccgagauccugcccgugagcaugaccaagacgagcgucgacugcaccauguacaucugcggggacuccaccgagugcagcaaccuccugcugcaguacggcuccuucugcacccagcucaaccgcgcgcugacggggaucgccguggagcaggacaagaacacccaggagguguucgcccaggucaagcagaucuacaagacgcccccgaucaaggacuucggcggguucaacuucagccagauccugcccgaccccuccaagcccagcaagcgguccuucaucgaggaccuccuguucaacaaggugacccuggccgacgccggcuucaucaagcaguacggcgacugccucggggacaucgcggcccgcgaccugaucugcgcccagaaguucaacggccugaccgugcucccgccccugcugaccgacgagaugaucgcccaguacaccagcgcccuccuggcggggaccaucacguccggcuggaccuucggggccggcgccgcccugcagauccccuucgcgaugcagauggccuaccgguucaacggcaucggggucacccagugcgugcucuacgagaaccagaagcugaucgccaaccaguucaacagcgccaucggcaagauccaggacucccugagcuccaccgccagcgcgcucgggaagcugcaggacguggucaaccagaacgcccaggcccugaacacgcucgugaagcagcuguccagcaacuucggcgccaucuccagcgugcugaacgacauccucucccgccuggacaaggucgaggccgaggugcagaucgaccggcugaucaccgggcgccuccagagccugcagaccuacgugacccagcagcugauccgggcggccgagauccgcgccagcgccaaccucgccgcgaccaagauguccgagugcguccugggccagagcaagcggguggacuucugcggcaagggguaccaccugauguccuucccccagagcgccccgcacggcguggucuuccuccacgugacguacguccccgcccaggagaagaacuucaccaccgcccccgcgaucugccacgacgggaaggcccacuucccccgcgagggcguguucguguccaacgggacccacugguucgucacgcagcggaacuucuacgagccgcagaucaucaccaccgacaacaccuucgugugcggcaacugcgacguggucaucggcaucgugaacaacacgguguacgacccccugcagcccgagcuggacuccggcgggggcgggagcgacaucaucaagcuccugaacgagcaggucaacaaggagaugcaguccagcaaccuguacauguccaugagcuccuggugcuacacccacagccucgacggcgccgggcuguuccuguucgaccacgccgcggaggaguacgagcacgccaagaagcucaucaucuuccugaacgagaacaacgugcccgugcagcugaccuccaucagcgccccggagcacaaguucgagggccucacgcagaucuuccagaaggccuacgagcacgagcagcacaucuccgagagcaucaacaacaucguggaccacgccaucaaguccaaggaccacgcgaccuucaacuuccugcagugguacgucgccgagcagcacgaggaggaggugcuguucaaggacauccucgacaagaucgagcugaucgggaacgagaaccacggccuguaccucgccgaccaguacgugaaggggaucgccaagagccgcaaguccugaggacuagucccuguucccagagcccacuuuuuuuucuuuuuuugaaauaaaauagccugucuuucagaucucaaaggcucuuuucagagccaccaaaaaaaaaaaaaaaaaaaaaaaaaaaaaaaaaaaaaaaaaaaaaaaaaaaaaaaaaaaaaaaaaaaaaaaaaaaaaaaaaaaaaaaaaaaaaaaaaaaaa

SEQ ID NO: 14149 - RNA, 3806 nt, Artificial Sequence
  SARS-CoV-2/Wuhan/WIV05/2019__EPI_ISL_402128 spike protein mRNA gc (1-1147)(N914C_S1123C) Foldon construct
aggagagucccgcagucggcguccagcggcucugcuuguucgugugugugucguugcaggccuuauucaagcuuaccauguucguguuccugguccuccugccccuggugagcucccagugcgugaaccucaccacccgcacgcagcugccgcccgccuacaccaacagcuucacccggggcgucuacuaccccgacaagguguuccgcuccagcgugcugcacuccacccaggaccucuuccugcccuucuucagcaacgucacgugguuccacgccauccacguguccgggaccaacggcaccaagcgguucgacaacccggugcugcccuucaacgacggggucuacuucgcgagcaccgagaaguccaacaucauccgcggcuggaucuucgggacgacccucgacagcaagacccagucccugcugaucgugaacaacgccaccaacguggucaucaaggugugcgaguuccaguucugcaacgaccccuuccucggcguguacuaccacaagaacaacaagagcuggauggaguccgaguuccgggucuacagcuccgccaacaacugcacguucgaguacgugagccagcccuuccugauggaccuggagggcaagcaggggaacuucaagaaccuccgcgaguucguguucaagaacaucgacggcuacuucaagaucuacuccaagcacaccccgaucaaccugguccgggaccugccccagggguucagcgcccucgagccccugguggaccugcccaucggcaucaacaucacccgcuuccagacccuccuggcccugcaccgguccuaccucacgccgggggacagcagcuccggcuggaccgcgggcgccgccgccuacuacgugggguaccugcagccccgcaccuuccugcucaaguacaacgagaacggcaccaucacggacgcggucgacugcgcccuggacccccugagcgagaccaagugcacccucaaguccuucaccguggagaaggggaucuaccagacgagcaacuuccgggugcagcccaccgaguccaucguccgcuucccgaacaucaccaaccugugccccuucggcgagguguucaacgccacccgguucgccagcgucuacgccuggaaccgcaagcggaucuccaacugcguggcggacuacagcgugcuguacaacuccgccagcuucuccacguucaagugcuacggcgucagccccaccaagcucaacgaccugugcuucaccaacguguacgccgacuccuucgugauccgcggggacgagguccggcagaucgcccccggccagaccgggaagaucgccgacuacaacuacaagcugccggacgacuucacgggcugcgugaucgcguggaacagcaacaaccucgacuccaaggucgggggcaacuacaacuaccuguaccgccuguuccgcaagagcaaccucaagcccuucgagcgggacaucuccaccgagaucuaccaggccggcagcacccccugcaacgggguggagggcuucaacugcuacuucccccugcaguccuacggguuccagccgaccaacggcgugggguaccagcccuaccggguggucgugcugagcuucgagcuccugcacgcccccgccacggugugcggccccaagaaguccaccaaccuggucaagaacaagugcgugaacuucaacuucaacggccucaccgggaccggcgugcugaccgagagcaacaagaaguuccugccguuccagcaguucgggcgcgacaucgccgacacgaccgacgcgguccgcgacccccagacccuggagauccucgacaucacccccugcagcuucggcgggguguccgugaucacgccgggcaccaacaccagcaaccaggucgccgugcuguaccaggacgugaacugcaccgagguccccguggccauccacgccgaccagcugacgcccaccuggcggguguacuccaccggcagcaacgucuuccagacccgcgccgggugccucaucggcgcggagcacgugaacaacuccuacgagugcgacauccccaucggggccggcaucugcgccagcuaccagacgcagaccaacuccccgcggcgcgcccggagcguggcgucccagagcaucaucgccuacaccaugucccugggcgccgagaacagcgucgccuacuccaacaacagcaucgccauccccaccaacuucacgaucuccgugaccaccgagauccugcccgugagcaugaccaagacgagcgucgacugcaccauguacaucugcggggacuccaccgagugcagcaaccuccugcugcaguacggcuccuucugcacccagcucaaccgcgcgcugacggggaucgccguggagcaggacaagaacacccaggagguguucgcccaggucaagcagaucuacaagacgcccccgaucaaggacuucggcggguucaacuucagccagauccugcccgaccccuccaagcccagcaagcgguccuucaucgaggaccuccuguucaacaaggugacccuggccgacgccggcuucaucaagcaguacggcgacugccucggggacaucgcggcccgcgaccugaucugcgcccagaaguucaacggccugaccgugcucccgccccugcugaccgacgagaugaucgcccaguacaccagcgcccuccuggcggggaccaucacguccggcuggaccuucggggccggcgccgcccugcagauccccuucgcgaugcagauggccuaccgguucaacggcaucggggucacccagugcgugcucuacgagaaccagaagcugaucgccaaccaguucaacagcgccaucggcaagauccaggacucccugagcuccaccgccagcgcgcucgggaagcugcaggacguggucaaccagaacgcccaggcccugaacacgcucgugaagcagcuguccagcaacuucggcgccaucuccagcgugcugaacgacauccucucccgccuggacaaggucgaggccgaggugcagaucgaccggcugaucaccgggcgccuccagagccugcagaccuacgugacccagcagcugauccgggcggccgagauccgcgccagcgccaaccucgccgcgaccaagauguccgagugcguccugggccagagcaagcggguggacuucugcggcaagggguaccaccugauguccuucccccagagcgccccgcacggcguggucuuccuccacgugacguacguccccgcccaggagaagaacuucaccaccgcccccgcgaucugccacgacgggaaggcccacuucccccgcgagggcguguucguguccaacgggacccacugguucgucacgcagcggaacuucuacgagccgcagaucaucaccaccgacaacaccuucgugugcggcaacugcgacguggucaucggcaucgugaacaacacgguguacgacccccugcagcccgagcuggacuccggcgggagcggcuacauccccgaggccccgcgcgacgggcaggccuacgugcggaaggacggcgaguggguccugcucagcaccuuccugugaggacuagucccuguucccagagcccacuuuuuuuucuuuuuuugaaauaaaauagccugucuuucagaucucaaaggcucuuuucagagccaccaaaaaaaaaaaaaaaaaaaaaaaaaaaaaaaaaaaaaaaaaaaaaaaaaaaaaaaaaaaaaaaaaaaaaaaaaaaaaaaaaaaaaaaaaaaaaaaaaaaaa

SEQ ID NO: 14150 - RNA, 4178 nt, Artificial Sequence
  SARS-CoV-2/Wuhan/WIV05/2019__EPI_ISL_402128 spike protein mRNA gc (1-1147)(N914C_S1123C) WhcAg construct
aggagagucccgcagucggcguccagcggcucugcuuguucgugugugugucguugcaggccuuauucaagcuuaccauguucguguuccugguccuccugccccuggugagcucccagugcgugaaccucaccacccgcacgcagcugccgcccgccuacaccaacagcuucacccggggcgucuacuaccccgacaagguguuccgcuccagcgugcugcacuccacccaggaccucuuccugcccuucuucagcaacgucacgugguuccacgccauccacguguccgggaccaacggcaccaagcgguucgacaacccggugcugcccuucaacgacggggucuacuucgcgagcaccgagaaguccaacaucauccgcggcuggaucuucgggacgacccucgacagcaagacccagucccugcugaucgugaacaacgccaccaacguggucaucaaggugugcgaguuccaguucugcaacgaccccuuccucggcguguacuaccacaagaacaacaagagcuggauggaguccgaguuccgggucuacagcuccgccaacaacugcacguucgaguacgugagccagcccuuccugauggaccuggagggcaagcaggggaacuucaagaaccuccgcgaguucguguucaagaacaucgacggcuacuucaagaucuacuccaagcacaccccgaucaaccugguccgggaccugccccagggguucagcgcccucgagccccugguggaccugcccaucggcaucaacaucacccgcuuccagacccuccuggcccugcaccgguccuaccucacgccgggggacagcagcuccggcuggaccgcgggcgccgccgccuacuacgugggguaccugcagccccgcaccuuccugcucaaguacaacgagaacggcaccaucacggacgcggucgacugcgcccuggacccccugagcgagaccaagugcacccucaaguccuucaccguggagaaggggaucuaccagacgagcaacuuccgggugcagcccaccgaguccaucguccgcuucccgaacaucaccaaccugugccccuucggcgagguguucaacgccacccgguucgccagcgucuacgccuggaaccgcaagcggaucuccaacugcguggcggacuacagcgugcuguacaacuccgccagcuucuccacguucaagugcuacggcgucagccccaccaagcucaacgaccugugcuucaccaacguguacgccgacuccuucgugauccgcggggacgagguccggcagaucgcccccggccagaccgggaagaucgccgacuacaacuacaagcugccggacgacuucacgggcugcgugaucgcguggaacagcaacaaccucgacuccaaggucgggggcaacuacaacuaccuguaccgccuguuccgcaagagcaaccucaagcccuucgagcgggacaucuccaccgagaucuaccaggccggcagcacccccugcaacgggguggagggcuucaacugcuacuucccccugcaguccuacggguuccagccgaccaacggcgugggguaccagcccuaccggguggucgugcugagcuucgagcuccugcacgcccccgccacggugugcggccccaagaaguccaccaaccuggucaagaacaagugcgugaacuucaacuucaacggccucaccgggaccggcgugcugaccgagagcaacaagaaguuccugccguuccagcaguucgggcgcgacaucgccgacacgaccgacgcgguccgcgacccccagacccuggagauccucgacaucacccccugcagcuucggcgggguguccgugaucacgccgggcaccaacaccagcaaccaggucgccgugcuguaccaggacgugaacugcaccgagguccccguggccauccacgccgaccagcugacgcccaccuggcggguguacuccaccggcagcaacgucuuccagacccgcgccgggugccucaucggcgcggagcacgugaacaacuccuacgagugcgacauccccaucggggccggcaucugcgccagcuaccagacgcagaccaacuccccgcggcgcgcccggagcguggcgucccagagcaucaucgccuacaccaugucccugggcgccgagaacagcgucgccuacuccaacaacagcaucgccauccccaccaacuucacgaucuccgugaccaccgagauccugcccgugagcaugaccaagacgagcgucgacugcaccauguacaucugcggggacuccaccgagugcagcaaccuccugcugcaguacggcuccuucugcacccagcucaaccgcgcgcugacggggaucgccguggagcaggacaagaacacccaggagguguucgcccaggucaagcagaucuacaagacgcccccgaucaaggacuucggcggguucaacuucagccagauccugcccgaccccuccaagcccagcaagcgguccuucaucgaggaccuccuguucaacaaggugacccuggccgacgccggcuucaucaagcaguacggcgacugccucggggacaucgcggcccgcgaccugaucugcgcccagaaguucaacggccugaccgugcucccgccccugcugaccgacgagaugaucgcccaguacaccagcgcccuccuggcggggaccaucacguccggcuggaccuucggggccggcgccgcccugcagauccccuucgcgaugcagauggccuaccgguucaacggcaucggggucacccagugcgugcucuacgagaaccagaagcugaucgccaaccaguucaacagcgccaucggcaagauccaggacucccugagcuccaccgccagcgcgcucgggaagcugcaggacguggucaaccagaacgcccaggcccugaacacgcucgugaagcagcuguccagcaacuucggcgccaucuccagcgugcugaacgacauccucucccgccuggacaaggucgaggccgaggugcagaucgaccggcugaucaccgggcgccuccagagccugcagaccuacgugacccagcagcugauccgggcggccgagauccgcgccagcgccaaccucgccgcgaccaagauguccgagugcguccugggccagagcaagcggguggacuucugcggcaagggguaccaccugauguccuucccccagagcgccccgcacggcguggucuuccuccacgugacguacguccccgcccaggagaagaacuucaccaccgcccccgcgaucugccacgacgggaaggcccacuucccccgcgagggcguguucguguccaacgggacccacugguucgucacgcagcggaacuucuacgagccgcagaucaucaccaccgacaacaccuucgugugcggcaacugcgacguggucaucggcaucgugaacaacacgguguacgacccccugcagcccgagcuggacuccggcgggggcgggagcgacaucgaccccuacaaggaguucggcagcuccuaccagcugcucaacuuccugccccuggacuucuuccccgaccucaacgcccugguggacaccgccaccgcgcuguacgaggaggagcucacggggcgcgagcacugcagcccccaccacaccgccauccggcaggcccuggucugcugggacgagcugaccaagcucaucgccuggauguccagcaacaucaccuccgagcagguccgcacgaucaucgugaaccacgucaacgacaccuggggccugaaggugcggcagagccugugguuccaccucuccugccugaccuucgggcagcacaccgugcaggaguuccuggucagcuucggcguguggauccgcacgcccgccccguaccggccgcccaacgcgccgauccucuccacccugccggagcacaccgugaucugcugaggacuagucccuguucccagagcccacuuuuuuuucuuuuuuugaaauaaaauagccugucuuucagaucucaaaggcucuuuucagagccaccaaaaaaaaaaaaaaaaaaaaaaaaaaaaaaaaaaaaaaaaaaaaaaaaaaaaaaaaaaaaaaaaaaaaaaaaaaaaaaaaaaaaaaaaaaaaaaaaaaaaa

SEQ ID NO: 14151 - RNA, 4094 nt, Artificial Sequence
  SARS-CoV-2/Wuhan/WIV05/2019__EPI_ISL_402128 spike protein mRNA gc mod (1-1273)(N914C_S1123C)
aggagagucccgcagucggcguccagcggcucugcuuguucgugugugugucguugcaggccuuauucaagcuuaccauguucguguuucuggugcugcugccccugguguccagccagugugugaaccugaccaccagaacacagcugccuccagccuacaccaacagcuucaccagaggcguguacuaccccgacaagguguucagauccagcgugcugcacucuacccaggaccuguuccugccuuucuucagcaacgugaccugguuccacgccauccacguguccggcaccaauggcaccaagagauucgacaaccccgugcugcccuucaacgacgggguguacuuugccagcaccgagaaguccaacaucaucagaggcuggaucuucggcaccacacuggacagcaagacccagagccugcugaucgugaacaacgccaccaacguggucaucaaagugugcgaguuccaguucugcaacgaccccuuccugggcgucuacuaccacaagaacaacaagagcuggauggaaagcgaguuccggguguacagcagcgccaacaacugcaccuucgaguacgugucccagccuuuccugauggaccuggaaggcaagcagggcaacuucaagaaccugcgcgaguucguguucaagaacaucgacggcuacuucaaaaucuacagcaagcacaccccuaucaaccucgugcgggaucugccucagggcuucucugcucuggaaccccugguggaucugcccaucggcaucaacaucacccgguuucagacacugcuggcccugcacagaagcuaccugacaccuggcgauagcagcagcggauggacagcuggugccgccgcuuacuaugugggcuaccugcagccuagaaccuuccugcugaaguacaacgagaacggcaccaucaccgacgccguggauugugcucuggauccucugagcgagacaaagugcacccugaaguccuucaccguggaaaagggcaucuaccagaccagcaacuuccgggugcagcccaccgaauccaucgugcgguuccccaauaucaccaaucugugccccuucggcgagguguucaaugccaccagauucgccucuguguacgccuggaaccggaagcggaucagcaauugcguggccgacuacuccgugcuguacaacuccgccagcuucagcaccuucaagugcuacggcguguccccuaccaagcugaacgaccugugcuucacaaacguguacgccgacagcuucgugauccggggagaugaagugcggcagauugccccuggacagacaggcaagaucgccgacuacaacuacaagcugcccgacgacuucaccggcugugugauugccuggaacagcaacaaccuggacuccaaagucggcggcaacuacaauuaccuguaccggcuguuccggaaguccaaucugaagcccuucgagcgggacaucagcaccgaaaucuaucaggccggcagcaccccuugcaacggcguggaaggcuucaacugcuacuucccacugcaguccuacggcuuucagcccacaaauggcgugggcuaucagcccuacagagugguggugcugagcuucgaacugcugcaugcuccugccacagugugcggcccuaagaaaagcaccaaucucgugaagaacaaaugcgugaacuucaacuucaacggccugaccggcaccggcgugcugacagagagcaacaagaaguuccugccauuccagcaguuuggccgggauaucgccgauaccacagacgccguuagagauccccagacacuggaaauccuggacaucaccccaugcagcuucggcggagugucugugaucaccccuggcaccaacaccagcaaucagguggcagugcuguaccaggacgugaacuguaccgaagugcccguggccauucacgccgaucagcugacaccuacauggcggguguacuccaccggcagcaauguguuucagaccagagccggcugucugaucggagccgagcacgugaacaauagcuacgagugcgacauccccaucggcgcuggcaucugugccagcuaccagacacagacaaacagccccagacgggcuagaagcguggccagccagagcaucauugccuacacaaugucucugggcgccgagaacagcguggccuacuccaacaacucuaucgcuauccccaccaacuucaccaucagcgugaccaccgagauccugccuguguccaugaccaagaccagcguggacugcaccauguacaucugcggcgauuccaccgagugcuccaaccugcugcugcaguacggcagcuucugcacccagcugaauagagcccugacagggaucgccguggaacaggacaagaacacccaagagguguucgcccaagugaagcaaaucuacaagaccccuccuaucaaggacuucggcggcuucaauuucagccagauucugcccgauccuagcaagcccagcaagcggagcuucaucgaggaccugcuguucaacaaagugacacuggccgacgccggcuucaucaagcaguauggcgauugucugggcgacauugccgccagggaucugauuugcgcccagaaguuuaacggacugacagugcugccuccucugcugaccgaugagaugaucgcccaguacacaucugcccugcuggccggcacaaucacaagcggcuggacauuuggagcuggcgccgcucugcagauccccuuugcuaugcagauggccuaccgguucaacggcaucggagugacccagugcgugcuguacgagaaccagaagcugaucgccaaccaguucaacagcgccaucggcaagauccaggacagccugagcagcacagcaagcgcccugggaaagcugcaggacguggucaaccagaaugcccaggcacugaacacccuggucaagcagcuguccuccaacuucggcgccaucagcucugugcugaacgauauccugagcagacuggacaaggucgaggccgaggugcagaucgacagacugaucacaggcagacugcagagccuccagacauacgugacccagcagcugaucagagccgccgagauuagagccucugccaaucuggccgccaccaagaugucugagugugugcugggccagagcaagagaguggacuuuugcggcaagggcuaccaccugaugagcuucccucagucugccccucacggcgugguguuucugcacgugacauaugugcccgcucaagagaagaauuucaccaccgcuccagccaucugccacgacggcaaagcccacuuuccuagagaaggcguguucguguccaacggcacccauugguucgugacacagcggaacuucuacgagccccagaucaucaccaccgacaacaccuucguguguggcaacugcgacguugugaucggcauugugaacaauaccguguacgacccucugcagcccgagcuggacagcuucaaagaggaacuggacaaguacuuuaagaaccacacaagccccgacguggaccugggcgauaucagcggaaucaaugccagcgucgugaacauccagaaagagaucgaccggcugaacgagguggccaagaaucugaacgagagccugaucgaccugcaagaacuggggaaguacgagcaguacaucaaguggcccugguacaucuggcugggcuuuaucgccggacugauugccaucgugauggucacaaucaugcuguguugcaugaccagcugcuguagcugccugaagggcuguuguagcuguggcagcugcugcaaguucgacgaggacgauucugagcccgugcugaagggcgugaaacugcacuacaccugaggacuagucccuguucccagagcccacuuuuuuuucuuuuuuugaaauaaaauagccugucuuucagaucucaaaggcucuuuucagagccaccaaaaaaaaaaaaaaaaaaaaaaaaaaaaaaaaaaaaaaaaaaaaaaaaaaaaaaaaaaaaaaaaaaaaaaaaaaaaaaaaaaaaaaaaaaaaaaaaaaaaa

SEQ ID NO: 14152 - RNA, 4388 nt, Artificial Sequence
  SARS-CoV-2/Wuhan/WIV05/2019__EPI_ISL_402128 spike protein mRNA gc mod (1-1211)(N914C_S1123C) LumSynth construct
aggagagucccgcagucggcguccagcggcucugcuuguucgugugugugucguugcaggccuuauucaagcuuaccauguucguguuucuggugcugcugccccugguguccagccagugugugaaccugaccaccagaacacagcugccuccagccuacaccaacagcuucaccagaggcguguacuaccccgacaagguguucagauccagcgugcugcacucuacccaggaccuguuccugccuuucuucagcaacgugaccugguuccacgccauccacguguccggcaccaauggcaccaagagauucgacaaccccgugcugcccuucaacgacgggguguacuuugccagcaccgagaaguccaacaucaucagaggcuggaucuucggcaccacacuggacagcaagacccagagccugcugaucgugaacaacgccaccaacguggucaucaaagugugcgaguuccaguucugcaacgaccccuuccugggcgucuacuaccacaagaacaacaagagcuggauggaaagcgaguuccggguguacagcagcgccaacaacugcaccuucgaguacgugucccagccuuuccugauggaccuggaaggcaagcagggcaacuucaagaaccugcgcgaguucguguucaagaacaucgacggcuacuucaaaaucuacagcaagcacaccccuaucaaccucgugcgggaucugccucagggcuucucugcucuggaaccccugguggaucugcccaucggcaucaacaucacccgguuucagacacugcuggcccugcacagaagcuaccugacaccuggcgauagcagcagcggauggacagcuggugccgccgcuuacuaugugggcuaccugcagccuagaaccuuccugcugaaguacaacgagaacggcaccaucaccgacgccguggauugugcucuggauccucugagcgagacaaagugcacccugaaguccuucaccguggaaaagggcaucuaccagaccagcaacuuccgggugcagcccaccgaauccaucgugcgguuccccaauaucaccaaucugugccccuucggcgagguguucaaugccaccagauucgccucuguguacgccuggaaccggaagcggaucagcaauugcguggccgacuacuccgugcuguacaacuccgccagcuucagcaccuucaagugcuacggcguguccccuaccaagcugaacgaccugugcuucacaaacguguacgccgacagcuucgugauccggggagaugaagugcggcagauugccccuggacagacaggcaagaucgccgacuacaacuacaagcugcccgacgacuucaccggcugugugauugccuggaacagcaacaaccuggacuccaaagucggcggcaacuacaauuaccuguaccggcuguuccggaaguccaaucugaagcccuucgagcgggacaucagcaccgaaaucuaucaggccggcagcaccccuugcaacggcguggaaggcuucaacugcuacuucccacugcaguccuacggcuuucagcccacaaauggcgugggcuaucagcccuacagagugguggugcugagcuucgaacugcugcaugcuccugccacagugugcggcccuaagaaaagcaccaaucucgugaagaacaaaugcgugaacuucaacuucaacggccugaccggcaccggcgugcugacagagagcaacaagaaguuccugccauuccagcaguuuggccgggauaucgccgauaccacagacgccguuagagauccccagacacuggaaauccuggacaucaccccaugcagcuucggcggagugucugugaucaccccuggcaccaacaccagcaaucagguggcagugcuguaccaggacgugaacuguaccgaagugcccguggccauucacgccgaucagcugacaccuacauggcggguguacuccaccggcagcaauguguuucagaccagagccggcugucugaucggagccgagcacgugaacaauagcuacgagugcgacauccccaucggcgcuggcaucugugccagcuaccagacacagacaaacagccccagacgggcuagaagcguggccagccagagcaucauugccuacacaaugucucugggcgccgagaacagcguggccuacuccaacaacucuaucgcuauccccaccaacuucaccaucagcgugaccaccgagauccugccuguguccaugaccaagaccagcguggacugcaccauguacaucugcggcgauuccaccgagugcuccaaccugcugcugcaguacggcagcuucugcacccagcugaauagagcccugacagggaucgccguggaacaggacaagaacacccaagagguguucgcccaagugaagcaaaucuacaagaccccuccuaucaaggacuucggcggcuucaauuucagccagauucugcccgauccuagcaagcccagcaagcggagcuucaucgaggaccugcuguucaacaaagugacacuggccgacgccggcuucaucaagcaguauggcgauugucugggcgacauugccgccagggaucugauuugcgcccagaaguuuaacggacugacagugcugccuccucugcugaccgaugagaugaucgcccaguacacaucugcccugcuggccggcacaaucacaagcggcuggacauuuggagcuggcgccgcucugcagauccccuuugcuaugcagauggccuaccgguucaacggcaucggagugacccagugcgugcuguacgagaaccagaagcugaucgccaaccaguucaacagcgccaucggcaagauccaggacagccugagcagcacagcaagcgcccugggaaagcugcaggacguggucaaccagaaugcccaggcacugaacacccuggucaagcagcuguccuccaacuucggcgccaucagcucugugcugaacgauauccugagcagacuggacaaggucgaggccgaggugcagaucgacagacugaucacaggcagacugcagagccuccagacauacgugacccagcagcugaucagagccgccgagauuagagccucugccaaucuggccgccaccaagaugucugagugugugcugggccagagcaagagaguggacuuuugcggcaagggcuaccaccugaugagcuucccucagucugccccucacggcgugguguuucugcacgugacauaugugcccgcucaagagaagaauuucaccaccgcuccagccaucugccacgacggcaaagcccacuuuccuagagaaggcguguucguguccaacggcacccauugguucgugacacagcggaacuucuacgagccccagaucaucaccaccgacaacaccuucguguguggcaacugcgacguugugaucggcauugugaacaauaccguguacgacccucugcagcccgagcuggacagcuucaaagaggaacuggacaaguacuuuaagaaccacacaagccccgacguggaccugggcgauaucagcggaaucaaugccagcgucgugaacauccagaaagagaucgaccggcugaacgagguggccaagaaucugaacgagagccugaucgaccugcaagaacuggggaaguacgagcaguacaucaagggcggaggaucuggcggaggacagaucuacgagggcaagcugacagccgagggccugagauuuggaaucguggccagccgguucaaucacgcccugguggauagacugguggaaggcgccaucgaugccauugucagacacggcggcagagaagaggacaucacccucguuagagugcccggcucuugggagauuccuguggcugcuggcgagcuggcccggaaagaagauaucgacgccguuaucgccaucggcgugcugaucagaggcgccacaccucacuucgacuauaucgccagcgagguguccaaaggccuggccgaucugagccuggaacugagaaagcccaucaccuucggcgugaucaccgcugacacacuggaacaggccauugagagagccggcaccaagcacggcaacaaaggaugggaagccgcucuguccgccaucgagauggccaaccuguucaagagccugcggugaggacuagucccuguucccagagcccacuuuuuuuucuuuuuuugaaauaaaauagccugucuuucagaucucaaaggcucuuuucagagccaccaaaaaaaaaaaaaaaaaaaaaaaaaaaaaaaaaaaaaaaaaaaaaaaaaaaaaaaaaaaaaaaaaaaaaaaaaaaaaaaaaaaaaaaaaaaaaaaaaaaaa

SEQ ID NO: 14153 - RNA, 4412 nt, Artificial Sequence
  SARS-CoV-2/Wuhan/WIV05/2019__EPI_ISL_402128 spike protein mRNA gc mod (1-1211)(N914C_S1123C) Ferritin construct
aggagagucccgcagucggcguccagcggcucugcuuguucgugugugugucguugcaggccuuauucaagcuuaccauguucguguuucuggugcugcugccccugguguccagccagugugugaaccugaccaccagaacacagcugccuccagccuacaccaacagcuucaccagaggcguguacuaccccgacaagguguucagauccagcgugcugcacucuacccaggaccuguuccugccuuucuucagcaacgugaccugguuccacgccauccacguguccggcaccaauggcaccaagagauucgacaaccccgugcugcccuucaacgacgggguguacuuugccagcaccgagaaguccaacaucaucagaggcuggaucuucggcaccacacuggacagcaagacccagagccugcugaucgugaacaacgccaccaacguggucaucaaagugugcgaguuccaguucugcaacgaccccuuccugggcgucuacuaccacaagaacaacaagagcuggauggaaagcgaguuccggguguacagcagcgccaacaacugcaccuucgaguacgugucccagccuuuccugauggaccuggaaggcaagcagggcaacuucaagaaccugcgcgaguucguguucaagaacaucgacggcuacuucaaaaucuacagcaagcacaccccuaucaaccucgugcgggaucugccucagggcuucucugcucuggaaccccugguggaucugcccaucggcaucaacaucacccgguuucagacacugcuggcccugcacagaagcuaccugacaccuggcgauagcagcagcggauggacagcuggugccgccgcuuacuaugugggcuaccugcagccuagaaccuuccugcugaaguacaacgagaacggcaccaucaccgacgccguggauugugcucuggauccucugagcgagacaaagugcacccugaaguccuucaccguggaaaagggcaucuaccagaccagcaacuuccgggugcagcccaccgaauccaucgugcgguuccccaauaucaccaaucugugccccuucggcgagguguucaaugccaccagauucgccucuguguacgccuggaaccggaagcggaucagcaauugcguggccgacuacuccgugcuguacaacuccgccagcuucagcaccuucaagugcuacggcguguccccuaccaagcugaacgaccugugcuucacaaacguguacgccgacagcuucgugauccggggagaugaagugcggcagauugccccuggacagacaggcaagaucgccgacuacaacuacaagcugcccgacgacuucaccggcugugugauugccuggaacagcaacaaccuggacuccaaagucggcggcaacuacaauuaccuguaccggcuguuccggaaguccaaucugaagcccuucgagcgggacaucagcaccgaaaucuaucaggccggcagcaccccuugcaacggcguggaaggcuucaacugcuacuucccacugcaguccuacggcuuucagcccacaaauggcgugggcuaucagcccuacagagugguggugcugagcuucgaacugcugcaugcuccugccacagugugcggcccuaagaaaagcaccaaucucgugaagaacaaaugcgugaacuucaacuucaacggccugaccggcaccggcgugcugacagagagcaacaagaaguuccugccauuccagcaguuuggccgggauaucgccgauaccacagacgccguuagagauccccagacacuggaaauccuggacaucaccccaugcagcuucggcggagugucugugaucaccccuggcaccaacaccagcaaucagguggcagugcuguaccaggacgugaacuguaccgaagugcccguggccauucacgccgaucagcugacaccuacauggcggguguacuccaccggcagcaauguguuucagaccagagccggcugucugaucggagccgagcacgugaacaauagcuacgagugcgacauccccaucggcgcuggcaucugugccagcuaccagacacagacaaacagccccagacgggcuagaagcguggccagccagagcaucauugccuacacaaugucucugggcgccgagaacagcguggccuacuccaacaacucuaucgcuauccccaccaacuucaccaucagcgugaccaccgagauccugccuguguccaugaccaagaccagcguggacugcaccauguacaucugcggcgauuccaccgagugcuccaaccugcugcugcaguacggcagcuucugcacccagcugaauagagcccugacagggaucgccguggaacaggacaagaacacccaagagguguucgcccaagugaagcaaaucuacaagaccccuccuaucaaggacuucggcggcuucaauuucagccagauucugcccgauccuagcaagcccagcaagcggagcuucaucgaggaccugcuguucaacaaagugacacuggccgacgccggcuucaucaagcaguauggcgauugucugggcgacauugccgccagggaucugauuugcgcccagaaguuuaacggacugacagugcugccuccucugcugaccgaugagaugaucgcccaguacacaucugcccugcuggccggcacaaucacaagcggcuggacauuuggagcuggcgccgcucugcagauccccuuugcuaugcagauggccuaccgguucaacggcaucggagugacccagugcgugcuguacgagaaccagaagcugaucgccaaccaguucaacagcgccaucggcaagauccaggacagccugagcagcacagcaagcgcccugggaaagcugcaggacguggucaaccagaaugcccaggcacugaacacccuggucaagcagcuguccuccaacuucggcgccaucagcucugugcugaacgauauccugagcagacuggacaaggucgaggccgaggugcagaucgacagacugaucacaggcagacugcagagccuccagacauacgugacccagcagcugaucagagccgccgagauuagagccucugccaaucuggccgccaccaagaugucugagugugugcugggccagagcaagagaguggacuuuugcggcaagggcuaccaccugaugagcuucccucagucugccccucacggcgugguguuucugcacgugacauaugugcccgcucaagagaagaauuucaccaccgcuccagccaucugccacgacggcaaagcccacuuuccuagagaaggcguguucguguccaacggcacccauugguucgugacacagcggaacuucuacgagccccagaucaucaccaccgacaacaccuucguguguggcaacugcgacguugugaucggcauugugaacaauaccguguacgacccucugcagcccgagcuggacagcuucaaagaggaacuggacaaguacuuuaagaaccacacaagccccgacguggaccugggcgauaucagcggaaucaaugccagcgucgugaacauccagaaagagaucgaccggcugaacgagguggccaagaaucugaacgagagccugaucgaccugcaagaacuggggaaguacgagcaguacaucaagggaggcggaggaucugacaucaucaagcugcugaacgagcaagugaacaaagagaugcagagcagcaaccuguacaugagcaugagcagcuggugcuacacccacagccuugauggcgccggacuguuccuguuugaucacgccgccgaggaauacgagcacgccaagaagcugaucaucuuccugaacgagaacaacgugcccgugcagcugaccagcauuucugccccugagcacaaguucgagggccugacacagaucuuccagaaggccuacgaacacgagcagcacaucagcgagagcaucaacaacaucguggaccacgccauuaagagcaaggaucacgccaccuucaacuuucugcagugguacguggccgaacagcacgaggaagaggugcuguucaaggacauccuggacaagaucgagcugaucggcaacgagaaccacggccuguaucuggccgaccaguacgugaagggaaucgccaagagcagaaagagcugaggacuagucccuguucccagagcccacuuuuuuuucuuuuuuugaaauaaaauagccugucuuucagaucucaaaggcucuuuucagagccaccaaaaaaaaaaaaaaaaaaaaaaaaaaaaaaaaaaaaaaaaaaaaaaaaaaaaaaaaaaaaaaaaaaaaaaaaaaaaaaaaaaaaaaaaaaaaaaaaaaaaa

SEQ ID NO: 14154 - RNA, 3998 nt, Artificial Sequence
  SARS-CoV-2/Wuhan/WIV05/2019__EPI_ISL_402128 spike protein mRNA gc mod (1-1211)(N914C_S1123C) Foldon construct
aggagagucccgcagucggcguccagcggcucugcuuguucgugugugugucguugcaggccuuauucaagcuuaccauguucguguuucuggugcugcugccccugguguccagccagugugugaaccugaccaccagaacacagcugccuccagccuacaccaacagcuucaccagaggcguguacuaccccgacaagguguucagauccagcgugcugcacucuacccaggaccuguuccugccuuucuucagcaacgugaccugguuccacgccauccacguguccggcaccaauggcaccaagagauucgacaaccccgugcugcccuucaacgacgggguguacuuugccagcaccgagaaguccaacaucaucagaggcuggaucuucggcaccacacuggacagcaagacccagagccugcugaucgugaacaacgccaccaacguggucaucaaagugugcgaguuccaguucugcaacgaccccuuccugggcgucuacuaccacaagaacaacaagagcuggauggaaagcgaguuccggguguacagcagcgccaacaacugcaccuucgaguacgugucccagccuuuccugauggaccuggaaggcaagcagggcaacuucaagaaccugcgcgaguucguguucaagaacaucgacggcuacuucaaaaucuacagcaagcacaccccuaucaaccucgugcgggaucugccucagggcuucucugcucuggaaccccugguggaucugcccaucggcaucaacaucacccgguuucagacacugcuggcccugcacagaagcuaccugacaccuggcgauagcagcagcggauggacagcuggugccgccgcuuacuaugugggcuaccugcagccuagaaccuuccugcugaaguacaacgagaacggcaccaucaccgacgccguggauugugcucuggauccucugagcgagacaaagugcacccugaaguccuucaccguggaaaagggcaucuaccagaccagcaacuuccgggugcagcccaccgaauccaucgugcgguuccccaauaucaccaaucugugccccuucggcgagguguucaaugccaccagauucgccucuguguacgccuggaaccggaagcggaucagcaauugcguggccgacuacuccgugcuguacaacuccgccagcuucagcaccuucaagugcuacggcguguccccuaccaagcugaacgaccugugcuucacaaacguguacgccgacagcuucgugauccggggagaugaagugcggcagauugccccuggacagacaggcaagaucgccgacuacaacuacaagcugcccgacgacuucaccggcugugugauugccuggaacagcaacaaccuggacuccaaagucggcggcaacuacaauuaccuguaccggcuguuccggaaguccaaucugaagcccuucgagcgggacaucagcaccgaaaucuaucaggccggcagcaccccuugcaacggcguggaaggcuucaacugcuacuucccacugcaguccuacggcuuucagcccacaaauggcgugggcuaucagcccuacagagugguggugcugagcuucgaacugcugcaugcuccugccacagugugcggcccuaagaaaagcaccaaucucgugaagaacaaaugcgugaacuucaacuucaacggccugaccggcaccggcgugcugacagagagcaacaagaaguuccugccauuccagcaguuuggccgggauaucgccgauaccacagacgccguuagagauccccagacacuggaaauccuggacaucaccccaugcagcuucggcggagugucugugaucaccccuggcaccaacaccagcaaucagguggcagugcuguaccaggacgugaacuguaccgaagugcccguggccauucacgccgaucagcugacaccuacauggcggguguacuccaccggcagcaauguguuucagaccagagccggcugucugaucggagccgagcacgugaacaauagcuacgagugcgacauccccaucggcgcuggcaucugugccagcuaccagacacagacaaacagccccagacgggcuagaagcguggccagccagagcaucauugccuacacaaugucucugggcgccgagaacagcguggccuacuccaacaacucuaucgcuauccccaccaacuucaccaucagcgugaccaccgagauccugccuguguccaugaccaagaccagcguggacugcaccauguacaucugcggcgauuccaccgagugcuccaaccugcugcugcaguacggcagcuucugcacccagcugaauagagcccugacagggaucgccguggaacaggacaagaacacccaagagguguucgcccaagugaagcaaaucuacaagaccccuccuaucaaggacuucggcggcuucaauuucagccagauucugcccgauccuagcaagcccagcaagcggagcuucaucgaggaccugcuguucaacaaagugacacuggccgacgccggcuucaucaagcaguauggcgauugucugggcgacauugccgccagggaucugauuugcgcccagaaguuuaacggacugacagugcugccuccucugcugaccgaugagaugaucgcccaguacacaucugcccugcuggccggcacaaucacaagcggcuggacauuuggagcuggcgccgcucugcagauccccuuugcuaugcagauggccuaccgguucaacggcaucggagugacccagugcgugcuguacgagaaccagaagcugaucgccaaccaguucaacagcgccaucggcaagauccaggacagccugagcagcacagcaagcgcccugggaaagcugcaggacguggucaaccagaaugcccaggcacugaacacccuggucaagcagcuguccuccaacuucggcgccaucagcucugugcugaacgauauccugagcagacuggacaaggucgaggccgaggugcagaucgacagacugaucacaggcagacugcagagccuccagacauacgugacccagcagcugaucagagccgccgagauuagagccucugccaaucuggccgccaccaagaugucugagugugugcugggccagagcaagagaguggacuuuugcggcaagggcuaccaccugaugagcuucccucagucugccccucacggcgugguguuucugcacgugacauaugugcccgcucaagagaagaauuucaccaccgcuccagccaucugccacgacggcaaagcccacuuuccuagagaaggcguguucguguccaacggcacccauugguucgugacacagcggaacuucuacgagccccagaucaucaccaccgacaacaccuucguguguggcaacugcgacguugugaucggcauugugaacaauaccguguacgacccucugcagcccgagcuggacagcuucaaagaggaacuggacaaguacuuuaagaaccacacaagccccgacguggaccugggcgauaucagcggaaucaaugccagcgucgugaacauccagaaagagaucgaccggcugaacgagguggccaagaaucugaacgagagccugaucgaccugcaagaacuggggaaguacgagcaguacaucaagggaggaucuggcuauauccccgaggcuccuagagauggccaggccuauguucggaaggauggcgaaugggugcugcugagcaccuuccuuugaggacuagucccuguucccagagcccacuuuuuuuucuuuuuuugaaauaaaauagccugucuuucagaucucaaaggcucuuuucagagccaccaaaaaaaaaaaaaaaaaaaaaaaaaaaaaaaaaaaaaaaaaaaaaaaaaaaaaaaaaaaaaaaaaaaaaaaaaaaaaaaaaaaaaaaaaaaaaaaaaaaaa

SEQ ID NO: 14155 - RNA, 4370 nt, Artificial Sequence
  SARS-CoV-2/Wuhan/WIV05/2019__EPI_ISL_402128 spike protein mRNA gc mod (1-1211)(N914C_S1123C) WhcAg construct
aggagagucccgcagucggcguccagcggcucugcuuguucgugugugugucguugcaggccuuauucaagcuuaccauguucguguuucuggugcugcugccccugguguccagccagugugugaaccugaccaccagaacacagcugccuccagccuacaccaacagcuucaccagaggcguguacuaccccgacaagguguucagauccagcgugcugcacucuacccaggaccuguuccugccuuucuucagcaacgugaccugguuccacgccauccacguguccggcaccaauggcaccaagagauucgacaaccccgugcugcccuucaacgacgggguguacuuugccagcaccgagaaguccaacaucaucagaggcuggaucuucggcaccacacuggacagcaagacccagagccugcugaucgugaacaacgccaccaacguggucaucaaagugugcgaguuccaguucugcaacgaccccuuccugggcgucuacuaccacaagaacaacaagagcuggauggaaagcgaguuccggguguacagcagcgccaacaacugcaccuucgaguacgugucccagccuuuccugauggaccuggaaggcaagcagggcaacuucaagaaccugcgcgaguucguguucaagaacaucgacggcuacuucaaaaucuacagcaagcacaccccuaucaaccucgugcgggaucugccucagggcuucucugcucuggaaccccugguggaucugcccaucggcaucaacaucacccgguuucagacacugcuggcccugcacagaagcuaccugacaccuggcgauagcagcagcggauggacagcuggugccgccgcuuacuaugugggcuaccugcagccuagaaccuuccugcugaaguacaacgagaacggcaccaucaccgacgccguggauugugcucuggauccucugagcgagacaaagugcacccugaaguccuucaccguggaaaagggcaucuaccagaccagcaacuuccgggugcagcccaccgaauccaucgugcgguuccccaauaucaccaaucugugccccuucggcgagguguucaaugccaccagauucgccucuguguacgccuggaaccggaagcggaucagcaauugcguggccgacuacuccgugcuguacaacuccgccagcuucagcaccuucaagugcuacggcguguccccuaccaagcugaacgaccugugcuucacaaacguguacgccgacagcuucgugauccggggagaugaagugcggcagauugccccuggacagacaggcaagaucgccgacuacaacuacaagcugcccgacgacuucaccggcugugugauugccuggaacagcaacaaccuggacuccaaagucggcggcaacuacaauuaccuguaccggcuguuccggaaguccaaucugaagcccuucgagcgggacaucagcaccgaaaucuaucaggccggcagcaccccuugcaacggcguggaaggcuucaacugcuacuucccacugcaguccuacggcuuucagcccacaaauggcgugggcuaucagcccuacagagugguggugcugagcuucgaacugcugcaugcuccugccacagugugcggcccuaagaaaagcaccaaucucgugaagaacaaaugcgugaacuucaacuucaacggccugaccggcaccggcgugcugacagagagcaacaagaaguuccugccauuccagcaguuuggccgggauaucgccgauaccacagacgccguuagagauccccagacacuggaaauccuggacaucaccccaugcagcuucggcggagugucugugaucaccccuggcaccaacaccagcaaucagguggcagugcuguaccaggacgugaacuguaccgaagugcccguggccauucacgccgaucagcugacaccuacauggcggguguacuccaccggcagcaauguguuucagaccagagccggcugucugaucggagccgagcacgugaacaauagcuacgagugcgacauccccaucggcgcuggcaucugugccagcuaccagacacagacaaacagccccagacgggcuagaagcguggccagccagagcaucauugccuacacaaugucucugggcgccgagaacagcguggccuacuccaacaacucuaucgcuauccccaccaacuucaccaucagcgugaccaccgagauccugccuguguccaugaccaagaccagcguggacugcaccauguacaucugcggcgauuccaccgagugcuccaaccugcugcugcaguacggcagcuucugcacccagcugaauagagcccugacagggaucgccguggaacaggacaagaacacccaagagguguucgcccaagugaagcaaaucuacaagaccccuccuaucaaggacuucggcggcuucaauuucagccagauucugcccgauccuagcaagcccagcaagcggagcuucaucgaggaccugcuguucaacaaagugacacuggccgacgccggcuucaucaagcaguauggcgauugucugggcgacauugccgccagggaucugauuugcgcccagaaguuuaacggacugacagugcugccuccucugcugaccgaugagaugaucgcccaguacacaucugcccugcuggccggcacaaucacaagcggcuggacauuuggagcuggcgccgcucugcagauccccuuugcuaugcagauggccuaccgguucaacggcaucggagugacccagugcgugcuguacgagaaccagaagcugaucgccaaccaguucaacagcgccaucggcaagauccaggacagccugagcagcacagcaagcgcccugggaaagcugcaggacguggucaaccagaaugcccaggcacugaacacccuggucaagcagcuguccuccaacuucggcgccaucagcucugugcugaacgauauccugagcagacuggacaaggucgaggccgaggugcagaucgacagacugaucacaggcagacugcagagccuccagacauacgugacccagcagcugaucagagccgccgagauuagagccucugccaaucuggccgccaccaagaugucugagugugugcugggccagagcaagagaguggacuuuugcggcaagggcuaccaccugaugagcuucccucagucugccccucacggcgugguguuucugcacgugacauaugugcccgcucaagagaagaauuucaccaccgcuccagccaucugccacgacggcaaagcccacuuuccuagagaaggcguguucguguccaacggcacccauugguucgugacacagcggaacuucuacgagccccagaucaucaccaccgacaacaccuucguguguggcaacugcgacguugugaucggcauugugaacaauaccguguacgacccucugcagcccgagcuggacagcuucaaagaggaacuggacaaguacuuuaagaaccacacaagccccgacguggaccugggcgauaucagcggaaucaaugccagcgucgugaacauccagaaagagaucgaccggcugaacgagguggccaagaaucugaacgagagccugaucgaccugcaagaacuggggaaguacgagcaguacaucaagggaggcggaggaucugacaucgaccccuacaaagaguucggcagcagcuaccagcugcugaacuuccugccucuggacuucuuccccgaccugaacgcccugguggauacagccacagcucuguacgaggaagaacugaccggcagagagcacugcagcccucaccacacagccauuagacaggcccucgugugcugggacgagcugacaaaacugaucgccuggaugagcagcaacaucaccagcgagcaagugcggaccaucaucgugaaccacgugaacgauaccuggggccugaaagugcggcagagccugugguuucaccugagcugucugaccuucggccagcacaccgugcaagaguuucugguguccuucggcguguggaucagaaccccugcuccauacagaccuccaaacgcucccauccugagcacccugccugagcacacagugaucuguugaggacuagucccuguucccagagcccacuuuuuuuucuuuuuuugaaauaaaauagccugucuuucagaucucaaaggcucuuuucagagccaccaaaaaaaaaaaaaaaaaaaaaaaaaaaaaaaaaaaaaaaaaaaaaaaaaaaaaaaaaaaaaaaaaaaaaaaaaaaaaaaaaaaaaaaaaaaaaaaaaaaaa

SEQ ID NO: 14156 - RNA, 4196 nt, Artificial Sequence
  SARS-CoV-2/Wuhan/WIV05/2019__EPI_ISL_402128 spike protein mRNA gc mod (1-1147)(N914C_S1123C) LumSynth construct
aggagagucccgcagucggcguccagcggcucugcuuguucgugugugugucguugcaggccuuauucaagcuuaccauguucguguuucuggugcugcugccccugguguccagccagugugugaaccugaccaccagaacacagcugccuccagccuacaccaacagcuucaccagaggcguguacuaccccgacaagguguucagauccagcgugcugcacucuacccaggaccuguuccugccuuucuucagcaacgugaccugguuccacgccauccacguguccggcaccaauggcaccaagagauucgacaaccccgugcugcccuucaacgacgggguguacuuugccagcaccgagaaguccaacaucaucagaggcuggaucuucggcaccacacuggacagcaagacccagagccugcugaucgugaacaacgccaccaacguggucaucaaagugugcgaguuccaguucugcaacgaccccuuccugggcgucuacuaccacaagaacaacaagagcuggauggaaagcgaguuccggguguacagcagcgccaacaacugcaccuucgaguacgugucccagccuuuccugauggaccuggaaggcaagcagggcaacuucaagaaccugcgcgaguucguguucaagaacaucgacggcuacuucaaaaucuacagcaagcacaccccuaucaaccucgugcgggaucugccucagggcuucucugcucuggaaccccugguggaucugcccaucggcaucaacaucacccgguuucagacacugcuggcccugcacagaagcuaccugacaccuggcgauagcagcagcggauggacagcuggugccgccgcuuacuaugugggcuaccugcagccuagaaccuuccugcugaaguacaacgagaacggcaccaucaccgacgccguggauugugcucuggauccucugagcgagacaaagugcacccugaaguccuucaccguggaaaagggcaucuaccagaccagcaacuuccgggugcagcccaccgaauccaucgugcgguuccccaauaucaccaaucugugccccuucggcgagguguucaaugccaccagauucgccucuguguacgccuggaaccggaagcggaucagcaauugcguggccgacuacuccgugcuguacaacuccgccagcuucagcaccuucaagugcuacggcguguccccuaccaagcugaacgaccugugcuucacaaacguguacgccgacagcuucgugauccggggagaugaagugcggcagauugccccuggacagacaggcaagaucgccgacuacaacuacaagcugcccgacgacuucaccggcugugugauugccuggaacagcaacaaccuggacuccaaagucggcggcaacuacaauuaccuguaccggcuguuccggaaguccaaucugaagcccuucgagcgggacaucagcaccgaaaucuaucaggccggcagcaccccuugcaacggcguggaaggcuucaacugcuacuucccacugcaguccuacggcuuucagcccacaaauggcgugggcuaucagcccuacagagugguggugcugagcuucgaacugcugcaugcuccugccacagugugcggcccuaagaaaagcaccaaucucgugaagaacaaaugcgugaacuucaacuucaacggccugaccggcaccggcgugcugacagagagcaacaagaaguuccugccauuccagcaguuuggccgggauaucgccgauaccacagacgccguuagagauccccagacacuggaaauccuggacaucaccccaugcagcuucggcggagugucugugaucaccccuggcaccaacaccagcaaucagguggcagugcuguaccaggacgugaacuguaccgaagugcccguggccauucacgccgaucagcugacaccuacauggcggguguacuccaccggcagcaauguguuucagaccagagccggcugucugaucggagccgagcacgugaacaauagcuacgagugcgacauccccaucggcgcuggcaucugugccagcuaccagacacagacaaacagccccagacgggcuagaagcguggccagccagagcaucauugccuacacaaugucucugggcgccgagaacagcguggccuacuccaacaacucuaucgcuauccccaccaacuucaccaucagcgugaccaccgagauccugccuguguccaugaccaagaccagcguggacugcaccauguacaucugcggcgauuccaccgagugcuccaaccugcugcugcaguacggcagcuucugcacccagcugaauagagcccugacagggaucgccguggaacaggacaagaacacccaagagguguucgcccaagugaagcaaaucuacaagaccccuccuaucaaggacuucggcggcuucaauuucagccagauucugcccgauccuagcaagcccagcaagcggagcuucaucgaggaccugcuguucaacaaagugacacuggccgacgccggcuucaucaagcaguauggcgauugucugggcgacauugccgccagggaucugauuugcgcccagaaguuuaacggacugacagugcugccuccucugcugaccgaugagaugaucgcccaguacacaucugcccugcuggccggcacaaucacaagcggcuggacauuuggagcuggcgccgcucugcagauccccuuugcuaugcagauggccuaccgguucaacggcaucggagugacccagugcgugcuguacgagaaccagaagcugaucgccaaccaguucaacagcgccaucggcaagauccaggacagccugagcagcacagcaagcgcccugggaaagcugcaggacguggucaaccagaaugcccaggcacugaacacccuggucaagcagcuguccuccaacuucggcgccaucagcucugugcugaacgauauccugagcagacuggacaaggucgaggccgaggugcagaucgacagacugaucacaggcagacugcagagccuccagacauacgugacccagcagcugaucagagccgccgagauuagagccucugccaaucuggccgccaccaagaugucugagugugugcugggccagagcaagagaguggacuuuugcggcaagggcuaccaccugaugagcuucccucagucugccccucacggcgugguguuucugcacgugacauaugugcccgcucaagagaagaauuucaccaccgcuccagccaucugccacgacggcaaagcccacuuuccuagagaaggcguguucguguccaacggcacccauugguucgugacacagcggaacuucuacgagccccagaucaucaccaccgacaacaccuucguguguggcaacugcgacguugugaucggcauugugaacaauaccguguacgacccucugcagcccgagcuggacagcggcggaggaucuggcggaggacagaucuacgagggcaagcugacagccgagggccugagauuuggaaucguggccagccgguucaaucacgcccugguggauagacugguggaaggcgccaucgaugccauugucagacacggcggcagagaagaggacaucacccucguuagagugcccggcucuugggagauuccuguggcugcuggcgagcuggcccggaaagaagauaucgacgccguuaucgccaucggcgugcugaucagaggcgccacaccucacuucgacuauaucgccagcgagguguccaaaggccuggccgaucugagccuggaacugagaaagcccaucaccuucggcgugaucaccgcugacacacuggaacaggccauugagagagccggcaccaagcacggcaacaaaggaugggaagccgcucuguccgccaucgagauggccaaccuguucaagagccugcggugaggacuagucccuguucccagagcccacuuuuuuuucuuuuuuugaaauaaaauagccugucuuucagaucucaaaggcucuuuucagagccaccaaaaaaaaaaaaaaaaaaaaaaaaaaaaaaaaaaaaaaaaaaaaaaaaaaaaaaaaaaaaaaaaaaaaaaaaaaaaaaaaaaaaaaaaaaaaaaaaaaaaa

SEQ ID NO: 14157 - RNA, 4220 nt, Artificial Sequence
  SARS-CoV-2/Wuhan/WIV05/2019__EPI_ISL_402128 spike protein mRNA gc mod (1-1147)(N914C_S1123C) Ferritin construct
aggagagucccgcagucggcguccagcggcucugcuuguucgugugugugucguugcaggccuuauucaagcuuaccauguucguguuucuggugcugcugccccugguguccagccagugugugaaccugaccaccagaacacagcugccuccagccuacaccaacagcuucaccagaggcguguacuaccccgacaagguguucagauccagcgugcugcacucuacccaggaccuguuccugccuuucuucagcaacgugaccugguuccacgccauccacguguccggcaccaauggcaccaagagauucgacaaccccgugcugcccuucaacgacgggguguacuuugccagcaccgagaaguccaacaucaucagaggcuggaucuucggcaccacacuggacagcaagacccagagccugcugaucgugaacaacgccaccaacguggucaucaaagugugcgaguuccaguucugcaacgaccccuuccugggcgucuacuaccacaagaacaacaagagcuggauggaaagcgaguuccggguguacagcagcgccaacaacugcaccuucgaguacgugucccagccuuuccugauggaccuggaaggcaagcagggcaacuucaagaaccugcgcgaguucguguucaagaacaucgacggcuacuucaaaaucuacagcaagcacaccccuaucaaccucgugcgggaucugccucagggcuucucugcucuggaaccccugguggaucugcccaucggcaucaacaucacccgguuucagacacugcuggcccugcacagaagcuaccugacaccuggcgauagcagcagcggauggacagcuggugccgccgcuuacuaugugggcuaccugcagccuagaaccuuccugcugaaguacaacgagaacggcaccaucaccgacgccguggauugugcucuggauccucugagcgagacaaagugcacccugaaguccuucaccguggaaaagggcaucuaccagaccagcaacuuccgggugcagcccaccgaauccaucgugcgguuccccaauaucaccaaucugugccccuucggcgagguguucaaugccaccagauucgccucuguguacgccuggaaccggaagcggaucagcaauugcguggccgacuacuccgugcuguacaacuccgccagcuucagcaccuucaagugcuacggcguguccccuaccaagcugaacgaccugugcuucacaaacguguacgccgacagcuucgugauccggggagaugaagugcggcagauugccccuggacagacaggcaagaucgccgacuacaacuacaagcugcccgacgacuucaccggcugugugauugccuggaacagcaacaaccuggacuccaaagucggcggcaacuacaauuaccuguaccggcuguuccggaaguccaaucugaagcccuucgagcgggacaucagcaccgaaaucuaucaggccggcagcaccccuugcaacggcguggaaggcuucaacugcuacuucccacugcaguccuacggcuuucagcccacaaauggcgugggcuaucagcccuacagagugguggugcugagcuucgaacugcugcaugcuccugccacagugugcggcccuaagaaaagcaccaaucucgugaagaacaaaugcgugaacuucaacuucaacggccugaccggcaccggcgugcugacagagagcaacaagaaguuccugccauuccagcaguuuggccgggauaucgccgauaccacagacgccguuagagauccccagacacuggaaauccuggacaucaccccaugcagcuucggcggagugucugugaucaccccuggcaccaacaccagcaaucagguggcagugcuguaccaggacgugaacuguaccgaagugcccguggccauucacgccgaucagcugacaccuacauggcggguguacuccaccggcagcaauguguuucagaccagagccggcugucugaucggagccgagcacgugaacaauagcuacgagugcgacauccccaucggcgcuggcaucugugccagcuaccagacacagacaaacagccccagacgggcuagaagcguggccagccagagcaucauugccuacacaaugucucugggcgccgagaacagcguggccuacuccaacaacucuaucgcuauccccaccaacuucaccaucagcgugaccaccgagauccugccuguguccaugaccaagaccagcguggacugcaccauguacaucugcggcgauuccaccgagugcuccaaccugcugcugcaguacggcagcuucugcacccagcugaauagagcccugacagggaucgccguggaacaggacaagaacacccaagagguguucgcccaagugaagcaaaucuacaagaccccuccuaucaaggacuucggcggcuucaauuucagccagauucugcccgauccuagcaagcccagcaagcggagcuucaucgaggaccugcuguucaacaaagugacacuggccgacgccggcuucaucaagcaguauggcgauugucugggcgacauugccgccagggaucugauuugcgcccagaaguuuaacggacugacagugcugccuccucugcugaccgaugagaugaucgcccaguacacaucugcccugcuggccggcacaaucacaagcggcuggacauuuggagcuggcgccgcucugcagauccccuuugcuaugcagauggccuaccgguucaacggcaucggagugacccagugcgugcuguacgagaaccagaagcugaucgccaaccaguucaacagcgccaucggcaagauccaggacagccugagcagcacagcaagcgcccugggaaagcugcaggacguggucaaccagaaugcccaggcacugaacacccuggucaagcagcuguccuccaacuucggcgccaucagcucugugcugaacgauauccugagcagacuggacaaggucgaggccgaggugcagaucgacagacugaucacaggcagacugcagagccuccagacauacgugacccagcagcugaucagagccgccgagauuagagccucugccaaucuggccgccaccaagaugucugagugugugcugggccagagcaagagaguggacuuuugcggcaagggcuaccaccugaugagcuucccucagucugccccucacggcgugguguuucugcacgugacauaugugcccgcucaagagaagaauuucaccaccgcuccagccaucugccacgacggcaaagcccacuuuccuagagaaggcguguucguguccaacggcacccauugguucgugacacagcggaacuucuacgagccccagaucaucaccaccgacaacaccuucguguguggcaacugcgacguugugaucggcauugugaacaauaccguguacgacccucugcagcccgagcuggacagcggaggcggaggaucugacaucaucaagcugcugaacgagcaagugaacaaagagaugcagagcagcaaccuguacaugagcaugagcagcuggugcuacacccacagccuugauggcgccggacuguuccuguuugaucacgccgccgaggaauacgagcacgccaagaagcugaucaucuuccugaacgagaacaacgugcccgugcagcugaccagcauuucugccccugagcacaaguucgagggccugacacagaucuuccagaaggccuacgaacacgagcagcacaucagcgagagcaucaacaacaucguggaccacgccauuaagagcaaggaucacgccaccuucaacuuucugcagugguacguggccgaacagcacgaggaagaggugcuguucaaggacauccuggacaagaucgagcugaucggcaacgagaaccacggccuguaucuggccgaccaguacgugaagggaaucgccaagagcagaaagagcugaggacuagucccuguucccagagcccacuuuuuuuucuuuuuuugaaauaaaauagccugucuuucagaucucaaaggcucuuuucagagccaccaaaaaaaaaaaaaaaaaaaaaaaaaaaaaaaaaaaaaaaaaaaaaaaaaaaaaaaaaaaaaaaaaaaaaaaaaaaaaaaaaaaaaaaaaaaaaaaaaaaaa

SEQ ID NO: 14158 - RNA, 3806 nt, Artificial Sequence
  SARS-CoV-2/Wuhan/WIV05/2019__EPI_ISL_402128 spike protein mRNA gc mod (1-1147)(N914C_S1123C) Foldon construct
aggagagucccgcagucggcguccagcggcucugcuuguucgugugugugucguugcaggccuuauucaagcuuaccauguucguguuucuggugcugcugccccugguguccagccagugugugaaccugaccaccagaacacagcugccuccagccuacaccaacagcuucaccagaggcguguacuaccccgacaagguguucagauccagcgugcugcacucuacccaggaccuguuccugccuuucuucagcaacgugaccugguuccacgccauccacguguccggcaccaauggcaccaagagauucgacaaccccgugcugcccuucaacgacgggguguacuuugccagcaccgagaaguccaacaucaucagaggcuggaucuucggcaccacacuggacagcaagacccagagccugcugaucgugaacaacgccaccaacguggucaucaaagugugcgaguuccaguucugcaacgaccccuuccugggcgucuacuaccacaagaacaacaagagcuggauggaaagcgaguuccggguguacagcagcgccaacaacugcaccuucgaguacgugucccagccuuuccugauggaccuggaaggcaagcagggcaacuucaagaaccugcgcgaguucguguucaagaacaucgacggcuacuucaaaaucuacagcaagcacaccccuaucaaccucgugcgggaucugccucagggcuucucugcucuggaaccccugguggaucugcccaucggcaucaacaucacccgguuucagacacugcuggcccugcacagaagcuaccugacaccuggcgauagcagcagcggauggacagcuggugccgccgcuuacuaugugggcuaccugcagccuagaaccuuccugcugaaguacaacgagaacggcaccaucaccgacgccguggauugugcucuggauccucugagcgagacaaagugcacccugaaguccuucaccguggaaaagggcaucuaccagaccagcaacuuccgggugcagcccaccgaauccaucgugcgguuccccaauaucaccaaucugugccccuucggcgagguguucaaugccaccagauucgccucuguguacgccuggaaccggaagcggaucagcaauugcguggccgacuacuccgugcuguacaacuccgccagcuucagcaccuucaagugcuacggcguguccccuaccaagcugaacgaccugugcuucacaaacguguacgccgacagcuucgugauccggggagaugaagugcggcagauugccccuggacagacaggcaagaucgccgacuacaacuacaagcugcccgacgacuucaccggcugugugauugccuggaacagcaacaaccuggacuccaaagucggcggcaacuacaauuaccuguaccggcuguuccggaaguccaaucugaagcccuucgagcgggacaucagcaccgaaaucuaucaggccggcagcaccccuugcaacggcguggaaggcuucaacugcuacuucccacugcaguccuacggcuuucagcccacaaauggcgugggcuaucagcccuacagagugguggugcugagcuucgaacugcugcaugcuccugccacagugugcggcccuaagaaaagcaccaaucucgugaagaacaaaugcgugaacuucaacuucaacggccugaccggcaccggcgugcugacagagagcaacaagaaguuccugccauuccagcaguuuggccgggauaucgccgauaccacagacgccguuagagauccccagacacuggaaauccuggacaucaccccaugcagcuucggcggagugucugugaucaccccuggcaccaacaccagcaaucagguggcagugcuguaccaggacgugaacuguaccgaagugcccguggccauucacgccgaucagcugacaccuacauggcggguguacuccaccggcagcaauguguuucagaccagagccggcugucugaucggagccgagcacgugaacaauagcuacgagugcgacauccccaucggcgcuggcaucugugccagcuaccagacacagacaaacagccccagacgggcuagaagcguggccagccagagcaucauugccuacacaaugucucugggcgccgagaacagcguggccuacuccaacaacucuaucgcuauccccaccaacuucaccaucagcgugaccaccgagauccugccuguguccaugaccaagaccagcguggacugcaccauguacaucugcggcgauuccaccgagugcuccaaccugcugcugcaguacggcagcuucugcacccagcugaauagagcccugacagggaucgccguggaacaggacaagaacacccaagagguguucgcccaagugaagcaaaucuacaagaccccuccuaucaaggacuucggcggcuucaauuucagccagauucugcccgauccuagcaagcccagcaagcggagcuucaucgaggaccugcuguucaacaaagugacacuggccgacgccggcuucaucaagcaguauggcgauugucugggcgacauugccgccagggaucugauuugcgcccagaaguuuaacggacugacagugcugccuccucugcugaccgaugagaugaucgcccaguacacaucugcccugcuggccggcacaaucacaagcggcuggacauuuggagcuggcgccgcucugcagauccccuuugcuaugcagauggccuaccgguucaacggcaucggagugacccagugcgugcuguacgagaaccagaagcugaucgccaaccaguucaacagcgccaucggcaagauccaggacagccugagcagcacagcaagcgcccugggaaagcugcaggacguggucaaccagaaugcccaggcacugaacacccuggucaagcagcuguccuccaacuucggcgccaucagcucugugcugaacgauauccugagcagacuggacaaggucgaggccgaggugcagaucgacagacugaucacaggcagacugcagagccuccagacauacgugacccagcagcugaucagagccgccgagauuagagccucugccaaucuggccgccaccaagaugucugagugugugcugggccagagcaagagaguggacuuuugcggcaagggcuaccaccugaugagcuucccucagucugccccucacggcgugguguuucugcacgugacauaugugcccgcucaagagaagaauuucaccaccgcuccagccaucugccacgacggcaaagcccacuuuccuagagaaggcguguucguguccaacggcacccauugguucgugacacagcggaacuucuacgagccccagaucaucaccaccgacaacaccuucguguguggcaacugcgacguugugaucggcauugugaacaauaccguguacgacccucugcagcccgagcuggacagcggaggaucuggcuauauccccgaggcuccuagagauggccaggccuauguucggaaggauggcgaaugggugcugcugagcaccuuccuuugaggacuagucccuguucccagagcccacuuuuuuuucuuuuuuugaaauaaaauagccugucuuucagaucucaaaggcucuuuucagagccaccaaaaaaaaaaaaaaaaaaaaaaaaaaaaaaaaaaaaaaaaaaaaaaaaaaaaaaaaaaaaaaaaaaaaaaaaaaaaaaaaaaaaaaaaaaaaaaaaaaaaa

SEQ ID NO: 14159 - RNA, 4178 nt, Artificial Sequence
  SARS-CoV-2/Wuhan/WIV05/2019__EPI_ISL_402128 spike protein mRNA gc mod (1-1147)(N914C_S1123C) WhcAg construct
aggagagucccgcagucggcguccagcggcucugcuuguucgugugugugucguugcaggccuuauucaagcuuaccauguucguguuucuggugcugcugccccugguguccagccagugugugaaccugaccaccagaacacagcugccuccagccuacaccaacagcuucaccagaggcguguacuaccccgacaagguguucagauccagcgugcugcacucuacccaggaccuguuccugccuuucuucagcaacgugaccugguuccacgccauccacguguccggcaccaauggcaccaagagauucgacaaccccgugcugcccuucaacgacgggguguacuuugccagcaccgagaaguccaacaucaucagaggcuggaucuucggcaccacacuggacagcaagacccagagccugcugaucgugaacaacgccaccaacguggucaucaaagugugcgaguuccaguucugcaacgaccccuuccugggcgucuacuaccacaagaacaacaagagcuggauggaaagcgaguuccggguguacagcagcgccaacaacugcaccuucgaguacgugucccagccuuuccugauggaccuggaaggcaagcagggcaacuucaagaaccugcgcgaguucguguucaagaacaucgacggcuacuucaaaaucuacagcaagcacaccccuaucaaccucgugcgggaucugccucagggcuucucugcucuggaaccccugguggaucugcccaucggcaucaacaucacccgguuucagacacugcuggcccugcacagaagcuaccugacaccuggcgauagcagcagcggauggacagcuggugccgccgcuuacuaugugggcuaccugcagccuagaaccuuccugcugaaguacaacgagaacggcaccaucaccgacgccguggauugugcucuggauccucugagcgagacaaagugcacccugaaguccuucaccguggaaaagggcaucuaccagaccagcaacuuccgggugcagcccaccgaauccaucgugcgguuccccaauaucaccaaucugugccccuucggcgagguguucaaugccaccagauucgccucuguguacgccuggaaccggaagcggaucagcaauugcguggccgacuacuccgugcuguacaacuccgccagcuucagcaccuucaagugcuacggcguguccccuaccaagcugaacgaccugugcuucacaaacguguacgccgacagcuucgugauccggggagaugaagugcggcagauugccccuggacagacaggcaagaucgccgacuacaacuacaagcugcccgacgacuucaccggcugugugauugccuggaacagcaacaaccuggacuccaaagucggcggcaacuacaauuaccuguaccggcuguuccggaaguccaaucugaagcccuucgagcgggacaucagcaccgaaaucuaucaggccggcagcaccccuugcaacggcguggaaggcuucaacugcuacuucccacugcaguccuacggcuuucagcccacaaauggcgugggcuaucagcccuacagagugguggugcugagcuucgaacugcugcaugcuccugccacagugugcggcccuaagaaaagcaccaaucucgugaagaacaaaugcgugaacuucaacuucaacggccugaccggcaccggcgugcugacagagagcaacaagaaguuccugccauuccagcaguuuggccgggauaucgccgauaccacagacgccguuagagauccccagacacuggaaauccuggacaucaccccaugcagcuucggcggagugucugugaucaccccuggcaccaacaccagcaaucagguggcagugcuguaccaggacgugaacuguaccgaagugcccguggccauucacgccgaucagcugacaccuacauggcggguguacuccaccggcagcaauguguuucagaccagagccggcugucugaucggagccgagcacgugaacaauagcuacgagugcgacauccccaucggcgcuggcaucugugccagcuaccagacacagacaaacagccccagacgggcuagaagcguggccagccagagcaucauugccuacacaaugucucugggcgccgagaacagcguggccuacuccaacaacucuaucgcuauccccaccaacuucaccaucagcgugaccaccgagauccugccuguguccaugaccaagaccagcguggacugcaccauguacaucugcggcgauuccaccgagugcuccaaccugcugcugcaguacggcagcuucugcacccagcugaauagagcccugacagggaucgccguggaacaggacaagaacacccaagagguguucgcccaagugaagcaaaucuacaagaccccuccuaucaaggacuucggcggcuucaauuucagccagauucugcccgauccuagcaagcccagcaagcggagcuucaucgaggaccugcuguucaacaaagugacacuggccgacgccggcuucaucaagcaguauggcgauugucugggcgacauugccgccagggaucugauuugcgcccagaaguuuaacggacugacagugcugccuccucugcugaccgaugagaugaucgcccaguacacaucugcccugcuggccggcacaaucacaagcggcuggacauuuggagcuggcgccgcucugcagauccccuuugcuaugcagauggccuaccgguucaacggcaucggagugacccagugcgugcuguacgagaaccagaagcugaucgccaaccaguucaacagcgccaucggcaagauccaggacagccugagcagcacagcaagcgcccugggaaagcugcaggacguggucaaccagaaugcccaggcacugaacacccuggucaagcagcuguccuccaacuucggcgccaucagcucugugcugaacgauauccugagcagacuggacaaggucgaggccgaggugcagaucgacagacugaucacaggcagacugcagagccuccagacauacgugacccagcagcugaucagagccgccgagauuagagccucugccaaucuggccgccaccaagaugucugagugugugcugggccagagcaagagaguggacuuuugcggcaagggcuaccaccugaugagcuucccucagucugccccucacggcgugguguuucugcacgugacauaugugcccgcucaagagaagaauuucaccaccgcuccagccaucugccacgacggcaaagcccacuuuccuagagaaggcguguucguguccaacggcacccauugguucgugacacagcggaacuucuacgagccccagaucaucaccaccgacaacaccuucguguguggcaacugcgacguugugaucggcauugugaacaauaccguguacgacccucugcagcccgagcuggacagcggaggcggaggaucugacaucgaccccuacaaagaguucggcagcagcuaccagcugcugaacuuccugccucuggacuucuuccccgaccugaacgcccugguggauacagccacagcucuguacgaggaagaacugaccggcagagagcacugcagcccucaccacacagccauuagacaggcccucgugugcugggacgagcugacaaaacugaucgccuggaugagcagcaacaucaccagcgagcaagugcggaccaucaucgugaaccacgugaacgauaccuggggccugaaagugcggcagagccugugguuucaccugagcugucugaccuucggccagcacaccgugcaagaguuucugguguccuucggcguguggaucagaaccccugcuccauacagaccuccaaacgcucccauccugagcacccugccugagcacacagugaucuguugaggacuagucccuguucccagagcccacuuuuuuuucuuuuuuugaaauaaaauagccugucuuucagaucucaaaggcucuuuucagagccaccaaaaaaaaaaaaaaaaaaaaaaaaaaaaaaaaaaaaaaaaaaaaaaaaaaaaaaaaaaaaaaaaaaaaaaaaaaaaaaaaaaaaaaaaaaaaaaaaaaaaa

SEQ ID NO: 14160 - RNA, 4039 nt, Artificial Sequence
  SARS-CoV-2/Wuhan/WIV05/2019__EPI_ISL_402128 spike protein mRNA gc (1-1273)(N914C_S1123C)
aggagaaagcuuaccauguucguguuccugguccuccugccccuggugagcucccagugcgugaaccucaccacccgcacgcagcugccgcccgccuacaccaacagcuucacccggggcgucuacuaccccgacaagguguuccgcuccagcgugcugcacuccacccaggaccucuuccugcccuucuucagcaacgucacgugguuccacgccauccacguguccgggaccaacggcaccaagcgguucgacaacccggugcugcccuucaacgacggggucuacuucgcgagcaccgagaaguccaacaucauccgcggcuggaucuucgggacgacccucgacagcaagacccagucccugcugaucgugaacaacgccaccaacguggucaucaaggugugcgaguuccaguucugcaacgaccccuuccucggcguguacuaccacaagaacaacaagagcuggauggaguccgaguuccgggucuacagcuccgccaacaacugcacguucgaguacgugagccagcccuuccugauggaccuggagggcaagcaggggaacuucaagaaccuccgcgaguucguguucaagaacaucgacggcuacuucaagaucuacuccaagcacaccccgaucaaccugguccgggaccugccccagggguucagcgcccucgagccccugguggaccugcccaucggcaucaacaucacccgcuuccagacccuccuggcccugcaccgguccuaccucacgccgggggacagcagcuccggcuggaccgcgggcgccgccgccuacuacgugggguaccugcagccccgcaccuuccugcucaaguacaacgagaacggcaccaucacggacgcggucgacugcgcccuggacccccugagcgagaccaagugcacccucaaguccuucaccguggagaaggggaucuaccagacgagcaacuuccgggugcagcccaccgaguccaucguccgcuucccgaacaucaccaaccugugccccuucggcgagguguucaacgccacccgguucgccagcgucuacgccuggaaccgcaagcggaucuccaacugcguggcggacuacagcgugcuguacaacuccgccagcuucuccacguucaagugcuacggcgucagccccaccaagcucaacgaccugugcuucaccaacguguacgccgacuccuucgugauccgcggggacgagguccggcagaucgcccccggccagaccgggaagaucgccgacuacaacuacaagcugccggacgacuucacgggcugcgugaucgcguggaacagcaacaaccucgacuccaaggucgggggcaacuacaacuaccuguaccgccuguuccgcaagagcaaccucaagcccuucgagcgggacaucuccaccgagaucuaccaggccggcagcacccccugcaacgggguggagggcuucaacugcuacuucccccugcaguccuacggguuccagccgaccaacggcgugggguaccagcccuaccggguggucgugcugagcuucgagcuccugcacgcccccgccacggugugcggccccaagaaguccaccaaccuggucaagaacaagugcgugaacuucaacuucaacggccucaccgggaccggcgugcugaccgagagcaacaagaaguuccugccguuccagcaguucgggcgcgacaucgccgacacgaccgacgcgguccgcgacccccagacccuggagauccucgacaucacccccugcagcuucggcgggguguccgugaucacgccgggcaccaacaccagcaaccaggucgccgugcuguaccaggacgugaacugcaccgagguccccguggccauccacgccgaccagcugacgcccaccuggcggguguacuccaccggcagcaacgucuuccagacccgcgccgggugccucaucggcgcggagcacgugaacaacuccuacgagugcgacauccccaucggggccggcaucugcgccagcuaccagacgcagaccaacuccccgcggcgcgcccggagcguggcgucccagagcaucaucgccuacaccaugucccugggcgccgagaacagcgucgccuacuccaacaacagcaucgccauccccaccaacuucacgaucuccgugaccaccgagauccugcccgugagcaugaccaagacgagcgucgacugcaccauguacaucugcggggacuccaccgagugcagcaaccuccugcugcaguacggcuccuucugcacccagcucaaccgcgcgcugacggggaucgccguggagcaggacaagaacacccaggagguguucgcccaggucaagcagaucuacaagacgcccccgaucaaggacuucggcggguucaacuucagccagauccugcccgaccccuccaagcccagcaagcgguccuucaucgaggaccuccuguucaacaaggugacccuggccgacgccggcuucaucaagcaguacggcgacugccucggggacaucgcggcccgcgaccugaucugcgcccagaaguucaacggccugaccgugcucccgccccugcugaccgacgagaugaucgcccaguacaccagcgcccuccuggcggggaccaucacguccggcuggaccuucggggccggcgccgcccugcagauccccuucgcgaugcagauggccuaccgguucaacggcaucggggucacccagugcgugcucuacgagaaccagaagcugaucgccaaccaguucaacagcgccaucggcaagauccaggacucccugagcuccaccgccagcgcgcucgggaagcugcaggacguggucaaccagaacgcccaggcccugaacacgcucgugaagcagcuguccagcaacuucggcgccaucuccagcgugcugaacgacauccucucccgccuggacaaggucgaggccgaggugcagaucgaccggcugaucaccgggcgccuccagagccugcagaccuacgugacccagcagcugauccgggcggccgagauccgcgccagcgccaaccucgccgcgaccaagauguccgagugcguccugggccagagcaagcggguggacuucugcggcaagggguaccaccugauguccuucccccagagcgccccgcacggcguggucuuccuccacgugacguacguccccgcccaggagaagaacuucaccaccgcccccgcgaucugccacgacgggaaggcccacuucccccgcgagggcguguucguguccaacgggacccacugguucgucacgcagcggaacuucuacgagccgcagaucaucaccaccgacaacaccuucgugugcggcaacugcgacguggucaucggcaucgugaacaacacgguguacgacccccugcagcccgagcuggacuccuucaaggaggagcucgacaaguacuucaagaaccacaccagccccgacgucgaccugggggacaucuccggcaucaacgccagcguggugaacauccagaaggagaucgaccgccugaacgaggucgccaagaaccucaacgagucccugaucgaccugcaggagcucgggaaguacgagcaguacaucaaguggccgugguacaucuggcugggcuucaucgccggccugaucgcgaucgugauggugaccaucaugcucugcugcaugaccagcugcugcuccugccugaaggggugcugcagcugcggcuccugcugcaaguucgacgaggacgacagcgagcccguccugaagggggugaagcuccacuacacgugaggacuaguuauaagacugacuagcccgaugggccucccaacgggcccuccuccccuccuugcaccgagauuaauaaaaaaaaaaaaaaaaaaaaaaaaaaaaaaaaaaaaaaaaaaaaaaaaaaaaaaaaaaaaaaaaugcaucccccccccccccccccccccccccccccccaaaggcucuuuucagagccaccagaauu

SEQ ID NO: 14161 - RNA, 4333 nt, Artificial Sequence
  SARS-CoV-2/Wuhan/WIV05/2019__EPI_ISL_402128 spike protein mRNA gc (1-1211)(N914C_S1123C) LumSynth construct
aggagaaagcuuaccauguucguguuccugguccuccugccccuggugagcucccagugcgugaaccucaccacccgcacgcagcugccgcccgccuacaccaacagcuucacccggggcgucuacuaccccgacaagguguuccgcuccagcgugcugcacuccacccaggaccucuuccugcccuucuucagcaacgucacgugguuccacgccauccacguguccgggaccaacggcaccaagcgguucgacaacccggugcugcccuucaacgacggggucuacuucgcgagcaccgagaaguccaacaucauccgcggcuggaucuucgggacgacccucgacagcaagacccagucccugcugaucgugaacaacgccaccaacguggucaucaaggugugcgaguuccaguucugcaacgaccccuuccucggcguguacuaccacaagaacaacaagagcuggauggaguccgaguuccgggucuacagcuccgccaacaacugcacguucgaguacgugagccagcccuuccugauggaccuggagggcaagcaggggaacuucaagaaccuccgcgaguucguguucaagaacaucgacggcuacuucaagaucuacuccaagcacaccccgaucaaccugguccgggaccugccccagggguucagcgcccucgagccccugguggaccugcccaucggcaucaacaucacccgcuuccagacccuccuggcccugcaccgguccuaccucacgccgggggacagcagcuccggcuggaccgcgggcgccgccgccuacuacgugggguaccugcagccccgcaccuuccugcucaaguacaacgagaacggcaccaucacggacgcggucgacugcgcccuggacccccugagcgagaccaagugcacccucaaguccuucaccguggagaaggggaucuaccagacgagcaacuuccgggugcagcccaccgaguccaucguccgcuucccgaacaucaccaaccugugccccuucggcgagguguucaacgccacccgguucgccagcgucuacgccuggaaccgcaagcggaucuccaacugcguggcggacuacagcgugcuguacaacuccgccagcuucuccacguucaagugcuacggcgucagccccaccaagcucaacgaccugugcuucaccaacguguacgccgacuccuucgugauccgcggggacgagguccggcagaucgcccccggccagaccgggaagaucgccgacuacaacuacaagcugccggacgacuucacgggcugcgugaucgcguggaacagcaacaaccucgacuccaaggucgggggcaacuacaacuaccuguaccgccuguuccgcaagagcaaccucaagcccuucgagcgggacaucuccaccgagaucuaccaggccggcagcacccccugcaacgggguggagggcuucaacugcuacuucccccugcaguccuacggguuccagccgaccaacggcgugggguaccagcccuaccggguggucgugcugagcuucgagcuccugcacgcccccgccacggugugcggccccaagaaguccaccaaccuggucaagaacaagugcgugaacuucaacuucaacggccucaccgggaccggcgugcugaccgagagcaacaagaaguuccugccguuccagcaguucgggcgcgacaucgccgacacgaccgacgcgguccgcgacccccagacccuggagauccucgacaucacccccugcagcuucggcgggguguccgugaucacgccgggcaccaacaccagcaaccaggucgccgugcuguaccaggacgugaacugcaccgagguccccguggccauccacgccgaccagcugacgcccaccuggcggguguacuccaccggcagcaacgucuuccagacccgcgccgggugccucaucggcgcggagcacgugaacaacuccuacgagugcgacauccccaucggggccggcaucugcgccagcuaccagacgcagaccaacuccccgcggcgcgcccggagcguggcgucccagagcaucaucgccuacaccaugucccugggcgccgagaacagcgucgccuacuccaacaacagcaucgccauccccaccaacuucacgaucuccgugaccaccgagauccugcccgugagcaugaccaagacgagcgucgacugcaccauguacaucugcggggacuccaccgagugcagcaaccuccugcugcaguacggcuccuucugcacccagcucaaccgcgcgcugacggggaucgccguggagcaggacaagaacacccaggagguguucgcccaggucaagcagaucuacaagacgcccccgaucaaggacuucggcggguucaacuucagccagauccugcccgaccccuccaagcccagcaagcgguccuucaucgaggaccuccuguucaacaaggugacccuggccgacgccggcuucaucaagcaguacggcgacugccucggggacaucgcggcccgcgaccugaucugcgcccagaaguucaacggccugaccgugcucccgccccugcugaccgacgagaugaucgcccaguacaccagcgcccuccuggcggggaccaucacguccggcuggaccuucggggccggcgccgcccugcagauccccuucgcgaugcagauggccuaccgguucaacggcaucggggucacccagugcgugcucuacgagaaccagaagcugaucgccaaccaguucaacagcgccaucggcaagauccaggacucccugagcuccaccgccagcgcgcucgggaagcugcaggacguggucaaccagaacgcccaggcccugaacacgcucgugaagcagcuguccagcaacuucggcgccaucuccagcgugcugaacgacauccucucccgccuggacaaggucgaggccgaggugcagaucgaccggcugaucaccgggcgccuccagagccugcagaccuacgugacccagcagcugauccgggcggccgagauccgcgccagcgccaaccucgccgcgaccaagauguccgagugcguccugggccagagcaagcggguggacuucugcggcaagggguaccaccugauguccuucccccagagcgccccgcacggcguggucuuccuccacgugacguacguccccgcccaggagaagaacuucaccaccgcccccgcgaucugccacgacgggaaggcccacuucccccgcgagggcguguucguguccaacgggacccacugguucgucacgcagcggaacuucuacgagccgcagaucaucaccaccgacaacaccuucgugugcggcaacugcgacguggucaucggcaucgugaacaacacgguguacgacccccugcagcccgagcuggacuccuucaaggaggagcucgacaaguacuucaagaaccacaccagccccgacgucgaccugggggacaucuccggcaucaacgccagcguggugaacauccagaaggagaucgaccgccugaacgaggucgccaagaaccucaacgagucccugaucgaccugcaggagcucgggaaguacgagcaguacaucaagggcggcgggagcgggggcgggcagaucuacgagggcaagcugaccgccgaggggcuccgcuucggcaucguggccagccgguucaaccacgcgcuggucgaccgccugguggagggggccaucgacgccaucgugcggcacggcgggcgcgaggaggacaucacccucguccgggugcccggcuccugggagaucccgguggccgccggcgagcuggcccgcaaggaggacaucgacgcggucaucgccaucggggugcugauccggggcgccacgccccacuucgacuacaucgccagcgagguguccaaggggcucgcggaccugagccuggagcuccgcaagcccaucaccuucggcgucaucaccgccgacacccuggagcaggccaucgagcgggccgggacgaagcacggcaacaagggcugggaggccgcgcuguccgccaucgagauggccaaccucuucaagagccugcgcugaggacuaguuauaagacugacuagcccgaugggccucccaacgggcccuccuccccuccuugcaccgagauuaauaaaaaaaaaaaaaaaaaaaaaaaaaaaaaaaaaaaaaaaaaaaaaaaaaaaaaaaaaaaaaaaaugcaucccccccccccccccccccccccccccccccaaaggcucuuuucagagccaccagaauu

SEQ ID NO: 14162 - RNA, 4357 nt, Artificial Sequence
  SARS-CoV-2/Wuhan/WIV05/2019__EPI_ISL_402128 spike protein mRNA gc (1-1211)(N914C_S1123C) Ferritin construct
aggagaaagcuuaccauguucguguuccugguccuccugccccuggugagcucccagugcgugaaccucaccacccgcacgcagcugccgcccgccuacaccaacagcuucacccggggcgucuacuaccccgacaagguguuccgcuccagcgugcugcacuccacccaggaccucuuccugcccuucuucagcaacgucacgugguuccacgccauccacguguccgggaccaacggcaccaagcgguucgacaacccggugcugcccuucaacgacggggucuacuucgcgagcaccgagaaguccaacaucauccgcggcuggaucuucgggacgacccucgacagcaagacccagucccugcugaucgugaacaacgccaccaacguggucaucaaggugugcgaguuccaguucugcaacgaccccuuccucggcguguacuaccacaagaacaacaagagcuggauggaguccgaguuccgggucuacagcuccgccaacaacugcacguucgaguacgugagccagcccuuccugauggaccuggagggcaagcaggggaacuucaagaaccuccgcgaguucguguucaagaacaucgacggcuacuucaagaucuacuccaagcacaccccgaucaaccugguccgggaccugccccagggguucagcgcccucgagccccugguggaccugcccaucggcaucaacaucacccgcuuccagacccuccuggcccugcaccgguccuaccucacgccgggggacagcagcuccggcuggaccgcgggcgccgccgccuacuacgugggguaccugcagccccgcaccuuccugcucaaguacaacgagaacggcaccaucacggacgcggucgacugcgcccuggacccccugagcgagaccaagugcacccucaaguccuucaccguggagaaggggaucuaccagacgagcaacuuccgggugcagcccaccgaguccaucguccgcuucccgaacaucaccaaccugugccccuucggcgagguguucaacgccacccgguucgccagcgucuacgccuggaaccgcaagcggaucuccaacugcguggcggacuacagcgugcuguacaacuccgccagcuucuccacguucaagugcuacggcgucagccccaccaagcucaacgaccugugcuucaccaacguguacgccgacuccuucgugauccgcggggacgagguccggcagaucgcccccggccagaccgggaagaucgccgacuacaacuacaagcugccggacgacuucacgggcugcgugaucgcguggaacagcaacaaccucgacuccaaggucgggggcaacuacaacuaccuguaccgccuguuccgcaagagcaaccucaagcccuucgagcgggacaucuccaccgagaucuaccaggccggcagcacccccugcaacgggguggagggcuucaacugcuacuucccccugcaguccuacggguuccagccgaccaacggcgugggguaccagcccuaccggguggucgugcugagcuucgagcuccugcacgcccccgccacggugugcggccccaagaaguccaccaaccuggucaagaacaagugcgugaacuucaacuucaacggccucaccgggaccggcgugcugaccgagagcaacaagaaguuccugccguuccagcaguucgggcgcgacaucgccgacacgaccgacgcgguccgcgacccccagacccuggagauccucgacaucacccccugcagcuucggcgggguguccgugaucacgccgggcaccaacaccagcaaccaggucgccgugcuguaccaggacgugaacugcaccgagguccccguggccauccacgccgaccagcugacgcccaccuggcggguguacuccaccggcagcaacgucuuccagacccgcgccgggugccucaucggcgcggagcacgugaacaacuccuacgagugcgacauccccaucggggccggcaucugcgccagcuaccagacgcagaccaacuccccgcggcgcgcccggagcguggcgucccagagcaucaucgccuacaccaugucccugggcgccgagaacagcgucgccuacuccaacaacagcaucgccauccccaccaacuucacgaucuccgugaccaccgagauccugcccgugagcaugaccaagacgagcgucgacugcaccauguacaucugcggggacuccaccgagugcagcaaccuccugcugcaguacggcuccuucugcacccagcucaaccgcgcgcugacggggaucgccguggagcaggacaagaacacccaggagguguucgcccaggucaagcagaucuacaagacgcccccgaucaaggacuucggcggguucaacuucagccagauccugcccgaccccuccaagcccagcaagcgguccuucaucgaggaccuccuguucaacaaggugacccuggccgacgccggcuucaucaagcaguacggcgacugccucggggacaucgcggcccgcgaccugaucugcgcccagaaguucaacggccugaccgugcucccgccccugcugaccgacgagaugaucgcccaguacaccagcgcccuccuggcggggaccaucacguccggcuggaccuucggggccggcgccgcccugcagauccccuucgcgaugcagauggccuaccgguucaacggcaucggggucacccagugcgugcucuacgagaaccagaagcugaucgccaaccaguucaacagcgccaucggcaagauccaggacucccugagcuccaccgccagcgcgcucgggaagcugcaggacguggucaaccagaacgcccaggcccugaacacgcucgugaagcagcuguccagcaacuucggcgccaucuccagcgugcugaacgacauccucucccgccuggacaaggucgaggccgaggugcagaucgaccggcugaucaccgggcgccuccagagccugcagaccuacgugacccagcagcugauccgggcggccgagauccgcgccagcgccaaccucgccgcgaccaagauguccgagugcguccugggccagagcaagcggguggacuucugcggcaagggguaccaccugauguccuucccccagagcgccccgcacggcguggucuuccuccacgugacguacguccccgcccaggagaagaacuucaccaccgcccccgcgaucugccacgacgggaaggcccacuucccccgcgagggcguguucguguccaacgggacccacugguucgucacgcagcggaacuucuacgagccgcagaucaucaccaccgacaacaccuucgugugcggcaacugcgacguggucaucggcaucgugaacaacacgguguacgacccccugcagcccgagcuggacuccuucaaggaggagcucgacaaguacuucaagaaccacaccagccccgacgucgaccugggggacaucuccggcaucaacgccagcguggugaacauccagaaggagaucgaccgccugaacgaggucgccaagaaccucaacgagucccugaucgaccugcaggagcucgggaaguacgagcaguacaucaagggcgggggcgggagcgacaucaucaagcuccugaacgagcaggucaacaaggagaugcaguccagcaaccuguacauguccaugagcuccuggugcuacacccacagccucgacggcgccgggcuguuccuguucgaccacgccgcggaggaguacgagcacgccaagaagcucaucaucuuccugaacgagaacaacgugcccgugcagcugaccuccaucagcgccccggagcacaaguucgagggccucacgcagaucuuccagaaggccuacgagcacgagcagcacaucuccgagagcaucaacaacaucguggaccacgccaucaaguccaaggaccacgcgaccuucaacuuccugcagugguacgucgccgagcagcacgaggaggaggugcuguucaaggacauccucgacaagaucgagcugaucgggaacgagaaccacggccuguaccucgccgaccaguacgugaaggggaucgccaagagccgcaaguccugaggacuaguuauaagacugacuagcccgaugggccucccaacgggcccuccuccccuccuugcaccgagauuaauaaaaaaaaaaaaaaaaaaaaaaaaaaaaaaaaaaaaaaaaaaaaaaaaaaaaaaaaaaaaaaaaugcaucccccccccccccccccccccccccccccccaaaggcucuuuucagagccaccagaauu

SEQ ID NO: 14163 - RNA, 3943 nt, Artificial Sequence
  SARS-CoV-2/Wuhan/WIV05/2019__EPI_ISL_402128 spike protein mRNA gc (1-1211)(N914C_S1123C) Foldon construct
aggagaaagcuuaccauguucguguuccugguccuccugccccuggugagcucccagugcgugaaccucaccacccgcacgcagcugccgcccgccuacaccaacagcuucacccggggcgucuacuaccccgacaagguguuccgcuccagcgugcugcacuccacccaggaccucuuccugcccuucuucagcaacgucacgugguuccacgccauccacguguccgggaccaacggcaccaagcgguucgacaacccggugcugcccuucaacgacggggucuacuucgcgagcaccgagaaguccaacaucauccgcggcuggaucuucgggacgacccucgacagcaagacccagucccugcugaucgugaacaacgccaccaacguggucaucaaggugugcgaguuccaguucugcaacgaccccuuccucggcguguacuaccacaagaacaacaagagcuggauggaguccgaguuccgggucuacagcuccgccaacaacugcacguucgaguacgugagccagcccuuccugauggaccuggagggcaagcaggggaacuucaagaaccuccgcgaguucguguucaagaacaucgacggcuacuucaagaucuacuccaagcacaccccgaucaaccugguccgggaccugccccagggguucagcgcccucgagccccugguggaccugcccaucggcaucaacaucacccgcuuccagacccuccuggcccugcaccgguccuaccucacgccgggggacagcagcuccggcuggaccgcgggcgccgccgccuacuacgugggguaccugcagccccgcaccuuccugcucaaguacaacgagaacggcaccaucacggacgcggucgacugcgcccuggacccccugagcgagaccaagugcacccucaaguccuucaccguggagaaggggaucuaccagacgagcaacuuccgggugcagcccaccgaguccaucguccgcuucccgaacaucaccaaccugugccccuucggcgagguguucaacgccacccgguucgccagcgucuacgccuggaaccgcaagcggaucuccaacugcguggcggacuacagcgugcuguacaacuccgccagcuucuccacguucaagugcuacggcgucagccccaccaagcucaacgaccugugcuucaccaacguguacgccgacuccuucgugauccgcggggacgagguccggcagaucgcccccggccagaccgggaagaucgccgacuacaacuacaagcugccggacgacuucacgggcugcgugaucgcguggaacagcaacaaccucgacuccaaggucgggggcaacuacaacuaccuguaccgccuguuccgcaagagcaaccucaagcccuucgagcgggacaucuccaccgagaucuaccaggccggcagcacccccugcaacgggguggagggcuucaacugcuacuucccccugcaguccuacggguuccagccgaccaacggcgugggguaccagcccuaccggguggucgugcugagcuucgagcuccugcacgcccccgccacggugugcggccccaagaaguccaccaaccuggucaagaacaagugcgugaacuucaacuucaacggccucaccgggaccggcgugcugaccgagagcaacaagaaguuccugccguuccagcaguucgggcgcgacaucgccgacacgaccgacgcgguccgcgacccccagacccuggagauccucgacaucacccccugcagcuucggcgggguguccgugaucacgccgggcaccaacaccagcaaccaggucgccgugcuguaccaggacgugaacugcaccgagguccccguggccauccacgccgaccagcugacgcccaccuggcggguguacuccaccggcagcaacgucuuccagacccgcgccgggugccucaucggcgcggagcacgugaacaacuccuacgagugcgacauccccaucggggccggcaucugcgccagcuaccagacgcagaccaacuccccgcggcgcgcccggagcguggcgucccagagcaucaucgccuacaccaugucccugggcgccgagaacagcgucgccuacuccaacaacagcaucgccauccccaccaacuucacgaucuccgugaccaccgagauccugcccgugagcaugaccaagacgagcgucgacugcaccauguacaucugcggggacuccaccgagugcagcaaccuccugcugcaguacggcuccuucugcacccagcucaaccgcgcgcugacggggaucgccguggagcaggacaagaacacccaggagguguucgcccaggucaagcagaucuacaagacgcccccgaucaaggacuucggcggguucaacuucagccagauccugcccgaccccuccaagcccagcaagcgguccuucaucgaggaccuccuguucaacaaggugacccuggccgacgccggcuucaucaagcaguacggcgacugccucggggacaucgcggcccgcgaccugaucugcgcccagaaguucaacggccugaccgugcucccgccccugcugaccgacgagaugaucgcccaguacaccagcgcccuccuggcggggaccaucacguccggcuggaccuucggggccggcgccgcccugcagauccccuucgcgaugcagauggccuaccgguucaacggcaucggggucacccagugcgugcucuacgagaaccagaagcugaucgccaaccaguucaacagcgccaucggcaagauccaggacucccugagcuccaccgccagcgcgcucgggaagcugcaggacguggucaaccagaacgcccaggcccugaacacgcucgugaagcagcuguccagcaacuucggcgccaucuccagcgugcugaacgacauccucucccgccuggacaaggucgaggccgaggugcagaucgaccggcugaucaccgggcgccuccagagccugcagaccuacgugacccagcagcugauccgggcggccgagauccgcgccagcgccaaccucgccgcgaccaagauguccgagugcguccugggccagagcaagcggguggacuucugcggcaagggguaccaccugauguccuucccccagagcgccccgcacggcguggucuuccuccacgugacguacguccccgcccaggagaagaacuucaccaccgcccccgcgaucugccacgacgggaaggcccacuucccccgcgagggcguguucguguccaacgggacccacugguucgucacgcagcggaacuucuacgagccgcagaucaucaccaccgacaacaccuucgugugcggcaacugcgacguggucaucggcaucgugaacaacacgguguacgacccccugcagcccgagcuggacuccuucaaggaggagcucgacaaguacuucaagaaccacaccagccccgacgucgaccugggggacaucuccggcaucaacgccagcguggugaacauccagaaggagaucgaccgccugaacgaggucgccaagaaccucaacgagucccugaucgaccugcaggagcucgggaaguacgagcaguacaucaagggcgggagcggcuacauccccgaggccccgcgcgacgggcaggccuacgugcggaaggacggcgaguggguccugcucagcaccuuccugugaggacuaguuauaagacugacuagcccgaugggccucccaacgggcccuccuccccuccuugcaccgagauuaauaaaaaaaaaaaaaaaaaaaaaaaaaaaaaaaaaaaaaaaaaaaaaaaaaaaaaaaaaaaaaaaaugcaucccccccccccccccccccccccccccccccaaaggcucuuuucagagccaccagaauu

SEQ ID NO: 14164 - RNA, 4315 nt, Artificial Sequence
  SARS-CoV-2/Wuhan/WIV05/2019__EPI_ISL_402128 spike protein mRNA gc (1-1211)(N914C_S1123C) WhcAg construct
aggagaaagcuuaccauguucguguuccugguccuccugccccuggugagcucccagugcgugaaccucaccacccgcacgcagcugccgcccgccuacaccaacagcuucacccggggcgucuacuaccccgacaagguguuccgcuccagcgugcugcacuccacccaggaccucuuccugcccuucuucagcaacgucacgugguuccacgccauccacguguccgggaccaacggcaccaagcgguucgacaacccggugcugcccuucaacgacggggucuacuucgcgagcaccgagaaguccaacaucauccgcggcuggaucuucgggacgacccucgacagcaagacccagucccugcugaucgugaacaacgccaccaacguggucaucaaggugugcgaguuccaguucugcaacgaccccuuccucggcguguacuaccacaagaacaacaagagcuggauggaguccgaguuccgggucuacagcuccgccaacaacugcacguucgaguacgugagccagcccuuccugauggaccuggagggcaagcaggggaacuucaagaaccuccgcgaguucguguucaagaacaucgacggcuacuucaagaucuacuccaagcacaccccgaucaaccugguccgggaccugccccagggguucagcgcccucgagccccugguggaccugcccaucggcaucaacaucacccgcuuccagacccuccuggcccugcaccgguccuaccucacgccgggggacagcagcuccggcuggaccgcgggcgccgccgccuacuacgugggguaccugcagccccgcaccuuccugcucaaguacaacgagaacggcaccaucacggacgcggucgacugcgcccuggacccccugagcgagaccaagugcacccucaaguccuucaccguggagaaggggaucuaccagacgagcaacuuccgggugcagcccaccgaguccaucguccgcuucccgaacaucaccaaccugugccccuucggcgagguguucaacgccacccgguucgccagcgucuacgccuggaaccgcaagcggaucuccaacugcguggcggacuacagcgugcuguacaacuccgccagcuucuccacguucaagugcuacggcgucagccccaccaagcucaacgaccugugcuucaccaacguguacgccgacuccuucgugauccgcggggacgagguccggcagaucgcccccggccagaccgggaagaucgccgacuacaacuacaagcugccggacgacuucacgggcugcgugaucgcguggaacagcaacaaccucgacuccaaggucgggggcaacuacaacuaccuguaccgccuguuccgcaagagcaaccucaagcccuucgagcgggacaucuccaccgagaucuaccaggccggcagcacccccugcaacgggguggagggcuucaacugcuacuucccccugcaguccuacggguuccagccgaccaacggcgugggguaccagcccuaccggguggucgugcugagcuucgagcuccugcacgcccccgccacggugugcggccccaagaaguccaccaaccuggucaagaacaagugcgugaacuucaacuucaacggccucaccgggaccggcgugcugaccgagagcaacaagaaguuccugccguuccagcaguucgggcgcgacaucgccgacacgaccgacgcgguccgcgacccccagacccuggagauccucgacaucacccccugcagcuucggcgggguguccgugaucacgccgggcaccaacaccagcaaccaggucgccgugcuguaccaggacgugaacugcaccgagguccccguggccauccacgccgaccagcugacgcccaccuggcggguguacuccaccggcagcaacgucuuccagacccgcgccgggugccucaucggcgcggagcacgugaacaacuccuacgagugcgacauccccaucggggccggcaucugcgccagcuaccagacgcagaccaacuccccgcggcgcgcccggagcguggcgucccagagcaucaucgccuacaccaugucccugggcgccgagaacagcgucgccuacuccaacaacagcaucgccauccccaccaacuucacgaucuccgugaccaccgagauccugcccgugagcaugaccaagacgagcgucgacugcaccauguacaucugcggggacuccaccgagugcagcaaccuccugcugcaguacggcuccuucugcacccagcucaaccgcgcgcugacggggaucgccguggagcaggacaagaacacccaggagguguucgcccaggucaagcagaucuacaagacgcccccgaucaaggacuucggcggguucaacuucagccagauccugcccgaccccuccaagcccagcaagcgguccuucaucgaggaccuccuguucaacaaggugacccuggccgacgccggcuucaucaagcaguacggcgacugccucggggacaucgcggcccgcgaccugaucugcgcccagaaguucaacggccugaccgugcucccgccccugcugaccgacgagaugaucgcccaguacaccagcgcccuccuggcggggaccaucacguccggcuggaccuucggggccggcgccgcccugcagauccccuucgcgaugcagauggccuaccgguucaacggcaucggggucacccagugcgugcucuacgagaaccagaagcugaucgccaaccaguucaacagcgccaucggcaagauccaggacucccugagcuccaccgccagcgcgcucgggaagcugcaggacguggucaaccagaacgcccaggcccugaacacgcucgugaagcagcuguccagcaacuucggcgccaucuccagcgugcugaacgacauccucucccgccuggacaaggucgaggccgaggugcagaucgaccggcugaucaccgggcgccuccagagccugcagaccuacgugacccagcagcugauccgggcggccgagauccgcgccagcgccaaccucgccgcgaccaagauguccgagugcguccugggccagagcaagcggguggacuucugcggcaagggguaccaccugauguccuucccccagagcgccccgcacggcguggucuuccuccacgugacguacguccccgcccaggagaagaacuucaccaccgcccccgcgaucugccacgacgggaaggcccacuucccccgcgagggcguguucguguccaacgggacccacugguucgucacgcagcggaacuucuacgagccgcagaucaucaccaccgacaacaccuucgugugcggcaacugcgacguggucaucggcaucgugaacaacacgguguacgacccccugcagcccgagcuggacuccuucaaggaggagcucgacaaguacuucaagaaccacaccagccccgacgucgaccugggggacaucuccggcaucaacgccagcguggugaacauccagaaggagaucgaccgccugaacgaggucgccaagaaccucaacgagucccugaucgaccugcaggagcucgggaaguacgagcaguacaucaagggcgggggcgggagcgacaucgaccccuacaaggaguucggcagcuccuaccagcugcucaacuuccugccccuggacuucuuccccgaccucaacgcccugguggacaccgccaccgcgcuguacgaggaggagcucacggggcgcgagcacugcagcccccaccacaccgccauccggcaggcccuggucugcugggacgagcugaccaagcucaucgccuggauguccagcaacaucaccuccgagcagguccgcacgaucaucgugaaccacgucaacgacaccuggggccugaaggugcggcagagccugugguuccaccucuccugccugaccuucgggcagcacaccgugcaggaguuccuggucagcuucggcguguggauccgcacgcccgccccguaccggccgcccaacgcgccgauccucuccacccugccggagcacaccgugaucugcugaggacuaguuauaagacugacuagcccgaugggccucccaacgggcccuccuccccuccuugcaccgagauuaauaaaaaaaaaaaaaaaaaaaaaaaaaaaaaaaaaaaaaaaaaaaaaaaaaaaaaaaaaaaaaaaaugcaucccccccccccccccccccccccccccccccaaaggcucuuuucagagccaccagaauu

SEQ ID NO: 14165 - RNA, 4141 nt, Artificial Sequence
  SARS-CoV-2/Wuhan/WIV05/2019__EPI_ISL_402128 spike protein mRNA gc (1-1147)(N914C_S1123C) LumSynth construct
aggagaaagcuuaccauguucguguuccugguccuccugccccuggugagcucccagugcgugaaccucaccacccgcacgcagcugccgcccgccuacaccaacagcuucacccggggcgucuacuaccccgacaagguguuccgcuccagcgugcugcacuccacccaggaccucuuccugcccuucuucagcaacgucacgugguuccacgccauccacguguccgggaccaacggcaccaagcgguucgacaacccggugcugcccuucaacgacggggucuacuucgcgagcaccgagaaguccaacaucauccgcggcuggaucuucgggacgacccucgacagcaagacccagucccugcugaucgugaacaacgccaccaacguggucaucaaggugugcgaguuccaguucugcaacgaccccuuccucggcguguacuaccacaagaacaacaagagcuggauggaguccgaguuccgggucuacagcuccgccaacaacugcacguucgaguacgugagccagcccuuccugauggaccuggagggcaagcaggggaacuucaagaaccuccgcgaguucguguucaagaacaucgacggcuacuucaagaucuacuccaagcacaccccgaucaaccugguccgggaccugccccagggguucagcgcccucgagccccugguggaccugcccaucggcaucaacaucacccgcuuccagacccuccuggcccugcaccgguccuaccucacgccgggggacagcagcuccggcuggaccgcgggcgccgccgccuacuacgugggguaccugcagccccgcaccuuccugcucaaguacaacgagaacggcaccaucacggacgcggucgacugcgcccuggacccccugagcgagaccaagugcacccucaaguccuucaccguggagaaggggaucuaccagacgagcaacuuccgggugcagcccaccgaguccaucguccgcuucccgaacaucaccaaccugugccccuucggcgagguguucaacgccacccgguucgccagcgucuacgccuggaaccgcaagcggaucuccaacugcguggcggacuacagcgugcuguacaacuccgccagcuucuccacguucaagugcuacggcgucagccccaccaagcucaacgaccugugcuucaccaacguguacgccgacuccuucgugauccgcggggacgagguccggcagaucgcccccggccagaccgggaagaucgccgacuacaacuacaagcugccggacgacuucacgggcugcgugaucgcguggaacagcaacaaccucgacuccaaggucgggggcaacuacaacuaccuguaccgccuguuccgcaagagcaaccucaagcccuucgagcgggacaucuccaccgagaucuaccaggccggcagcacccccugcaacgggguggagggcuucaacugcuacuucccccugcaguccuacggguuccagccgaccaacggcgugggguaccagcccuaccggguggucgugcugagcuucgagcuccugcacgcccccgccacggugugcggccccaagaaguccaccaaccuggucaagaacaagugcgugaacuucaacuucaacggccucaccgggaccggcgugcugaccgagagcaacaagaaguuccugccguuccagcaguucgggcgcgacaucgccgacacgaccgacgcgguccgcgacccccagacccuggagauccucgacaucacccccugcagcuucggcgggguguccgugaucacgccgggcaccaacaccagcaaccaggucgccgugcuguaccaggacgugaacugcaccgagguccccguggccauccacgccgaccagcugacgcccaccuggcggguguacuccaccggcagcaacgucuuccagacccgcgccgggugccucaucggcgcggagcacgugaacaacuccuacgagugcgacauccccaucggggccggcaucugcgccagcuaccagacgcagaccaacuccccgcggcgcgcccggagcguggcgucccagagcaucaucgccuacaccaugucccugggcgccgagaacagcgucgccuacuccaacaacagcaucgccauccccaccaacuucacgaucuccgugaccaccgagauccugcccgugagcaugaccaagacgagcgucgacugcaccauguacaucugcggggacuccaccgagugcagcaaccuccugcugcaguacggcuccuucugcacccagcucaaccgcgcgcugacggggaucgccguggagcaggacaagaacacccaggagguguucgcccaggucaagcagaucuacaagacgcccccgaucaaggacuucggcggguucaacuucagccagauccugcccgaccccuccaagcccagcaagcgguccuucaucgaggaccuccuguucaacaaggugacccuggccgacgccggcuucaucaagcaguacggcgacugccucggggacaucgcggcccgcgaccugaucugcgcccagaaguucaacggccugaccgugcucccgccccugcugaccgacgagaugaucgcccaguacaccagcgcccuccuggcggggaccaucacguccggcuggaccuucggggccggcgccgcccugcagauccccuucgcgaugcagauggccuaccgguucaacggcaucggggucacccagugcgugcucuacgagaaccagaagcugaucgccaaccaguucaacagcgccaucggcaagauccaggacucccugagcuccaccgccagcgcgcucgggaagcugcaggacguggucaaccagaacgcccaggcccugaacacgcucgugaagcagcuguccagcaacuucggcgccaucuccagcgugcugaacgacauccucucccgccuggacaaggucgaggccgaggugcagaucgaccggcugaucaccgggcgccuccagagccugcagaccuacgugacccagcagcugauccgggcggccgagauccgcgccagcgccaaccucgccgcgaccaagauguccgagugcguccugggccagagcaagcggguggacuucugcggcaagggguaccaccugauguccuucccccagagcgccccgcacggcguggucuuccuccacgugacguacguccccgcccaggagaagaacuucaccaccgcccccgcgaucugccacgacgggaaggcccacuucccccgcgagggcguguucguguccaacgggacccacugguucgucacgcagcggaacuucuacgagccgcagaucaucaccaccgacaacaccuucgugugcggcaacugcgacguggucaucggcaucgugaacaacacgguguacgacccccugcagcccgagcuggacuccggcggcgggagcgggggcgggcagaucuacgagggcaagcugaccgccgaggggcuccgcuucggcaucguggccagccgguucaaccacgcgcuggucgaccgccugguggagggggccaucgacgccaucgugcggcacggcgggcgcgaggaggacaucacccucguccgggugcccggcuccugggagaucccgguggccgccggcgagcuggcccgcaaggaggacaucgacgcggucaucgccaucggggugcugauccggggcgccacgccccacuucgacuacaucgccagcgagguguccaaggggcucgcggaccugagccuggagcuccgcaagcccaucaccuucggcgucaucaccgccgacacccuggagcaggccaucgagcgggccgggacgaagcacggcaacaagggcugggaggccgcgcuguccgccaucgagauggccaaccucuucaagagccugcgcugaggacuaguuauaagacugacuagcccgaugggccucccaacgggcccuccuccccuccuugcaccgagauuaauaaaaaaaaaaaaaaaaaaaaaaaaaaaaaaaaaaaaaaaaaaaaaaaaaaaaaaaaaaaaaaaaugcaucccccccccccccccccccccccccccccccaaaggcucuuuucagagccaccagaauu

SEQ ID NO: 14166 - RNA, 4165 nt, Artificial Sequence
  SARS-CoV-2/Wuhan/WIV05/2019__EPI_ISL_402128 spike protein mRNA gc (1-1147)(N914C_S1123C) Ferritin construct
aggagaaagcuuaccauguucguguuccugguccuccugccccuggugagcucccagugcgugaaccucaccacccgcacgcagcugccgcccgccuacaccaacagcuucacccggggcgucuacuaccccgacaagguguuccgcuccagcgugcugcacuccacccaggaccucuuccugcccuucuucagcaacgucacgugguuccacgccauccacguguccgggaccaacggcaccaagcgguucgacaacccggugcugcccuucaacgacggggucuacuucgcgagcaccgagaaguccaacaucauccgcggcuggaucuucgggacgacccucgacagcaagacccagucccugcugaucgugaacaacgccaccaacguggucaucaaggugugcgaguuccaguucugcaacgaccccuuccucggcguguacuaccacaagaacaacaagagcuggauggaguccgaguuccgggucuacagcuccgccaacaacugcacguucgaguacgugagccagcccuuccugauggaccuggagggcaagcaggggaacuucaagaaccuccgcgaguucguguucaagaacaucgacggcuacuucaagaucuacuccaagcacaccccgaucaaccugguccgggaccugccccagggguucagcgcccucgagccccugguggaccugcccaucggcaucaacaucacccgcuuccagacccuccuggcccugcaccgguccuaccucacgccgggggacagcagcuccggcuggaccgcgggcgccgccgccuacuacgugggguaccugcagccccgcaccuuccugcucaaguacaacgagaacggcaccaucacggacgcggucgacugcgcccuggacccccugagcgagaccaagugcacccucaaguccuucaccguggagaaggggaucuaccagacgagcaacuuccgggugcagcccaccgaguccaucguccgcuucccgaacaucaccaaccugugccccuucggcgagguguucaacgccacccgguucgccagcgucuacgccuggaaccgcaagcggaucuccaacugcguggcggacuacagcgugcuguacaacuccgccagcuucuccacguucaagugcuacggcgucagccccaccaagcucaacgaccugugcuucaccaacguguacgccgacuccuucgugauccgcggggacgagguccggcagaucgcccccggccagaccgggaagaucgccgacuacaacuacaagcugccggacgacuucacgggcugcgugaucgcguggaacagcaacaaccucgacuccaaggucgggggcaacuacaacuaccuguaccgccuguuccgcaagagcaaccucaagcccuucgagcgggacaucuccaccgagaucuaccaggccggcagcacccccugcaacgggguggagggcuucaacugcuacuucccccugcaguccuacggguuccagccgaccaacggcgugggguaccagcccuaccggguggucgugcugagcuucgagcuccugcacgcccccgccacggugugcggccccaagaaguccaccaaccuggucaagaacaagugcgugaacuucaacuucaacggccucaccgggaccggcgugcugaccgagagcaacaagaaguuccugccguuccagcaguucgggcgcgacaucgccgacacgaccgacgcgguccgcgacccccagacccuggagauccucgacaucacccccugcagcuucggcgggguguccgugaucacgccgggcaccaacaccagcaaccaggucgccgugcuguaccaggacgugaacugcaccgagguccccguggccauccacgccgaccagcugacgcccaccuggcggguguacuccaccggcagcaacgucuuccagacccgcgccgggugccucaucggcgcggagcacgugaacaacuccuacgagugcgacauccccaucggggccggcaucugcgccagcuaccagacgcagaccaacuccccgcggcgcgcccggagcguggcgucccagagcaucaucgccuacaccaugucccugggcgccgagaacagcgucgccuacuccaacaacagcaucgccauccccaccaacuucacgaucuccgugaccaccgagauccugcccgugagcaugaccaagacgagcgucgacugcaccauguacaucugcggggacuccaccgagugcagcaaccuccugcugcaguacggcuccuucugcacccagcucaaccgcgcgcugacggggaucgccguggagcaggacaagaacacccaggagguguucgcccaggucaagcagaucuacaagacgcccccgaucaaggacuucggcggguucaacuucagccagauccugcccgaccccuccaagcccagcaagcgguccuucaucgaggaccuccuguucaacaaggugacccuggccgacgccggcuucaucaagcaguacggcgacugccucggggacaucgcggcccgcgaccugaucugcgcccagaaguucaacggccugaccgugcucccgccccugcugaccgacgagaugaucgcccaguacaccagcgcccuccuggcggggaccaucacguccggcuggaccuucggggccggcgccgcccugcagauccccuucgcgaugcagauggccuaccgguucaacggcaucggggucacccagugcgugcucuacgagaaccagaagcugaucgccaaccaguucaacagcgccaucggcaagauccaggacucccugagcuccaccgccagcgcgcucgggaagcugcaggacguggucaaccagaacgcccaggcccugaacacgcucgugaagcagcuguccagcaacuucggcgccaucuccagcgugcugaacgacauccucucccgccuggacaaggucgaggccgaggugcagaucgaccggcugaucaccgggcgccuccagagccugcagaccuacgugacccagcagcugauccgggcggccgagauccgcgccagcgccaaccucgccgcgaccaagauguccgagugcguccugggccagagcaagcggguggacuucugcggcaagggguaccaccugauguccuucccccagagcgccccgcacggcguggucuuccuccacgugacguacguccccgcccaggagaagaacuucaccaccgcccccgcgaucugccacgacgggaaggcccacuucccccgcgagggcguguucguguccaacgggacccacugguucgucacgcagcggaacuucuacgagccgcagaucaucaccaccgacaacaccuucgugugcggcaacugcgacguggucaucggcaucgugaacaacacgguguacgacccccugcagcccgagcuggacuccggcgggggcgggagcgacaucaucaagcuccugaacgagcaggucaacaaggagaugcaguccagcaaccuguacauguccaugagcuccuggugcuacacccacagccucgacggcgccgggcuguuccuguucgaccacgccgcggaggaguacgagcacgccaagaagcucaucaucuuccugaacgagaacaacgugcccgugcagcugaccuccaucagcgccccggagcacaaguucgagggccucacgcagaucuuccagaaggccuacgagcacgagcagcacaucuccgagagcaucaacaacaucguggaccacgccaucaaguccaaggaccacgcgaccuucaacuuccugcagugguacgucgccgagcagcacgaggaggaggugcuguucaaggacauccucgacaagaucgagcugaucgggaacgagaaccacggccuguaccucgccgaccaguacgugaaggggaucgccaagagccgcaaguccugaggacuaguuauaagacugacuagcccgaugggccucccaacgggcccuccuccccuccuugcaccgagauuaauaaaaaaaaaaaaaaaaaaaaaaaaaaaaaaaaaaaaaaaaaaaaaaaaaaaaaaaaaaaaaaaaugcaucccccccccccccccccccccccccccccccaaaggcucuuuucagagccaccagaauu

SEQ ID NO: 14167 - RNA, 3751 nt, Artificial Sequence
  SARS-CoV-2/Wuhan/WIV05/2019__EPI_ISL_402128 spike protein mRNA gc (1-1147)(N914C_S1123C) Foldon construct
aggagaaagcuuaccauguucguguuccugguccuccugccccuggugagcucccagugcgugaaccucaccacccgcacgcagcugccgcccgccuacaccaacagcuucacccggggcgucuacuaccccgacaagguguuccgcuccagcgugcugcacuccacccaggaccucuuccugcccuucuucagcaacgucacgugguuccacgccauccacguguccgggaccaacggcaccaagcgguucgacaacccggugcugcccuucaacgacggggucuacuucgcgagcaccgagaaguccaacaucauccgcggcuggaucuucgggacgacccucgacagcaagacccagucccugcugaucgugaacaacgccaccaacguggucaucaaggugugcgaguuccaguucugcaacgaccccuuccucggcguguacuaccacaagaacaacaagagcuggauggaguccgaguuccgggucuacagcuccgccaacaacugcacguucgaguacgugagccagcccuuccugauggaccuggagggcaagcaggggaacuucaagaaccuccgcgaguucguguucaagaacaucgacggcuacuucaagaucuacuccaagcacaccccgaucaaccugguccgggaccugccccagggguucagcgcccucgagccccugguggaccugcccaucggcaucaacaucacccgcuuccagacccuccuggcccugcaccgguccuaccucacgccgggggacagcagcuccggcuggaccgcgggcgccgccgccuacuacgugggguaccugcagccccgcaccuuccugcucaaguacaacgagaacggcaccaucacggacgcggucgacugcgcccuggacccccugagcgagaccaagugcacccucaaguccuucaccguggagaaggggaucuaccagacgagcaacuuccgggugcagcccaccgaguccaucguccgcuucccgaacaucaccaaccugugccccuucggcgagguguucaacgccacccgguucgccagcgucuacgccuggaaccgcaagcggaucuccaacugcguggcggacuacagcgugcuguacaacuccgccagcuucuccacguucaagugcuacggcgucagccccaccaagcucaacgaccugugcuucaccaacguguacgccgacuccuucgugauccgcggggacgagguccggcagaucgcccccggccagaccgggaagaucgccgacuacaacuacaagcugccggacgacuucacgggcugcgugaucgcguggaacagcaacaaccucgacuccaaggucgggggcaacuacaacuaccuguaccgccuguuccgcaagagcaaccucaagcccuucgagcgggacaucuccaccgagaucuaccaggccggcagcacccccugcaacgggguggagggcuucaacugcuacuucccccugcaguccuacggguuccagccgaccaacggcgugggguaccagcccuaccggguggucgugcugagcuucgagcuccugcacgcccccgccacggugugcggccccaagaaguccaccaaccuggucaagaacaagugcgugaacuucaacuucaacggccucaccgggaccggcgugcugaccgagagcaacaagaaguuccugccguuccagcaguucgggcgcgacaucgccgacacgaccgacgcgguccgcgacccccagacccuggagauccucgacaucacccccugcagcuucggcgggguguccgugaucacgccgggcaccaacaccagcaaccaggucgccgugcuguaccaggacgugaacugcaccgagguccccguggccauccacgccgaccagcugacgcccaccuggcggguguacuccaccggcagcaacgucuuccagacccgcgccgggugccucaucggcgcggagcacgugaacaacuccuacgagugcgacauccccaucggggccggcaucugcgccagcuaccagacgcagaccaacuccccgcggcgcgcccggagcguggcgucccagagcaucaucgccuacaccaugucccugggcgccgagaacagcgucgccuacuccaacaacagcaucgccauccccaccaacuucacgaucuccgugaccaccgagauccugcccgugagcaugaccaagacgagcgucgacugcaccauguacaucugcggggacuccaccgagugcagcaaccuccugcugcaguacggcuccuucugcacccagcucaaccgcgcgcugacggggaucgccguggagcaggacaagaacacccaggagguguucgcccaggucaagcagaucuacaagacgcccccgaucaaggacuucggcggguucaacuucagccagauccugcccgaccccuccaagcccagcaagcgguccuucaucgaggaccuccuguucaacaaggugacccuggccgacgccggcuucaucaagcaguacggcgacugccucggggacaucgcggcccgcgaccugaucugcgcccagaaguucaacggccugaccgugcucccgccccugcugaccgacgagaugaucgcccaguacaccagcgcccuccuggcggggaccaucacguccggcuggaccuucggggccggcgccgcccugcagauccccuucgcgaugcagauggccuaccgguucaacggcaucggggucacccagugcgugcucuacgagaaccagaagcugaucgccaaccaguucaacagcgccaucggcaagauccaggacucccugagcuccaccgccagcgcgcucgggaagcugcaggacguggucaaccagaacgcccaggcccugaacacgcucgugaagcagcuguccagcaacuucggcgccaucuccagcgugcugaacgacauccucucccgccuggacaaggucgaggccgaggugcagaucgaccggcugaucaccgggcgccuccagagccugcagaccuacgugacccagcagcugauccgggcggccgagauccgcgccagcgccaaccucgccgcgaccaagauguccgagugcguccugggccagagcaagcggguggacuucugcggcaagggguaccaccugauguccuucccccagagcgccccgcacggcguggucuuccuccacgugacguacguccccgcccaggagaagaacuucaccaccgcccccgcgaucugccacgacgggaaggcccacuucccccgcgagggcguguucguguccaacgggacccacugguucgucacgcagcggaacuucuacgagccgcagaucaucaccaccgacaacaccuucgugugcggcaacugcgacguggucaucggcaucgugaacaacacgguguacgacccccugcagcccgagcuggacuccggcgggagcggcuacauccccgaggccccgcgcgacgggcaggccuacgugcggaaggacggcgaguggguccugcucagcaccuuccugugaggacuaguuauaagacugacuagcccgaugggccucccaacgggcccuccuccccuccuugcaccgagauuaauaaaaaaaaaaaaaaaaaaaaaaaaaaaaaaaaaaaaaaaaaaaaaaaaaaaaaaaaaaaaaaaaugcaucccccccccccccccccccccccccccccccaaaggcucuuuucagagccaccagaauu

SEQ ID NO: 14168 - RNA, 4123 nt, Artificial Sequence
  SARS-CoV-2/Wuhan/WIV05/2019__EPI_ISL_402128 spike protein mRNA gc (1-1147)(N914C_S1123C) WhcAg construct
aggagaaagcuuaccauguucguguuccugguccuccugccccuggugagcucccagugcgugaaccucaccacccgcacgcagcugccgcccgccuacaccaacagcuucacccggggcgucuacuaccccgacaagguguuccgcuccagcgugcugcacuccacccaggaccucuuccugcccuucuucagcaacgucacgugguuccacgccauccacguguccgggaccaacggcaccaagcgguucgacaacccggugcugcccuucaacgacggggucuacuucgcgagcaccgagaaguccaacaucauccgcggcuggaucuucgggacgacccucgacagcaagacccagucccugcugaucgugaacaacgccaccaacguggucaucaaggugugcgaguuccaguucugcaacgaccccuuccucggcguguacuaccacaagaacaacaagagcuggauggaguccgaguuccgggucuacagcuccgccaacaacugcacguucgaguacgugagccagcccuuccugauggaccuggagggcaagcaggggaacuucaagaaccuccgcgaguucguguucaagaacaucgacggcuacuucaagaucuacuccaagcacaccccgaucaaccugguccgggaccugccccagggguucagcgcccucgagccccugguggaccugcccaucggcaucaacaucacccgcuuccagacccuccuggcccugcaccgguccuaccucacgccgggggacagcagcuccggcuggaccgcgggcgccgccgccuacuacgugggguaccugcagccccgcaccuuccugcucaaguacaacgagaacggcaccaucacggacgcggucgacugcgcccuggacccccugagcgagaccaagugcacccucaaguccuucaccguggagaaggggaucuaccagacgagcaacuuccgggugcagcccaccgaguccaucguccgcuucccgaacaucaccaaccugugccccuucggcgagguguucaacgccacccgguucgccagcgucuacgccuggaaccgcaagcggaucuccaacugcguggcggacuacagcgugcuguacaacuccgccagcuucuccacguucaagugcuacggcgucagccccaccaagcucaacgaccugugcuucaccaacguguacgccgacuccuucgugauccgcggggacgagguccggcagaucgcccccggccagaccgggaagaucgccgacuacaacuacaagcugccggacgacuucacgggcugcgugaucgcguggaacagcaacaaccucgacuccaaggucgggggcaacuacaacuaccuguaccgccuguuccgcaagagcaaccucaagcccuucgagcgggacaucuccaccgagaucuaccaggccggcagcacccccugcaacgggguggagggcuucaacugcuacuucccccugcaguccuacggguuccagccgaccaacggcgugggguaccagcccuaccggguggucgugcugagcuucgagcuccugcacgcccccgccacggugugcggccccaagaaguccaccaaccuggucaagaacaagugcgugaacuucaacuucaacggccucaccgggaccggcgugcugaccgagagcaacaagaaguuccugccguuccagcaguucgggcgcgacaucgccgacacgaccgacgcgguccgcgacccccagacccuggagauccucgacaucacccccugcagcuucggcgggguguccgugaucacgccgggcaccaacaccagcaaccaggucgccgugcuguaccaggacgugaacugcaccgagguccccguggccauccacgccgaccagcugacgcccaccuggcggguguacuccaccggcagcaacgucuuccagacccgcgccgggugccucaucggcgcggagcacgugaacaacuccuacgagugcgacauccccaucggggccggcaucugcgccagcuaccagacgcagaccaacuccccgcggcgcgcccggagcguggcgucccagagcaucaucgccuacaccaugucccugggcgccgagaacagcgucgccuacuccaacaacagcaucgccauccccaccaacuucacgaucuccgugaccaccgagauccugcccgugagcaugaccaagacgagcgucgacugcaccauguacaucugcggggacuccaccgagugcagcaaccuccugcugcaguacggcuccuucugcacccagcucaaccgcgcgcugacggggaucgccguggagcaggacaagaacacccaggagguguucgcccaggucaagcagaucuacaagacgcccccgaucaaggacuucggcggguucaacuucagccagauccugcccgaccccuccaagcccagcaagcgguccuucaucgaggaccuccuguucaacaaggugacccuggccgacgccggcuucaucaagcaguacggcgacugccucggggacaucgcggcccgcgaccugaucugcgcccagaaguucaacggccugaccgugcucccgccccugcugaccgacgagaugaucgcccaguacaccagcgcccuccuggcggggaccaucacguccggcuggaccuucggggccggcgccgcccugcagauccccuucgcgaugcagauggccuaccgguucaacggcaucggggucacccagugcgugcucuacgagaaccagaagcugaucgccaaccaguucaacagcgccaucggcaagauccaggacucccugagcuccaccgccagcgcgcucgggaagcugcaggacguggucaaccagaacgcccaggcccugaacacgcucgugaagcagcuguccagcaacuucggcgccaucuccagcgugcugaacgacauccucucccgccuggacaaggucgaggccgaggugcagaucgaccggcugaucaccgggcgccuccagagccugcagaccuacgugacccagcagcugauccgggcggccgagauccgcgccagcgccaaccucgccgcgaccaagauguccgagugcguccugggccagagcaagcggguggacuucugcggcaagggguaccaccugauguccuucccccagagcgccccgcacggcguggucuuccuccacgugacguacguccccgcccaggagaagaacuucaccaccgcccccgcgaucugccacgacgggaaggcccacuucccccgcgagggcguguucguguccaacgggacccacugguucgucacgcagcggaacuucuacgagccgcagaucaucaccaccgacaacaccuucgugugcggcaacugcgacguggucaucggcaucgugaacaacacgguguacgacccccugcagcccgagcuggacuccggcgggggcgggagcgacaucgaccccuacaaggaguucggcagcuccuaccagcugcucaacuuccugccccuggacuucuuccccgaccucaacgcccugguggacaccgccaccgcgcuguacgaggaggagcucacggggcgcgagcacugcagcccccaccacaccgccauccggcaggcccuggucugcugggacgagcugaccaagcucaucgccuggauguccagcaacaucaccuccgagcagguccgcacgaucaucgugaaccacgucaacgacaccuggggccugaaggugcggcagagccugugguuccaccucuccugccugaccuucgggcagcacaccgugcaggaguuccuggucagcuucggcguguggauccgcacgcccgccccguaccggccgcccaacgcgccgauccucuccacccugccggagcacaccgugaucugcugaggacuaguuauaagacugacuagcccgaugggccucccaacgggcccuccuccccuccuugcaccgagauuaauaaaaaaaaaaaaaaaaaaaaaaaaaaaaaaaaaaaaaaaaaaaaaaaaaaaaaaaaaaaaaaaaugcaucccccccccccccccccccccccccccccccaaaggcucuuuucagagccaccagaauu

SEQ ID NO: 14169 - RNA, 4039 nt, Artificial Sequence
  SARS-CoV-2/Wuhan/WIV05/2019__EPI_ISL_402128 spike protein mRNA gc mod (1-1273)(N914C_S1123C)
aggagaaagcuuaccauguucguguuucuggugcugcugccccugguguccagccagugugugaaccugaccaccagaacacagcugccuccagccuacaccaacagcuucaccagaggcguguacuaccccgacaagguguucagauccagcgugcugcacucuacccaggaccuguuccugccuuucuucagcaacgugaccugguuccacgccauccacguguccggcaccaauggcaccaagagauucgacaaccccgugcugcccuucaacgacgggguguacuuugccagcaccgagaaguccaacaucaucagaggcuggaucuucggcaccacacuggacagcaagacccagagccugcugaucgugaacaacgccaccaacguggucaucaaagugugcgaguuccaguucugcaacgaccccuuccugggcgucuacuaccacaagaacaacaagagcuggauggaaagcgaguuccggguguacagcagcgccaacaacugcaccuucgaguacgugucccagccuuuccugauggaccuggaaggcaagcagggcaacuucaagaaccugcgcgaguucguguucaagaacaucgacggcuacuucaaaaucuacagcaagcacaccccuaucaaccucgugcgggaucugccucagggcuucucugcucuggaaccccugguggaucugcccaucggcaucaacaucacccgguuucagacacugcuggcccugcacagaagcuaccugacaccuggcgauagcagcagcggauggacagcuggugccgccgcuuacuaugugggcuaccugcagccuagaaccuuccugcugaaguacaacgagaacggcaccaucaccgacgccguggauugugcucuggauccucugagcgagacaaagugcacccugaaguccuucaccguggaaaagggcaucuaccagaccagcaacuuccgggugcagcccaccgaauccaucgugcgguuccccaauaucaccaaucugugccccuucggcgagguguucaaugccaccagauucgccucuguguacgccuggaaccggaagcggaucagcaauugcguggccgacuacuccgugcuguacaacuccgccagcuucagcaccuucaagugcuacggcguguccccuaccaagcugaacgaccugugcuucacaaacguguacgccgacagcuucgugauccggggagaugaagugcggcagauugccccuggacagacaggcaagaucgccgacuacaacuacaagcugcccgacgacuucaccggcugugugauugccuggaacagcaacaaccuggacuccaaagucggcggcaacuacaauuaccuguaccggcuguuccggaaguccaaucugaagcccuucgagcgggacaucagcaccgaaaucuaucaggccggcagcaccccuugcaacggcguggaaggcuucaacugcuacuucccacugcaguccuacggcuuucagcccacaaauggcgugggcuaucagcccuacagagugguggugcugagcuucgaacugcugcaugcuccugccacagugugcggcccuaagaaaagcaccaaucucgugaagaacaaaugcgugaacuucaacuucaacggccugaccggcaccggcgugcugacagagagcaacaagaaguuccugccauuccagcaguuuggccgggauaucgccgauaccacagacgccguuagagauccccagacacuggaaauccuggacaucaccccaugcagcuucggcggagugucugugaucaccccuggcaccaacaccagcaaucagguggcagugcuguaccaggacgugaacuguaccgaagugcccguggccauucacgccgaucagcugacaccuacauggcggguguacuccaccggcagcaauguguuucagaccagagccggcugucugaucggagccgagcacgugaacaauagcuacgagugcgacauccccaucggcgcuggcaucugugccagcuaccagacacagacaaacagccccagacgggcuagaagcguggccagccagagcaucauugccuacacaaugucucugggcgccgagaacagcguggccuacuccaacaacucuaucgcuauccccaccaacuucaccaucagcgugaccaccgagauccugccuguguccaugaccaagaccagcguggacugcaccauguacaucugcggcgauuccaccgagugcuccaaccugcugcugcaguacggcagcuucugcacccagcugaauagagcccugacagggaucgccguggaacaggacaagaacacccaagagguguucgcccaagugaagcaaaucuacaagaccccuccuaucaaggacuucggcggcuucaauuucagccagauucugcccgauccuagcaagcccagcaagcggagcuucaucgaggaccugcuguucaacaaagugacacuggccgacgccggcuucaucaagcaguauggcgauugucugggcgacauugccgccagggaucugauuugcgcccagaaguuuaacggacugacagugcugccuccucugcugaccgaugagaugaucgcccaguacacaucugcccugcuggccggcacaaucacaagcggcuggacauuuggagcuggcgccgcucugcagauccccuuugcuaugcagauggccuaccgguucaacggcaucggagugacccagugcgugcuguacgagaaccagaagcugaucgccaaccaguucaacagcgccaucggcaagauccaggacagccugagcagcacagcaagcgcccugggaaagcugcaggacguggucaaccagaaugcccaggcacugaacacccuggucaagcagcuguccuccaacuucggcgccaucagcucugugcugaacgauauccugagcagacuggacaaggucgaggccgaggugcagaucgacagacugaucacaggcagacugcagagccuccagacauacgugacccagcagcugaucagagccgccgagauuagagccucugccaaucuggccgccaccaagaugucugagugugugcugggccagagcaagagaguggacuuuugcggcaagggcuaccaccugaugagcuucccucagucugccccucacggcgugguguuucugcacgugacauaugugcccgcucaagagaagaauuucaccaccgcuccagccaucugccacgacggcaaagcccacuuuccuagagaaggcguguucguguccaacggcacccauugguucgugacacagcggaacuucuacgagccccagaucaucaccaccgacaacaccuucguguguggcaacugcgacguugugaucggcauugugaacaauaccguguacgacccucugcagcccgagcuggacagcuucaaagaggaacuggacaaguacuuuaagaaccacacaagccccgacguggaccugggcgauaucagcggaaucaaugccagcgucgugaacauccagaaagagaucgaccggcugaacgagguggccaagaaucugaacgagagccugaucgaccugcaagaacuggggaaguacgagcaguacaucaaguggcccugguacaucuggcugggcuuuaucgccggacugauugccaucgugauggucacaaucaugcuguguugcaugaccagcugcuguagcugccugaagggcuguuguagcuguggcagcugcugcaaguucgacgaggacgauucugagcccgugcugaagggcgugaaacugcacuacaccugaggacuaguuauaagacugacuagcccgaugggccucccaacgggcccuccuccccuccuugcaccgagauuaauaaaaaaaaaaaaaaaaaaaaaaaaaaaaaaaaaaaaaaaaaaaaaaaaaaaaaaaaaaaaaaaaugcaucccccccccccccccccccccccccccccccaaaggcucuuuucagagccaccagaauu

SEQ ID NO: 14170 - RNA, 4333 nt, Artificial Sequence
  SARS-CoV-2/Wuhan/WIV05/2019__EPI_ISL_402128 spike protein mRNA gc mod (1-1211)(N914C_S1123C) LumSynth construct
aggagaaagcuuaccauguucguguuucuggugcugcugccccugguguccagccagugugugaaccugaccaccagaacacagcugccuccagccuacaccaacagcuucaccagaggcguguacuaccccgacaagguguucagauccagcgugcugcacucuacccaggaccuguuccugccuuucuucagcaacgugaccugguuccacgccauccacguguccggcaccaauggcaccaagagauucgacaaccccgugcugcccuucaacgacgggguguacuuugccagcaccgagaaguccaacaucaucagaggcuggaucuucggcaccacacuggacagcaagacccagagccugcugaucgugaacaacgccaccaacguggucaucaaagugugcgaguuccaguucugcaacgaccccuuccugggcgucuacuaccacaagaacaacaagagcuggauggaaagcgaguuccggguguacagcagcgccaacaacugcaccuucgaguacgugucccagccuuuccugauggaccuggaaggcaagcagggcaacuucaagaaccugcgcgaguucguguucaagaacaucgacggcuacuucaaaaucuacagcaagcacaccccuaucaaccucgugcgggaucugccucagggcuucucugcucuggaaccccugguggaucugcccaucggcaucaacaucacccgguuucagacacugcuggcccugcacagaagcuaccugacaccuggcgauagcagcagcggauggacagcuggugccgccgcuuacuaugugggcuaccugcagccuagaaccuuccugcugaaguacaacgagaacggcaccaucaccgacgccguggauugugcucuggauccucugagcgagacaaagugcacccugaaguccuucaccguggaaaagggcaucuaccagaccagcaacuuccgggugcagcccaccgaauccaucgugcgguuccccaauaucaccaaucugugccccuucggcgagguguucaaugccaccagauucgccucuguguacgccuggaaccggaagcggaucagcaauugcguggccgacuacuccgugcuguacaacuccgccagcuucagcaccuucaagugcuacggcguguccccuaccaagcugaacgaccugugcuucacaaacguguacgccgacagcuucgugauccggggagaugaagugcggcagauugccccuggacagacaggcaagaucgccgacuacaacuacaagcugcccgacgacuucaccggcugugugauugccuggaacagcaacaaccuggacuccaaagucggcggcaacuacaauuaccuguaccggcuguuccggaaguccaaucugaagcccuucgagcgggacaucagcaccgaaaucuaucaggccggcagcaccccuugcaacggcguggaaggcuucaacugcuacuucccacugcaguccuacggcuuucagcccacaaauggcgugggcuaucagcccuacagagugguggugcugagcuucgaacugcugcaugcuccugccacagugugcggcccuaagaaaagcaccaaucucgugaagaacaaaugcgugaacuucaacuucaacggccugaccggcaccggcgugcugacagagagcaacaagaaguuccugccauuccagcaguuuggccgggauaucgccgauaccacagacgccguuagagauccccagacacuggaaauccuggacaucaccccaugcagcuucggcggagugucugugaucaccccuggcaccaacaccagcaaucagguggcagugcuguaccaggacgugaacuguaccgaagugcccguggccauucacgccgaucagcugacaccuacauggcggguguacuccaccggcagcaauguguuucagaccagagccggcugucugaucggagccgagcacgugaacaauagcuacgagugcgacauccccaucggcgcuggcaucugugccagcuaccagacacagacaaacagccccagacgggcuagaagcguggccagccagagcaucauugccuacacaaugucucugggcgccgagaacagcguggccuacuccaacaacucuaucgcuauccccaccaacuucaccaucagcgugaccaccgagauccugccuguguccaugaccaagaccagcguggacugcaccauguacaucugcggcgauuccaccgagugcuccaaccugcugcugcaguacggcagcuucugcacccagcugaauagagcccugacagggaucgccguggaacaggacaagaacacccaagagguguucgcccaagugaagcaaaucuacaagaccccuccuaucaaggacuucggcggcuucaauuucagccagauucugcccgauccuagcaagcccagcaagcggagcuucaucgaggaccugcuguucaacaaagugacacuggccgacgccggcuucaucaagcaguauggcgauugucugggcgacauugccgccagggaucugauuugcgcccagaaguuuaacggacugacagugcugccuccucugcugaccgaugagaugaucgcccaguacacaucugcccugcuggccggcacaaucacaagcggcuggacauuuggagcuggcgccgcucugcagauccccuuugcuaugcagauggccuaccgguucaacggcaucggagugacccagugcgugcuguacgagaaccagaagcugaucgccaaccaguucaacagcgccaucggcaagauccaggacagccugagcagcacagcaagcgcccugggaaagcugcaggacguggucaaccagaaugcccaggcacugaacacccuggucaagcagcuguccuccaacuucggcgccaucagcucugugcugaacgauauccugagcagacuggacaaggucgaggccgaggugcagaucgacagacugaucacaggcagacugcagagccuccagacauacgugacccagcagcugaucagagccgccgagauuagagccucugccaaucuggccgccaccaagaugucugagugugugcugggccagagcaagagaguggacuuuugcggcaagggcuaccaccugaugagcuucccucagucugccccucacggcgugguguuucugcacgugacauaugugcccgcucaagagaagaauuucaccaccgcuccagccaucugccacgacggcaaagcccacuuuccuagagaaggcguguucguguccaacggcacccauugguucgugacacagcggaacuucuacgagccccagaucaucaccaccgacaacaccuucguguguggcaacugcgacguugugaucggcauugugaacaauaccguguacgacccucugcagcccgagcuggacagcuucaaagaggaacuggacaaguacuuuaagaaccacacaagccccgacguggaccugggcgauaucagcggaaucaaugccagcgucgugaacauccagaaagagaucgaccggcugaacgagguggccaagaaucugaacgagagccugaucgaccugcaagaacuggggaaguacgagcaguacaucaagggcggaggaucuggcggaggacagaucuacgagggcaagcugacagccgagggccugagauuuggaaucguggccagccgguucaaucacgcccugguggauagacugguggaaggcgccaucgaugccauugucagacacggcggcagagaagaggacaucacccucguuagagugcccggcucuugggagauuccuguggcugcuggcgagcuggcccggaaagaagauaucgacgccguuaucgccaucggcgugcugaucagaggcgccacaccucacuucgacuauaucgccagcgagguguccaaaggccuggccgaucugagccuggaacugagaaagcccaucaccuucggcgugaucaccgcugacacacuggaacaggccauugagagagccggcaccaagcacggcaacaaaggaugggaagccgcucuguccgccaucgagauggccaaccuguucaagagccugcggugaggacuaguuauaagacugacuagcccgaugggccucccaacgggcccuccuccccuccuugcaccgagauuaauaaaaaaaaaaaaaaaaaaaaaaaaaaaaaaaaaaaaaaaaaaaaaaaaaaaaaaaaaaaaaaaaugcaucccccccccccccccccccccccccccccccaaaggcucuuuucagagccaccagaauu

SEQ ID NO: 14171 - RNA, 4357 nt, Artificial Sequence
  SARS-CoV-2/Wuhan/WIV05/2019__EPI_ISL_402128 spike protein mRNA gc mod (1-1211)(N914C_S1123C) Ferritin construct
aggagaaagcuuaccauguucguguuucuggugcugcugccccugguguccagccagugugugaaccugaccaccagaacacagcugccuccagccuacaccaacagcuucaccagaggcguguacuaccccgacaagguguucagauccagcgugcugcacucuacccaggaccuguuccugccuuucuucagcaacgugaccugguuccacgccauccacguguccggcaccaauggcaccaagagauucgacaaccccgugcugcccuucaacgacgggguguacuuugccagcaccgagaaguccaacaucaucagaggcuggaucuucggcaccacacuggacagcaagacccagagccugcugaucgugaacaacgccaccaacguggucaucaaagugugcgaguuccaguucugcaacgaccccuuccugggcgucuacuaccacaagaacaacaagagcuggauggaaagcgaguuccggguguacagcagcgccaacaacugcaccuucgaguacgugucccagccuuuccugauggaccuggaaggcaagcagggcaacuucaagaaccugcgcgaguucguguucaagaacaucgacggcuacuucaaaaucuacagcaagcacaccccuaucaaccucgugcgggaucugccucagggcuucucugcucuggaaccccugguggaucugcccaucggcaucaacaucacccgguuucagacacugcuggcccugcacagaagcuaccugacaccuggcgauagcagcagcggauggacagcuggugccgccgcuuacuaugugggcuaccugcagccuagaaccuuccugcugaaguacaacgagaacggcaccaucaccgacgccguggauugugcucuggauccucugagcgagacaaagugcacccugaaguccuucaccguggaaaagggcaucuaccagaccagcaacuuccgggugcagcccaccgaauccaucgugcgguuccccaauaucaccaaucugugccccuucggcgagguguucaaugccaccagauucgccucuguguacgccuggaaccggaagcggaucagcaauugcguggccgacuacuccgugcuguacaacuccgccagcuucagcaccuucaagugcuacggcguguccccuaccaagcugaacgaccugugcuucacaaacguguacgccgacagcuucgugauccggggagaugaagugcggcagauugccccuggacagacaggcaagaucgccgacuacaacuacaagcugcccgacgacuucaccggcugugugauugccuggaacagcaacaaccuggacuccaaagucggcggcaacuacaauuaccuguaccggcuguuccggaaguccaaucugaagcccuucgagcgggacaucagcaccgaaaucuaucaggccggcagcaccccuugcaacggcguggaaggcuucaacugcuacuucccacugcaguccuacggcuuucagcccacaaauggcgugggcuaucagcccuacagagugguggugcugagcuucgaacugcugcaugcuccugccacagugugcggcccuaagaaaagcaccaaucucgugaagaacaaaugcgugaacuucaacuucaacggccugaccggcaccggcgugcugacagagagcaacaagaaguuccugccauuccagcaguuuggccgggauaucgccgauaccacagacgccguuagagauccccagacacuggaaauccuggacaucaccccaugcagcuucggcggagugucugugaucaccccuggcaccaacaccagcaaucagguggcagugcuguaccaggacgugaacuguaccgaagugcccguggccauucacgccgaucagcugacaccuacauggcggguguacuccaccggcagcaauguguuucagaccagagccggcugucugaucggagccgagcacgugaacaauagcuacgagugcgacauccccaucggcgcuggcaucugugccagcuaccagacacagacaaacagccccagacgggcuagaagcguggccagccagagcaucauugccuacacaaugucucugggcgccgagaacagcguggccuacuccaacaacucuaucgcuauccccaccaacuucaccaucagcgugaccaccgagauccugccuguguccaugaccaagaccagcguggacugcaccauguacaucugcggcgauuccaccgagugcuccaaccugcugcugcaguacggcagcuucugcacccagcugaauagagcccugacagggaucgccguggaacaggacaagaacacccaagagguguucgcccaagugaagcaaaucuacaagaccccuccuaucaaggacuucggcggcuucaauuucagccagauucugcccgauccuagcaagcccagcaagcggagcuucaucgaggaccugcuguucaacaaagugacacuggccgacgccggcuucaucaagcaguauggcgauugucugggcgacauugccgccagggaucugauuugcgcccagaaguuuaacggacugacagugcugccuccucugcugaccgaugagaugaucgcccaguacacaucugcccugcuggccggcacaaucacaagcggcuggacauuuggagcuggcgccgcucugcagauccccuuugcuaugcagauggccuaccgguucaacggcaucggagugacccagugcgugcuguacgagaaccagaagcugaucgccaaccaguucaacagcgccaucggcaagauccaggacagccugagcagcacagcaagcgcccugggaaagcugcaggacguggucaaccagaaugcccaggcacugaacacccuggucaagcagcuguccuccaacuucggcgccaucagcucugugcugaacgauauccugagcagacuggacaaggucgaggccgaggugcagaucgacagacugaucacaggcagacugcagagccuccagacauacgugacccagcagcugaucagagccgccgagauuagagccucugccaaucuggccgccaccaagaugucugagugugugcugggccagagcaagagaguggacuuuugcggcaagggcuaccaccugaugagcuucccucagucugccccucacggcgugguguuucugcacgugacauaugugcccgcucaagagaagaauuucaccaccgcuccagccaucugccacgacggcaaagcccacuuuccuagagaaggcguguucguguccaacggcacccauugguucgugacacagcggaacuucuacgagccccagaucaucaccaccgacaacaccuucguguguggcaacugcgacguugugaucggcauugugaacaauaccguguacgacccucugcagcccgagcuggacagcuucaaagaggaacuggacaaguacuuuaagaaccacacaagccccgacguggaccugggcgauaucagcggaaucaaugccagcgucgugaacauccagaaagagaucgaccggcugaacgagguggccaagaaucugaacgagagccugaucgaccugcaagaacuggggaaguacgagcaguacaucaagggaggcggaggaucugacaucaucaagcugcugaacgagcaagugaacaaagagaugcagagcagcaaccuguacaugagcaugagcagcuggugcuacacccacagccuugauggcgccggacuguuccuguuugaucacgccgccgaggaauacgagcacgccaagaagcugaucaucuuccugaacgagaacaacgugcccgugcagcugaccagcauuucugccccugagcacaaguucgagggccugacacagaucuuccagaaggccuacgaacacgagcagcacaucagcgagagcaucaacaacaucguggaccacgccauuaagagcaaggaucacgccaccuucaacuuucugcagugguacguggccgaacagcacgaggaagaggugcuguucaaggacauccuggacaagaucgagcugaucggcaacgagaaccacggccuguaucuggccgaccaguacgugaagggaaucgccaagagcagaaagagcugaggacuaguuauaagacugacuagcccgaugggccucccaacgggcccuccuccccuccuugcaccgagauuaauaaaaaaaaaaaaaaaaaaaaaaaaaaaaaaaaaaaaaaaaaaaaaaaaaaaaaaaaaaaaaaaaugcaucccccccccccccccccccccccccccccccaaaggcucuuuucagagccaccagaauu

SEQ ID NO: 14172 - RNA, 3943 nt, Artificial Sequence
  SARS-CoV-2/Wuhan/WIV05/2019__EPI_ISL_402128 spike protein mRNA gc mod (1-1211)(N914C_S1123C) Foldon construct
aggagaaagcuuaccauguucguguuucuggugcugcugccccugguguccagccagugugugaaccugaccaccagaacacagcugccuccagccuacaccaacagcuucaccagaggcguguacuaccccgacaagguguucagauccagcgugcugcacucuacccaggaccuguuccugccuuucuucagcaacgugaccugguuccacgccauccacguguccggcaccaauggcaccaagagauucgacaaccccgugcugcccuucaacgacgggguguacuuugccagcaccgagaaguccaacaucaucagaggcuggaucuucggcaccacacuggacagcaagacccagagccugcugaucgugaacaacgccaccaacguggucaucaaagugugcgaguuccaguucugcaacgaccccuuccugggcgucuacuaccacaagaacaacaagagcuggauggaaagcgaguuccggguguacagcagcgccaacaacugcaccuucgaguacgugucccagccuuuccugauggaccuggaaggcaagcagggcaacuucaagaaccugcgcgaguucguguucaagaacaucgacggcuacuucaaaaucuacagcaagcacaccccuaucaaccucgugcgggaucugccucagggcuucucugcucuggaaccccugguggaucugcccaucggcaucaacaucacccgguuucagacacugcuggcccugcacagaagcuaccugacaccuggcgauagcagcagcggauggacagcuggugccgccgcuuacuaugugggcuaccugcagccuagaaccuuccugcugaaguacaacgagaacggcaccaucaccgacgccguggauugugcucuggauccucugagcgagacaaagugcacccugaaguccuucaccguggaaaagggcaucuaccagaccagcaacuuccgggugcagcccaccgaauccaucgugcgguuccccaauaucaccaaucugugccccuucggcgagguguucaaugccaccagauucgccucuguguacgccuggaaccggaagcggaucagcaauugcguggccgacuacuccgugcuguacaacuccgccagcuucagcaccuucaagugcuacggcguguccccuaccaagcugaacgaccugugcuucacaaacguguacgccgacagcuucgugauccggggagaugaagugcggcagauugccccuggacagacaggcaagaucgccgacuacaacuacaagcugcccgacgacuucaccggcugugugauugccuggaacagcaacaaccuggacuccaaagucggcggcaacuacaauuaccuguaccggcuguuccggaaguccaaucugaagcccuucgagcgggacaucagcaccgaaaucuaucaggccggcagcaccccuugcaacggcguggaaggcuucaacugcuacuucccacugcaguccuacggcuuucagcccacaaauggcgugggcuaucagcccuacagagugguggugcugagcuucgaacugcugcaugcuccugccacagugugcggcccuaagaaaagcaccaaucucgugaagaacaaaugcgugaacuucaacuucaacggccugaccggcaccggcgugcugacagagagcaacaagaaguuccugccauuccagcaguuuggccgggauaucgccgauaccacagacgccguuagagauccccagacacuggaaauccuggacaucaccccaugcagcuucggcggagugucugugaucaccccuggcaccaacaccagcaaucagguggcagugcuguaccaggacgugaacuguaccgaagugcccguggccauucacgccgaucagcugacaccuacauggcggguguacuccaccggcagcaauguguuucagaccagagccggcugucugaucggagccgagcacgugaacaauagcuacgagugcgacauccccaucggcgcuggcaucugugccagcuaccagacacagacaaacagccccagacgggcuagaagcguggccagccagagcaucauugccuacacaaugucucugggcgccgagaacagcguggccuacuccaacaacucuaucgcuauccccaccaacuucaccaucagcgugaccaccgagauccugccuguguccaugaccaagaccagcguggacugcaccauguacaucugcggcgauuccaccgagugcuccaaccugcugcugcaguacggcagcuucugcacccagcugaauagagcccugacagggaucgccguggaacaggacaagaacacccaagagguguucgcccaagugaagcaaaucuacaagaccccuccuaucaaggacuucggcggcuucaauuucagccagauucugcccgauccuagcaagcccagcaagcggagcuucaucgaggaccugcuguucaacaaagugacacuggccgacgccggcuucaucaagcaguauggcgauugucugggcgacauugccgccagggaucugauuugcgcccagaaguuuaacggacugacagugcugccuccucugcugaccgaugagaugaucgcccaguacacaucugcccugcuggccggcacaaucacaagcggcuggacauuuggagcuggcgccgcucugcagauccccuuugcuaugcagauggccuaccgguucaacggcaucggagugacccagugcgugcuguacgagaaccagaagcugaucgccaaccaguucaacagcgccaucggcaagauccaggacagccugagcagcacagcaagcgcccugggaaagcugcaggacguggucaaccagaaugcccaggcacugaacacccuggucaagcagcuguccuccaacuucggcgccaucagcucugugcugaacgauauccugagcagacuggacaaggucgaggccgaggugcagaucgacagacugaucacaggcagacugcagagccuccagacauacgugacccagcagcugaucagagccgccgagauuagagccucugccaaucuggccgccaccaagaugucugagugugugcugggccagagcaagagaguggacuuuugcggcaagggcuaccaccugaugagcuucccucagucugccccucacggcgugguguuucugcacgugacauaugugcccgcucaagagaagaauuucaccaccgcuccagccaucugccacgacggcaaagcccacuuuccuagagaaggcguguucguguccaacggcacccauugguucgugacacagcggaacuucuacgagccccagaucaucaccaccgacaacaccuucguguguggcaacugcgacguugugaucggcauugugaacaauaccguguacgacccucugcagcccgagcuggacagcuucaaagaggaacuggacaaguacuuuaagaaccacacaagccccgacguggaccugggcgauaucagcggaaucaaugccagcgucgugaacauccagaaagagaucgaccggcugaacgagguggccaagaaucugaacgagagccugaucgaccugcaagaacuggggaaguacgagcaguacaucaagggaggaucuggcuauauccccgaggcuccuagagauggccaggccuauguucggaaggauggcgaaugggugcugcugagcaccuuccuuugaggacuaguuauaagacugacuagcccgaugggccucccaacgggcccuccuccccuccuugcaccgagauuaauaaaaaaaaaaaaaaaaaaaaaaaaaaaaaaaaaaaaaaaaaaaaaaaaaaaaaaaaaaaaaaaaugcaucccccccccccccccccccccccccccccccaaaggcucuuuucagagccaccagaauu

SEQ ID NO: 14173 - RNA, 4315 nt, Artificial Sequence
  SARS-CoV-2/Wuhan/WIV05/2019__EPI_ISL_402128 spike protein mRNA gc mod (1-1211)(N914C_S1123C) WhcAg construct
aggagaaagcuuaccauguucguguuucuggugcugcugccccugguguccagccagugugugaaccugaccaccagaacacagcugccuccagccuacaccaacagcuucaccagaggcguguacuaccccgacaagguguucagauccagcgugcugcacucuacccaggaccuguuccugccuuucuucagcaacgugaccugguuccacgccauccacguguccggcaccaauggcaccaagagauucgacaaccccgugcugcccuucaacgacgggguguacuuugccagcaccgagaaguccaacaucaucagaggcuggaucuucggcaccacacuggacagcaagacccagagccugcugaucgugaacaacgccaccaacguggucaucaaagugugcgaguuccaguucugcaacgaccccuuccugggcgucuacuaccacaagaacaacaagagcuggauggaaagcgaguuccggguguacagcagcgccaacaacugcaccuucgaguacgugucccagccuuuccugauggaccuggaaggcaagcagggcaacuucaagaaccugcgcgaguucguguucaagaacaucgacggcuacuucaaaaucuacagcaagcacaccccuaucaaccucgugcgggaucugccucagggcuucucugcucuggaaccccugguggaucugcccaucggcaucaacaucacccgguuucagacacugcuggcccugcacagaagcuaccugacaccuggcgauagcagcagcggauggacagcuggugccgccgcuuacuaugugggcuaccugcagccuagaaccuuccugcugaaguacaacgagaacggcaccaucaccgacgccguggauugugcucuggauccucugagcgagacaaagugcacccugaaguccuucaccguggaaaagggcaucuaccagaccagcaacuuccgggugcagcccaccgaauccaucgugcgguuccccaauaucaccaaucugugccccuucggcgagguguucaaugccaccagauucgccucuguguacgccuggaaccggaagcggaucagcaauugcguggccgacuacuccgugcuguacaacuccgccagcuucagcaccuucaagugcuacggcguguccccuaccaagcugaacgaccugugcuucacaaacguguacgccgacagcuucgugauccggggagaugaagugcggcagauugccccuggacagacaggcaagaucgccgacuacaacuacaagcugcccgacgacuucaccggcugugugauugccuggaacagcaacaaccuggacuccaaagucggcggcaacuacaauuaccuguaccggcuguuccggaaguccaaucugaagcccuucgagcgggacaucagcaccgaaaucuaucaggccggcagcaccccuugcaacggcguggaaggcuucaacugcuacuucccacugcaguccuacggcuuucagcccacaaauggcgugggcuaucagcccuacagagugguggugcugagcuucgaacugcugcaugcuccugccacagugugcggcccuaagaaaagcaccaaucucgugaagaacaaaugcgugaacuucaacuucaacggccugaccggcaccggcgugcugacagagagcaacaagaaguuccugccauuccagcaguuuggccgggauaucgccgauaccacagacgccguuagagauccccagacacuggaaauccuggacaucaccccaugcagcuucggcggagugucugugaucaccccuggcaccaacaccagcaaucagguggcagugcuguaccaggacgugaacuguaccgaagugcccguggccauucacgccgaucagcugacaccuacauggcggguguacuccaccggcagcaauguguuucagaccagagccggcugucugaucggagccgagcacgugaacaauagcuacgagugcgacauccccaucggcgcuggcaucugugccagcuaccagacacagacaaacagccccagacgggcuagaagcguggccagccagagcaucauugccuacacaaugucucugggcgccgagaacagcguggccuacuccaacaacucuaucgcuauccccaccaacuucaccaucagcgugaccaccgagauccugccuguguccaugaccaagaccagcguggacugcaccauguacaucugcggcgauuccaccgagugcuccaaccugcugcugcaguacggcagcuucugcacccagcugaauagagcccugacagggaucgccguggaacaggacaagaacacccaagagguguucgcccaagugaagcaaaucuacaagaccccuccuaucaaggacuucggcggcuucaauuucagccagauucugcccgauccuagcaagcccagcaagcggagcuucaucgaggaccugcuguucaacaaagugacacuggccgacgccggcuucaucaagcaguauggcgauugucugggcgacauugccgccagggaucugauuugcgcccagaaguuuaacggacugacagugcugccuccucugcugaccgaugagaugaucgcccaguacacaucugcccugcuggccggcacaaucacaagcggcuggacauuuggagcuggcgccgcucugcagauccccuuugcuaugcagauggccuaccgguucaacggcaucggagugacccagugcgugcuguacgagaaccagaagcugaucgccaaccaguucaacagcgccaucggcaagauccaggacagccugagcagcacagcaagcgcccugggaaagcugcaggacguggucaaccagaaugcccaggcacugaacacccuggucaagcagcuguccuccaacuucggcgccaucagcucugugcugaacgauauccugagcagacuggacaaggucgaggccgaggugcagaucgacagacugaucacaggcagacugcagagccuccagacauacgugacccagcagcugaucagagccgccgagauuagagccucugccaaucuggccgccaccaagaugucugagugugugcugggccagagcaagagaguggacuuuugcggcaagggcuaccaccugaugagcuucccucagucugccccucacggcgugguguuucugcacgugacauaugugcccgcucaagagaagaauuucaccaccgcuccagccaucugccacgacggcaaagcccacuuuccuagagaaggcguguucguguccaacggcacccauugguucgugacacagcggaacuucuacgagccccagaucaucaccaccgacaacaccuucguguguggcaacugcgacguugugaucggcauugugaacaauaccguguacgacccucugcagcccgagcuggacagcuucaaagaggaacuggacaaguacuuuaagaaccacacaagccccgacguggaccugggcgauaucagcggaaucaaugccagcgucgugaacauccagaaagagaucgaccggcugaacgagguggccaagaaucugaacgagagccugaucgaccugcaagaacuggggaaguacgagcaguacaucaagggaggcggaggaucugacaucgaccccuacaaagaguucggcagcagcuaccagcugcugaacuuccugccucuggacuucuuccccgaccugaacgcccugguggauacagccacagcucuguacgaggaagaacugaccggcagagagcacugcagcccucaccacacagccauuagacaggcccucgugugcugggacgagcugacaaaacugaucgccuggaugagcagcaacaucaccagcgagcaagugcggaccaucaucgugaaccacgugaacgauaccuggggccugaaagugcggcagagccugugguuucaccugagcugucugaccuucggccagcacaccgugcaagaguuucugguguccuucggcguguggaucagaaccccugcuccauacagaccuccaaacgcucccauccugagcacccugccugagcacacagugaucuguugaggacuaguuauaagacugacuagcccgaugggccucccaacgggcccuccuccccuccuugcaccgagauuaauaaaaaaaaaaaaaaaaaaaaaaaaaaaaaaaaaaaaaaaaaaaaaaaaaaaaaaaaaaaaaaaaugcaucccccccccccccccccccccccccccccccaaaggcucuuuucagagccaccagaauu

SEQ ID NO: 14174 - RNA, 4141 nt, Artificial Sequence
  SARS-CoV-2/Wuhan/WIV05/2019__EPI_ISL_402128 spike protein mRNA gc mod (1-1147)(N914C_S1123C) LumSynth construct
aggagaaagcuuaccauguucguguuucuggugcugcugccccugguguccagccagugugugaaccugaccaccagaacacagcugccuccagccuacaccaacagcuucaccagaggcguguacuaccccgacaagguguucagauccagcgugcugcacucuacccaggaccuguuccugccuuucuucagcaacgugaccugguuccacgccauccacguguccggcaccaauggcaccaagagauucgacaaccccgugcugcccuucaacgacgggguguacuuugccagcaccgagaaguccaacaucaucagaggcuggaucuucggcaccacacuggacagcaagacccagagccugcugaucgugaacaacgccaccaacguggucaucaaagugugcgaguuccaguucugcaacgaccccuuccugggcgucuacuaccacaagaacaacaagagcuggauggaaagcgaguuccggguguacagcagcgccaacaacugcaccuucgaguacgugucccagccuuuccugauggaccuggaaggcaagcagggcaacuucaagaaccugcgcgaguucguguucaagaacaucgacggcuacuucaaaaucuacagcaagcacaccccuaucaaccucgugcgggaucugccucagggcuucucugcucuggaaccccugguggaucugcccaucggcaucaacaucacccgguuucagacacugcuggcccugcacagaagcuaccugacaccuggcgauagcagcagcggauggacagcuggugccgccgcuuacuaugugggcuaccugcagccuagaaccuuccugcugaaguacaacgagaacggcaccaucaccgacgccguggauugugcucuggauccucugagcgagacaaagugcacccugaaguccuucaccguggaaaagggcaucuaccagaccagcaacuuccgggugcagcccaccgaauccaucgugcgguuccccaauaucaccaaucugugccccuucggcgagguguucaaugccaccagauucgccucuguguacgccuggaaccggaagcggaucagcaauugcguggccgacuacuccgugcuguacaacuccgccagcuucagcaccuucaagugcuacggcguguccccuaccaagcugaacgaccugugcuucacaaacguguacgccgacagcuucgugauccggggagaugaagugcggcagauugccccuggacagacaggcaagaucgccgacuacaacuacaagcugcccgacgacuucaccggcugugugauugccuggaacagcaacaaccuggacuccaaagucggcggcaacuacaauuaccuguaccggcuguuccggaaguccaaucugaagcccuucgagcgggacaucagcaccgaaaucuaucaggccggcagcaccccuugcaacggcguggaaggcuucaacugcuacuucccacugcaguccuacggcuuucagcccacaaauggcgugggcuaucagcccuacagagugguggugcugagcuucgaacugcugcaugcuccugccacagugugcggcccuaagaaaagcaccaaucucgugaagaacaaaugcgugaacuucaacuucaacggccugaccggcaccggcgugcugacagagagcaacaagaaguuccugccauuccagcaguuuggccgggauaucgccgauaccacagacgccguuagagauccccagacacuggaaauccuggacaucaccccaugcagcuucggcggagugucugugaucaccccuggcaccaacaccagcaaucagguggcagugcuguaccaggacgugaacuguaccgaagugcccguggccauucacgccgaucagcugacaccuacauggcggguguacuccaccggcagcaauguguuucagaccagagccggcugucugaucggagccgagcacgugaacaauagcuacgagugcgacauccccaucggcgcuggcaucugugccagcuaccagacacagacaaacagccccagacgggcuagaagcguggccagccagagcaucauugccuacacaaugucucugggcgccgagaacagcguggccuacuccaacaacucuaucgcuauccccaccaacuucaccaucagcgugaccaccgagauccugccuguguccaugaccaagaccagcguggacugcaccauguacaucugcggcgauuccaccgagugcuccaaccugcugcugcaguacggcagcuucugcacccagcugaauagagcccugacagggaucgccguggaacaggacaagaacacccaagagguguucgcccaagugaagcaaaucuacaagaccccuccuaucaaggacuucggcggcuucaauuucagccagauucugcccgauccuagcaagcccagcaagcggagcuucaucgaggaccugcuguucaacaaagugacacuggccgacgccggcuucaucaagcaguauggcgauugucugggcgacauugccgccagggaucugauuugcgcccagaaguuuaacggacugacagugcugccuccucugcugaccgaugagaugaucgcccaguacacaucugcccugcuggccggcacaaucacaagcggcuggacauuuggagcuggcgccgcucugcagauccccuuugcuaugcagauggccuaccgguucaacggcaucggagugacccagugcgugcuguacgagaaccagaagcugaucgccaaccaguucaacagcgccaucggcaagauccaggacagccugagcagcacagcaagcgcccugggaaagcugcaggacguggucaaccagaaugcccaggcacugaacacccuggucaagcagcuguccuccaacuucggcgccaucagcucugugcugaacgauauccugagcagacuggacaaggucgaggccgaggugcagaucgacagacugaucacaggcagacugcagagccuccagacauacgugacccagcagcugaucagagccgccgagauuagagccucugccaaucuggccgccaccaagaugucugagugugugcugggccagagcaagagaguggacuuuugcggcaagggcuaccaccugaugagcuucccucagucugccccucacggcgugguguuucugcacgugacauaugugcccgcucaagagaagaauuucaccaccgcuccagccaucugccacgacggcaaagcccacuuuccuagagaaggcguguucguguccaacggcacccauugguucgugacacagcggaacuucuacgagccccagaucaucaccaccgacaacaccuucguguguggcaacugcgacguugugaucggcauugugaacaauaccguguacgacccucugcagcccgagcuggacagcggcggaggaucuggcggaggacagaucuacgagggcaagcugacagccgagggccugagauuuggaaucguggccagccgguucaaucacgcccugguggauagacugguggaaggcgccaucgaugccauugucagacacggcggcagagaagaggacaucacccucguuagagugcccggcucuugggagauuccuguggcugcuggcgagcuggcccggaaagaagauaucgacgccguuaucgccaucggcgugcugaucagaggcgccacaccucacuucgacuauaucgccagcgagguguccaaaggccuggccgaucugagccuggaacugagaaagcccaucaccuucggcgugaucaccgcugacacacuggaacaggccauugagagagccggcaccaagcacggcaacaaaggaugggaagccgcucuguccgccaucgagauggccaaccuguucaagagccugcggugaggacuaguuauaagacugacuagcccgaugggccucccaacgggcccuccuccccuccuugcaccgagauuaauaaaaaaaaaaaaaaaaaaaaaaaaaaaaaaaaaaaaaaaaaaaaaaaaaaaaaaaaaaaaaaaaugcaucccccccccccccccccccccccccccccccaaaggcucuuuucagagccaccagaauu

SEQ ID NO: 14175 - RNA, 4165 nt, Artificial Sequence
  SARS-CoV-2/Wuhan/WIV05/2019__EPI_ISL_402128 spike protein mRNA gc mod (1-1147)(N914C_S1123C) Ferritin construct
aggagaaagcuuaccauguucguguuucuggugcugcugccccugguguccagccagugugugaaccugaccaccagaacacagcugccuccagccuacaccaacagcuucaccagaggcguguacuaccccgacaagguguucagauccagcgugcugcacucuacccaggaccuguuccugccuuucuucagcaacgugaccugguuccacgccauccacguguccggcaccaauggcaccaagagauucgacaaccccgugcugcccuucaacgacgggguguacuuugccagcaccgagaaguccaacaucaucagaggcuggaucuucggcaccacacuggacagcaagacccagagccugcugaucgugaacaacgccaccaacguggucaucaaagugugcgaguuccaguucugcaacgaccccuuccugggcgucuacuaccacaagaacaacaagagcuggauggaaagcgaguuccggguguacagcagcgccaacaacugcaccuucgaguacgugucccagccuuuccugauggaccuggaaggcaagcagggcaacuucaagaaccugcgcgaguucguguucaagaacaucgacggcuacuucaaaaucuacagcaagcacaccccuaucaaccucgugcgggaucugccucagggcuucucugcucuggaaccccugguggaucugcccaucggcaucaacaucacccgguuucagacacugcuggcccugcacagaagcuaccugacaccuggcgauagcagcagcggauggacagcuggugccgccgcuuacuaugugggcuaccugcagccuagaaccuuccugcugaaguacaacgagaacggcaccaucaccgacgccguggauugugcucuggauccucugagcgagacaaagugcacccugaaguccuucaccguggaaaagggcaucuaccagaccagcaacuuccgggugcagcccaccgaauccaucgugcgguuccccaauaucaccaaucugugccccuucggcgagguguucaaugccaccagauucgccucuguguacgccuggaaccggaagcggaucagcaauugcguggccgacuacuccgugcuguacaacuccgccagcuucagcaccuucaagugcuacggcguguccccuaccaagcugaacgaccugugcuucacaaacguguacgccgacagcuucgugauccggggagaugaagugcggcagauugccccuggacagacaggcaagaucgccgacuacaacuacaagcugcccgacgacuucaccggcugugugauugccuggaacagcaacaaccuggacuccaaagucggcggcaacuacaauuaccuguaccggcuguuccggaaguccaaucugaagcccuucgagcgggacaucagcaccgaaaucuaucaggccggcagcaccccuugcaacggcguggaaggcuucaacugcuacuucccacugcaguccuacggcuuucagcccacaaauggcgugggcuaucagcccuacagagugguggugcugagcuucgaacugcugcaugcuccugccacagugugcggcccuaagaaaagcaccaaucucgugaagaacaaaugcgugaacuucaacuucaacggccugaccggcaccggcgugcugacagagagcaacaagaaguuccugccauuccagcaguuuggccgggauaucgccgauaccacagacgccguuagagauccccagacacuggaaauccuggacaucaccccaugcagcuucggcggagugucugugaucaccccuggcaccaacaccagcaaucagguggcagugcuguaccaggacgugaacuguaccgaagugcccguggccauucacgccgaucagcugacaccuacauggcggguguacuccaccggcagcaauguguuucagaccagagccggcugucugaucggagccgagcacgugaacaauagcuacgagugcgacauccccaucggcgcuggcaucugugccagcuaccagacacagacaaacagccccagacgggcuagaagcguggccagccagagcaucauugccuacacaaugucucugggcgccgagaacagcguggccuacuccaacaacucuaucgcuauccccaccaacuucaccaucagcgugaccaccgagauccugccuguguccaugaccaagaccagcguggacugcaccauguacaucugcggcgauuccaccgagugcuccaaccugcugcugcaguacggcagcuucugcacccagcugaauagagcccugacagggaucgccguggaacaggacaagaacacccaagagguguucgcccaagugaagcaaaucuacaagaccccuccuaucaaggacuucggcggcuucaauuucagccagauucugcccgauccuagcaagcccagcaagcggagcuucaucgaggaccugcuguucaacaaagugacacuggccgacgccggcuucaucaagcaguauggcgauugucugggcgacauugccgccagggaucugauuugcgcccagaaguuuaacggacugacagugcugccuccucugcugaccgaugagaugaucgcccaguacacaucugcccugcuggccggcacaaucacaagcggcuggacauuuggagcuggcgccgcucugcagauccccuuugcuaugcagauggccuaccgguucaacggcaucggagugacccagugcgugcuguacgagaaccagaagcugaucgccaaccaguucaacagcgccaucggcaagauccaggacagccugagcagcacagcaagcgcccugggaaagcugcaggacguggucaaccagaaugcccaggcacugaacacccuggucaagcagcuguccuccaacuucggcgccaucagcucugugcugaacgauauccugagcagacuggacaaggucgaggccgaggugcagaucgacagacugaucacaggcagacugcagagccuccagacauacgugacccagcagcugaucagagccgccgagauuagagccucugccaaucuggccgccaccaagaugucugagugugugcugggccagagcaagagaguggacuuuugcggcaagggcuaccaccugaugagcuucccucagucugccccucacggcgugguguuucugcacgugacauaugugcccgcucaagagaagaauuucaccaccgcuccagccaucugccacgacggcaaagcccacuuuccuagagaaggcguguucguguccaacggcacccauugguucgugacacagcggaacuucuacgagccccagaucaucaccaccgacaacaccuucguguguggcaacugcgacguugugaucggcauugugaacaauaccguguacgacccucugcagcccgagcuggacagcggaggcggaggaucugacaucaucaagcugcugaacgagcaagugaacaaagagaugcagagcagcaaccuguacaugagcaugagcagcuggugcuacacccacagccuugauggcgccggacuguuccuguuugaucacgccgccgaggaauacgagcacgccaagaagcugaucaucuuccugaacgagaacaacgugcccgugcagcugaccagcauuucugccccugagcacaaguucgagggccugacacagaucuuccagaaggccuacgaacacgagcagcacaucagcgagagcaucaacaacaucguggaccacgccauuaagagcaaggaucacgccaccuucaacuuucugcagugguacguggccgaacagcacgaggaagaggugcuguucaaggacauccuggacaagaucgagcugaucggcaacgagaaccacggccuguaucuggccgaccaguacgugaagggaaucgccaagagcagaaagagcugaggacuaguuauaagacugacuagcccgaugggccucccaacgggcccuccuccccuccuugcaccgagauuaauaaaaaaaaaaaaaaaaaaaaaaaaaaaaaaaaaaaaaaaaaaaaaaaaaaaaaaaaaaaaaaaaugcaucccccccccccccccccccccccccccccccaaaggcucuuuucagagccaccagaauu

SEQ ID NO: 14176 - RNA, 3751 nt, Artificial Sequence
  SARS-CoV-2/Wuhan/WIV05/2019__EPI_ISL_402128 spike protein mRNA gc mod (1-1147)(N914C_S1123C) Foldon construct
aggagaaagcuuaccauguucguguuucuggugcugcugccccugguguccagccagugugugaaccugaccaccagaacacagcugccuccagccuacaccaacagcuucaccagaggcguguacuaccccgacaagguguucagauccagcgugcugcacucuacccaggaccuguuccugccuuucuucagcaacgugaccugguuccacgccauccacguguccggcaccaauggcaccaagagauucgacaaccccgugcugcccuucaacgacgggguguacuuugccagcaccgagaaguccaacaucaucagaggcuggaucuucggcaccacacuggacagcaagacccagagccugcugaucgugaacaacgccaccaacguggucaucaaagugugcgaguuccaguucugcaacgaccccuuccugggcgucuacuaccacaagaacaacaagagcuggauggaaagcgaguuccggguguacagcagcgccaacaacugcaccuucgaguacgugucccagccuuuccugauggaccuggaaggcaagcagggcaacuucaagaaccugcgcgaguucguguucaagaacaucgacggcuacuucaaaaucuacagcaagcacaccccuaucaaccucgugcgggaucugccucagggcuucucugcucuggaaccccugguggaucugcccaucggcaucaacaucacccgguuucagacacugcuggcccugcacagaagcuaccugacaccuggcgauagcagcagcggauggacagcuggugccgccgcuuacuaugugggcuaccugcagccuagaaccuuccugcugaaguacaacgagaacggcaccaucaccgacgccguggauugugcucuggauccucugagcgagacaaagugcacccugaaguccuucaccguggaaaagggcaucuaccagaccagcaacuuccgggugcagcccaccgaauccaucgugcgguuccccaauaucaccaaucugugccccuucggcgagguguucaaugccaccagauucgccucuguguacgccuggaaccggaagcggaucagcaauugcguggccgacuacuccgugcuguacaacuccgccagcuucagcaccuucaagugcuacggcguguccccuaccaagcugaacgaccugugcuucacaaacguguacgccgacagcuucgugauccggggagaugaagugcggcagauugccccuggacagacaggcaagaucgccgacuacaacuacaagcugcccgacgacuucaccggcugugugauugccuggaacagcaacaaccuggacuccaaagucggcggcaacuacaauuaccuguaccggcuguuccggaaguccaaucugaagcccuucgagcgggacaucagcaccgaaaucuaucaggccggcagcaccccuugcaacggcguggaaggcuucaacugcuacuucccacugcaguccuacggcuuucagcccacaaauggcgugggcuaucagcccuacagagugguggugcugagcuucgaacugcugcaugcuccugccacagugugcggcccuaagaaaagcaccaaucucgugaagaacaaaugcgugaacuucaacuucaacggccugaccggcaccggcgugcugacagagagcaacaagaaguuccugccauuccagcaguuuggccgggauaucgccgauaccacagacgccguuagagauccccagacacuggaaauccuggacaucaccccaugcagcuucggcggagugucugugaucaccccuggcaccaacaccagcaaucagguggcagugcuguaccaggacgugaacuguaccgaagugcccguggccauucacgccgaucagcugacaccuacauggcggguguacuccaccggcagcaauguguuucagaccagagccggcugucugaucggagccgagcacgugaacaauagcuacgagugcgacauccccaucggcgcuggcaucugugccagcuaccagacacagacaaacagccccagacgggcuagaagcguggccagccagagcaucauugccuacacaaugucucugggcgccgagaacagcguggccuacuccaacaacucuaucgcuauccccaccaacuucaccaucagcgugaccaccgagauccugccuguguccaugaccaagaccagcguggacugcaccauguacaucugcggcgauuccaccgagugcuccaaccugcugcugcaguacggcagcuucugcacccagcugaauagagcccugacagggaucgccguggaacaggacaagaacacccaagagguguucgcccaagugaagcaaaucuacaagaccccuccuaucaaggacuucggcggcuucaauuucagccagauucugcccgauccuagcaagcccagcaagcggagcuucaucgaggaccugcuguucaacaaagugacacuggccgacgccggcuucaucaagcaguauggcgauugucugggcgacauugccgccagggaucugauuugcgcccagaaguuuaacggacugacagugcugccuccucugcugaccgaugagaugaucgcccaguacacaucugcccugcuggccggcacaaucacaagcggcuggacauuuggagcuggcgccgcucugcagauccccuuugcuaugcagauggccuaccgguucaacggcaucggagugacccagugcgugcuguacgagaaccagaagcugaucgccaaccaguucaacagcgccaucggcaagauccaggacagccugagcagcacagcaagcgcccugggaaagcugcaggacguggucaaccagaaugcccaggcacugaacacccuggucaagcagcuguccuccaacuucggcgccaucagcucugugcugaacgauauccugagcagacuggacaaggucgaggccgaggugcagaucgacagacugaucacaggcagacugcagagccuccagacauacgugacccagcagcugaucagagccgccgagauuagagccucugccaaucuggccgccaccaagaugucugagugugugcugggccagagcaagagaguggacuuuugcggcaagggcuaccaccugaugagcuucccucagucugccccucacggcgugguguuucugcacgugacauaugugcccgcucaagagaagaauuucaccaccgcuccagccaucugccacgacggcaaagcccacuuuccuagagaaggcguguucguguccaacggcacccauugguucgugacacagcggaacuucuacgagccccagaucaucaccaccgacaacaccuucguguguggcaacugcgacguugugaucggcauugugaacaauaccguguacgacccucugcagcccgagcuggacagcggaggaucuggcuauauccccgaggcuccuagagauggccaggccuauguucggaaggauggcgaaugggugcugcugagcaccuuccuuugaggacuaguuauaagacugacuagcccgaugggccucccaacgggcccuccuccccuccuugcaccgagauuaauaaaaaaaaaaaaaaaaaaaaaaaaaaaaaaaaaaaaaaaaaaaaaaaaaaaaaaaaaaaaaaaaugcaucccccccccccccccccccccccccccccccaaaggcucuuuucagagccaccagaauu

SEQ ID NO: 14177 - RNA, 4123 nt, Artificial Sequence
  SARS-CoV-2/Wuhan/WIV05/2019__EPI_ISL_402128 spike protein mRNA gc mod (1-1147)(N914C_S1123C) WhcAg construct
aggagaaagcuuaccauguucguguuucuggugcugcugccccugguguccagccagugugugaaccugaccaccagaacacagcugccuccagccuacaccaacagcuucaccagaggcguguacuaccccgacaagguguucagauccagcgugcugcacucuacccaggaccuguuccugccuuucuucagcaacgugaccugguuccacgccauccacguguccggcaccaauggcaccaagagauucgacaaccccgugcugcccuucaacgacgggguguacuuugccagcaccgagaaguccaacaucaucagaggcuggaucuucggcaccacacuggacagcaagacccagagccugcugaucgugaacaacgccaccaacguggucaucaaagugugcgaguuccaguucugcaacgaccccuuccugggcgucuacuaccacaagaacaacaagagcuggauggaaagcgaguuccggguguacagcagcgccaacaacugcaccuucgaguacgugucccagccuuuccugauggaccuggaaggcaagcagggcaacuucaagaaccugcgcgaguucguguucaagaacaucgacggcuacuucaaaaucuacagcaagcacaccccuaucaaccucgugcgggaucugccucagggcuucucugcucuggaaccccugguggaucugcccaucggcaucaacaucacccgguuucagacacugcuggcccugcacagaagcuaccugacaccuggcgauagcagcagcggauggacagcuggugccgccgcuuacuaugugggcuaccugcagccuagaaccuuccugcugaaguacaacgagaacggcaccaucaccgacgccguggauugugcucuggauccucugagcgagacaaagugcacccugaaguccuucaccguggaaaagggcaucuaccagaccagcaacuuccgggugcagcccaccgaauccaucgugcgguuccccaauaucaccaaucugugccccuucggcgagguguucaaugccaccagauucgccucuguguacgccuggaaccggaagcggaucagcaauugcguggccgacuacuccgugcuguacaacuccgccagcuucagcaccuucaagugcuacggcguguccccuaccaagcugaacgaccugugcuucacaaacguguacgccgacagcuucgugauccggggagaugaagugcggcagauugccccuggacagacaggcaagaucgccgacuacaacuacaagcugcccgacgacuucaccggcugugugauugccuggaacagcaacaaccuggacuccaaagucggcggcaacuacaauuaccuguaccggcuguuccggaaguccaaucugaagcccuucgagcgggacaucagcaccgaaaucuaucaggccggcagcaccccuugcaacggcguggaaggcuucaacugcuacuucccacugcaguccuacggcuuucagcccacaaauggcgugggcuaucagcccuacagagugguggugcugagcuucgaacugcugcaugcuccugccacagugugcggcccuaagaaaagcaccaaucucgugaagaacaaaugcgugaacuucaacuucaacggccugaccggcaccggcgugcugacagagagcaacaagaaguuccugccauuccagcaguuuggccgggauaucgccgauaccacagacgccguuagagauccccagacacuggaaauccuggacaucaccccaugcagcuucggcggagugucugugaucaccccuggcaccaacaccagcaaucagguggcagugcuguaccaggacgugaacuguaccgaagugcccguggccauucacgccgaucagcugacaccuacauggcggguguacuccaccggcagcaauguguuucagaccagagccggcugucugaucggagccgagcacgugaacaauagcuacgagugcgacauccccaucggcgcuggcaucugugccagcuaccagacacagacaaacagccccagacgggcuagaagcguggccagccagagcaucauugccuacacaaugucucugggcgccgagaacagcguggccuacuccaacaacucuaucgcuauccccaccaacuucaccaucagcgugaccaccgagauccugccuguguccaugaccaagaccagcguggacugcaccauguacaucugcggcgauuccaccgagugcuccaaccugcugcugcaguacggcagcuucugcacccagcugaauagagcccugacagggaucgccguggaacaggacaagaacacccaagagguguucgcccaagugaagcaaaucuacaagaccccuccuaucaaggacuucggcggcuucaauuucagccagauucugcccgauccuagcaagcccagcaagcggagcuucaucgaggaccugcuguucaacaaagugacacuggccgacgccggcuucaucaagcaguauggcgauugucugggcgacauugccgccagggaucugauuugcgcccagaaguuuaacggacugacagugcugccuccucugcugaccgaugagaugaucgcccaguacacaucugcccugcuggccggcacaaucacaagcggcuggacauuuggagcuggcgccgcucugcagauccccuuugcuaugcagauggccuaccgguucaacggcaucggagugacccagugcgugcuguacgagaaccagaagcugaucgccaaccaguucaacagcgccaucggcaagauccaggacagccugagcagcacagcaagcgcccugggaaagcugcaggacguggucaaccagaaugcccaggcacugaacacccuggucaagcagcuguccuccaacuucggcgccaucagcucugugcugaacgauauccugagcagacuggacaaggucgaggccgaggugcagaucgacagacugaucacaggcagacugcagagccuccagacauacgugacccagcagcugaucagagccgccgagauuagagccucugccaaucuggccgccaccaagaugucugagugugugcugggccagagcaagagaguggacuuuugcggcaagggcuaccaccugaugagcuucccucagucugccccucacggcgugguguuucugcacgugacauaugugcccgcucaagagaagaauuucaccaccgcuccagccaucugccacgacggcaaagcccacuuuccuagagaaggcguguucguguccaacggcacccauugguucgugacacagcggaacuucuacgagccccagaucaucaccaccgacaacaccuucguguguggcaacugcgacguugugaucggcauugugaacaauaccguguacgacccucugcagcccgagcuggacagcggaggcggaggaucugacaucgaccccuacaaagaguucggcagcagcuaccagcugcugaacuuccugccucuggacuucuuccccgaccugaacgcccugguggauacagccacagcucuguacgaggaagaacugaccggcagagagcacugcagcccucaccacacagccauuagacaggcccucgugugcugggacgagcugacaaaacugaucgccuggaugagcagcaacaucaccagcgagcaagugcggaccaucaucgugaaccacgugaacgauaccuggggccugaaagugcggcagagccugugguuucaccugagcugucugaccuucggccagcacaccgugcaagaguuucugguguccuucggcguguggaucagaaccccugcuccauacagaccuccaaacgcucccauccugagcacccugccugagcacacagugaucuguugaggacuaguuauaagacugacuagcccgaugggccucccaacgggcccuccuccccuccuugcaccgagauuaauaaaaaaaaaaaaaaaaaaaaaaaaaaaaaaaaaaaaaaaaaaaaaaaaaaaaaaaaaaaaaaaaugcaucccccccccccccccccccccccccccccccaaaggcucuuuucagagccaccagaauu

SEQ ID NO: 14178 - protein, 566 aa, Artificial Sequence
  FLUAV/H1N1/A/California/7/2009__ACP41953 hemagglutinin (HA)
MKAILVVLLYTFATANADTLCIGYHANNSTDTVDTVLEKNVTVTHSVNLLEDKHNGKLCKLRGVAPLHLGKCNIAGWILGNPECESLSTASSWSYIVETPSSDNGTCYPGDFIDYEELREQLSSVSSFERFEIFPKTSSWPNHDSNKGVTAACPHAGAKSFYKNLIWLVKKGNSYPKLSKSYINDKGKEVLVLWGIHHPSTSADQQSLYQNADAYVFVGSSRYSKKFKPEIAIRPKVRDQEGRMNYYWTLVEPGDKITFEATGNLVVPRYAFAMERNAGSGIIISDTPVHDCNTTCQTPKGAINTSLPFQNIHPITIGKCPKYVKSTKLRLATGLRNIPSIQSRGLFGAIAGFIEGGWTGMVDGWYGYHHQNEQGSGYAADLKSTQNAIDEITNKVNSVIEKMNTQFTAVGKEFNHLEKRIENLNKKVDDGFLDIWTYNAELLVLLENERTLDYHDSNVKNLYEKVRSQLKNNAKEIGNGCFEFYHKCDNTCMESVKNGTYDYPKYSEEAKLNREEIDGVKLESTRIYQILAIYSTVASSLVLVVSLGAISFWMCSNGSLQCRICI

SEQ ID NO: 14179 - protein, 566 aa, Artificial Sequence
  FLUAV/H1N1/A/Michigan/45/2015__EPI662594 hemagglutinin (HA)
MKAILVVLLYTFTTANADTLCIGYHANNSTDTVDTVLEKNVTVTHSVNLLEDKHNGKLCKLRGVAPLHLGKCNIAGWILGNPECESLSTASSWSYIVETSNSDNGTCYPGDFINYEELREQLSSVSSFERFEIFPKTSSWPNHDSNKGVTAACPHAGAKSFYKNLIWLVKKGNSYPKLNQSYINDKGKEVLVLWGIHHPSTTADQQSLYQNADAYVFVGTSRYSKKFKPEIATRPKVRDQEGRMNYYWTLVEPGDKITFEATGNLVVPRYAFTMERNAGSGIIISDTPVHDCNTTCQTPEGAINTSLPFQNIHPITIGKCPKYVKSTKLRLATGLRNVPSIQSRGLFGAIAGFIEGGWTGMVDGWYGYHHQNEQGSGYAADLKSTQNAIDKITNKVNSVIEKMNTQFTAVGKEFNHLEKRIENLNKKVDDGFLDIWTYNAELLVLLENERTLDYHDSNVKNLYEKVRNQLKNNAKEIGNGCFEFYHKCDNTCMESVKNGTYDYPKYSEEAKLNREKIDGVKLESTRIYQILAIYSTVASSLVLVVSLGAISFWMCSNGSLQCRICI

SEQ ID NO: 14180 - protein, 566 aa, Artificial Sequence
  FLUAV/H1N1/A/Netherlands/602/2009__ACQ45338 hemagglutinin (HA)
MKAILVVLLYTFATANADTLCIGYHANNSTDTVDTVLEKNVTVTHSVNLLEDKHNGKLCKLRGVAPLHLGKCNIAGWILGNPECESLSTASSWSYIVETSSSDNGTCYPGDFIDYEELREQLSSVSSFERFEIFPKTSSWPNHDSNKGVTAACPHAGAKSFYKNLIWLVKKGNSYPKLSKSYINDKGKEVLVLWGIHHPSTSADQQSLYQNADAYVFVGSSRYSKKFKPEIAIRPKVRDQEGRMNYYWTLVEPGDKITFEATGNLVVPRYAFAMERNAGSGIIISDTPVHDCNTTCQTPKGAINTSLPFQNIHPITIGKCPKYVKSTKLRLATGLRNVPSIQSRGLFGAIAGFIEGGWTGMVDGWYGYHHQNEQGSGYAADLKSTQNAIDEITNKVNSVIEKMNTQFTAVGKEFNHLEKRIENLNKKVDDGFLDIWTYNAELLVLLENERTLDYHDSNVKNLYEKVRSQLKNNAKEIGNGCFEFYHKCDNTCMESVKNGTYDYPKYSEEAKLNREEIDGVKLESTRIYQILAIYSTVASSLVLVVSLGAISFWMCSNGSLQCRICI

SEQ ID NO: 14181 - protein, 566 aa, Artificial Sequence
  FLUAV/H3N2/A/Hong Kong/4801/2014__EPI643118 hemagglutinin (HA)
MKTIIALSYILCLVFAQKIPGNDNSTATLCLGHHAVPNGTIVKTITNDRIEVTNATELVQNSSIGEICDSPHQILDGENCTLIDALLGDPQCDGFQNKKWDLFVERSKAYSNCYPYDVPDYASLRSLVASSGTLEFNNESFNWTGVTQNGTSSACIRRSSSSFFSRLNWLTHLNYKYPALNVTMPNNEQFDKLYIWGVHHPGTDKDQIFPYAQSSGRIIVSTKRSQQAVIPNIGSRPRIRDIPSRISIYWTIVKPGDILLINSTGNLIAPRGYFKLRSGKSSIMRSDAPIGKCKSECITPNGSIPNDKPFQNVNRITYGACPRYVKHSTLKLATGMRNVPEKQTRGIFGAIAGFIENGWEGMVDGWYGFRHQNSEGRGQAADLKSTQAAIDQINGKLNRLIGKTNEKFHQIEKEFSEVEGRIQDLEKYVEDTKIDLWSYNAELLVALENQHTIDLTDSEMNKLFEKTKKQLRENAEDMGNGCFKIYHKCDNACIGSIRNGTYDHNVYRDEALNNRFQIKGVELKSGYKDWILWISFAISCFLLCVALLGFIMWACQKGNIRCNICI

SEQ ID NO: 14182 - protein, 585 aa, Artificial Sequence
  FLUBV/H0N0/B/Brisbane/60/2008__FJ766840 hemagglutinin (HA)
MKAIIVLLMVVTSNADRICTGITSSNSPHVVKTATQGEVNVTGVIPLTTTPTKSHFANLKGTETRGKLCPKCLNCTDLDVALGRPKCTGKIPSARVSILHEVRPVTSGCFPIMHDRTKIRQLPNLLRGYEHIRLSTHNVINAENAPGGPYKIGTSGSCPNITNGNGFFATMAWAVPKNDKNKTATNPLTIEVPYICTEGEDQITVWGFHSDNETQMAKLYGDSKPQKFTSSANGVTTHYVSQIGGFPNQTEDGGLPQSGRIVVDYMVQKSGKTGTITYQRGILLPQKVWCASGRSKVIKGSLPLIGEADCLHEKYGGLNKSKPYYTGEHAKAIGNCPIWVKTPLKLANGTKYRPPAKLLKERGFFGAIAGFLEGGWEGMIAGWHGYTSHGAHGVAVAADLKSTQEAINKITKNLNSLSELEVKNLQRLSGAMDELHNEILELDEKVDDLRADTISSQIELAVLLSNEGIINSEDEHLLALERKLKKMLGPSAVEIGNGCFETKHKCNQTCLDRIAAGTFDAGEFSLPTFDSLNITAASLNDDGLDNHTILLYYSTAASSLAVTLMIAIFVVYMVSRDNVSCSICL

SEQ ID NO: 14183 - protein, 584 aa, Artificial Sequence
  FLUBV/H0N0/B/Phuket/3073/2013__EPI540671 hemagglutinin (HA)
MKAIIVLLMVVTSNADRICTGITSSNSPHVVKTATQGEVNVTGVIPLTTTPTKSYFANLKGTRTRGKLCPDCLNCTDLDVALGRPMCVGTTPSAKASILHEVRPVTSGCFPIMHDRTKIRQLPNLLRGYEKIRLSTQNVIDAEKAPGGPYRLGTSGSCPNATSKIGFFATMAWAVPKDNYKNATNPLTVEVPYICTEGEDQITVWGFHSDNKTQMKSLYGDSNPQKFTSSANGVTTHYVSQIGDFPDQTEDGGLPQSGRIVVDYMMQKPGKTGTIVYQRGVLLPQKVWCASGRSKVIKGSLPLIGEADCLHEEYGGLNKSKPYYTGKHAKAIGNCPIWVKTPLKLANGTKYRPPAKLLKERGFFGAIAGFLEGGWEGMIAGWHGYTSHGAHGVAVAADLKSTQEAINKITKNLNSLSELEVKNLQRLSGAMDELHNEILELDEKVDDLRADTISSQIELAVLLSNEGIINSEDEHLLALERKLKKMLGPSAVDIGNGCFETKHKCNQTCLDRIAAGTFNAGEFSLPTFDSLNITAASLNDDGLDNHTILLYYSTAASSLAVTLMLAIFIVYMVSRDNVSCSICL

SEQ ID NO: 14184 - protein, 564 aa, Artificial Sequence
  FLUAV/H1N1/A/Brisbane/02/2018__EPI1212834 hemagglutinin (HA)
MKAILVVLLYTFTTANADTLCIGYHANNSTDTVDTVLEKNVTVTHSVNLLEDKHNGKLCKLGGVAPLHLGKCNIAGWILGNPECESLSTARSWSYIVETSNSDNGTCYPGDFINYEELREQLSSVSSFERFEIFPKTSSWPNHDSNKGVTAACPHAGAKSFYKNLIWLVKKGNSYPKLNQTYINDKGKEVLVLWGIHHPPTTADQQSLYQNADAYVFVGTSRYSKKFKPEIATRPKVRDREGRMNYYWTLVEPGDKITFEATGNLVVPRYAFTMERNAGSGIIISDTPVHDCNTTCQTAEGAINTSLPFQNVHPVTIGKCPKYVKSTKLRLATGLRNVPSIQSRGLFGAIAGFIEGGWTGMVDGWYGYHHQNEQGSGYAADLKSNAIDKITNKVNSVIEKMNTQFTAVGKEFNHLEKRIENLNKKVDDGFLDIWTYNAELLVLLENERTLDYHDSNVKNLYEKVRNQLKNNAKEIGNGCFEFYHKCDNTCMESVKNGTYDYPKYSEEAKLNREKIDGVKLESTRIYQILAIYSTVASSLVLVVSLGAISFWMCSNGSLQCRICI

SEQ ID NO: 14185 - protein, 564 aa, Artificial Sequence
  FLUAV/H1N1/A/Brisbane/02/2018__EPI1671767 hemagglutinin (HA)
MKAILVVLLYTFTTANADTLCIGYHANNSTDTVDTVLEKNVTVTHSVNLLEDKHNGKLCKLGGVAPLHLGKCNIAGWILGNPECESLSTARSWSYIVETSNSDNGTCYPGDFINYEELREQLSSVSSFERFEIFPKTSSWPNHDSNKGVTAACPHAGAKSFYKNLIWLVKKGNSYPKLNQTYINDKGKEVLVLWGIHHPPTTADQQSLYQNADAYVFVGTSRYSKKFKPEIATRPKVRDQEGRMNYYWTLVEPGDKITFEATGNLVVPRYAFTMERNAGSGIIISDTPVHDCNTTCQTAEGAINTSLPFQNVHPVTIGKCPKYVKSTKLRLATGLRNVPSIQSRGLFGAIAGFIEGGWTGMVDGWYGYHHQNEQGSGYAADLKSNAIDKITNKVNSVIEKMNTQFTAVGKEFNHLEKRIENLNKKVDDGFLDIWTYNAELLVLLENERTLDYHDSNVKNLYEKVRNQLKNNAKEIGNGCFEFYHKCDNTCMESVKNGTYDYPKYSEEAKLNREKIDGVKLESTRIYQILAIYSTVASSLVLVVSLGAISFWMCSNGSLQCRICI

SEQ ID NO: 14186 - protein, 564 aa, Artificial Sequence
  FLUAV/H1N1/A/Guangdong-Maonan/SWL1536/2019__EPI1542570 hemagglutinin (HA)
MKAILVVLLYTFTTANADTLCIGYHANNSTDTVDTVLEKNVTVTHSVNLLEDKHNGKLCKLRGVAPLHLGKCNIAGWILGNPECESLSTARSWSYIVETSNSDNGTCYPGDFINYEELREQLSSVSSFERFEIFPKTSSWPNHDSDKGVTAACPHAGAKSFYKNLIWLVKKGNSYPKLNQTYINDKGKEVLVLWGIHHPPTIAAQESLYQNADAYVFVGTSRYSKKFKPEIATRPKVRDQEGRMNYYWTLVEPGDKITFEATGNLVVPRYAFTMERDAGSGIIISDTPVHDCNTTCQTPEGAINTSLPFQNVHPITIGKCPKYVKSTKLRLATGLRNVPSIQSRGLFGAIAGFIEGGWTGMVDGWYGYHHQNEQGSGYAADLKSNAIDKITNKVNSVIEKMNTQFTAVGKEFNHLEKRIENLNKKVDDGFLDIWTYNAELLVLLENERTLDYHDSNVKNLYEKVRNQLKNNAKEIGNGCFEFYHKCDNTCMESVKNGTYDYPKYSEEAKLNREKIDGVKLESTRIYQILAIYSTVASSLVLVVSLGAISFWMCSNGSLQCRICI

SEQ ID NO: 14187 - protein, 564 aa, Artificial Sequence
  FLUAV/H1N1/A/Guangdong-Maonan/SWL1536/2019__EPI1590725 hemagglutinin (HA)
MKAILVVLLYTFTTANADTLCIGYHANNSTDTVDTVLEKNVTVTHSVNLLEDKHNGKLCKLRGVAPLHLGKCNIAGWILGNPECESLSTARSWSYIVETSNSDNGTCYPGDFINYEELREQLSSVSSFERFEIFPKTSSWPNHDSDKGVTAACPHAGAKSFYKNLIWLVKKGNSYPKLNQTYINDKGKEVLVLWGIHHPPTIAVQESLYQNADAYVFVGTSRYSKKFKPEIATRPKVRDQEGRMNYYWTLVEPGDKITFEATGNLVVPRYAFTMERDAGSGIIISDTPVHDCNTTCQTPEGAINTSLPFQNVHPITIGKCPKYVKSTKLRLATGLRNVPSIQSRGLFGAIAGFIEGGWTGMVDGWYGYHHQNEQGSGYAADLKSNAIDKITNKVNSVIEKMNTQFTAVGKEFNHLEKRIENLNKKVDDGFLDIWTYNAELLVLLENERTLDYHDSNVKNLYEKVRNQLKNNAKEIGNGCFEFYHKCDNTCMESVKNGTYDYPKYSEEAKLNREKIDGVKLESTRIYQILAIYSTVASSLVLVVSLGAISFWMCSNGSLQCRICI

SEQ ID NO: 14188 - protein, 566 aa, Artificial Sequence
  FLUAV/H3N2/A/Singapore/INFIMH-16-0019/2016__EPI1106227 hemagglutinin (HA)
MKTIIALSYILCLVFAQKIPGNDNSTATLCLGHHAVPNGTIVKTITNDRIEVTNATELVQNSSIGEICDSPHQILDGENCTLIDALLGDPQCDGFQNKKWDLFVERSKAYSNCYPYDVPDYASLRSLVASSGTLEFKNESFNWTGVTQNGTSSACIRGSSSSFFSRLNWLTHLNYTYPALNVTMPNKEQFDKLYIWGVHHPGTDKDQIFLYAQSSGRITVSTKRSQQAVIPNIGSRPRIRDIPSRISIYWTIVKPGDILLINSTGNLIAPRGYFKIRSGKSSIMRSDAPIGKCKSECITPNGSIPNDKPFQNVNRITYGACPRYVKHSTLKLATGMRNVPEKQTRGIFGAIAGFIENGWEGMVDGWYGFRHQNSEGRGQAADLKSTQAAIDQINGKLNRLIGKTNEKFHQIEKEFSEVEGRVQDLEKYVEDTKIDLWSYNAELLVALENQHTIDLTDSEMNKLFEKTKKQLRENAEDMGNGCFKIYHKCDNACIESIRNETYDHNVYRDEALNNRFQIKGVELKSGYKDWILWISFAISCFLLCVALLGFIMWACQKGNIRCNICI

SEQ ID NO: 14189 - protein, 566 aa, Artificial Sequence
  FLUAV/H3N2/A/Singapore/INFIMH-16-0019/2016__EPI1341068 hemagglutinin (HA)
MKTIIALSYILCLVFAQKIPGNDNSTATLCLGHHAVPNGTIVKTITNDRIEVTNATELVQNSSIGEICDSPHQILDGENCTLIDALLGDPQCDGFQNKKWDLFVERSKAYSNCYPYDVPDYASLRSLVASSGTLEFKNESFNWTGVTQNGTSSACIRGSSSSFFSRLNWLTHLNYKYPALNVTMPNKEQFDKLYIWGVHHPGTDKDQIFPYAQSSGRITVSTKRSQQAVIPNIGSRPRIRGIPSRISIYWTIVKPGDILLINSTGNLIAPRGYFKIRSGKSSIMRSDAPIGKCKSECITPNGSIPNDKPFQNVNRITYGACPRYVKHSTLKLATGMRNVPEKQTRGIFGAIAGFIENGWEGMVDGWYGFRHQNSEGRGQAADLKSTQAAIDQINGKLNRLIGKTNEKFHQIEKEFSEVEGRVQDLEKYVEDTKIDLWSYNAELLVALENQHTIDLTDSEMNKLFEKTKKQLRENAEDMGNGCFKIYHKCDNACIESIRNETYDHNVYRDEALNNRFQIKGVELKSGYKDWILWISFAISCFLLCVALLGFIMWACQKGNIRCNICI

SEQ ID NO: 14190 - protein, 566 aa, Artificial Sequence
  FLUAV/H3N2/A/Singapore/INFIMH-16-0019/2016 NYMC-X-307__EPI1259099 hemagglutinin (HA)
MKTIIALSYILCLVFAQKIPGNDNSTATLCLGHHAVPNGTIVKTITNDRIEVTNATELVQNSSIGEICDSPHQILDGENCTLIDALLGDPQCDGFQNKKWDLFVERSKAYSNCYPYDVPDYASLRSLVASSGTLEFKNESFNWTGVTQNGTSSACIRGSSSSFFSRLNWLTHLNYKYPALNVTMPNKEQFDKLYIWGVHHPGTDKDQIFPYAQSSGRITVSTKRSQQAVIPNIGSRPRIRGIPSRISIYWTIVKPGDILLINSTGNLIAPRGYFKIRSGKSSIMRSDAPIGKCKSECITPNGSIPNDKPFQNVNKITYGACPRYVKHSTLKLATGMRNVPEKQTRGIFGAIAGFIENGWEGMVDGWYGFRHQNSEGRGQAADLKSTQAAIDQINGKLNRLIGKTNEKFHQIEKEFSEVEGRVQDLEKYVEDTKIDLWSYNAELLVALENQHTIDLTDSEMNKLFEKTKKQLRENAEDMGNGCFKIYHKCDNACIESIRNETYDHNVYRDEALNNRFQIKGVELKSGYKDWILWISFAISCFLLCVALLGFIMWACQKGNIRCNICI

SEQ ID NO: 14191 - protein, 566 aa, Artificial Sequence
  FLUAV/H3N2/A/Singapore/INFIMH-16-0019/2016-CDC-LV18A__EPI1583318 hemagglutinin (HA)
MKTIIALSYILCLVFAQKIPGNDNSTATLCLGHHAVPNGTIVKTITNDRIEVTNATELVQNSSIGEICDSPHQILDGENCTLIDALLGDPQCDGFQNKKWDLFVERSKAYSNCYPYDVPDYASLRSLVASSGTLEFKNESFNWTGVTQNGTSSACIRGSSSSFFSRLNWLTHLNYKYPALNVTMPNKEQFDKLYIWGVHHPGTDKDQIFPYAQSSGRIIVSTKRSQQAVIPNIGSRPRIRDIPSRISIYWTIVKPGDILLINSTGNLIAPRGYFKIRSGKSSIMRSDAPIGKCKSECITPNGSIPNDKPFQNVNRITYGACPRYVKHSTLKLATGMRNVPEKQTRGIFGAIAGFIENGWEGMVDGWYGFRHQNSEGRGQAADLKSTQAAIDQINGKLNRLIGKTNEKFHQIEKEFSEVEGRVQDLEKYVEDTKIDLWSYNAELLVALENQHTIDLTDSEMNKLFEKTKKQLRENAEDMGNGCFKIYHKCDNACIESIRNETYDHNVYRDEALNNRFQIKGVELKSGYKDWILWISFAISCFLLCVALLGFIMWACQKGNIRCNICI

SEQ ID NO: 14192 - protein, 566 aa, Artificial Sequence
  FLUAV/H3N2/A/Kansas/14/2017__EPI1146345 hemagglutinin (HA)
MKTIIALSCILCLVFAQKIPGNDNSTATLCLGHHAVPNGTIVKTITNDRIEVTNATELVQNSSIGEICDSPHQILDGENCTLIDALLGDPQCDGFQNKKWDLFVERNKAYSNCYPYDVPDYASLRSLVASSGTLEFNNESFNWAGVTQNGTSSSCIRGSKSSFFSRLNWLTHLNSKYPALNVTMPNNEQFDKLYIWGVHHPGTDKDQISLYAQSSGRITVSTKRSQQAVIPNIGSRPRIRDIPSRISIYWTIVKPGDILLINSTGNLIAPRGYFKIRSGKSSIMRSDAPIGKCKSECITPNGSIPNDKPFQNVNRITYGACPRYVKQSTLKLATGMRNVPERQTRGIFGAIAGFIENGWEGMVDGWYGFRHQNSEGRGQAADLKSTQAAIDQINGKLNRLIGKTNEKFHQIEKEFSEVEGRIQDLEKYVEDTKIDLWSYNAELLVALENQHTIDLTDSEMNKLFEKTKKQLRENAEDMGNGCFKIYHKCDNACMGSIRNGTYDHNVYRDEALNNRFQIKGVELKSGYKDWILWISFAISCFLLCVALLGFIMWACQKGNIRCNICI

SEQ ID NO: 14193 - protein, 566 aa, Artificial Sequence
  FLUAV/H3N2/A/Kansas/14/2017__EPI1261067 hemagglutinin (HA)
MKTIIALSCILCLVFAQKIPGNDNSTATLCLGHHAVPNGTIVKTITNDRIEVTNATELVQNSSIGEICDSPHQILDGENCTLIDALLGDPQCDGFQNKKWDLFVERNKAYSNCYPYDVPDYASLRSLVASSGTLEFNNESFNWAGVTQNGTSSSCIRGSKSSFFSRLNWLTHLNSKYPALNVTMPNNEQFDKLYIWGVHHPGTDKNQISLYAQSSGRITVSTKRSQQAVIPNIGSRPRIRDIPSRISIYWTIVKPGDILLITSTGNLIAPRGYFKIRSGKSSIMRSDAPIGKCKSECITPNGSIPNDKPFQNVNRITYGACPRYVKQSTLKLATGMRNVPERQTRGIFGAIAGFIENGWEGMVDGWYGFRHQNSEGRGQAADLKSTQAAIDQINGKLNRLIGKTNEKFHQIEKEFSEVEGRIQDLEKYVEDTKIDLWSYNAELLVALENQHTIDLTDSEMNKLFEKTKKQLRENAEDMGNGCFKIYHKCDNACMGSIRNGTYDHNVYRDEALNNRFQIKGVELKSGYKDWILWISFAISCFLLCVALLGFIMWACQKGNIRCNICI

SEQ ID NO: 14194 - protein, 566 aa, Artificial Sequence
  FLUAV/H3N2/A/Kansas/14/2017__EPI1691978 hemagglutinin (HA)
MKTIIALSCILCLVFAQKIPGNDNSTATLCLGHHAVPNGTIVKTITNDRIEVTNATELVQNSSIGEICDSPHQILDGENCTLIDALLGDPQCDGFQNKKWDLFVERNKAYSNCYPYDVPDYASLRSLVASSGTLEFNNESFNWAGVTQNGTSSSCIRGSKSSFFSRLNWLTHLNSKYPALNVTMPNNEQFDKLYIWGVHHPVTDKNQISLYAQSSGRITVSTKRSQQAVIPNIGYRPRIRDIPSRISIYWTIVKPGDILLINSTGNLIAPRGYFKIRSGKSSIMRSDAPIGKCKSECITPNGSIPNDKPFQNVNRITYGACPRYVKQSTLKLATGMRNVPERQTRGIFGAIAGFIENGWEGMVDGWYGFRHQNSEGRGQAADLKSTQAAIDQINGKLNRLIGKTNEKFHQIEKEFSEVEGRIQDLEKYVEDTKIDLWSYNAELLVALENQHTIDLTDSEMNKLFEKTKKQLRENAEDMGNGCFKIYHKCDNACMGSIRNGTYDHNVYRDEALNNRFQIKGVELKSGYKDWILWISFAISCFLLCVALLGFIMWACQKGNIRCNICI

SEQ ID NO: 14195 - protein, 566 aa, Artificial Sequence
  FLUAV/H3N2/A/Kansas/14/2017 CBER-22B CDC19A__EPI1388416 hemagglutinin (HA)
MKTIIALSCILCLVFAQKIPGNDNSTATLCLGHHAVPNGTIVKTITNDRIEVTNATELVQNSSIGEICDSPHQILDGENCTLIDALLGDPQCDGFQNKKWDLFVERNKAYSNCYPYDVPDYASLRSLVASSGTLEFNNESFNWAGVTQNGTSSSCIRGSKSSFFSRLNWLTHLNSKYPALNVTMPNNEQFDKLYIWGVHHPVTDKNQISLYAQSSGRITVSTKRSQQAVIPNIGYRPRIRDIPSRISIYWTIVKPGDILLINSTGNLIAPRGYFKIRSGKSSIMRSDAPIGKCKSECITPNGSIPNDKPFQNVNRITYGACPRYVKQSTLKLATGMRNVPERQTRGIFGAIAGFIENGWEGMVDGWYGFRHQNSEGRGQAADLKSTQAAIDQINGKLNRLIGKTNEKFHQIEKEFSEVEGRIQDLEKYVEDTKIDLWSYNAELLVALENQHTIDLTDSEMNKLFEKTKKQLRENAEDMGNGCFKIYHKCDNACIGSIRNGTYDHNVYRDEALNNRFQIKGVELKSGYKDWILWISFAISCFLLCVALLGFIMWACQKGNIRCNICI

SEQ ID NO: 14196 - protein, 566 aa, Artificial Sequence
  FLUAV/H3N2/A/Switzerland/8060/2017__EPI1154878 hemagglutinin (HA)
MKTIIALSYILCLVFAQKIPGNDNSTATLCLGHHAVPNGTIVKTITNDRIEVTNATELVQNSSIGEICDSPHQILDGENCTLIDALLGDPQCDGFQNKKWDLFVERSKAYSSCYPYDVPDYASLRSLVASSGTLEFNNESFNWTGVKQNGTSSACIRKSSSSFFSRLNWLTHLNYTYPALNVTMPNNEQFDKLYIWGVHHPGTDKDQIFLYAQSSGRITVSTKRSQQAVIPNIGSRPRIRDIPSRISIYWTIVKPGDILLINSTGNLIAPRGYFKIQSGKSSIMRSDAPIGKCKSECITPNGSIPNDKPFQNVNRITYGACPRYVKHSTLKLATGMRNVPEKQTRGIFGAIAGFIENGWEGMVDGWYGFRHQNSEGRGQAADLKSTQAAIDQINGKLNRLIGKTNEKFHQIEKEFSEVEGRIQDLEKYVEDTKIDLWSYNAELLVALENQHTIDLTDSEMNKLFEKTKKQLRENAEDMGNGCFKIYHKCDNACIGSIRNGTYDHNVYRDEALNNRFQIKGVELKSGYKDWILWISFAISCFLLCVALLGFIMWACQKGNIRCNICI

SEQ ID NO: 14197 - protein, 566 aa, Artificial Sequence
  FLUAV/H3N2/A/Switzerland/8060/2017__EPI1266285 hemagglutinin (HA)
MKTIIALSYILCLVFAQKIPGNDNSTATLCLGHHAVPNGTIVKTITNDRIEVTNATELVQNSSIGEICDSPHQILDGENCTLIDALLGDPQCDGFQNKKWDLFVERSKAYSSCYPYDVPDYASLRSLVASSGTLEFNNESFNWTGVKQNGTSSACIRKSSSSFFSRLNWLTHLNYKYPALNVTMPNNEQFDKLYIWGVHHPGTDKDQIFPYAQSSGRITVSTKRSQQAVIPNIGSRPRIRDIPSRISIYWTIVKPGDILLINSTGNLIAPRGYFKIQSGKSSIMRSDAPIGKCKSECITPNGSIPNDKPFQNVNRITYGACPRYVKHSTLKLATGMRNVPEKQTRGIFGAIAGFIENGWEGMVDGWYGFRHQNSEGRGQAADLKSTQAAIDQINGKLNRLIGKTNEKFHQIEKEFSEVEGRIQDLEKYVEDTKIDLWSYNAELLVALENQHTIDLTDSEMNKLFEKTKKQLRENAEDMGNGCFKIYHKCDNACIGSIRNGTYDHNVYRDEALNNRFQIKGVELKSGYKDWILWISFAISCFLLCVALLGFIMWACQKGNIRCNICI

SEQ ID NO: 14198 - protein, 566 aa, Artificial Sequence
  FLUAV/H3N2/A/Hong Kong/2671/2019__EPI1543098 hemagglutinin (HA)
MKTIIALSYILCLVFTQKIPGNDNSTATLCLGHHAVPNGTIVKTITNDRIEVTNATELVQNSSIGEICDSPHQILDGGNCTLIDALLGDPQCDGFQNKKWDLFVERSRAYSNCYPYDVPDYASLRSLVASSGTLEFKNESFNWAGVTQNGKSFSCIRGSSSSFFSRLNWLTHLNYTYPALNVTMPNKEQFDKLYIWGVHHPGTDKDQISLYAQSSGRITVSTKRSQQAVIPNIGSRPRIRDIPSRISIYWTIVKPGDILLINSTGNLIAPRGYFKIRSGKSSIMRSDAPIGKCKSECITPNGSIPNDKPFQNVNRITYGACPRYVKQSTLKLATGMRNVPEKQTRGIFGAIAGFIENGWEGMVDGWYGFRHQNSEGRGQAADLKSTQAAIDQINGKLNRLIGKTNEKFHQIEKEFSEVEGRVQDLEKYVEDTKIDLWSYNAELLVALENQHTIDLTDSEMNKLFEKTKKQLRENAEDMGNGCFKIYHKCDNACIGSIRNETYDHNVYRDEALNNRFQIKGVELKSGYKDWILWISFAISCFLLCVALLGFIMWACQKGNIRCNICI

SEQ ID NO: 14199 - protein, 566 aa, Artificial Sequence
  FLUAV/H3N2/A/Hong Kong/2671/2019__EPI1642843 hemagglutinin (HA)
MKTIIALSYILCLVFTQKIPGNDNSTATLCLGHHAVPNGTIVKTITNDRIEVTNATELVQNSSIGEICDSPHQILDGGNCTLIDALLGDPQCDGFQNKKWDLFVERSRAYSNCYPYDVPDYASLRSLVASSGTLEFKNESFNWAGVTQNGKSFSCIRGSSSSFFSRLNWLTHLNYIYPALNVTMPNKEQFDKLYIWGVHHPVTDKDQISLYAQSSGRITVSTKRSQQAVIPNIGSRPRIRNIPSRISIYWTIVKPGDILLINSTGNLIAPRGYFKIRSGKSSIMRSDAPIGKCKSECITPNGSIPNDKPFQNVNRITYGACPRYVKQSTLKLATGMRNVPEKQTRGIFGAIAGFIENGWEGMVDGWYGFRHQNSEGRGQAADLKSTQAAIDQINGKLNRLIGKTNEKFHQIEKEFSEVEGRVQDLEKYVEDTKIDLWSYNAELLVALENQHTIDLTDSEMNKLFEKTKKQLRENAEDMGNGCFKIYHKCDNACIGSIRNETYDHNVYRDEALNNRFQIKGVELKSGYKDWILWISFAISCFLLCVALLGFIMWACQKGNIRCNICI

SEQ ID NO: 14200 - protein, 566 aa, Artificial Sequence
  FLUAV/H3N2/A/Hong Kong/45/2019__EPI1691930 hemagglutinin (HA)
MKTIIALSYILCLGFTQKIPGNDNSTATLCLGHHAVPNGTIVKTITNDRIEVTNATELVQNSSIGEICDSPHQILDGGNCTLIDALLGDPQCDGFQNKKWDLFVERSRAYSNCYPYDVPDYASLRSLVASSGTLEFKNESFNWAGVTQNGKSFSCIRGSSSSFFSRLNWLTHLNYTYPALNVTMPNKEQFDKLYIWGVHHPGTDKDQISLYAQSSGRITVSTKRSQQAVIPNIGSRPRIRDIPSRISIYWTIVKPGDILLINSTGNLIAPRGYFKIRSGKSSIMRSDAPIGKCKSECITPNGSIPNDKPFQNVNRITYGACPRYVKQNTLKLATGMRNVPEKQTRGIFGAIAGFIENGWEGMVDGWYGFRHQNSEGRGQAADLKSTQAAIDQINGKLNRLIGKTNEKFHQIEKEFSEVEGRVQDLEKYVEDTKIDLWSYNAELLVALENQHTIDLTDSEMNKLFEKTKKQLRENAEDMGNGCFKIYHKCDNACIGSIRNETYDHNVYRDEALNNRFQIKGVELKSGYKDWILWISFAISCFLLCVALLGFIMWACQKGNIRCNICI

SEQ ID NO: 14201 - protein, 566 aa, Artificial Sequence
  FLUAV/H3N2/A/South Australia/34/2019__EPI1387331 hemagglutinin (HA)
MKTIIALSYILCLVFAQKIPGNDNSTATLCLGHHAVPNGTIVKTITNDRIEVTNATELVQNSSIGEICDSPHQILDGGNCTLIDALLGDPQCDGFQNKKWDLFVERSRAYSNCYPYDVPDYASLRSLVASSGTLEFKNESFNWTGVKQNGTSSACIRGSSSSFFSRLNWLTHLNYTYPALNVTMPNKEQFDKLYIWGVHHPGTDKDQIFLYAQSSGRITVSTKRSQQAVIPNIGFRPRIRDIPSRISIYWTIVKPGDILLINSTGNLIAPRGYFKIRSGKSSIMRSDAPIGKCKSECITPNGSIPNDKPFQNVNRITYGACPRYVKQSTLKLATGMRNVPEKQTRGIFGAIAGFIENGWEGMMDGWYGFRHQNSEGRGQAADLKSTQAAIDQINGKLNRLIGKTNEKFHQIEKEFSEVEGRVQDLEKYVEDTKIDLWSYNAELLVALENQHTIDLTDSEMNKLFEKTKKQLRENAEDMGNGCFKIYHKCDNACIGSIRNETYDHNVYRDEALNNRFQIKGVELKSGYKDWILWISFAISCFLLCIALLGFIMWACQKGNIRCNICI

SEQ ID NO: 14202 - protein, 566 aa, Artificial Sequence
  FLUAV/H3N2/A/South Australia/34/2019__EPI1440494 hemagglutinin (HA)
MKTIIALSYILCLVFAQKIPGNDNSTATLCLGHHAVPNGTIVKTITNDRIEVTNATELVQNSSIGEICDSPHQILDGGNCTLIDALLGDPQCDGFQNKKWDLFVERSRAYSNCYPYDVPDYASLRSLVASSGTLEFKNESFNWTGVKQNGTSSACIRGSSSSFFSRLNWLTHLNYKYPALNVTMPNKEQFDKLYIWGVHHPITDKDQIFLYAQSSGRITVSTKRSQQAVIPNIGFRPRIRDIPSRISIYWTIVKPGDILLINSTGNLIAPRGYFKIRSGKSSIMRSDAPIGKCKSECITPNGSIPNDKPFQNVNRITYGACPRYVKQSTLKLATGMRNVPEKQTRGIFGAIAGFIENGWEGMMDGWYGFRHQNSEGRGQAADLKSTQAAIDQINGKLNRLIGKTNEKFHQIEKEFSEVEGRVQDLEKYVEDTKIDLWSYNAELLVALENQHTIDLTDSEMNKLFEKTKKQLRENAEDMGNGCFKIYHKCDNACIGSIRNETYDHNVYRDEALNNRFQIKGVELKSGYKDWILWISFAISCFLLCIALLGFIMWACQKGNIRCNICI

SEQ ID NO: 14203 - protein, 560 aa, Artificial Sequence
  FLUAV/H7N9/A/chicken/Zhejiang/C483/2013(H7N9)__AGN69400.1 hemagglutinin (HA)
MNTQILVFALIAIIPTNADKICLGHHAVSNGTKVNTLTERGVEVVNATETVERTNIPRICSKGKKTVDLGQCGLLGTITGPPQCDQFLEFSADLIIERREGSDVCYPGKFVNEEALRQILRESGGIDKEAMGFTYSGIRTNGATSACRRSGSSFYAEMKWLLSNTDNAAFPQMTKSYKNTRKSPALIVWGIHHSVSTAEQTKLYGSGNKLVTVGSSNYQQSFVPSPGARPQVNGQSGRIDFHWLMLNPNDTVTFSFNGAFIAPDRASFLRGKSMGIQSGVQVDANCEGDCYHSGGTIISNLPFQNIDSRAVGKCPRYVKQRSLLLATGMKNVPEIPKGRGLFGAIAGFIENGWEGLIDGWYGFRHQNAQGEGTAADYKSTQSAIDQITGKLNRLIEKTNQQFELIDNEFNEVEKQIGNVINWTRDSITEVWSYNAELLVAMENQHTIDLADSEMDKLYERVKRQLRENAEEDGTGCFEIFHKCDDDCMASIRNNTYDHSKYREEAMQNRIQIDPVKLSSGYKDVILWFSFGASCFILLAIVMGLVFICVKNGNMRCTICI

SEQ ID NO: 14204 - protein, 561 aa, Artificial Sequence
  FLUAV/H10N8/A/Jiangxi/IPB13/2013(H10N8)__AHK10761.1 hemagglutinin (HA)
MYKIVVIIALLGAVKGLDKICLGHHAVANGTIVKTLTNEQEEVTNATETVESTGINRLCMKGRKHKDLGNCHPIGMLIGTPACDLHLTGMWDTLIERENAIAYCYPGATVNVEALRQKIMESGGINKISTGFTYGSSINSAGTTRACMRNGGNSFYAELKWLVSKSKGQNFPQTTNTYRNTDTAEHLIMWGIHHPSSTQEKNDLYGTQSLSISVGSSTYRNNFVPVVGARPQVNGQSGRIDFHWTLVQPGDNITFSHNGGLIAPSRVSKLIGRGLGIQSDAPIDNNCESKCFWRGGSINTRLPFQNLSPRTVGQCPKYVNRRSLMLATGMRNVPELIQGRGLFGAIAGFLENGWEGMVDGWYGFRHQNAQGTGQAADYKSTQAAIDQITGKLNRLVEKTNTEFESIESEFSEIEHQIGNVINWTKDSITDIWTYQAELLVAMENQHTIDMADSEMLNLYERVRKQLRQNAEEDGKGCFEIYHACDDSCMESIRNNTYDHSQYREEALLNRLNINPVTLSSGYKDIILWFSFGASCFVLLAVVMGLFFFCLKNGNMRCTICI

SEQ ID NO: 14205 - protein, 583 aa, Artificial Sequence
  FLUBV/H0N0/B/Colorado/06/2017__EPI1011552 hemagglutinin (HA)
MKAIIVLLMVVTSSADRICTGITSSNSPHVVKTATQGEVNVTGVIPLTTTPTKSHFANLKGTETRGKLCPKCLNCTDLDVALGRPKCTGKIPSARVSILHEVRPVTSGCFPIMHDRTKIRQLPNLLRGYEHVRLSTHNVINAEGAPGGPYKIGTSGSCPNITNGNGFFATMAWAVPDKNKTATNPLTIEVPYVCTEGEDQITVWGFHSDNETQMAKLYGDSKPQKFTSSANGVTTHYVSQIGGFPNQTEDGGLPQSGRIVVDYMVQKSGKTGTITYQRGILLPQKVWCASGRSKVIKGSLPLIGEADCLHEKYGGLNKSKPYYTGEHAKAIGNCPIWVKTPLKLANGTKYRPPAKLLKERGFFGAIAGFLEGGWEGMIAGWHGYTSHGAHGVAVAADLKSTQEAINKITKNLNSLSELEVKNLQRLSGAMDELHNEILELDEKVDDLRADTISSQIELAVLLSNEGIINSEDEHLLALERKLKKMLGPSAVEIGNGCFETKHKCNQTCLDKIAAGTFDAGEFSLPTFDSLNITAASLNDDGLDNHTILLYYSTAASSLAVTLMIAIFVVYMVSRDNVSCSICL

SEQ ID NO: 14206 - protein, 583 aa, Artificial Sequence
  FLUBV/H0N0/B/Colorado/06/2017__EPI1051642 hemagglutinin (HA)
MKAIIVLLMVVTSSADRICTGITSSNSPHVVKTATQGEVNVTGVIPLTTTPTKSHFANLKGTETRGKLCPKCLNCTDLDVALGRPKCTGKIPSARVSILHEVRPVTSGCFPIMHDRTKIRQLPNLLRGYEHVRLSTHNVINAEGAPGGPYKIGTSGSCPNITNGNGFFATMAWAVPDKNKTATNPLTIEVPYVCTEGEDQITVWGFHSDTETQMAKLYGDSKPQKFTSSANGVTTHYVSQIGGFPNQTEDGGLPQSGRIVVDYMVQKSGKTGTITYQRGILLPQKVWCASGRSKVIKGSLPLIGEADCLHEKYGGLNKSKPYYTGEHAKAIGNCPIWVKTPLKLANGTKYRPPAKLLKERGFFGAIAGFLEGGWEGMIAGWHGYTSHGAHGVAVAADLKSTQEAINKITKNLNSLSELEVKNLQRLSGAMDELHNEILELDEKVDDLRADTISSQIELAVLLSNEGIINSEDEHLLALERKLKKMLGPSAVEIGNGCFETKHKCNQTCLDKIAAGTFDAGEFSLPTFDSLNITAASLNDDGLDNHTILLYYSTAASSLAVTLMIAIFVVYMVSRDNVSCSICL

SEQ ID NO: 14207 - protein, 583 aa, Artificial Sequence
  FLUBV/H0N0/B/Colorado/06/2017 BX-71__EPI1151760 hemagglutinin (HA)
MKAIIVLLMVVTSSADRICTGITSSNSPHVVKTATQGEVNVTGVIPLTTTPTKSHFANLKGTETRGKLCPKCLNCTDLDVALGRPKCTGKIPSARVSILHEVRPVTSGCFPIMHDRTKIRQLPNLLRGYEHVRLSTHNVINAEGAPGGPYKIGTSGSCPNITNGNGFFATMAWAVPDKNKTATNPLTIEVPYVCTEGEDQITVWGFHSDTETQMAKLYGDSKPQKFTSSANGVTTHYVSQIGGFPNQTEDGGRPQSGRIVVDYMVQKSGKTGTITYQRGILLPQKVWCASGRSKVIKGSLPLIGEADCLHEKYGGLNKSKPYYTGEHAKAIGNCPIWVKTPLKLANGTKYRPPAKLLKERGFFGAIAGFLEGGWEGMIAGWHGYTSHGAHGVAVAADLKSTQEAINKITKNLNSLSELEVKNLQRLSGAMDELHNEILELDEKVDDLRADTISSQIELAVLLSNEGIINSEDEHLLALERKLKKMLGPSAVEIGNGCFETKHKCNQTCLDKIAAGTFDAGEFSLPTFDSLNITAASLNDDGLDNHTILLYYSTAASSLAVTLMIAIFVVYMVSRDNVSCSICL

SEQ ID NO: 14208 - protein, 582 aa, Artificial Sequence
  FLUBV/H0N0/B/Washington/02/2019__EPI1368874 hemagglutinin (HA)
MKAIIVLLMVVTSNADRICTGITSSNSPHVVKTATQGEVNVTGVIPLTTTPTKSHFANLKGTETRGKLCPKCLNCTDLDVALGRPKCTGKIPSARVSILHEVRPVTSGCFPIMHDRTKIRQLPNLLRGYEHVRLSTHNVINAEDAPGRPYEIGTSGSCPNITNGNGFFATMAWAVPKNKTATNPLTIEVPYICTEGEDQITVWGFHSDNETQMAKLYGDSKPQKFTSSANGVTTHYVSQIGGFPNQTEDGGLPQSGRIVVDYMVQKSGKTGTITYQRGILLPQKVWCASGRSKVIKGSLPLIGEADCLHEKYGGLNKSKPYYTGEHAKAIGNCPIWVKTPLKLANGTKYRPPAKLLKERGFFGAIAGFLEGGWEGMIAGWHGYTSHGAHGVAVAADLKSTQEAINKITKNLNSLSELEVKNLQRLSGAMDELHNEILELDEKVDDLRADTISSQIELAVLLSNEGIINSEDEHLLALERKLKKMLGPSAVEIGNGCFETKHKCNQTCLDRIAAGTFDAGEFSLPTFDSLNITAASLNDDGLDNHTILLYYSTAASSLAVTLMIAIFVVYMVSRDNVSCSICL

SEQ ID NO: 14209 - protein, 582 aa, Artificial Sequence
  FLUBV/H0N0/B/Washington/02/2019__EPI1422452 hemagglutinin (HA)
MKAIIVLLMVVTSNADRICTGITSSNSPHVVKTATQGEVNVTGVIPLTTTPTKSHFANLKGTETRGKLCPKCLNCTDLDVALGRPKCTGKIPSARVSILHEVRPVTSGCFPIMHDRTKIRQLPNLLRGYEHVRLSTHNVINAEDAPGRPYEIGTSGSCPNITNGNGFFATMAWAVPKNKTATNPLTIEVPYICTEGEDQITVWGFHSDSETQMAKLYGDSKPQKFTSSANGVTTHYVSQIGGFPNQTEDGGLPQSGRIVVDYMVQKSGKTGTITYQRGILLPQKVWCASGRSKVIKGSLPLIGEADCLHEKYGGLNKSKPYYTGEHAKAIGNCPIWVKTPLKLANGTKYRPPAKLLKERGFFGAIAGFLEGGWEGMIAGWHGYTSHGAHGVAVAADLKSTQEAINKITKNLNSLSELEVKNLQRLSGAMDELHNEILELDEKVDDLRADTISSQIELAVLLSNEGIINSEDEHLLALERKLKKMLGPSAVEIGNGCFETKHKCNQTCLDRIAAGTFDAGEFSLPTFDSLNITAASLNDDGLDNHTILLYYSTAASSLAVTLMIAIFVVYMVSRDNVSCSICL

SEQ ID NO: 14210 - protein, 469 aa, Artificial Sequence
  FLUAV/H1N1/A/California/7/2009__GQ906802 neuraminidase (NA)
MNPNQKIITIGSVCMTIGMANLILQIGNIISIWISHSIQLGNQNQIETCNQSVITYENNTWVNQTYVNISNTNFAAGQSVVSVKLAGNSSLCPVSGWAIYSKDNSVRIGSKGDVFVIREPFISCSPLECRTFFLTQGALLNDKHSNGTIKDRSPYRTLMSCPIGEVPSPYNSRFESVAWSASACHDGINWLTIGISGPDNGAVAVLKYNGIITDTIKSWRNNILRTQESECACVNGSCFTVMTDGPSNGQASYKIFRIEKGKIVKSVEMNAPNYHYEECSCYPDSSEITCVCRDNWHGSNRPWVSFNQNLEYQIGYICSGIFGDNPRPNDKTGSCGPVSSNGANGVKGFSFKYGNGVWIGRTKSISSRNGFEMIWDPNGWTGTDNNFSIKQDIVGINEWSGYSGSFVQHPELTGLDCIRPCFWVELIRGRPKENTIWTSGSSISFCGVNSDTVGWSWPDGAELPFTIDK

SEQ ID NO: 14211 - protein, 469 aa, Artificial Sequence
  FLUAV/H1N1/A/Michigan/45/2015__EPI662593 neuraminidase (NA)
MNPNQKIITIGSICMTIGMANLILQIGNIISIWVSHSIQIGNQSQIETCNQSVITYENNTWVNQTYVNISNTNFAAGQSVVSVKLAGNSSLCPVSGWAIYSKDNSVRIGSKGDVFVIREPFISCSPLECRTFFLTQGALLNDKHSNGTIKDRSPYRTLMSCPIGEVPSPYNSRFESVAWSASACHDGINWLTIGISGPDSGAVAVLKYNGIITDTIKSWRNNILRTQESECACVNGSCFTIMTDGPSDGQASYKIFRIEKGKIIKSVEMKAPNYHYEECSCYPDSSEITCVCRDNWHGSNRPWVSFNQNLEYQMGYICSGVFGDNPRPNDKTGSCGPVSSNGANGVKGFSFKYGNGVWIGRTKSISSRKGFEMIWDPNGWTGTDNKFSIKQDIVGINEWSGYSGSFVQHPELTGLDCIRPCFWVELIRGRPEENTIWTSGSSISFCGVNSDTVGWSWPDGAELPFTIDK

SEQ ID NO: 14212 - protein, 469 aa, Artificial Sequence
  FLUAV/H1N1/A/Netherlands/602/2009__AGU92703 neuraminidase (NA)
MNPNQKIITIGSVCMTIGMANLILQIGNIISIWISHSIQLGNQNQIETCNQSVITYENNTWVNQTYVNISNTNFAAGQSVVSVKLAGNSSLCPVSGWAIYSKDNSVRVGSKGDVFVIREPFISCSPLECRTFFLTQGALLNDKHSNGTIKDRSPYRTLMSCPIGEVPSPYNSRFESVAWSASACHDGINWLTIGISGPDNGAVAVLKYNGIITDTIKSWRNNILRTQESECACVNGSCFTVMTDGPSNGQASYKIFRIEKGKIVKSVEMNAPNYHYEECSCYPDSSEITCVCRDNWHGSNRPWVSFNQNLEYQIGYICSGIFGDNPRPNDKTGSCGPVSSNGANGVKGFSFKYGNGVWIGRTKSISSRNGFEMIWDPNGWTGTDNNFSIKQDIVGINEWSGYSGSFIQHPELTGLDCIRPCFWVELIRGRPKENTIWTSGSSISFCGVNSDTVGWSWPDGAELPFTIDK

SEQ ID NO: 14213 - protein, 469 aa, Artificial Sequence
  FLUAV/H3N2/A/Hong Kong/4801/2014__EPI578429 neuraminidase (NA)
MNPNQKIITIGSVSLTISTICFFMQIAILITTVTLHFKQYEFNSPPNNQVMLCEPTIIERNITEIVYLTNTTIEKEICPKPAEYRNWSKPQCGITGFAPFSKDNSIRLSAGGDIWVTREPYVSCDPDKCYQFALGQGTTLNNVHSNNTVRDRTPYRTLLMNELGVPFHLGTKQVCIAWSSSSCHDGKAWLHVCITGDDKNATASFIYNGRLVDSVVSWSKDILRTQESECICINGTCTVVMTDGSASGKADTKILFIEEGKIVHTSTLSGSAQHVEECSCYPRYPGVRCVCRDNWKGSNRPIVDINIKDHSIVSSYVCSGLVGDTPRKNDSSSSSHCLDPNNEEGGHGVKGWAFDDGNDVWMGRTINETSRLGYETFKVIEGWSNPKSKLQTNRQVIVDRGDRSGYSGIFSVEGKSCINRCFYVELIRGRKEETEVLWTSNSIVVFCGTSGTYGTGSWPDGADLNLMPI

SEQ ID NO: 14214 - protein, 466 aa, Artificial Sequence
  FLUBV/H0N0/B/Brisbane/60/2008__EPI173278 neuraminidase (NA)
MLPSTIQTLTLFLTSGGVLLSLYVSASLSYLLYSDILLKFSPTEITAPTMPLDCANASNVQAVNRSATKGVTLLLPEPEWTYPRLSCPGSTFQKALLISPHRFGETKGNSAPLIIREPFIACGPNECKHFALTHYAAQPGGYYNGTRGDRNKLRHLISVKLGKIPTVENSIFHMAAWSGSACHDGKEWTYIGVDGPDNNALLKVKYGEAYTDTYHSYANKILRTQESACNCIGGNCYLMITDGSASGVSECRFLKIREGRIIKEIFPTGRVKHTEECTCGFASNKTIECACRDNSYTAKRPFVKLNVETDTAEIRLMCTDTYLDTPRPNDGSITGPCESNGDKGSGGIKGGFVHQRMESKIGRWYSRTMSKTERMGMGLYVKYDGDPWADSDALAFSGVMVSMKEPGWYSFGFEIKDKKCDVPCIGIEMVHDGGKETWHSAATAIYCLMGSGQLLWDTVTGVDMAL

SEQ ID NO: 14215 - protein, 466 aa, Artificial Sequence
  FLUBV/H0N0/B/Phuket/3073/2013__EPI540672 neuraminidase (NA)
MLPSTIQTLTLFLTSGGVLLSLYVSASLSYLLYSDILLKFSRTEVTAPIMPLDCANASNVQAVNRSATKGVTPLLPEPEWTYPRLSCPGSTFQKALLISPHRFGETKGNSAPLIIREPFIACGPKECKHFALTHYAAQPGGYYNGTREDRNKLRHLISVKLGKIPTVENSIFHMAAWSGSACHDGREWTYIGVDGPDSNALLKIKYGEAYTDTYHSYAKNILRTQESACNCIGGDCYLMITDGPASGISECRFLKIREGRIIKEIFPTGRVKHTEECTCGFASNKTIECACRDNSYTAKRPFVKLNVETDTAEIRLMCTKTYLDTPRPNDGSITGPCESDGDEGSGGIKGGFVHQRMASKIGRWYSRTMSKTKRMGMGLYVKYDGDPWTDSEALALSGVMVSMEEPGWYSFGFEIKDKKCDVPCIGIEMVHDGGKTTWHSAATAIYCLMGSGQLLWDTVTGVNMTL

SEQ ID NO: 14216 - protein, 469 aa, Artificial Sequence
  FLUAV/H1N1/A/Brisbane/02/2018__EPI1212833 neuraminidase (NA)
MNPNQKIITIGSTCMTIGMANLILQIGNIISIWVSHSIQIGNQSQIETCNQSVITYENNTWVNQTYVNISNTNFAARQSVASVKLAGNSSLCPVSGWAIYSKDNSVRIGSKGDVFVIREPFISCSPLECRTFFLTQGALLNDKHSNGTIKDRSPYRTLMSCPIGEVPSPYNSRFESVAWSASACHDGTNWLTIGISGPDSGAVAVLKYNGIITDTIKSWRNNILRTQESECACVNGSCFTIMTDGPSDGQASYKIFRIEKGKIIKSVEMKAPNYHYEECSCYPDSSEITCVCRDNWHGSNRPWVSFNQNLEYQMGYICSGVFGDNPRPNDKTGSCGPVSSNGANGVKGFSFKYGNGVWIGRTKSISSRKGFEMIWDPNGWTGTDNKFSIKQDIVGINEWSGYSGSFVQHPELTGLDCIRPCFWVELIRGRPEENTIWTSGSSISFCGVDSDTVGWSWPDGAELPFTIDK

SEQ ID NO: 14217 - protein, 469 aa, Artificial Sequence
  FLUAV/H1N1/A/Guangdong-Maonan/SWL1536/2019__EPI1542569 neuraminidase (NA)
MNPNQKIITIGSICMTIGMANLILQIGNIISIWVSHSIQIGNQSQIETCNKNVITYENNTWVNQTYVNISNTNSAARQSVASVKLAGNSSLCPVSGWAIYSKDNSVRIGSKGDVFVIREPFISCSPLECRTFFLTQGALLNDKHSNGTIKDRSPYRTLMSCPIGEVPSPYNSRFESVAWSASACHDGTNWLTIGISGPDSGAVAVLKYNGIITDTIKSWRNNILRTQESECACVNGSCFTIMTDGPSDGQASYKIFRIEKGKIIKSVEMKAPNYHYEECSCYPDSSEITCVCRDNWHGSNRPWVSFNQNLEYQMGYICSGVFGDNPRPNDKTGSCGPVSSNGANGVKGFSFKYGNGVWIGRTKSISSRKGFEMIWDPNGWTGTDNKFSKKQDIVGINEWSGYSGSFVQHPELTGLNCIRPCFWVELIRGRPEENTIWTSGSSISFCGVDSDIVGWSWPDGAELPFTIDK

SEQ ID NO: 14218 - protein, 469 aa, Artificial Sequence
  FLUAV/H3N2/A/Singapore/INFIMH-16-0019/2016__EPI1047603 neuraminidase (NA)
MNPNQKIITIGSVSLTISTICFFMQIAILITTVTLHFKQYEFNSPPNNQVMLCEPTIIERNITEIVYLTNTTIEKEICPKPAEYRNWSKPQCGITGFAPFSKDNSIRLSAGGDIWVTREPYVSCDPDKCYQFALGQGTTLNNVHSNNTVRDRTPYRTLLMNELGVPFHLGTKQVCIAWSSSSCHDGKAWLHVCITGDDKNATASFIYNGRLIDSVVSWSKDILRTQESECVCINGTCTVVMTDGNATGKADTKILFIEEGKIVHTSKLSGSAQHVEECSCYPRYPGVRCVCRDNWKGSNRPIVDINIKDHSIVSSYVCSGLVGDTPRKNDSSSSSHCLNPNNEEGGHGVKGWAFDDGNDVWMGRTINETSRLGYETFKVVEGWSNPKSKLQINRQVIVDRGDRSGYSGIFSVEGKSCINRCFYVELIRGRKEETEVLWTSNSIVVFCGTSGTYGTGSWPDGADLNLMHI

SEQ ID NO: 14219 - protein, 469 aa, Artificial Sequence
  FLUAV/H3N2/A/Kansas/14/2017__EPI1146344 neuraminidase (NA)
MNPNQKIITIGSVSLTISTICFFMQIAILITTVTLHFKQYEFNSPPNNQVMLCEPTIIERNITEIVYLTNTTIEREICPKPAEYRNWSKPQCGITGFAPFSKDNSIRLSAGGDIWVTREPYVSCDPDKCYQFALGQGTTINNVHSNNTARDRTPHRTLLMNELGVPFHLGTKQVCIAWSSSSCHDGKAWLHVCITGDDKNATASFIYNGRLVDSVVSWSKDILRTQESECVCINGTCTVVMTDGNATGKADTKILFIEEGKIVHTSKLSGSAQHVEECSCYPRYPGVRCVCRDNWKGSNRPIVDINIKDHSIVSSYVCSGLVGDTPRKTDSSSSSHCLNPNNEKGGHGVKGWAFDDGNDVWMGRTINETSRLGYETFKVVEGWSNPKSKLQINRQVIVDRGDRSGYSGIFSVEGKSCINRCFYVELIRGRKEETEVLWTSNSIVVFCGTSGTYGTGSWPDGADLNLMHI

SEQ ID NO: 14220 - protein, 469 aa, Artificial Sequence
  FLUAV/H3N2/A/Kansas/14/2017-CDC-LV24A__EPI1444881 neuraminidase (NA)
MNPNQKIITIGSVSLTISTICFFMQIAILITTVTLHFKQYEFNSPPNNQVMLCEPTIIERNITEIVYLTNTTIEREICPKPAEYRNWSKPQCGITGFAPFSKDNSIRLSAGGDIWVTREPYVSCDPDKCYQFALGQGTTINNVHSNNTARDRTPHRTLLMNELGVPFHLGTKQVCIAWSSSSCHDGKAWLHVCITGDDKNATASFIYNGRLVDSVVSWSKDILRTQESECVCINGTCTVVMTDGNATGKADTKILFIEEGKIVHTSKLSGSAQHVEECSCYPRYPGVRCVCRDNWKGSNRPIVDINIKDHSIVSSYVCSGLVGDTPRKTDNSSSSHCLNPNNEKGGHGVKGWAFDDGNDVWMGRTINETSRLGYETFKVVEGWSNPKSKLQINRQVIVDRGDRSGYSGIFSVEGKSCINRCFYVELIRGRKEETEVLWTSNSIVVFCGTSGTYGTGSWPDGADLNLMHI

SEQ ID NO: 14221 - protein, 469 aa, Artificial Sequence
  FLUAV/H3N2/A/Switzerland/8060/2017__EPI1154879 neuraminidase (NA)
MNPNQKIITIGSVSLTISTICFFMQIAILITTVTLHFKQYEFNSPPNNQVMLCEPTIIERNITEIVYLTNTTIEKEICPKPAEYRNWSKPQCGITGFAPFSKDNSIRLSAGGDIWVTREPYVSCDPDKCYQFALGQGTTLNNVHSNNTVRDRTPYRTLLMNELGVPFHLGTKQVCMAWSSSSCHDGKAWLHVCVTGDDKNATASFIYNGRLVDSVVSWSKDILRTQESECVCINGTCTVVMTDGNATGKADTKILFIEEGKIVHTSKLSGSAQHVEECSCYPRYPGVRCVCRDNWKGSNRPIVDINIKDHSIVSSYVCSGLVGDTPRKSDSSSSSHCLNPNNEEGGHGVKGWAFDDGNDVWMGRTINETSRLGYETFKVVEGWSNSKSKLQINRQVIVDRGDRSGYSGIFSVEGKSCINRCFYVELIRGRKEETEVLWTSNSIVVFCGTSGTYGTGSWPDGADLNLMHI

SEQ ID NO: 14222 - protein, 469 aa, Artificial Sequence
  FLUAV/H3N2/A/Switzerland/8060/2017(H3N2)-CDC-LV21A__EPI1364258 neuraminidase (NA)
MNPNQKIITIGSVSLTISTICFFMQIAILITTVTLHFKQYEFNSPPNNQVMLCEPTIIERNITEIVYLTNTTIEKEICPKPAEYRNWSKPQCGITGFAPFSKDNSIRLSAGGDIWVTREPYVSCDPDKCYQFALGQGTTLNNVHSNNTVRDRTPYRTLLMNELGVPFHLGTKQVCMAWSSSSCHDGKAWLHVCVTGDDKNATASFIYNGRLVDSVVSWSKDILRTQESECVCINGTCTVVMTDGNATGKADTKILFIEEGKIVHTSKLSGSAQHVEECSCYPRYPGVRCVCRDNWKGSNRPIVDINIKDHSIVSSYVCSRLVGDTPRKSDSSSSSHCLNPNNEEGGHGVKGWAFDDGNDVWMGRTINETSRLGYETFKVVEGWSNSKSKLQINRQVIVDRGDRSGYSGIFSVEGKSCINRCFYVELIRGRKEETEVLWTSNSIVVFCGTSGTYGTGSWPDGADLNLMHI

SEQ ID NO: 14223 - protein, 469 aa, Artificial Sequence
  FLUAV/H3N2/A/Hong Kong/2671/2019__EPI1543099 neuraminidase (NA)
MNPNQKIITIGSVSLTISTICFFMQIAILITTVTLHFKQYEFNSPPNNQVMLCEPTIIERNITEIVYLTNTTIEKEICPKPAEYRNWSKPQCGITGFAPFSKDNSIRLSAGGDIWVTREPYVSCDLDKCYQFALGQGTTLNNVHSNNTVRDRTPYRTLLMNELGVPFHLGTKQVCIAWSSSSCHDGKAWLHVCITGDDKNATASFIYNGRLVDSVVSWSNDILRTQESECVCINGTCTVVMTDGNATGKADTKILFIEEGKIVHTSKLSGSAQHVEECSCYPRYPGVRCVCRDNWKGSNRPIIDINIKDHSIVSSYVCSGLVGDTPRKSDSSSSSHCLNPNNEEGGHGVKGWAFDDGNDVWMGRTINETSRLGYETFKVVEGWSNPKSKLQINRQVIVDRGDRSGYSGIFSVEGKSCINRCFYVELIRGRKEETEVLWTSNSIVVFCGTSGTYGTGSWPDGADLNLMHT

SEQ ID NO: 14224 - protein, 469 aa, Artificial Sequence
  FLUAV/H3N2/A/Hong Kong/45/2019__EPI1691929 neuraminidase (NA)
MNPNQKIITIGSVSLTISTICFFMQIAILITTVTLHFKQYEFNSLPNNQVMLCEPTIIERNITEIVYLTNTTIEKEICPKPAEYRNWSKPQCGITGFAPFSKDNSIRLSAGGDIWVTREPYVSCDLDKCYQFALGQGTTLNNVHSNNTVRDRTPYRTLLMNELGVPFHLGTKQVCIAWSSSSCHDGKAWLHVCITGDDKNATASFIYNGRLVDSVVSWSNDILRTQESECVCINGTCTVVMTDGNATGKADTKILFIEEGKIVHTSKLSGSAQHVEECSCYPRYPGVRCVCRDNWKGSNRPIIDINIKDHSIVSSYVCSGLVGDTPRKSDSSSSSHCLNPNNEEGGHGVKGWAFDDGNDVWMGRTINETSRLGYETFKVVEGWSNPKSKLQINRQVIVDRGDRSGYSGIFSVEGKSCINRCFYVELIRGRKEETEVLWTSNSIVVFCGTSGTYGTGSWPDGADLNLMHI

SEQ ID NO: 14225 - protein, 469 aa, Artificial Sequence
  FLUAV/H3N2/A/South Australia/34/2019__EPI1387330 neuraminidase (NA)
MNPNQKIITIGSVSLTISTICFFMQIAILITTVTLHFKQYEFNSPPNNQVMLCEPTIIERNITEIVYLTNTTIEKEICPKPAEYRNWSKPQCGITGFAPFSKDNSIRLSAGGDIWVTREPYVSCDLDKCYQFALGQGTTLNNVHSNNTVRDRTPYRTLLMNELGVPFHLGTKQVCIAWSSSSCHDGKAWLHVCITGDDKNATASFIYNGRLVDSVVSWSNDILRTQESECVCINGTCTVVMTDGNATGKADTKILFIEEGKIVHTSKLSGSAQHVEECSCYPRYPGVRCVCRDNWKGSNRPIIDINIKDHSIVSRYVCSGLVGDTPRKSDSSSSSHCLNPNNEKGGHGVKGWAFDDGNDVWMGRTINETSRLGYETFKVVEGWSNPKSKLQINRQVIVDRGDRSGYSGIFSVEGKSCINRCFYVELIRGRKEETEVLWTSNSIVVFCGTSGTYGTGSWPDGADLNLMHI

SEQ ID NO: 14226 - protein, 465 aa, Artificial Sequence
  FLUAV/H7N9/A/chicken/Zhejiang/C483/2013(H7N9)__AGN69396.1 neuraminidase (NA)
MNPNQKILCTSATAIIIGAIAVLIGIANLGLNIGLHLKPGCNCSHSQPETTNTSQTIINNYYNETNITNIQMEERTSRNFNNLTKGLCTINSWHIYGKDNAVRIGESSDVLVTREPYVSCDPDECRFYALSQGTTIRGKHSNGTIHDRSQYRALISWPLSSPPTVYNSRVECIGWSSTSCHDGKSRMSICISGPNNNASAVVWYNRRPVAEINTWARNILRTQESECVCHNGVCPVVFTDGSATGPADTRIYYFKEGKILKWESLTGTAKHIEECSCYGERTGITCTCRDNWQGSNRPVIQIDPVAMTHTSQYICSPVLTDNPRPNDPNIGKCNDPYPGNNNNGVKGFSYLDGANTWLGRTISTASRSGYEMLKVPNALTDDRSKPIQGQTIVLNADWSGYSGSFMDYWAEGDCYRACFYVELIRGRPKEDKVWWTSNSIVSMCSSTEFLGQWNWPDGAKIEYFL

SEQ ID NO: 14227 - protein, 470 aa, Artificial Sequence
  FLUAV/H10N8/A/Jiangxi/IPB13/2013(H10N8)__AHK10769.1 neuraminidase (NA)
MNPNQKIITIGSVSLGLVILNILLHIVSITVTVLVLPGNGNNESCNETVIREYNETVRVEKVTQWHNTNVIEYIERPENDHFMNNTEALCDAKGFAPFSKDNGIRIGSRGHVFVIREPFVSCSPTECRTFFLTQGSLLNDKHSNGTVKDRSPYRTLMSVEIGQSPNVYQARFEAVAWSATACHDGKKWMTIGVTGPDAKAVAVVHYGGIPTDVINSWAGDILRTQESSCTCIQGECFWVMTDGPANRQAQYRAFKAKQGKIVGQAEISFNGGHIEECSCYPNEGKVECVCRDNWTGTNRPVLVISPDLSYRVGYLCAGLPSDTPRGEDSQFTGSCTSPMGNQGYGVKGFGFRQGNDVWMGRTISRTSRSGFEILKVRNGWVQNSKEQIKRQVVVDNLNWSGYSGSFTLPAELTKRNCLVPCFWVEMIRGNPEEKTIWTSSSSIVMCGVDHEIADWSWHDGAILPFDIDKM

SEQ ID NO: 14228 - protein, 466 aa, Artificial Sequence
  FLUBV/H0N0/B/Colorado/06/2017__EPI1001930 neuraminidase (NA)
MLPSTIQTLTLFLTSGGVLLSLYVSASLSYLLYSDILLKFSPTEITAPTMPLDCANASNVQAVNRSATKGVTLLLPEPEWTYPRLSCPGSTFQKALLISPHRFGETKGNSAPLIIREPFVACGPNECKHFALTHYAAQPGGYYNGTRGDRNKLRHLISVKLGKIPTVENSIFHMAAWSGSACHDGKEWTYIGVDGPDNNALLKVKYGEAYTDTYHSYANNILRTQESACNCIGGNCYLMITDGSASGVSECRFLKIREGRIIKEIFPTGRVKHTEECTCGFASNKTIECACRDNRYTAKRPFVKLNVETDTAEIRLMCTDTYLDTPRPNDGSITGPCESDGDKGSGGIKGGFVHQRMKSKIGRWYSRTMSQTERMGMGLYVKYGGDPWADSDALAFSGVMVSMKEPGWYSFGFEIKDKKCDVPCIGIEMVHDGGKETWHSAATAIYCLMGSGQLLWDTVTGVDMAL

SEQ ID NO: 14229 - protein, 466 aa, Artificial Sequence
  FLUBV/H0N0/B/Washington/02/2019__EPI1368872 neuraminidase (NA)
MLPSTIQTLTLFLTSGGVLLSLYVSASLSYLLYSDILLKFSPTEITAPTMPLDCANASNVQAVNRSATKGVTLLLPEPEWTYPRLSCPGSTFQKALLISPHRFGETKGNSAPLIIREPFVACGPNECKHFALTHYAAQPGGYYNGTRGDRNKLRHLISVKLGKIPTVENSIFHMAAWSGSACHDGKEWTYIGVDGPDNNALLKVKYGEAYTDTYHSYANNILRTQESACNCIGGNCYLMITDGSASGVSECRFLKIREGRIIKEIFPTGRVKHTEECTCGFASNKTIECACRDNRYTAKRPFVKLNVETDTAEIRLMCTDTYLDTPRPNDGSITGPCESDGDKGSGGIKGGFVHQRMKSKIGRWYSRTMSKTERMGMGLYVKYGGDPWADSDALTFSGVMVSMKEPGWYSFGFEIKDKKCDVPCIGIEMVHDGGKETWHSAATAIYCLMGSGQLLWDTVTGVDMAL

SEQ ID NO: 14230 - RNA, 1701 nt, Artificial Sequence
  FLUAV/H1N1/A/California/7/2009__ACP41953 hemagglutinin CDS gc (HA)
augaaggccauccuggugguccuccuguacaccuucgccaccgcgaacgccgacacgcugugcaucggcuaccacgccaacaacagcaccgacaccguggacaccgugcucgagaagaacgucacggugacccacuccgugaaccugcuggaggacaagcacaacgggaagcucugcaagcugcggggcgucgccccgcugcaccucgggaagugcaacaucgccggcuggauccuggggaacccggagugcgagagccuguccaccgcgagcuccuggagcuacaucguggagacccccuccagcgacaacggcacgugcuaccccggcgacuucaucgacuacgaggagcuccgcgagcagcuguccagcguguccagcuucgagcgguucgagaucuuccccaagaccuccagcuggccgaaccacgacuccaacaagggggucaccgccgccugcccccacgccggcgccaagagcuucuacaagaaccugaucuggcucgugaagaaggggaacuccuaccccaagcugagcaaguccuacaucaacgacaagggcaaggaggugcugguccucugggggauccaccaccccagcaccagcgcggaccagcagucccuguaccagaacgccgacgccuacguguucgugggcagcucccgcuacagcaagaaguucaagccggagaucgccauccggcccaagguccgcgaccaggagggccgcaugaacuacuacuggacccugguggagcccggggacaagaucaccuucgaggcgaccggcaaccucguggucccccgguacgccuucgccauggagcgcaacgccggguccggcaucaucaucagcgacacgccggugcacgacugcaacacgaccugccagacccccaagggcgccaucaacaccucccugcccuuccagaacauccaccccaucaccaucgggaagugcccgaaguacgucaagagcaccaagcugcggcucgcgaccggccugcgcaacauccccuccauccagagccgggggcuguucggcgccaucgccggguucaucgagggcggcuggacggggaugguggacggcugguacggguaccaccaccagaacgagcagggcagcggguacgccgccgaccucaaguccacgcagaacgcgaucgacgagaucaccaacaaggugaacagcgucaucgagaagaugaacacccaguucaccgccgugggcaaggaguucaaccaccuggagaagcggaucgagaaccugaacaagaaggucgacgacggcuuccucgacaucuggacguacaacgccgagcugcuggugcuccuggagaacgagcgcacccuggacuaccacgacuccaacgugaagaaccucuacgagaagguccggagccagcugaagaacaacgccaaggagaucgggaacggcugcuucgaguucuaccacaagugcgacaacacgugcauggaguccgugaagaacgggaccuacgacuaccccaaguacagcgaggaggccaagcugaaccgcgaggagaucgacggcgugaagcucgaguccacccggaucuaccagauccuggcgaucuacagcaccgucgccagcucccuggugcucguggucagccugggggccaucuccuucuggaugugcagcaacggcucccugcagugccgcaucugcaucuga

SEQ ID NO: 14231 - RNA, 1701 nt, Artificial Sequence
  FLUAV/H1N1/A/Michigan/45/2015__EPI662594 hemagglutinin CDS gc (HA)
augaaggccauccuggugguccuccuguacaccuucaccacggccaacgcggacacccugugcaucggcuaccacgccaacaacagcaccgacaccguggacacggugcucgagaagaacgucaccgugacccacuccgugaaccugcuggaggacaagcacaacgggaagcucugcaagcugcgcggcgucgcgccccugcaccucgggaagugcaacaucgccggcuggauccuggggaacccggagugcgagagccuguccaccgccagcuccuggagcuacaucguggagacguccaacagcgacaacgggaccugcuaccccggcgacuucaucaacuacgaggagcuccgggagcagcuguccagcguguccagcuucgagcgcuucgagaucuuccccaagaccuccagcuggcccaaccacgacuccaacaagggcgucaccgccgccugcccgcacgccggcgccaagagcuucuacaagaaccugaucuggcucgugaagaaggggaacuccuaccccaagcugaaccagagcuacaucaacgacaagggcaaggaggugcugguccucugggggauccaccaccccuccacgaccgcggaccagcagagccuguaccagaacgccgacgccuacguguucgugggcaccagccgguacuccaagaaguucaagcccgagaucgccacccgcccgaagguccgggaccaggagggccgcaugaacuacuacuggacgcugguggagcccggggacaagaucaccuucgaggccaccggcaaccucguggucccccgguacgcguucaccauggagcgcaacgccgggagcggcaucaucaucuccgacacgcccgugcacgacugcaacacgaccugccagaccccggagggcgccaucaacaccagccugcccuuccagaacauccaccccaucaccaucgggaagugccccaaguacgugaaguccaccaagcugcggcucgccaccggccugcgcaacgucccgagcauccagucccgggggcuguucggcgccaucgcgggguucaucgagggcggcuggacggggaugguggacggcugguacggguaccaccaccagaacgagcagggcagcggguacgccgccgaccucaaguccacccagaacgccaucgacaagaucaccaacaaggugaacagcgucaucgagaagaugaacacccaguucacggccgugggcaaggaguucaaccaccuggagaagcgcaucgagaaccugaacaagaaggucgacgacggcuuccucgacaucuggaccuacaacgcggagcugcuggugcuccuggagaacgagcggacccuggacuaccacgacuccaacgugaagaaccucuacgagaagguccgcaaccagcugaagaacaacgccaaggagaucgggaacggcugcuucgaguucuaccacaagugcgacaacacgugcauggagagcgugaagaacgggaccuacgacuaccccaaguacuccgaggaggccaagcugaaccgggagaagaucgacggcgugaagcucgagagcacccgcaucuaccagauccuggccaucuacuccaccgucgccagcucccuggugcucguggucagccugggggcgaucuccuucuggaugugcagcaacggcagccugcagugccggaucugcaucuga

SEQ ID NO: 14232 - RNA, 1701 nt, Artificial Sequence
  FLUAV/H1N1/A/Netherlands/602/2009__ACQ45338 hemagglutinin CDS gc (HA)
augaaggccauccuggugguccuccuguacaccuucgccaccgcgaacgccgacacgcugugcaucggcuaccacgccaacaacagcaccgacaccguggacaccgugcucgagaagaacgucacggugacccacuccgugaaccugcuggaggacaagcacaacgggaagcucugcaagcugcggggcgucgccccgcugcaccucgggaagugcaacaucgccggcuggauccuggggaacccggagugcgagagccuguccaccgcgagcuccuggagcuacaucguggagaccuccagcuccgacaacggcacgugcuaccccggcgacuucaucgacuacgaggagcuccgcgagcagcugagcuccgugagcuccuucgagcgguucgagaucuuccccaagaccagcuccuggcccaaccacgacagcaacaagggggucaccgccgccugcccgcacgccggcgcgaaguccuucuacaagaaccugaucuggcucgugaagaaggggaacagcuaccccaagcuguccaagagcuacaucaacgacaagggcaaggaggugcugguccucugggggauccaccaccccagcaccuccgccgaccagcagagccuguaccagaacgccgacgccuacguguucgugggcuccagccgcuacuccaagaaguucaagcccgagaucgccauccggccgaagguccgcgaccaggagggccggaugaacuacuacuggacgcugguggagcccggggacaagaucaccuucgaggcgaccggcaaccucguggucccccgcuacgccuucgccauggagcggaacgccgggagcggcaucaucaucuccgacacccccgugcacgacugcaacacgaccugccagaccccgaagggcgccaucaacaccagccugcccuuccagaacauccaccccaucacgaucgggaagugccccaaguacgugaaguccaccaagcugcgccucgcgaccggccugcggaacgucccgagcauccagucccgcgggcuguucggcgccaucgccggguucaucgagggcggcuggaccgggaugguggacggcugguacggguaccaccaccagaacgagcagggcagcggguacgccgccgaccucaaguccacgcagaacgcgaucgacgagaucaccaacaaggugaacagcgucaucgagaagaugaacacccaguucaccgccgugggcaaggaguucaaccaccuggagaagcggaucgagaaccugaacaagaaggucgacgacggcuuccucgacaucuggacguacaacgccgagcugcuggugcuccuggagaacgagcgcacccuggacuaccacgacuccaacgugaagaaccucuacgagaagguccggagccagcugaagaacaacgccaaggagaucgggaacggcugcuucgaguucuaccacaagugcgacaacaccugcauggaguccgugaagaacgggaccuacgacuaccccaaguacagcgaggaggccaagcugaaccgcgaggagaucgacggcgugaagcucgaguccacgcggaucuaccagauccuggcgaucuacagcaccgucgccagcucccuggugcucguggucagccugggggccaucuccuucuggaugugcagcaacggcucccugcagugccgcaucugcaucuga

SEQ ID NO: 14233 - RNA, 1701 nt, Artificial Sequence
  FLUAV/H3N2/A/Hong Kong/4801/2014__EPI643118 hemagglutinin CDS gc (HA)
augaagaccaucaucgcccugagcuacauccucugccugguguucgcccagaagauccccggcaacgacaacuccaccgcgacgcugugccucgggcaccacgccgucccgaacggcaccaucgugaagaccaucaccaacgaccgcaucgaggugacgaacgccaccgagcugguccagaacagcuccaucggggagaucugcgacagcccccaccagauccuggacggcgagaacugcacccucaucgacgcccugcugggggacccccagugcgacggcuuccagaacaagaagugggaccucuucguggagcgguccaaggccuacagcaacugcuaccccuacgacgugccggacuacgcgucccugcgcagccuggucgccuccagcggcacccucgaguucaacaacgaguccuucaacuggacgggggugacccagaacggcaccagcuccgccugcauccggcgcagcuccagcuccuucuucagccggcugaacuggcugacccaccucaacuacaaguaccccgcccugaacgugacgaugcccaacaacgagcaguucgacaagcuguacaucuggggcguccaccaccccgggaccgacaaggaccagaucuucccguacgcgcaguccagcgggcgcaucaucgugagcaccaagcggucccagcaggccgugauccccaacaucggcagccgcccccggauccgcgacaucccgucccggaucagcaucuacuggaccaucgucaagccgggcgacauccuccugaucaacuccacggggaaccugaucgccccgcgcggcuacuucaagcuccggagcgggaaguccagcaucaugcgcuccgacgcccccaucggcaagugcaagagcgagugcaucacccccaacggcuccaucccgaacgacaagcccuuccagaacgugaaccggaucaccuacggggccugcccccgcuacgugaagcacagcacccugaagcuggcgacgggcaugcggaacguccccgagaagcagacccgcgggaucuucggcgccaucgccggguucaucgagaacggcugggagggcaugguggacgggugguacggcuuccggcaccagaacuccgaggggcgcggccaggccgccgaccucaagagcacccaggcggccaucgaccagaucaacgggaagcugaaccggcugaucggcaagaccaacgagaaguuccaccagaucgagaaggaguucuccgagguggagggccgcauccaggaccucgagaaguacgucgaggacacgaagaucgaccuguggagcuacaacgccgagcugcucguggcccuggagaaccagcacaccaucgaccugaccgacuccgagaugaacaagcucuucgagaagaccaagaagcagcugcgcgagaacgccgaggacauggggaacggcugcuucaagaucuaccacaagugcgacaacgcgugcaucgggagcauccggaacggcacguacgaccacaacguguaccgcgacgaggcccugaacaaccgguuccagaucaagggggucgagcucaaguccggcuacaaggacuggauccuguggaucagcuucgccaucagcugcuuccugcucugcguggcccugcugggcuucaucaugugggccugccagaaggggaacauccgcugcaacaucugcaucuga

SEQ ID NO: 14234 - RNA, 1758 nt, Artificial Sequence
  FLUBV/H0N0/B/Brisbane/60/2008__FJ766840 hemagglutinin CDS gc (HA)
augaaggccaucaucgugcugcucauggucgugaccagcaacgccgaccggaucugcaccggcaucacguccagcaacuccccgcacguggucaagaccgcgacccagggggaggugaacgugaccggcgucaucccgcugacgaccacccccaccaagagccacuucgccaaccugaaagggacggagacccgcggcaagcucugccccaagugccugaacugcaccgaccuggacguggcccucgggcggcccaagugcaccggcaaaaucccguccgcccgcgugagcauccugcacgagguccggcccgugacguccggcugcuuccccaucaugcacgaccgcaccaagauccggcagcugcccaaccuccugcgcggguacgagcacauccggcugagcacccacaacgugaucaacgccgagaacgcgccgggcgggcccuacaagaucggcaccuccgggagcugccccaacaucacgaacggcaacggcuucuucgccaccauggccugggccguccccaagaacgacaagaacaaaaccgcgaccaacccgcucacgaucgaggugcccuacaucugcaccgagggggaggaccagaucaccguguggggcuuccacuccgacaacgagacccagauggccaagcuguacggggacagcaagccccagaaguucacguccagcgccaacggcgucaccacccacuacgugucccagaucggcggguuccccaaccagaccgaggacggcgggcugccgcagagcggccgcaucguggucgacuacauggugcagaaauccgggaagacgggcaccaucaccuaccagcggggcauccuccugccccagaagguguggugcgccagcgggcgcuccaaggucaucaaaggcagccugccccucaucggggaggccgacugccugcacgagaaguacggcgggcugaacaagagcaagcccuacuacaccggcgagcacgcgaaagccaucggcaacugcccgaucugggugaagacgccccucaagcuggccaacgggaccaaguaccggccgcccgccaaacugcucaaggagcgcggcuucuucggggccaucgcgggcuuccuggagggcgggugggagggcaugaucgccggguggcacggcuacaccucccacggggcccacggcguggccgucgccgcggaccucaagagcacccaggaggccaucaacaaaaucacgaagaaccugaacucccugagcgagcuggaggugaagaaccuccagcggcuguccggcgccauggacgagcugcacaacgagauccucgagcuggacgagaaggucgacgaccugcgcgccgacaccaucagcucccagaucgagcucgccgugcugcugagcaacgaggggaucaucaacuccgaggacgagcaccuccuggcgcuggagcggaaacucaagaagaugcugggccccagcgccguggagaucgggaacggcugcuucgagaccaagcacaagugcaaccagaccugccuggaccgcaucgccgccgggaccuucgacgcgggcgaguucucccuccccacguucgacagccugaacaucaccgccgccucccugaacgacgacggccuggacaaccacaccauccuccuguacuacagcaccgccgccuccagccuggcggucacgcucaugaucgccaucuucgugguguacauggucucccgggacaacgugagcugcuccaucugccuguga

SEQ ID NO: 14235 - RNA, 1755 nt, Artificial Sequence
  FLUBV/H0N0/B/Phuket/3073/2013__EPI540671 hemagglutinin CDS gc (HA)
augaaggccaucaucgugcugcucauggucgugaccagcaacgccgaccgcaucugcaccggcaucacguccagcaacuccccgcacguggucaagaccgcgacccagggggaggugaacgugaccggcgucaucccccugacgaccacccccaccaagagcuacuucgccaaccugaaggggacgcggacccgcggcaaacucugccccgacugccugaacugcaccgaccuggacguggcccucgggcggcccaugugcgugggcaccacgccguccgccaaggccagcauccugcacgagguccgccccgugaccuccggcugcuuccccaucaugcacgaccggaccaagauccgccagcugcccaaccuccugcggggguacgagaagauccgccugagcacccagaacgugaucgacgcggagaaagccccgggcgggcccuaccggcucggcacguccgggagcugccccaacgccaccuccaagaucggcuucuucgccaccauggcgugggccguccccaaggacaacuacaagaacgccaccaacccgcugacgguggaggugcccuacaucugcaccgagggcgaggaccagaucaccgucuggggguuccacagcgacaacaagacccagaugaaaucccuguacggcgacagcaacccccagaaguucacguccagcgccaacggggugaccacccacuacgugucccagaucggcgacuuccccgaccagaccgaggacggcgggcucccgcagagcggccgcaucgucguggacuacaugaugcagaagcccgggaagacgggcaccaucguguaccagcggggcguccugcugccccagaaaguguggugcgccuccgggcgcagcaaggugaucaagggcagccucccccugaucggggaggcggacugccugcacgaggaguacggcgggcucaacaaguccaaaccguacuacaccggcaagcacgccaaggccaucgggaacugccccaucugggucaagaccccgcugaaacuggccaacggcacgaaauaccggcccccggccaagcuccugaaggagcgcggcuucuucggggcgaucgccggcuuccuggagggcgggugggaggggaugaucgccggcuggcacggcuacaccagccacggggcccacggcguggccgucgcggccgaccucaaguccacccaggaggccaucaacaaaaucaccaagaaccugaacagccuguccgagcucgaggugaagaaccugcagcggcugagcggggccauggacgagcuccacaacgagauccuggagcuggacgagaagguggacgaccuccgcgccgacacgaucuccagccagaucgagcuggcgguccugcucuccaacgagggcaucaucaacagcgaggacgagcaccuccuggcccucgagcggaaacugaagaagaugcugggccccuccgccguggacaucgggaacggcugcuucgagaccaagcacaagugcaaccagaccugccucgaccgcaucgccgcggggaccuucaacgccggcgaguucagccugcccaccuucgacucccugaacaucacggccgccagccugaacgacgacgggcucgacaaccacaccauccugcuguacuacuccaccgccgcgagcucccucgccgugacccugaugcuggccaucuucaucgucuacauggugagccgggacaacguguccugcagcaucugccucuga

SEQ ID NO: 14236 - RNA, 1695 nt, Artificial Sequence
  FLUAV/H1N1/A/Brisbane/02/2018__EPI1212834 hemagglutinin CDS gc (HA)
augaaggccauccuggugguccuccuguacaccuucaccacggccaacgcggacacccugugcaucggcuaccacgccaacaacagcaccgacaccguggacacggugcucgagaagaacgucaccgugacccacuccgugaaccugcuggaggacaagcacaacgggaagcucugcaagcugggcggggucgcgccccugcaccucggcaagugcaacaucgccggguggauccugggcaacccggagugcgagagccuguccaccgcccgcagcugguccuacaucguggagacgagcaacuccgacaacgggaccugcuaccccggcgacuucaucaacuacgaggagcuccgggagcagcugagcuccgugagcuccuucgagcgcuucgagaucuuccccaagaccagcuccuggcccaaccacgacagcaacaagggcgucaccgccgccugcccgcacgccggggccaaguccuucuacaagaaccugaucuggcucgugaagaagggcaacagcuaccccaagcugaaccagacguacaucaacgacaaggggaaggaggugcugguccucuggggcauccaccacccgcccaccaccgcggaccagcagucccuguaccagaacgccgacgccuacguguucgugggcaccagccgguacuccaagaaguucaagcccgagaucgccacgcgccccaagguccgggaccgcgaggggcggaugaacuacuacuggacccugguggagcccggcgacaagaucaccuucgaggccaccgggaaccucguggucccccgcuacgcguucacgauggagcggaacgccggcagcggcaucaucaucagcgacaccccggugcacgacugcaacacgaccugccagaccgccgagggggccaucaacaccucccugcccuuccagaacgugcaccccgucaccaucggcaagugccccaaguacgucaagagcaccaagcugcgccucgccacggggcugcggaacgugccguccauccagagccgcggccuguucggggcgaucgccggcuucaucgagggcggguggaccggcaugguggacgggugguacggcuaccaccaccagaacgagcagggguccggcuacgccgccgaccucaagagcaacgccaucgacaagaucaccaacaaggugaacuccgucaucgagaagaugaacacccaguucacggcggugggcaaggaguucaaccaccuggagaagcggaucgagaaccugaacaagaagguggacgacggguuccucgacaucuggaccuacaacgccgagcugcugguccuccuggagaacgagcgcacccuggacuaccacgacagcaacgugaagaaccucuacgagaaggugcggaaccagcugaagaacaacgccaaggagaucggcaacgggugcuucgaguucuaccacaagugcgacaacacgugcauggaguccgucaagaacggcaccuacgacuaccccaaguacagcgaggaggccaagcugaaccgcgagaagaucgacggggugaagcucgaguccacccggaucuaccagauccuggccaucuacagcaccguggcguccagccugguccucguggugucccugggcgccaucagcuucuggaugugcuccaacggcagccugcagugccgcaucugcaucuga

SEQ ID NO: 14237 - RNA, 1695 nt, Artificial Sequence
  FLUAV/H1N1/A/Brisbane/02/2018__EPI1671767 hemagglutinin CDS gc (HA)
augaaggccauccuggugguccuccuguacaccuucaccacggccaacgcggacacccugugcaucggcuaccacgccaacaacagcaccgacaccguggacacggugcucgagaagaacgucaccgugacccacuccgugaaccugcuggaggacaagcacaacgggaagcucugcaagcugggcggggucgcgccccugcaccucggcaagugcaacaucgccggguggauccugggcaacccggagugcgagagccuguccaccgcccgcagcugguccuacaucguggagacgagcaacuccgacaacgggaccugcuaccccggcgacuucaucaacuacgaggagcuccgggagcagcugagcuccgugagcuccuucgagcgcuucgagaucuuccccaagaccagcuccuggcccaaccacgacagcaacaagggcgucaccgccgccugcccgcacgccggggccaaguccuucuacaagaaccugaucuggcucgugaagaagggcaacagcuaccccaagcugaaccagacguacaucaacgacaaggggaaggaggugcugguccucuggggcauccaccacccgcccaccaccgcggaccagcagucccuguaccagaacgccgacgccuacguguucgugggcaccagccgguacuccaagaaguucaagcccgagaucgccacgcgccccaagguccgggaccaggaggggcgcaugaacuacuacuggacccugguggagcccggcgacaagaucaccuucgaggccaccgggaaccucguggucccccgguacgcguucacgauggagcgcaacgccggcagcggcaucaucaucagcgacaccccggugcacgacugcaacacgaccugccagaccgccgagggggccaucaacaccucccugcccuuccagaacgugcaccccgucaccaucggcaagugccccaaguacgucaagagcaccaagcugcggcucgccacggggcugcgcaacgugccguccauccagagccggggccuguucggggcgaucgccggcuucaucgagggcggguggaccggcaugguggacgggugguacggcuaccaccaccagaacgagcagggguccggcuacgccgccgaccucaagagcaacgccaucgacaagaucaccaacaaggugaacuccgucaucgagaagaugaacacccaguucacggcggugggcaaggaguucaaccaccuggagaagcgcaucgagaaccugaacaagaagguggacgacggguuccucgacaucuggaccuacaacgccgagcugcugguccuccuggagaacgagcggacccuggacuaccacgacagcaacgugaagaaccucuacgagaaggugcgcaaccagcugaagaacaacgccaaggagaucggcaacgggugcuucgaguucuaccacaagugcgacaacacgugcauggaguccgucaagaacggcaccuacgacuaccccaaguacagcgaggaggccaagcugaaccgggagaagaucgacggggugaagcucgaguccacccgcaucuaccagauccuggccaucuacagcaccguggcguccagccugguccucguggugucccugggcgccaucagcuucuggaugugcuccaacggcagccugcagugccggaucugcaucuga

SEQ ID NO: 14238 - RNA, 1695 nt, Artificial Sequence
  FLUAV/H1N1/A/Guangdong-Maonan/SWL1536/2019__EPI1542570 hemagglutinin CDS gc (HA)
augaaggccauccuggugguccuccuguacaccuucaccacggccaacgcggacacccugugcaucggcuaccacgccaacaacagcaccgacaccguggacacggugcucgagaagaacgucaccgugacccacuccgugaaccugcuggaggacaagcacaacgggaagcucugcaagcugcgcggcgucgcgccccugcaccucgggaagugcaacaucgccggcuggauccuggggaacccggagugcgagagccuguccaccgcccggagcugguccuacaucguggagacgagcaacuccgacaacgggaccugcuaccccggcgacuucaucaacuacgaggagcuccgcgagcagcugagcuccgugagcuccuucgagcgguucgagaucuuccccaagaccagcuccuggcccaaccacgacagcgacaagggcgucaccgccgccugcccgcacgccggcgccaaguccuucuacaagaaccugaucuggcucgugaagaaggggaacagcuaccccaagcugaaccagacguacaucaacgacaagggcaaggaggugcugguccucugggggauccaccacccgcccaccaucgcggcccaggagucccuguaccagaacgccgacgccuacguguucgugggcaccagccgcuacuccaagaaguucaagcccgagaucgccacccggcccaagguccgcgaccaggagggccggaugaacuacuacuggacgcugguggagcccggggacaagaucaccuucgaggcgaccggcaaccucguggucccccgcuacgccuucaccauggagcgggacgccgggagcggcaucaucaucagcgacacgccggugcacgacugcaacacgaccugccagacccccgagggcgccaucaacaccucccugcccuuccagaacgugcaccccaucaccaucgggaagugcccgaaguacgucaagagcaccaagcugcgccucgccaccggccugcggaacgugcccuccauccagagccgcgggcuguucggcgcgaucgccggguucaucgagggcggcuggacggggaugguggacggcugguacggguaccaccaccagaacgagcagggcuccggguacgccgccgaccucaagagcaacgccaucgacaagaucaccaacaaggucaacuccgugaucgagaagaugaacacccaguucaccgcggucggcaaggaguucaaccaccuggagaagcggaucgagaaccugaacaagaagguggacgacggcuuccucgacaucuggacguacaacgccgagcugcuggugcuccuggagaacgagcgcacccuggacuaccacgacagcaacgucaagaaccucuacgagaaggugcggaaccagcugaagaacaacgccaaggagaucgggaacggcugcuucgaguucuaccacaagugcgacaacacgugcauggaguccgugaagaacgggaccuacgacuaccccaaguacagcgaggaggccaagcugaaccgcgagaagaucgacggcgucaagcucgaguccacccggaucuaccagauccuggccaucuacagcaccguggcguccagccuggugcucgucgugucccugggggccaucagcuucuggaugugcuccaacggcagccugcagugccgcaucugcaucuga

SEQ ID NO: 14239 - RNA, 1695 nt, Artificial Sequence
  FLUAV/H1N1/A/Guangdong-Maonan/SWL1536/2019__EPI1590725 hemagglutinin CDS gc (HA)
augaaggccauccuggugguccuccuguacaccuucaccacggccaacgcggacacccugugcaucggcuaccacgccaacaacagcaccgacaccguggacacggugcucgagaagaacgucaccgugacccacuccgugaaccugcuggaggacaagcacaacgggaagcucugcaagcugcgcggcgucgcgccccugcaccucgggaagugcaacaucgccggcuggauccuggggaacccggagugcgagagccuguccaccgcccggagcugguccuacaucguggagacgagcaacuccgacaacgggaccugcuaccccggcgacuucaucaacuacgaggagcuccgcgagcagcugagcuccgugagcuccuucgagcgguucgagaucuuccccaagaccagcuccuggcccaaccacgacagcgacaagggcgucaccgccgccugcccgcacgccggcgccaaguccuucuacaagaaccugaucuggcucgugaagaaggggaacagcuaccccaagcugaaccagacguacaucaacgacaagggcaaggaggugcugguccucugggggauccaccacccgcccaccaucgcggugcaggagucccuguaccagaacgccgacgccuacguguucgucggcaccagccgcuacuccaagaaguucaagcccgagaucgccacccggcccaaggugcgcgaccaggagggccggaugaacuacuacuggacgcugguggagcccggggacaagaucaccuucgaggccaccggcaaccucgucgugccccgcuacgcguucaccauggagcgggacgccgggagcggcaucaucaucagcgacacgccggugcacgacugcaacacgaccugccagacccccgagggcgccaucaacaccucccugcccuuccagaacguccaccccaucaccaucgggaagugcccgaaguacgucaagagcaccaagcugcgccucgccaccggccugcggaacgugcccuccauccagagccgcgggcuguucggcgccaucgcgggguucaucgagggcggcuggacggggaugguggacggcugguacggguaccaccaccagaacgagcagggcuccggguacgccgccgaccucaagagcaacgccaucgacaagaucaccaacaaggugaacuccgucaucgagaagaugaacacccaguucaccgccgugggcaaggaguucaaccaccuggagaagcggaucgagaaccugaacaagaagguggacgacggcuuccucgacaucuggacguacaacgcggagcugcugguccuccuggagaacgagcgcacccuggacuaccacgacagcaacgugaagaaccucuacgagaaggugcggaaccagcugaagaacaacgccaaggagaucgggaacggcugcuucgaguucuaccacaagugcgacaacacgugcauggaguccgucaagaacgggaccuacgacuaccccaaguacagcgaggaggccaagcugaaccgcgagaagaucgacggcgugaagcucgaguccacccggaucuaccagauccuggccaucuacagcaccguggccuccagccugguccucguggugucccugggggcgaucagcuucuggaugugcuccaacggcagccugcagugccgcaucugcaucuga

SEQ ID NO: 14240 - RNA, 1701 nt, Artificial Sequence
  FLUAV/H3N2/A/Singapore/INFIMH-16-0019/2016__EPI1106227 hemagglutinin CDS gc (HA)
augaagaccaucaucgcccugagcuacauccucugccugguguucgcccagaagauccccggcaacgacaacuccaccgcgacgcugugccucgggcaccacgccgucccgaacggcaccaucgugaagaccaucaccaacgaccgcaucgaggugacgaacgccaccgagcugguccagaacagcuccaucggggagaucugcgacagcccccaccagauccuggacggcgagaacugcacccucaucgacgcccugcugggggacccccagugcgacggcuuccagaacaagaagugggaccucuucguggagcgguccaaggccuacagcaacugcuaccccuacgacgugccggacuacgcgucccugcgcagccuggucgccuccagcggcacccucgaguucaagaacgaguccuucaacuggacgggggugacccagaacggcaccagcuccgccugcauccgggggagcuccagcuccuucuucagccgccugaacuggcugacccaccucaacuacacguaccccgcccugaacgugaccaugcccaacaaggagcaguucgacaagcuguacaucuggggcguccaccaccccgggaccgacaaggaccagaucuuccucuacgcgcaguccagcggccggaucaccgugagcacgaagcgcucccagcaggccgugaucccgaacaucggcagccggccccgcauccgggacauccccucccgcaucagcaucuacuggaccaucgucaagcccggggacauccugcugaucaacuccaccggcaaccucaucgccccgcggggguacuucaagauccgcagcggcaaguccagcaucaugcgguccgacgcccccaucggcaagugcaagagcgagugcaucacccccaacggguccauccccaacgacaagccguuccagaacgugaaccgcaucacguacggcgccugcccccgguacgugaagcacagcacccugaagcuggcgaccgggaugcgcaacguccccgagaagcagacccggggcaucuucggggccaucgccggcuucaucgagaacggcugggaggggaugguggacggcugguacggguuccgccaccagaacuccgagggccgggggcaggccgccgaccucaagagcacgcaggcggccaucgaccagaucaacggcaagcugaaccgccugaucggcaagaccaacgagaaguuccaccagaucgagaaggaguucuccgagguggaggggcggguccaggaccucgagaaguacguggaggacaccaagaucgaccuguggagcuacaacgccgagcugcucguggcccuggagaaccagcacaccaucgaccugacggacuccgagaugaacaagcuguucgagaagaccaagaagcagcuccgcgagaacgccgaggacaugggcaacgggugcuucaagaucuaccacaagugcgacaacgcgugcaucgagagcauccgcaacgagaccuacgaccacaacgucuaccgggacgaggcccugaacaaccgcuuccagaucaagggcguggagcucaaguccggguacaaggacuggauccuguggaucagcuucgccaucagcugcuuccugcucugcguggcccugcugggcuucaucaugugggccugccagaagggcaacauccggugcaacaucugcaucuga

SEQ ID NO: 14241 - RNA, 1701 nt, Artificial Sequence
  FLUAV/H3N2/A/Singapore/INFIMH-16-0019/2016__EPI1341068 hemagglutinin CDS gc (HA)
augaagaccaucaucgcccugagcuacauccucugccugguguucgcccagaagauccccggcaacgacaacuccaccgcgacgcugugccucgggcaccacgccgucccgaacggcaccaucgugaagaccaucaccaacgaccgcaucgaggugacgaacgccaccgagcugguccagaacagcuccaucggggagaucugcgacagcccccaccagauccuggacggcgagaacugcacccucaucgacgcccugcugggggacccccagugcgacggcuuccagaacaagaagugggaccucuucguggagcgguccaaggccuacagcaacugcuaccccuacgacgugccggacuacgcgucccugcgcagccuggucgccuccagcggcacccucgaguucaagaacgaguccuucaacuggacgggggugacccagaacggcaccagcuccgccugcauccgggggagcuccagcuccuucuucagccgccugaacuggcugacccaccucaacuacaaguaccccgcccugaacgugacgaugcccaacaaggagcaguucgacaagcuguacaucuggggcguccaccaccccgggaccgacaaggaccagaucuucccguacgcgcaguccagcggccggaucaccgugagcaccaagcgcucccagcaggccgugauccccaacaucggcagccggccccgcauccgggggauccccucccgcaucagcaucuacuggacgaucgucaagccgggcgacauccuccugaucaacuccaccgggaaccugaucgcgccccggggcuacuucaagauccgcagcggcaaguccagcaucaugcgguccgacgcccccaucgggaagugcaagagcgagugcaucacccccaacggcuccaucccgaacgacaagcccuuccagaacgugaaccgcaucaccuacggggccugcccccgguacgugaagcacagcacgcucaagcuggccaccggcaugcgcaacguccccgagaagcagacccgggggaucuucggcgccaucgccggcuucaucgagaacgggugggagggcaugguggacgggugguacggcuuccgccaccagaacuccgaggggcggggccaggccgccgaccucaagagcacccaggcggccaucgaccagaucaacggcaagcugaaccgccugaucgggaagacgaacgagaaguuccaccagaucgagaaggaguucuccgagguggagggccggguccaggaccuggagaaguacguggaggacaccaagaucgaccucuggagcuacaacgccgagcugcugguggcccucgagaaccagcacaccaucgaccugaccgacuccgagaugaacaagcuguucgagaagacgaagaagcagcuccgcgagaacgccgaggacauggggaacggcugcuucaagaucuaccacaagugcgacaacgcgugcaucgagagcauccgcaacgagaccuacgaccacaacgucuaccgggacgaggcccugaacaaccgcuuccagaucaaggggguggagcugaaguccggcuacaaggacuggauccucuggaucagcuucgccaucagcugcuuccugcugugcguggcccuccugggcuucaucaugugggccugccagaaggggaacauccggugcaacaucugcaucuga

SEQ ID NO: 14242 - RNA, 1701 nt, Artificial Sequence
  FLUAV/H3N2/A/Singapore/INFIMH-16-0019/2016 NYMC-X-307__EPI1259099 hemagglutinin CDS gc (HA)
augaagaccaucaucgcccugagcuacauccucugccugguguucgcccagaagauccccggcaacgacaacuccaccgcgacgcugugccucgggcaccacgccgucccgaacggcaccaucgugaagaccaucaccaacgaccgcaucgaggugacgaacgccaccgagcugguccagaacagcuccaucggggagaucugcgacagcccccaccagauccuggacggcgagaacugcacccucaucgacgcccugcugggggacccccagugcgacggcuuccagaacaagaagugggaccucuucguggagcgguccaaggccuacagcaacugcuaccccuacgacgugccggacuacgcgucccugcgcagccuggucgccuccagcggcacccucgaguucaagaacgaguccuucaacuggacgggggugacccagaacggcaccagcuccgccugcauccgggggagcuccagcuccuucuucagccgccugaacuggcugacccaccucaacuacaaguaccccgcccugaacgugacgaugcccaacaaggagcaguucgacaagcuguacaucuggggcguccaccaccccgggaccgacaaggaccagaucuucccguacgcgcaguccagcggccggaucaccgugagcaccaagcgcucccagcaggccgugauccccaacaucggcagccggccccgcauccgggggauccccucccgcaucagcaucuacuggacgaucgucaagccgggcgacauccuccugaucaacuccaccgggaaccugaucgcgccccggggcuacuucaagauccgcagcggcaaguccagcaucaugcgguccgacgcccccaucgggaagugcaagagcgagugcaucacccccaacggcuccaucccgaacgacaagcccuuccagaacgugaacaagaucaccuacggggccugcccccgcuacgugaagcacagcacgcucaagcuggccaccggcaugcggaacguccccgagaagcagacccgcgggaucuucggcgccaucgccggcuucaucgagaacgggugggagggcaugguggacgggugguacggcuuccggcaccagaacuccgaggggcgcggccaggccgccgaccucaagagcacccaggcggccaucgaccagaucaacggcaagcugaaccggcugaucgggaagacgaacgagaaguuccaccagaucgagaaggaguucuccgagguggagggccgcguccaggaccuggagaaguacguggaggacaccaagaucgaccucuggagcuacaacgccgagcugcugguggcccucgagaaccagcacaccaucgaccugaccgacuccgagaugaacaagcuguucgagaagacgaagaagcagcuccgggagaacgccgaggacauggggaacggcugcuucaagaucuaccacaagugcgacaacgcgugcaucgagagcauccgcaacgagaccuacgaccacaacgucuaccgcgacgaggcccugaacaaccgguuccagaucaaggggguggagcugaaguccggcuacaaggacuggauccucuggaucagcuucgccaucagcugcuuccugcugugcguggcccuccugggcuucaucaugugggccugccagaaggggaacauccgcugcaacaucugcaucuga

SEQ ID NO: 14243 - RNA, 1701 nt, Artificial Sequence
  FLUAV/H3N2/A/Singapore/INFIMH-16-0019/2016-CDC-LV18A__EPI1583318 hemagglutinin CDS gc (HA)
augaagaccaucaucgcccugagcuacauccucugccugguguucgcccagaagauccccggcaacgacaacuccaccgcgacgcugugccucgggcaccacgccgucccgaacggcaccaucgugaagaccaucaccaacgaccgcaucgaggugacgaacgccaccgagcugguccagaacagcuccaucggggagaucugcgacagcccccaccagauccuggacggcgagaacugcacccucaucgacgcccugcugggggacccccagugcgacggcuuccagaacaagaagugggaccucuucguggagcgguccaaggccuacagcaacugcuaccccuacgacgugccggacuacgcgucccugcgcagccuggucgccuccagcggcacccucgaguucaagaacgaguccuucaacuggacgggggugacccagaacggcaccagcuccgccugcauccgggggagcuccagcuccuucuucagccgccugaacuggcugacccaccucaacuacaaguaccccgcccugaacgugacgaugcccaacaaggagcaguucgacaagcuguacaucuggggcguccaccaccccgggaccgacaaggaccagaucuucccguacgcgcaguccagcggccggaucaucgugagcaccaagcgcucccagcaggccgugauccccaacaucggcagccggccccgcauccgggacauccccucccgcaucagcaucuacuggaccaucgucaagccgggggacauccuccugaucaacuccacgggcaaccugaucgcgccccggggguacuucaagauccgcagcggcaaguccagcaucaugcgguccgacgcccccaucggcaagugcaagagcgagugcaucacccccaacggguccaucccgaacgacaagcccuuccagaacgugaaccgcaucaccuacggcgccugcccccgguacgugaagcacagcacccucaagcuggccacggggaugcgcaacguccccgagaagcagacccggggcaucuucggggccaucgccggcuucaucgagaacggcugggaggggaugguggacggcugguacggguuccgccaccagaacuccgagggccgggggcaggccgccgaccucaagagcacccaggcggccaucgaccagaucaacggcaagcugaaccgccugaucggcaagaccaacgagaaguuccaccagaucgagaaggaguucuccgagguggaggggcggguccaggaccuggagaaguacguggaggacacgaagaucgaccucuggagcuacaacgccgagcugcugguggcccucgagaaccagcacaccaucgaccugaccgacuccgagaugaacaagcuguucgagaagaccaagaagcagcuccgcgagaacgccgaggacaugggcaacgggugcuucaagaucuaccacaagugcgacaacgcgugcaucgagagcauccgcaacgagacguacgaccacaacgucuaccgggacgaggcccugaacaaccgcuuccagaucaagggcguggagcugaaguccggguacaaggacuggauccucuggaucagcuucgccaucagcugcuuccugcugugcguggcccuccugggcuucaucaugugggccugccagaagggcaacauccggugcaacaucugcaucuga

SEQ ID NO: 14244 - RNA, 1701 nt, Artificial Sequence
  FLUAV/H3N2/A/Kansas/14/2017__EPI1146345 hemagglutinin CDS gc (HA)
augaagaccaucaucgcccugagcugcauccucugccugguguucgcccagaagauccccggcaacgacaacuccaccgcgacgcugugccucgggcaccacgccgucccgaacggcaccaucgugaagaccaucaccaacgaccgcaucgaggugacgaacgccaccgagcugguccagaacagcuccaucggggagaucugcgacagcccccaccagauccuggacggcgagaacugcacccucaucgacgcccugcugggggacccccagugcgacggcuuccagaacaagaagugggaccucuucguggagcggaacaaggccuacuccaacugcuaccccuacgacgugccggacuacgcgagccugcgcucccuggucgccagcuccggcacccucgaguucaacaacgagagcuucaacugggccggggugacgcagaacggcaccuccagcuccugcauccgggggagcaaguccagcuucuucucccgccugaacuggcugacccaccucaacagcaaguaccccgcccugaacgugaccaugcccaacaacgagcaguucgacaagcuguacaucuggggcguccaccaccccgggacggacaaggaccagaucucccucuacgcgcagagcagcggccggaucaccguguccaccaagcgcagccagcaggccgugaucccgaacaucggcucccggccccgcauccgggacauccccagccgcaucuccaucuacuggaccaucgucaagcccggggacauccugcugaucaacagcacgggcaaccucaucgccccgcggggguacuucaagauccgcuccggcaagagcuccaucaugcggagcgacgcccccaucggcaagugcaaguccgagugcaucacccccaacgggagcauccccaacgacaagccguuccagaacgugaaccgcaucaccuacggcgccugcccccgguacgugaagcaguccacccugaagcuggcgacggggaugcgcaacguccccgagcggcagacccgcggcaucuucggggccaucgccggcuucaucgagaacggcugggaggggaugguggacggcugguacggguuccggcaccagaacagcgagggccgcgggcaggccgccgaccucaaguccacccaggcggccaucgaccagaucaacggcaagcugaaccggcugaucggcaagaccaacgagaaguuccaccagaucgagaaggaguucagcgagguggaggggcgcauccaggaccucgagaaguacgucgaggacacgaagaucgaccugugguccuacaacgccgagcugcucguggcccuggagaaccagcacaccaucgaccugaccgacagcgagaugaacaagcuguucgagaagaccaagaagcagcuccgcgagaacgccgaggacaugggcaacgggugcuucaagaucuaccacaagugcgacaacgcgugcaugggcuccauccggaacgggacguacgaccacaacguguaccgcgacgaggcccugaacaaccgguuccagaucaagggcgucgagcucaagagcggcuacaaggacuggauccuguggaucagcuucgccaucuccugcuuccugcucugcguggcccugcugggguucaucaugugggccugccagaagggcaacauccgcugcaacaucugcaucuga

SEQ ID NO: 14245 - RNA, 1701 nt, Artificial Sequence
  FLUAV/H3N2/A/Kansas/14/2017__EPI1261067 hemagglutinin CDS gc (HA)
augaagaccaucaucgcccugagcugcauccucugccugguguucgcccagaagauccccggcaacgacaacuccaccgcgacgcugugccucgggcaccacgccgucccgaacggcaccaucgugaagaccaucaccaacgaccgcaucgaggugacgaacgccaccgagcugguccagaacagcuccaucggggagaucugcgacagcccccaccagauccuggacggcgagaacugcacccucaucgacgcccugcugggggacccccagugcgacggcuuccagaacaagaagugggaccucuucguggagcggaacaaggccuacuccaacugcuaccccuacgacgugccggacuacgcgagccugcgcucccuggucgccagcuccggcacccucgaguucaacaacgagagcuucaacugggccggggugacgcagaacggcaccuccagcuccugcauccgggggagcaaguccagcuucuucucccgccugaacuggcugacccaccucaacagcaaguaccccgcccugaacgugaccaugcccaacaacgagcaguucgacaagcuguacaucuggggcguccaccaccccgggacggacaagaaccagaucucccucuacgcgcagagcagcggccggaucaccguguccaccaagcgcagccagcaggccgugaucccgaacaucggcucccggccccgcauccgggacauccccagccgcaucuccaucuacuggaccaucgucaagcccggggacauccugcugaucacgagcaccggcaaccucaucgccccgcggggguacuucaagauccgcuccggcaagagcuccaucaugcggagcgacgcccccaucggcaagugcaaguccgagugcaucacccccaacgggagcauccccaacgacaagccguuccagaacgugaaccgcaucaccuacggcgccugcccccgguacgugaagcaguccacgcugaagcuggcgaccgggaugcgcaacguccccgagcggcagacccgcggcaucuucggggccaucgccggcuucaucgagaacggcugggaggggaugguggacggcugguacggguuccggcaccagaacagcgagggccgcgggcaggccgccgaccucaaguccacccaggcggccaucgaccagaucaacggcaagcugaaccggcugaucggcaagacgaacgagaaguuccaccagaucgagaaggaguucagcgagguggaggggcgcauccaggaccucgagaaguacgucgaggacaccaagaucgaccugugguccuacaacgccgagcugcucguggcccuggagaaccagcacaccaucgaccugaccgacagcgagaugaacaagcuguucgagaagacgaagaagcagcuccgcgagaacgccgaggacaugggcaacgggugcuucaagaucuaccacaagugcgacaacgcgugcaugggcuccauccggaacgggaccuacgaccacaacguguaccgcgacgaggcccugaacaaccgguuccagaucaagggcgucgagcucaagagcggcuacaaggacuggauccuguggaucagcuucgccaucuccugcuuccugcucugcguggcccugcugggguucaucaugugggccugccagaagggcaacauccgcugcaacaucugcaucuga

SEQ ID NO: 14246 - RNA, 1701 nt, Artificial Sequence
  FLUAV/H3N2/A/Kansas/14/2017__EPI1691978 hemagglutinin CDS gc (HA)
augaagaccaucaucgcccugagcugcauccucugccugguguucgcccagaagauccccggcaacgacaacuccaccgcgacgcugugccucgggcaccacgccgucccgaacggcaccaucgugaagaccaucaccaacgaccgcaucgaggugacgaacgccaccgagcugguccagaacagcuccaucggggagaucugcgacagcccccaccagauccuggacggcgagaacugcacccucaucgacgcccugcugggggacccccagugcgacggcuuccagaacaagaagugggaccucuucguggagcggaacaaggccuacuccaacugcuaccccuacgacgugccggacuacgcgagccugcgcucccuggucgccagcuccggcacccucgaguucaacaacgagagcuucaacugggccggggugacgcagaacggcaccuccagcuccugcauccgggggagcaaguccagcuucuucucccgccugaacuggcugacccaccucaacagcaaguaccccgcccugaacgugaccaugcccaacaacgagcaguucgacaagcuguacaucuggggcguccaccaccccgugacggacaagaaccagaucucccucuacgcgcagagcagcgggcggaucaccguguccaccaagcgcagccagcaggccgucaucccgaacaucggcuaccggccccgcauccgggacauccccucccgcaucagcaucuacuggaccaucgugaagcccggcgacauccugcugaucaacuccacggggaaccucaucgccccgcggggcuacuucaagauccgcagcgggaaguccagcaucaugcgguccgacgcccccaucggcaagugcaagagcgagugcaucacccccaacggcuccauccccaacgacaagccguuccagaacgugaaccgcaucaccuacggggccugcccccgguacgucaagcagagcacccugaagcuggcgacgggcaugcgcaacgugcccgagcggcagacccgcgggaucuucggcgccaucgccggguucaucgagaacggcugggagggcaugguggacgggugguacggcuuccggcaccagaacuccgaggggcgcggccaggccgccgaccucaagagcacccaggcggccaucgaccagaucaacgggaagcugaaccggcugaucggcaagaccaacgagaaguuccaccagaucgagaaggaguucuccgaggucgagggccgcauccaggaccucgagaaguacguggaggacacgaagaucgaccuguggagcuacaacgccgagcugcucguggcccuggagaaccagcacaccaucgaccugaccgacuccgagaugaacaagcuguucgagaagaccaagaagcagcuccgcgagaacgccgaggacauggggaacggcugcuucaagaucuaccacaagugcgacaacgcgugcauggggagcauccggaacggcacguacgaccacaacgucuaccgcgacgaggcccugaacaaccgguuccagaucaaggggguggagcucaaguccggcuacaaggacuggauccuguggaucagcuucgccaucagcugcuuccugcucugcguggcccugcugggcuucaucaugugggccugccagaaggggaacauccgcugcaacaucugcaucuga

SEQ ID NO: 14247 - RNA, 1701 nt, Artificial Sequence
  FLUAV/H3N2/A/Kansas/14/2017 CBER-22B CDC19A__EPI1388416 hemagglutinin CDS gc (HA)
augaagaccaucaucgcccugagcugcauccucugccugguguucgcccagaagauccccggcaacgacaacuccaccgcgacgcugugccucgggcaccacgccgucccgaacggcaccaucgugaagaccaucaccaacgaccgcaucgaggugacgaacgccaccgagcugguccagaacagcuccaucggggagaucugcgacagcccccaccagauccuggacggcgagaacugcacccucaucgacgcccugcugggggacccccagugcgacggcuuccagaacaagaagugggaccucuucguggagcggaacaaggccuacuccaacugcuaccccuacgacgugccggacuacgcgagccugcgcucccuggucgccagcuccggcacccucgaguucaacaacgagagcuucaacugggccggggugacgcagaacggcaccuccagcuccugcauccgggggagcaaguccagcuucuucucccgccugaacuggcugacccaccucaacagcaaguaccccgcccugaacgugaccaugcccaacaacgagcaguucgacaagcuguacaucuggggcguccaccaccccgugacggacaagaaccagaucucccucuacgcgcagagcagcgggcggaucaccguguccaccaagcgcagccagcaggccgucaucccgaacaucggcuaccggccccgcauccgggacauccccucccgcaucagcaucuacuggaccaucgugaagcccggcgacauccugcugaucaacuccacggggaaccucaucgccccgcggggcuacuucaagauccgcagcgggaaguccagcaucaugcgguccgacgcccccaucggcaagugcaagagcgagugcaucacccccaacggcuccauccccaacgacaagccguuccagaacgugaaccgcaucaccuacggggccugcccccgguacgucaagcagagcacccugaagcuggcgacgggcaugcgcaacgugcccgagcggcagacccgcgggaucuucggcgccaucgccggguucaucgagaacggcugggagggcaugguggacgggugguacggcuuccggcaccagaacuccgaggggcgcggccaggccgccgaccucaagagcacccaggcggccaucgaccagaucaacgggaagcugaaccggcugaucggcaagaccaacgagaaguuccaccagaucgagaaggaguucuccgaggucgagggccgcauccaggaccucgagaaguacguggaggacacgaagaucgaccuguggagcuacaacgccgagcugcucguggcccuggagaaccagcacaccaucgaccugaccgacuccgagaugaacaagcuguucgagaagaccaagaagcagcuccgcgagaacgccgaggacauggggaacggcugcuucaagaucuaccacaagugcgacaacgcgugcaucgggagcauccggaacggcacguacgaccacaacgucuaccgcgacgaggcccugaacaaccgguuccagaucaaggggguggagcucaaguccggcuacaaggacuggauccuguggaucagcuucgccaucagcugcuuccugcucugcguggcccugcugggcuucaucaugugggccugccagaaggggaacauccgcugcaacaucugcaucuga

SEQ ID NO: 14248 - RNA, 1701 nt, Artificial Sequence
  FLUAV/H3N2/A/Switzerland/8060/2017__EPI1154878 hemagglutinin CDS gc (HA)
augaagaccaucaucgcccugagcuacauccucugccugguguucgcccagaagauccccggcaacgacaacuccaccgcgacgcugugccucgggcaccacgccgucccgaacggcaccaucgugaagaccaucaccaacgaccgcaucgaggugacgaacgccaccgagcugguccagaacagcuccaucggggagaucugcgacagcccccaccagauccuggacggcgagaacugcacccucaucgacgcccugcugggggacccccagugcgacggcuuccagaacaagaagugggaccucuucguggagcgguccaaggccuacagcuccugcuaccccuacgacgugccggacuacgcgagccugcgcucccuggucgccagcuccggcacccucgaguucaacaacgagagcuucaacuggacgggggugaagcagaacggcaccuccagcgccugcauccggaaguccagcuccagcuucuucucccgccugaacuggcugacccaccucaacuacaccuaccccgcccugaacgugacgaugcccaacaacgagcaguucgacaagcuguacaucuggggcguccaccaccccgggaccgacaaggaccagaucuuccucuacgcgcagagcagcgggcggaucaccguguccaccaagcgcagccagcaggccgugaucccgaacaucggcucccggccccgcauccgggacauccccagccgcaucuccaucuacuggacgaucgucaagcccggcgacauccugcugaucaacagcaccgggaaccucaucgccccgcggggcuacuucaagauccaguccggcaagagcuccaucaugcgcagcgacgcccccaucgggaagugcaaguccgagugcaucacccccaacggcagcauccccaacgacaagccguuccagaacgugaaccggaucaccuacggggccugcccccgcuacgugaagcacuccacgcugaagcuggcgaccggcaugcggaacguccccgagaagcagacccgcgggaucuucggcgccaucgccggguucaucgagaacggcugggagggcaugguggacgggugguacggcuuccggcaccagaacagcgaggggcgcggccaggccgccgaccucaaguccacccaggcggccaucgaccagaucaacgggaagcugaaccggcugaucggcaagacgaacgagaaguuccaccagaucgagaaggaguucagcgagguggagggccgcauccaggaccucgagaaguacgucgaggacaccaagaucgaccugugguccuacaacgccgagcugcucguggcccuggagaaccagcacaccaucgaccugaccgacagcgagaugaacaagcuguucgagaagacgaagaagcagcuccgggagaacgccgaggacauggggaacggcugcuucaagaucuaccacaagugcgacaacgcgugcaucggguccauccgcaacggcaccuacgaccacaacguguaccgcgacgaggcccugaacaaccgguuccagaucaagggggucgagcucaagagcggcuacaaggacuggauccuguggaucagcuucgccaucuccugcuuccugcucugcguggcccugcugggcuucaucaugugggccugccagaaggggaacauccgcugcaacaucugcaucuga

SEQ ID NO: 14249 - RNA, 1701 nt, Artificial Sequence
  FLUAV/H3N2/A/Switzerland/8060/2017__EPI1266285 hemagglutinin CDS gc (HA)
augaagaccaucaucgcccugagcuacauccucugccugguguucgcccagaagauccccggcaacgacaacuccaccgcgacgcugugccucgggcaccacgccgucccgaacggcaccaucgugaagaccaucaccaacgaccgcaucgaggugacgaacgccaccgagcugguccagaacagcuccaucggggagaucugcgacagcccccaccagauccuggacggcgagaacugcacccucaucgacgcccugcugggggacccccagugcgacggcuuccagaacaagaagugggaccucuucguggagcgguccaaggccuacagcuccugcuaccccuacgacgugccggacuacgcgagccugcgcucccuggucgccagcuccggcacccucgaguucaacaacgagagcuucaacuggacgggggugaagcagaacggcaccuccagcgccugcauccggaaguccagcuccagcuucuucucccgccugaacuggcugacccaccucaacuacaaguaccccgcccugaacgugaccaugcccaacaacgagcaguucgacaagcuguacaucuggggcguccaccaccccgggacggacaaggaccagaucuucccguacgcgcagagcagcgggcggaucaccguguccaccaagcgcagccagcaggccgugauccccaacaucggcucccggccccgcauccgggacauccccagccgcaucuccaucuacuggaccaucgucaagccgggcgacauccuccugaucaacagcacggggaaccugaucgcgccccggggcuacuucaagauccaguccggcaagagcuccaucaugcgcagcgacgcccccaucgggaagugcaaguccgagugcaucacccccaacggcagcaucccgaacgacaagcccuuccagaacgugaaccggaucaccuacggggccugcccccgcuacgugaagcacuccacccucaagcuggccacgggcaugcggaacguccccgagaagcagacccgcgggaucuucggcgccaucgccggguucaucgagaacggcugggagggcaugguggacgggugguacggcuuccggcaccagaacagcgaggggcgcggccaggccgccgaccugaaguccacccaggcggccaucgaccagaucaacgggaagcucaaccggcugaucggcaagaccaacgagaaguuccaccagaucgagaaggaguucagcgagguggagggccgcauccaggaccuggagaaguacgucgaggacacgaagaucgaccucugguccuacaacgccgagcugcugguggcccucgagaaccagcacaccaucgaccugaccgacagcgagaugaacaagcuguucgagaagaccaagaagcagcuccgggagaacgccgaggacauggggaacggcugcuucaagaucuaccacaagugcgacaacgcgugcaucggguccauccgcaacggcacguacgaccacaacguguaccgcgacgaggcccugaacaaccgguuccagaucaagggggucgagcucaagagcggcuacaaggacuggauccuguggaucagcuucgccaucuccugcuuccugcugugcguggcccuccugggcuucaucaugugggccugccagaaggggaacauccgcugcaacaucugcaucuga

SEQ ID NO: 14250 - RNA, 1701 nt, Artificial Sequence
  FLUAV/H3N2/A/Hong Kong/2671/2019__EPI1543098 hemagglutinin CDS gc (HA)
augaagaccaucaucgcccugagcuacauccucugccugguguucacccagaagauccccggcaacgacaacuccacggccacccugugccucgggcaccacgcggucccgaacggcaccaucgugaagaccaucacgaacgaccgcaucgaggugaccaacgccaccgagcugguccagaacagcuccaucggggagaucugcgacagcccccaccagauccuggacggcgggaacugcacccucaucgacgcccugcugggcgacccccagugcgacggcuuccagaacaagaagugggaccucuucguggagcggucccgcgccuacagcaacugcuaccccuacgacgugccggacuacgccucccugcggagccuggucgcguccagcgggacgcucgaguucaagaacgaguccuucaacugggccggcgugacccagaacggcaagagcuucuccugcauccgcgggagcuccagcuccuucuucagccggcugaacuggcugacccaccucaacuacaccuaccccgcccugaacgugacgaugcccaacaaggagcaguucgacaagcuguacaucuggggcguccaccaccccgggaccgacaaggaccagaucucccucuacgcccagagcagcggccgcaucaccguguccaccaagcggagccagcaggcggugaucccgaacaucgggucccgcccccggauccgcgacauccccagccggaucuccaucuacuggacgaucgucaagcccggcgacauccugcugaucaacagcaccgggaaccucaucgccccgcgcggcuacuucaagauccgguccggcaagagcuccaucaugcgcagcgacgcccccaucgggaagugcaaguccgagugcaucacccccaacggcagcauccccaacgacaagccguuccagaacgugaaccggaucaccuacggggccugcccccgcuacgugaagcaguccacgcugaagcuggccaccggcaugcggaacguccccgagaagcagacccgcgggaucuucggcgcgaucgccggcuucaucgagaacgggugggagggcaugguggacgggugguacggcuuccggcaccagaacagcgaggggcgcggccaggccgccgaccucaaguccacccaggccgcgaucgaccagaucaacggcaagcugaaccggcugaucgggaagacgaacgagaaguuccaccagaucgagaaggaguucagcgagguggagggccgcguccaggaccucgagaaguacguggaggacaccaagaucgaccugugguccuacaacgccgagcugcucguggcccuggagaaccagcacaccaucgaccugaccgacagcgagaugaacaagcuguucgagaagacgaagaagcagcuccgcgagaacgccgaggacauggggaacggcugcuucaagaucuaccacaagugcgacaacgccugcaucggguccauccggaacgagaccuacgaccacaacgucuaccgcgacgaggcgcugaacaaccgguuccagaucaagggcguggagcucaagagcggcuacaaggacuggauccuguggaucagcuucgccaucuccugcuuccugcucugcguggcccugcugggguucaucaugugggccugccagaagggcaacauccgcugcaacaucugcaucuga

SEQ ID NO: 14251 - RNA, 1701 nt, Artificial Sequence
  FLUAV/H3N2/A/Hong Kong/2671/2019__EPI1642843 hemagglutinin CDS gc (HA)
augaagaccaucaucgcccugagcuacauccucugccugguguucacccagaagauccccggcaacgacaacuccacggccacccugugccucgggcaccacgcggucccgaacggcaccaucgugaagaccaucacgaacgaccgcaucgaggugaccaacgccaccgagcugguccagaacagcuccaucggggagaucugcgacagcccccaccagauccuggacggcgggaacugcacccucaucgacgcccugcugggcgacccccagugcgacggcuuccagaacaagaagugggaccucuucguggagcggucccgcgccuacagcaacugcuaccccuacgacgugccggacuacgccucccugcggagccuggucgcguccagcgggacgcucgaguucaagaacgaguccuucaacugggccggcgugacccagaacggcaagagcuucuccugcauccgcgggagcuccagcuccuucuucagccggcugaacuggcugacccaccucaacuacaucuaccccgcccugaacgugaccaugcccaacaaggagcaguucgacaagcuguacaucuggggcguccaccaccccgugacggacaaggaccagaucucccucuacgcccagagcagcgggcgcaucaccguguccaccaagcggagccagcaggcggucaucccgaacaucggcucccgcccccggauccgcaacauccccagccggaucuccaucuacuggaccaucgugaagcccggggacauccugcugaucaacagcacgggcaaccucaucgccccgcgcggguacuucaagauccgguccggcaagagcuccaucaugcgcagcgacgcccccaucggcaagugcaaguccgagugcaucacccccaacgggagcauccccaacgacaagccguuccagaacgugaaccggaucaccuacggcgccugcccccgcuacgucaagcaguccacccugaagcuggccacggggaugcggaacgugcccgagaagcagacccgcggcaucuucggggcgaucgccggcuucaucgagaacggcugggaggggaugguggacggcugguacggguuccggcaccagaacagcgagggccgcgggcaggccgccgaccucaaguccacccaggccgcgaucgaccagaucaacggcaagcugaaccggcugaucggcaagaccaacgagaaguuccaccagaucgagaaggaguucagcgaggucgaggggcgcgugcaggaccucgagaaguacguggaggacacgaagaucgaccugugguccuacaacgccgagcugcucgucgcccuggagaaccagcacaccaucgaccugaccgacagcgagaugaacaagcuguucgagaagaccaagaagcagcuccgcgagaacgccgaggacaugggcaacgggugcuucaagaucuaccacaagugcgacaacgccugcaucggcuccauccggaacgagacguacgaccacaacguguaccgcgacgaggcgcugaacaaccgguuccagaucaaggggguggagcucaagagcggcuacaaggacuggauccuguggaucagcuucgccaucuccugcuuccugcucugcgucgcccugcugggcuucaucaugugggccugccagaaggggaacauccgcugcaacaucugcaucuga

SEQ ID NO: 14252 - RNA, 1701 nt, Artificial Sequence
  FLUAV/H3N2/A/Hong Kong/45/2019__EPI1691930 hemagglutinin CDS gc (HA)
augaagaccaucaucgcccugagcuacauccucugccugggcuucacccagaagauccccgggaacgacaacuccacggccacccugugccucggccaccacgcggugccgaacgggaccaucgucaagaccaucacgaacgaccgcaucgaggugaccaacgccaccgagcuggugcagaacagcuccaucggcgagaucugcgacagcccccaccagauccuggacgggggcaacugcacccucaucgacgcccugcugggcgacccccagugcgacggguuccagaacaagaagugggaccucuucgucgagcggucccgcgccuacagcaacugcuaccccuacgacgugccggacuacgccucccugcggagccugguggcguccagcggcacgcucgaguucaagaacgaguccuucaacugggccggggucacccagaacggcaagagcuucuccugcauccgcgggagcuccagcuccuucuucagccggcugaacuggcugacccaccucaacuacaccuaccccgcccugaacgugacgaugcccaacaaggagcaguucgacaagcuguacaucuggggcgugcaccaccccggcaccgacaaggaccagaucucccucuacgcccagagcagcgggcgcaucaccgucuccaccaagcggagccagcaggcggugaucccgaacaucggcucccgcccccggauccgcgacauccccagccggaucuccaucuacuggacgaucgugaagcccggggacauccugcugaucaacagcaccggcaaccucaucgccccgcgcggcuacuucaagauccgguccggcaagagcuccaucaugcgcagcgacgcccccaucgggaagugcaaguccgagugcaucacccccaacgggagcauccccaacgacaagccguuccagaacgucaaccggaucaccuacggcgccugcccccgcuacgugaagcagaacacgcugaagcuggccaccgggaugcggaacgugcccgagaagcagacccgcggcaucuucggcgcgaucgccggguucaucgagaacggcugggaggggauggucgacggcugguacggguuccggcaccagaacuccgagggccgcggccaggccgccgaccucaagagcacccaggccgcgaucgaccagaucaacgggaagcugaaccggcugaucggcaagacgaacgagaaguuccaccagaucgagaaggaguucuccgagguggaggggcgcgugcaggaccucgagaaguacgucgaggacaccaagaucgaccuguggagcuacaacgccgagcugcucguggcccuggagaaccagcacaccaucgaccugaccgacuccgagaugaacaagcuguucgagaagacgaagaagcagcuccgcgagaacgccgaggacaugggcaacgggugcuucaagaucuaccacaagugcgacaacgccugcaucggcagcauccggaacgagaccuacgaccacaacguguaccgcgacgaggcgcugaacaaccgguuccagaucaagggcgucgagcucaaguccggguacaaggacuggauccuguggaucagcuucgccaucagcugcuuccugcucugcguggcccugcugggcuucaucaugugggccugccagaaggggaacauccgcugcaacaucugcaucuga

SEQ ID NO: 14253 - RNA, 1701 nt, Artificial Sequence
  FLUAV/H3N2/A/South Australia/34/2019__EPI1387331 hemagglutinin CDS gc (HA)
augaagaccaucaucgcccugagcuacauccucugccugguguucgcccagaagauccccggcaacgacaacuccaccgcgacgcugugccucgggcaccacgccgucccgaacggcaccaucgugaagaccaucaccaacgaccgcaucgaggugacgaacgccaccgagcugguccagaacagcuccaucggggagaucugcgacagcccccaccagauccuggacggcgggaacugcacccucaucgacgcccugcugggcgacccccagugcgacggcuuccagaacaagaagugggaccucuucguggagcggucccgcgccuacagcaacugcuaccccuacgacgugccggacuacgcgucccugcggagccuggucgccuccagcgggacccucgaguucaagaacgaguccuucaacuggacgggcgugaagcagaacgggaccagcuccgccugcauccgcggcagcuccagcuccuucuucagccggcugaacuggcugacccaccucaacuacaccuaccccgcccugaacgugacgaugcccaacaaggagcaguucgacaagcuguacaucuggggcguccaccaccccgggaccgacaaggaccagaucuuccucuacgcgcaguccagcggccgcaucaccgugagcaccaagcggucccagcaggccgugaucccgaacaucggguuccgcccccggauccgcgacauccccagccggaucuccaucuacuggacgaucgucaagcccggcgacauccugcugaucaacagcaccgggaaccucaucgccccgcgcggcuacuucaagauccgguccggcaagagcuccaucaugcgcagcgacgcccccaucgggaagugcaaguccgagugcaucacccccaacggcagcauccccaacgacaagccguuccagaacgugaaccggaucaccuacggggccugcccccgcuacgugaagcaguccacgcugaagcuggcgaccggcaugcggaacguccccgagaagcagacccgcgggaucuucggcgccaucgccggcuucaucgagaacgggugggagggcaugauggacgggugguacggcuuccggcaccagaacagcgaggggcgcggccaggccgccgaccucaaguccacccaggcggccaucgaccagaucaacggcaagcugaaccggcugaucgggaagacgaacgagaaguuccaccagaucgagaaggaguucagcgagguggagggccgcgugcaggaccucgagaaguacgucgaggacaccaagaucgaccugugguccuacaacgccgagcugcucguggcccuggagaaccagcacaccaucgaccugaccgacagcgagaugaacaagcuguucgagaagacgaagaagcagcuccgcgagaacgccgaggacauggggaacggcugcuucaagaucuaccacaagugcgacaacgcgugcaucggguccauccggaacgagaccuacgaccacaacguguaccgcgacgaggcccugaacaaccgguuccagaucaagggcgucgagcucaagagcggcuacaaggacuggauccuguggaucuccuucgccaucagcugcuuccugcucugcaucgcccugcugggguucaucaugugggccugccagaagggcaacauccgcugcaacaucugcaucuga

SEQ ID NO: 14254 - RNA, 1701 nt, Artificial Sequence
  FLUAV/H3N2/A/South Australia/34/2019__EPI1440494 hemagglutinin CDS gc (HA)
augaagaccaucaucgcccugagcuacauccucugccugguguucgcccagaagauccccggcaacgacaacuccaccgcgacgcugugccucgggcaccacgccgucccgaacggcaccaucgugaagaccaucaccaacgaccgcaucgaggugacgaacgccaccgagcugguccagaacagcuccaucggggagaucugcgacagcccccaccagauccuggacggcgggaacugcacccucaucgacgcccugcugggcgacccccagugcgacggcuuccagaacaagaagugggaccucuucguggagcggucccgcgccuacagcaacugcuaccccuacgacgugccggacuacgcgucccugcggagccuggucgccuccagcgggacccucgaguucaagaacgaguccuucaacuggacgggcgugaagcagaacgggaccagcuccgccugcauccgcggcagcuccagcuccuucuucagccggcugaacuggcugacccaccucaacuacaaguaccccgcccugaacgugaccaugcccaacaaggagcaguucgacaagcuguacaucuggggcguccaccaccccaucacggacaaggaccagaucuuccucuacgcgcaguccagcgggcgcaucaccgugagcaccaagcggucccagcaggccgugaucccgaacaucggcuuccgcccccggauccgcgacauccccagccggaucuccaucuacuggaccaucgucaagcccggggacauccugcugaucaacagcacgggcaaccucaucgccccgcgcggguacuucaagauccgguccggcaagagcuccaucaugcgcagcgacgcccccaucggcaagugcaaguccgagugcaucacccccaacgggagcauccccaacgacaagccguuccagaacgugaaccggaucaccuacggcgccugcccccgcuacgugaagcaguccacccugaagcuggcgacggggaugcggaacguccccgagaagcagacccgcggcaucuucggggccaucgccggcuucaucgagaacggcugggaggggaugauggacggcugguacggguuccggcaccagaacagcgagggccgcgggcaggccgccgaccucaaguccacccaggcggccaucgaccagaucaacggcaagcugaaccggcugaucggcaagaccaacgagaaguuccaccagaucgagaaggaguucagcgagguggaggggcgcgugcaggaccucgagaaguacgucgaggacacgaagaucgaccugugguccuacaacgccgagcugcucguggcccuggagaaccagcacaccaucgaccugaccgacagcgagaugaacaagcuguucgagaagaccaagaagcagcuccgcgagaacgccgaggacaugggcaacgggugcuucaagaucuaccacaagugcgacaacgcgugcaucggcuccauccggaacgagacguacgaccacaacguguaccgcgacgaggcccugaacaaccgguuccagaucaagggggucgagcucaagagcggcuacaaggacuggauccuguggaucuccuucgccaucagcugcuuccugcucugcaucgcccugcugggcuucaucaugugggccugccagaaggggaacauccgcugcaacaucugcaucuga

SEQ ID NO: 14255 - RNA, 1683 nt, Artificial Sequence
  FLUAV/H7N9/A/chicken/Zhejiang/C483/2013(H7N9)__AGN69400.1 hemagglutinin CDS gc (HA)
augaacacccagauccugguguucgcccucaucgccaucauccccaccaacgcggacaagaucugccugggccaccacgccgucagcaacgggacgaaggugaacacccugaccgagcgcggcguggaggucgugaacgccaccgagacgguggagcggaccaacaucccgcgcaucugcuccaaggggaagaagaccgucgaccucggccagugcgggcugcugggcaccaucacgggcccgccccagugcgaccaguuccucgaguucagcgccgaccugaucaucgagcggcgcgagggguccgacgugugcuaccccggcaaguucgugaacgaggaggcccugcggcagauccuccgcgagagcgggggcaucgacaaggaggcgaugggguucaccuacuccggcauccggaccaacggcgccaccagcgccugccgccgguccgggagcuccuucuacgccgagaugaaguggcugcugagcaacacggacaacgcggccuucccgcagaugaccaaguccuacaagaacacccgcaagagccccgcccucaucgucuggggcauccaccacuccgugagcaccgccgagcagacgaagcuguacggguccggcaacaagcuggugaccgucggcagcuccaacuaccagcagagcuucgugcccucccccggggcccggccccaggugaacggccagagcgggcgcaucgacuuccacuggcucaugcugaaccccaacgacaccgucaccuucagcuucaacggcgcguucaucgcccccgaccgggccuccuuccugcgcggcaagagcauggggauccaguccggcguccagguggacgccaacugcgagggggacugcuaccacagcggcgggacgaucaucuccaaccuccccuuccagaacaucgacagccgggccgugggcaagugcccgcgcuacgugaagcagcggucccugcugcucgcgaccgggaugaagaacgugcccgagauccccaagggccgcggccuguucggggccaucgccggcuucaucgagaacgggugggagggccugaucgacgggugguacggcuuccggcaccagaacgcccagggcgaggggaccgccgcggacuacaagagcacccaguccgccaucgaccagaucacgggcaagcucaaccgccugaucgagaagaccaaccagcaguucgagcugaucgacaacgaguucaacgaggucgagaagcagaucgggaacgugaucaacuggacccgggacagcaucaccgaggugugguccuacaacgccgagcuccuggucgccauggagaaccagcacacgaucgaccuggccgacagcgagauggacaagcucuacgagcgcgugaagcgccagcugcgggagaacgcggaggaggacggcaccggcugcuucgagaucuuccacaagugcgacgacgacugcauggccuccauccgcaacaacaccuacgaccacagcaaguaccgggaggaggccaugcagaaccgcauccagaucgaccccgucaagcuguccagcggguacaaggacgugauccucugguucuccuucggcgccagcugcuucauccugcuggcgaucgugauggggcucgucuucaucugcgugaagaacggcaacaugcggugcaccaucugcaucuga

SEQ ID NO: 14256 - RNA, 1686 nt, Artificial Sequence
  FLUAV/H10N8/A/Jiangxi/IPB13/2013(H10N8)__AHK10761.1 hemagglutinin CDS gc (HA)
auguacaagaucguggucaucaucgcccugcucggcgccgugaaggggcuggacaagaucugccugggccaccacgcgguggccaacgggaccaucgucaagacccucacgaacgagcaggaggaggugaccaacgccaccgagaccguggagagcacgggcaucaaccgccugugcaugaaggggcggaagcacaaggaccugggcaacugccaccccaucggcaugcucaucgggaccccggccugcgaccugcaccugaccggcaugugggacacccucaucgagcgcgagaacgccaucgcguacugcuaccccggggccacggucaacguggaggcccugcggcagaagaucauggaguccggcgggaucaacaagaucagcaccggcuucaccuacggcuccagcaucaacuccgccgggaccacgcgcgcgugcaugcggaacggcgggaacagcuucuacgccgagcugaaguggcucguguccaagagcaagggccagaacuucccccagaccaccaacaccuaccgcaacacggacaccgccgagcaccugaucauguggggcauccaccaccccuccagcacccaggagaagaacgaccuguacgggacccagucccucagcaucuccgucggcagcuccacguaccggaacaacuucgugccgguggucggggcccgcccccaggugaacggccagagcgggcggaucgacuuccacuggacccuggugcagcccggcgacaacaucaccuucucccacaacggcgggcugaucgcccccagccgcgucuccaagcucaucggccgggggcugggcauccagagcgacgcgccgaucgacaacaacugcgagagcaagugcuucuggcgcgggggcuccaucaacacccggcugcccuuccagaaccucagcccccgcacggugggccagugccccaaguacgugaaccggcgcucccugaugcuggccaccgggaugcggaacgucccggagcucauccagggccgcgggcuguucggcgccaucgccggguuccuggagaacggcugggagggcaugguggacgggugguacggcuuccggcaccagaacgcccaggggaccggccaggcggccgacuacaagagcacccaggccgccaucgaccagaucacgggcaagcucaaccgccugguggagaagaccaacaccgaguucgaguccaucgagagcgaguucuccgagaucgagcaccagaucgggaacgucaucaacuggaccaaggacagcaucacggacaucuggaccuaccaggccgagcugcucguggcgauggagaaccagcacaccaucgacauggccgacuccgagaugcugaaccuguacgagcgggugcgcaagcagcuccgccagaacgccgaggaggacggcaaggggugcuucgagaucuaccacgccugcgacgacagcugcauggaguccauccggaacaacaccuacgaccacagccaguaccgcgaggaggcccugcugaaccggcucaacaucaaccccgucacgcuguccagcggcuacaaggacaucauccugugguucuccuucggggcgagcugcuucgugcuccuggccgucgugaugggccuguucuucuucugccucaagaacggcaacaugcgcugcaccaucugcaucuga

SEQ ID NO: 14257 - RNA, 1752 nt, Artificial Sequence
  FLUBV/H0N0/B/Colorado/06/2017__EPI1011552 hemagglutinin CDS gc (HA)
augaaggccaucaucgugcugcucauggucgugaccagcuccgccgaccgcaucugcaccggcaucacgagcuccaacagcccccacguggucaagaccgcgacccagggggaggugaacgugaccggcgucaucccgcugacgaccacccccaccaagucccacuucgccaaccugaaggggacggagacccggggcaagcucugccccaagugccugaacugcaccgaccuggacguggcccucgggcgccccaagugcaccggcaagaucccgagcgcccggguguccauccugcacgagguccgccccgugacgagcggcugcuuccccaucaugcacgaccggaccaagauccgccagcugcccaaccuccugcggggguacgagcacgugcgccuguccacccacaacgucaucaacgccgagggcgcgcccgggggccccuacaagaucgggaccagcggcuccugccccaacaucacgaacggcaacggguucuucgccaccauggccugggccgugcccgacaagaacaagaccgcgaccaacccgcucacgaucgaggugcccuacgucugcaccgagggcgaggaccagaucaccguguggggguuccacagcgacaacgagacccagauggccaagcuguacggcgacuccaagccccagaaguucacgagcuccgccaacggcgugaccacccacuacgucagccagaucgggggcuuccccaaccagaccgaggacgggggccugccgcaguccgggcggaucgugguggacuacaugguccagaaguccggcaagacgggcaccaucaccuaccagcgcgggauccuccugccccagaagguguggugcgccagcggccggagcaaggugaucaaggggagccugccccucaucggcgaggccgacugccugcacgagaaguacgggggccugaacaaguccaagcccuacuacaccggcgagcacgcgaaggccaucgggaacugcccgaucugggucaagacgccccucaagcuggccaacggcaccaaguaccgcccgcccgccaagcugcucaaggagcggggguucuucggcgccaucgcgggguuccuggagggcggcugggaggggaugaucgccggcuggcacggguacaccagccacggcgcccacggcguggccgucgccgcggaccugaaguccacccaggaggccaucaacaagaucacgaagaaccucaacagccuguccgagcuggaggugaagaaccuccagcgccugagcggggccauggacgagcugcacaacgagauccucgagcuggacgagaagguggacgaccugcgggccgacaccaucuccagccagaucgagcucgccguccugcuguccaacgagggcaucaucaacagcgaggacgagcaccuccuggcgcuggagcgcaagcucaagaagaugcuggggccguccgccguggagaucggcaacgggugcuucgagaccaagcacaagugcaaccagaccugccuggacaagaucgccgccggcaccuucgacgcgggcgaguucagccuccccacguucgacucccugaacaucaccgccgccagccugaacgacgacgggcuggacaaccacaccauccuccuguacuacuccaccgccgccagcucccuggcggugacgcucaugaucgccaucuucgucguguacauggugagccgggacaacgucuccugcagcaucugccuguga

SEQ ID NO: 14258 - RNA, 1752 nt, Artificial Sequence
  FLUBV/H0N0/B/Colorado/06/2017__EPI1051642 hemagglutinin CDS gc (HA)
augaaggccaucaucgugcugcucauggucgugaccagcuccgccgaccgcaucugcaccggcaucacgagcuccaacagcccccacguggucaagaccgcgacccagggggaggugaacgugaccggcgucaucccgcugacgaccacccccaccaagucccacuucgccaaccugaaggggacggagacccggggcaagcucugccccaagugccugaacugcaccgaccuggacguggcccucgggcgccccaagugcaccggcaagaucccgagcgcccggguguccauccugcacgagguccgccccgugacgagcggcugcuuccccaucaugcacgaccggaccaagauccgccagcugcccaaccuccugcggggguacgagcacgugcgccuguccacccacaacgucaucaacgccgagggcgcgcccgggggccccuacaagaucgggaccagcggcuccugccccaacaucacgaacggcaacggguucuucgccaccauggccugggccgugcccgacaagaacaagaccgcgaccaacccgcucacgaucgaggugcccuacgucugcaccgagggcgaggaccagaucaccguguggggguuccacagcgacaccgagacgcagauggccaagcuguacggcgacuccaagccccagaaguucaccagcuccgccaacggcgugaccacccacuacgucagccagaucgggggcuuccccaaccagacggaggacgggggccugccgcaguccgggcggaucgugguggacuacaugguccagaaguccggcaagaccggcaccaucaccuaccagcgcgggauccuccugccccagaagguguggugcgccagcggccggagcaaggugaucaaggggagccugccccucaucggcgaggccgacugccugcacgagaaguacgggggccugaacaaguccaagcccuacuacacgggcgagcacgcgaaggccaucgggaacugcccgaucugggucaagacgccccucaagcuggccaacggcaccaaguaccgcccgcccgccaagcugcucaaggagcggggguucuucggcgccaucgcgggguuccuggagggcggcugggaggggaugaucgccggcuggcacggguacaccagccacggcgcccacggcguggccgucgccgcggaccugaaguccacccaggaggccaucaacaagaucaccaagaaccucaacagccuguccgagcuggaggugaagaaccuccagcgccugagcggggccauggacgagcugcacaacgagauccucgagcuggacgagaagguggacgaccugcgggccgacaccaucuccagccagaucgagcucgccguccugcuguccaacgagggcaucaucaacagcgaggacgagcaccuccuggcgcuggagcgcaagcucaagaagaugcuggggccguccgccguggagaucggcaacgggugcuucgagaccaagcacaagugcaaccagaccugccuggacaagaucgccgccggcacguucgacgcgggcgaguucagccuccccaccuucgacucccugaacaucaccgccgccagccugaacgacgacgggcuggacaaccacaccauccuccuguacuacuccacggccgccagcucccuggcggugacccucaugaucgccaucuucgucguguacauggugagccgggacaacgucuccugcagcaucugccuguga

SEQ ID NO: 14259 - RNA, 1752 nt, Artificial Sequence
  FLUBV/H0N0/B/Colorado/06/2017 BX-71__EPI1151760 hemagglutinin CDS gc (HA)
augaaggccaucaucgugcugcucauggucgugaccagcuccgccgaccgcaucugcaccggcaucacgagcuccaacagcccccacguggucaagaccgcgacccagggggaggugaacgugaccggcgucaucccgcugacgaccacccccaccaagucccacuucgccaaccugaaggggacggagacccggggcaagcucugccccaagugccugaacugcaccgaccuggacguggcccucgggcgccccaagugcaccggcaagaucccgagcgcccggguguccauccugcacgagguccgccccgugacgagcggcugcuuccccaucaugcacgaccggaccaagauccgccagcugcccaaccuccugcggggguacgagcacgugcgccuguccacccacaacgucaucaacgccgagggcgcgcccgggggccccuacaagaucgggaccagcggcuccugccccaacaucacgaacggcaacggguucuucgccaccauggccugggccgugcccgacaagaacaagaccgcgaccaacccgcucacgaucgaggugcccuacgucugcaccgagggcgaggaccagaucaccguguggggguuccacagcgacaccgagacgcagauggccaagcuguacggcgacuccaagccccagaaguucaccagcuccgccaacggcgugaccacccacuacgucagccagaucgggggcuuccccaaccagacggaggacgggggccggccgcaguccgggcgcaucgugguggacuacaugguccagaaguccggcaagaccggcaccaucaccuaccagcgggggauccugcucccccagaagguguggugcgccagcggccgcagcaaggugaucaaggggagccugccccugaucggcgaggccgacugccuccacgagaaguacgggggccugaacaaguccaagcccuacuacacgggcgagcacgcgaaggccaucgggaacugcccgaucugggucaagacgccccugaagcucgccaacggcaccaaguaccggccgcccgccaagcugcugaaggagcgcggguucuucggcgccaucgcgggguuccucgagggcggcugggaggggaugaucgccggcuggcacggguacaccagccacggcgcccacggcguggccgucgccgcggaccugaaguccacccaggaggccaucaacaagaucaccaagaaccugaacagccucuccgagcuggaggugaagaaccugcagcggcucagcggggccauggacgagcugcacaacgagauccuggagcucgacgagaagguggacgaccugcgcgccgacaccaucuccagccagaucgagcuggccguccuccuguccaacgagggcaucaucaacagcgaggacgagcaccuccuggcgcuggagcggaagcugaagaagaugcucgggccguccgccguggagaucggcaacgggugcuucgagaccaagcacaagugcaaccagaccugccuggacaagaucgccgccggcacguucgacgcgggcgaguucagccugcccaccuucgacucccucaacaucaccgccgccagccugaacgacgacgggcuggacaaccacaccauccugcucuacuacuccacggccgccagcucccuggcggugacccugaugaucgccaucuucgucguguacauggugagccgcgacaacgucuccugcagcaucugccucuga

SEQ ID NO: 14260 - RNA, 1749 nt, Artificial Sequence
  FLUBV/H0N0/B/Washington/02/2019__EPI1368874 hemagglutinin CDS gc (HA)
augaaggccaucaucgugcugcucauggucgugaccagcaacgccgaccgcaucugcaccggcaucacguccagcaacagcccccacguggucaagaccgcgacccagggggaggugaacgugaccggcgucaucccgcugacgaccacccccaccaagagccacuucgccaaccugaaggggacggagacccggggcaagcucugccccaagugccugaacugcaccgaccuggacguggcccucgggcgccccaagugcaccggcaagaucccguccgcccgggugagcauccugcacgagguccgccccgugacguccggcugcuuccccaucaugcacgaccggaccaagauccgccagcugcccaaccuccugcggggguacgagcacgugcgccugagcacccacaacgucaucaacgccgaggacgcgccgggccggcccuacgagaucgggaccuccggcagcugccccaacaucacgaacgggaacggcuucuucgccaccauggccugggccgugcccaagaacaagaccgcgaccaacccgcucacgaucgaggugcccuacaucugcaccgagggcgaggaccagaucaccgucuggggguuccacuccgacaacgagacccagauggccaagcuguacggcgacagcaagccccagaaguucacguccagcgccaacggggugaccacccacuacgugucccagaucggcggcuuccccaaccagaccgaggacgggggccugccgcagagcgggcgcaucgucguggacuacauggugcagaaguccggcaagacggggaccaucaccuaccagcggggcauccuccugccccagaaggucuggugcgccagcggccgcuccaaggugaucaaggggagccugccccucaucggcgaggccgacugccugcacgagaaguacgggggccugaacaagagcaagcccuacuacaccggggagcacgcgaaggccaucggcaacugcccgaucugggugaagacgccccucaagcuggccaacggcaccaaguaccggccgcccgccaagcugcucaaggagcgcggguucuucggcgccaucgcgggguuccuggagggcgggugggagggcaugaucgccggcuggcacggguacaccucccacggcgcccacggggucgccguggccgcggaccugaaguccacccaggaggccaucaacaagaucacgaagaaccucaacucccugagcgagcuggaggucaagaaccuccagcggcuguccggcgccauggacgagcugcacaacgagauccucgagcuggacgagaagguggacgaccugcgcgccgacaccaucagcucccagaucgagcucgccgugcugcugagcaacgagggcaucaucaacuccgaggacgagcaccuccuggcgcuggagcggaagcucaagaagaugcuggggcccagcgccgucgagaucggcaacgggugcuucgagaccaagcacaagugcaaccagaccugccuggaccgcaucgccgccggcaccuucgacgcgggggaguucucccuccccacguucgacagccugaacaucaccgccgccucccugaacgacgacggccuggacaaccacaccauccuccuguacuacagcaccgccgccuccagccuggcggugacgcucaugaucgccaucuucguggucuacauggugucccgggacaacgugagcugcuccaucugccuguga

SEQ ID NO: 14261 - RNA, 1749 nt, Artificial Sequence
  FLUBV/H0N0/B/Washington/02/2019__EPI1422452 hemagglutinin CDS gc (HA)
augaaggccaucaucgugcugcucauggucgugaccagcaacgccgaccgcaucugcaccggcaucacguccagcaacagcccccacguggucaagaccgcgacccagggggaggugaacgugaccggcgucaucccgcugacgaccacccccaccaagagccacuucgccaaccugaaggggacggagacccggggcaagcucugccccaagugccugaacugcaccgaccuggacguggcccucgggcgccccaagugcaccggcaagaucccguccgcccgggugagcauccugcacgagguccgccccgugacguccggcugcuuccccaucaugcacgaccggaccaagauccgccagcugcccaaccuccugcggggguacgagcacgugcgccugagcacccacaacgucaucaacgccgaggacgcgccgggccggcccuacgagaucgggaccuccggcagcugccccaacaucacgaacgggaacggcuucuucgccaccauggccugggccgugcccaagaacaagaccgcgaccaacccgcucacgaucgaggugcccuacaucugcaccgagggcgaggaccagaucaccgucuggggguuccacuccgacagcgagacccagauggccaagcuguacggcgacuccaagccccagaaguucacgagcuccgccaacggggugaccacccacuacgugagccagaucggcggcuuccccaaccagaccgaggacgggggccugccgcaguccgggcgcaucgucguggacuacauggugcagaaguccggcaagacggggaccaucaccuaccagcggggcauccuccugccccagaaggucuggugcgccuccggccgcagcaaggugaucaaggggagccugccccucaucggcgaggccgacugccugcacgagaaguacgggggccugaacaaguccaagcccuacuacaccggggagcacgcgaaggccaucggcaacugcccgaucugggugaagacgccccucaagcuggccaacggcaccaaguaccggccgcccgccaagcugcucaaggagcgcggguucuucggcgccaucgcgggguuccuggagggcgggugggagggcaugaucgccggcuggcacggguacaccagccacggcgcccacggggucgccguggccgcggaccugaaguccacccaggaggccaucaacaagaucacgaagaaccucaacagccuguccgagcuggaggucaagaaccuccagcggcugagcggcgccauggacgagcugcacaacgagauccucgagcuggacgagaagguggacgaccugcgcgccgacaccaucuccagccagaucgagcucgccgugcugcuguccaacgagggcaucaucaacagcgaggacgagcaccuccuggcgcuggagcggaagcucaagaagaugcuggggcccuccgccgucgagaucggcaacgggugcuucgagaccaagcacaagugcaaccagaccugccuggaccgcaucgccgccggcaccuucgacgcgggggaguucagccuccccacguucgacucccugaacaucaccgccgccagccugaacgacgacggccuggacaaccacaccauccuccuguacuacuccaccgccgccagcucccuggcggugacgcucaugaucgccaucuucguggucuacauggugagccgggacaacguguccugcagcaucugccuguga

SEQ ID NO: 14262 - RNA, 1410 nt, Artificial Sequence
  FLUAV/H1N1/A/California/7/2009__GQ906802 neuraminidase CDS gc (NA)
augaaccccaaccagaagaucaucaccaucggcuccgugugcaugaccaucgggauggccaaccugauccuccagaucggcaacaucaucuccaucuggaucucccacuccauccagcuggggaaccagaaccagaucgagacgugcaaccaguccgucaucaccuacgagaacaacaccugggugaaccagaccuacgugaacaucuccaacacgaacuucgccgcgggccaguccgucguguccgugaagcuggccgggaacagcucccucugcccggucuccggcugggccaucuacuccaaggacaacuccgugcggaucggcuccaagggggacgucuucgugauccgcgagccguucaucuccugcuccccccuggagugccggaccuucuuccugacccagggcgcccuccugaacgacaagcacuccaacgggaccaucaaggaccgcucccccuaccggacgcugauguccugcccgaucggcgaggugcccucccccuacaacucccgcuucgaguccgucgccugguccgcguccgccugccacgacgggaucaacuggcucaccaucggcaucuccggccccgacaacggggccguggccgugcugaaguacaacggcaucaucaccgacaccaucaaguccuggcggaacaacauccugcgcacgcaggaguccgagugcgcgugcgucaacggguccugcuucaccgugaugaccgacggcccguccaacggccaggccuccuacaagaucuuccggaucgagaaggggaagaucgugaaguccgucgagaugaacgcccccaacuaccacuacgaggagugcuccugcuaccccgacuccuccgagaucaccugcgugugccgcgacaacuggcacggcuccaaccggcccuggguguccuucaaccagaaccucgaguaccagaucggguacaucugcuccggcaucuucggggacaacccgcgccccaacgacaagacgggcuccugcggccccgucuccagcaacggggccaacggcgugaagggguucuccuucaaguacggcaacgggguguggaucggccggaccaaguccaucuccucccgcaacggcuucgagaugaucugggaccccaacggguggaccggcaccgacaacaacuucuccaucaagcaggacaucgucgggaucaacgagugguccggcuacuccggguccuucgugcagcacccggagcugacgggccuggacugcauccggcccugcuucuggguggagcucauccgcggccggcccaaggagaacaccaucuggaccuccggguccuccaucuccuucugcggcgucaacuccgacaccguggggugguccuggcccgacggcgccgagcugccguucacgaucgacaaguga

SEQ ID NO: 14263 - RNA, 1410 nt, Artificial Sequence
  FLUAV/H1N1/A/Michigan/45/2015__EPI662593 neuraminidase CDS gc (NA)
augaaccccaaccagaagaucaucaccaucggcagcaucugcaugaccaucgggauggccaaccugauccuccagaucggcaacaucaucuccaucugggugagccacuccauccagaucgggaaccagagccagaucgagacgugcaaccaguccgucaucaccuacgagaacaacaccugggugaaccagaccuacgugaacaucagcaacacgaacuucgccgcgggccaguccgucgugagcgugaagcuggccgggaacuccagccugugcccggucuccggcugggccaucuacagcaaggacaacuccgugcgcaucggcagcaagggggacguguucgucauccgggagcccuucaucuccugcagcccccucgagugccgcaccuucuuccugacccagggcgcccugcucaacgacaagcacuccaacgggaccaucaaggaccggagccccuaccgcacgcugauguccugcccgaucggcgaggugcccagccccuacaacagccgguucgaguccguggccuggagcgcguccgccugccacgacgggaucaacuggcugaccaucggcaucagcggccccgacuccggggccgucgccgugcucaaguacaacggcaucaucaccgacaccaucaagagcuggcgcaacaacauccugcggacgcaggaguccgagugcgcgugcgugaacgggagcugcuucaccaucaugaccgacggcccguccgacggccaggccagcuacaagaucuuccgcaucgagaaggggaagaucaucaaguccgucgagaugaaggcccccaacuaccacuacgaggagugcagcugcuaccccgacuccagcgagaucacgugcgugugccgggacaacuggcacggcuccaaccgccccugggugagcuucaaccagaaccuggaguaccagaugggguacaucugcuccggcgucuucggggacaacccgcggcccaacgacaagaccggcagcugcggccccguguccagcaacggggccaacggcgugaagggguucagcuucaaguacggcaacggggucuggaucggccgcaccaaguccaucagcucccggaagggcuucgagaugaucugggaccccaacggguggaccggcaccgacaacaaguucagcaucaagcaggacaucguggggaucaacgagugguccggcuacagcggguccuucgugcagcacccggagcucacgggccuggacugcauccgccccugcuucugggucgagcugauccggggccgccccgaggagaacaccaucuggaccagcggguccagcaucuccuucugcggcgugaacagcgacaccgucgggugguccuggcccgacggcgccgagcucccguucacgaucgacaaguga

SEQ ID NO: 14264 - RNA, 1410 nt, Artificial Sequence
  FLUAV/H1N1/A/Netherlands/602/2009__AGU92703 neuraminidase CDS gc (NA)
augaaccccaaccagaagaucaucaccaucggcagcgugugcaugaccaucgggauggccaaccugauccuccagaucggcaacaucaucuccaucuggaucagccacuccauccagcuggggaaccagaaccagaucgagacgugcaaccagagcgucaucaccuacgagaacaacaccugggugaaccagaccuacgugaacaucuccaacacgaacuucgccgcgggccagagcgucguguccgugaagcuggccgggaacagcucccucugcccggucagcggcugggccaucuacuccaaggacaacagcgugcgggugggcuccaagggggacgucuucgugauccgcgagccguucaucagcugcuccccccuggagugccggaccuucuuccugacccagggcgcccuccugaacgacaagcacagcaacgggaccaucaaggaccgcucccccuaccggacgcugaugagcugcccgaucggcgaggugcccucccccuacaacagccgcuucgagagcgucgccugguccgcgagcgccugccacgacgggaucaacuggcucaccaucggcaucuccggccccgacaacggggccguggccgugcugaaguacaacggcaucaucaccgacaccaucaagagcuggcggaacaacauccugcgcacgcaggaguccgagugcgcgugcgucaacgggagcugcuucaccgugaugaccgacggcccguccaacggccaggccagcuacaagaucuuccggaucgagaaggggaagaucgugaaguccgucgagaugaacgcccccaacuaccacuacgaggagugcagcugcuaccccgacuccagcgagaucaccugcgugugccgcgacaacuggcacggcuccaaccggcccugggugagcuucaaccagaaccucgaguaccagaucggguacaucugcuccggcaucuucggggacaacccgcgccccaacgacaagacgggcagcugcggccccgucuccagcaacggggccaacggcgugaagggguucuccuucaaguacggcaacgggguguggaucggccggaccaagagcaucagcucccgcaacggcuucgagaugaucugggaccccaacggguggaccggcaccgacaacaacuucagcaucaagcaggacaucgucgggaucaacgagugguccggcuacagcggguccuucauccagcacccggagcugacgggccuggacugcauccggcccugcuucuggguggagcucauccgcggccggcccaaggagaacaccaucuggaccagcggguccagcaucuccuucugcggcgucaacagcgacaccguggggugguccuggcccgacggcgccgagcugccguucacgaucgacaaguga

SEQ ID NO: 14265 - RNA, 1410 nt, Artificial Sequence
  FLUAV/H3N2/A/Hong Kong/4801/2014__EPI578429 neuraminidase CDS gc (NA)
augaaccccaaccagaagaucaucaccaucggcuccgugucccugaccaucuccacgaucugcuucuucaugcagaucgccauccucaucaccaccgucacccugcacuucaagcaguacgaguucaacuccccgcccaacaaccaggugaugcugugcgagcccacgaucaucgagcgcaacaucaccgagaucguguaccucaccaacaccacgaucgagaaggagaucugccccaagccggccgaguaccggaacugguccaagccccagugcgggaucaccggcuucgcgcccuucuccaaggacaacuccauccgccuguccgccgggggcgacaucugggucacccgggagcccuacguguccugcgacccggacaagugcuaccaguucgcccuggggcagggcaccacgcucaacaacgugcacuccaacaacaccguccgcgaccggacccccuaccgcacccugcugaugaacgagcucggcgugcccuuccaccuggggacgaagcaggucugcaucgccugguccuccagcuccugccacgacggcaaggccuggcugcacgucugcaucaccggggacgacaagaacgcgaccgccuccuucaucuacaacggccggcucguggacuccguggucagcugguccaaggacauccugcgcacccaggaguccgagugcaucugcaucaacgggacgugcaccguggugaugaccgacggcuccgccuccggcaaggccgacaccaagauccuguucaucgaggaggggaagaucguccacacguccacccucuccggcuccgcgcagcacguggaggagugcuccugcuacccccgguacccgggggugcgcugcgucugccgggacaacuggaagggcuccaaccgcccgaucguggacaucaacaucaaggaccacuccaucgugagcuccuacgucugcuccggccuggugggggacaccccgcggaagaacgacuccagcuccagcucccacugccuggaccccaacaacgaggagggcgggcacggcgugaaggggugggccuucgacgacggcaacgacgucuggaugggccgcaccaucaacgagacgucccggcucggguacgagaccuucaaggugaucgagggcugguccaacccgaaguccaagcugcagaccaaccgccaggucaucguggaccggggcgaccgcuccggguacuccgggaucuucuccguggagggcaaguccugcaucaaccggugcuucuacgucgagcugauccgcggccggaaggaggagaccgaggugcucuggacgagcaacuccaucguggucuucugcgggaccagcggcaccuacgggaccggcuccuggcccgacggggccgaccugaaccugaugcccaucuga

SEQ ID NO: 14266 - RNA, 1401 nt, Artificial Sequence
  FLUBV/H0N0/B/Brisbane/60/2008__EPI173278 neuraminidase CDS gc (NA)
augcugcccagcaccauccagacccucacgcuguuccugaccuccggcggggugcuccugagccuguacgucuccgccagccucuccuaccugcuguacagcgacauccuccugaaguucuccccgaccgagaucaccgcccccacgaugccccuggacugcgcgaacgccagcaacgugcaggccgugaaccgcuccgccaccaagggcgucacccuccugcugcccgagccggaguggaccuacccccggcucagcugccccggguccacguuccagaaggcccugcugaucagcccccaccgcuucggcgagaccaaggggaacuccgcgccgcucaucauccgggagcccuucaucgccugcggccccaacgagugcaagcacuucgcccugacccacuacgccgcgcagcccggcggguacuacaacggcacccgcggggaccggaacaagcugcgccaccucaucagcgugaagcugggcaagaucccgacgguggagaacuccaucuuccacauggccgccuggagcggguccgccugccacgacggcaaggaguggaccuacaucggcgucgacgggcccgacaacaacgcccugcucaaggugaaguacggcgaggcguacaccgacaccuaccacagcuacgccaacaagauccugcggacgcaggaguccgccugcaacugcaucgggggcaacugcuaccugaugaucaccgacggcagcgccagcgggguguccgagugccgcuuccucaagauccgggagggccgcaucaucaaggagaucuuccccaccgggcgggucaagcacaccgaggagugcacgugcggcuucgccagcaacaagaccaucgagugcgcgugccgcgacaacuccuacaccgccaagcggcccuucgugaagcugaacguggagaccgacacggccgagauccgccugaugugcaccgacaccuaccucgacaccccgcggcccaacgacgggagcaucacgggccccugcgaguccaacggcgacaaggggagcggcgggaucaagggcggguucguccaccagcgcauggaguccaagaucggccggugguacagccgcaccauguccaagaccgagcggaugggcauggggcuguacgugaaguacgacggcgaccccugggccgacagcgacgcccuggcguucuccggggugauggucagcaugaaggagccgggcugguacuccuucggguucgagaucaaggacaagaagugcgacgugcccugcaucggcaucgagauggugcacgacggcgggaaggagaccuggcacagcgccgccacggccaucuacugccucaugggcuccgggcagcugcugugggacaccgucaccggcguggacauggcccucuga

SEQ ID NO: 14267 - RNA, 1401 nt, Artificial Sequence
  FLUBV/H0N0/B/Phuket/3073/2013__EPI540672 neuraminidase CDS gc (NA)
augcugcccagcaccauccagacccucacgcuguuccugaccuccggcggggugcuccugagccuguacgucuccgccagccucuccuaccugcuguacagcgacauccuccugaaguucucccgcaccgaggugaccgccccgaucaugccccuggacugcgcgaacgccagcaacgugcaggccgucaaccgguccgccacgaagggcgugacgccccuccugcccgagccggaguggaccuacccccgccugagcugccccggguccaccuuccagaaggcccuccugaucagcccccaccgguucggcgagaccaaggggaacuccgcgccgcugaucauccgcgagcccuucaucgccugcggccccaaggagugcaagcacuucgcccucacccacuacgccgcgcagcccggcggguacuacaacggcacccgggaggaccgcaacaagcugcggcaccugaucagcgugaagcucgggaagaucccgaccgucgagaacuccaucuuccacauggccgccuggagcggcuccgccugccacgacgggcgcgaguggacguacaucggcguggacggccccgacagcaacgcccugcugaagaucaaguacggggaggcguacaccgacaccuaccacuccuacgccaagaacauccuccggacccaggagagcgccugcaacugcaucggcggggacugcuaccugaugaucacggacggccccgccagcggcaucuccgagugccgcuuccugaagauccgggaggggcgcaucaucaaggagaucuuccccaccggccgggugaagcacaccgaggagugcacgugcggguucgccagcaacaagaccaucgagugcgcgugccgcgacaacuccuacaccgccaagcggccguucgucaagcucaacguggagaccgacaccgccgagauccgccugaugugcacgaagaccuaccuggacacgccccggcccaacgacggcagcaucaccgggcccugcgaguccgacggcgacgagggcagcgggggcaucaagggcggguucgugcaccagcgcauggccuccaagaucgggcggugguacagccgcaccauguccaagaccaagcggaugggcaugggccucuacgucaaguacgacggggacccguggaccgacagcgaggcccuggcgcuguccggcgugauggugagcauggaggagcccgggugguacuccuucggcuucgagaucaaggacaagaagugcgacguccccugcaucgggaucgagauggugcacgacggcggcaagaccacguggcacagcgccgccaccgccaucuacugccucaugggguccggccagcugcugugggacaccgugaccggggucaacaugacgcucuga

SEQ ID NO: 14268 - RNA, 1410 nt, Artificial Sequence
  FLUAV/H1N1/A/Brisbane/02/2018__EPI1212833 neuraminidase CDS gc (NA)
augaaccccaaccagaagaucaucaccaucggcagcacgugcaugaccaucgggauggccaaccugauccuccagaucggcaacaucaucuccaucugggugagccacuccauccagaucgggaaccagagccagaucgagaccugcaaccaguccgucaucaccuacgagaacaacaccugggugaaccagacguacgugaacaucagcaacaccaacuucgccgcgcgccaguccgucgccagcgugaagcuggccggcaacuccagccugugcccgguguccgggugggccaucuacagcaaggacaacuccguccggaucggcagcaagggcgacguguucgugauccgcgagcccuucaucuccugcagcccccucgagugccggaccuucuuccugacccagggggcccugcucaacgacaagcacuccaacggcacgaucaaggaccgcagccccuaccggacccugauguccugcccgaucggggagguccccagccccuacaacagccgcuucgaguccguggcguggagcgccuccgccugccacgacggcaccaacuggcugaccaucgggaucagcggccccgacuccggcgccguggcgguccucaaguacaacgggaucaucacggacaccaucaagagcuggcggaacaacauccugcgcacccaggaguccgagugcgccugcgugaacggcagcugcuucaccaucaugacggacgggccguccgacggccaggccagcuacaagaucuuccggaucgagaagggcaagaucaucaaguccguggagaugaaggcccccaacuaccacuacgaggagugcagcugcuaccccgacuccagcgagaucacgugcgucugccgcgacaacuggcacggguccaaccggcccugggugagcuucaaccagaaccuggaguaccagaugggcuacaucugcuccgggguguucggcgacaacccgcgccccaacgacaagaccgggagcugcggccccgucuccagcaacggcgccaacggggugaagggcuucagcuucaaguacgggaacggcguguggaucgggcggaccaaguccaucagcucccgcaagggcuucgagaugaucugggaccccaacggcuggaccgggaccgacaacaaguucagcaucaagcaggacaucgucggcaucaacgagugguccggguacagcggcuccuucgugcagcacccggagcucaccgggcuggacugcauccggcccugcuucuggguggagcugauccgcggccggcccgaggagaacaccaucuggacgagcggcuccagcaucuccuucugcggggucgacagcgacaccgugggcugguccuggcccgacggggcggagcucccguucaccaucgacaaguga

SEQ ID NO: 14269 - RNA, 1410 nt, Artificial Sequence
  FLUAV/H1N1/A/Guangdong-Maonan/SWL1536/2019__EPI1542569 neuraminidase CDS gc (NA)
augaaccccaaccagaagaucaucaccaucggcagcaucugcaugaccaucgggauggccaaccugauccuccagaucggcaacaucaucuccaucugggugagccacuccauccagaucgggaaccagagccagaucgagacgugcaacaagaacgucaucaccuacgagaacaacaccugggugaaccagaccuacgugaacaucuccaacacgaacagcgccgcgcgccaguccgucgccagcgugaagcuggccggcaacuccagccugugcccgguguccgggugggccaucuacagcaaggacaacuccguccggaucggcagcaagggcgacguguucgugauccgcgagcccuucaucuccugcagcccccucgagugccggaccuucuuccugacccagggggcccugcucaacgacaagcacuccaacggcaccaucaaggaccgcagccccuaccggacgcugauguccugcccgaucggggagguccccagccccuacaacagccgcuucgaguccguggcguggagcgccuccgccugccacgacggcaccaacuggcugaccaucgggaucagcggccccgacuccggcgccguggcgguccucaaguacaacgggaucaucaccgacacgaucaagagcuggcggaacaacauccugcgcacccaggaguccgagugcgccugcgugaacggcagcugcuucaccaucaugaccgacgggccguccgacggccaggccagcuacaagaucuuccggaucgagaagggcaagaucaucaaguccguggagaugaaggcccccaacuaccacuacgaggagugcagcugcuaccccgacuccagcgagaucacgugcgucugccgcgacaacuggcacggguccaaccggcccugggugagcuucaaccagaaccuggaguaccagaugggcuacaucugcuccgggguguucggcgacaacccgcgccccaacgacaagaccgggagcugcggccccgucuccagcaacggcgccaacggggugaagggcuucagcuucaaguacgggaacggcguguggaucgggcggaccaaguccaucagcucccgcaagggcuucgagaugaucugggaccccaacggcuggaccgggacggacaacaaguucagcaagaagcaggacaucgucggcaucaacgagugguccggguacagcggcuccuucgugcagcacccggagcucaccgggcugaacugcauccggcccugcuucuggguggagcugauccgcggccggcccgaggagaacaccaucuggaccagcggcuccagcaucuccuucugcggggucgacagcgacaucgugggcugguccuggcccgacggggcggagcucccguucacgaucgacaaguga

SEQ ID NO: 14270 - RNA, 1410 nt, Artificial Sequence
  FLUAV/H3N2/A/Singapore/INFIMH-16-0019/2016__EPI1047603 neuraminidase CDS gc (NA)
augaaccccaaccagaagaucaucaccaucggcagcgugucccugaccaucagcacgaucugcuucuucaugcagaucgccauccucaucaccaccgucacccugcacuucaagcaguacgaguucaacuccccgcccaacaaccaggugaugcugugcgagcccacgaucaucgagcgcaacaucaccgagaucguguaccucaccaacaccacgaucgagaaggagaucugccccaagccggccgaguaccggaacuggagcaagccccagugcgggaucaccggcuucgcgcccuucuccaaggacaacagcauccgccuguccgccgggggcgacaucugggucacccgggagcccuacgugagcugcgacccggacaagugcuaccaguucgcccuggggcagggcaccacgcucaacaacgugcacuccaacaacaccguccgcgaccggacccccuaccgcacccugcugaugaacgagcucggcgugcccuuccaccuggggacgaagcaggucugcaucgccuggagcuccagcuccugccacgacggcaaggccuggcugcacgugugcaucaccggggacgacaagaacgcgaccgccagcuucaucuacaacggccggcucaucgacuccguggugagcugguccaaggacauccugcgcacccaggagagcgagugcgucugcaucaacgggacgugcaccguggugaugaccgacggcaacgccaccggcaaggccgacacgaagauccuguucaucgaggaggggaagaucguccacaccuccaagcucagcggcagcgcgcagcacguggaggagugcuccugcuacccccgguacccgggggugcgcugcgucugccgggacaacuggaagggcagcaaccgccccaucguggacaucaacaucaaggaccacuccaucgugagcuccuacgucugcagcggccuggugggggacaccccgcggaagaacgacuccagcuccagcucccacugccugaaccccaacaacgaggagggcgggcacggcgugaaggggugggccuucgacgacggcaacgacgucuggaugggccgcaccaucaacgagacgagccggcucggguacgagaccuucaagguggucgagggcugguccaaccccaagagcaagcugcagaucaaccgccaggugaucguggaccgcggggaccgguccggcuacagcgggaucuucuccgucgagggcaagagcugcaucaaccggugcuucuacguggagcugauccgcggccggaaggaggagaccgaggugcucuggaccuccaacagcaucgucguguucugcgggacgagcggcaccuacgggaccggcuccuggcccgacggggccgaccugaaccugaugcacaucuga

SEQ ID NO: 14271 - RNA, 1410 nt, Artificial Sequence
  FLUAV/H3N2/A/Kansas/14/2017__EPI1146344 neuraminidase CDS gc (NA)
augaaccccaaccagaagaucaucaccaucggcagcgugucccugaccaucagcacgaucugcuucuucaugcagaucgccauccucaucaccaccgucacccugcacuucaagcaguacgaguucaacuccccgcccaacaaccaggugaugcugugcgagcccacgaucaucgagcgcaacaucaccgagaucguguaccucaccaacaccacgaucgagcgggagaucugccccaagccggccgaguaccgcaacuggagcaagccccagugcgggaucaccggcuucgcgcccuucuccaaggacaacagcauccggcuguccgccgggggcgacaucugggucacccgcgagcccuacgugagcugcgacccggacaagugcuaccaguucgcccuggggcagggcaccacgaucaacaacgugcacuccaacaacaccgcccgggaccgcaccccgcaccggacccuccugaugaacgagcugggcguccccuuccaccucgggacgaagcaggucugcaucgccuggagcuccagcuccugccacgacggcaaggcguggcugcacgugugcaucaccggggacgacaagaacgccaccgccagcuucaucuacaacggccgccugguggacuccguggugagcugguccaaggacauccuccggacccaggagagcgagugcgucugcaucaacgggacgugcaccguggugaugaccgacggcaacgccaccggcaaggcggacacgaagauccuguucaucgaggaggggaagaucguccacaccuccaagcugagcggcagcgcccagcacguggaggagugcuccugcuacccccgcuacccgggggugcggugcgucugccgcgacaacuggaagggcagcaaccggcccaucguggacaucaacaucaaggaccacuccaucgugagcuccuacgucugcagcggccucgugggggacacgccccgcaagaccgacuccagcuccagcucccacugccugaaccccaacaacgagaagggcgggcacggcgugaaggggugggccuucgacgacggcaacgacgucuggaugggccggaccaucaacgagaccagccgccugggguacgagaccuucaagguggucgagggcugguccaaccccaagagcaagcuccagaucaaccggcaggucaucguggaccgcggggaccgguccggcuacagcgggaucuucuccguggagggcaagagcugcaucaaccgcugcuucuacguggagcugauccggggccgcaaggaggagaccgaggugcuguggacguccaacagcaucgucguguucugcgggaccagcggcaccuacgggaccggcuccuggcccgacggggccgaccucaaccugaugcacaucuga

SEQ ID NO: 14272 - RNA, 1410 nt, Artificial Sequence
  FLUAV/H3N2/A/Kansas/14/2017-CDC-LV24A__EPI1444881 neuraminidase CDS gc (NA)
augaaccccaaccagaagaucaucaccaucggcagcgugucccugaccaucagcacgaucugcuucuucaugcagaucgccauccucaucaccaccgucacccugcacuucaagcaguacgaguucaacuccccgcccaacaaccaggugaugcugugcgagcccacgaucaucgagcgcaacaucaccgagaucguguaccucaccaacaccacgaucgagcgggagaucugccccaagccggccgaguaccgcaacuggagcaagccccagugcgggaucaccggcuucgcgcccuucuccaaggacaacagcauccggcuguccgccgggggcgacaucugggucacccgcgagcccuacgugagcugcgacccggacaagugcuaccaguucgcccuggggcagggcaccacgaucaacaacgugcacuccaacaacaccgcccgggaccgcacgccccaccggacccuccugaugaacgagcugggcguccccuuccaccucgggaccaagcaggucugcaucgccuggagcuccagcuccugccacgacggcaaggcguggcugcacgugugcaucaccggggacgacaagaacgccaccgccagcuucaucuacaacggccgccugguggacuccguggugagcugguccaaggacauccuccggacccaggagagcgagugcgucugcaucaacgggacgugcaccguggugaugaccgacggcaacgccaccggcaaggcggacacgaagauccuguucaucgaggaggggaagaucguccacaccuccaagcugagcggcagcgcccagcacguggaggagugcuccugcuacccccgcuacccgggggugcggugcgucugccgcgacaacuggaagggcagcaaccggcccaucguggacaucaacaucaaggaccacuccaucgugagcuccuacgucugcagcggccucgugggggacacgccccgcaagaccgacaacuccagcuccagccacugccugaaccccaacaacgagaagggcgggcacggcgugaaggggugggccuucgacgacggcaacgacgucuggaugggccggaccaucaacgagaccucccgccugggguacgagaccuucaagguggucgagggcuggagcaacccgaaguccaagcuccagaucaaccggcaggucaucguggaccgcggggaccggagcggcuacuccgggaucuucagcguggagggcaaguccugcaucaaccgcugcuucuacguggagcugauccggggccgcaaggaggagaccgaggugcuguggacgagcaacuccaucgucguguucugcgggaccagcggcaccuacgggaccggcagcuggcccgacggggccgaccucaaccugaugcacaucuga

SEQ ID NO: 14273 - RNA, 1410 nt, Artificial Sequence
  FLUAV/H3N2/A/Switzerland/8060/2017__EPI1154879 neuraminidase CDS gc (NA)
augaaccccaaccagaagaucaucaccaucggcagcgugucccugaccaucagcacgaucugcuucuucaugcagaucgccauccucaucaccaccgucacccugcacuucaagcaguacgaguucaacuccccgcccaacaaccaggugaugcugugcgagcccacgaucaucgagcgcaacaucaccgagaucguguaccucaccaacaccacgaucgagaaggagaucugccccaagccggccgaguaccggaacuggagcaagccccagugcgggaucaccggcuucgcgcccuucuccaaggacaacagcauccgccuguccgccgggggcgacaucugggucacccgggagcccuacgugagcugcgacccggacaagugcuaccaguucgcccuggggcagggcaccacgcucaacaacgugcacuccaacaacaccguccgcgaccggacccccuaccgcacccugcugaugaacgagcucggcgugcccuuccaccuggggacgaagcaggucugcauggccuggagcuccagcuccugccacgacggcaaggccuggcugcacgugugcgugaccggggacgacaagaacgcgaccgccagcuucaucuacaacggccggcucguggacuccgucgugagcugguccaaggacauccugcgcacccaggagagcgagugcgugugcaucaacgggacgugcaccgucgugaugaccgacggcaacgccaccggcaaggccgacacgaagauccuguucaucgaggaggggaagaucgugcacaccuccaagcucagcggcagcgcgcagcacgucgaggagugcuccugcuacccccgguacccgggggugcgcugcgugugccgggacaacuggaagggcagcaaccgccccaucgucgacaucaacaucaaggaccacuccaucgugagcuccuacgugugcagcggccuggucggggacacgccccggaaguccgacagcuccagcuccagccacugccugaaccccaacaacgaggagggcgggcacggcgugaaggggugggccuucgacgacggcaacgacgucuggaugggccgcaccaucaacgagaccucccggcucggguacgagaccuucaaggugguggagggcuggagcaacuccaagagcaagcugcagaucaaccgccaggucaucguggaccgcggggaccgguccggcuacagcgggaucuucuccguggagggcaagagcugcaucaaccggugcuucuacgucgagcugauccgcggccggaaggaggagaccgaggugcucuggaccagcaacuccaucguggucuucugcgggacgagcggcaccuacgggaccggcuccuggccggacggggccgaccugaaccugaugcacaucuga

SEQ ID NO: 14274 - RNA, 1410 nt, Artificial Sequence
  FLUAV/H3N2/A/Switzerland/8060/2017(H3N2)-CDC-LV21A__EPI1364258 neuraminidase CDS gc (NA)
augaaccccaaccagaagaucaucaccaucggcagcgugucccugaccaucagcacgaucugcuucuucaugcagaucgccauccucaucaccaccgucacccugcacuucaagcaguacgaguucaacuccccgcccaacaaccaggugaugcugugcgagcccacgaucaucgagcgcaacaucaccgagaucguguaccucaccaacaccacgaucgagaaggagaucugccccaagccggccgaguaccggaacuggagcaagccccagugcgggaucaccggcuucgcgcccuucuccaaggacaacagcauccgccuguccgccgggggcgacaucugggucacccgggagcccuacgugagcugcgacccggacaagugcuaccaguucgcccuggggcagggcaccacgcucaacaacgugcacuccaacaacaccguccgcgaccggacccccuaccgcacccugcugaugaacgagcucggcgugcccuuccaccuggggacgaagcaggucugcauggccuggagcuccagcuccugccacgacggcaaggccuggcugcacgugugcgugaccggggacgacaagaacgcgaccgccagcuucaucuacaacggccggcucguggacuccgucgugagcugguccaaggacauccugcgcacccaggagagcgagugcgugugcaucaacgggacgugcaccgucgugaugaccgacggcaacgccaccggcaaggccgacacgaagauccuguucaucgaggaggggaagaucgugcacaccuccaagcucagcggcagcgcgcagcacgucgaggagugcuccugcuacccccgguacccgggggugcgcugcgugugccgggacaacuggaagggcagcaaccgccccaucgucgacaucaacaucaaggaccacuccaucgugagcuccuacgugugcagccggcuggucggcgacacgccccgcaaguccgacagcuccagcuccagccacugccugaaccccaacaacgaggagggcgggcacggggugaagggcugggccuucgacgacgggaacgacgucuggaugggccggaccaucaacgagaccucccgccucggcuacgagaccuucaaggugguggagggguggagcaacuccaagagcaagcugcagaucaaccggcaggucaucguggaccgcggcgaccgguccggguacagcggcaucuucuccguggagggcaagagcugcaucaaccgcugcuucuacgucgagcugauccgggggcgcaaggaggagaccgaggugcucuggaccagcaacuccaucguggucuucugcggcacgagcgggaccuacggcaccggguccuggccggacggcgccgaccugaaccugaugcacaucuga

SEQ ID NO: 14275 - RNA, 1410 nt, Artificial Sequence
  FLUAV/H3N2/A/Hong Kong/2671/2019__EPI1543099 neuraminidase CDS gc (NA)
augaaccccaaccagaagaucaucaccaucggcagcgugucccugaccaucagcacgaucugcuucuucaugcagaucgccauccucaucaccaccgucacccugcacuucaagcaguacgaguucaacuccccgcccaacaaccaggugaugcugugcgagcccacgaucaucgagcgcaacaucaccgagaucguguaccucaccaacaccacgaucgagaaggagaucugccccaagccggccgaguaccggaacuggagcaagccccagugcgggaucaccggcuucgcgcccuucuccaaggacaacagcauccgccuguccgccgggggcgacaucugggucacccgggagcccuacgugagcugcgaccuggacaagugcuaccaguucgcccucgggcagggcaccacgcugaacaacgugcacuccaacaacaccguccgcgaccggaccccguaccgcacccugcucaugaacgagcugggcgugcccuuccaccuggggacgaagcaggucugcaucgccuggagcuccagcuccugccacgacggcaaggccuggcuccacgugugcaucaccggggacgacaagaacgcgaccgccagcuucaucuacaacggccggcugguggacuccguggucagcugguccaacgacauccugcgcacccaggagagcgagugcgugugcaucaacgggacgugcaccguggucaugaccgacggcaacgccaccggcaaggccgacacgaagauccucuucaucgaggaggggaagaucgugcacaccuccaagcugagcggcagcgcgcagcacguggaggagugcuccugcuacccccgguaccccgggguccgcugcgugugccgggacaacuggaagggcagcaaccgcccgaucaucgacaucaacaucaaggaccacuccaucgugagcuccuacgucugcagcggccuggugggggacacgccccggaaguccgacagcuccagcuccagccacugccucaaccccaacaacgaggagggcgggcacggcgugaaggggugggccuucgacgacggcaacgacgucuggaugggccgcaccaucaacgagaccucccggcugggguacgagaccuucaagguggucgagggcuggagcaaccccaaguccaagcugcagaucaaccgccaggugaucguggaccgcggggaccggagcggcuacuccgggaucuucagcgucgagggcaaguccugcaucaaccggugcuucuacguggagcucauccgcggccggaaggaggagaccgaggugcuguggaccagcaacagcaucgucguguucugcgggacguccggcaccuacgggaccggcagcuggccggacggggccgaccugaaccucaugcacaccuga

SEQ ID NO: 14276 - RNA, 1410 nt, Artificial Sequence
  FLUAV/H3N2/A/Hong Kong/45/2019__EPI1691929 neuraminidase CDS gc (NA)
augaaccccaaccagaagaucaucaccaucggcagcgugucccugaccaucagcacgaucugcuucuucaugcagaucgccauccucaucaccaccgucacccugcacuucaagcaguacgaguucaacucccugccgaacaaccaggugaugcucugcgagcccacgaucaucgagcgcaacaucaccgagaucguguaccugaccaacaccacgaucgagaaggagaucugccccaagcccgccgaguaccggaacuggagcaagccgcagugcgggaucaccggcuucgcgcccuucuccaaggacaacagcauccgccuguccgccgggggcgacaucugggucacccgggagcccuacgugagcugcgaccucgacaagugcuaccaguucgcccuggggcagggcaccacgcugaacaacgugcacuccaacaacaccguccgcgaccggacccccuaccgcacccuccugaugaacgagcugggcgugccguuccaccucgggacgaagcaggucugcaucgccuggagcuccagcuccugccacgacggcaaggccuggcugcacgugugcaucaccggggacgacaagaacgcgaccgccagcuucaucuacaacggccggcugguggacuccguggucagcugguccaacgacauccuccgcacccaggagagcgagugcgugugcaucaacgggacgugcaccguggucaugaccgacggcaacgccaccggcaaggccgacacgaagauccuguucaucgaggaggggaagaucgugcacaccuccaagcugagcggcagcgcgcagcacguggaggagugcuccugcuacccccgguaccccgggguccgcugcgugugccgggacaacuggaagggcagcaaccgccccaucaucgacaucaacaucaaggaccacuccaucgugagcuccuacgucugcagcggccucgugggggacaccccgcggaaguccgacagcuccagcuccagccacugccugaaccccaacaacgaggagggcgggcacggcgugaaggggugggccuucgacgacggcaacgacgucuggaugggccgcaccaucaacgagacgucccggcugggguacgagaccuucaagguggucgagggcuggagcaaccccaaguccaagcuccagaucaaccgccaggugaucguggaccgcggggaccggagcggcuacuccgggaucuucagcgucgagggcaaguccugcaucaaccggugcuucuacguggagcugauccgcggccggaaggaggagaccgaggugcuguggaccagcaacagcaucgucguguucugcgggacguccggcaccuacgggaccggcagcuggcccgacggggccgaccucaaccugaugcacaucuga

SEQ ID NO: 14277 - RNA, 1410 nt, Artificial Sequence
  FLUAV/H3N2/A/South Australia/34/2019__EPI1387330 neuraminidase CDS gc (NA)
augaaccccaaccagaagaucaucaccaucggcagcgugucccugaccaucagcacgaucugcuucuucaugcagaucgccauccucaucaccaccgucacccugcacuucaagcaguacgaguucaacuccccgcccaacaaccaggugaugcugugcgagcccacgaucaucgagcgcaacaucaccgagaucguguaccucaccaacaccacgaucgagaaggagaucugccccaagccggccgaguaccggaacuggagcaagccccagugcgggaucaccggcuucgcgcccuucuccaaggacaacagcauccgccuguccgccgggggcgacaucugggucacccgggagcccuacgugagcugcgaccuggacaagugcuaccaguucgcccucgggcagggcaccacgcugaacaacgugcacuccaacaacaccguccgcgaccggaccccguaccgcacccugcucaugaacgagcugggcgugcccuuccaccuggggacgaagcaggucugcaucgccuggagcuccagcuccugccacgacggcaaggccuggcuccacgugugcaucaccggggacgacaagaacgcgaccgccagcuucaucuacaacggccggcugguggacuccguggucagcugguccaacgacauccugcgcacccaggagagcgagugcgugugcaucaacgggacgugcaccguggucaugaccgacggcaacgccaccggcaaggccgacacgaagauccucuucaucgaggaggggaagaucgugcacaccuccaagcugagcggcagcgcgcagcacguggaggagugcuccugcuacccccgguaccccgggguccgcugcgugugccgggacaacuggaagggcagcaaccgcccgaucaucgacaucaacaucaaggaccacuccaucgugagccgguacgucugcuccggccuggugggggacacgccccgcaagagcgacuccagcuccagcucccacugccucaaccccaacaacgagaagggcgggcacggcgugaaggggugggccuucgacgacggcaacgacgucuggaugggccggaccaucaacgagaccagccgccugggguacgagaccuucaagguggucgagggcugguccaaccccaagagcaagcugcagaucaaccggcaggucaucguggaccgcggggaccgguccggcuacagcgggaucuucuccguggagggcaagagcugcaucaaccgcugcuucuacguggagcucauccggggccgcaaggaggagaccgaggugcuguggaccuccaacagcaucgucguguucugcgggacgagcggcaccuacgggaccggcuccuggccggacggggccgaccugaaccucaugcacaucuga

SEQ ID NO: 14278 - RNA, 1398 nt, Artificial Sequence
  FLUAV/H7N9/A/chicken/Zhejiang/C483/2013(H7N9)__AGN69396.1 neuraminidase CDS gc (NA)
augaaccccaaccagaagauccugugcaccagcgccaccgccaucaucaucggcgcgaucgccgugcucaucgggaucgccaaccugggccugaacaucgggcuccaccugaagccgggcugcaacugcucccacagccagcccgagacgaccaacaccucccagaccaucaucaacaacuacuacaacgagacgaacaucaccaacauccagauggaggagcgcaccagccggaacuucaacaaccugaccaaggggcucugcacgaucaacuccuggcacaucuacggcaaggacaacgccguccgcaucggcgagagcuccgacgugcuggugacccgggagcccuacgucagcugcgaccccgacgagugccgcuucuacgcccugucccaggggaccaccauccggggcaagcacagcaacgggacgauccacgaccgcucccaguaccgggcgcucaucagcuggccgcuguccagcccgcccaccguguacaacucccgcguggagugcaucggcuggagcuccaccagcugccacgacgggaagucccggaugagcaucugcaucagcggccccaacaacaacgccuccgccgucgugugguacaaccgccggcccguggccgagaucaacaccugggcgcgcaacauccugcggacgcaggagagcgagugcgucugccacaacggcgugugccccguggucuucaccgacggguccgccaccggccccgccgacacccgcaucuacuacuucaaggaggggaagauccucaagugggagagccugacgggcaccgccaagcacaucgaggagugcuccugcuacggcgagcggaccgggaucacgugcacgugccgcgacaacuggcagggcagcaaccggcccgugauccagaucgacccgguggccaugacccacaccucccaguacaucugcagccccguccugaccgacaacccccgccccaacgacccgaacaucgggaagugcaacgaccccuaccccggcaacaacaacaacggggugaagggcuucuccuaccucgacggcgcgaacaccuggcuggggcggaccaucagcaccgccucccgcagcggcuacgagaugcugaaggugcccaacgcccucaccgacgaccgguccaagccgauccaggggcagacgaucguccugaacgccgacuggagcggcuacuccgggagcuucauggacuacugggccgagggcgacugcuaccgcgcgugcuucuacguggagcugauccgcggccggcccaaggaggacaaggugugguggaccuccaacagcaucgucuccaugugcagcagcaccgaguuccucgggcaguggaacuggcccgacggcgccaagaucgaguacuuccuguga

SEQ ID NO: 14279 - RNA, 1413 nt, Artificial Sequence
  FLUAV/H10N8/A/Jiangxi/IPB13/2013(H10N8)__AHK10769.1 neuraminidase CDS gc (NA)
augaaccccaaccagaagaucaucaccaucggcagcgugucccuggggcucgucauccugaacauccugcuccacaucgugagcaucaccgugacgguccuggugcugccgggcaacgggaacaacgaguccugcaacgagaccgugauccgcgaguacaacgagaccguccggguggagaaggugacccaguggcacaacacgaacgucaucgaguacaucgagcgccccgagaacgaccacuucaugaacaacaccgaggcccucugcgacgccaagggcuucgcgcccuucagcaaggacaacgggauccggaucggcucccgcggccacguguucgugauccgggagcccuucgucagcugcuccccgaccgagugccgcaccuucuuccugacgcaggggagccugcucaacgacaagcacuccaacggcaccgugaaggaccggagccccuaccgcacccugauguccguggagaucgggcagagccccaacgucuaccaggcccgguucgaggccguggccugguccgccaccgcgugccacgacggcaagaaguggaugacgaucggggugaccggccccgacgccaaggccgucgccguggugcacuacggcgggaucccgaccgacgucaucaacagcugggcgggcgacauccugcgcacccaggaguccagcugcacgugcauccagggggagugcuucugggugaugaccgacggccccgccaaccggcaggcccaguaccgcgccuucaaggccaagcagggcaagaucguggggcaggcggagaucuccuucaacggcgggcacaucgaggagugcagcugcuaccccaacgagggcaaggucgagugcgugugccgggacaacuggaccgggaccaaccgccccguccucgugaucuccccggaccugagcuaccgggugggcuaccugugcgccggccuccccagcgacacgccccgcggggaggacucccaguucaccggcagcugcaccucccccauggggaaccagggcuacggggucaagggcuucggcuuccggcaggggaacgacguguggaugggccgcaccaucagccggacgucccgcagcggguucgagauccugaaggugcggaacggcuggguccagaacuccaaggagcagaucaagcgccaggugguggucgacaaccugaacuggagcggguacuccggcagcuucacccucccggccgagcugaccaagcgcaacugccuggugcccugcuucuggguggagaugauccggggcaaccccgaggagaagaccaucuggacguccagcuccagcaucgucaugugcgggguggaccacgagaucgccgacugguccuggcacgacggcgccauccuccccuucgacaucgacaagauguga

SEQ ID NO: 14280 - RNA, 1401 nt, Artificial Sequence
  FLUBV/H0N0/B/Colorado/06/2017__EPI1001930 neuraminidase CDS gc (NA)
augcugcccagcaccauccagacccucacgcuguuccugaccuccggcggggugcuccugagccuguacgucuccgccagccucuccuaccugcuguacagcgacauccuccugaaguucuccccgaccgagaucaccgcccccacgaugccccuggacugcgcgaacgccagcaacgugcaggccgugaaccgcuccgccaccaagggcgucacccuccugcugcccgagccggaguggaccuacccccggcucagcugccccggguccacguuccagaaggcccugcugaucagcccccaccgcuucggcgagaccaaggggaacuccgcgccgcucaucauccgggagcccuucguggccugcggccccaacgagugcaagcacuucgcccugacccacuacgccgcgcagcccggcggguacuacaacggcacccgcggggaccggaacaagcugcgccaccucaucagcgugaagcugggcaagaucccgacggucgagaacuccaucuuccacauggccgccuggagcggguccgccugccacgacggcaaggaguggaccuacaucggcguggacgggcccgacaacaacgcccugcucaaggugaaguacggcgaggcguacaccgacaccuaccacagcuacgccaacaacauccugcggacgcaggaguccgccugcaacugcaucgggggcaacugcuaccugaugaucaccgacggcagcgccagcggggucuccgagugccgcuuccucaagauccgggagggccgcaucaucaaggagaucuuccccaccgggcgggugaagcacaccgaggagugcacgugcggcuucgccagcaacaagaccaucgagugcgcgugccgcgacaaccgguacaccgccaagcgccccuucgugaagcugaacgucgagaccgacacggccgagauccggcugaugugcaccgacaccuaccucgacaccccgcgccccaacgacggguccaucacgggccccugcgagagcgacggcgacaagggguccggcgggaucaagggcggguucgugcaccagcggaugaaguccaagaucggccgcugguacagccggaccaugagccagaccgagcgcaugggcauggggcuguacgugaaguacggcggggaccccugggccgacuccgacgcccuggcguucagcggcgucaugguguccaugaaggagccggggugguacagcuucggcuucgagaucaaggacaagaagugcgacgugcccugcaucggcaucgagaugguccacgacgggggcaaggagaccuggcacuccgccgccacggccaucuacugccucauggggagcggccagcugcugugggacaccgugaccggcguggacauggcccucuga

SEQ ID NO: 14281 - RNA, 1401 nt, Artificial Sequence
  FLUBV/H0N0/B/Washington/02/2019__EPI1368872 neuraminidase CDS gc (NA)
augcugcccagcaccauccagacccucacgcuguuccugaccuccggcggggugcuccugagccuguacgucuccgccagccucuccuaccugcuguacagcgacauccuccugaaguucuccccgaccgagaucaccgcccccacgaugccccuggacugcgcgaacgccagcaacgugcaggccgugaaccgcuccgccaccaagggcgucacccuccugcugcccgagccggaguggaccuacccccggcucagcugccccggguccacguuccagaaggcccugcugaucagcccccaccgcuucggcgagaccaaggggaacuccgcgccgcucaucauccgggagcccuucguggccugcggccccaacgagugcaagcacuucgcccugacccacuacgccgcgcagcccggcggguacuacaacggcacccgcggggaccggaacaagcugcgccaccucaucagcgugaagcugggcaagaucccgacggucgagaacuccaucuuccacauggccgccuggagcggguccgccugccacgacggcaaggaguggaccuacaucggcguggacgggcccgacaacaacgcccugcucaaggugaaguacggcgaggcguacaccgacaccuaccacagcuacgccaacaacauccugcggacgcaggaguccgccugcaacugcaucgggggcaacugcuaccugaugaucaccgacggcagcgccagcggggucuccgagugccgcuuccucaagauccgggagggccgcaucaucaaggagaucuuccccaccgggcgggugaagcacaccgaggagugcacgugcggcuucgccagcaacaagaccaucgagugcgcgugccgcgacaaccgguacaccgccaagcgccccuucgugaagcugaacgucgagaccgacacggccgagauccggcugaugugcaccgacaccuaccucgacaccccgcgccccaacgacggguccaucacgggccccugcgagagcgacggcgacaagggguccggcgggaucaagggcggguucgugcaccagcggaugaaguccaagaucggccgcugguacagccggaccaugagcaagaccgagcgcaugggcauggggcuguacgugaaguacggcggggaccccugggccgacuccgacgcccugaccuucagcggcgucaugguguccaugaaggagccggggugguacagcuucggcuucgagaucaaggacaagaagugcgacgugcccugcaucggcaucgagaugguccacgacgggggcaaggagacguggcacuccgcggccaccgccaucuacugccucauggggagcggccagcugcugugggacaccgugaccggcguggacauggcccucuga

SEQ ID NO: 14282 - RNA, 1701 nt, Artificial Sequence
  FLUAV/H1N1/A/California/7/2009__ACP41953 hemagglutinin CDS human (HA)
augaaggccauccuggugguccuccuuuacaccuucgcuacagcaaacgccgacacucugugcauuggcuaucacgcgaauaacagcacggauaccguugacacaguguuggagaagaauguaacugugacccauuccgucaacuuacuggaagauaagcacaaugggaaacuauguaagcucagaggaguggcuccccugcaucuugguaaaugcaacauagccggcuggauccuggggaauccugagugugaaucuuugucaacagcaaguagcugguccuacauuguugagaccccaucuucggacaacggaacuugcuauccgggcgauuuuaucgacuacgaggagcucagggagcagcugucaagcgugaguuccuucgaacgguuugagauuuuccccaagacaucuagcuggccuaaucacgauuccaacaagggugucaccgccgcuuguccacaugcaggggccaaaucauuuuauaagaaucugaucuggcucgugaaaaagggaaacaguuaccccaaauuaagcaagucuuauauaaaugacaagggcaaagaaguacugguucuuuggggcauccaccacccuuccacgucagcugaucaacagagcuuguaccagaacgccgacgcguacguguucgucgggaguucucgcuauuccaagaaauuuaagccagagauugcaauccgacccaaagugcgugaucaggagggaagaaugaauuacuauuggacucugguggaaccuggugacaagauuaccuucgaggccacaggcaaccuagucguuccaagguacgcuuuugccauggaacggaacgcagggagcggaaucauaauuucggauacuccggugcaugacugcaauaccacaugucaaacccccaaaggcgcuaucaacacgucucucccuuuccagaauauucacccaaucacuaucgguaagugccccaaguauguaaaauccacaaagcugcgccuugccaccgggcugagaaacauuccuucaauacagaguaggggauuguuuggcgcgaucgccggcuucauugaagggggauggacugguaugguggacggcugguacggguaucaucaccagaaugaacaaggaagcggcuacgcagcugaucucaaauccacacagaacgccaucgacgagauaaccaauaaggucaacucugugauugagaaaaugaauacgcaguuuaccgcuguugguaaggaguucaaccaccuggaaaagcggaucgaaaauuuaaacaaaaagguggaugacggguuccuggauaucuggacauacaaugccgagcuccuuguccuguuggaaaacgagcgcacucuagacuaucaugauagcaaugugaaaaaccuguacgagaagguacgaucacagcucaaaaacaaugcaaaggaaauuggcaacggauguuuugaguucuaucacaagugcgacaauaccuguauggaaaguguuaaaaacggcacauacgauuauccaaaguacuccgaggaagccaaacugaauagagaggagaucgacggggugaaacuugaaagcacuaggauuuaucaaauacuggcuaucuacucuaccgucgcgucaaguuuggugcucgucgugagccugggagcaauuuccuuuuggaugugcucuaacgguucguuacagugccggaucuguaucuga

SEQ ID NO: 14283 - RNA, 1701 nt, Artificial Sequence
  FLUAV/H1N1/A/Michigan/45/2015__EPI662594 hemagglutinin CDS human (HA)
augaaggccauccuggugguccuccuuuacaccuucacaacugcuaacgcagacacgcugugcauuggcuaucacgccaauaacagcaccgauacaguugacacuguguuggagaagaauguaaccgugacacauuccgucaacuuacuggaagauaagcacaaugggaaacuauguaagcucagaggaguggcgccccugcaucuugguaaaugcaacauagcuggcuggauccuggggaauccugagugugaaucuuugucaaccgccaguagcugguccuacauuguugagacuucuaacucggacaauggaacaugcuauccaggcgauuuuaucaacuacgaagaacucagggagcagcugucaagcgugaguuccuucgaacgguuugagauuuucccgaagaccucuagcuggcccaaucacgacuccaacaagggugucacggcagccuguccucaugcuggggcaaaaucauuuuauaagaaucugaucuggcucgugaaaaagggaaacaguuacccaaaauuaaaucaaagcuauauaaacgauaagggcaaggaaguacugguucuuuggggcauccaccaccccucuacuaccgccgaccagcaguccuuguaccagaacgcugaugccuacguguucgucgggacaucacgcuauagcaaaaaguuuaaaccugagauugcgacucgaccaaaggugcgugaccaagagggaagaaugaauuacuauuggacccugguggaacccggugauaaaaucacauucgaggcaaccggcaaccuagucguuccuagguacgccuuuacgauggaacggaaugcugggaguggaauuaucauaucugacacuccagugcaugauugcaacacaaccugucagacuccggagggcgccauuaauacaucccuccccuuccagaacauccacccuauuaccaucgguaagugcccaaaauauguaaagagcacgaagcugcgccuugcaaccgggcugagaaaugugcccucgauccagucuaggggauuguuuggcgcuauugccggcuucauagaagggggauggacagguauggucgacggcugguacggguaucaucaccaaaacgagcagggauccggcuacgcggccgaccucaaaucaacucagaaugcaaucgauaagauuaccaacaaagugaauaguguuaucgagaagaugaacacacaguuuacugcuguggguaaagaguucaaucaccuggagaagcggauagaaaacuuaaauaagaaagucgacgauggguuccuggacauuuggaccuacaacgccgagcuccuugugcuguuggaaaacgagcgcacacuagauuaucaugacagcaauguaaagaaccuguacgagaaaguucgaaaucaacucaagaacaaugcuaaagaaaucggcaacggauguuuugaguucuaucacaagugcgauaauaccuguauggaauccgugaagaacggcacuuacgacuauccuaaauacucugaggaagccaagcugaauagagagaaaaucgauggggucaaacuugagagcacgaggauuuaucagauccuggcaauuuacucaacaguggccaguuccuugguccucgugguuagccugggagcuauaucuuuuuggaugugcucaaacgguaguuuacagugccggaucuguauuuga

SEQ ID NO: 14284 - RNA, 1701 nt, Artificial Sequence
  FLUAV/H1N1/A/Netherlands/602/2009__ACQ45338 hemagglutinin CDS human (HA)
augaaggccauccuggugguccuccuuuacaccuucgcuacagcaaacgccgacacucugugcauuggcuaucacgcgaauaacagcacggauaccguugacacaguguuggagaaaaauguaacugugacccauuccgucaacuuacuggaagauaagcacaaugggaaacuauguaagcucagaggaguggcuccccugcaucuugguaaaugcaacauagccggcuggauccuggggaauccugagugugaaucuuugucaacagcaaguagcugguccuacauuguugagaccucuucgucagacaacggaacuugcuauccaggcgauuuuaucgacuacgaggagcucagggagcagcugagcaguguguccucuuucgaacgguuugagauuuucccgaagacaagcuccuggcccaaucacgauucaaacaagggugucaccgccgcuuguccucaugcaggggccaaaaguuuuuauaagaaucugaucuggcucgugaaaaagggaaacagcuacccaaaauuaucuaaguccuauauaaaugacaagggcaaagaaguacugguucuuuggggcauccaccaccccucaacgagcgcugaucaacagaguuuguaccagaacgccgacgcguacguguucgucgggucuucccgcuauagcaagaaauuuaagccugagauugcaauccgaccaaaagugcgugaucaggagggaagaaugaauuacuauuggacucugguggaacccggugacaagauuaccuucgaggccacaggcaaccuagucguuccuagguacgcuuuugccauggaacggaacgcagggucgggaaucauaauuucugauacuccagugcaugacugcaauaccacaugucaaaccccgaaaggcgcuaucaacacgucccuccccuuccagaauauucacccuaucacuaucgguaagugcccaaaguauguaaaaucaacaaagcugcgccuugccaccgggcugagaaacgugcccaguauucagagcaggggauuguuuggcgcgauagccggcuucaucgaagggggauggacugguauggucgacggcugguacggguaucaucaccagaaugaacaaggauccggcuacgcagcugaucucaaaucuacacagaacgccauugacgagaucaccaauaaggugaacagcguuauagagaaaaugaauacgcaguuuaccgcuguggguaaggaguucaaccaccuggaaaagcggauugaaaauuuaaacaaaaaggucgaugacggguuccuggauaucuggacauacaaugccgagcuccuugugcuguuggaaaacgagcgcacucuagacuaucaugauucaaauguaaagaaccuguacgagaagguucgaagucagcucaaaaacaaugcaaaggaaaucggcaacggauguuuugaguucuaucacaagugcgacaauaccuguauggaauccgugaaaaacggcacauacgauuauccuaaguacagcgaggaagccaaacugaauagagaggagauugacggggucaaacuugaaucuacuaggaucuaucaaauucuggcuauauacucaaccguggcgaguagcuugguccucgugguuucccugggagcaaucucuuuuuggaugugcucgaacgguagcuuacagugccggauuuguaucuga

SEQ ID NO: 14285 - RNA, 1701 nt, Artificial Sequence
  FLUAV/H3N2/A/Hong Kong/4801/2014__EPI643118 hemagglutinin CDS human (HA)
augaagaccaucauugcccugagcuacauacucugccuuguguucgcucagaaaauccccggcaacgacaauuccacagcaacucuguguuuggggcaccaugccgucccuaacggaacgauuguuaagaccaucacaaaugauagaauugaggugacuaacgcgaccgaauuaguacaaaauucuucaaucggugagauaugcgacaguccacaccagauccuggauggcgaaaacuguacacuaauugacgcucuccugggggauccgcagugcgacggauuucagaauaaaaagugggaucuuuucguggagaggagcaaagccuauuccaacuguuaccccuaugacgucccugauuacgcaucucugcggucguugguggccucaagcggcacccucgaauuuaauaacgagaguuucaauuggacugguguuacacaaaacgggaccuccucugcuugcauccgccgaagcuccucaaguuucuucagccgucugaauuggcugacgcaucucaacuauaaguacccagcauuaaaugugacuaugcccaacaacgagcaguuugacaagcuguauauuuggggaguccaccauccuggcaccgauaaagaccagaucuucccauacgcccagucuuccggcagaauaauugugucaacaaagaggagccaacaggcuguaauccccaauauugggagucggccucgcaucagagauaucccaucuaggauuuccauauacuggacuaucguuaaaccgggagacauucuuuugaucaacagcaccgguaaucugauagcgccccggggcuauuuuaagcuacgcucggggaaaucuuccauuaugcgaucagacgccccuaucggaaaguguaagagugaaugcaucacaccaaacggcagcauucccaaugauaaaccuuuccagaacgugaauagaaucaccuacggugcauguccaagguaugucaagcacuccacgcucaaacuggccacugggaugcggaacgugcccgagaagcagacacguggaauuuuuggcgcuauagccggcuucaucgaaaaugggugggagggaaugguggacgguugguacggcuuucgccaccaaaacucugaggggagaggacaggcagcugaucuuaaaagcacccaggccgcgauugaccaaaucaauggcaagcugaacagguugaucgguaaaacuaaugaaaaguuccaucagauugagaaggaauuuucagaggucgaagggcggauacaggaucucgagaaauauguugaggacacaaagaucgaucuguggaguuacaacgccgaauuacugguggcacucgagaaucagcacaccauugaccuuacggauuccgaaaugaacaaacuguuugagaagaccaaaaagcaauugcgagaaaacgcugaggacaugggcaauggaugcuucaagaucuaucauaaaugugauaacgccugcauuggcagcauccgcaaugggacauacgaccacaacguauacagagacgaggcucuaaauaacagguuucagauaaagggaguggaacugaaaucugguuauaaggauuggauccucuggauuucauucgccaucaguugcuuucugcuuugugucgcacuguugggcuucauuaugugggccugccagaaagggaauauccgguguaacauaugcauuuga

SEQ ID NO: 14286 - RNA, 1758 nt, Artificial Sequence
  FLUBV/H0N0/B/Brisbane/60/2008__FJ766840 hemagglutinin CDS human (HA)
augaaggccaucauugugcugcucauggucguuaccagcaacgcugacagaauaugcacaggcaucacuuccucuaauucaccccacgugguaaaaacggcaacccagggggaggugaacgucacaggagugauuccucuuacuaccacaccaaccaagagucauuucgccaaucugaaagguacugaaacaaggggcaaguuguguccgaaaugcuuaaacuguaccgaucuggacguugcgcuagggcggcccaagugcacgggaaagaucccuagcgcucgcguguccauucuccacgagguccgaccagugacuucuggcuguuuucccaucaugcaugaucguaccaaaauaagacaacugccuaaucuucugagggguuacgaacacauccgguugucgacacauaacguaauuaaugccgagaacgcaccagggggacccuauaagaucggcacuucaggcagcugcccuaauauuaccaacgggaauggauucuuugccacaauggcuugggcaguuccgaaaaacgacaagaauaaaaccgccacgaacccacucacuaucgaagugcccuacauauguacagagggugaggaucagauuaccgucuggggcuuccacagugacaaugaaacucagauggcuaagcuguauggggauuccaagccucagaaauuuacaucuagcgccaacggagugaccacgcacuacgugucccaaaucggcgguuucccaaaccagaccgaggacgggggacugccccagucaggccgcauugucguugauuauauggugcagaagaguggcaaaacagggacuaucaccuaccaaagaggaauccucuuaccucagaagguauggugcgcgagcgguaggucuaaagugauuaagggcucccugccacuuauaggggaagcagacuguuugcaugagaaauauggaggccugaauaagucaaagcccuacuacacaggugagcacgccaaagcuaucgggaacugcccgauuugggucaagacuccucuaaaacucgccaauggcaccaaguaucggcccccagcaaaacugcuuaaggaacgcggauuuuucggcgcuaucgccggguuucuggagggagguugggaaggcaugauagcgggguggcauggauacacaagccacggcgcccacgguguggcaguugcugccgauuugaagaguacccaggaggcuauuaacaaaaucacuaagaaucucaacucucuguccgaauuagaggugaaaaaucugcagcgacucagcggggccauggacgagcuucauaacgaaauccuggaguuggaugaaaaggucgacgaccuaagagcagauacgauuucgucucaaaucgagcuggccgugcuccuguccaaugaaggcauuauaaacucagaggacgagcaccuucuggcuuuggaaaggaaacucaagaagaugcugggaccuagugcgguagagaucggcaauggguguuucgaaacaaaacauaagugcaaccagaccugcuuagaucggauugcagccggaacuuuugacgcuggugaguucagccugcccaccuuugauucccuaaauaucacagccgcaucucucaacgacgauggccuggacaaucacaccauccuuuuguauuacagcacugccgcuucaagucuggccguuacacucaugauugcaauauucguggucuauauggugucccgugauaacgucagcuguucuaucugccuguga

SEQ ID NO: 14287 - RNA, 1755 nt, Artificial Sequence
  FLUBV/H0N0/B/Phuket/3073/2013__EPI540671 hemagglutinin CDS human (HA)
augaaggccaucauugugcugcucauggucguuaccagcaacgcugacagaauaugcacaggcaucacuuccucuaauucaccccacgugguaaaaacggcaacccagggggaagugaacgucacaggagugauuccucuuacuaccacaccaaccaagaguuacuucgccaaucugaaagguacuaggacacggggcaaguuguguccggauugcuuaaacuguaccgaccuggauguugcgcuagggcgccccaugugcgugggaacgacuccuagcgcuaaagccuccauccuccaugaaguccgaccagugaccucuggcuguuuucccauuaugcacgaccguacaaagaucagacaacugccuaaucuucugagggguuaugagaagauacgguugucgacucagaacguaaucgaugcagaaaaagccccagggggacccuaccgccucggcaccucaggcagcugcccuaaugcuacaaguaagauuggguucuuugcaaccauggccugggcuguuccaaaagacaacuauaagaaugccacgaacccgcugacuguggagguccccuacaucuguacagaaggagaggaucagauuaccgugugggguuuccauuccgacaauaaaacucagaugaagucucuguauggcgauagcaacccucaaaaguuuacauccucagcgaauggggugaccacgcacuacgucagucagaucggagacuucccagaucagaccgaggacggcggucucccccagagcgggagaauaguuguggauuauaugaugcaaaaaccuggaaagacaggcacuauuguauaccagaggggcguguuacugccacagaaagucuggugcgcaucugggcgguccaaggugaucaaaggaucacuucccuugauuggugaagccgacugucugcaugaggaauacggcgggcuaaacaagagcaaaccguauuacaccggaaagcacgcuaaggccaucggcaauugcccuaucuggguuaaaacaccccucaagcuggcaaacgguacuaaauaucgcccuccagcuaaacuucugaaggagcgaggguuuuucggcgccauugcgggauuuuuggagggcgggugggaaggaaugauagccgguuggcacggcuacaccagucauggggcacacggaguggcugucgccgcugaccucaagucuacacaggaggccaucaacaagauuaccaaaaaucugaacuccuuaagcgaacuggaggugaagaaucuccaaagacuuucgggcgcaauggaugaacugcauaacgagaucuuggagcuagacgaaaaaguagaugaccugagggccgauacuauaucuucccagauugagcucgcuguucugcuuucaaaugaagguaucaucaacagugaggacgaacaccuguuggcgcucgagcggaagcugaaaaagauguuagggcccagcgcaguggauauuggcaauggauguuucgagacgaagcacaaaugcaaccagacaugccuggaccguaucgccgcuggcaccuuuaaugccggggaguucucccuaccaacuuuugauucucucaacauuaccgcagccagccugaaugacgauggacuugacaaccauacaauauugcuguauuacucaaccgcugccaguucccucgcagucacucugaugcuugcgaucuucauuguguauauggucagccgcgacaaugugucuuguucaaucugccuguga

SEQ ID NO: 14288 - RNA, 1695 nt, Artificial Sequence
  FLUAV/H1N1/A/Brisbane/02/2018__EPI1212834 hemagglutinin CDS human (HA)
augaaggccauccuggugguccuccuuuacaccuucacaacugcuaacgcagacacgcugugcauuggcuaucacgccaauaacagcaccgauacaguugacacuguguuggagaagaauguaaccgugacacauuccgucaacuuacuggaagauaagcacaaugggaaacuauguaagcucggagguguggcgccccugcaucuuggcaaaugcaacauagcuggguggauccugggaaauccugagugugaaucuuugucaaccgccagaaguuggagcuacauuguugagacuuccaacucugacaauggcacaugcuauccaggugauuuuaucaacuacgaagaacucagggagcagcugucgucagugagcaguuucgaacgguuugagauuuucccgaagaccuccucuuggcccaaucacgacagcaacaagggggucacggcagccuguccucaugcuggagcaaaauccuuuuauaagaaucugaucuggcucgugaaaaagggcaacucauacccaaaauuaaaucaaacuuauauaaacgauaagggcaaggaaguacugguucuuugggggauccaccaucccccuaccacagccgaccagcagaguuuguaccagaacgcugaugccuacguguucgucggaacuagccgcuauucuaaaaaguuuaaaccagagauugcgacccgacccaaggugcgugacagagaggguaggaugaauuacuauuggacacugguggaaccuggcgauaaaaucaccuucgaggcaacggggaaccuagucguuccacgguacgccuuuacuauggaacgcaaugcuggauccggcauuaucauaucagacacaccggugcacgauugcaacaccacuugucaaacagccgagggugcaauuaauaccagccuccccuuccagaacguacacccugugacgaucgggaagugcccaaaauaugucaagaguaccaagcugagacuugcuacaggacugaggaaugugcccucuauucagucccggggcuuguuuggcgccaucgcgggguucaucgaaggagguuggacuggcaugguugacgggugguacggauaucaucaccagaacgagcaaggcagcgguuacgccgcagaccucaaaucgaaugcuauugauaagauaaccaacaaagucaauucugugaucgagaagaugaacacacaguuuacugccguggggaaagaguucaaucaccuggagaagcgcauugaaaacuuaaauaagaaaguagacgauggcuuccuggacaucuggaccuacaacgcugagcuccuuguucuguuggaaaacgagcgaacacuagauuaucaugacuccaaugugaagaaccuguacgagaaagucagaaaucagcucaagaacaaugccaaagaaauaggaaacggcuguuuugaguucuaucacaagugcgauaauaccuguauggaaucagugaagaacgggacuuacgacuauccuaaauacagugaggaagcaaagcugaauagggagaaaauugauggagucaaacuugagagcacgcggaucuaucagauccuggccauuuacuccacaguggcuucuagcuugguucucgugguaucacugggugcgaucaguuuuuggaugugcuccaacggcagcuuacaaugccguauuuguauauga

SEQ ID NO: 14289 - RNA, 1695 nt, Artificial Sequence
  FLUAV/H1N1/A/Brisbane/02/2018__EPI1671767 hemagglutinin CDS human (HA)
augaaggccauccuggugguccuccuuuacaccuucacaacugcuaacgcagacacgcugugcauuggcuaucacgccaauaacagcaccgauacaguugacacuguguuggagaagaauguaaccgugacacauuccgucaacuuacuggaagauaagcacaaugggaaacuauguaagcucggagguguggcgccccugcaucuuggcaaaugcaacauagcuggguggauccugggaaauccugagugugaaucuuugucaaccgccagaaguuggagcuacauuguugagacuuccaacucugacaauggcacaugcuauccaggugauuuuaucaacuacgaagaacucagggagcagcugucgucagugagcaguuucgaacgguuugagauuuucccgaagaccuccucuuggcccaaucacgacagcaacaagggggucacggcagccuguccucaugcuggagcaaaauccuuuuauaagaaucugaucuggcucgugaaaaagggcaacucauacccaaaauuaaaucaaacuuauauaaacgauaagggcaaggaaguacugguucuuugggggauccaccaucccccuaccacagccgaccagcagaguuuguaccagaacgcugaugccuacguguucgucggaacuagccgcuauucuaaaaaguuuaaaccagagauugcgacccgacccaaggugcgugaccaagaggguagaaugaauuacuauuggacacugguggaaccuggcgauaaaaucaccuucgaggcaacggggaaccuagucguuccaagguacgccuuuacuauggaacggaaugcuggauccggcauuaucauaucagacacaccggugcacgauugcaacaccacuugucagacagccgagggugcaauuaauaccagccuccccuuccagaacguacacccugugacgaucgggaagugcccaaaauaugucaagaguaccaagcugcgccuugcuacaggacugagaaaugugcccucuauucaguccaggggcuuguuuggcgccaucgcgggguucaucgaaggagguuggacuggcaugguugacgggugguacggauaucaucaccaaaacgagcagggcagcgguuacgccgcagaccucaaaucgaaugcuauugauaagauaaccaacaaagucaauucugugaucgagaagaugaacacacaguuuacugccguggggaaagaguucaaucaccuggagaagcggauugaaaacuuaaauaagaaaguagacgauggcuuccuggacaucuggaccuacaacgcugagcuccuuguucuguuggaaaacgagcgcacacuagauuaucaugacuccaaugugaagaaccuguacgagaaaguccgaaaucagcucaagaacaaugccaaagaaauaggaaacggcuguuuugaguucuaucacaagugcgauaauaccuguauggaaucagugaagaacgggacuuacgacuauccuaaauacagugaggaagcaaagcugaauagagagaaaauugauggagucaaacuugagagcacgaggaucuaucaaauccuggccauuuacuccacaguggcuucuagcuugguucucgugguaucacugggugcgaucaguuuuuggaugugcuccaacggcagcuuacagugccggauuuguauauga

SEQ ID NO: 14290 - RNA, 1695 nt, Artificial Sequence
  FLUAV/H1N1/A/Guangdong-Maonan/SWL1536/2019__EPI1542570 hemagglutinin CDS human (HA)
augaaggccauccuggugguccuccuuuacaccuucacaacugcuaacgcagacacgcugugcauuggcuaucacgccaauaacagcaccgauacaguugacacuguguuggagaagaauguaaccgugacacauuccgucaacuuacuggaagauaagcacaaugggaaacuauguaagcucagaggaguggcgccccugcaucuugguaaaugcaacauagcuggcuggauccuggggaauccugagugugaaucuuugucaaccgccaggaguuggagcuacauuguugagacuuccaacucugacaauggaacaugcuauccaggcgauuuuaucaacuacgaggagcuccgggagcagcugucgucagugagcaguuucgaacgcuuugagauuuucccgaagaccuccucuuggcccaaucacgacagcgauaagggugucacggcagccuguccucaugcuggggcaaaauccuuuuauaagaaccugaucuggcucgugaaaaagggaaauucauacccaaaauuaaaccaaacuuauauaaaugacaagggcaaggaaguacugguucuuuggggcauccaccaucccccuaccauugccgcucaggagaguuuguaccagaacgccgaugcguacguguucgucgggacaagccgauauucuaaaaaguuuaaaccagagaucgcaacucgucccaaggugagagaccaggaaggaaggaugaacuacuauuggacccugguggagccuggugauaaaauuacauucgaagccaccggcaaucuagucguuccacgguacgcuuuuacgauggagcgcgacgccggguccggaaucauaauuucagauacuccggugcacgacugcaacacaaccugucaaacucccgaaggcgcaaucaauacaagccucccuuuccagaacguacacccaauuaccaucgguaagugccccaaauaugugaagaguacgaagcugagacuugcuaccgggcugaggaaugucccuucuauccagucccggggauuguuuggcgccauugcgggcuucauagaagggggauggacagguaugguggacggcugguacggguaucaucaccagaacgagcaaggaagcggcuacgccgcagaucucaaaucgaaugcuaucgacaagauuacuaacaaaguuaauucugugaucgaaaagaugaacacccaguuuacagccgucgguaaagaguucaaucaccuggaaaagcgcauagagaacuuaaauaagaaaguggaugacggguuccuggauauuuggacuuacaacgcugaacuccuuguacuguuggagaaugagcgaacccuagacuaucaugauuccaacguuaagaaccuguacgaaaaagugagaaaucagcucaagaacaaugccaaagagaucggcaacggauguuuugaguucuaucacaagugcgacaauacauguauggaaucagucaagaacggcaccuacgauuauccaaaauacagugaagaggcaaagcugaauagggagaaaaucgacggggugaaacuugaaagcacucggauuuaucagauccuggccauuuacuccacggucgcuucuagcuuggugcucguugugucacugggagcgauaaguuuuuggaugugcuccaacgguagcuuacaaugccguaucuguauuuga

SEQ ID NO: 14291 - RNA, 1695 nt, Artificial Sequence
  FLUAV/H1N1/A/Guangdong-Maonan/SWL1536/2019__EPI1590725 hemagglutinin CDS human (HA)
augaaggccauccuggugguccuccuuuacaccuucacaacugcuaacgcagacacgcugugcauuggcuaucacgccaauaacagcaccgauacaguugacacuguguuggagaagaauguaaccgugacacauuccgucaacuuacuggaagauaagcacaaugggaaacuauguaagcucagaggaguggcgccccugcaucuugguaaaugcaacauagcuggcuggauccuggggaauccugagugugaaucuuugucaaccgccaggaguuggagcuacauuguugagacuuccaacucugacaauggaacaugcuauccaggcgauuuuaucaacuacgaggagcuccgggagcagcugucgucagugagcaguuucgaacgcuuugagauuuucccgaagaccuccucuuggcccaaucacgacagcgauaagggugucacggcagccuguccucaugcuggggcaaaauccuuuuauaagaaccugaucuggcucgugaaaaagggaaauucauacccaaaauuaaaccaaacuuauauaaaugacaagggcaaggaaguacugguucuuuggggcauccaccaucccccuaccauugccgugcaggagaguuuguaccagaacgcugaugccuacgucuucguggggacaagccgauauucuaaaaaguuuaaaccagagaucgcgacucgucccaaggugagagaccaggaaggaaggaugaacuacuauuggacccuggucgagccuggugauaaaauuacauucgaagcaaccggcaaucuaguugugccacgguacgccuuuacgauggagcgcgacgcuggguccggaaucauaauuucagauacuccgguacacgacugcaacacaaccugucaaacucccgaaggcgccaucaauacaagccucccuuuccagaacgugcacccaauuaccaucgguaagugccccaaauaugucaagaguacgaagcugagacuugcaaccgggcugaggaaugugccuucuauccagucccggggauuguuuggcgcuauugccggcuucauagaagggggauggacagguaugguugacggcugguacggguaucaucaccagaacgagcaaggaagcggcuacgcggccgaucucaaaucgaaugcaaucgacaagauuacuaacaaagucaauucugugaucgaaaagaugaacacccaguuuacagcuguggguaaagaguucaaucaccuggaaaagcgcauagagaacuuaaauaagaaaguagaugacggguuccuggauauuuggacuuacaacgccgaacuccuuguucuguuggagaaugagcgaacccuagacuaucaugauuccaacgugaagaaccuguacgaaaaagucagaaaucagcucaagaacaaugcuaaagagaucggcaacggauguuuugaguucuaucacaagugcgacaauacauguauggaaucagugaagaacggcaccuacgauuauccaaaauacagugaagaggccaagcugaauagggagaaaaucgacggggucaaacuugaaagcacucggauuuaucagauccuggcaauuuacuccacgguggccucuagcuugguucucgugguaucacugggagcuauaaguuuuuggaugugcuccaacgguagcuuacaaugccguaucuguauuuga

SEQ ID NO: 14292 - RNA, 1701 nt, Artificial Sequence
  FLUAV/H3N2/A/Singapore/INFIMH-16-0019/2016__EPI1106227 hemagglutinin CDS human (HA)
augaagaccaucauugcccugagcuacauacucugccuuguguucgcucagaaaauccccggcaacgacaauuccacagcaacucuguguuuggggcaccaugccgucccuaacggaacgauuguuaagaccaucacaaaugauagaauugaggugacuaacgcgaccgaauuaguacaaaauucuucaaucggugagauaugcgacaguccacaccagauccuggauggcgaaaacuguacacuaauugacgcucuccugggggauccgcagugcgacggauuucagaauaaaaagugggaucuuuucguggagaggagcaaagccuauuccaacuguuaccccuaugacgucccugauuacgcaucucugcggucguugguggccucaagcggcacccucgaauuuaagaaugagaguuucaacuggacugguguuacacaaaaugggaccuccucugcuugcauccgcggaagcuccucaaguuucuucagccgacugaacuggcugacgcaucucaauuauacuuacccagcauuaaacgugaccaugcccaauaaggagcaguuugacaaacuguauauuuggggcguccaccauccuggcacagauaaggaccagaucuuccuuuacgcccagucuuccgggcguauaacugugucaaccaaaagaagccaacaggcuguaauuccaaacaucggaaguaggccccggauucgcgauaucccuucuagaaucuccauuuacuggacaauaguuaagccaggugacaucuugcugauuaacagcaccggcaaucuaaucgccccgaggggguauuuuaaaauacggucgggaaagucuuccauuaugcgcucagacgcgcccaucggcaaguguaaaagugaaugcaucacgccuaacgguagcauuccaaaugauaagcccuuccagaacgugaaucgaaucacuuacggggcauguccuagauaugucaaacacuccacacucaagcuggccaccggaaugaggaacgugccagagaaacagacucggggcauuuuuggcgcuauagccggguucaucgaaaauggaugggaggguaugguggacggcugguacggguuucgucaccaaaacucugagggacgcggccaggcagcugaucuuaagagcacacaggccgcgauugaccaaaucaaugguaaacugaacagauugaucgggaagaccaaugaaaaguuccaucagauugagaaagaauuuucagaggucgaaggcaggguucaggaucucgagaaguauguggaggacacgaaaauagaucuguggaguuacaacgccgaauuacugguagcacucgagaaucagcacaccaucgaccuuacagauuccgaaaugaacaagcuguuugagaaaacuaagaagcaauugcgggaaaaugcugaggacaugggaaacggcugcuucaaaauuuaucauaagugugauaacgccugcaucgagagcauucgaaaugaaaccuacgaccacaacguguaccgcgacgaggcucuaaauaacagauuucagaucaaaggggucgaacugaagucuggauauaaagauuggauacucuggaucucauucgccauuaguugcuuucugcuuuguguggcacuguuggguuucaucaugugggccugccagaagggcaauauuagguguaacaucugcauauga

SEQ ID NO: 14293 - RNA, 1701 nt, Artificial Sequence
  FLUAV/H3N2/A/Singapore/INFIMH-16-0019/2016__EPI1341068 hemagglutinin CDS human (HA)
augaagaccaucauugcccugagcuacauacucugccuuguguucgcucagaaaauccccggcaacgacaauuccacagcaacucuguguuuggggcaccaugccgucccuaacggaacgauuguuaagaccaucacaaaugauagaauugaggugacuaacgcgaccgaauuaguacaaaauucuucaaucggugagauaugcgacaguccacaccagauccuggauggcgaaaacuguacacuaauugacgcucuccugggggauccgcagugcgacggauuucagaauaaaaagugggaucuuuucguggagaggagcaaagccuauuccaacuguuaccccuaugacgucccugauuacgcaucucugcggucguugguggccucaagcggcacccucgaauuuaagaaugagaguuucaacuggacugguguuacacaaaaugggaccuccucugcuugcauccgcggaagcuccucaaguuucuucagccgacugaacuggcugacgcaucucaauuauaaguacccagcauuaaacgugacuaugcccaauaaagagcaguuugacaagcuguauauuuggggcguccaccauccuggcaccgauaaagaccagaucuucccauacgcccagucuuccgggcguauaacagugucaacuaagagaagccaacaggcuguaauucccaacaucggaaguaggccucggauucgcgguaucccaucuagaaucuccauuuacuggaccauaguuaaaccgggcgauauccuuuugauuaacagcacagggaaucugaucgcccccaggggauauuuuaagauacggucgggcaagucuuccauuaugcgcucagacgcgccuaucgguaaauguaagagugaaugcaucaccccaaacgggagcauucccaaugacaaaccuuuccagaacgugaaucgaaucacguacggagcauguccaagauaugucaagcacuccacucuaaaacucgccacaggcaugaggaacgugcccgagaagcagacccggggcauuuuuggggcuauagccggauucaucgaaaaugguugggagggcaugguggaugggugguacggauuucgucaccaaaacucugagggccgcggucaggcagcugaccugaaaagcacucaggccgcgauugaucaaaucaaugggaaacuuaacagacugaucggcaagacaaaugaaaaguuccaucagauugagaaggaauuuucagaggucgaaggaaggguucaggacuuggagaaauauguggaggauaccaagauagaccucuggaguuacaacgccgaacuguuaguagcacuggagaaucagcacacgaucgaucucaccgacuccgaaaugaacaaacuuuuugagaagacaaagaaacaacugcgggaaaaugcugaggauaugggcaacgggugcuucaagauuuaucauaaaugugacaacgccugcaucgagagcauucgaaaugaaacuuacgaucacaacguguaccgcgacgaggcuuugaauaacagauuucagaucaagggagucgaacuaaaaucugguuauaaggacuggauacuguggaucucauucgccauuaguugcuuucuccuguguguggcacuucugggcuucaucaugugggccugccagaaggggaauauuagguguaacaucugcauauga

SEQ ID NO: 14294 - RNA, 1701 nt, Artificial Sequence
  FLUAV/H3N2/A/Singapore/INFIMH-16-0019/2016 NYMC-X-307__EPI1259099 hemagglutinin CDS human (HA)
augaagaccaucauugcccugagcuacauacucugccuuguguucgcucagaaaauccccggcaacgacaauuccacagcaacucuguguuuggggcaccaugccgucccuaacggaacgauuguuaagaccaucacaaaugauagaauugaggugacuaacgcgaccgaauuaguacaaaauucuucaaucggugagauaugcgacaguccacaccagauccuggauggcgaaaacuguacacuaauugacgcucuccugggggauccgcagugcgacggauuucagaauaaaaagugggaucuuuucguggagaggagcaaagccuauuccaacuguuaccccuaugacgucccugauuacgcaucucugcggucguugguggccucaagcggcacccucgaauuuaagaaugagaguuucaacuggacugguguuacacaaaaugggaccuccucugcuugcauccgcggaagcuccucaaguuucuucagccgacugaacuggcugacgcaucucaauuauaaguacccagcauuaaacgugacuaugcccaauaaagagcaguuugacaagcuguauauuuggggcguccaccauccuggcaccgauaaagaccagaucuucccauacgcccagucuuccgggcguauaacagugucaacuaagagaagccaacaggcuguaauucccaacaucggaaguaggccucggauucgcgguaucccaucuagaaucuccauuuacuggaccauaguuaaaccgggcgauauccuuuugauuaacagcacagggaaucugaucgcccccaggggauauuuuaagauacggucgggcaagucuuccauuaugcgcucagacgcgccuaucgguaaauguaagagugaaugcaucaccccaaacgggagcauucccaaugacaaaccuuuccagaacgugaauaagaucacguacggagcauguccacgauaugucaaacacuccacucuaaagcucgccacaggcaugagaaacgugcccgagaaacagaccaggggcauuuuuggggcuauagccggauucaucgaaaaugguugggagggcaugguggaugggugguacggauuucggcaccaaaacucugagggccguggucaggcagcugaccuuaagagcacucaggccgcgauugaucaaaucaaugggaagcugaaccgccugaucggcaaaacaaaugaaaaguuccaucagauugagaaagaauuuucagaggucgaaggaagaguucaggacuuggagaaguauguggaggauaccaaaauagaccucuggaguuacaacgccgaacuguuaguagcacuggagaaucagcacacgaucgaucucaccgacuccgaaaugaacaaacuuuuugagaagacaaagaagcaacugagggaaaaugcugaggauaugggcaacgggugcuucaaaauuuaucauaagugugacaacgccugcaucgagagcauucggaaugaaacuuacgaucacaacguguaccgagacgaggcuuugaauaaccgcuuucagaucaaaggagucgaacuaaagucugguuauaaggacuggauacuguggaucucauucgccauuaguugcuuucuccuguguguggcacuucugggcuucaucaugugggccugccagaaagggaauauuagauguaacaucugcauauga

SEQ ID NO: 14295 - RNA, 1701 nt, Artificial Sequence
  FLUAV/H3N2/A/Singapore/INFIMH-16-0019/2016-CDC-LV18A__EPI1583318 hemagglutinin CDS human (HA)
augaagaccaucauugcccugagcuacauacucugccuuguguucgcucagaaaauccccggcaacgacaauuccacagcaacucuguguuuggggcaccaugccgucccuaacggaacgauuguuaagaccaucacaaaugauagaauugaggugacuaacgcgaccgaauuaguacaaaauucuucaaucggugagauaugcgacaguccacaccagauccuggauggcgaaaacuguacacuaauugacgcucuccugggggauccgcagugcgacggauuucagaauaaaaagugggaucuuuucguggagaggagcaaagccuauuccaacuguuaccccuaugacgucccugauuacgcaucucugcggucguugguggccucaagcggcacccucgaauuuaagaaugagaguuucaacuggacugguguuacacaaaaugggaccuccucugcuugcauccgcggaagcuccucaaguuucuucagccgacugaacuggcugacgcaucucaauuauaaguacccagcauuaaacgugacuaugcccaauaaagagcaguuugacaagcuguauauuuggggcguccaccauccuggcaccgauaaagaccagaucuucccauacgcccagucuuccgggcguauaauugugucaacaaagagaagccaacaggcuguaauccccaacauuggaaguaggccucggauccgcgauaucccaucuagaauuuccauauacuggacuaucguuaaaccgggugacauucuuuugaucaacagcaccggcaaucugauagcccccaggggguauuuuaagauucggucgggaaagucuuccaucaugcgcucagacgcgccuaucggcaaauguaagagugaaugcauuacaccaaacgguagcauccccaaugauaaaccuuuccagaacgugaaucgaauuaccuacggggcauguccaagauaugucaagcacuccacgcuaaaacucgccacuggaaugaggaacgugcccgagaagcagacacggggcauauuuggcgcuaucgccggguucauugaaaauggaugggaggguaugguggacggcugguacggguuucgucaccaaaacucugagggacgcggccaggcagcugaucugaaaagcacccaggccgcgaucgaccaaaucaaugguaaacuuaacagacugauugggaagacuaaugaaaaguuccaucagauagagaaggaauuuucagaggucgaaggcaggguucaggauuuggagaaauauguggaggacacaaagaucgaucucuggaguuacaacgccgaacuguuaguagcacuggagaaucagcacaccauugaccucacggauuccgaaaugaacaaacuuuuugagaagaccaagaaacaacugcgggaaaaugcugaggacaugggaaacggcugcuucaagaucuaucauaaaugugauaacgccugcauugagagcauccgaaaugaaacauacgaccacaacguguaccgcgacgaggcuuugaauaacagauuucagauaaagggggucgaacuaaaaucuggauauaaggauuggauccuguggauuucauucgccaucaguugcuuucuccuguguguggcacuucuggguuucauuaugugggccugccagaagggcaauaucagguguaacauaugcauuuga

SEQ ID NO: 14296 - RNA, 1701 nt, Artificial Sequence
  FLUAV/H3N2/A/Kansas/14/2017__EPI1146345 hemagglutinin CDS human (HA)
augaagaccaucauugcccugagcugcauacucugucuuguguucgcucagaaaauccccggcaacgacaauuccacagcaacucugugcuuggggcaccaugccgucccuaacggaacgauuguuaagaccaucacaaaugauagaauugaggugacuaacgcgaccgaauuaguacaaaauucuucaaucggugagauaugugacaguccacaccagauccuggauggcgaaaacugcacacuaauugacgcucuccugggggauccgcagugugacggauuucagaauaaaaagugggaucuuuucguggagaggaacaaagccuacagcaauugcuaucccuacgacgucccugauuaugcaucccugcggucuuugguggccucgucaggcacccucgaauuuaacaaugagagcuucaacugggcugguguuacucaaaaugggacaaguuccucuuguauccgcggaagcaaguccucauuuuucagucgacugaacuggcugacccaucucaauagcaaguacccagcauuaaacgugacgaugcccaacaaugagcaguuugacaaacuguauauuuggggcguccaccauccuggcacugauaaggaccagaucucucuuuacgcccaguccucagggcguauaaccgugagcacaaaaagaagucaacaggcuguaauuccaaacaucggaucuaggccccggauucgcgauaucccuuccagaaucagcauuuauuggacuauaguuaagccaggugacaucuugcugauuaauucgaccggcaaccuaaucgccccgaggggguacuucaaaauacggucuggaaaguccucaauuaugcgcagugacgcgcccaucggcaagugcaaaagcgaauguaucacaccuaaugguuccauuccaaacgauaagcccuuucagaaugugaaccgaaucaccuacggggcaugcccuagauaugucaaacagucuacgcucaagcuggccacuggaaugaggaaugugccagagcggcaaacacguggcauuuucggcgcuauagccggguuuaucgaaaacggaugggaggguaugguggacggcugguacggguuccgccaccagaauagcgagggaagaggccaggcagcugaucuuaaaucaacccaagccgcgauugaccagaucaacgguaagcugaauagguugaucgggaaaacuaacgaaaaguuucaccagauugagaaggaguucagugaagucgaaggccggauacaggaucucgagaaauauguugaggacacaaagaucgaucugugguccuacaaugccgaauuacugguggcacucgagaaccaacauaccauugaccuuacggauagcgaaaugaacaaacuguucgagaagaccaaaaagcaguugcgagaaaaugcugaggacaugggaaacggcuguuuuaagaucuaucacaaaugcgauaaugccugcauggggucuauucgcaacggaacauacgaccauaauguauauagagacgaggcucuaaacaauagguuccagaucaaggguguggaacugaaaucaggcuacaaggauuggauacucuggaucaguuuugccauuagcuguuuccugcuuugcgucgcacuguugggguuuaucaugugggccugucagaaaggaaacauucggugcaauaucuguauauga

SEQ ID NO: 14297 - RNA, 1701 nt, Artificial Sequence
  FLUAV/H3N2/A/Kansas/14/2017__EPI1261067 hemagglutinin CDS human (HA)
augaagaccaucauugcccugagcugcauacucugucuuguguucgcucagaaaauccccggcaacgacaauuccacagcaacucugugcuuggggcaccaugccgucccuaacggaacgauuguuaagaccaucacaaaugauagaauugaggugacuaacgcgaccgaauuaguacaaaauucuucaaucggugagauaugugacaguccacaccagauccuggauggcgaaaacugcacacuaauugacgcucuccugggggauccgcagugugacggauuucagaauaaaaagugggaucuuuucguggagaggaacaaagccuacagcaauugcuaucccuacgacgucccugauuaugcaucccugcggucuuugguggccucgucaggcacccucgaauuuaacaaugagagcuucaacugggcugguguuacucaaaaugggacaaguuccucuuguauccgcggaagcaaguccucauuuuucagucgacugaacuggcugacccaucucaauagcaaguacccagcauuaaacgugacgaugcccaacaaugagcaguuugacaaacuguauauuuggggcguccaccauccuggcacugauaagaaccagaucucucuuuacgcccaguccucagggcguauaaccgugagcacaaaaagaagucaacaggcuguaauuccaaauaucggaucuaggccccggauucgcgacaucccuuccagaaucagcauuuauuggacuauaguuaagccaggugauaucuugcugauuaccucgacaggcaaccuaaucgccccgaggggguacuucaaaauacggucuggaaaguccucaauuaugcgcagugacgcgcccaucggcaagugcaaaagcgaauguaucaccccuaaugguuccauuccaaacgacaagcccuuucagaaugugaaccgaaucacguacggggcaugcccuagauaugucaaacagucuacucucaagcuggccacaggaaugaggaaugugccagagcggcaaacccguggcauuuucggcgcuauagccggguuuaucgaaaacggaugggaggguaugguggauggcugguacggguuccgccaccagaauagcgagggaagaggccaggcagcugaccuuaaaucaacucaagccgcgauugaucagaucaacgguaagcugaauagguugaucgggaaaacaaacgaaaaguuucaccagauugagaaggaguucagugaagucgaaggccggauacaggaccucgagaaauauguugaggauaccaagaucgaccugugguccuacaaugccgaauuacugguggcacucgagaaccaacauacgauugaucuuaccgacagcgaaaugaacaaacuguucgagaagacuaaaaagcaguugcgagaaaaugcugaggauaugggaaacggcuguuuuaagaucuaucacaaaugcgacaaugccugcauggggucuauucgcaacggaacauacgaucauaauguauauagagacgaggcucuaaacaauagguuccagaucaaggguguggaacugaaaucaggcuacaaggacuggauacucuggaucaguuuugccauuagcuguuuccugcuuugcgucgcacuguugggguuuaucaugugggccugucagaaaggaaacauucggugcaauaucuguauauga

SEQ ID NO: 14298 - RNA, 1701 nt, Artificial Sequence
  FLUAV/H3N2/A/Kansas/14/2017__EPI1691978 hemagglutinin CDS human (HA)
augaagaccaucauugcccugagcugcauacucugucuuguguucgcucagaaaauccccggcaacgacaauuccacagcaacucugugcuuggggcaccaugccgucccuaacggaacgauuguuaagaccaucacaaaugauagaauugaggugacuaacgcgaccgaauuaguacaaaauucuucaaucggugagauaugugacaguccacaccagauccuggauggcgaaaacugcacacuaauugacgcucuccugggggauccgcagugugacggauuucagaauaaaaagugggaucuuuucguggagaggaacaaagccuacagcaauugcuaucccuacgacgucccugauuaugcaucccugcggucuuugguggccucgucaggcacccucgaauuuaacaaugagagcuucaacugggcugguguuacucaaaaugggacaaguuccucuuguauccgcggaagcaaguccucauuuuucagucgacugaacuggcugacccaucucaauagcaaguacccagcauuaaacgugacgaugcccaacaaugagcaguuugacaaacuguauauuuggggcguccaccauccugugacugauaagaaccagaucucucuuuacgcccaguccucaggccguauaaccguaagcacaaaaagaagucaacaggcuguuauuccaaauaucggguauaggccccggauucgcgacaucccuucuagaaucuccauuuacuggacuauagugaagccaggagauaucuugcugauuaacagcaccgguaaucuaaucgccccgaggggcuacuucaaaauacggucggggaagucuuccauuaugcgcucagacgcgcccaucggaaagugcaaaagugaauguaucacaccuaacggcagcauuccaaaugacaagcccuuucagaacgucaaucgaaucaccuauggugcaugcccuagauacgugaaacaguccacgcucaagcuggccacugggaugaggaacgugccagagcggcaaacacguggaauuuucggcgcuauagccggcuuuaucgaaaaugggugggagggaauggucgaugguugguauggcuuccgccaccagaacucugaggggagaggacaggcagcugaccuuaaaagcacccaagccgcgauugaucagaucaauggcaagcugaacagguugaucgguaaaacuaaugaaaaguuucaccagauugagaaggaguucucagaaguugaagggcggauacaggaccucgagaaauacguggaggauacaaagaucgaccuguggaguuauaacgccgaauuacugguagcacucgagaaccaacauaccauugaucuuacggacuccgaaaugaauaaacuguucgagaagaccaaaaagcaguugcgagaaaacgcugaggauaugggcaauggauguuuuaagaucuaccacaaaugcgacaacgccugcaugggcagcauucgcaaugggacauaugaucauaacguguacagagacgaggcucuaaauaacagguuccagaucaagggagucgaacugaaaucugguuacaaggacuggauacucuggaucucauuugccauuaguuguuuccugcuuugcguggcacuguugggcuuuaucaugugggccugucagaaagggaauauucggugcaacaucuguauauga

SEQ ID NO: 14299 - RNA, 1701 nt, Artificial Sequence
  FLUAV/H3N2/A/Kansas/14/2017 CBER-22B CDC19A__EPI1388416 hemagglutinin CDS human (HA)
augaagaccaucauugcccugagcugcauacucugucuuguguucgcucagaaaauccccggcaacgacaauuccacagcaacucugugcuuggggcaccaugccgucccuaacggaacgauuguuaagaccaucacaaaugauagaauugaggugacuaacgcgaccgaauuaguacaaaauucuucaaucggugagauaugugacaguccacaccagauccuggauggcgaaaacugcacacuaauugacgcucuccugggggauccgcagugugacggauuucagaauaaaaagugggaucuuuucguggagaggaacaaagccuacagcaauugcuaucccuacgacgucccugauuaugcaucccugcggucuuugguggccucgucaggcacccucgaauuuaacaaugagagcuucaacugggcugguguuacucaaaaugggacaaguuccucuuguauccgcggaagcaaguccucauuuuucagucgacugaacuggcugacccaucucaauagcaaguacccagcauuaaacgugacgaugcccaacaaugagcaguuugacaaacuguauauuuggggcguccaccauccugugacugauaagaaccagaucucucuuuacgcccaguccucaggccguauaaccguaagcacaaaaagaagucaacaggcuguuauuccaaauaucggguauaggccccggauucgcgacaucccuucuagaaucuccauuuacuggacuauagugaagccaggagauaucuugcugauuaacagcaccgguaaucuaaucgccccgaggggcuacuucaaaauacggucggggaagucuuccauuaugcgcucagacgcgcccaucggaaagugcaaaagugaauguaucacaccuaacggcagcauuccaaaugacaagcccuuucagaacgucaaucgaaucaccuauggugcaugcccuagauacgugaaacaguccacgcucaagcuggccacugggaugaggaacgugccagagcggcaaacacguggaauuuucggcgcuauagccggcuuuaucgaaaaugggugggagggaauggucgaugguugguauggcuuccgccaccagaacucugaggggagaggacaggcagcugaccuuaaaagcacccaagccgcgauugaucagaucaauggcaagcugaacagguugaucgguaaaacuaaugaaaaguuucaccagauugagaaggaguucucagaaguugaagggcggauacaggaccucgagaaauacguggaggauacaaagaucgaccuguggaguuauaacgccgaauuacugguagcacucgagaaccaacauaccauugaucuuacggacuccgaaaugaauaaacuguucgagaagaccaaaaagcaguugcgagaaaacgcugaggauaugggcaauggauguuuuaagaucuaccacaaaugcgacaacgccugcauuggcagcauccgcaaugggacauaugaucauaacguguacagagacgaggcucuaaauaacagguuccagauaaagggagucgaacugaaaucugguuacaaggacuggauccucuggauuucauuugccaucaguuguuuccugcuuugcguggcacuguugggcuuuauuaugugggccugucagaaagggaauauccggugcaacauauguauuuga

SEQ ID NO: 14300 - RNA, 1701 nt, Artificial Sequence
  FLUAV/H3N2/A/Switzerland/8060/2017__EPI1154878 hemagglutinin CDS human (HA)
augaagaccaucauugcccugagcuacauacucugccuuguguucgcucagaaaauccccggcaacgacaauuccacagcaacucuguguuuggggcaccaugccgucccuaacggaacgauuguuaagaccaucacaaaugauagaauugaggugacuaacgcgaccgaauuaguacaaaauucuucaaucggugagauaugcgacaguccacaccagauccuggauggcgaaaacuguacacuaauugacgcucuccugggggauccgcagugcgacggauuucagaauaaaaagugggaucuuuucguggagaggagcaaagccuauuccucuuguuaccccuaugacgucccugauuacgcaucgcugcggucauugguggccagcaguggcacccucgaauuuaacaaugaguccuucaacuggacugguguuaagcaaaaugggacaucuagcgcuugcauccgcaaguccucaaguagcuuuuucucucgacugaacuggcugacccaucucaauuauacguacccagcauuaaacgugacuaugcccaauaacgagcaguuugacaaacuguauauuuggggaguccaccauccuggcaccgauaaggaccagaucuuccuuuacgcccaguccucaggccguauaacagugagcacuaaaagaagucaacaggcuguaauuccaaacaucgggucuaggccccggauucgcgauaucccuuccagaaucagcauuuacuggaccauaguuaagccaggagacaucuugcugauuaauucgacagguaaccuaaucgccccgaggggcuauuuuaaaauacagucugggaaguccucaauuaugcggagugacgcgcccaucggaaaguguaaaagcgaaugcaucaccccuaauggcuccauuccaaacgauaagcccuuccagaaugugaaccgcaucacguacggugcauguccucgauaugucaaacacucuacucucaagcuggccacagggaugagaaaugugccagagaaacaaaccaggggaauuuuuggcgcuauagccggcuucaucgaaaacgggugggagggaaugguggacgguugguacggcuuucggcaccagaauagcgaggggcguggacaggcagcugaucuuaagucaacucaagccgcgauugaccagaucaacggcaaacugaaucgcuugaucgguaagacaaacgaaaaguuccaucagauugagaaagaguucagugaagucgaagggagaauacaggaucucgagaaguauguugaggacaccaaaaucgaucugugguccuacaaugccgaauuacugguggcacucgagaaccaacacacgauugaccuuaccgauagcgaaaugaauaagcuguuugagaaaacaaagaagcaguugagggaaaacgcugaggacaugggcaacggaugcuucaaaaucuaucauaagugugauaaugccugcauuggcucuauccggaacgggacuuacgaccacaauguauaccgagacgaggcucuaaacaaucgcuuucagauaaaaggaguggaacugaagucagguuauaaagauuggauccucuggauuaguuucgccaucagcugcuuucugcuuugugucgcacuguugggcuucauuaugugggccugccagaaggggaacaucagauguaauauaugcauuuga

SEQ ID NO: 14301 - RNA, 1701 nt, Artificial Sequence
  FLUAV/H3N2/A/Switzerland/8060/2017__EPI1266285 hemagglutinin CDS human (HA)
augaagaccaucauugcccugagcuacauacucugccuuguguucgcucagaaaauccccggcaacgacaauuccacagcaacucuguguuuggggcaccaugccgucccuaacggaacgauuguuaagaccaucacaaaugauagaauugaggugacuaacgcgaccgaauuaguacaaaauucuucaaucggugagauaugcgacaguccacaccagauccuggauggcgaaaacuguacacuaauugacgcucuccugggggauccgcagugcgacggauuucagaauaaaaagugggaucuuuucguggagaggagcaaagccuauuccucuuguuaccccuaugacgucccugauuacgcaucgcugcggucauugguggccagcaguggcacccucgaauuuaacaaugaguccuucaacuggacugguguuaagcaaaaugggacaucuagcgcuugcauccgcaaguccucaaguagcuuuuucucucgacugaacuggcugacccaucucaauuauaaauacccagcauuaaacgugacgaugcccaauaacgagcaguuugacaagcuguauauuuggggaguccaccauccuggcacugauaaagaccagaucuucccauacgcccaguccucaggccguauaaccgugagcacaaagagaagucaacaggcuguaauucccaacaucgggucuaggccucggauucgcgauaucccauccagaaucagcauuuacuggacuauaguuaaaccgggagacauccuuuugauuaauucgaccgguaaccugaucgcccccaggggcuauuuuaagauacagucugggaaguccucaauuaugcggagugacgcgccuaucggaaaauguaagagcgaaugcaucacaccaaauggcuccauucccaacgauaaaccuuuccagaaugugaaccgcaucaccuacggugcauguccacgauaugucaagcacucuacgcuaaaacucgccacugggaugagaaaugugcccgagaagcaaacaaggggaauuuuuggcgcuauagccggcuucaucgaaaacgggugggagggaaugguggacgguugguacggcuuucggcaccagaauagcgaggggcguggacaggcagcugaucugaaaucaacccaagccgcgauugaccagaucaacggcaaacuuaaucgccugaucgguaagacuaacgaaaaguuccaucagauugagaaggaguucagugaagucgaagggagaauacaggauuuggagaaauauguugaggacacaaagaucgaucucugguccuacaaugccgaacuguuaguggcacuggagaaccaacacaccauugaccucacggauagcgaaaugaauaaacuuuuugagaagaccaagaaacagcugagggaaaacgcugaggacaugggcaacggaugcuucaagaucuaucauaaaugugauaaugccugcauuggcucuauccggaacgggacauacgaccacaauguauaccgagacgaggcuuugaacaaucgcuuucagauaaagggaguggaacuaaaaucagguuauaaggauuggauccuguggauuaguuucgccaucagcugcuuucuccugugugucgcacuucugggcuucauuaugugggccugccagaaggggaacaucagauguaauauaugcauuuga

SEQ ID NO: 14302 - RNA, 1701 nt, Artificial Sequence
  FLUAV/H3N2/A/Hong Kong/2671/2019__EPI1543098 hemagglutinin CDS human (HA)
augaagaccaucauugcccugagcuacauacucugccuuguguucacacagaaaauccccggcaacgacaauuccacugcuacgcuguguuuggggcaccaugcagucccuaacggaaccauuguuaagacaaucacuaaugauagaauugaggugaccaacgccacagaauuaguacaaaauucuucaaucggugagauaugcgacaguccacaccagauccuggauggcgggaacuguacccuaauugacgcgcuccugggagauccgcagugcgacggcuuucagaauaaaaagugggaucuuuucguggaaaggagccgggcuuauuccaacuguuaccccuaugacgucccugauuacgccucucugcgcucguugguggcaucaagcgguacucucgaguuuaaaaaugaaaguuucaacugggccgggguuacacaaaauggaaaguccuuuucuugcauccgaggcagcuccucaaguuucuuuagccgucugaacuggcugacccaucucaauuauacguacccagcuuuaaacgugacuaugcccaauaaggagcaguucgacaaacuguauauuuggggcguccaccauccugggaccgauaaggaccagaucucucuuuacgcacaguccucaggaagaauaacagugagcacuaaaaggagucaacaggccguaauuccaaacaucgguucucggccccgcauuagagauaucccuuccaggaucagcauuuacuggaccauaguuaagccaggcgacaucuugcugauuaacucgacagggaaucuaaucgcuccgcggggauauuuuaaaauacgcucuggcaaguccucaauuaugcgaagugacgcccccaucgguaaguguaaaagcgagugcaucaccccuaacggguccauuccaaaugauaagcccuuccagaacgugaauagaaucacguacggagcguguccuagguaugucaaacagucuacucucaagcuggcaacaggcaugcggaacgugccagaaaaacaaacccguggcauuuuuggggccauagcuggauucaucgagaaugguugggaaggcaugguggacgggugguacggauuucgccaccagaacagcgagggcagaggucaggccgcagaucuuaagucaacucaagcugccauugaccagaucaaugggaaacugaacagguugaucggcaagacaaaugagaaguuccaccagauugaaaaagaguucagugaagucgagggacggguucaggaucucgaaaaguauguggaggacaccaaaauagaucugugguccuacaacgcggaguuacugguagcccucgaaaaucaacauacgaucgaccuuaccgauagcgagaugaacaagcuguuugagaaaacaaagaagcaguugcgagaaaaugcagaagacaugggcaacgggugcuucaaaauuuaucacaagugugauaacgcuugcaucggaucuauucgcaaugagacuuacgaccauaacguguacagagacgaggcccuaaauaacagguuucagaucaaaggugucgaacugaagucaggcuauaaagauuggauacucuggaucaguuucgcuauuagcugcuuucugcuuuguguggcccuguugggguucaucaugugggcaugccagaagggaaauauucgguguaacaucugcauauga

SEQ ID NO: 14303 - RNA, 1701 nt, Artificial Sequence
  FLUAV/H3N2/A/Hong Kong/2671/2019__EPI1642843 hemagglutinin CDS human (HA)
augaagaccaucauugcccugagcuacauacucugccuuguguucacacagaaaauccccggcaacgacaauuccacugcuacgcuguguuuggggcaccaugcagucccuaacggaaccauuguuaagacaaucacuaaugauagaauugaggugaccaacgccacagaauuaguacaaaauucuucaaucggugagauaugcgacaguccacaccagauccuggauggcgggaacuguacccuaauugacgcgcuccugggagauccgcagugcgacggcuuucagaauaaaaagugggaucuuuucguggaaaggagccgggcuuauuccaacuguuaccccuaugacgucccugauuacgccucucugcgcucguugguggcaucaagcgguacucucgaguuuaaaaaugaaaguuucaacugggccgggguuacacaaaauggaaaguccuuuucuugcauccgaggcagcuccucaaguuucuuuagccgucugaacuggcugacccaucucaauuauauuuacccagcuuuaaacgugacgaugcccaauaaggagcaguucgacaaacuguauaucuggggcguccaccauccugugacugauaaggaccagauaucucuuuacgcacaguccucagggagaauuaccguaagcacaaaaaggagucaacaggccguuaucccaaacauuggaucucggccccgcaucagaaacaucccuuccaggauuagcauauacuggacuaucgugaagccaggugauauuuugcugaucaauucgaccggcaaccuaauagcuccgcggggguauuuuaaaauucgcucuggaaaguccucaaucaugcgaagugacgcccccaucggcaaguguaaaagcgagugcauuacaccuaaugguuccaucccaaacgacaagcccuuccagaaugucaacagaauuaccuacggggcguguccuagguaugugaaacagucuacgcucaagcuggcaacuggaaugcggaaugugccagaaaaacaaacacguggcauauuuggcgccaucgcuggguucauugagaacggaugggaagguauggucgauggcugguacggguuucgccaccagaauagcgagggaagaggccaggccgcagaccuuaagucaacccaagcugccaucgaucagaucaacgguaaacugaauagguugauugggaagacuaacgagaaguuccaccagauagaaaaagaguucagugaaguugagggccgggugcaggaccucgaaaaguauguagaggauacaaaaaucgaccugugguccuacaaugcggaguuacugguggcccucgaaaaccaacauaccauugaucuuacggacagcgagaugaauaagcuguuugagaaaaccaagaagcaguugcgagaaaacgcagaagauaugggaaacggcugcuucaaaaucuaucacaagugugacaaugcuugcauugggucuauccgcaacgagacauacgaucauaaugucuacagagacgaggcccuaaacaauagguuucagauaaaaggaguggaacugaagucagguuauaaagacuggauccucuggauuaguuucgcuaucagcugcuuucugcuuuguguugcccuguugggcuucauuaugugggcaugccagaaggggaacauccgguguaauauaugcauuuga

SEQ ID NO: 14304 - RNA, 1701 nt, Artificial Sequence
  FLUAV/H3N2/A/Hong Kong/45/2019__EPI1691930 hemagglutinin CDS human (HA)
augaagaccaucauugcccugagcuacauacucugccuuggcuucacacagaaaauccccgggaacgacaauuccacugcuacgcuguguuugggacaccaugcagugccuaacgguaccauugucaagacaaucacuaaugauagaauugagguuaccaacgccacagaauuagugcaaaauucuucaaucggcgagauaugcgacaguccacaccagauccuggaugggggaaacuguacccuaauugacgcgcuccugggcgauccgcagugcgacgguuuucagaauaaaaagugggaucuuuucguagaaaggagccgggcuuauuccaacuguuaccccuaugacgugccugauuacgccucucugcgcucguuggucgcaucaagcgggacucucgaguuuaaaaaugaaaguuucaacugggccggagugacacaaaauggcaaguccuuuucuugcauccgaggcagcuccucaaguuucuuuagccgucugaacuggcugacccaucucaauuauacguacccagcuuuaaacguuacuaugcccaauaaggagcaguucgacaaacuguauauuuggggagugcaccauccugggaccgauaaggaccagaucucucuuuacgcacaguccucagguagaauaacagucagcacuaaaaggagucaacaggccgugauuccaaacaucggcucucggccccgcauuagagauaucccuuccaggaucagcauuuacuggaccauaguaaagccaggggacaucuugcugauuaacucgacaggaaaucuaaucgcuccgcggggcuauuuuaaaauacgcucugguaaguccucaauuaugcgaagugacgcccccaucgggaaguguaaaagcgagugcaucaccccuaacggauccauuccaaaugauaagcccuuccagaacguuaauagaaucacguacggcgcguguccuagguaugugaaacagaacacucucaagcuggcaacaggcaugcggaaugucccagaaaaacaaacccgugggauuuuuggagccauagcugguuucaucgagaacggcugggaagggaugguggacggaugguacggcuuucgccaccaaaauucugaggguagagggcaggccgcagaucuuaagagcacucaggcugccauugaccagaucaacggcaaacugaauagguugaucggaaagacaaacgagaaguuccaccagauugaaaaagaguucucagaaguggagggccggguccaggaucucgaaaaguauguugaggacaccaaaauagaucuguggaguuacaaugcggaguuacugguggcccucgaaaaccaacauacgaucgaccuuaccgauuccgagaugaauaagcuguuugagaaaacaaagaagcaguugcgagaaaacgcagaagacauggggaacggaugcuucaaaauuuaucacaagugugauaaugcuugcaucgguagcauucgcaacgagacuuacgaccauaauguauacagagacgaggcccuaaacaauagguuucagaucaaaggcguggaacugaagucuggguauaaagauuggauacucuggaucucauucgcuauuaguugcuuucugcuuugugucgcccuguugggauucaucaugugggcaugccagaagggcaacauucgguguaauaucugcauauga

SEQ ID NO: 14305 - RNA, 1701 nt, Artificial Sequence
  FLUAV/H3N2/A/South Australia/34/2019__EPI1387331 hemagglutinin CDS human (HA)
augaagaccaucauugcccugagcuacauacucugccuuguguucgcucagaaaauccccggcaacgacaauuccacagcaacucuguguuuggggcaccaugccgucccuaacggaacgauuguuaagaccaucacaaaugauagaauugaggugacuaacgcgaccgaauuaguacaaaauucuucaaucggugagauaugcgacaguccacaccagauccuggauggcgggaacuguacacuaauugacgcucuccugggagauccgcagugcgacggcuuucagaauaaaaagugggaucuuuucguggaaaggagccgggccuauuccaacuguuaccccuaugacgucccugauuacgcaucucugcgcucguugguggccucaagcgguacccucgaguuuaaaaaugaaaguuucaacuggacugggguuaagcaaaauggaacauccucugcuugcauccgaggcagcuccucaaguuucuuuagccgucugaacuggcugacccaucucaauuauacguacccagcauuaaacgugacuaugcccaauaaggagcaguuugacaaacuguauauuuggggcguccaccauccugggaccgauaaggaccagaucuuccuuuacgcccagucuuccggaagaauaacagugucaacuaaaaggagccaacaggcuguaauuccaaacaucgguuuucggccccgcauuagagauaucccuaguaggaucucuauuuacuggaccauaguuaagccaggcgacaucuugcugauuaacuccacagggaaucuaaucgccccgcggggauauuucaaaauacgcagcggcaagucgucuauuaugcgauccgacgcgcccaucgguaaguguaaaucagagugcaucaccccuaacgggaguauuccaaaugauaagcccuuucagaacgugaauagaaucacguacggagcauguccuagguaugucaaacagagcacucucaagcuggccacaggcaugcggaacgugccagaaaaacaaacccguggcauuuucggggcuauagccggauuuaucgagaaugguugggaaggcaugauggacgggugguacggauuccgccaccagaacuccgagggcagaggucaggcagcugaucuuaagucuacucaagccgcgauugaccagaucaaugggaaacugaacagguugaucggcaagacaaaugagaaguuccaccagauugaaaaagaguuuagcgaaguggagggacggguccaggaucucgaaaaguauguugaggacaccaaaauagaucuguggucauacaacgccgaguuacugguggcacucgaaaaucaacauacgaucgaccuuaccgauagugagaugaacaagcuguucgaaaagacaaagaagcaguugcgagagaaugcugaagacaugggcaacgggugcuuuaaaauuuaucacaagugugauaacgccugcaucggauccauucgcaaugagacuuacgaccauaacguauacagagacgaggcucuaaauaacagguuccagaucaaagguguggaacugaaaagcggcuauaaagauuggauacucuggaucucuuuugccauuucaugcuuccugcuuuguaucgcacuguugggguuuauuaugugggccugccagaagggaaauauccgguguaacauaugcauuuga

SEQ ID NO: 14306 - RNA, 1701 nt, Artificial Sequence
  FLUAV/H3N2/A/South Australia/34/2019__EPI1440494 hemagglutinin CDS human (HA)
augaagaccaucauugcccugagcuacauacucugccuuguguucgcucagaaaauccccggcaacgacaauuccacagcaacucuguguuuggggcaccaugccgucccuaacggaacgauuguuaagaccaucacaaaugauagaauugaggugacuaacgcgaccgaauuaguacaaaauucuucaaucggugagauaugcgacaguccacaccagauccuggauggcgggaacuguacacuaauugacgcucuccugggagauccgcagugcgacggcuuucagaauaaaaagugggaucuuuucguggaaaggagccgggccuauuccaacuguuaccccuaugacgucccugauuacgcaucucugcgcucguugguggccucaagcgguacccucgaguuuaaaaaugaaaguuucaacuggacugggguuaagcaaaauggaacauccucugcuugcauccgaggcagcuccucaaguuucuuuagccgucugaacuggcugacccaucucaauuauaaguacccagcauuaaacgugacgaugcccaauaaagagcaguuugacaagcuguauauuuggggcguccaccauccuaucacugauaaagaccagauauuccuuuacgcccagucuuccgggagaauuaccgugucaacaaagaggagccaacaggcuguaaucccaaacauuggauuucggccccgcaucagagauaucccuaguaggauuucuauauacuggacuaucguuaaaccaggugacauuuugcugaucaacuccaccggcaaucuaauagccccgcggggguauuucaagauucgcagcggaaagucgucuaucaugcgauccgacgcgcccaucggcaaauguaagucagagugcauuacaccuaacgguaguaucccaaaugauaaacccuuucagaacgugaauagaauuaccuacggggcauguccuagguaugucaagcagagcacgcucaaacuggccacuggaaugcggaacgugccagaaaagcaaacacguggcauauucggcgcuaucgccggguuuauugagaauggaugggaagguaugauggacggcugguacggguuccgccaccagaacuccgagggaagaggccaggcagcugaucuuaaaucuacccaagccgcgaucgaccagaucaaugguaagcugaacagguugauugggaagacuaaugagaaauuccaccagauagaaaaggaguuuagcgaaguggagggccggguccaggaucucgaaaaauauguugaggacacaaagaucgaucuguggucauacaacgccgaguuacugguggcacucgaaaaucaacauaccauugaccuuacggauagugagaugaacaaacuguucgaaaagaccaagaaacaguugcgagagaaugcugaagacaugggaaacggcugcuuuaagaucuaucacaaaugugauaacgccugcauuggguccauccgcaaugagacauacgaccauaacguauacagagacgaggcucuaaauaacagguuccagauaaagggaguggaacugaaaagcgguuauaaggauuggauccucuggauuucuuuugccaucucaugcuuccugcuuuguauugcacuguugggcuuuaucaugugggccugccagaaggggaauauacgguguaacauuugcaucuga

SEQ ID NO: 14307 - RNA, 1683 nt, Artificial Sequence
  FLUAV/H7N9/A/chicken/Zhejiang/C483/2013(H7N9)__AGN69400.1 hemagglutinin CDS human (HA)
augaacacccagauccugguguucgcccucauugcuauaauccccacaaaugcagacaagauuugccuuggccaccaugccgucagcaacgggacuaaaguuaauacgcugaccgagagaggaguggaaguagugaacgcgacagagacugucgaaaggaccaauaucccucggauuuguuccaaggguaaaaagacaguggauuugggccaaugcggguuacugggaaccaucacuggcccaccgcagugugaccaguuucuagaguucucugcugaucucauaaucgaacgccgagaggguucagacguuugcuaccccgggaaauuugugaacgaggaagcccugcgucagauucuuagagagaguggaggcaucgauaaggaagcaaugggcuucacauauagcgggauuaggaccaauggagccacguccgcuugucggcgcucugguucgucauuuuacgcagagaugaaguggcuguugagcaacacugacaaugccgcuuucccucaaaugaccaaaaguuauaagaacacaagaaaauccccagcccucaucgucuggggcauacaccauucugugagcacugcggagcagaccaagcuguacggguccggaaauaaacugguaacaguuggcucaaguaacuaucagcagagcuuugugcccucuccuggugcaaggccacaagucaaugggcaguccggacggauugauuuccacuggcucauguuaaaccccaaugacaccgugacguuuucauucaacggcgccuuuaucgcuccugaucgcgccagcuuccugcgaggcaagaguauggggauucagucuggagugcaggucgacgcaaacugcgaaggugauuguuaccauuccggcgggacuaucaucagcaaucuuccauuucaaaacauugacucgagagcuguuggaaagugcccgagguaugugaaacagcggucuuugcugcuagccacaggcaugaagaauguacccgagauaccuaaaggucguggccucuucggggcgaucgccggauucauugaaaacggcugggaggggcugaucgauggaugguacgguuuucgccaccagaaugcacaaggcgaagggaccgcugccgacuacaaguccacucagucagcuauagaccagauuacaggaaaacuuaacagacugaucgagaagaccaaucagcaauucgaguugaucgauaacgaauuuaaugagguggaaaaacagauuggcaacgucaucaauuggacgagggacaguauuaccgagguguggagcuauaacgccgaacuccugguugcaauggagaaucagcacacaauagauuuagccgacuccgagauggauaagcuguacgaacgggugaagcgacagcuccgcgagaacgcugaagaggacgguacuggguguuucgaaaucuuucauaaaugcgaugacgauuguauggcgucuauuagaaauaacaccuaugaccacagcaaguacagggaggaggcaaugcaaaaccggauccagaucgauccagucaaacuuucaaguggcuauaaggacgugauucugugguucuccuuuggagccagcugcuucauauugcuagcuaucguaaugggccugguuuuuauuugcgugaaaaaugggaacaugcgcuguacaaucugcauuuga

SEQ ID NO: 14308 - RNA, 1686 nt, Artificial Sequence
  FLUAV/H10N8/A/Jiangxi/IPB13/2013(H10N8)__AHK10761.1 hemagglutinin CDS human (HA)
auguacaagaucguggucauuauagcccugcucggcgcuguuaaagggcuugacaagaucugccugggacaccaugcaguggccaacgguaccauuguaaaaacauugacuaaugagcaggaagaggugacgaacgcgaccgaaacagucgagagcacuggcaucaauagauuauguaugaaggggaggaaacacaaggaucugggaaacugccaucccauuggcaugcuaaucgguaccccugcuugugaccuccaccugacagggaugugggauacccuuauagaacgggagaaugccaucgcauauugcuacccaggagccacugugaacguugaggcucugcgccaaaagauuauggaauccggcggcaucaauaaaauuucuacaggguucaccuauggaucaaguaucaacagcgcagguacgacucgagccuguaugcguaauggcgggaacuccuuuuacgcugaguugaaguggcucgugucuaaaucgaagggacagaauuucccgcagaccacaaacacuuauagaaauaccgacacagccgaacaucugauaauguggggcauucaccaccccucaagcacccaggagaaaaacgaucuguacgguacgcaaagucucuccaucucugucgggagcuccacuuauaggaauaacuuugugccuguaguuggagcgcggccacaggugaacggccagucaggccgcauugacuuccauuggacauuaguccagcccggggauaauaucaccuuuagucacaacggaggucugaucgcaccuagcagagugucuaaacuuauuggcaggggguugggaauacaauccgacgccccaaucgauaauaacugcgagucaaaguguuucuggcggggcgguagcauuaauacucgccugcccuuucagaaccuaaguccucgaacaguggggcagugcccaaaguacgucaauagaaggucucucaugcuggcuaccggcaugcggaacguuccggaacuuauccagggacguggccuguucggggccauagcaggauuuuuggagaaugguugggaaggcaugguggacgggugguacggauuccgccaucaaaacgcucagggcacgggucaggccgcggauuauaaguccacccaagccgcaauugaccagaucacagggaaacucaauagacugguagagaagacuaacaccgaauuugagagcaucgagucggaguucucugaaauugaacaccagaucggcaaugugauuaacuggacaaaagauuccauaacugacaucuggaccuaccaggcugaguuacuggucgccauggaaaaucaacacacaauugacauggcugauucagagaugcucaaccuuuaugagagggugcggaagcagcugcgacagaacgccgaagaggacggaaaaggcuguuuugaaaucuaccaugcaugcgaugacaguuguauggagagcauccgcaauaacaccuaugaucacucccaguacagagaagaggccuugcuaaauaggcugaacauuaaucccguuacucucucuagcggguauaaggacauaauccugugguucucauucggagcuaguugcuuugugcuucuggcggucgugauggguuuguucuuuuucugccucaagaacggcaauaugcgguguacgauuugcaucuga

SEQ ID NO: 14309 - RNA, 1752 nt, Artificial Sequence
  FLUBV/H0N0/B/Colorado/06/2017__EPI1011552 hemagglutinin CDS human (HA)
augaaggccaucauugugcugcucauggucguuaccagcuccgcugacagaauaugcacaggcaucacuucuucaaacaguccccacgugguaaaaacggcaacccagggggaggugaaugucacaggagugauuccucuuacuaccacaccaaccaagagccauuucgccaaccugaaagguacugaaacaaggggcaaguuguguccgaaaugcuuaaauuguaccgaucuggacguugcgcuagggcggcccaagugcacgggaaagaucccuuccgcucgcgugucuauucuccacgagguccgaccagugacuucgggcuguuuucccaucaugcaugaucguaccaaaauaagacaacugccuaaccuucugagggguuacgaacacguacgguugucaacacauaauguuaucaacgccgagggggcaccaggaggccccuauaagauuggcacuagcgggaguugcccuaauaucaccaacggaaaugguuucuuugccacaauggcuugggcagugccagacaaaaacaagaccgccacgaauccgcucacuauugaaguccccuacguguguacagagggcgaggaucagaucaccguguggggguuccacuccgacaacgaaacucagauggcuaaacuguauggagauucuaagccucagaaguuuacaagcuccgccaauggcgucaccacgcacuacguuucacaaauagguggguucccaaaccagaccgaggacggaggccugccccagaguggccgcauugugguagauuauauggugcagaaaagcgggaagacaggaacuaucaccuaccaaagagguauucucuuaccucagaaagucuggugcgcgucuggcagguccaaggugaucaaagggucacugccacuuaucggagaagcagacuguuugcaugagaaguauggcggucugaauaaaagcaagcccuacuacacaggggagcacgccaaggcuauuggcaacugcccgauauggguuaaaacuccucuaaagcucgccaacggaaccaaauaucggcccccagcaaagcugcuuaaagaacgcggcuuuuucggggcuaucgccggauuucuggaggguggcugggaagggaugauugcgggauggcauggcuacacaagucacggugcccacgggguggcagucgcugccgauuugaagucuacccaggaggcuaucaauaagauaacuaaaaaccucaauucccugagcgaauuagaggugaagaaccugcagcgacucucgggcgccauggacgagcuucauaaugaaauucuggaguuggaugaaaaaguagacgaccuaagagcagauacgaucucuucccaaaucgagcuggccguucuccugucaaacgaaggaauuaucaauagugaggacgagcaccuucuggcuuuggaaaggaagcucaaaaagaugcugggcccuagcgcgguggagauugggaacggauguuucgaaacaaagcauaaaugcaaucagaccugcuuagauaagauagcagccgguacuuuugacgcuggcgaguucucccugcccaccuuugauucucuaaacaucacagccgcaagccucaaugacgaugggcuggacaaccacaccauucuuuuguauuacucaacugccgcuaguucccuggccgucacacucaugaucgcaaucuucguggucuauauggugagccgggauaauguuucuuguucaauuugccuguga

SEQ ID NO: 14310 - RNA, 1752 nt, Artificial Sequence
  FLUBV/H0N0/B/Colorado/06/2017__EPI1051642 hemagglutinin CDS human (HA)
augaaggccaucauugugcugcucauggucguuaccagcuccgcugacagaauaugcacaggcaucacuucuucaaacaguccccacgugguaaaaacggcaacccagggggaggugaaugucacaggagugauuccucuuacuaccacaccaaccaagagccauuucgccaaccugaaagguacugaaacaaggggcaaguuguguccgaaaugcuuaaauuguaccgaucuggacguugcgcuagggcggcccaagugcacgggaaagaucccuuccgcucgcgugucuauucuccacgagguccgaccagugacuucgggcuguuuucccaucaugcaugaucguaccaaaauaagacaacugccuaaccuucugagggguuacgaacacguacgguugucaacacauaauguuaucaacgccgagggggcaccaggaggccccuauaagauuggcacuagcgggaguugcccuaauaucaccaacggaaaugguuucuuugccacaauggcuugggcagugccagacaaaaacaagaccgccacgaauccgcucacuauugaaguccccuacguguguacagagggcgaggaucagaucaccguguggggguuccacuccgacacugaaacacagauggcuaaacuguauggagauucuaagccucagaaguuuaccagcuccgccaacggcgucacgacccacuacguuucacaaauagguggguucccaaaucagacagaggacggaggccugccccagaguggccgcauugugguagauuauauggugcagaaaagcgggaagacuggaaccaucacauaccaaagagguauucucuuaccucagaaagucuggugcgcgucuggcagguccaaggugaucaaagggucacugccacuuaucggagaagcagacuguuugcaugagaaguauggcggucugaacaaaagcaagcccuacuacacuggggagcacgccaaggcuauuggcaauugcccgauauggguuaaaaccccucuaaagcucgccaacggaacaaaauaucggcccccagcaaagcugcuuaaagaacgcggcuuuuucggggcuaucgccggauuucuggaggguggcugggaagggaugauugcgggauggcauggcuacaccagucacggugcccacgggguggcagucgcugccgauuugaagucuacucaggaggcuaucaacaagauaacgaaaaaucucaacucccugagcgaauuagaggugaagaaucugcagcgacucucgggcgccauggacgagcuucauaacgaaauucuggaguuggaugaaaaaguagacgaccuaagagcagauacaaucucuucccaaaucgagcuggccguucuccugucaaaugaaggaauuaucaacagugaggacgagcaccuucuggcuuuggaaaggaagcucaaaaagaugcugggcccuagcgcgguggagauugggaauggauguuucgaaaccaagcauaaaugcaaccagacuugcuuagauaagauagcagccgguaccuuugacgcuggcgaguucucccugcccacauuugauucucuaaauaucaccgccgcaagccucaacgacgaugggcuggacaaucacacuauucuuuuguauuacucaacagccgcuaguucccuggccgucacgcucaugaucgcaaucuucguggucuauauggugagccgggauaacguuucuuguucaauuugccuguga

SEQ ID NO: 14311 - RNA, 1752 nt, Artificial Sequence
  FLUBV/H0N0/B/Colorado/06/2017 BX-71__EPI1151760 hemagglutinin CDS human (HA)
augaaggccaucauugugcugcucauggucguuaccagcuccgcugacagaauaugcacaggcaucacuucuucaaacaguccccacgugguaaaaacggcaacccagggggaggugaaugucacaggagugauuccucuuacuaccacaccaaccaagagccauuucgccaaccugaaagguacugaaacaaggggcaaguuguguccgaaaugcuuaaauuguaccgaucuggacguugcgcuagggcggcccaagugcacgggaaagaucccuuccgcucgcgugucuauucuccacgagguccgaccagugacuucgggcuguuuucccaucaugcaugaucguaccaaaauaagacaacugccuaaccuucugagggguuacgaacacguacgguugucaacacauaauguuaucaacgccgagggggcaccaggaggccccuauaagauuggcacuagcgggaguugcccuaauaucaccaacggaaaugguuucuuugccacaauggcuugggcagugccagacaaaaacaagaccgccacgaauccgcucacuauugaaguccccuacguguguacagagggcgaggaucagaucaccguguggggguuccacuccgacacugaaacacagauggcuaaacuguauggagauucuaagccucagaaguuuaccagcuccgccaacggcgucacgacccacuacguuucacaaauagguggguucccaaaucagacagaggacggaggccgcccccagaguggcagaauugugguagauuauauggugcagaaaagcgggaagacuggaaccaucacauaccaaagggguauucugcucccucagaaagucuggugcgcgucuggccgguccaaggugaucaaagggucauuaccacugaucggagaagcagacugucuucaugagaaguauggcgguuugaacaaaagcaagcccuacuacacuggggagcacgccaaggcuauuggcaauugcccgauauggguuaaaaccccucugaagcuagccaacggaacaaaauaucgacccccagcaaagcuccugaaagaacgcggcuuuuucggggcuaucgccggauuucuugaggguggcugggaagggaugauugcgggauggcauggcuacaccagucacggugcccacgggguggcagucgcugccgaucugaagucuacucaggaggcuaucaacaagauaacgaaaaauuugaacucccucagcgaacuggaggugaagaauuuacagagacugucgggcgccauggacgagcuccauaacgaaauucuugagcuggaugaaaaaguagacgacuugagggcagauacaaucucuucccaaaucgagcuagccguucugcucucaaaugaaggaauuaucaacagugaggacgagcaucugcuugcucuggaacggaaguugaaaaagaugcucggcccuagcgcgguggagauugggaauggauguuucgaaaccaagcacaaaugcaaccagacuugccuggauaagauagcagccgguaccuuugacgcuggcgaguucuccuuacccacauuugauucucugaauaucaccgccgcaagccuaaacgacgaugggcucgacaaucacacuauucugcuuuauuacucaacagccgcuaguuccuuggccgucacgcugaugaucgcaaucuucguggucuauauggugagccgugauaacguuucuuguucaauuugccucuga

SEQ ID NO: 14312 - RNA, 1749 nt, Artificial Sequence
  FLUBV/H0N0/B/Washington/02/2019__EPI1368874 hemagglutinin CDS human (HA)
augaaggccaucauugugcugcucauggucguuaccagcaacgcugacagaauaugcacaggcaucacuuccucuaauucaccccacgugguaaaaacggcaacccagggggaagugaacgucacaggagugauuccucuuacuaccacaccaaccaagagucauuucgccaaucugaaagguacugaaacaaggggcaaguuguguccgaaaugcuuaaacuguaccgaucuggacguugcgcuagggcggcccaagugcacgggaaagaucccuagcgcucgcguguccauucuccacgagguccgaccagugacuucuggcuguuuucccaucaugcaugaucguaccaaaauaagacaacugccuaaucuucugagggguuacgaacacguacgguugucgacacauaacguuaucaaugccgaggacgcaccagggcgccccuaugaaauuggaacuucaggcagcugcccuaacaucaccaauggcaacggguucuuugccacaauggcuugggcagugccaaagaauaaaaccgccacgaacccgcucacuauugagguccccuacaucuguacagagggagaagaucagauaaccgugugggguuuccacagugacaaugagacucagauggcuaagcuguauggcgauuccaaaccucagaaguuuacaucuagcgccaacggggugaccacgcacuacgucucccaaauuggaggcuucccaaaucagaccgaagacggugggcugccccagucaggaagaaucguuguggauuauaugguacagaagaguggcaaaacaggcacuauuaccuaccaaagggggauccucuuaccucagaagguguggugcgcgagcggacggucuaaagucaucaaggguucccugccacuuauuggcgaggcagacuguuugcaugagaaauaugggggacugaacaagucaaaacccuacuacacaggcgaacacgccaaggcuauagguaacugcccgaucugggugaagacuccucuaaaacucgccaaugggaccaaguaucgacccccagcaaaacugcuuaaggagcgcggcuuuuucggagcuauugccggcuuucuggaagggggaugggaggguaugaucgcgggcuggcauggguacacaagccacggagcccacggcguugcaguggcugccgauuugaaaaguacccaggaagcuauaaacaagauuacuaagaaucucaacucucuguccgaguuagaggucaaaaaucugcagagacucagcggugccauggacgaacuucauaacgagauccuggaauuggaugagaagguggacgaccuaagggcagauacgaucucgucucaaauugaacuggccguacuccuguccaaugaggggaucauuaacucagaggacgaacaccuucuggcuuuggagcggaaacucaagaaaaugcugggcccuagugcgguugaaauaggaaauggcuguuucgagacaaagcauaagugcaaccagaccugcuuagaucguaucgcagccgggacuuuugacgcuggagaguucagccugcccaccuuugauucccuaaauauuacagccgcaucucucaacgacgauggucuggacaaucacaccauccuuuuguauuacagcacugccgcuucaagucuggccgugacacucaugaucgcaauuuucgucguguauauggucucccgcgauaacgugagcuguucuauaugccuguga

SEQ ID NO: 14313 - RNA, 1749 nt, Artificial Sequence
  FLUBV/H0N0/B/Washington/02/2019__EPI1422452 hemagglutinin CDS human (HA)
augaaggccaucauugugcugcucauggucguuaccagcaacgcugacagaauaugcacaggcaucacuuccucuaauucaccccacgugguaaaaacggcaacccagggggaagugaacgucacaggagugauuccucuuacuaccacaccaaccaagagucauuucgccaaucugaaagguacugaaacaaggggcaaguuguguccgaaaugcuuaaacuguaccgaucuggacguugcgcuagggcggcccaagugcacgggaaagaucccuagcgcucgcguguccauucuccacgagguccgaccagugacuucuggcuguuuucccaucaugcaugaucguaccaaaauaagacaacugccuaaucuucugagggguuacgaacacguacgguugucgacacauaacguuaucaaugccgaggacgcaccagggcgccccuaugaaauuggaacuucaggcagcugcccuaacaucaccaauggcaacggguucuuugccacaauggcuugggcagugccaaagaauaaaaccgccacgaacccgcucacuauugagguccccuacaucuguacagagggagaagaucagauaaccgugugggguuuccacagugacuccgagacucagauggcuaagcuguauggcgauucuaaaccucagaaguuuacaagcuccgccaauggggugaccacgcacuacgucucacaaauuggaggcuucccaaaccagaccgaagacggugggcugccccagaguggaagaaucguuguggauuauaugguacaaaagagcggcaaaacaggcacuauuaccuaccagagggggauccucuuaccucagaagguguggugcgcgucuggacgguccaaagucaucaaggguucacugccacuuauuggcgaggcagacuguuugcaugagaaauaugggggacugaauaagagcaaacccuacuacacaggcgaacacgccaaggcuauagguaacugcccgaucugggugaagacuccucuaaaacucgccaacgggaccaaguaucgacccccagcaaaacugcuuaaggagcgcggcuuuuucggagcuauugccggcuuucuggaagggggaugggaggguaugaucgcgggcuggcauggguacacaagucacggagcccacggcguugcaguggcugccgauuugaaaucuacccaggaagcuauaaauaagauuacuaagaaccucaauucccugagcgaguuagaggucaaaaaccugcagagacucucgggugccauggacgaacuucauaaugagauccuggaauuggaugagaagguggacgaccuaagggcagauacgaucucuucccaaauugaacuggccguacuccugucaaacgaggggaucauuaauagugaggacgaacaccuucuggcuuuggagcggaaacucaagaaaaugcugggcccuagcgcgguugaaauaggaaacggcuguuucgagacaaagcauaagugcaaucagaccugcuuagaucguaucgcagccgggacuuuugacgcuggagaguucucccugcccaccuuugauucucuaaacauuacagccgcaagccucaaugacgauggucuggacaaccacaccauccuuuuguauuacucaacugccgcuaguucccuggccgugacacucaugaucgcaauuuucgucguguauauggucagccgcgauaaugugucuuguucaauaugccuguga

SEQ ID NO: 14314 - RNA, 1410 nt, Artificial Sequence
  FLUAV/H1N1/A/California/7/2009__GQ906802 neuraminidase CDS human (NA)
augaaccccaaucagaagaucauuaccauaggcagcgugugcaugacaaucgggauggccaaccugauucuccaaaucggaaauauuaucuccauauggaucucucacucaauucagcuugguaaccagaaucagaucgagacuuguaaccaaagugucauuacguacgaaaauaacaccuggguuaaucagacauaugugaacaucagcaauacuaacuucgcugcaggccaguccguagugucugucaaacuggccggaaauucgucauugugcccugugagcggaugggcgauauacaguaaggacaacuccguuagaauuggcucuaaaggugauguguuugucaucagggagccauucauuagcuguuccccguuagaaugccggaccuuuuuccugacacagggggcucuacucaaugacaagcauucaaacggaaccaucaaagaucgcagucccuaucgaacucugaugagcuguccuaucggcgaggugccaucucccuacaacucccguuuugaaucaguagccuggagcgcaagugccugccacgacggcauuaauuggcuuacaauagggaucucuggaccugauaacggugcuguugcagugcugaaguauaauggcauuaucaccgacacgauaaaguccuggagaaacaauauuuugaggacucaagagagcgagugugccugcgucaacgggucguguuucaccgugaugacagauggaccaucuaauggccaggcuuccuacaaaaucuuucggaucgaaaaggguaaaauugugaagucagucgagaugaacgcccccaauuaucauuacgaagagugcaguuguuacccugacagcuccgagaucacuugcguuugccgcgauaacuggcacgggucuaauagaccaugggugagcuucaaccagaaucucgaauaucagauuggauacauauguucaggcaucuuuggcgacaacccgaggcccaaugauaaaaccgggaguugcggaccuguauccagcaacggugcgaacggcgugaagggguucucuuuuaaguauggaaauggcgucuggauuggucggacaaaaucaaucaguagccgcaacggguucgagaugaucugggacccaaauggcuggaccggaacggauaacaauuuuuccauuaagcaagacauagugggcaucaacgaauggucuggguacucggggagcuucguucagcaucccgagcugacuggucuggacuguauucgaccuugcuucuggguggaacucaucagaggcaggccaaaagagaauacaauuuggaccuccgggucaaguaucucuuuuuguggagucaacagcgauacugugggcugguccuggcccgacggugcagaguuaccguucacaauagauaaguga

SEQ ID NO: 14315 - RNA, 1410 nt, Artificial Sequence
  FLUAV/H1N1/A/Michigan/45/2015__EPI662593 neuraminidase CDS human (NA)
augaaccccaaucagaagaucauuaccauaggcagcaucugcaugacaauugggauggccaaccugauccuccaaauuggaaauaucauauccaucugggugucucacucaauucagaucgguaaccagagucagauugagacuuguaaucaaagcgucaucacguacgaaaacaauaccuggguuaaccagacauaugugaauauauccaacacuaauuucgcugcaggccagucuguagugucggucaaacuugccgggaacucaagccugugcccugugaguggaugggcgauuuacuccaaggacaauucuguuagaaucggcagcaaaggugauguguuugucauuagggagccauucaucuccuguucaccguuggaaugccggaccuuuuucuuaacacagggggcucugcuaaacgacaagcauaguaauggaaccaucaaagaucgcagccccuaucgaacucucaugucuuguccuauuggcgaggugccaucccccuacaacucacguuuugaaagcguagccuggagugcaucugccugccacgacggcauaaacuggcugacaaucgggauuuccggaccugauagcggugcuguugcagugcuuaaguauaauggcaucauaaccgacacgauuaagucguggagaaacaauauccugaggacucaagagucugagugugccugcgucaacggguccuguuucaccaucaugacagauggaccaucagacggccaggcuaguuacaaaauuuuucggaucgaaaaggguaaaauuauaaagagcguggagaugaaagcccccaauuaucauuacgaagagugcuccuguuacccugauucuagcgagaucacuugcgugugccgcgacaacuggcacgggucaaauagaccaugggucaguuucaaccagaauuuggaauaucagaugggauacauuuguuccggcguuuuuggcgauaacccgaggcccaaugacaagaccgggagcugcggaccugugucuucaaacggugcgaauggcguaaagggguucaguuuuaaauauggaaacggcguguggaucggucggacaaagagcaucuccucucgcaaaggguucgagaugauuugggauccaaauggcuggaccggaacggacaacaaguuuucgauaaaacaagacaucgucggcauuaacgaauggagcggguacuccggaucauucgugcagcaucccgagcucacuggucuggauuguauccgaccuugcuucuggguugaacugauuagaggcaggccagaggagaauacaaucuggaccagugggucuagcauauccuuuuguggagugaacucagacacugucggcuggagcuggcccgauggugcagaacucccguucacaaucgacaaguga

SEQ ID NO: 14316 - RNA, 1410 nt, Artificial Sequence
  FLUAV/H1N1/A/Netherlands/602/2009__AGU92703 neuraminidase CDS human (NA)
augaaccccaaucagaagaucauuaccauaggcagcgugugcaugacaaucgggauggccaaccugauucuccaaaucggaaauauuaucuccauauggaucucucacucaauucagcuugguaaccagaaucagaucgagacuuguaaccaaagugucauuacguacgaaaauaacaccuggguuaaucagacauaugugaacaucagcaauacuaacuucgcugcaggccaguccguagugucugucaaacuggccggaaauucgucauugugcccugugagcggaugggcgauauacaguaaggacaacuccguuagagugggcucuaaaggugaugucuuugugauuagggagccauucaucagcuguuccccguuagaaugccggaccuuuuuccugacacagggggcucuacucaaugacaagcauucaaacggaaccauuaaagaucgcagucccuaucgaacucugaugagcuguccuaucggcgagguaccaucucccuacaacucccguuuugaaucaguugccuggagcgcaagugccugccacgacggcaucaauuggcuuacaauugggauaucuggaccugauaacggugcuguggcaguccugaaguauaauggcaucauuaccgacacgaucaaguccuggagaaacaauauauugaggacucaagagagcgagugugccugcgugaacgggucguguuucaccgugaugacagauggaccaucuaauggccaggcuuccuacaaaauuuuucggaucgaaaaggguaaaaucgucaagucaguugagaugaacgcccccaauuaucauuacgaagagugcaguuguuacccugacagcuccgagauuacuugcgugugccgcgauaacuggcacgggucuaauagaccaugggugagcuucaaccagaaucucgaauaucagaucggauacauuuguucaggcauauuuggcgacaacccgaggcccaaugauaaaaccgggaguugcggaccuguauccagcaacggugcgaacggcgucaagggguucucuuuuaaguauggaaauggcguguggaucggucggacaaaaucaauuaguagccgcaacggguucgagaugaucugggacccaaauggcuggaccggaacggauaacaauuuuuccaucaagcaagacauuguuggcauaaacgaauggucuggguacucggggagcuucauccagcaucccgagcugacuggucuggacuguauucgaccuugcuucuggguggaacucaucagaggcaggccaaaagagaauacaauuuggaccuccgggucaaguaucucuuuuuguggagucaacagcgauacugugggcugguccuggcccgacggugcagaguuaccguucacaauagauaaguga

SEQ ID NO: 14317 - RNA, 1410 nt, Artificial Sequence
  FLUAV/H3N2/A/Hong Kong/4801/2014__EPI578429 neuraminidase CDS human (NA)
augaaccccaaucagaagaucauuaccauaggcagcgugucccugacaaucucuacuauuugcuucuuuaugcaaaucgccauucucaucacgaccgucacacuucacuucaaacaguacgaguuuaacucaccuccaaauaaccagguuaugcugugugaaccgacuauaaucgagagaaauauuaccgaaaucguguauuugacaaacaccacuauugagaaggaaaucugccccaaaccugcugaguacaggaauuggaguaagccacagugugggauaacaggauucgcacccuuuagcaaagacaacuccauucgguuaucugccgguggcgauaucuggguaacccgcgagccuuaugugucgugcgacccagauaaguguuaccaauucgcgcuggggcagggaacgacucuaaauaacguccauucaaauaacaccgugcgagaccguacacccuauagaacucuccugaugaaugaacuuggcguuccuuuucaccuggguaccaaacaggugugcauugcuuggagcaguuccucuugucaugaugggaaggccugguugcacgucugcaucacaggagacgauaagaacgcaaccgccagcuucaucuacaauggcaggcucguggacuccguaguuucauggaguaaagauauucugcggacgcaggagagcgaauguauaugcaucaacggcacuuguacaguggucaugaccgacgggucugcuuccggaaaggcagauacuaaaauucuguuuaucgaggaggguaagauagugcauacaucaacccucagcggcagugcccaacacguggaagagugcucuugcuauccacgcuacccgggggucagauguguuugcagggacaacuggaagggauccaaucggcccauuguggauaucaacaucaaagaccacagcauuguaucgucuuacguguguuccggcuuagucggugacacgccucgcaagaaugauucaaguagcuccucucauugccuggacccaaacaaugaagaagggggacacggcgugaaaggcugggcuuucgaugacgggaacgauguuuggaugggacgaaccaucaaugagacaagcagacuugguuaugagacuuuuaaggugauugagggcuggucaaaccccaaaaguaaguugcagaccaauaggcaggucauaguggaccguggggaucgguccggauacagcggcaucuucucuguagaagguaaaucauguauuaaccgcugcuuuuauguugagcugaucagagggaggaaggaagagacagaagugcuauggaccaguaauagcaucgucguguucuguggcacuuccggaacauacggcaccgggucuuggccugacggagccgaucucaaccugaugccaauuuga

SEQ ID NO: 14318 - RNA, 1401 nt, Artificial Sequence
  FLUBV/H0N0/B/Brisbane/60/2008__EPI173278 neuraminidase CDS human (NA)
augcugcccagcaccauccagacacucacucuuuuccugacguccggcgggguguuguuaucucuguacgucucagccagucuaagcuaucuccuguacuccgacauucuucugaaguuuucuccuaccgagauaacagcuccaacuaugccguuggauugcgcaaacgccucgaauguucaagcggugaacagaucagcuaccaaaggaguaacacuccugcugcccgaaccugaguggaccuauccaaggcucagcugucccgguaguacuuuccagaaggccuuacugaucuccccucaccgguuuggcgaaacaaaaggaaauucugcaccacuuauuauccgcgagcccuucauugccugcgggccuaacgaauguaagcauuuugcuuugacccacuacgcagcccagccaggcgguuauuacaaugggacgcgaggagaccguaacaaacugagacaucuaaucagcgugaagcucggcaagauaccgacugucgaaaauuccaucuuccacauggcugccuggucaggcagugcgugccaugaugggaaagaguggaccuauauuggaguggacggucccgauaacaaugcacugcuuaagguuaaauacggcgaggccuacacagacacuuaucacagcuacgcuaacaagauccugaggacccaggagucugccuguaauugcauugggggaaacuguuauuugaugaucacagauggcuccgcaucaggugugagcgaaugccgguuucucaaaauacgcgaggggagaauuaucaaggagauuuucccuaccggaagggucaagcacacggaagaguguacuugcggcuuugcuaguaauaaaacaaucgaaugugccugccgggacaacucuuacaccgcgaagcgcccauucgugaaacugaauguagagacugauacagccgaaauccgauuaaugugcaccgacacguaucuggauacccccagaccuaacgacggcuccauuacagggccaugugagagcaacggagauaaggguucgggcgggauaaaaggaggcuuuguucaucaaaggauggagucuaagaucggucggugguacucccguacuaugucaaaaaccgaacgcauggggaugggccucuaugugaaguacgacggagaccccugggcagauagugacgcucuugccuucagcggcgucaugguguccaugaaggagccggggugguacucuuuuggauucgaaauuaaagauaagaaaugcgacgugccuuguaucgguauagagaugguccacgauggcgggaaggaaacauggcauagcgcugccacugcaauuuauugccugaugggaucaggccaguugcuaugggacaccguuacagguguggauauggcccuguga

SEQ ID NO: 14319 - RNA, 1401 nt, Artificial Sequence
  FLUBV/H0N0/B/Phuket/3073/2013__EPI540672 neuraminidase CDS human (NA)
augcugcccagcaccauccagacacucacucuuuuccugacguccggcgggguguuguuaucucuguacgucucagccagucuaagcuaucuccuguacuccgacauucuucugaaguuuucuagaaccgagguuacagcuccuauaaugccauuggauugcgcaaacgccucgaaugugcaagcgguaaacaggucagcuacuaaaggagugaccccgcuccugcccgaaccugaguggacauauccacggcugagcugucccgguaguaccuuccagaaggcccucuuaaucuccccucaccgcuuuggcgaaacuaaaggaaauucugcaccacugauuauccgagagcccuucauugccugcgggccuaaggaauguaaacauuuugcucuuacacacuacgcagcccagccaggcgguuauuacaacgggacccgugaggacagaaauaaguugaggcaucugaucagcgucaagcuaggaaaaauaccgacgguggagaacuccaucuuccacauggcugccuggucaggcagugcgugccaugauggccgggaauggacuuauauugggguugacggacccgauagcaaugcacuccugaagaucaaauacggugaggccuacaccgacacauaucacucuuacgcuaagaacauucuucgcacucaggaauccgccuguaauugcaucggcggggauuguuaucugaugauaaccgacggaccugcaucaggcauuagcgagugcagauuuuugaaaaucagggagggucggauuaucaaggaaaucuucccaacagggcgcgugaagcacaccgaggaauguacgugcggauuugcuaguaacaaaacuauugagugugccugccgagauaauucuuacacagcgaagagacccuucgucaaacucaacguggaaaccgacacugccgagauaaggcugaugugcacaaagaccuauuuagauacgccucggccaaaugacggcuccaucaccggccccugugagagcgauggggacgaaggaucggguggcauuaaagggggauuuguacaucaacguauggcaucuaagaucggccgcugguacuccagaacaaugucaaaaacuaagaggauggguauggggcuguauguuaaguacgacggcgauccguggaccgacagugaggcucucgcccuuagcggagugauggucuccauggaggaaccuggcugguacucuuucggguuugaaauaaaagauaagaaaugcgacgugcccuguauuggaaucgagauggugcacgaugguggcaagacaacuuggcauagcgcugccaccgcaaucuauugccugauggggucaggacaguugcuaugggacacagucaccggcguuaacaugacucuguga

SEQ ID NO: 14320 - RNA, 1410 nt, Artificial Sequence
  FLUAV/H1N1/A/Brisbane/02/2018__EPI1212833 neuraminidase CDS human (NA)
augaaccccaaucagaagaucauuaccauaggcagcacaugcaugacuaucgggauggccaaccugauucuccaaaucggaaauauuaucuccauaugggugucucacucaauccagauugguaaccagagucagaucgagacguguaaucaaagcgucauuaccuacgaaaacaauacauggguuaaccagacuuaugugaauaucuccaacaccaauuucgcugcaagacagucuguagccucggugaaacuugcgggcaacucaagccugugcccugucagugggugggcuauauacuccaaggacaauucugugaggauuggaagcaaaggcgauguuuuugugauccgggagccauucauuuccuguucaccguuggaaugccgcacauuuuucuuaacccagggugcccugcuaaacgacaagcauaguaaugggacuaucaaagaucgaagccccuaucguacacucaugucuuguccuaucggagaggucccaucccccuacaacucaagauuugaaagcguggcauggagugccucugcuugccacgacggcaccaacuggcugacgauuggcauauccgggccugauagcggagcaguagccguucuuaaguauaaugguaucauuacugacaccaucaagucguggaggaacaauauacugcggacacaagagucugagugugcuugcgugaacggcuccuguuucacuauuaugaccgaugggccaucagacggacaggccaguuacaaaaucuuucgcaucgaaaagggcaaaauuaucaagagcgucgagaugaaagcgcccaauuaucauuacgaagagugcuccuguuacccugauucuagcgagauuacaugcgugugcagagacaacuggcacgguucaaauaggccaugggugaguuucaaccagaauuuggaauaucagaugggguacauauguuccggagucuuuggcgauaacccgcggcccaaugacaagaccggcagcugcgggccuguuucuucaaacggagcaaauggugugaagggcuucaguuuuaaauaugggaacggaguauggaucggccgcacuaagagcauuuccucucgaaaagguuucgagaugaucugggauccaaauggguggacgggcacagacaacaaguuuucgaucaaacaagacauugugggaauaaacgaauggagcggcuacuccgggucauucguccagcaucccgagcucaccggacuggauuguaucagaccuugcuucuggguggaacugauuaggggucggccagaggagaauacuaucuggacaaguggcucuagcauuuccuuuugugggguugacucagauaccgugggauggagcuggcccgacggcgccgaacucccguucacgaucgauaaguga

SEQ ID NO: 14321 - RNA, 1410 nt, Artificial Sequence
  FLUAV/H1N1/A/Guangdong-Maonan/SWL1536/2019__EPI1542569 neuraminidase CDS human (NA)
augaaccccaaucagaagaucauuaccauaggcagcaucugcaugacaauugggauggccaaccugauccuccaaauuggaaauaucauauccaucugggugucucacucaauucagaucgguaaccagagucagauugagacuuguaauaaaaacgucaucacguacgaaaauaacaccuggguuaaucaaacauaugugaacauaagcaauacuaacuccgcugcaagacagucuguagccucggugaaacuugcgggcaauucaagccugugcccugucagugggugggcuauuuacuccaaggacaacucugugaggaucggaagcaagggcgauguuuucgugauucgggagccauuuaucuccuguucaccguuggaaugccgcaccuucuuuuuaacacagggugcccugcuaaaugacaaacauaguaacgggaccaucaaggaucgaagccccuaucguacucucaugucuuguccuauuggagaggucccaucccccuacaacucaagauucgaaagcguggcauggagugccucugcuugccacgacggcacaaauuggcugaccauaggcaucuccgggccugauagcggagcaguagccguucuuaaguauaacgguauuaucacggacacuauaaaaucguggaggaauaacauucugcggacccaggagucugagugugcuugcgugaauggcuccuguuuuacaaucaugacugaugggccaucagacggacaagccaguuacaagaucuuccgcauugaaaaaggcaagaucauuaaaagcgucgagaugaaggcgcccaacuaucauuacgaagagugcuccuguuacccugauucuagcgagauaaccugcgugugcagagacaauuggcacgguucaaacaggccaugggugaguuuuaaucagaacuuggaauaucagaugggguacaucuguuccggagucuucggcgauaauccgcggcccaacgacaagacaggcagcugcgggccuguuucuucaaauggagcaaacggugugaaaggcuuuaguuucaaguaugggaauggaguauggauuggccgcaccaaaagcaucuccucucgaaaggguuuugagaugaucugggauccaaacggguggacgggcacugacaacaaauucucgaagaaacaggacauugugggaauaaaugaauggagcggcuacuccgggucauuuguccaacaucccgagcucacaggacugaacuguaucagaccuugcuucuggguggaacugauuaggggucggccagaggagaauaccaucuggacaaguggcucuagcauuuccuucugugggguugauucagacaucgugggauggagcuggcccgauggcgccgaacucccguuuacuauagacaaguga

SEQ ID NO: 14322 - RNA, 1410 nt, Artificial Sequence
  FLUAV/H3N2/A/Singapore/INFIMH-16-0019/2016__EPI1047603 neuraminidase CDS human (NA)
augaaccccaaucagaagaucauuaccauaggcagcgugucccugacaaucucuacuauuugcuucuuuaugcagaucgccauucucaucacgaccgucacacuucacuucaaacaguacgaguuuaacucaccuccaaauaaccagguuaugcugugugaaccgacuauaaucgagagaaauauuaccgaaaucguguauuugacaaacaccacuauugagaaggaaaucugccccaaaccugcugaguacaggaauuggaguaagccacagugugggauaacaggauucgcacccuuuagcaaagacaacuccauucgguuaucugccgguggcgauaucuggguaacccgcgagccuuaugugucgugcgacccagauaaguguuaccaauucgcgcuggggcagggaacgacucuaaauaacguccauucaaauaacaccgugcgagaccguacacccuauagaacucuccugaugaaugaacuuggcguuccuuuucaccuggguaccaaacaggugugcauugcuuggagcaguuccucuugucaugaugggaaggccugguugcacgucugcaucacaggagacgauaagaacgcaaccgccagcuucaucuacaauggcaggcucauugacuccgugguaucauggaguaaagauauacugcggacgcaggagagcgaauguguuugcaucaacggcacuuguacaguggucaugaccgacgggaacgcuacuggaaaggcagauacaaaaauucuguuuaucgaggaggguaagauagugcauaccucuaagcucuccggcucagcccaacacguggaagagugcagcugcuauccacgcuacccgggggucagauguguuugcagggacaauuggaaaggaaguaaccggcccauuguggauaucaauaucaaggaccacucuauuguauccagcuacguguguucgggcuuagucggugacacgccucgcaaaaacgauucuuccucaaguagccauugccugaauccaaacaaugaagaagggggacacggcgugaagggcugggcuuucgacgaugggaacgacguuuggaugggacgaaccaucaaugagacauccagacuugguuaugagacuuuuaaaguggucgagggcuggucuaaccccaagagcaaauugcagauuaauaggcaagugauaguagaucguggggaccggucaggauacaguggcaucuucuccguugaagguaagagcuguauuaaccgcugcuuuuauguggagcugaucagagggaggaaggaagagaccgaaguccuauggacaucuaauucaaucguggucuucuguggcaccaguggaacuuacggcacagggagcuggccugauggagccgaccucaaccugaugcauauuuga

SEQ ID NO: 14323 - RNA, 1410 nt, Artificial Sequence
  FLUAV/H3N2/A/Kansas/14/2017__EPI1146344 neuraminidase CDS human (NA)
augaaccccaaucagaagaucauuaccauaggcagcgugucccugacaaucucuacuauuugcuucuuuaugcagaucgccauucucaucacgaccgucacacuucacuucaaacaguacgaguuuaacucaccuccaaauaaccagguuaugcugugugaaccgacuauaaucgagagaaauauuaccgaaaucguguauuugacaaacaccacuauugagagggaaaucugccccaagccugcugaguaccggaauuggaguaaaccacagugugggauaacaggauucgcacccuuuagcaaggacaacuccauucgcuuaucugccgguggcgauaucuggguaacccgagagccuuaugugucgugcgacccagauaaauguuaccaauucgcgcuggggcagggaacgacuauuaauaacguccauucaaauaacaccgcucgugacagaacaccccacaggacucuacucaugaaugaacugggcgugccuuuucaucuugguaccaagcagguuugcaucgccuggagcaguuccucuugucacgaugggaaggcauggcugcaugugugcaucacaggagacgauaaaaacgccaccgcuagcuucauuuauaauggccgguuggucgacuccgugguaucauggaguaaggauauacuccgcacgcaggagagcgaauguguuugcaucaacggcacuuguacaguggucaugaccgacgggaacgcaacuggaaaagccgauacaaagauucuguuuaucgaggaggguaaaauagugcacaccucuaagcuguccggcucagcucaacacguggaagagugcagcugcuacccaagauauccgggggucagguguguuugccgggacaauuggaagggaaguaaccgccccauuguggauaucaauaucaaagaccauucuauuguauccagcuacguguguucgggccucgucggugacacgccucgaaagaccgauucuuccucaaguagccacugcuuaaacccaaauaacgaaaaagggggacauggcgugaagggcugggccuucgacgaugggaaugacguuuggaugggaagaacaaucaacgagacuuccaggcuggguuacgaaaccuuuaaaguggucgagggcuggucuaaucccaagagcaaacuucagauuaaccggcaagugauaguagaucguggggaccgcucaggauauaguggcaucuucuccguugaggguaagagcuguauuaauagaugcuuuuacguggaauugaucagggggcggaaggaggaaacagagguccuguggacuucuaacucaaucguggucuucuguggcaccaguggaacauauggcaccgggagcuggccugauggagcggaccuaaaucucaugcacauuuga

SEQ ID NO: 14324 - RNA, 1410 nt, Artificial Sequence
  FLUAV/H3N2/A/Kansas/14/2017-CDC-LV24A__EPI1444881 neuraminidase CDS human (NA)
augaaccccaaucagaagaucauuaccauaggcagcgugucccugacaaucucuacuauuugcuucuuuaugcagaucgccauucucaucacgaccgucacacuucacuucaaacaguacgaguuuaacucaccuccaaauaaccagguuaugcugugugaaccgacuauaaucgagagaaauauuaccgaaaucguguauuugacaaacaccacuauugagagggaaaucugccccaagccugcugaguaccggaauuggaguaaaccacagugugggauaacaggauucgcacccuuuagcaaggacaacuccauucgcuuaucugccgguggcgauaucuggguaacccgagagccuuaugugucgugcgacccagauaaauguuaccaauucgcgcuggggcagggaacgacuauuaauaacguccauucaaauaacaccgcucgugacagaacaccccacaggacucuacucaugaaugaacugggcgugccuuuucaucuugguaccaagcagguuugcaucgccuggagcaguuccucuugucacgaugggaaggcauggcugcaugugugcaucacaggagacgauaaaaacgccaccgcuagcuucauuuauaauggccgguuggucgacuccgugguaucauggaguaaggauauacuccgcacgcaggagagcgaauguguuugcaucaacggcacuuguacaguggucaugaccgacgggaacgcaacuggaaaagccgauacaaagauucuguuuaucgaggaggguaaaauagugcacaccucuaagcuguccggcucagcucaacacguggaagagugcagcugcuacccaagauauccgggggucagguguguuugccgggacaauuggaagggaaguaaccgccccauuguggauaucaauaucaaagaccauucuauuguauccagcuacguguguucgggccucgucggugacacgccucgaaagaccgauaacucuuccucaagucacugcuuaaauccaaacaaugaaaaagggggacauggcgugaagggcugggccuucgacgaugggaacgacguuuggaugggaagaacaaucaaugagacuagcaggcuggguuacgaaaccuuuaaaguggucgagggcugguccaaccccaagucuaaacuucagauuaaucggcaagugauaguagaucguggggaccgcagcggauauucaggcaucuucaguguugaggguaaguccuguauuaacagaugcuuuuacguggaauugaucagggggcggaaggaggaaacagagguccuguggacuagcaauucuaucguggucuucuguggcaccucaggaacauauggcaccgggaguuggccugauggagcggaccuaaaccucaugcacauuuga

SEQ ID NO: 14325 - RNA, 1410 nt, Artificial Sequence
  FLUAV/H3N2/A/Switzerland/8060/2017__EPI1154879 neuraminidase CDS human (NA)
augaaccccaaucagaagaucauuaccauaggcagcgugucccugacaaucucuacuauuugcuucuuuaugcaaaucgccauucucaucacgaccgucacacuucacuucaaacaguacgaguuuaacucaccuccaaauaaccagguuaugcugugugaaccgacuauaaucgagagaaauauuaccgaaaucguguauuugacaaacaccacuauugagaaggaaaucugccccaaaccugcugaguacaggaauuggaguaagccacagugugggauaacaggauucgcacccuuuagcaaagacaacuccauucgguuaucugccgguggcgauaucuggguaacccgcgagccuuaugugucgugcgacccagauaaguguuaccaauucgcgcuggggcagggaacgacucuaaauaacguccauucaaauaacaccgugcgagaccguacacccuauagaacucuccugaugaaugaacuuggcguuccuuuucaccuggguaccaaacaggugugcauggcuuggagcaguuccucuugucaugaugggaaggccugguugcacgucugcgugacaggagacgauaagaacgcaaccgccagcuucauuuacaauggcaggcucguagacuccguugugucauggaguaaagauauccugcggacgcaggagagcgaaugugucugcaucaacggcacuuguacaguggugaugaccgacgggaacgcuacuggaaaggcagauacaaaaauucuguuuauagaggaggguaagaucguccauaccucuaagcucuccggcucagcccaacacguugaagagugcagcugcuauccacgcuacccgggggugagauguguaugcagggacaauuggaaaggaaguaaccggcccauuguggauaucaauauaaaggaccacucuauugucuccagcuacguguguucgggcuuaguuggugacacgccucgcaaaucugauuccucaaguagcucccauugccugaacccaaauaacgaagaagggggacacggcgugaagggcugggcuuucgacgaugggaaugacgucuggaugggacgaaccaucaacgagacaucuagacuugguuaugagacuuuuaaagugguagagggcuggagcaauucaaagaguaaauugcagaucaacaggcagguuauuguggaucguggggaccgguccggauacagcggcaucuucucugucgaagguaagucauguauuaaucgcugcuuuuauguggagcugauaagagggaggaaggaagagaccgaaguccuauggacaaguaacagcaucgugguuuucuguggcacuuccggaaccuacggcacagggucuuggcccgauggagccgaccucaaucugaugcauauuuga

SEQ ID NO: 14326 - RNA, 1410 nt, Artificial Sequence
  FLUAV/H3N2/A/Switzerland/8060/2017(H3N2)-CDC-LV21A__EPI1364258 neuraminidase CDS human (NA)
augaaccccaaucagaagaucauuaccauaggcagcgugucccugacaaucucuacuauuugcuucuuuaugcaaaucgccauucucaucacgaccgucacacuucacuucaaacaguacgaguuuaacucaccuccaaauaaccagguuaugcugugugaaccgacuauaaucgagagaaauauuaccgaaaucguguauuugacaaacaccacuauugagaaggaaaucugccccaaaccugcugaguacaggaauuggaguaagccacagugugggauaacaggauucgcacccuuuagcaaagacaacuccauucgguuaucugccgguggcgauaucuggguaacccgcgagccuuaugugucgugcgacccagauaaguguuaccaauucgcgcuggggcagggaacgacucuaaauaacguccauucaaauaacaccgugcgagaccguacacccuauagaacucuccugaugaaugaacuuggcguuccuuuucaccuggguaccaaacaggugugcauggcuuggagcaguuccucuugucaugaugggaaggccugguugcacgucugcgugacaggagacgauaagaacgcaaccgccagcuucauuuacaauggcaggcucguagacuccguugugucauggaguaaagauauccugcggacgcaggagagcgaaugugucugcaucaacggcacuuguacaguggugaugaccgacgggaacgcuacuggaaaggcagauacaaaaauucuguuuauagaggaggguaagaucguccauaccucuaagcucuccggcucagcccaacacguugaagagugcagcugcuauccacgcuacccgggggugagauguguaugcagggacaauuggaaaggaaguaaccggcccauuguggauaucaauauaaaggaccacucuauugucuccagcuacguguguucgcgcuuaguuggcgacacgccucgaaaaucugauuccucaaguagcucccauugccugaacccaaauaacgaagagggugggcacggagugaagggcugggcuuucgacgauggcaaugacgucuggauggggagaaccaucaacgaaacaucuaggcuuggauaugagacuuuuaaagugguagaggguuggagcaauucaaagaguaaauugcagaucaaccggcagguuauuguggaucguggcgaccgcuccggguacagcggaaucuucucugucgaaggcaagucauguauuaauagaugcuuuuauguggagcugauaaggggucggaaggaagagaccgaaguccuauggacaaguaacagcaucgugguuuucugugggacuuccggcaccuacggaacaggcucuuggcccgauggggccgaccucaaucugaugcauauuuga

SEQ ID NO: 14327 - RNA, 1410 nt, Artificial Sequence
  FLUAV/H3N2/A/Hong Kong/2671/2019__EPI1543099 neuraminidase CDS human (NA)
augaaccccaaucagaagaucauuaccauaggcagcgugucccugacaaucucuacuauuugcuucuuuaugcagaucgccauucucaucacgaccgucacacuucacuucaaacaguacgaguuuaacucaccuccaaauaaccagguuaugcugugugaaccgacuauaaucgagagaaauauuaccgaaaucguguauuugacaaacaccacuauugagaaggaaaucugccccaaaccugcugaguacaggaauuggaguaagccacagugugggauaacaggauucgcacccuuuagcaaagacaacuccauucgguuaucugccgguggcgauaucuggguaacccgcgagccuuaugugucgugcgaccuggauaaguguuaccaauucgcgcuagggcagggaacgacucucaauaacguccauucaaauaacaccgugcgagaccguacaccauauagaacucugcuuaugaaugaacugggcguucccuuucacuuggguaccaaacaggugugcauugcuuggagcaguuccucuugucaugaugggaaggccuggcuccacgucugcaucacaggagacgauaagaacgcaaccgccagcuucaucuacaauggcaggcugguggacuccguaguuucauggaguaacgauauucugcggacgcaggagagcgaaugugugugcauaaacggcacuuguacagucgugaugaccgacgggaaugcuacuggaaaagcagauacaaagauccucuuuauugaggaggguaaaaucgugcauaccucuaaguuauccggcucagcccaacacgucgaagagugcagcugcuauccucgcuacccagggguuagaugugugugcagggacaacuggaagggaaguaaucggccgauaauugauaucaacaucaaagaccacucuauuguauccagcuacguguguucgggccuggucggugacacgccccgcaagucugauuccucaaguagcucccauugccuuaauccuaacaaugaagaagggggacacggcgugaaaggcugggcuuucgacgaugggaacgacguuuggaugggacgaaccaucaaugagacaucuagauuggguuaugagacuuuuaagguggucgagggcuggagcaacccaaaaucaaagcugcagauuaauaggcaagugauaguagaucguggggaccggaguggauacuccggcaucuucagcguugaagguaaaucuuguauuaaccgcugcuuuuauguggagcuaaucagagggaggaaggaagagaccgaaguccucuggacaucaaauaguaucguggucuucuguggcacuagcggaaccuacggcacaggguccuggcccgauggagccgaccugaaccuuaugcauaccuga

SEQ ID NO: 14328 - RNA, 1410 nt, Artificial Sequence
  FLUAV/H3N2/A/Hong Kong/45/2019__EPI1691929 neuraminidase CDS human (NA)
augaaccccaaucagaagaucauuaccauaggcagcgugucccugacaaucucuacuauuugcuucuuuaugcagaucgccauucucaucacgaccgucacacuucacuucaaacaguacgaguuuaacucacugccuaauaaccagguuauguugugugaaccaacuauaaucgagagaaauauuaccgaaaucguguauuuaacaaacaccacuauugagaaggaaaucugcccgaaacccgcugaguacaggaauuggaguaagccucagugugggauaacaggauucgcaccauuuagcaaagacaacuccauucggcugucugccgguggcgauaucuggguaacccgcgagcccuaugugucgugcgaccuagauaaguguuaccaauucgcgcucgggcagggaacgacucugaauaacguccauucaaauaacaccgugcgagaccguacaccuuauagaacucuucugaugaaugaauugggcguuccauuucaccucgguaccaaacaggugugcauugcuuggagcaguuccucuugucaugaugggaaggccuggcugcacgucugcaucacaggagacgauaagaacgcaaccgccagcuucaucuacaauggcaggcugguggacuccguaguuucauggaguaacgauauucuccggacgcaggagagcgaaugugugugcauaaacggcacuuguacagucgugaugaccgacgggaaugcuacuggaaaagcagauacaaagaucuuauuuauugaggaggguaaaaucgugcauaccucuaagcuguccggcucagcccaacacgucgaagagugcagcugcuauccccgcuacccugggguuagaugugugugcagggacaacuggaagggaaguaaucggccaauaauugauaucaacaucaaagaccacucuauuguauccagcuacguguguucgggccuugucggugacacgccgcgcaagucugauuccucaaguagcucccauugcuugaaucccaacaaugaagaagggggacacggcgugaaaggcugggcuuucgacgaugggaacgacguuuggaugggacgaaccaucaaugagacaucuagacuggguuaugagacuuuuaagguggucgagggcuggagcaacccuaaaucaaagcuacagauuaauaggcaagugauaguagaucguggggaccggaguggauacuccggcaucuucagcguugaagguaaaucuuguauuaaccgcugcuuuuauguggagcucaucagagggaggaaggaagagaccgaaguccuguggacaucaaauaguaucguggucuucuguggcacuagcggaaccuacggcacaggguccuggccagauggagccgaccuuaaccugaugcauauuuga

SEQ ID NO: 14329 - RNA, 1410 nt, Artificial Sequence
  FLUAV/H3N2/A/South Australia/34/2019__EPI1387330 neuraminidase CDS human (NA)
augaaccccaaucagaagaucauuaccauaggcagcgugucccugacaaucucuacuauuugcuucuuuaugcagaucgccauucucaucacgaccgucacacuucacuucaaacaguacgaguuuaacucaccuccaaauaaccagguuaugcugugugaaccgacuauaaucgagagaaauauuaccgaaaucguguauuugacaaacaccacuauugagaaggaaaucugccccaaaccugcugaguacaggaauuggaguaagccacagugugggauaacaggauucgcacccuuuagcaaagacaacuccauucgguuaucugccgguggcgauaucuggguaacccgcgagccuuaugugucgugcgaccuggauaaguguuaccaauucgcgcuagggcagggaacgacucucaauaacguccauucaaauaacaccgugcgagaccguacaccauauagaacucugcuuaugaaugaacugggcguucccuuucacuuggguaccaaacaggugugcauugcuuggagcaguuccucuugucaugaugggaaggccuggcuccacgucugcaucacaggagacgauaagaacgcaaccgccagcuucaucuacaauggcaggcugguggacuccguaguuucauggaguaacgauauucugcggacgcaggagagcgaaugugugugcauaaacggcacuuguacagucgugaugaccgacgggaaugcuacuggaaaagcagauacaaagauccucuuuauugaggaggguaaaaucgugcauaccucuaaguuauccggcucagcccaacacgucgaagagugcagcugcuauccucgcuacccagggguuagaugugugugcagggacaacuggaagggaaguaaucggccgauaauugauaucaacaucaaagaccacucuauuguaucccgcuacguguguagcggccuggucggugacacgccccgaaagucggauucuuccucaaguagccauugccuuaauccuaacaaugaaaaagggggacacggcgugaagggcugggcuuucgacgaugggaacgacguuuggaugggaagaaccaucaaugagacauccagguuggguuaugaaacuuuuaaaguggucgagggcuggucuaacccaaagagcaaacugcagauuaaucggcaagugauaguagaucguggggaccgcucaggauacaguggcaucuucuccguugaggguaagagcuguauuaacagaugcuuuuauguggaacuaaucagggggcggaaggaggaaaccgagguccucuggacaucuaauucaaucguggucuucuguggcaccaguggaacuuacggcacagggagcuggcccgauggagccgaccugaaccuuaugcauauuuga

SEQ ID NO: 14330 - RNA, 1398 nt, Artificial Sequence
  FLUAV/H7N9/A/chicken/Zhejiang/C483/2013(H7N9)__AGN69396.1 neuraminidase CDS human (NA)
augaaccccaaucagaagauccugugcaccagcgccacagcuauuauaaucggcgcaauugccgugcucaucgggauugcgaaccuuggacugaauaucgguuugcacuuaaaaccuggcuguaacugcucccauucucaaccagagacuacgaauaccucacagacaauaaucaacaauuacuauaacgaaacuaauauuaccaacauccagauggaggaaagaacaaguaggaauuucaacaaucugaccaaggggcuauguacuauuaacagcuggcacaucuacggaaaagacaaugcuguccggauaggcgaguccucugauguucucgugacacgcgaaccguauguaucgugcgaccccgaugagugucgauuuuacgcccugucacaggguaccacgauucgugggaagcauagcaacggaacuauccacgacagaagucaauauagggcacuuauuuccuggccucugucuagcccacccaccguguacaacucccgggucgagugcaucggcuggucaaguacaagcugucaugauggcaaaucucgcauguccaucugcauuucagggccuaauaacaaugccagcgcugugguuugguauaacagaaggccaguggcagaaauaaauacuugggcccggaacaucuugcgcacccaggagagugaaugugucugccacaauggagugugucccguaguuuucacagacgguucugcuaccggcccugccgauacgcgaauuuacuacuuuaaggaggggaagauccucaaaugggagucccugacuggaacagcgaagcacauagaagagugcagcugcuauggcgaaagaaccgguauuacuuguacaugcagggacaacuggcaggggucgaaucggccagugauccagaucgauccggucgcaaugacccauacgucucaauacauuuguucccccgugcugaccgacaacccucguccaaaugaucccaacaucggaaaaugcaaugacccuuauccaggcaacaauaacaacggcgugaagggguucucauaccucgauggagccaauacaugguuaggucgcacuauuaguaccgcuagcagauccggcuaugagaugcugaaaguccccaacgcccuuacagacgacaggucuaagccgauacaggggcagacuaucguuuugaaugcagauuggagcggauacucaggcaguuuuauggacuauugggcugaaggugauuguuaccgggccugcuucuacguggagcugauucgagggcgcccuaaggaggacaaaguaugguggaccuccaacagcaucgugucuauguguucaaguacagaauuucuaggccaguggaauuggcccgauggagcgaagaucgaguauuuccucuga

SEQ ID NO: 14331 - RNA, 1413 nt, Artificial Sequence
  FLUAV/H10N8/A/Jiangxi/IPB13/2013(H10N8)__AHK10769.1 neuraminidase CDS human (NA)
augaaccccaaucagaagaucauuaccauaggcagcgugucccuggggcucgucauccuuaacauucuguugcacaucguuucuauuacagugacuguauuagugcugccuggaaaugguaacaaugagucaugcaacgaaacggucaucagagaguacaaugaaaccgugaggguugagaaagugacacaauggcauaacacuaaugucauagaauauaucgagcggccagagaacgaccacuucaugaauaacaccgaagcccuaugugaugcuaagggcuuugcaccguucaguaaagacaaugggauucgcaucggaagccgaggccauguguuuguaauucgugagcccuucguuuccugcucuccuacagaauguagaaccuuuuuccucacucaggguucgcugcuuaacgauaagcacucaaaugggacagugaaagacaggagcccauaccggacccugaugagugucgagaucggacagucccccaacguguaucaggcccgcuuugaggcgguggcuuggucugccacggcaugccaugauggcaagaaguggaugacuauaggcgucaccgggccugacgccaaagcuguugcagugguacacuacggagguauuccaacagaugugaucaacagcugggccggcgacauuuugagaacucaagaauccucauguaccugcauccagggggaguguuucugggucaugacagauggacccgcuaauaggcaggcccaguaucgggcguuuaaggcaaaacaaggcaagaucgugggucaggccgaaauuaguuucaacgggggacacauagaggaaugcagcuguuacccuaaugagggcaaaguugagugcgugugucgcgacaacuggaccggcacgaaucgaccaguccucgugaucucuccggaucuguccuauagaguaggguaccugugcgcuggacuccccucagacacuccuaggggugaagauagccaguuuacaggcaguugcaccucuccaauggggaaccagggauacggcguuaaggguuucggguuucggcaaggcaaugacguguggaugggacguacuauuucccgcacaagcagaucgggcuucgagaucuuaaaggucaggaacgggugggugcaaaauucuaaagaacagauaaagcggcaggucgugguugacaaccugaauugguccggauauucagguaguuucacccuucccgccgaguugacgaaacgaaacugucuggugccuugcuuuuggguagaaaugauucgcggcaauccagaggagaagaccaucuggacaagcuccucuagcaucgucaugugugggguggaucaugaaauugcagacuggucauggcacgauggagcuauccuacccuucgacauugauaaaauguga

SEQ ID NO: 14332 - RNA, 1401 nt, Artificial Sequence
  FLUBV/H0N0/B/Colorado/06/2017__EPI1001930 neuraminidase CDS human (NA)
augcugcccagcaccauccagacacucacucuuuuccugacguccggcgggguguuguuaucucuguacgucucagccagucuaagcuaucuccuguacuccgacauucuucugaaguuuucuccuaccgagauaacagcuccaacuaugccguuggauugcgcaaacgccucgaauguucaagcggugaacagaucagcuaccaaaggaguaacacuccugcugcccgaaccugaguggaccuauccaaggcucagcugucccgguaguacuuuccagaaggccuuacugaucuccccucaccgguuuggcgaaacaaaaggaaauucugcaccacuuauuauccgcgagcccuucguggccugcgggccuaacgaauguaagcauuuugcuuugacccacuacgcagcccagccaggcgguuauuacaaugggacgcgaggagaccguaacaaacugagacaucuaauuagcgucaagcucggcaagaucccgacuguggaaaauuccauauuccacauggcugccuggucaggcagugcgugccaugaugggaaagaguggaccuauaucggaguugacggucccgauaacaaugcacugcuuaaggugaaauacggcgaggccuacacagacacuuaucacagcuacgcuaacaauauucugaggacccaggagucugccuguaacugcaucgggggaaauuguuauuugaugauuacagauggcuccgcaucaggugucagcgaaugccgguuucucaagauccgcgaggggagaauaauuaaagagaucuucccuaccggaagggugaagcacacggaagaguguacuugcggcuuugcuaguaacaagacaauugaaugugccugccgggacaaucgcuacaccgcgaaacgaccauucguaaagcugaacguugagacugauacagccgaaaucagauuaaugugcaccgacacguaucuggauacccccaggccuaacgacggcucuaucacagggccaugugaguccgauggagacaaagguagcggcgggauuaagggaggcuuugugcaucaacggaugaaaucgaagauaggucguugguacucucgcacuaugucccagaccgagagaauggggaugggccucuaugucaaauacggaggcgaccccugggcagauucagacgcucuugccuucaguggggugauggugagcaugaaggaaccgggaugguacuccuuugguuucgagaucaaggauaaaaagugcgacgucccuuguauuggcaucgaaaugguucacgaugggggaaaagagacauggcauucugcugccacugcaauauauugccugaugggcagcggucaguugcuaugggacaccgugacagggguagauauggcccuguga

SEQ ID NO: 14333 - RNA, 1401 nt, Artificial Sequence
  FLUBV/H0N0/B/Washington/02/2019__EPI1368872 neuraminidase CDS human (NA)
augcugcccagcaccauccagacacucacucuuuuccugacguccggcgggguguuguuaucucuguacgucucagccagucuaagcuaucuccuguacuccgacauucuucugaaguuuucuccuaccgagauaacagcuccaacuaugccguuggauugcgcaaacgccucgaauguucaagcggugaacagaucagcuaccaaaggaguaacacuccugcugcccgaaccugaguggaccuauccaaggcucagcugucccgguaguacuuuccagaaggccuuacugaucuccccucaccgguuuggcgaaacaaaaggaaauucugcaccacuuauuauccgcgagcccuucguggccugcgggccuaacgaauguaagcauuuugcuuugacccacuacgcagcccagccaggcgguuauuacaaugggacgcgaggagaccguaacaaacugagacaucuaauuagcgucaagcucggcaagaucccgacuguggaaaauuccauauuccacauggcugccuggucaggcagugcgugccaugaugggaaagaguggaccuauaucggaguugacggucccgauaacaaugcacugcuuaaggugaaauacggcgaggccuacacagacacuuaucacagcuacgcuaacaauauucugaggacccaggagucugccuguaacugcaucgggggaaauuguuauuugaugauuacagauggcuccgcaucaggugucagcgaaugccgguuucucaagauccgcgaggggagaauaauuaaagagaucuucccuaccggaagggugaagcacacggaagaguguacuugcggcuuugcuaguaacaagacaauugaaugugccugccgggacaaucgcuacaccgcgaaacgaccauucguaaagcugaacguugagacugauacagccgaaaucagauuaaugugcaccgacacguaucuggauacccccaggccuaacgacggcucuaucacagggccaugugaguccgauggagacaaagguagcggcgggauuaagggaggcuuugugcaucaacggaugaaaucgaagauaggucguugguacucucgcacuauguccaaaaccgagagaauggggaugggccucuaugucaaguacggaggcgaccccugggcagauucagacgcucuuacauucaguggggugauggugagcaugaaggaaccgggaugguacuccuuugguuucgagaucaaagauaagaaaugcgacgucccuuguauuggcaucgaaaugguucacgaugggggaaaggagacuuggcauucugccgcuaccgccauauauugccugaugggcagcggucaguugcuaugggacacagugaccgggguagauauggcacuguga

SEQ ID NO: 14334 - RNA, 1973 nt, Artificial Sequence
  FLUAV/H1N1/A/California/7/2009__ACP41953 hemagglutinin mRNA gc (HA)
aggagagucccgcagucggcguccagcggcucugcuuguucgugugugugucguugcaggccuuauucaagcuuaccaugaaggccauccuggugguccuccuguacaccuucgccaccgcgaacgccgacacgcugugcaucggcuaccacgccaacaacagcaccgacaccguggacaccgugcucgagaagaacgucacggugacccacuccgugaaccugcuggaggacaagcacaacgggaagcucugcaagcugcggggcgucgccccgcugcaccucgggaagugcaacaucgccggcuggauccuggggaacccggagugcgagagccuguccaccgcgagcuccuggagcuacaucguggagacccccuccagcgacaacggcacgugcuaccccggcgacuucaucgacuacgaggagcuccgcgagcagcuguccagcguguccagcuucgagcgguucgagaucuuccccaagaccuccagcuggccgaaccacgacuccaacaagggggucaccgccgccugcccccacgccggcgccaagagcuucuacaagaaccugaucuggcucgugaagaaggggaacuccuaccccaagcugagcaaguccuacaucaacgacaagggcaaggaggugcugguccucugggggauccaccaccccagcaccagcgcggaccagcagucccuguaccagaacgccgacgccuacguguucgugggcagcucccgcuacagcaagaaguucaagccggagaucgccauccggcccaagguccgcgaccaggagggccgcaugaacuacuacuggacccugguggagcccggggacaagaucaccuucgaggcgaccggcaaccucguggucccccgguacgccuucgccauggagcgcaacgccggguccggcaucaucaucagcgacacgccggugcacgacugcaacacgaccugccagacccccaagggcgccaucaacaccucccugcccuuccagaacauccaccccaucaccaucgggaagugcccgaaguacgucaagagcaccaagcugcggcucgcgaccggccugcgcaacauccccuccauccagagccgggggcuguucggcgccaucgccggguucaucgagggcggcuggacggggaugguggacggcugguacggguaccaccaccagaacgagcagggcagcggguacgccgccgaccucaaguccacgcagaacgcgaucgacgagaucaccaacaaggugaacagcgucaucgagaagaugaacacccaguucaccgccgugggcaaggaguucaaccaccuggagaagcggaucgagaaccugaacaagaaggucgacgacggcuuccucgacaucuggacguacaacgccgagcugcuggugcuccuggagaacgagcgcacccuggacuaccacgacuccaacgugaagaaccucuacgagaagguccggagccagcugaagaacaacgccaaggagaucgggaacggcugcuucgaguucuaccacaagugcgacaacacgugcauggaguccgugaagaacgggaccuacgacuaccccaaguacagcgaggaggccaagcugaaccgcgaggagaucgacggcgugaagcucgaguccacccggaucuaccagauccuggcgaucuacagcaccgucgccagcucccuggugcucguggucagccugggggccaucuccuucuggaugugcagcaacggcucccugcagugccgcaucugcaucugaggacuagucccuguucccagagcccacuuuuuuuucuuuuuuugaaauaaaauagccugucuuucagaucucaaaggcucuuuucagagccaccaaaaaaaaaaaaaaaaaaaaaaaaaaaaaaaaaaaaaaaaaaaaaaaaaaaaaaaaaaaaaaaaaaaaaaaaaaaaaaaaaaaaaaaaaaaaaaaaaaaaa

SEQ ID NO: 14335 - RNA, 1973 nt, Artificial Sequence
  FLUAV/H1N1/A/Michigan/45/2015__EPI662594 hemagglutinin mRNA gc (HA)
aggagagucccgcagucggcguccagcggcucugcuuguucgugugugugucguugcaggccuuauucaagcuuaccaugaaggccauccuggugguccuccuguacaccuucaccacggccaacgcggacacccugugcaucggcuaccacgccaacaacagcaccgacaccguggacacggugcucgagaagaacgucaccgugacccacuccgugaaccugcuggaggacaagcacaacgggaagcucugcaagcugcgcggcgucgcgccccugcaccucgggaagugcaacaucgccggcuggauccuggggaacccggagugcgagagccuguccaccgccagcuccuggagcuacaucguggagacguccaacagcgacaacgggaccugcuaccccggcgacuucaucaacuacgaggagcuccgggagcagcuguccagcguguccagcuucgagcgcuucgagaucuuccccaagaccuccagcuggcccaaccacgacuccaacaagggcgucaccgccgccugcccgcacgccggcgccaagagcuucuacaagaaccugaucuggcucgugaagaaggggaacuccuaccccaagcugaaccagagcuacaucaacgacaagggcaaggaggugcugguccucugggggauccaccaccccuccacgaccgcggaccagcagagccuguaccagaacgccgacgccuacguguucgugggcaccagccgguacuccaagaaguucaagcccgagaucgccacccgcccgaagguccgggaccaggagggccgcaugaacuacuacuggacgcugguggagcccggggacaagaucaccuucgaggccaccggcaaccucguggucccccgguacgcguucaccauggagcgcaacgccgggagcggcaucaucaucuccgacacgcccgugcacgacugcaacacgaccugccagaccccggagggcgccaucaacaccagccugcccuuccagaacauccaccccaucaccaucgggaagugccccaaguacgugaaguccaccaagcugcggcucgccaccggccugcgcaacgucccgagcauccagucccgggggcuguucggcgccaucgcgggguucaucgagggcggcuggacggggaugguggacggcugguacggguaccaccaccagaacgagcagggcagcggguacgccgccgaccucaaguccacccagaacgccaucgacaagaucaccaacaaggugaacagcgucaucgagaagaugaacacccaguucacggccgugggcaaggaguucaaccaccuggagaagcgcaucgagaaccugaacaagaaggucgacgacggcuuccucgacaucuggaccuacaacgcggagcugcuggugcuccuggagaacgagcggacccuggacuaccacgacuccaacgugaagaaccucuacgagaagguccgcaaccagcugaagaacaacgccaaggagaucgggaacggcugcuucgaguucuaccacaagugcgacaacacgugcauggagagcgugaagaacgggaccuacgacuaccccaaguacuccgaggaggccaagcugaaccgggagaagaucgacggcgugaagcucgagagcacccgcaucuaccagauccuggccaucuacuccaccgucgccagcucccuggugcucguggucagccugggggcgaucuccuucuggaugugcagcaacggcagccugcagugccggaucugcaucugaggacuagucccuguucccagagcccacuuuuuuuucuuuuuuugaaauaaaauagccugucuuucagaucucaaaggcucuuuucagagccaccaaaaaaaaaaaaaaaaaaaaaaaaaaaaaaaaaaaaaaaaaaaaaaaaaaaaaaaaaaaaaaaaaaaaaaaaaaaaaaaaaaaaaaaaaaaaaaaaaaaaa

SEQ ID NO: 14336 - RNA, 1973 nt, Artificial Sequence
  FLUAV/H1N1/A/Netherlands/602/2009__ACQ45338 hemagglutinin mRNA gc (HA)
aggagagucccgcagucggcguccagcggcucugcuuguucgugugugugucguugcaggccuuauucaagcuuaccaugaaggccauccuggugguccuccuguacaccuucgccaccgcgaacgccgacacgcugugcaucggcuaccacgccaacaacagcaccgacaccguggacaccgugcucgagaagaacgucacggugacccacuccgugaaccugcuggaggacaagcacaacgggaagcucugcaagcugcggggcgucgccccgcugcaccucgggaagugcaacaucgccggcuggauccuggggaacccggagugcgagagccuguccaccgcgagcuccuggagcuacaucguggagaccuccagcuccgacaacggcacgugcuaccccggcgacuucaucgacuacgaggagcuccgcgagcagcugagcuccgugagcuccuucgagcgguucgagaucuuccccaagaccagcuccuggcccaaccacgacagcaacaagggggucaccgccgccugcccgcacgccggcgcgaaguccuucuacaagaaccugaucuggcucgugaagaaggggaacagcuaccccaagcuguccaagagcuacaucaacgacaagggcaaggaggugcugguccucugggggauccaccaccccagcaccuccgccgaccagcagagccuguaccagaacgccgacgccuacguguucgugggcuccagccgcuacuccaagaaguucaagcccgagaucgccauccggccgaagguccgcgaccaggagggccggaugaacuacuacuggacgcugguggagcccggggacaagaucaccuucgaggcgaccggcaaccucguggucccccgcuacgccuucgccauggagcggaacgccgggagcggcaucaucaucuccgacacccccgugcacgacugcaacacgaccugccagaccccgaagggcgccaucaacaccagccugcccuuccagaacauccaccccaucacgaucgggaagugccccaaguacgugaaguccaccaagcugcgccucgcgaccggccugcggaacgucccgagcauccagucccgcgggcuguucggcgccaucgccggguucaucgagggcggcuggaccgggaugguggacggcugguacggguaccaccaccagaacgagcagggcagcggguacgccgccgaccucaaguccacgcagaacgcgaucgacgagaucaccaacaaggugaacagcgucaucgagaagaugaacacccaguucaccgccgugggcaaggaguucaaccaccuggagaagcggaucgagaaccugaacaagaaggucgacgacggcuuccucgacaucuggacguacaacgccgagcugcuggugcuccuggagaacgagcgcacccuggacuaccacgacuccaacgugaagaaccucuacgagaagguccggagccagcugaagaacaacgccaaggagaucgggaacggcugcuucgaguucuaccacaagugcgacaacaccugcauggaguccgugaagaacgggaccuacgacuaccccaaguacagcgaggaggccaagcugaaccgcgaggagaucgacggcgugaagcucgaguccacgcggaucuaccagauccuggcgaucuacagcaccgucgccagcucccuggugcucguggucagccugggggccaucuccuucuggaugugcagcaacggcucccugcagugccgcaucugcaucugaggacuagucccuguucccagagcccacuuuuuuuucuuuuuuugaaauaaaauagccugucuuucagaucucaaaggcucuuuucagagccaccaaaaaaaaaaaaaaaaaaaaaaaaaaaaaaaaaaaaaaaaaaaaaaaaaaaaaaaaaaaaaaaaaaaaaaaaaaaaaaaaaaaaaaaaaaaaaaaaaaaaa

SEQ ID NO: 14337 - RNA, 1973 nt, Artificial Sequence
  FLUAV/H3N2/A/Hong Kong/4801/2014__EPI643118 hemagglutinin mRNA gc (HA)
aggagagucccgcagucggcguccagcggcucugcuuguucgugugugugucguugcaggccuuauucaagcuuaccaugaagaccaucaucgcccugagcuacauccucugccugguguucgcccagaagauccccggcaacgacaacuccaccgcgacgcugugccucgggcaccacgccgucccgaacggcaccaucgugaagaccaucaccaacgaccgcaucgaggugacgaacgccaccgagcugguccagaacagcuccaucggggagaucugcgacagcccccaccagauccuggacggcgagaacugcacccucaucgacgcccugcugggggacccccagugcgacggcuuccagaacaagaagugggaccucuucguggagcgguccaaggccuacagcaacugcuaccccuacgacgugccggacuacgcgucccugcgcagccuggucgccuccagcggcacccucgaguucaacaacgaguccuucaacuggacgggggugacccagaacggcaccagcuccgccugcauccggcgcagcuccagcuccuucuucagccggcugaacuggcugacccaccucaacuacaaguaccccgcccugaacgugacgaugcccaacaacgagcaguucgacaagcuguacaucuggggcguccaccaccccgggaccgacaaggaccagaucuucccguacgcgcaguccagcgggcgcaucaucgugagcaccaagcggucccagcaggccgugauccccaacaucggcagccgcccccggauccgcgacaucccgucccggaucagcaucuacuggaccaucgucaagccgggcgacauccuccugaucaacuccacggggaaccugaucgccccgcgcggcuacuucaagcuccggagcgggaaguccagcaucaugcgcuccgacgcccccaucggcaagugcaagagcgagugcaucacccccaacggcuccaucccgaacgacaagcccuuccagaacgugaaccggaucaccuacggggccugcccccgcuacgugaagcacagcacccugaagcuggcgacgggcaugcggaacguccccgagaagcagacccgcgggaucuucggcgccaucgccggguucaucgagaacggcugggagggcaugguggacgggugguacggcuuccggcaccagaacuccgaggggcgcggccaggccgccgaccucaagagcacccaggcggccaucgaccagaucaacgggaagcugaaccggcugaucggcaagaccaacgagaaguuccaccagaucgagaaggaguucuccgagguggagggccgcauccaggaccucgagaaguacgucgaggacacgaagaucgaccuguggagcuacaacgccgagcugcucguggcccuggagaaccagcacaccaucgaccugaccgacuccgagaugaacaagcucuucgagaagaccaagaagcagcugcgcgagaacgccgaggacauggggaacggcugcuucaagaucuaccacaagugcgacaacgcgugcaucgggagcauccggaacggcacguacgaccacaacguguaccgcgacgaggcccugaacaaccgguuccagaucaagggggucgagcucaaguccggcuacaaggacuggauccuguggaucagcuucgccaucagcugcuuccugcucugcguggcccugcugggcuucaucaugugggccugccagaaggggaacauccgcugcaacaucugcaucugaggacuagucccuguucccagagcccacuuuuuuuucuuuuuuugaaauaaaauagccugucuuucagaucucaaaggcucuuuucagagccaccaaaaaaaaaaaaaaaaaaaaaaaaaaaaaaaaaaaaaaaaaaaaaaaaaaaaaaaaaaaaaaaaaaaaaaaaaaaaaaaaaaaaaaaaaaaaaaaaaaaaa

SEQ ID NO: 14338 - RNA, 2030 nt, Artificial Sequence
  FLUBV/H0N0/B/Brisbane/60/2008__FJ766840 hemagglutinin mRNA gc (HA)
aggagagucccgcagucggcguccagcggcucugcuuguucgugugugugucguugcaggccuuauucaagcuuaccaugaaggccaucaucgugcugcucauggucgugaccagcaacgccgaccggaucugcaccggcaucacguccagcaacuccccgcacguggucaagaccgcgacccagggggaggugaacgugaccggcgucaucccgcugacgaccacccccaccaagagccacuucgccaaccugaaagggacggagacccgcggcaagcucugccccaagugccugaacugcaccgaccuggacguggcccucgggcggcccaagugcaccggcaaaaucccguccgcccgcgugagcauccugcacgagguccggcccgugacguccggcugcuuccccaucaugcacgaccgcaccaagauccggcagcugcccaaccuccugcgcggguacgagcacauccggcugagcacccacaacgugaucaacgccgagaacgcgccgggcgggcccuacaagaucggcaccuccgggagcugccccaacaucacgaacggcaacggcuucuucgccaccauggccugggccguccccaagaacgacaagaacaaaaccgcgaccaacccgcucacgaucgaggugcccuacaucugcaccgagggggaggaccagaucaccguguggggcuuccacuccgacaacgagacccagauggccaagcuguacggggacagcaagccccagaaguucacguccagcgccaacggcgucaccacccacuacgugucccagaucggcggguuccccaaccagaccgaggacggcgggcugccgcagagcggccgcaucguggucgacuacauggugcagaaauccgggaagacgggcaccaucaccuaccagcggggcauccuccugccccagaagguguggugcgccagcgggcgcuccaaggucaucaaaggcagccugccccucaucggggaggccgacugccugcacgagaaguacggcgggcugaacaagagcaagcccuacuacaccggcgagcacgcgaaagccaucggcaacugcccgaucugggugaagacgccccucaagcuggccaacgggaccaaguaccggccgcccgccaaacugcucaaggagcgcggcuucuucggggccaucgcgggcuuccuggagggcgggugggagggcaugaucgccggguggcacggcuacaccucccacggggcccacggcguggccgucgccgcggaccucaagagcacccaggaggccaucaacaaaaucacgaagaaccugaacucccugagcgagcuggaggugaagaaccuccagcggcuguccggcgccauggacgagcugcacaacgagauccucgagcuggacgagaaggucgacgaccugcgcgccgacaccaucagcucccagaucgagcucgccgugcugcugagcaacgaggggaucaucaacuccgaggacgagcaccuccuggcgcuggagcggaaacucaagaagaugcugggccccagcgccguggagaucgggaacggcugcuucgagaccaagcacaagugcaaccagaccugccuggaccgcaucgccgccgggaccuucgacgcgggcgaguucucccuccccacguucgacagccugaacaucaccgccgccucccugaacgacgacggccuggacaaccacaccauccuccuguacuacagcaccgccgccuccagccuggcggucacgcucaugaucgccaucuucgugguguacauggucucccgggacaacgugagcugcuccaucugccugugaggacuagucccuguucccagagcccacuuuuuuuucuuuuuuugaaauaaaauagccugucuuucagaucucaaaggcucuuuucagagccaccaaaaaaaaaaaaaaaaaaaaaaaaaaaaaaaaaaaaaaaaaaaaaaaaaaaaaaaaaaaaaaaaaaaaaaaaaaaaaaaaaaaaaaaaaaaaaaaaaaaaa

SEQ ID NO: 14339 - RNA, 2027 nt, Artificial Sequence
  FLUBV/H0N0/B/Phuket/3073/2013__EPI540671 hemagglutinin mRNA gc (HA)
aggagagucccgcagucggcguccagcggcucugcuuguucgugugugugucguugcaggccuuauucaagcuuaccaugaaggccaucaucgugcugcucauggucgugaccagcaacgccgaccgcaucugcaccggcaucacguccagcaacuccccgcacguggucaagaccgcgacccagggggaggugaacgugaccggcgucaucccccugacgaccacccccaccaagagcuacuucgccaaccugaaggggacgcggacccgcggcaaacucugccccgacugccugaacugcaccgaccuggacguggcccucgggcggcccaugugcgugggcaccacgccguccgccaaggccagcauccugcacgagguccgccccgugaccuccggcugcuuccccaucaugcacgaccggaccaagauccgccagcugcccaaccuccugcggggguacgagaagauccgccugagcacccagaacgugaucgacgcggagaaagccccgggcgggcccuaccggcucggcacguccgggagcugccccaacgccaccuccaagaucggcuucuucgccaccauggcgugggccguccccaaggacaacuacaagaacgccaccaacccgcugacgguggaggugcccuacaucugcaccgagggcgaggaccagaucaccgucuggggguuccacagcgacaacaagacccagaugaaaucccuguacggcgacagcaacccccagaaguucacguccagcgccaacggggugaccacccacuacgugucccagaucggcgacuuccccgaccagaccgaggacggcgggcucccgcagagcggccgcaucgucguggacuacaugaugcagaagcccgggaagacgggcaccaucguguaccagcggggcguccugcugccccagaaaguguggugcgccuccgggcgcagcaaggugaucaagggcagccucccccugaucggggaggcggacugccugcacgaggaguacggcgggcucaacaaguccaaaccguacuacaccggcaagcacgccaaggccaucgggaacugccccaucugggucaagaccccgcugaaacuggccaacggcacgaaauaccggcccccggccaagcuccugaaggagcgcggcuucuucggggcgaucgccggcuuccuggagggcgggugggaggggaugaucgccggcuggcacggcuacaccagccacggggcccacggcguggccgucgcggccgaccucaaguccacccaggaggccaucaacaaaaucaccaagaaccugaacagccuguccgagcucgaggugaagaaccugcagcggcugagcggggccauggacgagcuccacaacgagauccuggagcuggacgagaagguggacgaccuccgcgccgacacgaucuccagccagaucgagcuggcgguccugcucuccaacgagggcaucaucaacagcgaggacgagcaccuccuggcccucgagcggaaacugaagaagaugcugggccccuccgccguggacaucgggaacggcugcuucgagaccaagcacaagugcaaccagaccugccucgaccgcaucgccgcggggaccuucaacgccggcgaguucagccugcccaccuucgacucccugaacaucacggccgccagccugaacgacgacgggcucgacaaccacaccauccugcuguacuacuccaccgccgcgagcucccucgccgugacccugaugcuggccaucuucaucgucuacauggugagccgggacaacguguccugcagcaucugccucugaggacuagucccuguucccagagcccacuuuuuuuucuuuuuuugaaauaaaauagccugucuuucagaucucaaaggcucuuuucagagccaccaaaaaaaaaaaaaaaaaaaaaaaaaaaaaaaaaaaaaaaaaaaaaaaaaaaaaaaaaaaaaaaaaaaaaaaaaaaaaaaaaaaaaaaaaaaaaaaaaaaaa

SEQ ID NO: 14340 - RNA, 1967 nt, Artificial Sequence
  FLUAV/H1N1/A/Brisbane/02/2018__EPI1212834 hemagglutinin mRNA gc (HA)
aggagagucccgcagucggcguccagcggcucugcuuguucgugugugugucguugcaggccuuauucaagcuuaccaugaaggccauccuggugguccuccuguacaccuucaccacggccaacgcggacacccugugcaucggcuaccacgccaacaacagcaccgacaccguggacacggugcucgagaagaacgucaccgugacccacuccgugaaccugcuggaggacaagcacaacgggaagcucugcaagcugggcggggucgcgccccugcaccucggcaagugcaacaucgccggguggauccugggcaacccggagugcgagagccuguccaccgcccgcagcugguccuacaucguggagacgagcaacuccgacaacgggaccugcuaccccggcgacuucaucaacuacgaggagcuccgggagcagcugagcuccgugagcuccuucgagcgcuucgagaucuuccccaagaccagcuccuggcccaaccacgacagcaacaagggcgucaccgccgccugcccgcacgccggggccaaguccuucuacaagaaccugaucuggcucgugaagaagggcaacagcuaccccaagcugaaccagacguacaucaacgacaaggggaaggaggugcugguccucuggggcauccaccacccgcccaccaccgcggaccagcagucccuguaccagaacgccgacgccuacguguucgugggcaccagccgguacuccaagaaguucaagcccgagaucgccacgcgccccaagguccgggaccgcgaggggcggaugaacuacuacuggacccugguggagcccggcgacaagaucaccuucgaggccaccgggaaccucguggucccccgcuacgcguucacgauggagcggaacgccggcagcggcaucaucaucagcgacaccccggugcacgacugcaacacgaccugccagaccgccgagggggccaucaacaccucccugcccuuccagaacgugcaccccgucaccaucggcaagugccccaaguacgucaagagcaccaagcugcgccucgccacggggcugcggaacgugccguccauccagagccgcggccuguucggggcgaucgccggcuucaucgagggcggguggaccggcaugguggacgggugguacggcuaccaccaccagaacgagcagggguccggcuacgccgccgaccucaagagcaacgccaucgacaagaucaccaacaaggugaacuccgucaucgagaagaugaacacccaguucacggcggugggcaaggaguucaaccaccuggagaagcggaucgagaaccugaacaagaagguggacgacggguuccucgacaucuggaccuacaacgccgagcugcugguccuccuggagaacgagcgcacccuggacuaccacgacagcaacgugaagaaccucuacgagaaggugcggaaccagcugaagaacaacgccaaggagaucggcaacgggugcuucgaguucuaccacaagugcgacaacacgugcauggaguccgucaagaacggcaccuacgacuaccccaaguacagcgaggaggccaagcugaaccgcgagaagaucgacggggugaagcucgaguccacccggaucuaccagauccuggccaucuacagcaccguggcguccagccugguccucguggugucccugggcgccaucagcuucuggaugugcuccaacggcagccugcagugccgcaucugcaucugaggacuagucccuguucccagagcccacuuuuuuuucuuuuuuugaaauaaaauagccugucuuucagaucucaaaggcucuuuucagagccaccaaaaaaaaaaaaaaaaaaaaaaaaaaaaaaaaaaaaaaaaaaaaaaaaaaaaaaaaaaaaaaaaaaaaaaaaaaaaaaaaaaaaaaaaaaaaaaaaaaaaa

SEQ ID NO: 14341 - RNA, 1967 nt, Artificial Sequence
  FLUAV/H1N1/A/Brisbane/02/2018__EPI1671767 hemagglutinin mRNA gc (HA)
aggagagucccgcagucggcguccagcggcucugcuuguucgugugugugucguugcaggccuuauucaagcuuaccaugaaggccauccuggugguccuccuguacaccuucaccacggccaacgcggacacccugugcaucggcuaccacgccaacaacagcaccgacaccguggacacggugcucgagaagaacgucaccgugacccacuccgugaaccugcuggaggacaagcacaacgggaagcucugcaagcugggcggggucgcgccccugcaccucggcaagugcaacaucgccggguggauccugggcaacccggagugcgagagccuguccaccgcccgcagcugguccuacaucguggagacgagcaacuccgacaacgggaccugcuaccccggcgacuucaucaacuacgaggagcuccgggagcagcugagcuccgugagcuccuucgagcgcuucgagaucuuccccaagaccagcuccuggcccaaccacgacagcaacaagggcgucaccgccgccugcccgcacgccggggccaaguccuucuacaagaaccugaucuggcucgugaagaagggcaacagcuaccccaagcugaaccagacguacaucaacgacaaggggaaggaggugcugguccucuggggcauccaccacccgcccaccaccgcggaccagcagucccuguaccagaacgccgacgccuacguguucgugggcaccagccgguacuccaagaaguucaagcccgagaucgccacgcgccccaagguccgggaccaggaggggcgcaugaacuacuacuggacccugguggagcccggcgacaagaucaccuucgaggccaccgggaaccucguggucccccgguacgcguucacgauggagcgcaacgccggcagcggcaucaucaucagcgacaccccggugcacgacugcaacacgaccugccagaccgccgagggggccaucaacaccucccugcccuuccagaacgugcaccccgucaccaucggcaagugccccaaguacgucaagagcaccaagcugcggcucgccacggggcugcgcaacgugccguccauccagagccggggccuguucggggcgaucgccggcuucaucgagggcggguggaccggcaugguggacgggugguacggcuaccaccaccagaacgagcagggguccggcuacgccgccgaccucaagagcaacgccaucgacaagaucaccaacaaggugaacuccgucaucgagaagaugaacacccaguucacggcggugggcaaggaguucaaccaccuggagaagcgcaucgagaaccugaacaagaagguggacgacggguuccucgacaucuggaccuacaacgccgagcugcugguccuccuggagaacgagcggacccuggacuaccacgacagcaacgugaagaaccucuacgagaaggugcgcaaccagcugaagaacaacgccaaggagaucggcaacgggugcuucgaguucuaccacaagugcgacaacacgugcauggaguccgucaagaacggcaccuacgacuaccccaaguacagcgaggaggccaagcugaaccgggagaagaucgacggggugaagcucgaguccacccgcaucuaccagauccuggccaucuacagcaccguggcguccagccugguccucguggugucccugggcgccaucagcuucuggaugugcuccaacggcagccugcagugccggaucugcaucugaggacuagucccuguucccagagcccacuuuuuuuucuuuuuuugaaauaaaauagccugucuuucagaucucaaaggcucuuuucagagccaccaaaaaaaaaaaaaaaaaaaaaaaaaaaaaaaaaaaaaaaaaaaaaaaaaaaaaaaaaaaaaaaaaaaaaaaaaaaaaaaaaaaaaaaaaaaaaaaaaaaaa

SEQ ID NO: 14342 - RNA, 1967 nt, Artificial Sequence
  FLUAV/H1N1/A/Guangdong-Maonan/SWL1536/2019__EPI1542570 hemagglutinin mRNA gc (HA)
aggagagucccgcagucggcguccagcggcucugcuuguucgugugugugucguugcaggccuuauucaagcuuaccaugaaggccauccuggugguccuccuguacaccuucaccacggccaacgcggacacccugugcaucggcuaccacgccaacaacagcaccgacaccguggacacggugcucgagaagaacgucaccgugacccacuccgugaaccugcuggaggacaagcacaacgggaagcucugcaagcugcgcggcgucgcgccccugcaccucgggaagugcaacaucgccggcuggauccuggggaacccggagugcgagagccuguccaccgcccggagcugguccuacaucguggagacgagcaacuccgacaacgggaccugcuaccccggcgacuucaucaacuacgaggagcuccgcgagcagcugagcuccgugagcuccuucgagcgguucgagaucuuccccaagaccagcuccuggcccaaccacgacagcgacaagggcgucaccgccgccugcccgcacgccggcgccaaguccuucuacaagaaccugaucuggcucgugaagaaggggaacagcuaccccaagcugaaccagacguacaucaacgacaagggcaaggaggugcugguccucugggggauccaccacccgcccaccaucgcggcccaggagucccuguaccagaacgccgacgccuacguguucgugggcaccagccgcuacuccaagaaguucaagcccgagaucgccacccggcccaagguccgcgaccaggagggccggaugaacuacuacuggacgcugguggagcccggggacaagaucaccuucgaggcgaccggcaaccucguggucccccgcuacgccuucaccauggagcgggacgccgggagcggcaucaucaucagcgacacgccggugcacgacugcaacacgaccugccagacccccgagggcgccaucaacaccucccugcccuuccagaacgugcaccccaucaccaucgggaagugcccgaaguacgucaagagcaccaagcugcgccucgccaccggccugcggaacgugcccuccauccagagccgcgggcuguucggcgcgaucgccggguucaucgagggcggcuggacggggaugguggacggcugguacggguaccaccaccagaacgagcagggcuccggguacgccgccgaccucaagagcaacgccaucgacaagaucaccaacaaggucaacuccgugaucgagaagaugaacacccaguucaccgcggucggcaaggaguucaaccaccuggagaagcggaucgagaaccugaacaagaagguggacgacggcuuccucgacaucuggacguacaacgccgagcugcuggugcuccuggagaacgagcgcacccuggacuaccacgacagcaacgucaagaaccucuacgagaaggugcggaaccagcugaagaacaacgccaaggagaucgggaacggcugcuucgaguucuaccacaagugcgacaacacgugcauggaguccgugaagaacgggaccuacgacuaccccaaguacagcgaggaggccaagcugaaccgcgagaagaucgacggcgucaagcucgaguccacccggaucuaccagauccuggccaucuacagcaccguggcguccagccuggugcucgucgugucccugggggccaucagcuucuggaugugcuccaacggcagccugcagugccgcaucugcaucugaggacuagucccuguucccagagcccacuuuuuuuucuuuuuuugaaauaaaauagccugucuuucagaucucaaaggcucuuuucagagccaccaaaaaaaaaaaaaaaaaaaaaaaaaaaaaaaaaaaaaaaaaaaaaaaaaaaaaaaaaaaaaaaaaaaaaaaaaaaaaaaaaaaaaaaaaaaaaaaaaaaaa

SEQ ID NO: 14343 - RNA, 1967 nt, Artificial Sequence
  FLUAV/H1N1/A/Guangdong-Maonan/SWL1536/2019__EPI1590725 hemagglutinin mRNA gc (HA)
aggagagucccgcagucggcguccagcggcucugcuuguucgugugugugucguugcaggccuuauucaagcuuaccaugaaggccauccuggugguccuccuguacaccuucaccacggccaacgcggacacccugugcaucggcuaccacgccaacaacagcaccgacaccguggacacggugcucgagaagaacgucaccgugacccacuccgugaaccugcuggaggacaagcacaacgggaagcucugcaagcugcgcggcgucgcgccccugcaccucgggaagugcaacaucgccggcuggauccuggggaacccggagugcgagagccuguccaccgcccggagcugguccuacaucguggagacgagcaacuccgacaacgggaccugcuaccccggcgacuucaucaacuacgaggagcuccgcgagcagcugagcuccgugagcuccuucgagcgguucgagaucuuccccaagaccagcuccuggcccaaccacgacagcgacaagggcgucaccgccgccugcccgcacgccggcgccaaguccuucuacaagaaccugaucuggcucgugaagaaggggaacagcuaccccaagcugaaccagacguacaucaacgacaagggcaaggaggugcugguccucugggggauccaccacccgcccaccaucgcggugcaggagucccuguaccagaacgccgacgccuacguguucgucggcaccagccgcuacuccaagaaguucaagcccgagaucgccacccggcccaaggugcgcgaccaggagggccggaugaacuacuacuggacgcugguggagcccggggacaagaucaccuucgaggccaccggcaaccucgucgugccccgcuacgcguucaccauggagcgggacgccgggagcggcaucaucaucagcgacacgccggugcacgacugcaacacgaccugccagacccccgagggcgccaucaacaccucccugcccuuccagaacguccaccccaucaccaucgggaagugcccgaaguacgucaagagcaccaagcugcgccucgccaccggccugcggaacgugcccuccauccagagccgcgggcuguucggcgccaucgcgggguucaucgagggcggcuggacggggaugguggacggcugguacggguaccaccaccagaacgagcagggcuccggguacgccgccgaccucaagagcaacgccaucgacaagaucaccaacaaggugaacuccgucaucgagaagaugaacacccaguucaccgccgugggcaaggaguucaaccaccuggagaagcggaucgagaaccugaacaagaagguggacgacggcuuccucgacaucuggacguacaacgcggagcugcugguccuccuggagaacgagcgcacccuggacuaccacgacagcaacgugaagaaccucuacgagaaggugcggaaccagcugaagaacaacgccaaggagaucgggaacggcugcuucgaguucuaccacaagugcgacaacacgugcauggaguccgucaagaacgggaccuacgacuaccccaaguacagcgaggaggccaagcugaaccgcgagaagaucgacggcgugaagcucgaguccacccggaucuaccagauccuggccaucuacagcaccguggccuccagccugguccucguggugucccugggggcgaucagcuucuggaugugcuccaacggcagccugcagugccgcaucugcaucugaggacuagucccuguucccagagcccacuuuuuuuucuuuuuuugaaauaaaauagccugucuuucagaucucaaaggcucuuuucagagccaccaaaaaaaaaaaaaaaaaaaaaaaaaaaaaaaaaaaaaaaaaaaaaaaaaaaaaaaaaaaaaaaaaaaaaaaaaaaaaaaaaaaaaaaaaaaaaaaaaaaaa

SEQ ID NO: 14344 - RNA, 1973 nt, Artificial Sequence
  FLUAV/H3N2/A/Singapore/INFIMH-16-0019/2016__EPI1106227 hemagglutinin mRNA gc (HA)
aggagagucccgcagucggcguccagcggcucugcuuguucgugugugugucguugcaggccuuauucaagcuuaccaugaagaccaucaucgcccugagcuacauccucugccugguguucgcccagaagauccccggcaacgacaacuccaccgcgacgcugugccucgggcaccacgccgucccgaacggcaccaucgugaagaccaucaccaacgaccgcaucgaggugacgaacgccaccgagcugguccagaacagcuccaucggggagaucugcgacagcccccaccagauccuggacggcgagaacugcacccucaucgacgcccugcugggggacccccagugcgacggcuuccagaacaagaagugggaccucuucguggagcgguccaaggccuacagcaacugcuaccccuacgacgugccggacuacgcgucccugcgcagccuggucgccuccagcggcacccucgaguucaagaacgaguccuucaacuggacgggggugacccagaacggcaccagcuccgccugcauccgggggagcuccagcuccuucuucagccgccugaacuggcugacccaccucaacuacacguaccccgcccugaacgugaccaugcccaacaaggagcaguucgacaagcuguacaucuggggcguccaccaccccgggaccgacaaggaccagaucuuccucuacgcgcaguccagcggccggaucaccgugagcacgaagcgcucccagcaggccgugaucccgaacaucggcagccggccccgcauccgggacauccccucccgcaucagcaucuacuggaccaucgucaagcccggggacauccugcugaucaacuccaccggcaaccucaucgccccgcggggguacuucaagauccgcagcggcaaguccagcaucaugcgguccgacgcccccaucggcaagugcaagagcgagugcaucacccccaacggguccauccccaacgacaagccguuccagaacgugaaccgcaucacguacggcgccugcccccgguacgugaagcacagcacccugaagcuggcgaccgggaugcgcaacguccccgagaagcagacccggggcaucuucggggccaucgccggcuucaucgagaacggcugggaggggaugguggacggcugguacggguuccgccaccagaacuccgagggccgggggcaggccgccgaccucaagagcacgcaggcggccaucgaccagaucaacggcaagcugaaccgccugaucggcaagaccaacgagaaguuccaccagaucgagaaggaguucuccgagguggaggggcggguccaggaccucgagaaguacguggaggacaccaagaucgaccuguggagcuacaacgccgagcugcucguggcccuggagaaccagcacaccaucgaccugacggacuccgagaugaacaagcuguucgagaagaccaagaagcagcuccgcgagaacgccgaggacaugggcaacgggugcuucaagaucuaccacaagugcgacaacgcgugcaucgagagcauccgcaacgagaccuacgaccacaacgucuaccgggacgaggcccugaacaaccgcuuccagaucaagggcguggagcucaaguccggguacaaggacuggauccuguggaucagcuucgccaucagcugcuuccugcucugcguggcccugcugggcuucaucaugugggccugccagaagggcaacauccggugcaacaucugcaucugaggacuagucccuguucccagagcccacuuuuuuuucuuuuuuugaaauaaaauagccugucuuucagaucucaaaggcucuuuucagagccaccaaaaaaaaaaaaaaaaaaaaaaaaaaaaaaaaaaaaaaaaaaaaaaaaaaaaaaaaaaaaaaaaaaaaaaaaaaaaaaaaaaaaaaaaaaaaaaaaaaaaa

SEQ ID NO: 14345 - RNA, 1973 nt, Artificial Sequence
  FLUAV/H3N2/A/Singapore/INFIMH-16-0019/2016__EPI1341068 hemagglutinin mRNA gc (HA)
aggagagucccgcagucggcguccagcggcucugcuuguucgugugugugucguugcaggccuuauucaagcuuaccaugaagaccaucaucgcccugagcuacauccucugccugguguucgcccagaagauccccggcaacgacaacuccaccgcgacgcugugccucgggcaccacgccgucccgaacggcaccaucgugaagaccaucaccaacgaccgcaucgaggugacgaacgccaccgagcugguccagaacagcuccaucggggagaucugcgacagcccccaccagauccuggacggcgagaacugcacccucaucgacgcccugcugggggacccccagugcgacggcuuccagaacaagaagugggaccucuucguggagcgguccaaggccuacagcaacugcuaccccuacgacgugccggacuacgcgucccugcgcagccuggucgccuccagcggcacccucgaguucaagaacgaguccuucaacuggacgggggugacccagaacggcaccagcuccgccugcauccgggggagcuccagcuccuucuucagccgccugaacuggcugacccaccucaacuacaaguaccccgcccugaacgugacgaugcccaacaaggagcaguucgacaagcuguacaucuggggcguccaccaccccgggaccgacaaggaccagaucuucccguacgcgcaguccagcggccggaucaccgugagcaccaagcgcucccagcaggccgugauccccaacaucggcagccggccccgcauccgggggauccccucccgcaucagcaucuacuggacgaucgucaagccgggcgacauccuccugaucaacuccaccgggaaccugaucgcgccccggggcuacuucaagauccgcagcggcaaguccagcaucaugcgguccgacgcccccaucgggaagugcaagagcgagugcaucacccccaacggcuccaucccgaacgacaagcccuuccagaacgugaaccgcaucaccuacggggccugcccccgguacgugaagcacagcacgcucaagcuggccaccggcaugcgcaacguccccgagaagcagacccgggggaucuucggcgccaucgccggcuucaucgagaacgggugggagggcaugguggacgggugguacggcuuccgccaccagaacuccgaggggcggggccaggccgccgaccucaagagcacccaggcggccaucgaccagaucaacggcaagcugaaccgccugaucgggaagacgaacgagaaguuccaccagaucgagaaggaguucuccgagguggagggccggguccaggaccuggagaaguacguggaggacaccaagaucgaccucuggagcuacaacgccgagcugcugguggcccucgagaaccagcacaccaucgaccugaccgacuccgagaugaacaagcuguucgagaagacgaagaagcagcuccgcgagaacgccgaggacauggggaacggcugcuucaagaucuaccacaagugcgacaacgcgugcaucgagagcauccgcaacgagaccuacgaccacaacgucuaccgggacgaggcccugaacaaccgcuuccagaucaaggggguggagcugaaguccggcuacaaggacuggauccucuggaucagcuucgccaucagcugcuuccugcugugcguggcccuccugggcuucaucaugugggccugccagaaggggaacauccggugcaacaucugcaucugaggacuagucccuguucccagagcccacuuuuuuuucuuuuuuugaaauaaaauagccugucuuucagaucucaaaggcucuuuucagagccaccaaaaaaaaaaaaaaaaaaaaaaaaaaaaaaaaaaaaaaaaaaaaaaaaaaaaaaaaaaaaaaaaaaaaaaaaaaaaaaaaaaaaaaaaaaaaaaaaaaaaa

SEQ ID NO: 14346 - RNA, 1973 nt, Artificial Sequence
  FLUAV/H3N2/A/Singapore/INFIMH-16-0019/2016 NYMC-X-307__EPI1259099 hemagglutinin mRNA gc (HA)
aggagagucccgcagucggcguccagcggcucugcuuguucgugugugugucguugcaggccuuauucaagcuuaccaugaagaccaucaucgcccugagcuacauccucugccugguguucgcccagaagauccccggcaacgacaacuccaccgcgacgcugugccucgggcaccacgccgucccgaacggcaccaucgugaagaccaucaccaacgaccgcaucgaggugacgaacgccaccgagcugguccagaacagcuccaucggggagaucugcgacagcccccaccagauccuggacggcgagaacugcacccucaucgacgcccugcugggggacccccagugcgacggcuuccagaacaagaagugggaccucuucguggagcgguccaaggccuacagcaacugcuaccccuacgacgugccggacuacgcgucccugcgcagccuggucgccuccagcggcacccucgaguucaagaacgaguccuucaacuggacgggggugacccagaacggcaccagcuccgccugcauccgggggagcuccagcuccuucuucagccgccugaacuggcugacccaccucaacuacaaguaccccgcccugaacgugacgaugcccaacaaggagcaguucgacaagcuguacaucuggggcguccaccaccccgggaccgacaaggaccagaucuucccguacgcgcaguccagcggccggaucaccgugagcaccaagcgcucccagcaggccgugauccccaacaucggcagccggccccgcauccgggggauccccucccgcaucagcaucuacuggacgaucgucaagccgggcgacauccuccugaucaacuccaccgggaaccugaucgcgccccggggcuacuucaagauccgcagcggcaaguccagcaucaugcgguccgacgcccccaucgggaagugcaagagcgagugcaucacccccaacggcuccaucccgaacgacaagcccuuccagaacgugaacaagaucaccuacggggccugcccccgcuacgugaagcacagcacgcucaagcuggccaccggcaugcggaacguccccgagaagcagacccgcgggaucuucggcgccaucgccggcuucaucgagaacgggugggagggcaugguggacgggugguacggcuuccggcaccagaacuccgaggggcgcggccaggccgccgaccucaagagcacccaggcggccaucgaccagaucaacggcaagcugaaccggcugaucgggaagacgaacgagaaguuccaccagaucgagaaggaguucuccgagguggagggccgcguccaggaccuggagaaguacguggaggacaccaagaucgaccucuggagcuacaacgccgagcugcugguggcccucgagaaccagcacaccaucgaccugaccgacuccgagaugaacaagcuguucgagaagacgaagaagcagcuccgggagaacgccgaggacauggggaacggcugcuucaagaucuaccacaagugcgacaacgcgugcaucgagagcauccgcaacgagaccuacgaccacaacgucuaccgcgacgaggcccugaacaaccgguuccagaucaaggggguggagcugaaguccggcuacaaggacuggauccucuggaucagcuucgccaucagcugcuuccugcugugcguggcccuccugggcuucaucaugugggccugccagaaggggaacauccgcugcaacaucugcaucugaggacuagucccuguucccagagcccacuuuuuuuucuuuuuuugaaauaaaauagccugucuuucagaucucaaaggcucuuuucagagccaccaaaaaaaaaaaaaaaaaaaaaaaaaaaaaaaaaaaaaaaaaaaaaaaaaaaaaaaaaaaaaaaaaaaaaaaaaaaaaaaaaaaaaaaaaaaaaaaaaaaaa

SEQ ID NO: 14347 - RNA, 1973 nt, Artificial Sequence
  FLUAV/H3N2/A/Singapore/INFIMH-16-0019/2016-CDC-LV18A__EPI1583318 hemagglutinin mRNA gc (HA)
aggagagucccgcagucggcguccagcggcucugcuuguucgugugugugucguugcaggccuuauucaagcuuaccaugaagaccaucaucgcccugagcuacauccucugccugguguucgcccagaagauccccggcaacgacaacuccaccgcgacgcugugccucgggcaccacgccgucccgaacggcaccaucgugaagaccaucaccaacgaccgcaucgaggugacgaacgccaccgagcugguccagaacagcuccaucggggagaucugcgacagcccccaccagauccuggacggcgagaacugcacccucaucgacgcccugcugggggacccccagugcgacggcuuccagaacaagaagugggaccucuucguggagcgguccaaggccuacagcaacugcuaccccuacgacgugccggacuacgcgucccugcgcagccuggucgccuccagcggcacccucgaguucaagaacgaguccuucaacuggacgggggugacccagaacggcaccagcuccgccugcauccgggggagcuccagcuccuucuucagccgccugaacuggcugacccaccucaacuacaaguaccccgcccugaacgugacgaugcccaacaaggagcaguucgacaagcuguacaucuggggcguccaccaccccgggaccgacaaggaccagaucuucccguacgcgcaguccagcggccggaucaucgugagcaccaagcgcucccagcaggccgugauccccaacaucggcagccggccccgcauccgggacauccccucccgcaucagcaucuacuggaccaucgucaagccgggggacauccuccugaucaacuccacgggcaaccugaucgcgccccggggguacuucaagauccgcagcggcaaguccagcaucaugcgguccgacgcccccaucggcaagugcaagagcgagugcaucacccccaacggguccaucccgaacgacaagcccuuccagaacgugaaccgcaucaccuacggcgccugcccccgguacgugaagcacagcacccucaagcuggccacggggaugcgcaacguccccgagaagcagacccggggcaucuucggggccaucgccggcuucaucgagaacggcugggaggggaugguggacggcugguacggguuccgccaccagaacuccgagggccgggggcaggccgccgaccucaagagcacccaggcggccaucgaccagaucaacggcaagcugaaccgccugaucggcaagaccaacgagaaguuccaccagaucgagaaggaguucuccgagguggaggggcggguccaggaccuggagaaguacguggaggacacgaagaucgaccucuggagcuacaacgccgagcugcugguggcccucgagaaccagcacaccaucgaccugaccgacuccgagaugaacaagcuguucgagaagaccaagaagcagcuccgcgagaacgccgaggacaugggcaacgggugcuucaagaucuaccacaagugcgacaacgcgugcaucgagagcauccgcaacgagacguacgaccacaacgucuaccgggacgaggcccugaacaaccgcuuccagaucaagggcguggagcugaaguccggguacaaggacuggauccucuggaucagcuucgccaucagcugcuuccugcugugcguggcccuccugggcuucaucaugugggccugccagaagggcaacauccggugcaacaucugcaucugaggacuagucccuguucccagagcccacuuuuuuuucuuuuuuugaaauaaaauagccugucuuucagaucucaaaggcucuuuucagagccaccaaaaaaaaaaaaaaaaaaaaaaaaaaaaaaaaaaaaaaaaaaaaaaaaaaaaaaaaaaaaaaaaaaaaaaaaaaaaaaaaaaaaaaaaaaaaaaaaaaaaa

SEQ ID NO: 14348 - RNA, 1973 nt, Artificial Sequence
  FLUAV/H3N2/A/Kansas/14/2017__EPI1146345 hemagglutinin mRNA gc (HA)
aggagagucccgcagucggcguccagcggcucugcuuguucgugugugugucguugcaggccuuauucaagcuuaccaugaagaccaucaucgcccugagcugcauccucugccugguguucgcccagaagauccccggcaacgacaacuccaccgcgacgcugugccucgggcaccacgccgucccgaacggcaccaucgugaagaccaucaccaacgaccgcaucgaggugacgaacgccaccgagcugguccagaacagcuccaucggggagaucugcgacagcccccaccagauccuggacggcgagaacugcacccucaucgacgcccugcugggggacccccagugcgacggcuuccagaacaagaagugggaccucuucguggagcggaacaaggccuacuccaacugcuaccccuacgacgugccggacuacgcgagccugcgcucccuggucgccagcuccggcacccucgaguucaacaacgagagcuucaacugggccggggugacgcagaacggcaccuccagcuccugcauccgggggagcaaguccagcuucuucucccgccugaacuggcugacccaccucaacagcaaguaccccgcccugaacgugaccaugcccaacaacgagcaguucgacaagcuguacaucuggggcguccaccaccccgggacggacaaggaccagaucucccucuacgcgcagagcagcggccggaucaccguguccaccaagcgcagccagcaggccgugaucccgaacaucggcucccggccccgcauccgggacauccccagccgcaucuccaucuacuggaccaucgucaagcccggggacauccugcugaucaacagcacgggcaaccucaucgccccgcggggguacuucaagauccgcuccggcaagagcuccaucaugcggagcgacgcccccaucggcaagugcaaguccgagugcaucacccccaacgggagcauccccaacgacaagccguuccagaacgugaaccgcaucaccuacggcgccugcccccgguacgugaagcaguccacccugaagcuggcgacggggaugcgcaacguccccgagcggcagacccgcggcaucuucggggccaucgccggcuucaucgagaacggcugggaggggaugguggacggcugguacggguuccggcaccagaacagcgagggccgcgggcaggccgccgaccucaaguccacccaggcggccaucgaccagaucaacggcaagcugaaccggcugaucggcaagaccaacgagaaguuccaccagaucgagaaggaguucagcgagguggaggggcgcauccaggaccucgagaaguacgucgaggacacgaagaucgaccugugguccuacaacgccgagcugcucguggcccuggagaaccagcacaccaucgaccugaccgacagcgagaugaacaagcuguucgagaagaccaagaagcagcuccgcgagaacgccgaggacaugggcaacgggugcuucaagaucuaccacaagugcgacaacgcgugcaugggcuccauccggaacgggacguacgaccacaacguguaccgcgacgaggcccugaacaaccgguuccagaucaagggcgucgagcucaagagcggcuacaaggacuggauccuguggaucagcuucgccaucuccugcuuccugcucugcguggcccugcugggguucaucaugugggccugccagaagggcaacauccgcugcaacaucugcaucugaggacuagucccuguucccagagcccacuuuuuuuucuuuuuuugaaauaaaauagccugucuuucagaucucaaaggcucuuuucagagccaccaaaaaaaaaaaaaaaaaaaaaaaaaaaaaaaaaaaaaaaaaaaaaaaaaaaaaaaaaaaaaaaaaaaaaaaaaaaaaaaaaaaaaaaaaaaaaaaaaaaaa

SEQ ID NO: 14349 - RNA, 1973 nt, Artificial Sequence
  FLUAV/H3N2/A/Kansas/14/2017__EPI1261067 hemagglutinin mRNA gc (HA)
aggagagucccgcagucggcguccagcggcucugcuuguucgugugugugucguugcaggccuuauucaagcuuaccaugaagaccaucaucgcccugagcugcauccucugccugguguucgcccagaagauccccggcaacgacaacuccaccgcgacgcugugccucgggcaccacgccgucccgaacggcaccaucgugaagaccaucaccaacgaccgcaucgaggugacgaacgccaccgagcugguccagaacagcuccaucggggagaucugcgacagcccccaccagauccuggacggcgagaacugcacccucaucgacgcccugcugggggacccccagugcgacggcuuccagaacaagaagugggaccucuucguggagcggaacaaggccuacuccaacugcuaccccuacgacgugccggacuacgcgagccugcgcucccuggucgccagcuccggcacccucgaguucaacaacgagagcuucaacugggccggggugacgcagaacggcaccuccagcuccugcauccgggggagcaaguccagcuucuucucccgccugaacuggcugacccaccucaacagcaaguaccccgcccugaacgugaccaugcccaacaacgagcaguucgacaagcuguacaucuggggcguccaccaccccgggacggacaagaaccagaucucccucuacgcgcagagcagcggccggaucaccguguccaccaagcgcagccagcaggccgugaucccgaacaucggcucccggccccgcauccgggacauccccagccgcaucuccaucuacuggaccaucgucaagcccggggacauccugcugaucacgagcaccggcaaccucaucgccccgcggggguacuucaagauccgcuccggcaagagcuccaucaugcggagcgacgcccccaucggcaagugcaaguccgagugcaucacccccaacgggagcauccccaacgacaagccguuccagaacgugaaccgcaucaccuacggcgccugcccccgguacgugaagcaguccacgcugaagcuggcgaccgggaugcgcaacguccccgagcggcagacccgcggcaucuucggggccaucgccggcuucaucgagaacggcugggaggggaugguggacggcugguacggguuccggcaccagaacagcgagggccgcgggcaggccgccgaccucaaguccacccaggcggccaucgaccagaucaacggcaagcugaaccggcugaucggcaagacgaacgagaaguuccaccagaucgagaaggaguucagcgagguggaggggcgcauccaggaccucgagaaguacgucgaggacaccaagaucgaccugugguccuacaacgccgagcugcucguggcccuggagaaccagcacaccaucgaccugaccgacagcgagaugaacaagcuguucgagaagacgaagaagcagcuccgcgagaacgccgaggacaugggcaacgggugcuucaagaucuaccacaagugcgacaacgcgugcaugggcuccauccggaacgggaccuacgaccacaacguguaccgcgacgaggcccugaacaaccgguuccagaucaagggcgucgagcucaagagcggcuacaaggacuggauccuguggaucagcuucgccaucuccugcuuccugcucugcguggcccugcugggguucaucaugugggccugccagaagggcaacauccgcugcaacaucugcaucugaggacuagucccuguucccagagcccacuuuuuuuucuuuuuuugaaauaaaauagccugucuuucagaucucaaaggcucuuuucagagccaccaaaaaaaaaaaaaaaaaaaaaaaaaaaaaaaaaaaaaaaaaaaaaaaaaaaaaaaaaaaaaaaaaaaaaaaaaaaaaaaaaaaaaaaaaaaaaaaaaaaaa

SEQ ID NO: 14350 - RNA, 1973 nt, Artificial Sequence
  FLUAV/H3N2/A/Kansas/14/2017__EPI1691978 hemagglutinin mRNA gc (HA)
aggagagucccgcagucggcguccagcggcucugcuuguucgugugugugucguugcaggccuuauucaagcuuaccaugaagaccaucaucgcccugagcugcauccucugccugguguucgcccagaagauccccggcaacgacaacuccaccgcgacgcugugccucgggcaccacgccgucccgaacggcaccaucgugaagaccaucaccaacgaccgcaucgaggugacgaacgccaccgagcugguccagaacagcuccaucggggagaucugcgacagcccccaccagauccuggacggcgagaacugcacccucaucgacgcccugcugggggacccccagugcgacggcuuccagaacaagaagugggaccucuucguggagcggaacaaggccuacuccaacugcuaccccuacgacgugccggacuacgcgagccugcgcucccuggucgccagcuccggcacccucgaguucaacaacgagagcuucaacugggccggggugacgcagaacggcaccuccagcuccugcauccgggggagcaaguccagcuucuucucccgccugaacuggcugacccaccucaacagcaaguaccccgcccugaacgugaccaugcccaacaacgagcaguucgacaagcuguacaucuggggcguccaccaccccgugacggacaagaaccagaucucccucuacgcgcagagcagcgggcggaucaccguguccaccaagcgcagccagcaggccgucaucccgaacaucggcuaccggccccgcauccgggacauccccucccgcaucagcaucuacuggaccaucgugaagcccggcgacauccugcugaucaacuccacggggaaccucaucgccccgcggggcuacuucaagauccgcagcgggaaguccagcaucaugcgguccgacgcccccaucggcaagugcaagagcgagugcaucacccccaacggcuccauccccaacgacaagccguuccagaacgugaaccgcaucaccuacggggccugcccccgguacgucaagcagagcacccugaagcuggcgacgggcaugcgcaacgugcccgagcggcagacccgcgggaucuucggcgccaucgccggguucaucgagaacggcugggagggcaugguggacgggugguacggcuuccggcaccagaacuccgaggggcgcggccaggccgccgaccucaagagcacccaggcggccaucgaccagaucaacgggaagcugaaccggcugaucggcaagaccaacgagaaguuccaccagaucgagaaggaguucuccgaggucgagggccgcauccaggaccucgagaaguacguggaggacacgaagaucgaccuguggagcuacaacgccgagcugcucguggcccuggagaaccagcacaccaucgaccugaccgacuccgagaugaacaagcuguucgagaagaccaagaagcagcuccgcgagaacgccgaggacauggggaacggcugcuucaagaucuaccacaagugcgacaacgcgugcauggggagcauccggaacggcacguacgaccacaacgucuaccgcgacgaggcccugaacaaccgguuccagaucaaggggguggagcucaaguccggcuacaaggacuggauccuguggaucagcuucgccaucagcugcuuccugcucugcguggcccugcugggcuucaucaugugggccugccagaaggggaacauccgcugcaacaucugcaucugaggacuagucccuguucccagagcccacuuuuuuuucuuuuuuugaaauaaaauagccugucuuucagaucucaaaggcucuuuucagagccaccaaaaaaaaaaaaaaaaaaaaaaaaaaaaaaaaaaaaaaaaaaaaaaaaaaaaaaaaaaaaaaaaaaaaaaaaaaaaaaaaaaaaaaaaaaaaaaaaaaaaa

SEQ ID NO: 14351 - RNA, 1973 nt, Artificial Sequence
  FLUAV/H3N2/A/Kansas/14/2017 CBER-22B CDC19A__EPI1388416 hemagglutinin mRNA gc (HA)
aggagagucccgcagucggcguccagcggcucugcuuguucgugugugugucguugcaggccuuauucaagcuuaccaugaagaccaucaucgcccugagcugcauccucugccugguguucgcccagaagauccccggcaacgacaacuccaccgcgacgcugugccucgggcaccacgccgucccgaacggcaccaucgugaagaccaucaccaacgaccgcaucgaggugacgaacgccaccgagcugguccagaacagcuccaucggggagaucugcgacagcccccaccagauccuggacggcgagaacugcacccucaucgacgcccugcugggggacccccagugcgacggcuuccagaacaagaagugggaccucuucguggagcggaacaaggccuacuccaacugcuaccccuacgacgugccggacuacgcgagccugcgcucccuggucgccagcuccggcacccucgaguucaacaacgagagcuucaacugggccggggugacgcagaacggcaccuccagcuccugcauccgggggagcaaguccagcuucuucucccgccugaacuggcugacccaccucaacagcaaguaccccgcccugaacgugaccaugcccaacaacgagcaguucgacaagcuguacaucuggggcguccaccaccccgugacggacaagaaccagaucucccucuacgcgcagagcagcgggcggaucaccguguccaccaagcgcagccagcaggccgucaucccgaacaucggcuaccggccccgcauccgggacauccccucccgcaucagcaucuacuggaccaucgugaagcccggcgacauccugcugaucaacuccacggggaaccucaucgccccgcggggcuacuucaagauccgcagcgggaaguccagcaucaugcgguccgacgcccccaucggcaagugcaagagcgagugcaucacccccaacggcuccauccccaacgacaagccguuccagaacgugaaccgcaucaccuacggggccugcccccgguacgucaagcagagcacccugaagcuggcgacgggcaugcgcaacgugcccgagcggcagacccgcgggaucuucggcgccaucgccggguucaucgagaacggcugggagggcaugguggacgggugguacggcuuccggcaccagaacuccgaggggcgcggccaggccgccgaccucaagagcacccaggcggccaucgaccagaucaacgggaagcugaaccggcugaucggcaagaccaacgagaaguuccaccagaucgagaaggaguucuccgaggucgagggccgcauccaggaccucgagaaguacguggaggacacgaagaucgaccuguggagcuacaacgccgagcugcucguggcccuggagaaccagcacaccaucgaccugaccgacuccgagaugaacaagcuguucgagaagaccaagaagcagcuccgcgagaacgccgaggacauggggaacggcugcuucaagaucuaccacaagugcgacaacgcgugcaucgggagcauccggaacggcacguacgaccacaacgucuaccgcgacgaggcccugaacaaccgguuccagaucaaggggguggagcucaaguccggcuacaaggacuggauccuguggaucagcuucgccaucagcugcuuccugcucugcguggcccugcugggcuucaucaugugggccugccagaaggggaacauccgcugcaacaucugcaucugaggacuagucccuguucccagagcccacuuuuuuuucuuuuuuugaaauaaaauagccugucuuucagaucucaaaggcucuuuucagagccaccaaaaaaaaaaaaaaaaaaaaaaaaaaaaaaaaaaaaaaaaaaaaaaaaaaaaaaaaaaaaaaaaaaaaaaaaaaaaaaaaaaaaaaaaaaaaaaaaaaaaa

SEQ ID NO: 14352 - RNA, 1973 nt, Artificial Sequence
  FLUAV/H3N2/A/Switzerland/8060/2017__EPI1154878 hemagglutinin mRNA gc (HA)
aggagagucccgcagucggcguccagcggcucugcuuguucgugugugugucguugcaggccuuauucaagcuuaccaugaagaccaucaucgcccugagcuacauccucugccugguguucgcccagaagauccccggcaacgacaacuccaccgcgacgcugugccucgggcaccacgccgucccgaacggcaccaucgugaagaccaucaccaacgaccgcaucgaggugacgaacgccaccgagcugguccagaacagcuccaucggggagaucugcgacagcccccaccagauccuggacggcgagaacugcacccucaucgacgcccugcugggggacccccagugcgacggcuuccagaacaagaagugggaccucuucguggagcgguccaaggccuacagcuccugcuaccccuacgacgugccggacuacgcgagccugcgcucccuggucgccagcuccggcacccucgaguucaacaacgagagcuucaacuggacgggggugaagcagaacggcaccuccagcgccugcauccggaaguccagcuccagcuucuucucccgccugaacuggcugacccaccucaacuacaccuaccccgcccugaacgugacgaugcccaacaacgagcaguucgacaagcuguacaucuggggcguccaccaccccgggaccgacaaggaccagaucuuccucuacgcgcagagcagcgggcggaucaccguguccaccaagcgcagccagcaggccgugaucccgaacaucggcucccggccccgcauccgggacauccccagccgcaucuccaucuacuggacgaucgucaagcccggcgacauccugcugaucaacagcaccgggaaccucaucgccccgcggggcuacuucaagauccaguccggcaagagcuccaucaugcgcagcgacgcccccaucgggaagugcaaguccgagugcaucacccccaacggcagcauccccaacgacaagccguuccagaacgugaaccggaucaccuacggggccugcccccgcuacgugaagcacuccacgcugaagcuggcgaccggcaugcggaacguccccgagaagcagacccgcgggaucuucggcgccaucgccggguucaucgagaacggcugggagggcaugguggacgggugguacggcuuccggcaccagaacagcgaggggcgcggccaggccgccgaccucaaguccacccaggcggccaucgaccagaucaacgggaagcugaaccggcugaucggcaagacgaacgagaaguuccaccagaucgagaaggaguucagcgagguggagggccgcauccaggaccucgagaaguacgucgaggacaccaagaucgaccugugguccuacaacgccgagcugcucguggcccuggagaaccagcacaccaucgaccugaccgacagcgagaugaacaagcuguucgagaagacgaagaagcagcuccgggagaacgccgaggacauggggaacggcugcuucaagaucuaccacaagugcgacaacgcgugcaucggguccauccgcaacggcaccuacgaccacaacguguaccgcgacgaggcccugaacaaccgguuccagaucaagggggucgagcucaagagcggcuacaaggacuggauccuguggaucagcuucgccaucuccugcuuccugcucugcguggcccugcugggcuucaucaugugggccugccagaaggggaacauccgcugcaacaucugcaucugaggacuagucccuguucccagagcccacuuuuuuuucuuuuuuugaaauaaaauagccugucuuucagaucucaaaggcucuuuucagagccaccaaaaaaaaaaaaaaaaaaaaaaaaaaaaaaaaaaaaaaaaaaaaaaaaaaaaaaaaaaaaaaaaaaaaaaaaaaaaaaaaaaaaaaaaaaaaaaaaaaaaa

SEQ ID NO: 14353 - RNA, 1973 nt, Artificial Sequence
  FLUAV/H3N2/A/Switzerland/8060/2017__EPI1266285 hemagglutinin mRNA gc (HA)
aggagagucccgcagucggcguccagcggcucugcuuguucgugugugugucguugcaggccuuauucaagcuuaccaugaagaccaucaucgcccugagcuacauccucugccugguguucgcccagaagauccccggcaacgacaacuccaccgcgacgcugugccucgggcaccacgccgucccgaacggcaccaucgugaagaccaucaccaacgaccgcaucgaggugacgaacgccaccgagcugguccagaacagcuccaucggggagaucugcgacagcccccaccagauccuggacggcgagaacugcacccucaucgacgcccugcugggggacccccagugcgacggcuuccagaacaagaagugggaccucuucguggagcgguccaaggccuacagcuccugcuaccccuacgacgugccggacuacgcgagccugcgcucccuggucgccagcuccggcacccucgaguucaacaacgagagcuucaacuggacgggggugaagcagaacggcaccuccagcgccugcauccggaaguccagcuccagcuucuucucccgccugaacuggcugacccaccucaacuacaaguaccccgcccugaacgugaccaugcccaacaacgagcaguucgacaagcuguacaucuggggcguccaccaccccgggacggacaaggaccagaucuucccguacgcgcagagcagcgggcggaucaccguguccaccaagcgcagccagcaggccgugauccccaacaucggcucccggccccgcauccgggacauccccagccgcaucuccaucuacuggaccaucgucaagccgggcgacauccuccugaucaacagcacggggaaccugaucgcgccccggggcuacuucaagauccaguccggcaagagcuccaucaugcgcagcgacgcccccaucgggaagugcaaguccgagugcaucacccccaacggcagcaucccgaacgacaagcccuuccagaacgugaaccggaucaccuacggggccugcccccgcuacgugaagcacuccacccucaagcuggccacgggcaugcggaacguccccgagaagcagacccgcgggaucuucggcgccaucgccggguucaucgagaacggcugggagggcaugguggacgggugguacggcuuccggcaccagaacagcgaggggcgcggccaggccgccgaccugaaguccacccaggcggccaucgaccagaucaacgggaagcucaaccggcugaucggcaagaccaacgagaaguuccaccagaucgagaaggaguucagcgagguggagggccgcauccaggaccuggagaaguacgucgaggacacgaagaucgaccucugguccuacaacgccgagcugcugguggcccucgagaaccagcacaccaucgaccugaccgacagcgagaugaacaagcuguucgagaagaccaagaagcagcuccgggagaacgccgaggacauggggaacggcugcuucaagaucuaccacaagugcgacaacgcgugcaucggguccauccgcaacggcacguacgaccacaacguguaccgcgacgaggcccugaacaaccgguuccagaucaagggggucgagcucaagagcggcuacaaggacuggauccuguggaucagcuucgccaucuccugcuuccugcugugcguggcccuccugggcuucaucaugugggccugccagaaggggaacauccgcugcaacaucugcaucugaggacuagucccuguucccagagcccacuuuuuuuucuuuuuuugaaauaaaauagccugucuuucagaucucaaaggcucuuuucagagccaccaaaaaaaaaaaaaaaaaaaaaaaaaaaaaaaaaaaaaaaaaaaaaaaaaaaaaaaaaaaaaaaaaaaaaaaaaaaaaaaaaaaaaaaaaaaaaaaaaaaaa

SEQ ID NO: 14354 - RNA, 1973 nt, Artificial Sequence
  FLUAV/H3N2/A/Hong Kong/2671/2019__EPI1543098 hemagglutinin mRNA gc (HA)
aggagagucccgcagucggcguccagcggcucugcuuguucgugugugugucguugcaggccuuauucaagcuuaccaugaagaccaucaucgcccugagcuacauccucugccugguguucacccagaagauccccggcaacgacaacuccacggccacccugugccucgggcaccacgcggucccgaacggcaccaucgugaagaccaucacgaacgaccgcaucgaggugaccaacgccaccgagcugguccagaacagcuccaucggggagaucugcgacagcccccaccagauccuggacggcgggaacugcacccucaucgacgcccugcugggcgacccccagugcgacggcuuccagaacaagaagugggaccucuucguggagcggucccgcgccuacagcaacugcuaccccuacgacgugccggacuacgccucccugcggagccuggucgcguccagcgggacgcucgaguucaagaacgaguccuucaacugggccggcgugacccagaacggcaagagcuucuccugcauccgcgggagcuccagcuccuucuucagccggcugaacuggcugacccaccucaacuacaccuaccccgcccugaacgugacgaugcccaacaaggagcaguucgacaagcuguacaucuggggcguccaccaccccgggaccgacaaggaccagaucucccucuacgcccagagcagcggccgcaucaccguguccaccaagcggagccagcaggcggugaucccgaacaucgggucccgcccccggauccgcgacauccccagccggaucuccaucuacuggacgaucgucaagcccggcgacauccugcugaucaacagcaccgggaaccucaucgccccgcgcggcuacuucaagauccgguccggcaagagcuccaucaugcgcagcgacgcccccaucgggaagugcaaguccgagugcaucacccccaacggcagcauccccaacgacaagccguuccagaacgugaaccggaucaccuacggggccugcccccgcuacgugaagcaguccacgcugaagcuggccaccggcaugcggaacguccccgagaagcagacccgcgggaucuucggcgcgaucgccggcuucaucgagaacgggugggagggcaugguggacgggugguacggcuuccggcaccagaacagcgaggggcgcggccaggccgccgaccucaaguccacccaggccgcgaucgaccagaucaacggcaagcugaaccggcugaucgggaagacgaacgagaaguuccaccagaucgagaaggaguucagcgagguggagggccgcguccaggaccucgagaaguacguggaggacaccaagaucgaccugugguccuacaacgccgagcugcucguggcccuggagaaccagcacaccaucgaccugaccgacagcgagaugaacaagcuguucgagaagacgaagaagcagcuccgcgagaacgccgaggacauggggaacggcugcuucaagaucuaccacaagugcgacaacgccugcaucggguccauccggaacgagaccuacgaccacaacgucuaccgcgacgaggcgcugaacaaccgguuccagaucaagggcguggagcucaagagcggcuacaaggacuggauccuguggaucagcuucgccaucuccugcuuccugcucugcguggcccugcugggguucaucaugugggccugccagaagggcaacauccgcugcaacaucugcaucugaggacuagucccuguucccagagcccacuuuuuuuucuuuuuuugaaauaaaauagccugucuuucagaucucaaaggcucuuuucagagccaccaaaaaaaaaaaaaaaaaaaaaaaaaaaaaaaaaaaaaaaaaaaaaaaaaaaaaaaaaaaaaaaaaaaaaaaaaaaaaaaaaaaaaaaaaaaaaaaaaaaaa

SEQ ID NO: 14355 - RNA, 1973 nt, Artificial Sequence
  FLUAV/H3N2/A/Hong Kong/2671/2019__EPI1642843 hemagglutinin mRNA gc (HA)
aggagagucccgcagucggcguccagcggcucugcuuguucgugugugugucguugcaggccuuauucaagcuuaccaugaagaccaucaucgcccugagcuacauccucugccugguguucacccagaagauccccggcaacgacaacuccacggccacccugugccucgggcaccacgcggucccgaacggcaccaucgugaagaccaucacgaacgaccgcaucgaggugaccaacgccaccgagcugguccagaacagcuccaucggggagaucugcgacagcccccaccagauccuggacggcgggaacugcacccucaucgacgcccugcugggcgacccccagugcgacggcuuccagaacaagaagugggaccucuucguggagcggucccgcgccuacagcaacugcuaccccuacgacgugccggacuacgccucccugcggagccuggucgcguccagcgggacgcucgaguucaagaacgaguccuucaacugggccggcgugacccagaacggcaagagcuucuccugcauccgcgggagcuccagcuccuucuucagccggcugaacuggcugacccaccucaacuacaucuaccccgcccugaacgugaccaugcccaacaaggagcaguucgacaagcuguacaucuggggcguccaccaccccgugacggacaaggaccagaucucccucuacgcccagagcagcgggcgcaucaccguguccaccaagcggagccagcaggcggucaucccgaacaucggcucccgcccccggauccgcaacauccccagccggaucuccaucuacuggaccaucgugaagcccggggacauccugcugaucaacagcacgggcaaccucaucgccccgcgcggguacuucaagauccgguccggcaagagcuccaucaugcgcagcgacgcccccaucggcaagugcaaguccgagugcaucacccccaacgggagcauccccaacgacaagccguuccagaacgugaaccggaucaccuacggcgccugcccccgcuacgucaagcaguccacccugaagcuggccacggggaugcggaacgugcccgagaagcagacccgcggcaucuucggggcgaucgccggcuucaucgagaacggcugggaggggaugguggacggcugguacggguuccggcaccagaacagcgagggccgcgggcaggccgccgaccucaaguccacccaggccgcgaucgaccagaucaacggcaagcugaaccggcugaucggcaagaccaacgagaaguuccaccagaucgagaaggaguucagcgaggucgaggggcgcgugcaggaccucgagaaguacguggaggacacgaagaucgaccugugguccuacaacgccgagcugcucgucgcccuggagaaccagcacaccaucgaccugaccgacagcgagaugaacaagcuguucgagaagaccaagaagcagcuccgcgagaacgccgaggacaugggcaacgggugcuucaagaucuaccacaagugcgacaacgccugcaucggcuccauccggaacgagacguacgaccacaacguguaccgcgacgaggcgcugaacaaccgguuccagaucaaggggguggagcucaagagcggcuacaaggacuggauccuguggaucagcuucgccaucuccugcuuccugcucugcgucgcccugcugggcuucaucaugugggccugccagaaggggaacauccgcugcaacaucugcaucugaggacuagucccuguucccagagcccacuuuuuuuucuuuuuuugaaauaaaauagccugucuuucagaucucaaaggcucuuuucagagccaccaaaaaaaaaaaaaaaaaaaaaaaaaaaaaaaaaaaaaaaaaaaaaaaaaaaaaaaaaaaaaaaaaaaaaaaaaaaaaaaaaaaaaaaaaaaaaaaaaaaaa

SEQ ID NO: 14356 - RNA, 1973 nt, Artificial Sequence
  FLUAV/H3N2/A/Hong Kong/45/2019__EPI1691930 hemagglutinin mRNA gc (HA)
aggagagucccgcagucggcguccagcggcucugcuuguucgugugugugucguugcaggccuuauucaagcuuaccaugaagaccaucaucgcccugagcuacauccucugccugggcuucacccagaagauccccgggaacgacaacuccacggccacccugugccucggccaccacgcggugccgaacgggaccaucgucaagaccaucacgaacgaccgcaucgaggugaccaacgccaccgagcuggugcagaacagcuccaucggcgagaucugcgacagcccccaccagauccuggacgggggcaacugcacccucaucgacgcccugcugggcgacccccagugcgacggguuccagaacaagaagugggaccucuucgucgagcggucccgcgccuacagcaacugcuaccccuacgacgugccggacuacgccucccugcggagccugguggcguccagcggcacgcucgaguucaagaacgaguccuucaacugggccggggucacccagaacggcaagagcuucuccugcauccgcgggagcuccagcuccuucuucagccggcugaacuggcugacccaccucaacuacaccuaccccgcccugaacgugacgaugcccaacaaggagcaguucgacaagcuguacaucuggggcgugcaccaccccggcaccgacaaggaccagaucucccucuacgcccagagcagcgggcgcaucaccgucuccaccaagcggagccagcaggcggugaucccgaacaucggcucccgcccccggauccgcgacauccccagccggaucuccaucuacuggacgaucgugaagcccggggacauccugcugaucaacagcaccggcaaccucaucgccccgcgcggcuacuucaagauccgguccggcaagagcuccaucaugcgcagcgacgcccccaucgggaagugcaaguccgagugcaucacccccaacgggagcauccccaacgacaagccguuccagaacgucaaccggaucaccuacggcgccugcccccgcuacgugaagcagaacacgcugaagcuggccaccgggaugcggaacgugcccgagaagcagacccgcggcaucuucggcgcgaucgccggguucaucgagaacggcugggaggggauggucgacggcugguacggguuccggcaccagaacuccgagggccgcggccaggccgccgaccucaagagcacccaggccgcgaucgaccagaucaacgggaagcugaaccggcugaucggcaagacgaacgagaaguuccaccagaucgagaaggaguucuccgagguggaggggcgcgugcaggaccucgagaaguacgucgaggacaccaagaucgaccuguggagcuacaacgccgagcugcucguggcccuggagaaccagcacaccaucgaccugaccgacuccgagaugaacaagcuguucgagaagacgaagaagcagcuccgcgagaacgccgaggacaugggcaacgggugcuucaagaucuaccacaagugcgacaacgccugcaucggcagcauccggaacgagaccuacgaccacaacguguaccgcgacgaggcgcugaacaaccgguuccagaucaagggcgucgagcucaaguccggguacaaggacuggauccuguggaucagcuucgccaucagcugcuuccugcucugcguggcccugcugggcuucaucaugugggccugccagaaggggaacauccgcugcaacaucugcaucugaggacuagucccuguucccagagcccacuuuuuuuucuuuuuuugaaauaaaauagccugucuuucagaucucaaaggcucuuuucagagccaccaaaaaaaaaaaaaaaaaaaaaaaaaaaaaaaaaaaaaaaaaaaaaaaaaaaaaaaaaaaaaaaaaaaaaaaaaaaaaaaaaaaaaaaaaaaaaaaaaaaaa

SEQ ID NO: 14357 - RNA, 1973 nt, Artificial Sequence
  FLUAV/H3N2/A/South Australia/34/2019__EPI1387331 hemagglutinin mRNA gc (HA)
aggagagucccgcagucggcguccagcggcucugcuuguucgugugugugucguugcaggccuuauucaagcuuaccaugaagaccaucaucgcccugagcuacauccucugccugguguucgcccagaagauccccggcaacgacaacuccaccgcgacgcugugccucgggcaccacgccgucccgaacggcaccaucgugaagaccaucaccaacgaccgcaucgaggugacgaacgccaccgagcugguccagaacagcuccaucggggagaucugcgacagcccccaccagauccuggacggcgggaacugcacccucaucgacgcccugcugggcgacccccagugcgacggcuuccagaacaagaagugggaccucuucguggagcggucccgcgccuacagcaacugcuaccccuacgacgugccggacuacgcgucccugcggagccuggucgccuccagcgggacccucgaguucaagaacgaguccuucaacuggacgggcgugaagcagaacgggaccagcuccgccugcauccgcggcagcuccagcuccuucuucagccggcugaacuggcugacccaccucaacuacaccuaccccgcccugaacgugacgaugcccaacaaggagcaguucgacaagcuguacaucuggggcguccaccaccccgggaccgacaaggaccagaucuuccucuacgcgcaguccagcggccgcaucaccgugagcaccaagcggucccagcaggccgugaucccgaacaucggguuccgcccccggauccgcgacauccccagccggaucuccaucuacuggacgaucgucaagcccggcgacauccugcugaucaacagcaccgggaaccucaucgccccgcgcggcuacuucaagauccgguccggcaagagcuccaucaugcgcagcgacgcccccaucgggaagugcaaguccgagugcaucacccccaacggcagcauccccaacgacaagccguuccagaacgugaaccggaucaccuacggggccugcccccgcuacgugaagcaguccacgcugaagcuggcgaccggcaugcggaacguccccgagaagcagacccgcgggaucuucggcgccaucgccggcuucaucgagaacgggugggagggcaugauggacgggugguacggcuuccggcaccagaacagcgaggggcgcggccaggccgccgaccucaaguccacccaggcggccaucgaccagaucaacggcaagcugaaccggcugaucgggaagacgaacgagaaguuccaccagaucgagaaggaguucagcgagguggagggccgcgugcaggaccucgagaaguacgucgaggacaccaagaucgaccugugguccuacaacgccgagcugcucguggcccuggagaaccagcacaccaucgaccugaccgacagcgagaugaacaagcuguucgagaagacgaagaagcagcuccgcgagaacgccgaggacauggggaacggcugcuucaagaucuaccacaagugcgacaacgcgugcaucggguccauccggaacgagaccuacgaccacaacguguaccgcgacgaggcccugaacaaccgguuccagaucaagggcgucgagcucaagagcggcuacaaggacuggauccuguggaucuccuucgccaucagcugcuuccugcucugcaucgcccugcugggguucaucaugugggccugccagaagggcaacauccgcugcaacaucugcaucugaggacuagucccuguucccagagcccacuuuuuuuucuuuuuuugaaauaaaauagccugucuuucagaucucaaaggcucuuuucagagccaccaaaaaaaaaaaaaaaaaaaaaaaaaaaaaaaaaaaaaaaaaaaaaaaaaaaaaaaaaaaaaaaaaaaaaaaaaaaaaaaaaaaaaaaaaaaaaaaaaaaaa

SEQ ID NO: 14358 - RNA, 1973 nt, Artificial Sequence
  FLUAV/H3N2/A/South Australia/34/2019__EPI1440494 hemagglutinin mRNA gc (HA)
aggagagucccgcagucggcguccagcggcucugcuuguucgugugugugucguugcaggccuuauucaagcuuaccaugaagaccaucaucgcccugagcuacauccucugccugguguucgcccagaagauccccggcaacgacaacuccaccgcgacgcugugccucgggcaccacgccgucccgaacggcaccaucgugaagaccaucaccaacgaccgcaucgaggugacgaacgccaccgagcugguccagaacagcuccaucggggagaucugcgacagcccccaccagauccuggacggcgggaacugcacccucaucgacgcccugcugggcgacccccagugcgacggcuuccagaacaagaagugggaccucuucguggagcggucccgcgccuacagcaacugcuaccccuacgacgugccggacuacgcgucccugcggagccuggucgccuccagcgggacccucgaguucaagaacgaguccuucaacuggacgggcgugaagcagaacgggaccagcuccgccugcauccgcggcagcuccagcuccuucuucagccggcugaacuggcugacccaccucaacuacaaguaccccgcccugaacgugaccaugcccaacaaggagcaguucgacaagcuguacaucuggggcguccaccaccccaucacggacaaggaccagaucuuccucuacgcgcaguccagcgggcgcaucaccgugagcaccaagcggucccagcaggccgugaucccgaacaucggcuuccgcccccggauccgcgacauccccagccggaucuccaucuacuggaccaucgucaagcccggggacauccugcugaucaacagcacgggcaaccucaucgccccgcgcggguacuucaagauccgguccggcaagagcuccaucaugcgcagcgacgcccccaucggcaagugcaaguccgagugcaucacccccaacgggagcauccccaacgacaagccguuccagaacgugaaccggaucaccuacggcgccugcccccgcuacgugaagcaguccacccugaagcuggcgacggggaugcggaacguccccgagaagcagacccgcggcaucuucggggccaucgccggcuucaucgagaacggcugggaggggaugauggacggcugguacggguuccggcaccagaacagcgagggccgcgggcaggccgccgaccucaaguccacccaggcggccaucgaccagaucaacggcaagcugaaccggcugaucggcaagaccaacgagaaguuccaccagaucgagaaggaguucagcgagguggaggggcgcgugcaggaccucgagaaguacgucgaggacacgaagaucgaccugugguccuacaacgccgagcugcucguggcccuggagaaccagcacaccaucgaccugaccgacagcgagaugaacaagcuguucgagaagaccaagaagcagcuccgcgagaacgccgaggacaugggcaacgggugcuucaagaucuaccacaagugcgacaacgcgugcaucggcuccauccggaacgagacguacgaccacaacguguaccgcgacgaggcccugaacaaccgguuccagaucaagggggucgagcucaagagcggcuacaaggacuggauccuguggaucuccuucgccaucagcugcuuccugcucugcaucgcccugcugggcuucaucaugugggccugccagaaggggaacauccgcugcaacaucugcaucugaggacuagucccuguucccagagcccacuuuuuuuucuuuuuuugaaauaaaauagccugucuuucagaucucaaaggcucuuuucagagccaccaaaaaaaaaaaaaaaaaaaaaaaaaaaaaaaaaaaaaaaaaaaaaaaaaaaaaaaaaaaaaaaaaaaaaaaaaaaaaaaaaaaaaaaaaaaaaaaaaaaaa

SEQ ID NO: 14359 - RNA, 1955 nt, Artificial Sequence
  FLUAV/H7N9/A/chicken/Zhejiang/C483/2013(H7N9)__AGN69400.1 hemagglutinin mRNA gc (HA)
aggagagucccgcagucggcguccagcggcucugcuuguucgugugugugucguugcaggccuuauucaagcuuaccaugaacacccagauccugguguucgcccucaucgccaucauccccaccaacgcggacaagaucugccugggccaccacgccgucagcaacgggacgaaggugaacacccugaccgagcgcggcguggaggucgugaacgccaccgagacgguggagcggaccaacaucccgcgcaucugcuccaaggggaagaagaccgucgaccucggccagugcgggcugcugggcaccaucacgggcccgccccagugcgaccaguuccucgaguucagcgccgaccugaucaucgagcggcgcgagggguccgacgugugcuaccccggcaaguucgugaacgaggaggcccugcggcagauccuccgcgagagcgggggcaucgacaaggaggcgaugggguucaccuacuccggcauccggaccaacggcgccaccagcgccugccgccgguccgggagcuccuucuacgccgagaugaaguggcugcugagcaacacggacaacgcggccuucccgcagaugaccaaguccuacaagaacacccgcaagagccccgcccucaucgucuggggcauccaccacuccgugagcaccgccgagcagacgaagcuguacggguccggcaacaagcuggugaccgucggcagcuccaacuaccagcagagcuucgugcccucccccggggcccggccccaggugaacggccagagcgggcgcaucgacuuccacuggcucaugcugaaccccaacgacaccgucaccuucagcuucaacggcgcguucaucgcccccgaccgggccuccuuccugcgcggcaagagcauggggauccaguccggcguccagguggacgccaacugcgagggggacugcuaccacagcggcgggacgaucaucuccaaccuccccuuccagaacaucgacagccgggccgugggcaagugcccgcgcuacgugaagcagcggucccugcugcucgcgaccgggaugaagaacgugcccgagauccccaagggccgcggccuguucggggccaucgccggcuucaucgagaacgggugggagggccugaucgacgggugguacggcuuccggcaccagaacgcccagggcgaggggaccgccgcggacuacaagagcacccaguccgccaucgaccagaucacgggcaagcucaaccgccugaucgagaagaccaaccagcaguucgagcugaucgacaacgaguucaacgaggucgagaagcagaucgggaacgugaucaacuggacccgggacagcaucaccgaggugugguccuacaacgccgagcuccuggucgccauggagaaccagcacacgaucgaccuggccgacagcgagauggacaagcucuacgagcgcgugaagcgccagcugcgggagaacgcggaggaggacggcaccggcugcuucgagaucuuccacaagugcgacgacgacugcauggccuccauccgcaacaacaccuacgaccacagcaaguaccgggaggaggccaugcagaaccgcauccagaucgaccccgucaagcuguccagcggguacaaggacgugauccucugguucuccuucggcgccagcugcuucauccugcuggcgaucgugauggggcucgucuucaucugcgugaagaacggcaacaugcggugcaccaucugcaucugaggacuagucccuguucccagagcccacuuuuuuuucuuuuuuugaaauaaaauagccugucuuucagaucucaaaggcucuuuucagagccaccaaaaaaaaaaaaaaaaaaaaaaaaaaaaaaaaaaaaaaaaaaaaaaaaaaaaaaaaaaaaaaaaaaaaaaaaaaaaaaaaaaaaaaaaaaaaaaaaaaaaa

SEQ ID NO: 14360 - RNA, 1958 nt, Artificial Sequence
  FLUAV/H10N8/A/Jiangxi/IPB13/2013(H10N8)__AHK10761.1 hemagglutinin mRNA gc (HA)
aggagagucccgcagucggcguccagcggcucugcuuguucgugugugugucguugcaggccuuauucaagcuuaccauguacaagaucguggucaucaucgcccugcucggcgccgugaaggggcuggacaagaucugccugggccaccacgcgguggccaacgggaccaucgucaagacccucacgaacgagcaggaggaggugaccaacgccaccgagaccguggagagcacgggcaucaaccgccugugcaugaaggggcggaagcacaaggaccugggcaacugccaccccaucggcaugcucaucgggaccccggccugcgaccugcaccugaccggcaugugggacacccucaucgagcgcgagaacgccaucgcguacugcuaccccggggccacggucaacguggaggcccugcggcagaagaucauggaguccggcgggaucaacaagaucagcaccggcuucaccuacggcuccagcaucaacuccgccgggaccacgcgcgcgugcaugcggaacggcgggaacagcuucuacgccgagcugaaguggcucguguccaagagcaagggccagaacuucccccagaccaccaacaccuaccgcaacacggacaccgccgagcaccugaucauguggggcauccaccaccccuccagcacccaggagaagaacgaccuguacgggacccagucccucagcaucuccgucggcagcuccacguaccggaacaacuucgugccgguggucggggcccgcccccaggugaacggccagagcgggcggaucgacuuccacuggacccuggugcagcccggcgacaacaucaccuucucccacaacggcgggcugaucgcccccagccgcgucuccaagcucaucggccgggggcugggcauccagagcgacgcgccgaucgacaacaacugcgagagcaagugcuucuggcgcgggggcuccaucaacacccggcugcccuuccagaaccucagcccccgcacggugggccagugccccaaguacgugaaccggcgcucccugaugcuggccaccgggaugcggaacgucccggagcucauccagggccgcgggcuguucggcgccaucgccggguuccuggagaacggcugggagggcaugguggacgggugguacggcuuccggcaccagaacgcccaggggaccggccaggcggccgacuacaagagcacccaggccgccaucgaccagaucacgggcaagcucaaccgccugguggagaagaccaacaccgaguucgaguccaucgagagcgaguucuccgagaucgagcaccagaucgggaacgucaucaacuggaccaaggacagcaucacggacaucuggaccuaccaggccgagcugcucguggcgauggagaaccagcacaccaucgacauggccgacuccgagaugcugaaccuguacgagcgggugcgcaagcagcuccgccagaacgccgaggaggacggcaaggggugcuucgagaucuaccacgccugcgacgacagcugcauggaguccauccggaacaacaccuacgaccacagccaguaccgcgaggaggcccugcugaaccggcucaacaucaaccccgucacgcuguccagcggcuacaaggacaucauccugugguucuccuucggggcgagcugcuucgugcuccuggccgucgugaugggccuguucuucuucugccucaagaacggcaacaugcgcugcaccaucugcaucugaggacuagucccuguucccagagcccacuuuuuuuucuuuuuuugaaauaaaauagccugucuuucagaucucaaaggcucuuuucagagccaccaaaaaaaaaaaaaaaaaaaaaaaaaaaaaaaaaaaaaaaaaaaaaaaaaaaaaaaaaaaaaaaaaaaaaaaaaaaaaaaaaaaaaaaaaaaaaaaaaaaaa

SEQ ID NO: 14361 - RNA, 2024 nt, Artificial Sequence
  FLUBV/H0N0/B/Colorado/06/2017__EPI1011552 hemagglutinin mRNA gc (HA)
aggagagucccgcagucggcguccagcggcucugcuuguucgugugugugucguugcaggccuuauucaagcuuaccaugaaggccaucaucgugcugcucauggucgugaccagcuccgccgaccgcaucugcaccggcaucacgagcuccaacagcccccacguggucaagaccgcgacccagggggaggugaacgugaccggcgucaucccgcugacgaccacccccaccaagucccacuucgccaaccugaaggggacggagacccggggcaagcucugccccaagugccugaacugcaccgaccuggacguggcccucgggcgccccaagugcaccggcaagaucccgagcgcccggguguccauccugcacgagguccgccccgugacgagcggcugcuuccccaucaugcacgaccggaccaagauccgccagcugcccaaccuccugcggggguacgagcacgugcgccuguccacccacaacgucaucaacgccgagggcgcgcccgggggccccuacaagaucgggaccagcggcuccugccccaacaucacgaacggcaacggguucuucgccaccauggccugggccgugcccgacaagaacaagaccgcgaccaacccgcucacgaucgaggugcccuacgucugcaccgagggcgaggaccagaucaccguguggggguuccacagcgacaacgagacccagauggccaagcuguacggcgacuccaagccccagaaguucacgagcuccgccaacggcgugaccacccacuacgucagccagaucgggggcuuccccaaccagaccgaggacgggggccugccgcaguccgggcggaucgugguggacuacaugguccagaaguccggcaagacgggcaccaucaccuaccagcgcgggauccuccugccccagaagguguggugcgccagcggccggagcaaggugaucaaggggagccugccccucaucggcgaggccgacugccugcacgagaaguacgggggccugaacaaguccaagcccuacuacaccggcgagcacgcgaaggccaucgggaacugcccgaucugggucaagacgccccucaagcuggccaacggcaccaaguaccgcccgcccgccaagcugcucaaggagcggggguucuucggcgccaucgcgggguuccuggagggcggcugggaggggaugaucgccggcuggcacggguacaccagccacggcgcccacggcguggccgucgccgcggaccugaaguccacccaggaggccaucaacaagaucacgaagaaccucaacagccuguccgagcuggaggugaagaaccuccagcgccugagcggggccauggacgagcugcacaacgagauccucgagcuggacgagaagguggacgaccugcgggccgacaccaucuccagccagaucgagcucgccguccugcuguccaacgagggcaucaucaacagcgaggacgagcaccuccuggcgcuggagcgcaagcucaagaagaugcuggggccguccgccguggagaucggcaacgggugcuucgagaccaagcacaagugcaaccagaccugccuggacaagaucgccgccggcaccuucgacgcgggcgaguucagccuccccacguucgacucccugaacaucaccgccgccagccugaacgacgacgggcuggacaaccacaccauccuccuguacuacuccaccgccgccagcucccuggcggugacgcucaugaucgccaucuucgucguguacauggugagccgggacaacgucuccugcagcaucugccugugaggacuagucccuguucccagagcccacuuuuuuuucuuuuuuugaaauaaaauagccugucuuucagaucucaaaggcucuuuucagagccaccaaaaaaaaaaaaaaaaaaaaaaaaaaaaaaaaaaaaaaaaaaaaaaaaaaaaaaaaaaaaaaaaaaaaaaaaaaaaaaaaaaaaaaaaaaaaaaaaaaaaa

SEQ ID NO: 14362 - RNA, 2024 nt, Artificial Sequence
  FLUBV/H0N0/B/Colorado/06/2017__EPI1051642 hemagglutinin mRNA gc (HA)
aggagagucccgcagucggcguccagcggcucugcuuguucgugugugugucguugcaggccuuauucaagcuuaccaugaaggccaucaucgugcugcucauggucgugaccagcuccgccgaccgcaucugcaccggcaucacgagcuccaacagcccccacguggucaagaccgcgacccagggggaggugaacgugaccggcgucaucccgcugacgaccacccccaccaagucccacuucgccaaccugaaggggacggagacccggggcaagcucugccccaagugccugaacugcaccgaccuggacguggcccucgggcgccccaagugcaccggcaagaucccgagcgcccggguguccauccugcacgagguccgccccgugacgagcggcugcuuccccaucaugcacgaccggaccaagauccgccagcugcccaaccuccugcggggguacgagcacgugcgccuguccacccacaacgucaucaacgccgagggcgcgcccgggggccccuacaagaucgggaccagcggcuccugccccaacaucacgaacggcaacggguucuucgccaccauggccugggccgugcccgacaagaacaagaccgcgaccaacccgcucacgaucgaggugcccuacgucugcaccgagggcgaggaccagaucaccguguggggguuccacagcgacaccgagacgcagauggccaagcuguacggcgacuccaagccccagaaguucaccagcuccgccaacggcgugaccacccacuacgucagccagaucgggggcuuccccaaccagacggaggacgggggccugccgcaguccgggcggaucgugguggacuacaugguccagaaguccggcaagaccggcaccaucaccuaccagcgcgggauccuccugccccagaagguguggugcgccagcggccggagcaaggugaucaaggggagccugccccucaucggcgaggccgacugccugcacgagaaguacgggggccugaacaaguccaagcccuacuacacgggcgagcacgcgaaggccaucgggaacugcccgaucugggucaagacgccccucaagcuggccaacggcaccaaguaccgcccgcccgccaagcugcucaaggagcggggguucuucggcgccaucgcgggguuccuggagggcggcugggaggggaugaucgccggcuggcacggguacaccagccacggcgcccacggcguggccgucgccgcggaccugaaguccacccaggaggccaucaacaagaucaccaagaaccucaacagccuguccgagcuggaggugaagaaccuccagcgccugagcggggccauggacgagcugcacaacgagauccucgagcuggacgagaagguggacgaccugcgggccgacaccaucuccagccagaucgagcucgccguccugcuguccaacgagggcaucaucaacagcgaggacgagcaccuccuggcgcuggagcgcaagcucaagaagaugcuggggccguccgccguggagaucggcaacgggugcuucgagaccaagcacaagugcaaccagaccugccuggacaagaucgccgccggcacguucgacgcgggcgaguucagccuccccaccuucgacucccugaacaucaccgccgccagccugaacgacgacgggcuggacaaccacaccauccuccuguacuacuccacggccgccagcucccuggcggugacccucaugaucgccaucuucgucguguacauggugagccgggacaacgucuccugcagcaucugccugugaggacuagucccuguucccagagcccacuuuuuuuucuuuuuuugaaauaaaauagccugucuuucagaucucaaaggcucuuuucagagccaccaaaaaaaaaaaaaaaaaaaaaaaaaaaaaaaaaaaaaaaaaaaaaaaaaaaaaaaaaaaaaaaaaaaaaaaaaaaaaaaaaaaaaaaaaaaaaaaaaaaaa

SEQ ID NO: 14363 - RNA, 2024 nt, Artificial Sequence
  FLUBV/H0N0/B/Colorado/06/2017 BX-71__EPI1151760 hemagglutinin mRNA gc (HA)
aggagagucccgcagucggcguccagcggcucugcuuguucgugugugugucguugcaggccuuauucaagcuuaccaugaaggccaucaucgugcugcucauggucgugaccagcuccgccgaccgcaucugcaccggcaucacgagcuccaacagcccccacguggucaagaccgcgacccagggggaggugaacgugaccggcgucaucccgcugacgaccacccccaccaagucccacuucgccaaccugaaggggacggagacccggggcaagcucugccccaagugccugaacugcaccgaccuggacguggcccucgggcgccccaagugcaccggcaagaucccgagcgcccggguguccauccugcacgagguccgccccgugacgagcggcugcuuccccaucaugcacgaccggaccaagauccgccagcugcccaaccuccugcggggguacgagcacgugcgccuguccacccacaacgucaucaacgccgagggcgcgcccgggggccccuacaagaucgggaccagcggcuccugccccaacaucacgaacggcaacggguucuucgccaccauggccugggccgugcccgacaagaacaagaccgcgaccaacccgcucacgaucgaggugcccuacgucugcaccgagggcgaggaccagaucaccguguggggguuccacagcgacaccgagacgcagauggccaagcuguacggcgacuccaagccccagaaguucaccagcuccgccaacggcgugaccacccacuacgucagccagaucgggggcuuccccaaccagacggaggacgggggccggccgcaguccgggcgcaucgugguggacuacaugguccagaaguccggcaagaccggcaccaucaccuaccagcgggggauccugcucccccagaagguguggugcgccagcggccgcagcaaggugaucaaggggagccugccccugaucggcgaggccgacugccuccacgagaaguacgggggccugaacaaguccaagcccuacuacacgggcgagcacgcgaaggccaucgggaacugcccgaucugggucaagacgccccugaagcucgccaacggcaccaaguaccggccgcccgccaagcugcugaaggagcgcggguucuucggcgccaucgcgggguuccucgagggcggcugggaggggaugaucgccggcuggcacggguacaccagccacggcgcccacggcguggccgucgccgcggaccugaaguccacccaggaggccaucaacaagaucaccaagaaccugaacagccucuccgagcuggaggugaagaaccugcagcggcucagcggggccauggacgagcugcacaacgagauccuggagcucgacgagaagguggacgaccugcgcgccgacaccaucuccagccagaucgagcuggccguccuccuguccaacgagggcaucaucaacagcgaggacgagcaccuccuggcgcuggagcggaagcugaagaagaugcucgggccguccgccguggagaucggcaacgggugcuucgagaccaagcacaagugcaaccagaccugccuggacaagaucgccgccggcacguucgacgcgggcgaguucagccugcccaccuucgacucccucaacaucaccgccgccagccugaacgacgacgggcuggacaaccacaccauccugcucuacuacuccacggccgccagcucccuggcggugacccugaugaucgccaucuucgucguguacauggugagccgcgacaacgucuccugcagcaucugccucugaggacuagucccuguucccagagcccacuuuuuuuucuuuuuuugaaauaaaauagccugucuuucagaucucaaaggcucuuuucagagccaccaaaaaaaaaaaaaaaaaaaaaaaaaaaaaaaaaaaaaaaaaaaaaaaaaaaaaaaaaaaaaaaaaaaaaaaaaaaaaaaaaaaaaaaaaaaaaaaaaaaaa

SEQ ID NO: 14364 - RNA, 2021 nt, Artificial Sequence
  FLUBV/H0N0/B/Washington/02/2019__EPI1368874 hemagglutinin mRNA gc (HA)
aggagagucccgcagucggcguccagcggcucugcuuguucgugugugugucguugcaggccuuauucaagcuuaccaugaaggccaucaucgugcugcucauggucgugaccagcaacgccgaccgcaucugcaccggcaucacguccagcaacagcccccacguggucaagaccgcgacccagggggaggugaacgugaccggcgucaucccgcugacgaccacccccaccaagagccacuucgccaaccugaaggggacggagacccggggcaagcucugccccaagugccugaacugcaccgaccuggacguggcccucgggcgccccaagugcaccggcaagaucccguccgcccgggugagcauccugcacgagguccgccccgugacguccggcugcuuccccaucaugcacgaccggaccaagauccgccagcugcccaaccuccugcggggguacgagcacgugcgccugagcacccacaacgucaucaacgccgaggacgcgccgggccggcccuacgagaucgggaccuccggcagcugccccaacaucacgaacgggaacggcuucuucgccaccauggccugggccgugcccaagaacaagaccgcgaccaacccgcucacgaucgaggugcccuacaucugcaccgagggcgaggaccagaucaccgucuggggguuccacuccgacaacgagacccagauggccaagcuguacggcgacagcaagccccagaaguucacguccagcgccaacggggugaccacccacuacgugucccagaucggcggcuuccccaaccagaccgaggacgggggccugccgcagagcgggcgcaucgucguggacuacauggugcagaaguccggcaagacggggaccaucaccuaccagcggggcauccuccugccccagaaggucuggugcgccagcggccgcuccaaggugaucaaggggagccugccccucaucggcgaggccgacugccugcacgagaaguacgggggccugaacaagagcaagcccuacuacaccggggagcacgcgaaggccaucggcaacugcccgaucugggugaagacgccccucaagcuggccaacggcaccaaguaccggccgcccgccaagcugcucaaggagcgcggguucuucggcgccaucgcgggguuccuggagggcgggugggagggcaugaucgccggcuggcacggguacaccucccacggcgcccacggggucgccguggccgcggaccugaaguccacccaggaggccaucaacaagaucacgaagaaccucaacucccugagcgagcuggaggucaagaaccuccagcggcuguccggcgccauggacgagcugcacaacgagauccucgagcuggacgagaagguggacgaccugcgcgccgacaccaucagcucccagaucgagcucgccgugcugcugagcaacgagggcaucaucaacuccgaggacgagcaccuccuggcgcuggagcggaagcucaagaagaugcuggggcccagcgccgucgagaucggcaacgggugcuucgagaccaagcacaagugcaaccagaccugccuggaccgcaucgccgccggcaccuucgacgcgggggaguucucccuccccacguucgacagccugaacaucaccgccgccucccugaacgacgacggccuggacaaccacaccauccuccuguacuacagcaccgccgccuccagccuggcggugacgcucaugaucgccaucuucguggucuacauggugucccgggacaacgugagcugcuccaucugccugugaggacuagucccuguucccagagcccacuuuuuuuucuuuuuuugaaauaaaauagccugucuuucagaucucaaaggcucuuuucagagccaccaaaaaaaaaaaaaaaaaaaaaaaaaaaaaaaaaaaaaaaaaaaaaaaaaaaaaaaaaaaaaaaaaaaaaaaaaaaaaaaaaaaaaaaaaaaaaaaaaaaaa

SEQ ID NO: 14365 - RNA, 2021 nt, Artificial Sequence
  FLUBV/H0N0/B/Washington/02/2019__EPI1422452 hemagglutinin mRNA gc (HA)
aggagagucccgcagucggcguccagcggcucugcuuguucgugugugugucguugcaggccuuauucaagcuuaccaugaaggccaucaucgugcugcucauggucgugaccagcaacgccgaccgcaucugcaccggcaucacguccagcaacagcccccacguggucaagaccgcgacccagggggaggugaacgugaccggcgucaucccgcugacgaccacccccaccaagagccacuucgccaaccugaaggggacggagacccggggcaagcucugccccaagugccugaacugcaccgaccuggacguggcccucgggcgccccaagugcaccggcaagaucccguccgcccgggugagcauccugcacgagguccgccccgugacguccggcugcuuccccaucaugcacgaccggaccaagauccgccagcugcccaaccuccugcggggguacgagcacgugcgccugagcacccacaacgucaucaacgccgaggacgcgccgggccggcccuacgagaucgggaccuccggcagcugccccaacaucacgaacgggaacggcuucuucgccaccauggccugggccgugcccaagaacaagaccgcgaccaacccgcucacgaucgaggugcccuacaucugcaccgagggcgaggaccagaucaccgucuggggguuccacuccgacagcgagacccagauggccaagcuguacggcgacuccaagccccagaaguucacgagcuccgccaacggggugaccacccacuacgugagccagaucggcggcuuccccaaccagaccgaggacgggggccugccgcaguccgggcgcaucgucguggacuacauggugcagaaguccggcaagacggggaccaucaccuaccagcggggcauccuccugccccagaaggucuggugcgccuccggccgcagcaaggugaucaaggggagccugccccucaucggcgaggccgacugccugcacgagaaguacgggggccugaacaaguccaagcccuacuacaccggggagcacgcgaaggccaucggcaacugcccgaucugggugaagacgccccucaagcuggccaacggcaccaaguaccggccgcccgccaagcugcucaaggagcgcggguucuucggcgccaucgcgggguuccuggagggcgggugggagggcaugaucgccggcuggcacggguacaccagccacggcgcccacggggucgccguggccgcggaccugaaguccacccaggaggccaucaacaagaucacgaagaaccucaacagccuguccgagcuggaggucaagaaccuccagcggcugagcggcgccauggacgagcugcacaacgagauccucgagcuggacgagaagguggacgaccugcgcgccgacaccaucuccagccagaucgagcucgccgugcugcuguccaacgagggcaucaucaacagcgaggacgagcaccuccuggcgcuggagcggaagcucaagaagaugcuggggcccuccgccgucgagaucggcaacgggugcuucgagaccaagcacaagugcaaccagaccugccuggaccgcaucgccgccggcaccuucgacgcgggggaguucagccuccccacguucgacucccugaacaucaccgccgccagccugaacgacgacggccuggacaaccacaccauccuccuguacuacuccaccgccgccagcucccuggcggugacgcucaugaucgccaucuucguggucuacauggugagccgggacaacguguccugcagcaucugccugugaggacuagucccuguucccagagcccacuuuuuuuucuuuuuuugaaauaaaauagccugucuuucagaucucaaaggcucuuuucagagccaccaaaaaaaaaaaaaaaaaaaaaaaaaaaaaaaaaaaaaaaaaaaaaaaaaaaaaaaaaaaaaaaaaaaaaaaaaaaaaaaaaaaaaaaaaaaaaaaaaaaaa

SEQ ID NO: 14366 - RNA, 1682 nt, Artificial Sequence
  FLUAV/H1N1/A/California/7/2009__GQ906802 neuraminidase mRNA gc (NA)
aggagagucccgcagucggcguccagcggcucugcuuguucgugugugugucguugcaggccuuauucaagcuuaccaugaaccccaaccagaagaucaucaccaucggcuccgugugcaugaccaucgggauggccaaccugauccuccagaucggcaacaucaucuccaucuggaucucccacuccauccagcuggggaaccagaaccagaucgagacgugcaaccaguccgucaucaccuacgagaacaacaccugggugaaccagaccuacgugaacaucuccaacacgaacuucgccgcgggccaguccgucguguccgugaagcuggccgggaacagcucccucugcccggucuccggcugggccaucuacuccaaggacaacuccgugcggaucggcuccaagggggacgucuucgugauccgcgagccguucaucuccugcuccccccuggagugccggaccuucuuccugacccagggcgcccuccugaacgacaagcacuccaacgggaccaucaaggaccgcucccccuaccggacgcugauguccugcccgaucggcgaggugcccucccccuacaacucccgcuucgaguccgucgccugguccgcguccgccugccacgacgggaucaacuggcucaccaucggcaucuccggccccgacaacggggccguggccgugcugaaguacaacggcaucaucaccgacaccaucaaguccuggcggaacaacauccugcgcacgcaggaguccgagugcgcgugcgucaacggguccugcuucaccgugaugaccgacggcccguccaacggccaggccuccuacaagaucuuccggaucgagaaggggaagaucgugaaguccgucgagaugaacgcccccaacuaccacuacgaggagugcuccugcuaccccgacuccuccgagaucaccugcgugugccgcgacaacuggcacggcuccaaccggcccuggguguccuucaaccagaaccucgaguaccagaucggguacaucugcuccggcaucuucggggacaacccgcgccccaacgacaagacgggcuccugcggccccgucuccagcaacggggccaacggcgugaagggguucuccuucaaguacggcaacgggguguggaucggccggaccaaguccaucuccucccgcaacggcuucgagaugaucugggaccccaacggguggaccggcaccgacaacaacuucuccaucaagcaggacaucgucgggaucaacgagugguccggcuacuccggguccuucgugcagcacccggagcugacgggccuggacugcauccggcccugcuucuggguggagcucauccgcggccggcccaaggagaacaccaucuggaccuccggguccuccaucuccuucugcggcgucaacuccgacaccguggggugguccuggcccgacggcgccgagcugccguucacgaucgacaagugaggacuagucccuguucccagagcccacuuuuuuuucuuuuuuugaaauaaaauagccugucuuucagaucucaaaggcucuuuucagagccaccaaaaaaaaaaaaaaaaaaaaaaaaaaaaaaaaaaaaaaaaaaaaaaaaaaaaaaaaaaaaaaaaaaaaaaaaaaaaaaaaaaaaaaaaaaaaaaaaaaaaa

SEQ ID NO: 14367 - RNA, 1682 nt, Artificial Sequence
  FLUAV/H1N1/A/Michigan/45/2015__EPI662593 neuraminidase mRNA gc (NA)
aggagagucccgcagucggcguccagcggcucugcuuguucgugugugugucguugcaggccuuauucaagcuuaccaugaaccccaaccagaagaucaucaccaucggcagcaucugcaugaccaucgggauggccaaccugauccuccagaucggcaacaucaucuccaucugggugagccacuccauccagaucgggaaccagagccagaucgagacgugcaaccaguccgucaucaccuacgagaacaacaccugggugaaccagaccuacgugaacaucagcaacacgaacuucgccgcgggccaguccgucgugagcgugaagcuggccgggaacuccagccugugcccggucuccggcugggccaucuacagcaaggacaacuccgugcgcaucggcagcaagggggacguguucgucauccgggagcccuucaucuccugcagcccccucgagugccgcaccuucuuccugacccagggcgcccugcucaacgacaagcacuccaacgggaccaucaaggaccggagccccuaccgcacgcugauguccugcccgaucggcgaggugcccagccccuacaacagccgguucgaguccguggccuggagcgcguccgccugccacgacgggaucaacuggcugaccaucggcaucagcggccccgacuccggggccgucgccgugcucaaguacaacggcaucaucaccgacaccaucaagagcuggcgcaacaacauccugcggacgcaggaguccgagugcgcgugcgugaacgggagcugcuucaccaucaugaccgacggcccguccgacggccaggccagcuacaagaucuuccgcaucgagaaggggaagaucaucaaguccgucgagaugaaggcccccaacuaccacuacgaggagugcagcugcuaccccgacuccagcgagaucacgugcgugugccgggacaacuggcacggcuccaaccgccccugggugagcuucaaccagaaccuggaguaccagaugggguacaucugcuccggcgucuucggggacaacccgcggcccaacgacaagaccggcagcugcggccccguguccagcaacggggccaacggcgugaagggguucagcuucaaguacggcaacggggucuggaucggccgcaccaaguccaucagcucccggaagggcuucgagaugaucugggaccccaacggguggaccggcaccgacaacaaguucagcaucaagcaggacaucguggggaucaacgagugguccggcuacagcggguccuucgugcagcacccggagcucacgggccuggacugcauccgccccugcuucugggucgagcugauccggggccgccccgaggagaacaccaucuggaccagcggguccagcaucuccuucugcggcgugaacagcgacaccgucgggugguccuggcccgacggcgccgagcucccguucacgaucgacaagugaggacuagucccuguucccagagcccacuuuuuuuucuuuuuuugaaauaaaauagccugucuuucagaucucaaaggcucuuuucagagccaccaaaaaaaaaaaaaaaaaaaaaaaaaaaaaaaaaaaaaaaaaaaaaaaaaaaaaaaaaaaaaaaaaaaaaaaaaaaaaaaaaaaaaaaaaaaaaaaaaaaaa

SEQ ID NO: 14368 - RNA, 1682 nt, Artificial Sequence
  FLUAV/H1N1/A/Netherlands/602/2009__AGU92703 neuraminidase mRNA gc (NA)
aggagagucccgcagucggcguccagcggcucugcuuguucgugugugugucguugcaggccuuauucaagcuuaccaugaaccccaaccagaagaucaucaccaucggcagcgugugcaugaccaucgggauggccaaccugauccuccagaucggcaacaucaucuccaucuggaucagccacuccauccagcuggggaaccagaaccagaucgagacgugcaaccagagcgucaucaccuacgagaacaacaccugggugaaccagaccuacgugaacaucuccaacacgaacuucgccgcgggccagagcgucguguccgugaagcuggccgggaacagcucccucugcccggucagcggcugggccaucuacuccaaggacaacagcgugcgggugggcuccaagggggacgucuucgugauccgcgagccguucaucagcugcuccccccuggagugccggaccuucuuccugacccagggcgcccuccugaacgacaagcacagcaacgggaccaucaaggaccgcucccccuaccggacgcugaugagcugcccgaucggcgaggugcccucccccuacaacagccgcuucgagagcgucgccugguccgcgagcgccugccacgacgggaucaacuggcucaccaucggcaucuccggccccgacaacggggccguggccgugcugaaguacaacggcaucaucaccgacaccaucaagagcuggcggaacaacauccugcgcacgcaggaguccgagugcgcgugcgucaacgggagcugcuucaccgugaugaccgacggcccguccaacggccaggccagcuacaagaucuuccggaucgagaaggggaagaucgugaaguccgucgagaugaacgcccccaacuaccacuacgaggagugcagcugcuaccccgacuccagcgagaucaccugcgugugccgcgacaacuggcacggcuccaaccggcccugggugagcuucaaccagaaccucgaguaccagaucggguacaucugcuccggcaucuucggggacaacccgcgccccaacgacaagacgggcagcugcggccccgucuccagcaacggggccaacggcgugaagggguucuccuucaaguacggcaacgggguguggaucggccggaccaagagcaucagcucccgcaacggcuucgagaugaucugggaccccaacggguggaccggcaccgacaacaacuucagcaucaagcaggacaucgucgggaucaacgagugguccggcuacagcggguccuucauccagcacccggagcugacgggccuggacugcauccggcccugcuucuggguggagcucauccgcggccggcccaaggagaacaccaucuggaccagcggguccagcaucuccuucugcggcgucaacagcgacaccguggggugguccuggcccgacggcgccgagcugccguucacgaucgacaagugaggacuagucccuguucccagagcccacuuuuuuuucuuuuuuugaaauaaaauagccugucuuucagaucucaaaggcucuuuucagagccaccaaaaaaaaaaaaaaaaaaaaaaaaaaaaaaaaaaaaaaaaaaaaaaaaaaaaaaaaaaaaaaaaaaaaaaaaaaaaaaaaaaaaaaaaaaaaaaaaaaaaa

SEQ ID NO: 14369 - RNA, 1682 nt, Artificial Sequence
  FLUAV/H3N2/A/Hong Kong/4801/2014__EPI578429 neuraminidase mRNA gc (NA)
aggagagucccgcagucggcguccagcggcucugcuuguucgugugugugucguugcaggccuuauucaagcuuaccaugaaccccaaccagaagaucaucaccaucggcuccgugucccugaccaucuccacgaucugcuucuucaugcagaucgccauccucaucaccaccgucacccugcacuucaagcaguacgaguucaacuccccgcccaacaaccaggugaugcugugcgagcccacgaucaucgagcgcaacaucaccgagaucguguaccucaccaacaccacgaucgagaaggagaucugccccaagccggccgaguaccggaacugguccaagccccagugcgggaucaccggcuucgcgcccuucuccaaggacaacuccauccgccuguccgccgggggcgacaucugggucacccgggagcccuacguguccugcgacccggacaagugcuaccaguucgcccuggggcagggcaccacgcucaacaacgugcacuccaacaacaccguccgcgaccggacccccuaccgcacccugcugaugaacgagcucggcgugcccuuccaccuggggacgaagcaggucugcaucgccugguccuccagcuccugccacgacggcaaggccuggcugcacgucugcaucaccggggacgacaagaacgcgaccgccuccuucaucuacaacggccggcucguggacuccguggucagcugguccaaggacauccugcgcacccaggaguccgagugcaucugcaucaacgggacgugcaccguggugaugaccgacggcuccgccuccggcaaggccgacaccaagauccuguucaucgaggaggggaagaucguccacacguccacccucuccggcuccgcgcagcacguggaggagugcuccugcuacccccgguacccgggggugcgcugcgucugccgggacaacuggaagggcuccaaccgcccgaucguggacaucaacaucaaggaccacuccaucgugagcuccuacgucugcuccggccuggugggggacaccccgcggaagaacgacuccagcuccagcucccacugccuggaccccaacaacgaggagggcgggcacggcgugaaggggugggccuucgacgacggcaacgacgucuggaugggccgcaccaucaacgagacgucccggcucggguacgagaccuucaaggugaucgagggcugguccaacccgaaguccaagcugcagaccaaccgccaggucaucguggaccggggcgaccgcuccggguacuccgggaucuucuccguggagggcaaguccugcaucaaccggugcuucuacgucgagcugauccgcggccggaaggaggagaccgaggugcucuggacgagcaacuccaucguggucuucugcgggaccagcggcaccuacgggaccggcuccuggcccgacggggccgaccugaaccugaugcccaucugaggacuagucccuguucccagagcccacuuuuuuuucuuuuuuugaaauaaaauagccugucuuucagaucucaaaggcucuuuucagagccaccaaaaaaaaaaaaaaaaaaaaaaaaaaaaaaaaaaaaaaaaaaaaaaaaaaaaaaaaaaaaaaaaaaaaaaaaaaaaaaaaaaaaaaaaaaaaaaaaaaaaa

SEQ ID NO: 14370 - RNA, 1673 nt, Artificial Sequence
  FLUBV/H0N0/B/Brisbane/60/2008__EPI173278 neuraminidase mRNA gc (NA)
aggagagucccgcagucggcguccagcggcucugcuuguucgugugugugucguugcaggccuuauucaagcuuaccaugcugcccagcaccauccagacccucacgcuguuccugaccuccggcggggugcuccugagccuguacgucuccgccagccucuccuaccugcuguacagcgacauccuccugaaguucuccccgaccgagaucaccgcccccacgaugccccuggacugcgcgaacgccagcaacgugcaggccgugaaccgcuccgccaccaagggcgucacccuccugcugcccgagccggaguggaccuacccccggcucagcugccccggguccacguuccagaaggcccugcugaucagcccccaccgcuucggcgagaccaaggggaacuccgcgccgcucaucauccgggagcccuucaucgccugcggccccaacgagugcaagcacuucgcccugacccacuacgccgcgcagcccggcggguacuacaacggcacccgcggggaccggaacaagcugcgccaccucaucagcgugaagcugggcaagaucccgacgguggagaacuccaucuuccacauggccgccuggagcggguccgccugccacgacggcaaggaguggaccuacaucggcgucgacgggcccgacaacaacgcccugcucaaggugaaguacggcgaggcguacaccgacaccuaccacagcuacgccaacaagauccugcggacgcaggaguccgccugcaacugcaucgggggcaacugcuaccugaugaucaccgacggcagcgccagcgggguguccgagugccgcuuccucaagauccgggagggccgcaucaucaaggagaucuuccccaccgggcgggucaagcacaccgaggagugcacgugcggcuucgccagcaacaagaccaucgagugcgcgugccgcgacaacuccuacaccgccaagcggcccuucgugaagcugaacguggagaccgacacggccgagauccgccugaugugcaccgacaccuaccucgacaccccgcggcccaacgacgggagcaucacgggccccugcgaguccaacggcgacaaggggagcggcgggaucaagggcggguucguccaccagcgcauggaguccaagaucggccggugguacagccgcaccauguccaagaccgagcggaugggcauggggcuguacgugaaguacgacggcgaccccugggccgacagcgacgcccuggcguucuccggggugauggucagcaugaaggagccgggcugguacuccuucggguucgagaucaaggacaagaagugcgacgugcccugcaucggcaucgagauggugcacgacggcgggaaggagaccuggcacagcgccgccacggccaucuacugccucaugggcuccgggcagcugcugugggacaccgucaccggcguggacauggcccucugaggacuagucccuguucccagagcccacuuuuuuuucuuuuuuugaaauaaaauagccugucuuucagaucucaaaggcucuuuucagagccaccaaaaaaaaaaaaaaaaaaaaaaaaaaaaaaaaaaaaaaaaaaaaaaaaaaaaaaaaaaaaaaaaaaaaaaaaaaaaaaaaaaaaaaaaaaaaaaaaaaaaa

SEQ ID NO: 14371 - RNA, 1673 nt, Artificial Sequence
  FLUBV/H0N0/B/Phuket/3073/2013__EPI540672 neuraminidase mRNA gc (NA)
aggagagucccgcagucggcguccagcggcucugcuuguucgugugugugucguugcaggccuuauucaagcuuaccaugcugcccagcaccauccagacccucacgcuguuccugaccuccggcggggugcuccugagccuguacgucuccgccagccucuccuaccugcuguacagcgacauccuccugaaguucucccgcaccgaggugaccgccccgaucaugccccuggacugcgcgaacgccagcaacgugcaggccgucaaccgguccgccacgaagggcgugacgccccuccugcccgagccggaguggaccuacccccgccugagcugccccggguccaccuuccagaaggcccuccugaucagcccccaccgguucggcgagaccaaggggaacuccgcgccgcugaucauccgcgagcccuucaucgccugcggccccaaggagugcaagcacuucgcccucacccacuacgccgcgcagcccggcggguacuacaacggcacccgggaggaccgcaacaagcugcggcaccugaucagcgugaagcucgggaagaucccgaccgucgagaacuccaucuuccacauggccgccuggagcggcuccgccugccacgacgggcgcgaguggacguacaucggcguggacggccccgacagcaacgcccugcugaagaucaaguacggggaggcguacaccgacaccuaccacuccuacgccaagaacauccuccggacccaggagagcgccugcaacugcaucggcggggacugcuaccugaugaucacggacggccccgccagcggcaucuccgagugccgcuuccugaagauccgggaggggcgcaucaucaaggagaucuuccccaccggccgggugaagcacaccgaggagugcacgugcggguucgccagcaacaagaccaucgagugcgcgugccgcgacaacuccuacaccgccaagcggccguucgucaagcucaacguggagaccgacaccgccgagauccgccugaugugcacgaagaccuaccuggacacgccccggcccaacgacggcagcaucaccgggcccugcgaguccgacggcgacgagggcagcgggggcaucaagggcggguucgugcaccagcgcauggccuccaagaucgggcggugguacagccgcaccauguccaagaccaagcggaugggcaugggccucuacgucaaguacgacggggacccguggaccgacagcgaggcccuggcgcuguccggcgugauggugagcauggaggagcccgggugguacuccuucggcuucgagaucaaggacaagaagugcgacguccccugcaucgggaucgagauggugcacgacggcggcaagaccacguggcacagcgccgccaccgccaucuacugccucaugggguccggccagcugcugugggacaccgugaccggggucaacaugacgcucugaggacuagucccuguucccagagcccacuuuuuuuucuuuuuuugaaauaaaauagccugucuuucagaucucaaaggcucuuuucagagccaccaaaaaaaaaaaaaaaaaaaaaaaaaaaaaaaaaaaaaaaaaaaaaaaaaaaaaaaaaaaaaaaaaaaaaaaaaaaaaaaaaaaaaaaaaaaaaaaaaaaaa

SEQ ID NO: 14372 - RNA, 1682 nt, Artificial Sequence
  FLUAV/H1N1/A/Brisbane/02/2018__EPI1212833 neuraminidase mRNA gc (NA)
aggagagucccgcagucggcguccagcggcucugcuuguucgugugugugucguugcaggccuuauucaagcuuaccaugaaccccaaccagaagaucaucaccaucggcagcacgugcaugaccaucgggauggccaaccugauccuccagaucggcaacaucaucuccaucugggugagccacuccauccagaucgggaaccagagccagaucgagaccugcaaccaguccgucaucaccuacgagaacaacaccugggugaaccagacguacgugaacaucagcaacaccaacuucgccgcgcgccaguccgucgccagcgugaagcuggccggcaacuccagccugugcccgguguccgggugggccaucuacagcaaggacaacuccguccggaucggcagcaagggcgacguguucgugauccgcgagcccuucaucuccugcagcccccucgagugccggaccuucuuccugacccagggggcccugcucaacgacaagcacuccaacggcacgaucaaggaccgcagccccuaccggacccugauguccugcccgaucggggagguccccagccccuacaacagccgcuucgaguccguggcguggagcgccuccgccugccacgacggcaccaacuggcugaccaucgggaucagcggccccgacuccggcgccguggcgguccucaaguacaacgggaucaucacggacaccaucaagagcuggcggaacaacauccugcgcacccaggaguccgagugcgccugcgugaacggcagcugcuucaccaucaugacggacgggccguccgacggccaggccagcuacaagaucuuccggaucgagaagggcaagaucaucaaguccguggagaugaaggcccccaacuaccacuacgaggagugcagcugcuaccccgacuccagcgagaucacgugcgucugccgcgacaacuggcacggguccaaccggcccugggugagcuucaaccagaaccuggaguaccagaugggcuacaucugcuccgggguguucggcgacaacccgcgccccaacgacaagaccgggagcugcggccccgucuccagcaacggcgccaacggggugaagggcuucagcuucaaguacgggaacggcguguggaucgggcggaccaaguccaucagcucccgcaagggcuucgagaugaucugggaccccaacggcuggaccgggaccgacaacaaguucagcaucaagcaggacaucgucggcaucaacgagugguccggguacagcggcuccuucgugcagcacccggagcucaccgggcuggacugcauccggcccugcuucuggguggagcugauccgcggccggcccgaggagaacaccaucuggacgagcggcuccagcaucuccuucugcggggucgacagcgacaccgugggcugguccuggcccgacggggcggagcucccguucaccaucgacaagugaggacuagucccuguucccagagcccacuuuuuuuucuuuuuuugaaauaaaauagccugucuuucagaucucaaaggcucuuuucagagccaccaaaaaaaaaaaaaaaaaaaaaaaaaaaaaaaaaaaaaaaaaaaaaaaaaaaaaaaaaaaaaaaaaaaaaaaaaaaaaaaaaaaaaaaaaaaaaaaaaaaaa

SEQ ID NO: 14373 - RNA, 1682 nt, Artificial Sequence
  FLUAV/H1N1/A/Guangdong-Maonan/SWL1536/2019__EPI1542569 neuraminidase mRNA gc (NA)
aggagagucccgcagucggcguccagcggcucugcuuguucgugugugugucguugcaggccuuauucaagcuuaccaugaaccccaaccagaagaucaucaccaucggcagcaucugcaugaccaucgggauggccaaccugauccuccagaucggcaacaucaucuccaucugggugagccacuccauccagaucgggaaccagagccagaucgagacgugcaacaagaacgucaucaccuacgagaacaacaccugggugaaccagaccuacgugaacaucuccaacacgaacagcgccgcgcgccaguccgucgccagcgugaagcuggccggcaacuccagccugugcccgguguccgggugggccaucuacagcaaggacaacuccguccggaucggcagcaagggcgacguguucgugauccgcgagcccuucaucuccugcagcccccucgagugccggaccuucuuccugacccagggggcccugcucaacgacaagcacuccaacggcaccaucaaggaccgcagccccuaccggacgcugauguccugcccgaucggggagguccccagccccuacaacagccgcuucgaguccguggcguggagcgccuccgccugccacgacggcaccaacuggcugaccaucgggaucagcggccccgacuccggcgccguggcgguccucaaguacaacgggaucaucaccgacacgaucaagagcuggcggaacaacauccugcgcacccaggaguccgagugcgccugcgugaacggcagcugcuucaccaucaugaccgacgggccguccgacggccaggccagcuacaagaucuuccggaucgagaagggcaagaucaucaaguccguggagaugaaggcccccaacuaccacuacgaggagugcagcugcuaccccgacuccagcgagaucacgugcgucugccgcgacaacuggcacggguccaaccggcccugggugagcuucaaccagaaccuggaguaccagaugggcuacaucugcuccgggguguucggcgacaacccgcgccccaacgacaagaccgggagcugcggccccgucuccagcaacggcgccaacggggugaagggcuucagcuucaaguacgggaacggcguguggaucgggcggaccaaguccaucagcucccgcaagggcuucgagaugaucugggaccccaacggcuggaccgggacggacaacaaguucagcaagaagcaggacaucgucggcaucaacgagugguccggguacagcggcuccuucgugcagcacccggagcucaccgggcugaacugcauccggcccugcuucuggguggagcugauccgcggccggcccgaggagaacaccaucuggaccagcggcuccagcaucuccuucugcggggucgacagcgacaucgugggcugguccuggcccgacggggcggagcucccguucacgaucgacaagugaggacuagucccuguucccagagcccacuuuuuuuucuuuuuuugaaauaaaauagccugucuuucagaucucaaaggcucuuuucagagccaccaaaaaaaaaaaaaaaaaaaaaaaaaaaaaaaaaaaaaaaaaaaaaaaaaaaaaaaaaaaaaaaaaaaaaaaaaaaaaaaaaaaaaaaaaaaaaaaaaaaaa

SEQ ID NO: 14374 - RNA, 1682 nt, Artificial Sequence
  FLUAV/H3N2/A/Singapore/INFIMH-16-0019/2016__EPI1047603 neuraminidase mRNA gc (NA)
aggagagucccgcagucggcguccagcggcucugcuuguucgugugugugucguugcaggccuuauucaagcuuaccaugaaccccaaccagaagaucaucaccaucggcagcgugucccugaccaucagcacgaucugcuucuucaugcagaucgccauccucaucaccaccgucacccugcacuucaagcaguacgaguucaacuccccgcccaacaaccaggugaugcugugcgagcccacgaucaucgagcgcaacaucaccgagaucguguaccucaccaacaccacgaucgagaaggagaucugccccaagccggccgaguaccggaacuggagcaagccccagugcgggaucaccggcuucgcgcccuucuccaaggacaacagcauccgccuguccgccgggggcgacaucugggucacccgggagcccuacgugagcugcgacccggacaagugcuaccaguucgcccuggggcagggcaccacgcucaacaacgugcacuccaacaacaccguccgcgaccggacccccuaccgcacccugcugaugaacgagcucggcgugcccuuccaccuggggacgaagcaggucugcaucgccuggagcuccagcuccugccacgacggcaaggccuggcugcacgugugcaucaccggggacgacaagaacgcgaccgccagcuucaucuacaacggccggcucaucgacuccguggugagcugguccaaggacauccugcgcacccaggagagcgagugcgucugcaucaacgggacgugcaccguggugaugaccgacggcaacgccaccggcaaggccgacacgaagauccuguucaucgaggaggggaagaucguccacaccuccaagcucagcggcagcgcgcagcacguggaggagugcuccugcuacccccgguacccgggggugcgcugcgucugccgggacaacuggaagggcagcaaccgccccaucguggacaucaacaucaaggaccacuccaucgugagcuccuacgucugcagcggccuggugggggacaccccgcggaagaacgacuccagcuccagcucccacugccugaaccccaacaacgaggagggcgggcacggcgugaaggggugggccuucgacgacggcaacgacgucuggaugggccgcaccaucaacgagacgagccggcucggguacgagaccuucaagguggucgagggcugguccaaccccaagagcaagcugcagaucaaccgccaggugaucguggaccgcggggaccgguccggcuacagcgggaucuucuccgucgagggcaagagcugcaucaaccggugcuucuacguggagcugauccgcggccggaaggaggagaccgaggugcucuggaccuccaacagcaucgucguguucugcgggacgagcggcaccuacgggaccggcuccuggcccgacggggccgaccugaaccugaugcacaucugaggacuagucccuguucccagagcccacuuuuuuuucuuuuuuugaaauaaaauagccugucuuucagaucucaaaggcucuuuucagagccaccaaaaaaaaaaaaaaaaaaaaaaaaaaaaaaaaaaaaaaaaaaaaaaaaaaaaaaaaaaaaaaaaaaaaaaaaaaaaaaaaaaaaaaaaaaaaaaaaaaaaa

SEQ ID NO: 14375 - RNA, 1682 nt, Artificial Sequence
  FLUAV/H3N2/A/Kansas/14/2017__EPI1146344 neuraminidase mRNA gc (NA)
aggagagucccgcagucggcguccagcggcucugcuuguucgugugugugucguugcaggccuuauucaagcuuaccaugaaccccaaccagaagaucaucaccaucggcagcgugucccugaccaucagcacgaucugcuucuucaugcagaucgccauccucaucaccaccgucacccugcacuucaagcaguacgaguucaacuccccgcccaacaaccaggugaugcugugcgagcccacgaucaucgagcgcaacaucaccgagaucguguaccucaccaacaccacgaucgagcgggagaucugccccaagccggccgaguaccgcaacuggagcaagccccagugcgggaucaccggcuucgcgcccuucuccaaggacaacagcauccggcuguccgccgggggcgacaucugggucacccgcgagcccuacgugagcugcgacccggacaagugcuaccaguucgcccuggggcagggcaccacgaucaacaacgugcacuccaacaacaccgcccgggaccgcaccccgcaccggacccuccugaugaacgagcugggcguccccuuccaccucgggacgaagcaggucugcaucgccuggagcuccagcuccugccacgacggcaaggcguggcugcacgugugcaucaccggggacgacaagaacgccaccgccagcuucaucuacaacggccgccugguggacuccguggugagcugguccaaggacauccuccggacccaggagagcgagugcgucugcaucaacgggacgugcaccguggugaugaccgacggcaacgccaccggcaaggcggacacgaagauccuguucaucgaggaggggaagaucguccacaccuccaagcugagcggcagcgcccagcacguggaggagugcuccugcuacccccgcuacccgggggugcggugcgucugccgcgacaacuggaagggcagcaaccggcccaucguggacaucaacaucaaggaccacuccaucgugagcuccuacgucugcagcggccucgugggggacacgccccgcaagaccgacuccagcuccagcucccacugccugaaccccaacaacgagaagggcgggcacggcgugaaggggugggccuucgacgacggcaacgacgucuggaugggccggaccaucaacgagaccagccgccugggguacgagaccuucaagguggucgagggcugguccaaccccaagagcaagcuccagaucaaccggcaggucaucguggaccgcggggaccgguccggcuacagcgggaucuucuccguggagggcaagagcugcaucaaccgcugcuucuacguggagcugauccggggccgcaaggaggagaccgaggugcuguggacguccaacagcaucgucguguucugcgggaccagcggcaccuacgggaccggcuccuggcccgacggggccgaccucaaccugaugcacaucugaggacuagucccuguucccagagcccacuuuuuuuucuuuuuuugaaauaaaauagccugucuuucagaucucaaaggcucuuuucagagccaccaaaaaaaaaaaaaaaaaaaaaaaaaaaaaaaaaaaaaaaaaaaaaaaaaaaaaaaaaaaaaaaaaaaaaaaaaaaaaaaaaaaaaaaaaaaaaaaaaaaaa

SEQ ID NO: 14376 - RNA, 1682 nt, Artificial Sequence
  FLUAV/H3N2/A/Kansas/14/2017-CDC-LV24A__EPI1444881 neuraminidase mRNA gc (NA)
aggagagucccgcagucggcguccagcggcucugcuuguucgugugugugucguugcaggccuuauucaagcuuaccaugaaccccaaccagaagaucaucaccaucggcagcgugucccugaccaucagcacgaucugcuucuucaugcagaucgccauccucaucaccaccgucacccugcacuucaagcaguacgaguucaacuccccgcccaacaaccaggugaugcugugcgagcccacgaucaucgagcgcaacaucaccgagaucguguaccucaccaacaccacgaucgagcgggagaucugccccaagccggccgaguaccgcaacuggagcaagccccagugcgggaucaccggcuucgcgcccuucuccaaggacaacagcauccggcuguccgccgggggcgacaucugggucacccgcgagcccuacgugagcugcgacccggacaagugcuaccaguucgcccuggggcagggcaccacgaucaacaacgugcacuccaacaacaccgcccgggaccgcacgccccaccggacccuccugaugaacgagcugggcguccccuuccaccucgggaccaagcaggucugcaucgccuggagcuccagcuccugccacgacggcaaggcguggcugcacgugugcaucaccggggacgacaagaacgccaccgccagcuucaucuacaacggccgccugguggacuccguggugagcugguccaaggacauccuccggacccaggagagcgagugcgucugcaucaacgggacgugcaccguggugaugaccgacggcaacgccaccggcaaggcggacacgaagauccuguucaucgaggaggggaagaucguccacaccuccaagcugagcggcagcgcccagcacguggaggagugcuccugcuacccccgcuacccgggggugcggugcgucugccgcgacaacuggaagggcagcaaccggcccaucguggacaucaacaucaaggaccacuccaucgugagcuccuacgucugcagcggccucgugggggacacgccccgcaagaccgacaacuccagcuccagccacugccugaaccccaacaacgagaagggcgggcacggcgugaaggggugggccuucgacgacggcaacgacgucuggaugggccggaccaucaacgagaccucccgccugggguacgagaccuucaagguggucgagggcuggagcaacccgaaguccaagcuccagaucaaccggcaggucaucguggaccgcggggaccggagcggcuacuccgggaucuucagcguggagggcaaguccugcaucaaccgcugcuucuacguggagcugauccggggccgcaaggaggagaccgaggugcuguggacgagcaacuccaucgucguguucugcgggaccagcggcaccuacgggaccggcagcuggcccgacggggccgaccucaaccugaugcacaucugaggacuagucccuguucccagagcccacuuuuuuuucuuuuuuugaaauaaaauagccugucuuucagaucucaaaggcucuuuucagagccaccaaaaaaaaaaaaaaaaaaaaaaaaaaaaaaaaaaaaaaaaaaaaaaaaaaaaaaaaaaaaaaaaaaaaaaaaaaaaaaaaaaaaaaaaaaaaaaaaaaaaa

SEQ ID NO: 14377 - RNA, 1682 nt, Artificial Sequence
  FLUAV/H3N2/A/Switzerland/8060/2017__EPI1154879 neuraminidase mRNA gc (NA)
aggagagucccgcagucggcguccagcggcucugcuuguucgugugugugucguugcaggccuuauucaagcuuaccaugaaccccaaccagaagaucaucaccaucggcagcgugucccugaccaucagcacgaucugcuucuucaugcagaucgccauccucaucaccaccgucacccugcacuucaagcaguacgaguucaacuccccgcccaacaaccaggugaugcugugcgagcccacgaucaucgagcgcaacaucaccgagaucguguaccucaccaacaccacgaucgagaaggagaucugccccaagccggccgaguaccggaacuggagcaagccccagugcgggaucaccggcuucgcgcccuucuccaaggacaacagcauccgccuguccgccgggggcgacaucugggucacccgggagcccuacgugagcugcgacccggacaagugcuaccaguucgcccuggggcagggcaccacgcucaacaacgugcacuccaacaacaccguccgcgaccggacccccuaccgcacccugcugaugaacgagcucggcgugcccuuccaccuggggacgaagcaggucugcauggccuggagcuccagcuccugccacgacggcaaggccuggcugcacgugugcgugaccggggacgacaagaacgcgaccgccagcuucaucuacaacggccggcucguggacuccgucgugagcugguccaaggacauccugcgcacccaggagagcgagugcgugugcaucaacgggacgugcaccgucgugaugaccgacggcaacgccaccggcaaggccgacacgaagauccuguucaucgaggaggggaagaucgugcacaccuccaagcucagcggcagcgcgcagcacgucgaggagugcuccugcuacccccgguacccgggggugcgcugcgugugccgggacaacuggaagggcagcaaccgccccaucgucgacaucaacaucaaggaccacuccaucgugagcuccuacgugugcagcggccuggucggggacacgccccggaaguccgacagcuccagcuccagccacugccugaaccccaacaacgaggagggcgggcacggcgugaaggggugggccuucgacgacggcaacgacgucuggaugggccgcaccaucaacgagaccucccggcucggguacgagaccuucaaggugguggagggcuggagcaacuccaagagcaagcugcagaucaaccgccaggucaucguggaccgcggggaccgguccggcuacagcgggaucuucuccguggagggcaagagcugcaucaaccggugcuucuacgucgagcugauccgcggccggaaggaggagaccgaggugcucuggaccagcaacuccaucguggucuucugcgggacgagcggcaccuacgggaccggcuccuggccggacggggccgaccugaaccugaugcacaucugaggacuagucccuguucccagagcccacuuuuuuuucuuuuuuugaaauaaaauagccugucuuucagaucucaaaggcucuuuucagagccaccaaaaaaaaaaaaaaaaaaaaaaaaaaaaaaaaaaaaaaaaaaaaaaaaaaaaaaaaaaaaaaaaaaaaaaaaaaaaaaaaaaaaaaaaaaaaaaaaaaaaa

SEQ ID NO: 14378 - RNA, 1682 nt, Artificial Sequence
  FLUAV/H3N2/A/Switzerland/8060/2017(H3N2)-CDC-LV21A__EPI1364258 neuraminidase mRNA gc (NA)
aggagagucccgcagucggcguccagcggcucugcuuguucgugugugugucguugcaggccuuauucaagcuuaccaugaaccccaaccagaagaucaucaccaucggcagcgugucccugaccaucagcacgaucugcuucuucaugcagaucgccauccucaucaccaccgucacccugcacuucaagcaguacgaguucaacuccccgcccaacaaccaggugaugcugugcgagcccacgaucaucgagcgcaacaucaccgagaucguguaccucaccaacaccacgaucgagaaggagaucugccccaagccggccgaguaccggaacuggagcaagccccagugcgggaucaccggcuucgcgcccuucuccaaggacaacagcauccgccuguccgccgggggcgacaucugggucacccgggagcccuacgugagcugcgacccggacaagugcuaccaguucgcccuggggcagggcaccacgcucaacaacgugcacuccaacaacaccguccgcgaccggacccccuaccgcacccugcugaugaacgagcucggcgugcccuuccaccuggggacgaagcaggucugcauggccuggagcuccagcuccugccacgacggcaaggccuggcugcacgugugcgugaccggggacgacaagaacgcgaccgccagcuucaucuacaacggccggcucguggacuccgucgugagcugguccaaggacauccugcgcacccaggagagcgagugcgugugcaucaacgggacgugcaccgucgugaugaccgacggcaacgccaccggcaaggccgacacgaagauccuguucaucgaggaggggaagaucgugcacaccuccaagcucagcggcagcgcgcagcacgucgaggagugcuccugcuacccccgguacccgggggugcgcugcgugugccgggacaacuggaagggcagcaaccgccccaucgucgacaucaacaucaaggaccacuccaucgugagcuccuacgugugcagccggcuggucggcgacacgccccgcaaguccgacagcuccagcuccagccacugccugaaccccaacaacgaggagggcgggcacggggugaagggcugggccuucgacgacgggaacgacgucuggaugggccggaccaucaacgagaccucccgccucggcuacgagaccuucaaggugguggagggguggagcaacuccaagagcaagcugcagaucaaccggcaggucaucguggaccgcggcgaccgguccggguacagcggcaucuucuccguggagggcaagagcugcaucaaccgcugcuucuacgucgagcugauccgggggcgcaaggaggagaccgaggugcucuggaccagcaacuccaucguggucuucugcggcacgagcgggaccuacggcaccggguccuggccggacggcgccgaccugaaccugaugcacaucugaggacuagucccuguucccagagcccacuuuuuuuucuuuuuuugaaauaaaauagccugucuuucagaucucaaaggcucuuuucagagccaccaaaaaaaaaaaaaaaaaaaaaaaaaaaaaaaaaaaaaaaaaaaaaaaaaaaaaaaaaaaaaaaaaaaaaaaaaaaaaaaaaaaaaaaaaaaaaaaaaaaaa

SEQ ID NO: 14379 - RNA, 1682 nt, Artificial Sequence
  FLUAV/H3N2/A/Hong Kong/2671/2019__EPI1543099 neuraminidase mRNA gc (NA)
aggagagucccgcagucggcguccagcggcucugcuuguucgugugugugucguugcaggccuuauucaagcuuaccaugaaccccaaccagaagaucaucaccaucggcagcgugucccugaccaucagcacgaucugcuucuucaugcagaucgccauccucaucaccaccgucacccugcacuucaagcaguacgaguucaacuccccgcccaacaaccaggugaugcugugcgagcccacgaucaucgagcgcaacaucaccgagaucguguaccucaccaacaccacgaucgagaaggagaucugccccaagccggccgaguaccggaacuggagcaagccccagugcgggaucaccggcuucgcgcccuucuccaaggacaacagcauccgccuguccgccgggggcgacaucugggucacccgggagcccuacgugagcugcgaccuggacaagugcuaccaguucgcccucgggcagggcaccacgcugaacaacgugcacuccaacaacaccguccgcgaccggaccccguaccgcacccugcucaugaacgagcugggcgugcccuuccaccuggggacgaagcaggucugcaucgccuggagcuccagcuccugccacgacggcaaggccuggcuccacgugugcaucaccggggacgacaagaacgcgaccgccagcuucaucuacaacggccggcugguggacuccguggucagcugguccaacgacauccugcgcacccaggagagcgagugcgugugcaucaacgggacgugcaccguggucaugaccgacggcaacgccaccggcaaggccgacacgaagauccucuucaucgaggaggggaagaucgugcacaccuccaagcugagcggcagcgcgcagcacguggaggagugcuccugcuacccccgguaccccgggguccgcugcgugugccgggacaacuggaagggcagcaaccgcccgaucaucgacaucaacaucaaggaccacuccaucgugagcuccuacgucugcagcggccuggugggggacacgccccggaaguccgacagcuccagcuccagccacugccucaaccccaacaacgaggagggcgggcacggcgugaaggggugggccuucgacgacggcaacgacgucuggaugggccgcaccaucaacgagaccucccggcugggguacgagaccuucaagguggucgagggcuggagcaaccccaaguccaagcugcagaucaaccgccaggugaucguggaccgcggggaccggagcggcuacuccgggaucuucagcgucgagggcaaguccugcaucaaccggugcuucuacguggagcucauccgcggccggaaggaggagaccgaggugcuguggaccagcaacagcaucgucguguucugcgggacguccggcaccuacgggaccggcagcuggccggacggggccgaccugaaccucaugcacaccugaggacuagucccuguucccagagcccacuuuuuuuucuuuuuuugaaauaaaauagccugucuuucagaucucaaaggcucuuuucagagccaccaaaaaaaaaaaaaaaaaaaaaaaaaaaaaaaaaaaaaaaaaaaaaaaaaaaaaaaaaaaaaaaaaaaaaaaaaaaaaaaaaaaaaaaaaaaaaaaaaaaaa

SEQ ID NO: 14380 - RNA, 1682 nt, Artificial Sequence
  FLUAV/H3N2/A/Hong Kong/45/2019__EPI1691929 neuraminidase mRNA gc (NA)
aggagagucccgcagucggcguccagcggcucugcuuguucgugugugugucguugcaggccuuauucaagcuuaccaugaaccccaaccagaagaucaucaccaucggcagcgugucccugaccaucagcacgaucugcuucuucaugcagaucgccauccucaucaccaccgucacccugcacuucaagcaguacgaguucaacucccugccgaacaaccaggugaugcucugcgagcccacgaucaucgagcgcaacaucaccgagaucguguaccugaccaacaccacgaucgagaaggagaucugccccaagcccgccgaguaccggaacuggagcaagccgcagugcgggaucaccggcuucgcgcccuucuccaaggacaacagcauccgccuguccgccgggggcgacaucugggucacccgggagcccuacgugagcugcgaccucgacaagugcuaccaguucgcccuggggcagggcaccacgcugaacaacgugcacuccaacaacaccguccgcgaccggacccccuaccgcacccuccugaugaacgagcugggcgugccguuccaccucgggacgaagcaggucugcaucgccuggagcuccagcuccugccacgacggcaaggccuggcugcacgugugcaucaccggggacgacaagaacgcgaccgccagcuucaucuacaacggccggcugguggacuccguggucagcugguccaacgacauccuccgcacccaggagagcgagugcgugugcaucaacgggacgugcaccguggucaugaccgacggcaacgccaccggcaaggccgacacgaagauccuguucaucgaggaggggaagaucgugcacaccuccaagcugagcggcagcgcgcagcacguggaggagugcuccugcuacccccgguaccccgggguccgcugcgugugccgggacaacuggaagggcagcaaccgccccaucaucgacaucaacaucaaggaccacuccaucgugagcuccuacgucugcagcggccucgugggggacaccccgcggaaguccgacagcuccagcuccagccacugccugaaccccaacaacgaggagggcgggcacggcgugaaggggugggccuucgacgacggcaacgacgucuggaugggccgcaccaucaacgagacgucccggcugggguacgagaccuucaagguggucgagggcuggagcaaccccaaguccaagcuccagaucaaccgccaggugaucguggaccgcggggaccggagcggcuacuccgggaucuucagcgucgagggcaaguccugcaucaaccggugcuucuacguggagcugauccgcggccggaaggaggagaccgaggugcuguggaccagcaacagcaucgucguguucugcgggacguccggcaccuacgggaccggcagcuggcccgacggggccgaccucaaccugaugcacaucugaggacuagucccuguucccagagcccacuuuuuuuucuuuuuuugaaauaaaauagccugucuuucagaucucaaaggcucuuuucagagccaccaaaaaaaaaaaaaaaaaaaaaaaaaaaaaaaaaaaaaaaaaaaaaaaaaaaaaaaaaaaaaaaaaaaaaaaaaaaaaaaaaaaaaaaaaaaaaaaaaaaaa

SEQ ID NO: 14381 - RNA, 1682 nt, Artificial Sequence
  FLUAV/H3N2/A/South Australia/34/2019__EPI1387330 neuraminidase mRNA gc (NA)
aggagagucccgcagucggcguccagcggcucugcuuguucgugugugugucguugcaggccuuauucaagcuuaccaugaaccccaaccagaagaucaucaccaucggcagcgugucccugaccaucagcacgaucugcuucuucaugcagaucgccauccucaucaccaccgucacccugcacuucaagcaguacgaguucaacuccccgcccaacaaccaggugaugcugugcgagcccacgaucaucgagcgcaacaucaccgagaucguguaccucaccaacaccacgaucgagaaggagaucugccccaagccggccgaguaccggaacuggagcaagccccagugcgggaucaccggcuucgcgcccuucuccaaggacaacagcauccgccuguccgccgggggcgacaucugggucacccgggagcccuacgugagcugcgaccuggacaagugcuaccaguucgcccucgggcagggcaccacgcugaacaacgugcacuccaacaacaccguccgcgaccggaccccguaccgcacccugcucaugaacgagcugggcgugcccuuccaccuggggacgaagcaggucugcaucgccuggagcuccagcuccugccacgacggcaaggccuggcuccacgugugcaucaccggggacgacaagaacgcgaccgccagcuucaucuacaacggccggcugguggacuccguggucagcugguccaacgacauccugcgcacccaggagagcgagugcgugugcaucaacgggacgugcaccguggucaugaccgacggcaacgccaccggcaaggccgacacgaagauccucuucaucgaggaggggaagaucgugcacaccuccaagcugagcggcagcgcgcagcacguggaggagugcuccugcuacccccgguaccccgggguccgcugcgugugccgggacaacuggaagggcagcaaccgcccgaucaucgacaucaacaucaaggaccacuccaucgugagccgguacgucugcuccggccuggugggggacacgccccgcaagagcgacuccagcuccagcucccacugccucaaccccaacaacgagaagggcgggcacggcgugaaggggugggccuucgacgacggcaacgacgucuggaugggccggaccaucaacgagaccagccgccugggguacgagaccuucaagguggucgagggcugguccaaccccaagagcaagcugcagaucaaccggcaggucaucguggaccgcggggaccgguccggcuacagcgggaucuucuccguggagggcaagagcugcaucaaccgcugcuucuacguggagcucauccggggccgcaaggaggagaccgaggugcuguggaccuccaacagcaucgucguguucugcgggacgagcggcaccuacgggaccggcuccuggccggacggggccgaccugaaccucaugcacaucugaggacuagucccuguucccagagcccacuuuuuuuucuuuuuuugaaauaaaauagccugucuuucagaucucaaaggcucuuuucagagccaccaaaaaaaaaaaaaaaaaaaaaaaaaaaaaaaaaaaaaaaaaaaaaaaaaaaaaaaaaaaaaaaaaaaaaaaaaaaaaaaaaaaaaaaaaaaaaaaaaaaaa

SEQ ID NO: 14382 - RNA, 1670 nt, Artificial Sequence
  FLUAV/H7N9/A/chicken/Zhejiang/C483/2013(H7N9)__AGN69396.1 neuraminidase mRNA gc (NA)
aggagagucccgcagucggcguccagcggcucugcuuguucgugugugugucguugcaggccuuauucaagcuuaccaugaaccccaaccagaagauccugugcaccagcgccaccgccaucaucaucggcgcgaucgccgugcucaucgggaucgccaaccugggccugaacaucgggcuccaccugaagccgggcugcaacugcucccacagccagcccgagacgaccaacaccucccagaccaucaucaacaacuacuacaacgagacgaacaucaccaacauccagauggaggagcgcaccagccggaacuucaacaaccugaccaaggggcucugcacgaucaacuccuggcacaucuacggcaaggacaacgccguccgcaucggcgagagcuccgacgugcuggugacccgggagcccuacgucagcugcgaccccgacgagugccgcuucuacgcccugucccaggggaccaccauccggggcaagcacagcaacgggacgauccacgaccgcucccaguaccgggcgcucaucagcuggccgcuguccagcccgcccaccguguacaacucccgcguggagugcaucggcuggagcuccaccagcugccacgacgggaagucccggaugagcaucugcaucagcggccccaacaacaacgccuccgccgucgugugguacaaccgccggcccguggccgagaucaacaccugggcgcgcaacauccugcggacgcaggagagcgagugcgucugccacaacggcgugugccccguggucuucaccgacggguccgccaccggccccgccgacacccgcaucuacuacuucaaggaggggaagauccucaagugggagagccugacgggcaccgccaagcacaucgaggagugcuccugcuacggcgagcggaccgggaucacgugcacgugccgcgacaacuggcagggcagcaaccggcccgugauccagaucgacccgguggccaugacccacaccucccaguacaucugcagccccguccugaccgacaacccccgccccaacgacccgaacaucgggaagugcaacgaccccuaccccggcaacaacaacaacggggugaagggcuucuccuaccucgacggcgcgaacaccuggcuggggcggaccaucagcaccgccucccgcagcggcuacgagaugcugaaggugcccaacgcccucaccgacgaccgguccaagccgauccaggggcagacgaucguccugaacgccgacuggagcggcuacuccgggagcuucauggacuacugggccgagggcgacugcuaccgcgcgugcuucuacguggagcugauccgcggccggcccaaggaggacaaggugugguggaccuccaacagcaucgucuccaugugcagcagcaccgaguuccucgggcaguggaacuggcccgacggcgccaagaucgaguacuuccugugaggacuagucccuguucccagagcccacuuuuuuuucuuuuuuugaaauaaaauagccugucuuucagaucucaaaggcucuuuucagagccaccaaaaaaaaaaaaaaaaaaaaaaaaaaaaaaaaaaaaaaaaaaaaaaaaaaaaaaaaaaaaaaaaaaaaaaaaaaaaaaaaaaaaaaaaaaaaaaaaaaaaa

SEQ ID NO: 14383 - RNA, 1685 nt, Artificial Sequence
  FLUAV/H10N8/A/Jiangxi/IPB13/2013(H10N8)__AHK10769.1 neuraminidase mRNA gc (NA)
aggagagucccgcagucggcguccagcggcucugcuuguucgugugugugucguugcaggccuuauucaagcuuaccaugaaccccaaccagaagaucaucaccaucggcagcgugucccuggggcucgucauccugaacauccugcuccacaucgugagcaucaccgugacgguccuggugcugccgggcaacgggaacaacgaguccugcaacgagaccgugauccgcgaguacaacgagaccguccggguggagaaggugacccaguggcacaacacgaacgucaucgaguacaucgagcgccccgagaacgaccacuucaugaacaacaccgaggcccucugcgacgccaagggcuucgcgcccuucagcaaggacaacgggauccggaucggcucccgcggccacguguucgugauccgggagcccuucgucagcugcuccccgaccgagugccgcaccuucuuccugacgcaggggagccugcucaacgacaagcacuccaacggcaccgugaaggaccggagccccuaccgcacccugauguccguggagaucgggcagagccccaacgucuaccaggcccgguucgaggccguggccugguccgccaccgcgugccacgacggcaagaaguggaugacgaucggggugaccggccccgacgccaaggccgucgccguggugcacuacggcgggaucccgaccgacgucaucaacagcugggcgggcgacauccugcgcacccaggaguccagcugcacgugcauccagggggagugcuucugggugaugaccgacggccccgccaaccggcaggcccaguaccgcgccuucaaggccaagcagggcaagaucguggggcaggcggagaucuccuucaacggcgggcacaucgaggagugcagcugcuaccccaacgagggcaaggucgagugcgugugccgggacaacuggaccgggaccaaccgccccguccucgugaucuccccggaccugagcuaccgggugggcuaccugugcgccggccuccccagcgacacgccccgcggggaggacucccaguucaccggcagcugcaccucccccauggggaaccagggcuacggggucaagggcuucggcuuccggcaggggaacgacguguggaugggccgcaccaucagccggacgucccgcagcggguucgagauccugaaggugcggaacggcuggguccagaacuccaaggagcagaucaagcgccaggugguggucgacaaccugaacuggagcggguacuccggcagcuucacccucccggccgagcugaccaagcgcaacugccuggugcccugcuucuggguggagaugauccggggcaaccccgaggagaagaccaucuggacguccagcuccagcaucgucaugugcgggguggaccacgagaucgccgacugguccuggcacgacggcgccauccuccccuucgacaucgacaagaugugaggacuagucccuguucccagagcccacuuuuuuuucuuuuuuugaaauaaaauagccugucuuucagaucucaaaggcucuuuucagagccaccaaaaaaaaaaaaaaaaaaaaaaaaaaaaaaaaaaaaaaaaaaaaaaaaaaaaaaaaaaaaaaaaaaaaaaaaaaaaaaaaaaaaaaaaaaaaaaaaaaaaa

SEQ ID NO: 14384 - RNA, 1673 nt, Artificial Sequence
  FLUBV/H0N0/B/Colorado/06/2017__EPI1001930 neuraminidase mRNA gc (NA)
aggagagucccgcagucggcguccagcggcucugcuuguucgugugugugucguugcaggccuuauucaagcuuaccaugcugcccagcaccauccagacccucacgcuguuccugaccuccggcggggugcuccugagccuguacgucuccgccagccucuccuaccugcuguacagcgacauccuccugaaguucuccccgaccgagaucaccgcccccacgaugccccuggacugcgcgaacgccagcaacgugcaggccgugaaccgcuccgccaccaagggcgucacccuccugcugcccgagccggaguggaccuacccccggcucagcugccccggguccacguuccagaaggcccugcugaucagcccccaccgcuucggcgagaccaaggggaacuccgcgccgcucaucauccgggagcccuucguggccugcggccccaacgagugcaagcacuucgcccugacccacuacgccgcgcagcccggcggguacuacaacggcacccgcggggaccggaacaagcugcgccaccucaucagcgugaagcugggcaagaucccgacggucgagaacuccaucuuccacauggccgccuggagcggguccgccugccacgacggcaaggaguggaccuacaucggcguggacgggcccgacaacaacgcccugcucaaggugaaguacggcgaggcguacaccgacaccuaccacagcuacgccaacaacauccugcggacgcaggaguccgccugcaacugcaucgggggcaacugcuaccugaugaucaccgacggcagcgccagcggggucuccgagugccgcuuccucaagauccgggagggccgcaucaucaaggagaucuuccccaccgggcgggugaagcacaccgaggagugcacgugcggcuucgccagcaacaagaccaucgagugcgcgugccgcgacaaccgguacaccgccaagcgccccuucgugaagcugaacgucgagaccgacacggccgagauccggcugaugugcaccgacaccuaccucgacaccccgcgccccaacgacggguccaucacgggccccugcgagagcgacggcgacaagggguccggcgggaucaagggcggguucgugcaccagcggaugaaguccaagaucggccgcugguacagccggaccaugagccagaccgagcgcaugggcauggggcuguacgugaaguacggcggggaccccugggccgacuccgacgcccuggcguucagcggcgucaugguguccaugaaggagccggggugguacagcuucggcuucgagaucaaggacaagaagugcgacgugcccugcaucggcaucgagaugguccacgacgggggcaaggagaccuggcacuccgccgccacggccaucuacugccucauggggagcggccagcugcugugggacaccgugaccggcguggacauggcccucugaggacuagucccuguucccagagcccacuuuuuuuucuuuuuuugaaauaaaauagccugucuuucagaucucaaaggcucuuuucagagccaccaaaaaaaaaaaaaaaaaaaaaaaaaaaaaaaaaaaaaaaaaaaaaaaaaaaaaaaaaaaaaaaaaaaaaaaaaaaaaaaaaaaaaaaaaaaaaaaaaaaaa

SEQ ID NO: 14385 - RNA, 1673 nt, Artificial Sequence
  FLUBV/H0N0/B/Washington/02/2019__EPI1368872 neuraminidase mRNA gc (NA)
aggagagucccgcagucggcguccagcggcucugcuuguucgugugugugucguugcaggccuuauucaagcuuaccaugcugcccagcaccauccagacccucacgcuguuccugaccuccggcggggugcuccugagccuguacgucuccgccagccucuccuaccugcuguacagcgacauccuccugaaguucuccccgaccgagaucaccgcccccacgaugccccuggacugcgcgaacgccagcaacgugcaggccgugaaccgcuccgccaccaagggcgucacccuccugcugcccgagccggaguggaccuacccccggcucagcugccccggguccacguuccagaaggcccugcugaucagcccccaccgcuucggcgagaccaaggggaacuccgcgccgcucaucauccgggagcccuucguggccugcggccccaacgagugcaagcacuucgcccugacccacuacgccgcgcagcccggcggguacuacaacggcacccgcggggaccggaacaagcugcgccaccucaucagcgugaagcugggcaagaucccgacggucgagaacuccaucuuccacauggccgccuggagcggguccgccugccacgacggcaaggaguggaccuacaucggcguggacgggcccgacaacaacgcccugcucaaggugaaguacggcgaggcguacaccgacaccuaccacagcuacgccaacaacauccugcggacgcaggaguccgccugcaacugcaucgggggcaacugcuaccugaugaucaccgacggcagcgccagcggggucuccgagugccgcuuccucaagauccgggagggccgcaucaucaaggagaucuuccccaccgggcgggugaagcacaccgaggagugcacgugcggcuucgccagcaacaagaccaucgagugcgcgugccgcgacaaccgguacaccgccaagcgccccuucgugaagcugaacgucgagaccgacacggccgagauccggcugaugugcaccgacaccuaccucgacaccccgcgccccaacgacggguccaucacgggccccugcgagagcgacggcgacaagggguccggcgggaucaagggcggguucgugcaccagcggaugaaguccaagaucggccgcugguacagccggaccaugagcaagaccgagcgcaugggcauggggcuguacgugaaguacggcggggaccccugggccgacuccgacgcccugaccuucagcggcgucaugguguccaugaaggagccggggugguacagcuucggcuucgagaucaaggacaagaagugcgacgugcccugcaucggcaucgagaugguccacgacgggggcaaggagacguggcacuccgcggccaccgccaucuacugccucauggggagcggccagcugcugugggacaccgugaccggcguggacauggcccucugaggacuagucccuguucccagagcccacuuuuuuuucuuuuuuugaaauaaaauagccugucuuucagaucucaaaggcucuuuucagagccaccaaaaaaaaaaaaaaaaaaaaaaaaaaaaaaaaaaaaaaaaaaaaaaaaaaaaaaaaaaaaaaaaaaaaaaaaaaaaaaaaaaaaaaaaaaaaaaaaaaaaa

SEQ ID NO: 14386 - RNA, 1973 nt, Artificial Sequence
  FLUAV/H1N1/A/California/7/2009__ACP41953 hemagglutinin mRNA human (HA)
aggagagucccgcagucggcguccagcggcucugcuuguucgugugugugucguugcaggccuuauucaagcuuaccaugaaggccauccuggugguccuccuuuacaccuucgcuacagcaaacgccgacacucugugcauuggcuaucacgcgaauaacagcacggauaccguugacacaguguuggagaagaauguaacugugacccauuccgucaacuuacuggaagauaagcacaaugggaaacuauguaagcucagaggaguggcuccccugcaucuugguaaaugcaacauagccggcuggauccuggggaauccugagugugaaucuuugucaacagcaaguagcugguccuacauuguugagaccccaucuucggacaacggaacuugcuauccgggcgauuuuaucgacuacgaggagcucagggagcagcugucaagcgugaguuccuucgaacgguuugagauuuuccccaagacaucuagcuggccuaaucacgauuccaacaagggugucaccgccgcuuguccacaugcaggggccaaaucauuuuauaagaaucugaucuggcucgugaaaaagggaaacaguuaccccaaauuaagcaagucuuauauaaaugacaagggcaaagaaguacugguucuuuggggcauccaccacccuuccacgucagcugaucaacagagcuuguaccagaacgccgacgcguacguguucgucgggaguucucgcuauuccaagaaauuuaagccagagauugcaauccgacccaaagugcgugaucaggagggaagaaugaauuacuauuggacucugguggaaccuggugacaagauuaccuucgaggccacaggcaaccuagucguuccaagguacgcuuuugccauggaacggaacgcagggagcggaaucauaauuucggauacuccggugcaugacugcaauaccacaugucaaacccccaaaggcgcuaucaacacgucucucccuuuccagaauauucacccaaucacuaucgguaagugccccaaguauguaaaauccacaaagcugcgccuugccaccgggcugagaaacauuccuucaauacagaguaggggauuguuuggcgcgaucgccggcuucauugaagggggauggacugguaugguggacggcugguacggguaucaucaccagaaugaacaaggaagcggcuacgcagcugaucucaaauccacacagaacgccaucgacgagauaaccaauaaggucaacucugugauugagaaaaugaauacgcaguuuaccgcuguugguaaggaguucaaccaccuggaaaagcggaucgaaaauuuaaacaaaaagguggaugacggguuccuggauaucuggacauacaaugccgagcuccuuguccuguuggaaaacgagcgcacucuagacuaucaugauagcaaugugaaaaaccuguacgagaagguacgaucacagcucaaaaacaaugcaaaggaaauuggcaacggauguuuugaguucuaucacaagugcgacaauaccuguauggaaaguguuaaaaacggcacauacgauuauccaaaguacuccgaggaagccaaacugaauagagaggagaucgacggggugaaacuugaaagcacuaggauuuaucaaauacuggcuaucuacucuaccgucgcgucaaguuuggugcucgucgugagccugggagcaauuuccuuuuggaugugcucuaacgguucguuacagugccggaucuguaucugaggacuagucccuguucccagagcccacuuuuuuuucuuuuuuugaaauaaaauagccugucuuucagaucucaaaggcucuuuucagagccaccaaaaaaaaaaaaaaaaaaaaaaaaaaaaaaaaaaaaaaaaaaaaaaaaaaaaaaaaaaaaaaaaaaaaaaaaaaaaaaaaaaaaaaaaaaaaaaaaaaaaa

SEQ ID NO: 14387 - RNA, 1973 nt, Artificial Sequence
  FLUAV/H1N1/A/Michigan/45/2015__EPI662594 hemagglutinin mRNA human (HA)
aggagagucccgcagucggcguccagcggcucugcuuguucgugugugugucguugcaggccuuauucaagcuuaccaugaaggccauccuggugguccuccuuuacaccuucacaacugcuaacgcagacacgcugugcauuggcuaucacgccaauaacagcaccgauacaguugacacuguguuggagaagaauguaaccgugacacauuccgucaacuuacuggaagauaagcacaaugggaaacuauguaagcucagaggaguggcgccccugcaucuugguaaaugcaacauagcuggcuggauccuggggaauccugagugugaaucuuugucaaccgccaguagcugguccuacauuguugagacuucuaacucggacaauggaacaugcuauccaggcgauuuuaucaacuacgaagaacucagggagcagcugucaagcgugaguuccuucgaacgguuugagauuuucccgaagaccucuagcuggcccaaucacgacuccaacaagggugucacggcagccuguccucaugcuggggcaaaaucauuuuauaagaaucugaucuggcucgugaaaaagggaaacaguuacccaaaauuaaaucaaagcuauauaaacgauaagggcaaggaaguacugguucuuuggggcauccaccaccccucuacuaccgccgaccagcaguccuuguaccagaacgcugaugccuacguguucgucgggacaucacgcuauagcaaaaaguuuaaaccugagauugcgacucgaccaaaggugcgugaccaagagggaagaaugaauuacuauuggacccugguggaacccggugauaaaaucacauucgaggcaaccggcaaccuagucguuccuagguacgccuuuacgauggaacggaaugcugggaguggaauuaucauaucugacacuccagugcaugauugcaacacaaccugucagacuccggagggcgccauuaauacaucccuccccuuccagaacauccacccuauuaccaucgguaagugcccaaaauauguaaagagcacgaagcugcgccuugcaaccgggcugagaaaugugcccucgauccagucuaggggauuguuuggcgcuauugccggcuucauagaagggggauggacagguauggucgacggcugguacggguaucaucaccaaaacgagcagggauccggcuacgcggccgaccucaaaucaacucagaaugcaaucgauaagauuaccaacaaagugaauaguguuaucgagaagaugaacacacaguuuacugcuguggguaaagaguucaaucaccuggagaagcggauagaaaacuuaaauaagaaagucgacgauggguuccuggacauuuggaccuacaacgccgagcuccuugugcuguuggaaaacgagcgcacacuagauuaucaugacagcaauguaaagaaccuguacgagaaaguucgaaaucaacucaagaacaaugcuaaagaaaucggcaacggauguuuugaguucuaucacaagugcgauaauaccuguauggaauccgugaagaacggcacuuacgacuauccuaaauacucugaggaagccaagcugaauagagagaaaaucgauggggucaaacuugagagcacgaggauuuaucagauccuggcaauuuacucaacaguggccaguuccuugguccucgugguuagccugggagcuauaucuuuuuggaugugcucaaacgguaguuuacagugccggaucuguauuugaggacuagucccuguucccagagcccacuuuuuuuucuuuuuuugaaauaaaauagccugucuuucagaucucaaaggcucuuuucagagccaccaaaaaaaaaaaaaaaaaaaaaaaaaaaaaaaaaaaaaaaaaaaaaaaaaaaaaaaaaaaaaaaaaaaaaaaaaaaaaaaaaaaaaaaaaaaaaaaaaaaaa

SEQ ID NO: 14388 - RNA, 1973 nt, Artificial Sequence
  FLUAV/H1N1/A/Netherlands/602/2009__ACQ45338 hemagglutinin mRNA human (HA)
aggagagucccgcagucggcguccagcggcucugcuuguucgugugugugucguugcaggccuuauucaagcuuaccaugaaggccauccuggugguccuccuuuacaccuucgcuacagcaaacgccgacacucugugcauuggcuaucacgcgaauaacagcacggauaccguugacacaguguuggagaaaaauguaacugugacccauuccgucaacuuacuggaagauaagcacaaugggaaacuauguaagcucagaggaguggcuccccugcaucuugguaaaugcaacauagccggcuggauccuggggaauccugagugugaaucuuugucaacagcaaguagcugguccuacauuguugagaccucuucgucagacaacggaacuugcuauccaggcgauuuuaucgacuacgaggagcucagggagcagcugagcaguguguccucuuucgaacgguuugagauuuucccgaagacaagcuccuggcccaaucacgauucaaacaagggugucaccgccgcuuguccucaugcaggggccaaaaguuuuuauaagaaucugaucuggcucgugaaaaagggaaacagcuacccaaaauuaucuaaguccuauauaaaugacaagggcaaagaaguacugguucuuuggggcauccaccaccccucaacgagcgcugaucaacagaguuuguaccagaacgccgacgcguacguguucgucgggucuucccgcuauagcaagaaauuuaagccugagauugcaauccgaccaaaagugcgugaucaggagggaagaaugaauuacuauuggacucugguggaacccggugacaagauuaccuucgaggccacaggcaaccuagucguuccuagguacgcuuuugccauggaacggaacgcagggucgggaaucauaauuucugauacuccagugcaugacugcaauaccacaugucaaaccccgaaaggcgcuaucaacacgucccuccccuuccagaauauucacccuaucacuaucgguaagugcccaaaguauguaaaaucaacaaagcugcgccuugccaccgggcugagaaacgugcccaguauucagagcaggggauuguuuggcgcgauagccggcuucaucgaagggggauggacugguauggucgacggcugguacggguaucaucaccagaaugaacaaggauccggcuacgcagcugaucucaaaucuacacagaacgccauugacgagaucaccaauaaggugaacagcguuauagagaaaaugaauacgcaguuuaccgcuguggguaaggaguucaaccaccuggaaaagcggauugaaaauuuaaacaaaaaggucgaugacggguuccuggauaucuggacauacaaugccgagcuccuugugcuguuggaaaacgagcgcacucuagacuaucaugauucaaauguaaagaaccuguacgagaagguucgaagucagcucaaaaacaaugcaaaggaaaucggcaacggauguuuugaguucuaucacaagugcgacaauaccuguauggaauccgugaaaaacggcacauacgauuauccuaaguacagcgaggaagccaaacugaauagagaggagauugacggggucaaacuugaaucuacuaggaucuaucaaauucuggcuauauacucaaccguggcgaguagcuugguccucgugguuucccugggagcaaucucuuuuuggaugugcucgaacgguagcuuacagugccggauuuguaucugaggacuagucccuguucccagagcccacuuuuuuuucuuuuuuugaaauaaaauagccugucuuucagaucucaaaggcucuuuucagagccaccaaaaaaaaaaaaaaaaaaaaaaaaaaaaaaaaaaaaaaaaaaaaaaaaaaaaaaaaaaaaaaaaaaaaaaaaaaaaaaaaaaaaaaaaaaaaaaaaaaaaa

SEQ ID NO: 14389 - RNA, 1973 nt, Artificial Sequence
  FLUAV/H3N2/A/Hong Kong/4801/2014__EPI643118 hemagglutinin mRNA human (HA)
aggagagucccgcagucggcguccagcggcucugcuuguucgugugugugucguugcaggccuuauucaagcuuaccaugaagaccaucauugcccugagcuacauacucugccuuguguucgcucagaaaauccccggcaacgacaauuccacagcaacucuguguuuggggcaccaugccgucccuaacggaacgauuguuaagaccaucacaaaugauagaauugaggugacuaacgcgaccgaauuaguacaaaauucuucaaucggugagauaugcgacaguccacaccagauccuggauggcgaaaacuguacacuaauugacgcucuccugggggauccgcagugcgacggauuucagaauaaaaagugggaucuuuucguggagaggagcaaagccuauuccaacuguuaccccuaugacgucccugauuacgcaucucugcggucguugguggccucaagcggcacccucgaauuuaauaacgagaguuucaauuggacugguguuacacaaaacgggaccuccucugcuugcauccgccgaagcuccucaaguuucuucagccgucugaauuggcugacgcaucucaacuauaaguacccagcauuaaaugugacuaugcccaacaacgagcaguuugacaagcuguauauuuggggaguccaccauccuggcaccgauaaagaccagaucuucccauacgcccagucuuccggcagaauaauugugucaacaaagaggagccaacaggcuguaauccccaauauugggagucggccucgcaucagagauaucccaucuaggauuuccauauacuggacuaucguuaaaccgggagacauucuuuugaucaacagcaccgguaaucugauagcgccccggggcuauuuuaagcuacgcucggggaaaucuuccauuaugcgaucagacgccccuaucggaaaguguaagagugaaugcaucacaccaaacggcagcauucccaaugauaaaccuuuccagaacgugaauagaaucaccuacggugcauguccaagguaugucaagcacuccacgcucaaacuggccacugggaugcggaacgugcccgagaagcagacacguggaauuuuuggcgcuauagccggcuucaucgaaaaugggugggagggaaugguggacgguugguacggcuuucgccaccaaaacucugaggggagaggacaggcagcugaucuuaaaagcacccaggccgcgauugaccaaaucaauggcaagcugaacagguugaucgguaaaacuaaugaaaaguuccaucagauugagaaggaauuuucagaggucgaagggcggauacaggaucucgagaaauauguugaggacacaaagaucgaucuguggaguuacaacgccgaauuacugguggcacucgagaaucagcacaccauugaccuuacggauuccgaaaugaacaaacuguuugagaagaccaaaaagcaauugcgagaaaacgcugaggacaugggcaauggaugcuucaagaucuaucauaaaugugauaacgccugcauuggcagcauccgcaaugggacauacgaccacaacguauacagagacgaggcucuaaauaacagguuucagauaaagggaguggaacugaaaucugguuauaaggauuggauccucuggauuucauucgccaucaguugcuuucugcuuugugucgcacuguugggcuucauuaugugggccugccagaaagggaauauccgguguaacauaugcauuugaggacuagucccuguucccagagcccacuuuuuuuucuuuuuuugaaauaaaauagccugucuuucagaucucaaaggcucuuuucagagccaccaaaaaaaaaaaaaaaaaaaaaaaaaaaaaaaaaaaaaaaaaaaaaaaaaaaaaaaaaaaaaaaaaaaaaaaaaaaaaaaaaaaaaaaaaaaaaaaaaaaaa

SEQ ID NO: 14390 - RNA, 2030 nt, Artificial Sequence
  FLUBV/H0N0/B/Brisbane/60/2008__FJ766840 hemagglutinin mRNA human (HA)
aggagagucccgcagucggcguccagcggcucugcuuguucgugugugugucguugcaggccuuauucaagcuuaccaugaaggccaucauugugcugcucauggucguuaccagcaacgcugacagaauaugcacaggcaucacuuccucuaauucaccccacgugguaaaaacggcaacccagggggaggugaacgucacaggagugauuccucuuacuaccacaccaaccaagagucauuucgccaaucugaaagguacugaaacaaggggcaaguuguguccgaaaugcuuaaacuguaccgaucuggacguugcgcuagggcggcccaagugcacgggaaagaucccuagcgcucgcguguccauucuccacgagguccgaccagugacuucuggcuguuuucccaucaugcaugaucguaccaaaauaagacaacugccuaaucuucugagggguuacgaacacauccgguugucgacacauaacguaauuaaugccgagaacgcaccagggggacccuauaagaucggcacuucaggcagcugcccuaauauuaccaacgggaauggauucuuugccacaauggcuugggcaguuccgaaaaacgacaagaauaaaaccgccacgaacccacucacuaucgaagugcccuacauauguacagagggugaggaucagauuaccgucuggggcuuccacagugacaaugaaacucagauggcuaagcuguauggggauuccaagccucagaaauuuacaucuagcgccaacggagugaccacgcacuacgugucccaaaucggcgguuucccaaaccagaccgaggacgggggacugccccagucaggccgcauugucguugauuauauggugcagaagaguggcaaaacagggacuaucaccuaccaaagaggaauccucuuaccucagaagguauggugcgcgagcgguaggucuaaagugauuaagggcucccugccacuuauaggggaagcagacuguuugcaugagaaauauggaggccugaauaagucaaagcccuacuacacaggugagcacgccaaagcuaucgggaacugcccgauuugggucaagacuccucuaaaacucgccaauggcaccaaguaucggcccccagcaaaacugcuuaaggaacgcggauuuuucggcgcuaucgccggguuucuggagggagguugggaaggcaugauagcgggguggcauggauacacaagccacggcgcccacgguguggcaguugcugccgauuugaagaguacccaggaggcuauuaacaaaaucacuaagaaucucaacucucuguccgaauuagaggugaaaaaucugcagcgacucagcggggccauggacgagcuucauaacgaaauccuggaguuggaugaaaaggucgacgaccuaagagcagauacgauuucgucucaaaucgagcuggccgugcuccuguccaaugaaggcauuauaaacucagaggacgagcaccuucuggcuuuggaaaggaaacucaagaagaugcugggaccuagugcgguagagaucggcaauggguguuucgaaacaaaacauaagugcaaccagaccugcuuagaucggauugcagccggaacuuuugacgcuggugaguucagccugcccaccuuugauucccuaaauaucacagccgcaucucucaacgacgauggccuggacaaucacaccauccuuuuguauuacagcacugccgcuucaagucuggccguuacacucaugauugcaauauucguggucuauauggugucccgugauaacgucagcuguucuaucugccugugaggacuagucccuguucccagagcccacuuuuuuuucuuuuuuugaaauaaaauagccugucuuucagaucucaaaggcucuuuucagagccaccaaaaaaaaaaaaaaaaaaaaaaaaaaaaaaaaaaaaaaaaaaaaaaaaaaaaaaaaaaaaaaaaaaaaaaaaaaaaaaaaaaaaaaaaaaaaaaaaaaaaa

SEQ ID NO: 14391 - RNA, 2027 nt, Artificial Sequence
  FLUBV/H0N0/B/Phuket/3073/2013__EPI540671 hemagglutinin mRNA human (HA)
aggagagucccgcagucggcguccagcggcucugcuuguucgugugugugucguugcaggccuuauucaagcuuaccaugaaggccaucauugugcugcucauggucguuaccagcaacgcugacagaauaugcacaggcaucacuuccucuaauucaccccacgugguaaaaacggcaacccagggggaagugaacgucacaggagugauuccucuuacuaccacaccaaccaagaguuacuucgccaaucugaaagguacuaggacacggggcaaguuguguccggauugcuuaaacuguaccgaccuggauguugcgcuagggcgccccaugugcgugggaacgacuccuagcgcuaaagccuccauccuccaugaaguccgaccagugaccucuggcuguuuucccauuaugcacgaccguacaaagaucagacaacugccuaaucuucugagggguuaugagaagauacgguugucgacucagaacguaaucgaugcagaaaaagccccagggggacccuaccgccucggcaccucaggcagcugcccuaaugcuacaaguaagauuggguucuuugcaaccauggccugggcuguuccaaaagacaacuauaagaaugccacgaacccgcugacuguggagguccccuacaucuguacagaaggagaggaucagauuaccgugugggguuuccauuccgacaauaaaacucagaugaagucucuguauggcgauagcaacccucaaaaguuuacauccucagcgaauggggugaccacgcacuacgucagucagaucggagacuucccagaucagaccgaggacggcggucucccccagagcgggagaauaguuguggauuauaugaugcaaaaaccuggaaagacaggcacuauuguauaccagaggggcguguuacugccacagaaagucuggugcgcaucugggcgguccaaggugaucaaaggaucacuucccuugauuggugaagccgacugucugcaugaggaauacggcgggcuaaacaagagcaaaccguauuacaccggaaagcacgcuaaggccaucggcaauugcccuaucuggguuaaaacaccccucaagcuggcaaacgguacuaaauaucgcccuccagcuaaacuucugaaggagcgaggguuuuucggcgccauugcgggauuuuuggagggcgggugggaaggaaugauagccgguuggcacggcuacaccagucauggggcacacggaguggcugucgccgcugaccucaagucuacacaggaggccaucaacaagauuaccaaaaaucugaacuccuuaagcgaacuggaggugaagaaucuccaaagacuuucgggcgcaauggaugaacugcauaacgagaucuuggagcuagacgaaaaaguagaugaccugagggccgauacuauaucuucccagauugagcucgcuguucugcuuucaaaugaagguaucaucaacagugaggacgaacaccuguuggcgcucgagcggaagcugaaaaagauguuagggcccagcgcaguggauauuggcaauggauguuucgagacgaagcacaaaugcaaccagacaugccuggaccguaucgccgcuggcaccuuuaaugccggggaguucucccuaccaacuuuugauucucucaacauuaccgcagccagccugaaugacgauggacuugacaaccauacaauauugcuguauuacucaaccgcugccaguucccucgcagucacucugaugcuugcgaucuucauuguguauauggucagccgcgacaaugugucuuguucaaucugccugugaggacuagucccuguucccagagcccacuuuuuuuucuuuuuuugaaauaaaauagccugucuuucagaucucaaaggcucuuuucagagccaccaaaaaaaaaaaaaaaaaaaaaaaaaaaaaaaaaaaaaaaaaaaaaaaaaaaaaaaaaaaaaaaaaaaaaaaaaaaaaaaaaaaaaaaaaaaaaaaaaaaaa

SEQ ID NO: 14392 - RNA, 1967 nt, Artificial Sequence
  FLUAV/H1N1/A/Brisbane/02/2018__EPI1212834 hemagglutinin mRNA human (HA)
aggagagucccgcagucggcguccagcggcucugcuuguucgugugugugucguugcaggccuuauucaagcuuaccaugaaggccauccuggugguccuccuuuacaccuucacaacugcuaacgcagacacgcugugcauuggcuaucacgccaauaacagcaccgauacaguugacacuguguuggagaagaauguaaccgugacacauuccgucaacuuacuggaagauaagcacaaugggaaacuauguaagcucggagguguggcgccccugcaucuuggcaaaugcaacauagcuggguggauccugggaaauccugagugugaaucuuugucaaccgccagaaguuggagcuacauuguugagacuuccaacucugacaauggcacaugcuauccaggugauuuuaucaacuacgaagaacucagggagcagcugucgucagugagcaguuucgaacgguuugagauuuucccgaagaccuccucuuggcccaaucacgacagcaacaagggggucacggcagccuguccucaugcuggagcaaaauccuuuuauaagaaucugaucuggcucgugaaaaagggcaacucauacccaaaauuaaaucaaacuuauauaaacgauaagggcaaggaaguacugguucuuugggggauccaccaucccccuaccacagccgaccagcagaguuuguaccagaacgcugaugccuacguguucgucggaacuagccgcuauucuaaaaaguuuaaaccagagauugcgacccgacccaaggugcgugacagagaggguaggaugaauuacuauuggacacugguggaaccuggcgauaaaaucaccuucgaggcaacggggaaccuagucguuccacgguacgccuuuacuauggaacgcaaugcuggauccggcauuaucauaucagacacaccggugcacgauugcaacaccacuugucaaacagccgagggugcaauuaauaccagccuccccuuccagaacguacacccugugacgaucgggaagugcccaaaauaugucaagaguaccaagcugagacuugcuacaggacugaggaaugugcccucuauucagucccggggcuuguuuggcgccaucgcgggguucaucgaaggagguuggacuggcaugguugacgggugguacggauaucaucaccagaacgagcaaggcagcgguuacgccgcagaccucaaaucgaaugcuauugauaagauaaccaacaaagucaauucugugaucgagaagaugaacacacaguuuacugccguggggaaagaguucaaucaccuggagaagcgcauugaaaacuuaaauaagaaaguagacgauggcuuccuggacaucuggaccuacaacgcugagcuccuuguucuguuggaaaacgagcgaacacuagauuaucaugacuccaaugugaagaaccuguacgagaaagucagaaaucagcucaagaacaaugccaaagaaauaggaaacggcuguuuugaguucuaucacaagugcgauaauaccuguauggaaucagugaagaacgggacuuacgacuauccuaaauacagugaggaagcaaagcugaauagggagaaaauugauggagucaaacuugagagcacgcggaucuaucagauccuggccauuuacuccacaguggcuucuagcuugguucucgugguaucacugggugcgaucaguuuuuggaugugcuccaacggcagcuuacaaugccguauuuguauaugaggacuagucccuguucccagagcccacuuuuuuuucuuuuuuugaaauaaaauagccugucuuucagaucucaaaggcucuuuucagagccaccaaaaaaaaaaaaaaaaaaaaaaaaaaaaaaaaaaaaaaaaaaaaaaaaaaaaaaaaaaaaaaaaaaaaaaaaaaaaaaaaaaaaaaaaaaaaaaaaaaaaa

SEQ ID NO: 14393 - RNA, 1967 nt, Artificial Sequence
  FLUAV/H1N1/A/Brisbane/02/2018__EPI1671767 hemagglutinin mRNA human (HA)
aggagagucccgcagucggcguccagcggcucugcuuguucgugugugugucguugcaggccuuauucaagcuuaccaugaaggccauccuggugguccuccuuuacaccuucacaacugcuaacgcagacacgcugugcauuggcuaucacgccaauaacagcaccgauacaguugacacuguguuggagaagaauguaaccgugacacauuccgucaacuuacuggaagauaagcacaaugggaaacuauguaagcucggagguguggcgccccugcaucuuggcaaaugcaacauagcuggguggauccugggaaauccugagugugaaucuuugucaaccgccagaaguuggagcuacauuguugagacuuccaacucugacaauggcacaugcuauccaggugauuuuaucaacuacgaagaacucagggagcagcugucgucagugagcaguuucgaacgguuugagauuuucccgaagaccuccucuuggcccaaucacgacagcaacaagggggucacggcagccuguccucaugcuggagcaaaauccuuuuauaagaaucugaucuggcucgugaaaaagggcaacucauacccaaaauuaaaucaaacuuauauaaacgauaagggcaaggaaguacugguucuuugggggauccaccaucccccuaccacagccgaccagcagaguuuguaccagaacgcugaugccuacguguucgucggaacuagccgcuauucuaaaaaguuuaaaccagagauugcgacccgacccaaggugcgugaccaagaggguagaaugaauuacuauuggacacugguggaaccuggcgauaaaaucaccuucgaggcaacggggaaccuagucguuccaagguacgccuuuacuauggaacggaaugcuggauccggcauuaucauaucagacacaccggugcacgauugcaacaccacuugucagacagccgagggugcaauuaauaccagccuccccuuccagaacguacacccugugacgaucgggaagugcccaaaauaugucaagaguaccaagcugcgccuugcuacaggacugagaaaugugcccucuauucaguccaggggcuuguuuggcgccaucgcgggguucaucgaaggagguuggacuggcaugguugacgggugguacggauaucaucaccaaaacgagcagggcagcgguuacgccgcagaccucaaaucgaaugcuauugauaagauaaccaacaaagucaauucugugaucgagaagaugaacacacaguuuacugccguggggaaagaguucaaucaccuggagaagcggauugaaaacuuaaauaagaaaguagacgauggcuuccuggacaucuggaccuacaacgcugagcuccuuguucuguuggaaaacgagcgcacacuagauuaucaugacuccaaugugaagaaccuguacgagaaaguccgaaaucagcucaagaacaaugccaaagaaauaggaaacggcuguuuugaguucuaucacaagugcgauaauaccuguauggaaucagugaagaacgggacuuacgacuauccuaaauacagugaggaagcaaagcugaauagagagaaaauugauggagucaaacuugagagcacgaggaucuaucaaauccuggccauuuacuccacaguggcuucuagcuugguucucgugguaucacugggugcgaucaguuuuuggaugugcuccaacggcagcuuacagugccggauuuguauaugaggacuagucccuguucccagagcccacuuuuuuuucuuuuuuugaaauaaaauagccugucuuucagaucucaaaggcucuuuucagagccaccaaaaaaaaaaaaaaaaaaaaaaaaaaaaaaaaaaaaaaaaaaaaaaaaaaaaaaaaaaaaaaaaaaaaaaaaaaaaaaaaaaaaaaaaaaaaaaaaaaaaa

SEQ ID NO: 14394 - RNA, 1967 nt, Artificial Sequence
  FLUAV/H1N1/A/Guangdong-Maonan/SWL1536/2019__EPI1542570 hemagglutinin mRNA human (HA)
aggagagucccgcagucggcguccagcggcucugcuuguucgugugugugucguugcaggccuuauucaagcuuaccaugaaggccauccuggugguccuccuuuacaccuucacaacugcuaacgcagacacgcugugcauuggcuaucacgccaauaacagcaccgauacaguugacacuguguuggagaagaauguaaccgugacacauuccgucaacuuacuggaagauaagcacaaugggaaacuauguaagcucagaggaguggcgccccugcaucuugguaaaugcaacauagcuggcuggauccuggggaauccugagugugaaucuuugucaaccgccaggaguuggagcuacauuguugagacuuccaacucugacaauggaacaugcuauccaggcgauuuuaucaacuacgaggagcuccgggagcagcugucgucagugagcaguuucgaacgcuuugagauuuucccgaagaccuccucuuggcccaaucacgacagcgauaagggugucacggcagccuguccucaugcuggggcaaaauccuuuuauaagaaccugaucuggcucgugaaaaagggaaauucauacccaaaauuaaaccaaacuuauauaaaugacaagggcaaggaaguacugguucuuuggggcauccaccaucccccuaccauugccgcucaggagaguuuguaccagaacgccgaugcguacguguucgucgggacaagccgauauucuaaaaaguuuaaaccagagaucgcaacucgucccaaggugagagaccaggaaggaaggaugaacuacuauuggacccugguggagccuggugauaaaauuacauucgaagccaccggcaaucuagucguuccacgguacgcuuuuacgauggagcgcgacgccggguccggaaucauaauuucagauacuccggugcacgacugcaacacaaccugucaaacucccgaaggcgcaaucaauacaagccucccuuuccagaacguacacccaauuaccaucgguaagugccccaaauaugugaagaguacgaagcugagacuugcuaccgggcugaggaaugucccuucuauccagucccggggauuguuuggcgccauugcgggcuucauagaagggggauggacagguaugguggacggcugguacggguaucaucaccagaacgagcaaggaagcggcuacgccgcagaucucaaaucgaaugcuaucgacaagauuacuaacaaaguuaauucugugaucgaaaagaugaacacccaguuuacagccgucgguaaagaguucaaucaccuggaaaagcgcauagagaacuuaaauaagaaaguggaugacggguuccuggauauuuggacuuacaacgcugaacuccuuguacuguuggagaaugagcgaacccuagacuaucaugauuccaacguuaagaaccuguacgaaaaagugagaaaucagcucaagaacaaugccaaagagaucggcaacggauguuuugaguucuaucacaagugcgacaauacauguauggaaucagucaagaacggcaccuacgauuauccaaaauacagugaagaggcaaagcugaauagggagaaaaucgacggggugaaacuugaaagcacucggauuuaucagauccuggccauuuacuccacggucgcuucuagcuuggugcucguugugucacugggagcgauaaguuuuuggaugugcuccaacgguagcuuacaaugccguaucuguauuugaggacuagucccuguucccagagcccacuuuuuuuucuuuuuuugaaauaaaauagccugucuuucagaucucaaaggcucuuuucagagccaccaaaaaaaaaaaaaaaaaaaaaaaaaaaaaaaaaaaaaaaaaaaaaaaaaaaaaaaaaaaaaaaaaaaaaaaaaaaaaaaaaaaaaaaaaaaaaaaaaaaaa

SEQ ID NO: 14395 - RNA, 1967 nt, Artificial Sequence
  FLUAV/H1N1/A/Guangdong-Maonan/SWL1536/2019__EPI1590725 hemagglutinin mRNA human (HA)
aggagagucccgcagucggcguccagcggcucugcuuguucgugugugugucguugcaggccuuauucaagcuuaccaugaaggccauccuggugguccuccuuuacaccuucacaacugcuaacgcagacacgcugugcauuggcuaucacgccaauaacagcaccgauacaguugacacuguguuggagaagaauguaaccgugacacauuccgucaacuuacuggaagauaagcacaaugggaaacuauguaagcucagaggaguggcgccccugcaucuugguaaaugcaacauagcuggcuggauccuggggaauccugagugugaaucuuugucaaccgccaggaguuggagcuacauuguugagacuuccaacucugacaauggaacaugcuauccaggcgauuuuaucaacuacgaggagcuccgggagcagcugucgucagugagcaguuucgaacgcuuugagauuuucccgaagaccuccucuuggcccaaucacgacagcgauaagggugucacggcagccuguccucaugcuggggcaaaauccuuuuauaagaaccugaucuggcucgugaaaaagggaaauucauacccaaaauuaaaccaaacuuauauaaaugacaagggcaaggaaguacugguucuuuggggcauccaccaucccccuaccauugccgugcaggagaguuuguaccagaacgcugaugccuacgucuucguggggacaagccgauauucuaaaaaguuuaaaccagagaucgcgacucgucccaaggugagagaccaggaaggaaggaugaacuacuauuggacccuggucgagccuggugauaaaauuacauucgaagcaaccggcaaucuaguugugccacgguacgccuuuacgauggagcgcgacgcuggguccggaaucauaauuucagauacuccgguacacgacugcaacacaaccugucaaacucccgaaggcgccaucaauacaagccucccuuuccagaacgugcacccaauuaccaucgguaagugccccaaauaugucaagaguacgaagcugagacuugcaaccgggcugaggaaugugccuucuauccagucccggggauuguuuggcgcuauugccggcuucauagaagggggauggacagguaugguugacggcugguacggguaucaucaccagaacgagcaaggaagcggcuacgcggccgaucucaaaucgaaugcaaucgacaagauuacuaacaaagucaauucugugaucgaaaagaugaacacccaguuuacagcuguggguaaagaguucaaucaccuggaaaagcgcauagagaacuuaaauaagaaaguagaugacggguuccuggauauuuggacuuacaacgccgaacuccuuguucuguuggagaaugagcgaacccuagacuaucaugauuccaacgugaagaaccuguacgaaaaagucagaaaucagcucaagaacaaugcuaaagagaucggcaacggauguuuugaguucuaucacaagugcgacaauacauguauggaaucagugaagaacggcaccuacgauuauccaaaauacagugaagaggccaagcugaauagggagaaaaucgacggggucaaacuugaaagcacucggauuuaucagauccuggcaauuuacuccacgguggccucuagcuugguucucgugguaucacugggagcuauaaguuuuuggaugugcuccaacgguagcuuacaaugccguaucuguauuugaggacuagucccuguucccagagcccacuuuuuuuucuuuuuuugaaauaaaauagccugucuuucagaucucaaaggcucuuuucagagccaccaaaaaaaaaaaaaaaaaaaaaaaaaaaaaaaaaaaaaaaaaaaaaaaaaaaaaaaaaaaaaaaaaaaaaaaaaaaaaaaaaaaaaaaaaaaaaaaaaaaaa

SEQ ID NO: 14396 - RNA, 1973 nt, Artificial Sequence
  FLUAV/H3N2/A/Singapore/INFIMH-16-0019/2016__EPI1106227 hemagglutinin mRNA human (HA)
aggagagucccgcagucggcguccagcggcucugcuuguucgugugugugucguugcaggccuuauucaagcuuaccaugaagaccaucauugcccugagcuacauacucugccuuguguucgcucagaaaauccccggcaacgacaauuccacagcaacucuguguuuggggcaccaugccgucccuaacggaacgauuguuaagaccaucacaaaugauagaauugaggugacuaacgcgaccgaauuaguacaaaauucuucaaucggugagauaugcgacaguccacaccagauccuggauggcgaaaacuguacacuaauugacgcucuccugggggauccgcagugcgacggauuucagaauaaaaagugggaucuuuucguggagaggagcaaagccuauuccaacuguuaccccuaugacgucccugauuacgcaucucugcggucguugguggccucaagcggcacccucgaauuuaagaaugagaguuucaacuggacugguguuacacaaaaugggaccuccucugcuugcauccgcggaagcuccucaaguuucuucagccgacugaacuggcugacgcaucucaauuauacuuacccagcauuaaacgugaccaugcccaauaaggagcaguuugacaaacuguauauuuggggcguccaccauccuggcacagauaaggaccagaucuuccuuuacgcccagucuuccgggcguauaacugugucaaccaaaagaagccaacaggcuguaauuccaaacaucggaaguaggccccggauucgcgauaucccuucuagaaucuccauuuacuggacaauaguuaagccaggugacaucuugcugauuaacagcaccggcaaucuaaucgccccgaggggguauuuuaaaauacggucgggaaagucuuccauuaugcgcucagacgcgcccaucggcaaguguaaaagugaaugcaucacgccuaacgguagcauuccaaaugauaagcccuuccagaacgugaaucgaaucacuuacggggcauguccuagauaugucaaacacuccacacucaagcuggccaccggaaugaggaacgugccagagaaacagacucggggcauuuuuggcgcuauagccggguucaucgaaaauggaugggaggguaugguggacggcugguacggguuucgucaccaaaacucugagggacgcggccaggcagcugaucuuaagagcacacaggccgcgauugaccaaaucaaugguaaacugaacagauugaucgggaagaccaaugaaaaguuccaucagauugagaaagaauuuucagaggucgaaggcaggguucaggaucucgagaaguauguggaggacacgaaaauagaucuguggaguuacaacgccgaauuacugguagcacucgagaaucagcacaccaucgaccuuacagauuccgaaaugaacaagcuguuugagaaaacuaagaagcaauugcgggaaaaugcugaggacaugggaaacggcugcuucaaaauuuaucauaagugugauaacgccugcaucgagagcauucgaaaugaaaccuacgaccacaacguguaccgcgacgaggcucuaaauaacagauuucagaucaaaggggucgaacugaagucuggauauaaagauuggauacucuggaucucauucgccauuaguugcuuucugcuuuguguggcacuguuggguuucaucaugugggccugccagaagggcaauauuagguguaacaucugcauaugaggacuagucccuguucccagagcccacuuuuuuuucuuuuuuugaaauaaaauagccugucuuucagaucucaaaggcucuuuucagagccaccaaaaaaaaaaaaaaaaaaaaaaaaaaaaaaaaaaaaaaaaaaaaaaaaaaaaaaaaaaaaaaaaaaaaaaaaaaaaaaaaaaaaaaaaaaaaaaaaaaaaa

SEQ ID NO: 14397 - RNA, 1973 nt, Artificial Sequence
  FLUAV/H3N2/A/Singapore/INFIMH-16-0019/2016__EPI1341068 hemagglutinin mRNA human (HA)
aggagagucccgcagucggcguccagcggcucugcuuguucgugugugugucguugcaggccuuauucaagcuuaccaugaagaccaucauugcccugagcuacauacucugccuuguguucgcucagaaaauccccggcaacgacaauuccacagcaacucuguguuuggggcaccaugccgucccuaacggaacgauuguuaagaccaucacaaaugauagaauugaggugacuaacgcgaccgaauuaguacaaaauucuucaaucggugagauaugcgacaguccacaccagauccuggauggcgaaaacuguacacuaauugacgcucuccugggggauccgcagugcgacggauuucagaauaaaaagugggaucuuuucguggagaggagcaaagccuauuccaacuguuaccccuaugacgucccugauuacgcaucucugcggucguugguggccucaagcggcacccucgaauuuaagaaugagaguuucaacuggacugguguuacacaaaaugggaccuccucugcuugcauccgcggaagcuccucaaguuucuucagccgacugaacuggcugacgcaucucaauuauaaguacccagcauuaaacgugacuaugcccaauaaagagcaguuugacaagcuguauauuuggggcguccaccauccuggcaccgauaaagaccagaucuucccauacgcccagucuuccgggcguauaacagugucaacuaagagaagccaacaggcuguaauucccaacaucggaaguaggccucggauucgcgguaucccaucuagaaucuccauuuacuggaccauaguuaaaccgggcgauauccuuuugauuaacagcacagggaaucugaucgcccccaggggauauuuuaagauacggucgggcaagucuuccauuaugcgcucagacgcgccuaucgguaaauguaagagugaaugcaucaccccaaacgggagcauucccaaugacaaaccuuuccagaacgugaaucgaaucacguacggagcauguccaagauaugucaagcacuccacucuaaaacucgccacaggcaugaggaacgugcccgagaagcagacccggggcauuuuuggggcuauagccggauucaucgaaaaugguugggagggcaugguggaugggugguacggauuucgucaccaaaacucugagggccgcggucaggcagcugaccugaaaagcacucaggccgcgauugaucaaaucaaugggaaacuuaacagacugaucggcaagacaaaugaaaaguuccaucagauugagaaggaauuuucagaggucgaaggaaggguucaggacuuggagaaauauguggaggauaccaagauagaccucuggaguuacaacgccgaacuguuaguagcacuggagaaucagcacacgaucgaucucaccgacuccgaaaugaacaaacuuuuugagaagacaaagaaacaacugcgggaaaaugcugaggauaugggcaacgggugcuucaagauuuaucauaaaugugacaacgccugcaucgagagcauucgaaaugaaacuuacgaucacaacguguaccgcgacgaggcuuugaauaacagauuucagaucaagggagucgaacuaaaaucugguuauaaggacuggauacuguggaucucauucgccauuaguugcuuucuccuguguguggcacuucugggcuucaucaugugggccugccagaaggggaauauuagguguaacaucugcauaugaggacuagucccuguucccagagcccacuuuuuuuucuuuuuuugaaauaaaauagccugucuuucagaucucaaaggcucuuuucagagccaccaaaaaaaaaaaaaaaaaaaaaaaaaaaaaaaaaaaaaaaaaaaaaaaaaaaaaaaaaaaaaaaaaaaaaaaaaaaaaaaaaaaaaaaaaaaaaaaaaaaaa

SEQ ID NO: 14398 - RNA, 1973 nt, Artificial Sequence
  FLUAV/H3N2/A/Singapore/INFIMH-16-0019/2016 NYMC-X-307__EPI1259099 hemagglutinin mRNA human (HA)
aggagagucccgcagucggcguccagcggcucugcuuguucgugugugugucguugcaggccuuauucaagcuuaccaugaagaccaucauugcccugagcuacauacucugccuuguguucgcucagaaaauccccggcaacgacaauuccacagcaacucuguguuuggggcaccaugccgucccuaacggaacgauuguuaagaccaucacaaaugauagaauugaggugacuaacgcgaccgaauuaguacaaaauucuucaaucggugagauaugcgacaguccacaccagauccuggauggcgaaaacuguacacuaauugacgcucuccugggggauccgcagugcgacggauuucagaauaaaaagugggaucuuuucguggagaggagcaaagccuauuccaacuguuaccccuaugacgucccugauuacgcaucucugcggucguugguggccucaagcggcacccucgaauuuaagaaugagaguuucaacuggacugguguuacacaaaaugggaccuccucugcuugcauccgcggaagcuccucaaguuucuucagccgacugaacuggcugacgcaucucaauuauaaguacccagcauuaaacgugacuaugcccaauaaagagcaguuugacaagcuguauauuuggggcguccaccauccuggcaccgauaaagaccagaucuucccauacgcccagucuuccgggcguauaacagugucaacuaagagaagccaacaggcuguaauucccaacaucggaaguaggccucggauucgcgguaucccaucuagaaucuccauuuacuggaccauaguuaaaccgggcgauauccuuuugauuaacagcacagggaaucugaucgcccccaggggauauuuuaagauacggucgggcaagucuuccauuaugcgcucagacgcgccuaucgguaaauguaagagugaaugcaucaccccaaacgggagcauucccaaugacaaaccuuuccagaacgugaauaagaucacguacggagcauguccacgauaugucaaacacuccacucuaaagcucgccacaggcaugagaaacgugcccgagaaacagaccaggggcauuuuuggggcuauagccggauucaucgaaaaugguugggagggcaugguggaugggugguacggauuucggcaccaaaacucugagggccguggucaggcagcugaccuuaagagcacucaggccgcgauugaucaaaucaaugggaagcugaaccgccugaucggcaaaacaaaugaaaaguuccaucagauugagaaagaauuuucagaggucgaaggaagaguucaggacuuggagaaguauguggaggauaccaaaauagaccucuggaguuacaacgccgaacuguuaguagcacuggagaaucagcacacgaucgaucucaccgacuccgaaaugaacaaacuuuuugagaagacaaagaagcaacugagggaaaaugcugaggauaugggcaacgggugcuucaaaauuuaucauaagugugacaacgccugcaucgagagcauucggaaugaaacuuacgaucacaacguguaccgagacgaggcuuugaauaaccgcuuucagaucaaaggagucgaacuaaagucugguuauaaggacuggauacuguggaucucauucgccauuaguugcuuucuccuguguguggcacuucugggcuucaucaugugggccugccagaaagggaauauuagauguaacaucugcauaugaggacuagucccuguucccagagcccacuuuuuuuucuuuuuuugaaauaaaauagccugucuuucagaucucaaaggcucuuuucagagccaccaaaaaaaaaaaaaaaaaaaaaaaaaaaaaaaaaaaaaaaaaaaaaaaaaaaaaaaaaaaaaaaaaaaaaaaaaaaaaaaaaaaaaaaaaaaaaaaaaaaaa

SEQ ID NO: 14399 - RNA, 1973 nt, Artificial Sequence
  FLUAV/H3N2/A/Singapore/INFIMH-16-0019/2016-CDC-LV18A__EPI1583318 hemagglutinin mRNA human (HA)
aggagagucccgcagucggcguccagcggcucugcuuguucgugugugugucguugcaggccuuauucaagcuuaccaugaagaccaucauugcccugagcuacauacucugccuuguguucgcucagaaaauccccggcaacgacaauuccacagcaacucuguguuuggggcaccaugccgucccuaacggaacgauuguuaagaccaucacaaaugauagaauugaggugacuaacgcgaccgaauuaguacaaaauucuucaaucggugagauaugcgacaguccacaccagauccuggauggcgaaaacuguacacuaauugacgcucuccugggggauccgcagugcgacggauuucagaauaaaaagugggaucuuuucguggagaggagcaaagccuauuccaacuguuaccccuaugacgucccugauuacgcaucucugcggucguugguggccucaagcggcacccucgaauuuaagaaugagaguuucaacuggacugguguuacacaaaaugggaccuccucugcuugcauccgcggaagcuccucaaguuucuucagccgacugaacuggcugacgcaucucaauuauaaguacccagcauuaaacgugacuaugcccaauaaagagcaguuugacaagcuguauauuuggggcguccaccauccuggcaccgauaaagaccagaucuucccauacgcccagucuuccgggcguauaauugugucaacaaagagaagccaacaggcuguaauccccaacauuggaaguaggccucggauccgcgauaucccaucuagaauuuccauauacuggacuaucguuaaaccgggugacauucuuuugaucaacagcaccggcaaucugauagcccccaggggguauuuuaagauucggucgggaaagucuuccaucaugcgcucagacgcgccuaucggcaaauguaagagugaaugcauuacaccaaacgguagcauccccaaugauaaaccuuuccagaacgugaaucgaauuaccuacggggcauguccaagauaugucaagcacuccacgcuaaaacucgccacuggaaugaggaacgugcccgagaagcagacacggggcauauuuggcgcuaucgccggguucauugaaaauggaugggaggguaugguggacggcugguacggguuucgucaccaaaacucugagggacgcggccaggcagcugaucugaaaagcacccaggccgcgaucgaccaaaucaaugguaaacuuaacagacugauugggaagacuaaugaaaaguuccaucagauagagaaggaauuuucagaggucgaaggcaggguucaggauuuggagaaauauguggaggacacaaagaucgaucucuggaguuacaacgccgaacuguuaguagcacuggagaaucagcacaccauugaccucacggauuccgaaaugaacaaacuuuuugagaagaccaagaaacaacugcgggaaaaugcugaggacaugggaaacggcugcuucaagaucuaucauaaaugugauaacgccugcauugagagcauccgaaaugaaacauacgaccacaacguguaccgcgacgaggcuuugaauaacagauuucagauaaagggggucgaacuaaaaucuggauauaaggauuggauccuguggauuucauucgccaucaguugcuuucuccuguguguggcacuucuggguuucauuaugugggccugccagaagggcaauaucagguguaacauaugcauuugaggacuagucccuguucccagagcccacuuuuuuuucuuuuuuugaaauaaaauagccugucuuucagaucucaaaggcucuuuucagagccaccaaaaaaaaaaaaaaaaaaaaaaaaaaaaaaaaaaaaaaaaaaaaaaaaaaaaaaaaaaaaaaaaaaaaaaaaaaaaaaaaaaaaaaaaaaaaaaaaaaaaa

SEQ ID NO: 14400 - RNA, 1973 nt, Artificial Sequence
  FLUAV/H3N2/A/Kansas/14/2017__EPI1146345 hemagglutinin mRNA human (HA)
aggagagucccgcagucggcguccagcggcucugcuuguucgugugugugucguugcaggccuuauucaagcuuaccaugaagaccaucauugcccugagcugcauacucugucuuguguucgcucagaaaauccccggcaacgacaauuccacagcaacucugugcuuggggcaccaugccgucccuaacggaacgauuguuaagaccaucacaaaugauagaauugaggugacuaacgcgaccgaauuaguacaaaauucuucaaucggugagauaugugacaguccacaccagauccuggauggcgaaaacugcacacuaauugacgcucuccugggggauccgcagugugacggauuucagaauaaaaagugggaucuuuucguggagaggaacaaagccuacagcaauugcuaucccuacgacgucccugauuaugcaucccugcggucuuugguggccucgucaggcacccucgaauuuaacaaugagagcuucaacugggcugguguuacucaaaaugggacaaguuccucuuguauccgcggaagcaaguccucauuuuucagucgacugaacuggcugacccaucucaauagcaaguacccagcauuaaacgugacgaugcccaacaaugagcaguuugacaaacuguauauuuggggcguccaccauccuggcacugauaaggaccagaucucucuuuacgcccaguccucagggcguauaaccgugagcacaaaaagaagucaacaggcuguaauuccaaacaucggaucuaggccccggauucgcgauaucccuuccagaaucagcauuuauuggacuauaguuaagccaggugacaucuugcugauuaauucgaccggcaaccuaaucgccccgaggggguacuucaaaauacggucuggaaaguccucaauuaugcgcagugacgcgcccaucggcaagugcaaaagcgaauguaucacaccuaaugguuccauuccaaacgauaagcccuuucagaaugugaaccgaaucaccuacggggcaugcccuagauaugucaaacagucuacgcucaagcuggccacuggaaugaggaaugugccagagcggcaaacacguggcauuuucggcgcuauagccggguuuaucgaaaacggaugggaggguaugguggacggcugguacggguuccgccaccagaauagcgagggaagaggccaggcagcugaucuuaaaucaacccaagccgcgauugaccagaucaacgguaagcugaauagguugaucgggaaaacuaacgaaaaguuucaccagauugagaaggaguucagugaagucgaaggccggauacaggaucucgagaaauauguugaggacacaaagaucgaucugugguccuacaaugccgaauuacugguggcacucgagaaccaacauaccauugaccuuacggauagcgaaaugaacaaacuguucgagaagaccaaaaagcaguugcgagaaaaugcugaggacaugggaaacggcuguuuuaagaucuaucacaaaugcgauaaugccugcauggggucuauucgcaacggaacauacgaccauaauguauauagagacgaggcucuaaacaauagguuccagaucaaggguguggaacugaaaucaggcuacaaggauuggauacucuggaucaguuuugccauuagcuguuuccugcuuugcgucgcacuguugggguuuaucaugugggccugucagaaaggaaacauucggugcaauaucuguauaugaggacuagucccuguucccagagcccacuuuuuuuucuuuuuuugaaauaaaauagccugucuuucagaucucaaaggcucuuuucagagccaccaaaaaaaaaaaaaaaaaaaaaaaaaaaaaaaaaaaaaaaaaaaaaaaaaaaaaaaaaaaaaaaaaaaaaaaaaaaaaaaaaaaaaaaaaaaaaaaaaaaaa

SEQ ID NO: 14401 - RNA, 1973 nt, Artificial Sequence
  FLUAV/H3N2/A/Kansas/14/2017__EPI1261067 hemagglutinin mRNA human (HA)
aggagagucccgcagucggcguccagcggcucugcuuguucgugugugugucguugcaggccuuauucaagcuuaccaugaagaccaucauugcccugagcugcauacucugucuuguguucgcucagaaaauccccggcaacgacaauuccacagcaacucugugcuuggggcaccaugccgucccuaacggaacgauuguuaagaccaucacaaaugauagaauugaggugacuaacgcgaccgaauuaguacaaaauucuucaaucggugagauaugugacaguccacaccagauccuggauggcgaaaacugcacacuaauugacgcucuccugggggauccgcagugugacggauuucagaauaaaaagugggaucuuuucguggagaggaacaaagccuacagcaauugcuaucccuacgacgucccugauuaugcaucccugcggucuuugguggccucgucaggcacccucgaauuuaacaaugagagcuucaacugggcugguguuacucaaaaugggacaaguuccucuuguauccgcggaagcaaguccucauuuuucagucgacugaacuggcugacccaucucaauagcaaguacccagcauuaaacgugacgaugcccaacaaugagcaguuugacaaacuguauauuuggggcguccaccauccuggcacugauaagaaccagaucucucuuuacgcccaguccucagggcguauaaccgugagcacaaaaagaagucaacaggcuguaauuccaaauaucggaucuaggccccggauucgcgacaucccuuccagaaucagcauuuauuggacuauaguuaagccaggugauaucuugcugauuaccucgacaggcaaccuaaucgccccgaggggguacuucaaaauacggucuggaaaguccucaauuaugcgcagugacgcgcccaucggcaagugcaaaagcgaauguaucaccccuaaugguuccauuccaaacgacaagcccuuucagaaugugaaccgaaucacguacggggcaugcccuagauaugucaaacagucuacucucaagcuggccacaggaaugaggaaugugccagagcggcaaacccguggcauuuucggcgcuauagccggguuuaucgaaaacggaugggaggguaugguggauggcugguacggguuccgccaccagaauagcgagggaagaggccaggcagcugaccuuaaaucaacucaagccgcgauugaucagaucaacgguaagcugaauagguugaucgggaaaacaaacgaaaaguuucaccagauugagaaggaguucagugaagucgaaggccggauacaggaccucgagaaauauguugaggauaccaagaucgaccugugguccuacaaugccgaauuacugguggcacucgagaaccaacauacgauugaucuuaccgacagcgaaaugaacaaacuguucgagaagacuaaaaagcaguugcgagaaaaugcugaggauaugggaaacggcuguuuuaagaucuaucacaaaugcgacaaugccugcauggggucuauucgcaacggaacauacgaucauaauguauauagagacgaggcucuaaacaauagguuccagaucaaggguguggaacugaaaucaggcuacaaggacuggauacucuggaucaguuuugccauuagcuguuuccugcuuugcgucgcacuguugggguuuaucaugugggccugucagaaaggaaacauucggugcaauaucuguauaugaggacuagucccuguucccagagcccacuuuuuuuucuuuuuuugaaauaaaauagccugucuuucagaucucaaaggcucuuuucagagccaccaaaaaaaaaaaaaaaaaaaaaaaaaaaaaaaaaaaaaaaaaaaaaaaaaaaaaaaaaaaaaaaaaaaaaaaaaaaaaaaaaaaaaaaaaaaaaaaaaaaaa

SEQ ID NO: 14402 - RNA, 1973 nt, Artificial Sequence
  FLUAV/H3N2/A/Kansas/14/2017__EPI1691978 hemagglutinin mRNA human (HA)
aggagagucccgcagucggcguccagcggcucugcuuguucgugugugugucguugcaggccuuauucaagcuuaccaugaagaccaucauugcccugagcugcauacucugucuuguguucgcucagaaaauccccggcaacgacaauuccacagcaacucugugcuuggggcaccaugccgucccuaacggaacgauuguuaagaccaucacaaaugauagaauugaggugacuaacgcgaccgaauuaguacaaaauucuucaaucggugagauaugugacaguccacaccagauccuggauggcgaaaacugcacacuaauugacgcucuccugggggauccgcagugugacggauuucagaauaaaaagugggaucuuuucguggagaggaacaaagccuacagcaauugcuaucccuacgacgucccugauuaugcaucccugcggucuuugguggccucgucaggcacccucgaauuuaacaaugagagcuucaacugggcugguguuacucaaaaugggacaaguuccucuuguauccgcggaagcaaguccucauuuuucagucgacugaacuggcugacccaucucaauagcaaguacccagcauuaaacgugacgaugcccaacaaugagcaguuugacaaacuguauauuuggggcguccaccauccugugacugauaagaaccagaucucucuuuacgcccaguccucaggccguauaaccguaagcacaaaaagaagucaacaggcuguuauuccaaauaucggguauaggccccggauucgcgacaucccuucuagaaucuccauuuacuggacuauagugaagccaggagauaucuugcugauuaacagcaccgguaaucuaaucgccccgaggggcuacuucaaaauacggucggggaagucuuccauuaugcgcucagacgcgcccaucggaaagugcaaaagugaauguaucacaccuaacggcagcauuccaaaugacaagcccuuucagaacgucaaucgaaucaccuauggugcaugcccuagauacgugaaacaguccacgcucaagcuggccacugggaugaggaacgugccagagcggcaaacacguggaauuuucggcgcuauagccggcuuuaucgaaaaugggugggagggaauggucgaugguugguauggcuuccgccaccagaacucugaggggagaggacaggcagcugaccuuaaaagcacccaagccgcgauugaucagaucaauggcaagcugaacagguugaucgguaaaacuaaugaaaaguuucaccagauugagaaggaguucucagaaguugaagggcggauacaggaccucgagaaauacguggaggauacaaagaucgaccuguggaguuauaacgccgaauuacugguagcacucgagaaccaacauaccauugaucuuacggacuccgaaaugaauaaacuguucgagaagaccaaaaagcaguugcgagaaaacgcugaggauaugggcaauggauguuuuaagaucuaccacaaaugcgacaacgccugcaugggcagcauucgcaaugggacauaugaucauaacguguacagagacgaggcucuaaauaacagguuccagaucaagggagucgaacugaaaucugguuacaaggacuggauacucuggaucucauuugccauuaguuguuuccugcuuugcguggcacuguugggcuuuaucaugugggccugucagaaagggaauauucggugcaacaucuguauaugaggacuagucccuguucccagagcccacuuuuuuuucuuuuuuugaaauaaaauagccugucuuucagaucucaaaggcucuuuucagagccaccaaaaaaaaaaaaaaaaaaaaaaaaaaaaaaaaaaaaaaaaaaaaaaaaaaaaaaaaaaaaaaaaaaaaaaaaaaaaaaaaaaaaaaaaaaaaaaaaaaaaa

SEQ ID NO: 14403 - RNA, 1973 nt, Artificial Sequence
  FLUAV/H3N2/A/Kansas/14/2017 CBER-22B CDC19A__EPI1388416 hemagglutinin mRNA human (HA)
aggagagucccgcagucggcguccagcggcucugcuuguucgugugugugucguugcaggccuuauucaagcuuaccaugaagaccaucauugcccugagcugcauacucugucuuguguucgcucagaaaauccccggcaacgacaauuccacagcaacucugugcuuggggcaccaugccgucccuaacggaacgauuguuaagaccaucacaaaugauagaauugaggugacuaacgcgaccgaauuaguacaaaauucuucaaucggugagauaugugacaguccacaccagauccuggauggcgaaaacugcacacuaauugacgcucuccugggggauccgcagugugacggauuucagaauaaaaagugggaucuuuucguggagaggaacaaagccuacagcaauugcuaucccuacgacgucccugauuaugcaucccugcggucuuugguggccucgucaggcacccucgaauuuaacaaugagagcuucaacugggcugguguuacucaaaaugggacaaguuccucuuguauccgcggaagcaaguccucauuuuucagucgacugaacuggcugacccaucucaauagcaaguacccagcauuaaacgugacgaugcccaacaaugagcaguuugacaaacuguauauuuggggcguccaccauccugugacugauaagaaccagaucucucuuuacgcccaguccucaggccguauaaccguaagcacaaaaagaagucaacaggcuguuauuccaaauaucggguauaggccccggauucgcgacaucccuucuagaaucuccauuuacuggacuauagugaagccaggagauaucuugcugauuaacagcaccgguaaucuaaucgccccgaggggcuacuucaaaauacggucggggaagucuuccauuaugcgcucagacgcgcccaucggaaagugcaaaagugaauguaucacaccuaacggcagcauuccaaaugacaagcccuuucagaacgucaaucgaaucaccuauggugcaugcccuagauacgugaaacaguccacgcucaagcuggccacugggaugaggaacgugccagagcggcaaacacguggaauuuucggcgcuauagccggcuuuaucgaaaaugggugggagggaauggucgaugguugguauggcuuccgccaccagaacucugaggggagaggacaggcagcugaccuuaaaagcacccaagccgcgauugaucagaucaauggcaagcugaacagguugaucgguaaaacuaaugaaaaguuucaccagauugagaaggaguucucagaaguugaagggcggauacaggaccucgagaaauacguggaggauacaaagaucgaccuguggaguuauaacgccgaauuacugguagcacucgagaaccaacauaccauugaucuuacggacuccgaaaugaauaaacuguucgagaagaccaaaaagcaguugcgagaaaacgcugaggauaugggcaauggauguuuuaagaucuaccacaaaugcgacaacgccugcauuggcagcauccgcaaugggacauaugaucauaacguguacagagacgaggcucuaaauaacagguuccagauaaagggagucgaacugaaaucugguuacaaggacuggauccucuggauuucauuugccaucaguuguuuccugcuuugcguggcacuguugggcuuuauuaugugggccugucagaaagggaauauccggugcaacauauguauuugaggacuagucccuguucccagagcccacuuuuuuuucuuuuuuugaaauaaaauagccugucuuucagaucucaaaggcucuuuucagagccaccaaaaaaaaaaaaaaaaaaaaaaaaaaaaaaaaaaaaaaaaaaaaaaaaaaaaaaaaaaaaaaaaaaaaaaaaaaaaaaaaaaaaaaaaaaaaaaaaaaaaa

SEQ ID NO: 14404 - RNA, 1973 nt, Artificial Sequence
  FLUAV/H3N2/A/Switzerland/8060/2017__EPI1154878 hemagglutinin mRNA human (HA)
aggagagucccgcagucggcguccagcggcucugcuuguucgugugugugucguugcaggccuuauucaagcuuaccaugaagaccaucauugcccugagcuacauacucugccuuguguucgcucagaaaauccccggcaacgacaauuccacagcaacucuguguuuggggcaccaugccgucccuaacggaacgauuguuaagaccaucacaaaugauagaauugaggugacuaacgcgaccgaauuaguacaaaauucuucaaucggugagauaugcgacaguccacaccagauccuggauggcgaaaacuguacacuaauugacgcucuccugggggauccgcagugcgacggauuucagaauaaaaagugggaucuuuucguggagaggagcaaagccuauuccucuuguuaccccuaugacgucccugauuacgcaucgcugcggucauugguggccagcaguggcacccucgaauuuaacaaugaguccuucaacuggacugguguuaagcaaaaugggacaucuagcgcuugcauccgcaaguccucaaguagcuuuuucucucgacugaacuggcugacccaucucaauuauacguacccagcauuaaacgugacuaugcccaauaacgagcaguuugacaaacuguauauuuggggaguccaccauccuggcaccgauaaggaccagaucuuccuuuacgcccaguccucaggccguauaacagugagcacuaaaagaagucaacaggcuguaauuccaaacaucgggucuaggccccggauucgcgauaucccuuccagaaucagcauuuacuggaccauaguuaagccaggagacaucuugcugauuaauucgacagguaaccuaaucgccccgaggggcuauuuuaaaauacagucugggaaguccucaauuaugcggagugacgcgcccaucggaaaguguaaaagcgaaugcaucaccccuaauggcuccauuccaaacgauaagcccuuccagaaugugaaccgcaucacguacggugcauguccucgauaugucaaacacucuacucucaagcuggccacagggaugagaaaugugccagagaaacaaaccaggggaauuuuuggcgcuauagccggcuucaucgaaaacgggugggagggaaugguggacgguugguacggcuuucggcaccagaauagcgaggggcguggacaggcagcugaucuuaagucaacucaagccgcgauugaccagaucaacggcaaacugaaucgcuugaucgguaagacaaacgaaaaguuccaucagauugagaaagaguucagugaagucgaagggagaauacaggaucucgagaaguauguugaggacaccaaaaucgaucugugguccuacaaugccgaauuacugguggcacucgagaaccaacacacgauugaccuuaccgauagcgaaaugaauaagcuguuugagaaaacaaagaagcaguugagggaaaacgcugaggacaugggcaacggaugcuucaaaaucuaucauaagugugauaaugccugcauuggcucuauccggaacgggacuuacgaccacaauguauaccgagacgaggcucuaaacaaucgcuuucagauaaaaggaguggaacugaagucagguuauaaagauuggauccucuggauuaguuucgccaucagcugcuuucugcuuugugucgcacuguugggcuucauuaugugggccugccagaaggggaacaucagauguaauauaugcauuugaggacuagucccuguucccagagcccacuuuuuuuucuuuuuuugaaauaaaauagccugucuuucagaucucaaaggcucuuuucagagccaccaaaaaaaaaaaaaaaaaaaaaaaaaaaaaaaaaaaaaaaaaaaaaaaaaaaaaaaaaaaaaaaaaaaaaaaaaaaaaaaaaaaaaaaaaaaaaaaaaaaaa

SEQ ID NO: 14405 - RNA, 1973 nt, Artificial Sequence
  FLUAV/H3N2/A/Switzerland/8060/2017__EPI1266285 hemagglutinin mRNA human (HA)
aggagagucccgcagucggcguccagcggcucugcuuguucgugugugugucguugcaggccuuauucaagcuuaccaugaagaccaucauugcccugagcuacauacucugccuuguguucgcucagaaaauccccggcaacgacaauuccacagcaacucuguguuuggggcaccaugccgucccuaacggaacgauuguuaagaccaucacaaaugauagaauugaggugacuaacgcgaccgaauuaguacaaaauucuucaaucggugagauaugcgacaguccacaccagauccuggauggcgaaaacuguacacuaauugacgcucuccugggggauccgcagugcgacggauuucagaauaaaaagugggaucuuuucguggagaggagcaaagccuauuccucuuguuaccccuaugacgucccugauuacgcaucgcugcggucauugguggccagcaguggcacccucgaauuuaacaaugaguccuucaacuggacugguguuaagcaaaaugggacaucuagcgcuugcauccgcaaguccucaaguagcuuuuucucucgacugaacuggcugacccaucucaauuauaaauacccagcauuaaacgugacgaugcccaauaacgagcaguuugacaagcuguauauuuggggaguccaccauccuggcacugauaaagaccagaucuucccauacgcccaguccucaggccguauaaccgugagcacaaagagaagucaacaggcuguaauucccaacaucgggucuaggccucggauucgcgauaucccauccagaaucagcauuuacuggacuauaguuaaaccgggagacauccuuuugauuaauucgaccgguaaccugaucgcccccaggggcuauuuuaagauacagucugggaaguccucaauuaugcggagugacgcgccuaucggaaaauguaagagcgaaugcaucacaccaaauggcuccauucccaacgauaaaccuuuccagaaugugaaccgcaucaccuacggugcauguccacgauaugucaagcacucuacgcuaaaacucgccacugggaugagaaaugugcccgagaagcaaacaaggggaauuuuuggcgcuauagccggcuucaucgaaaacgggugggagggaaugguggacgguugguacggcuuucggcaccagaauagcgaggggcguggacaggcagcugaucugaaaucaacccaagccgcgauugaccagaucaacggcaaacuuaaucgccugaucgguaagacuaacgaaaaguuccaucagauugagaaggaguucagugaagucgaagggagaauacaggauuuggagaaauauguugaggacacaaagaucgaucucugguccuacaaugccgaacuguuaguggcacuggagaaccaacacaccauugaccucacggauagcgaaaugaauaaacuuuuugagaagaccaagaaacagcugagggaaaacgcugaggacaugggcaacggaugcuucaagaucuaucauaaaugugauaaugccugcauuggcucuauccggaacgggacauacgaccacaauguauaccgagacgaggcuuugaacaaucgcuuucagauaaagggaguggaacuaaaaucagguuauaaggauuggauccuguggauuaguuucgccaucagcugcuuucuccugugugucgcacuucugggcuucauuaugugggccugccagaaggggaacaucagauguaauauaugcauuugaggacuagucccuguucccagagcccacuuuuuuuucuuuuuuugaaauaaaauagccugucuuucagaucucaaaggcucuuuucagagccaccaaaaaaaaaaaaaaaaaaaaaaaaaaaaaaaaaaaaaaaaaaaaaaaaaaaaaaaaaaaaaaaaaaaaaaaaaaaaaaaaaaaaaaaaaaaaaaaaaaaaa

SEQ ID NO: 14406 - RNA, 1973 nt, Artificial Sequence
  FLUAV/H3N2/A/Hong Kong/2671/2019__EPI1543098 hemagglutinin mRNA human (HA)
aggagagucccgcagucggcguccagcggcucugcuuguucgugugugugucguugcaggccuuauucaagcuuaccaugaagaccaucauugcccugagcuacauacucugccuuguguucacacagaaaauccccggcaacgacaauuccacugcuacgcuguguuuggggcaccaugcagucccuaacggaaccauuguuaagacaaucacuaaugauagaauugaggugaccaacgccacagaauuaguacaaaauucuucaaucggugagauaugcgacaguccacaccagauccuggauggcgggaacuguacccuaauugacgcgcuccugggagauccgcagugcgacggcuuucagaauaaaaagugggaucuuuucguggaaaggagccgggcuuauuccaacuguuaccccuaugacgucccugauuacgccucucugcgcucguugguggcaucaagcgguacucucgaguuuaaaaaugaaaguuucaacugggccgggguuacacaaaauggaaaguccuuuucuugcauccgaggcagcuccucaaguuucuuuagccgucugaacuggcugacccaucucaauuauacguacccagcuuuaaacgugacuaugcccaauaaggagcaguucgacaaacuguauauuuggggcguccaccauccugggaccgauaaggaccagaucucucuuuacgcacaguccucaggaagaauaacagugagcacuaaaaggagucaacaggccguaauuccaaacaucgguucucggccccgcauuagagauaucccuuccaggaucagcauuuacuggaccauaguuaagccaggcgacaucuugcugauuaacucgacagggaaucuaaucgcuccgcggggauauuuuaaaauacgcucuggcaaguccucaauuaugcgaagugacgcccccaucgguaaguguaaaagcgagugcaucaccccuaacggguccauuccaaaugauaagcccuuccagaacgugaauagaaucacguacggagcguguccuagguaugucaaacagucuacucucaagcuggcaacaggcaugcggaacgugccagaaaaacaaacccguggcauuuuuggggccauagcuggauucaucgagaaugguugggaaggcaugguggacgggugguacggauuucgccaccagaacagcgagggcagaggucaggccgcagaucuuaagucaacucaagcugccauugaccagaucaaugggaaacugaacagguugaucggcaagacaaaugagaaguuccaccagauugaaaaagaguucagugaagucgagggacggguucaggaucucgaaaaguauguggaggacaccaaaauagaucugugguccuacaacgcggaguuacugguagcccucgaaaaucaacauacgaucgaccuuaccgauagcgagaugaacaagcuguuugagaaaacaaagaagcaguugcgagaaaaugcagaagacaugggcaacgggugcuucaaaauuuaucacaagugugauaacgcuugcaucggaucuauucgcaaugagacuuacgaccauaacguguacagagacgaggcccuaaauaacagguuucagaucaaaggugucgaacugaagucaggcuauaaagauuggauacucuggaucaguuucgcuauuagcugcuuucugcuuuguguggcccuguugggguucaucaugugggcaugccagaagggaaauauucgguguaacaucugcauaugaggacuagucccuguucccagagcccacuuuuuuuucuuuuuuugaaauaaaauagccugucuuucagaucucaaaggcucuuuucagagccaccaaaaaaaaaaaaaaaaaaaaaaaaaaaaaaaaaaaaaaaaaaaaaaaaaaaaaaaaaaaaaaaaaaaaaaaaaaaaaaaaaaaaaaaaaaaaaaaaaaaaa

SEQ ID NO: 14407 - RNA, 1973 nt, Artificial Sequence
  FLUAV/H3N2/A/Hong Kong/2671/2019__EPI1642843 hemagglutinin mRNA human (HA)
aggagagucccgcagucggcguccagcggcucugcuuguucgugugugugucguugcaggccuuauucaagcuuaccaugaagaccaucauugcccugagcuacauacucugccuuguguucacacagaaaauccccggcaacgacaauuccacugcuacgcuguguuuggggcaccaugcagucccuaacggaaccauuguuaagacaaucacuaaugauagaauugaggugaccaacgccacagaauuaguacaaaauucuucaaucggugagauaugcgacaguccacaccagauccuggauggcgggaacuguacccuaauugacgcgcuccugggagauccgcagugcgacggcuuucagaauaaaaagugggaucuuuucguggaaaggagccgggcuuauuccaacuguuaccccuaugacgucccugauuacgccucucugcgcucguugguggcaucaagcgguacucucgaguuuaaaaaugaaaguuucaacugggccgggguuacacaaaauggaaaguccuuuucuugcauccgaggcagcuccucaaguuucuuuagccgucugaacuggcugacccaucucaauuauauuuacccagcuuuaaacgugacgaugcccaauaaggagcaguucgacaaacuguauaucuggggcguccaccauccugugacugauaaggaccagauaucucuuuacgcacaguccucagggagaauuaccguaagcacaaaaaggagucaacaggccguuaucccaaacauuggaucucggccccgcaucagaaacaucccuuccaggauuagcauauacuggacuaucgugaagccaggugauauuuugcugaucaauucgaccggcaaccuaauagcuccgcggggguauuuuaaaauucgcucuggaaaguccucaaucaugcgaagugacgcccccaucggcaaguguaaaagcgagugcauuacaccuaaugguuccaucccaaacgacaagcccuuccagaaugucaacagaauuaccuacggggcguguccuagguaugugaaacagucuacgcucaagcuggcaacuggaaugcggaaugugccagaaaaacaaacacguggcauauuuggcgccaucgcuggguucauugagaacggaugggaagguauggucgauggcugguacggguuucgccaccagaauagcgagggaagaggccaggccgcagaccuuaagucaacccaagcugccaucgaucagaucaacgguaaacugaauagguugauugggaagacuaacgagaaguuccaccagauagaaaaagaguucagugaaguugagggccgggugcaggaccucgaaaaguauguagaggauacaaaaaucgaccugugguccuacaaugcggaguuacugguggcccucgaaaaccaacauaccauugaucuuacggacagcgagaugaauaagcuguuugagaaaaccaagaagcaguugcgagaaaacgcagaagauaugggaaacggcugcuucaaaaucuaucacaagugugacaaugcuugcauugggucuauccgcaacgagacauacgaucauaaugucuacagagacgaggcccuaaacaauagguuucagauaaaaggaguggaacugaagucagguuauaaagacuggauccucuggauuaguuucgcuaucagcugcuuucugcuuuguguugcccuguugggcuucauuaugugggcaugccagaaggggaacauccgguguaauauaugcauuugaggacuagucccuguucccagagcccacuuuuuuuucuuuuuuugaaauaaaauagccugucuuucagaucucaaaggcucuuuucagagccaccaaaaaaaaaaaaaaaaaaaaaaaaaaaaaaaaaaaaaaaaaaaaaaaaaaaaaaaaaaaaaaaaaaaaaaaaaaaaaaaaaaaaaaaaaaaaaaaaaaaaa

SEQ ID NO: 14408 - RNA, 1973 nt, Artificial Sequence
  FLUAV/H3N2/A/Hong Kong/45/2019__EPI1691930 hemagglutinin mRNA human (HA)
aggagagucccgcagucggcguccagcggcucugcuuguucgugugugugucguugcaggccuuauucaagcuuaccaugaagaccaucauugcccugagcuacauacucugccuuggcuucacacagaaaauccccgggaacgacaauuccacugcuacgcuguguuugggacaccaugcagugccuaacgguaccauugucaagacaaucacuaaugauagaauugagguuaccaacgccacagaauuagugcaaaauucuucaaucggcgagauaugcgacaguccacaccagauccuggaugggggaaacuguacccuaauugacgcgcuccugggcgauccgcagugcgacgguuuucagaauaaaaagugggaucuuuucguagaaaggagccgggcuuauuccaacuguuaccccuaugacgugccugauuacgccucucugcgcucguuggucgcaucaagcgggacucucgaguuuaaaaaugaaaguuucaacugggccggagugacacaaaauggcaaguccuuuucuugcauccgaggcagcuccucaaguuucuuuagccgucugaacuggcugacccaucucaauuauacguacccagcuuuaaacguuacuaugcccaauaaggagcaguucgacaaacuguauauuuggggagugcaccauccugggaccgauaaggaccagaucucucuuuacgcacaguccucagguagaauaacagucagcacuaaaaggagucaacaggccgugauuccaaacaucggcucucggccccgcauuagagauaucccuuccaggaucagcauuuacuggaccauaguaaagccaggggacaucuugcugauuaacucgacaggaaaucuaaucgcuccgcggggcuauuuuaaaauacgcucugguaaguccucaauuaugcgaagugacgcccccaucgggaaguguaaaagcgagugcaucaccccuaacggauccauuccaaaugauaagcccuuccagaacguuaauagaaucacguacggcgcguguccuagguaugugaaacagaacacucucaagcuggcaacaggcaugcggaaugucccagaaaaacaaacccgugggauuuuuggagccauagcugguuucaucgagaacggcugggaagggaugguggacggaugguacggcuuucgccaccaaaauucugaggguagagggcaggccgcagaucuuaagagcacucaggcugccauugaccagaucaacggcaaacugaauagguugaucggaaagacaaacgagaaguuccaccagauugaaaaagaguucucagaaguggagggccggguccaggaucucgaaaaguauguugaggacaccaaaauagaucuguggaguuacaaugcggaguuacugguggcccucgaaaaccaacauacgaucgaccuuaccgauuccgagaugaauaagcuguuugagaaaacaaagaagcaguugcgagaaaacgcagaagacauggggaacggaugcuucaaaauuuaucacaagugugauaaugcuugcaucgguagcauucgcaacgagacuuacgaccauaauguauacagagacgaggcccuaaacaauagguuucagaucaaaggcguggaacugaagucuggguauaaagauuggauacucuggaucucauucgcuauuaguugcuuucugcuuugugucgcccuguugggauucaucaugugggcaugccagaagggcaacauucgguguaauaucugcauaugaggacuagucccuguucccagagcccacuuuuuuuucuuuuuuugaaauaaaauagccugucuuucagaucucaaaggcucuuuucagagccaccaaaaaaaaaaaaaaaaaaaaaaaaaaaaaaaaaaaaaaaaaaaaaaaaaaaaaaaaaaaaaaaaaaaaaaaaaaaaaaaaaaaaaaaaaaaaaaaaaaaaa

SEQ ID NO: 14409 - RNA, 1973 nt, Artificial Sequence
  FLUAV/H3N2/A/South Australia/34/2019__EPI1387331 hemagglutinin mRNA human (HA)
aggagagucccgcagucggcguccagcggcucugcuuguucgugugugugucguugcaggccuuauucaagcuuaccaugaagaccaucauugcccugagcuacauacucugccuuguguucgcucagaaaauccccggcaacgacaauuccacagcaacucuguguuuggggcaccaugccgucccuaacggaacgauuguuaagaccaucacaaaugauagaauugaggugacuaacgcgaccgaauuaguacaaaauucuucaaucggugagauaugcgacaguccacaccagauccuggauggcgggaacuguacacuaauugacgcucuccugggagauccgcagugcgacggcuuucagaauaaaaagugggaucuuuucguggaaaggagccgggccuauuccaacuguuaccccuaugacgucccugauuacgcaucucugcgcucguugguggccucaagcgguacccucgaguuuaaaaaugaaaguuucaacuggacugggguuaagcaaaauggaacauccucugcuugcauccgaggcagcuccucaaguuucuuuagccgucugaacuggcugacccaucucaauuauacguacccagcauuaaacgugacuaugcccaauaaggagcaguuugacaaacuguauauuuggggcguccaccauccugggaccgauaaggaccagaucuuccuuuacgcccagucuuccggaagaauaacagugucaacuaaaaggagccaacaggcuguaauuccaaacaucgguuuucggccccgcauuagagauaucccuaguaggaucucuauuuacuggaccauaguuaagccaggcgacaucuugcugauuaacuccacagggaaucuaaucgccccgcggggauauuucaaaauacgcagcggcaagucgucuauuaugcgauccgacgcgcccaucgguaaguguaaaucagagugcaucaccccuaacgggaguauuccaaaugauaagcccuuucagaacgugaauagaaucacguacggagcauguccuagguaugucaaacagagcacucucaagcuggccacaggcaugcggaacgugccagaaaaacaaacccguggcauuuucggggcuauagccggauuuaucgagaaugguugggaaggcaugauggacgggugguacggauuccgccaccagaacuccgagggcagaggucaggcagcugaucuuaagucuacucaagccgcgauugaccagaucaaugggaaacugaacagguugaucggcaagacaaaugagaaguuccaccagauugaaaaagaguuuagcgaaguggagggacggguccaggaucucgaaaaguauguugaggacaccaaaauagaucuguggucauacaacgccgaguuacugguggcacucgaaaaucaacauacgaucgaccuuaccgauagugagaugaacaagcuguucgaaaagacaaagaagcaguugcgagagaaugcugaagacaugggcaacgggugcuuuaaaauuuaucacaagugugauaacgccugcaucggauccauucgcaaugagacuuacgaccauaacguauacagagacgaggcucuaaauaacagguuccagaucaaagguguggaacugaaaagcggcuauaaagauuggauacucuggaucucuuuugccauuucaugcuuccugcuuuguaucgcacuguugggguuuauuaugugggccugccagaagggaaauauccgguguaacauaugcauuugaggacuagucccuguucccagagcccacuuuuuuuucuuuuuuugaaauaaaauagccugucuuucagaucucaaaggcucuuuucagagccaccaaaaaaaaaaaaaaaaaaaaaaaaaaaaaaaaaaaaaaaaaaaaaaaaaaaaaaaaaaaaaaaaaaaaaaaaaaaaaaaaaaaaaaaaaaaaaaaaaaaaa

SEQ ID NO: 14410 - RNA, 1973 nt, Artificial Sequence
  FLUAV/H3N2/A/South Australia/34/2019__EPI1440494 hemagglutinin mRNA human (HA)
aggagagucccgcagucggcguccagcggcucugcuuguucgugugugugucguugcaggccuuauucaagcuuaccaugaagaccaucauugcccugagcuacauacucugccuuguguucgcucagaaaauccccggcaacgacaauuccacagcaacucuguguuuggggcaccaugccgucccuaacggaacgauuguuaagaccaucacaaaugauagaauugaggugacuaacgcgaccgaauuaguacaaaauucuucaaucggugagauaugcgacaguccacaccagauccuggauggcgggaacuguacacuaauugacgcucuccugggagauccgcagugcgacggcuuucagaauaaaaagugggaucuuuucguggaaaggagccgggccuauuccaacuguuaccccuaugacgucccugauuacgcaucucugcgcucguugguggccucaagcgguacccucgaguuuaaaaaugaaaguuucaacuggacugggguuaagcaaaauggaacauccucugcuugcauccgaggcagcuccucaaguuucuuuagccgucugaacuggcugacccaucucaauuauaaguacccagcauuaaacgugacgaugcccaauaaagagcaguuugacaagcuguauauuuggggcguccaccauccuaucacugauaaagaccagauauuccuuuacgcccagucuuccgggagaauuaccgugucaacaaagaggagccaacaggcuguaaucccaaacauuggauuucggccccgcaucagagauaucccuaguaggauuucuauauacuggacuaucguuaaaccaggugacauuuugcugaucaacuccaccggcaaucuaauagccccgcggggguauuucaagauucgcagcggaaagucgucuaucaugcgauccgacgcgcccaucggcaaauguaagucagagugcauuacaccuaacgguaguaucccaaaugauaaacccuuucagaacgugaauagaauuaccuacggggcauguccuagguaugucaagcagagcacgcucaaacuggccacuggaaugcggaacgugccagaaaagcaaacacguggcauauucggcgcuaucgccggguuuauugagaauggaugggaagguaugauggacggcugguacggguuccgccaccagaacuccgagggaagaggccaggcagcugaucuuaaaucuacccaagccgcgaucgaccagaucaaugguaagcugaacagguugauugggaagacuaaugagaaauuccaccagauagaaaaggaguuuagcgaaguggagggccggguccaggaucucgaaaaauauguugaggacacaaagaucgaucuguggucauacaacgccgaguuacugguggcacucgaaaaucaacauaccauugaccuuacggauagugagaugaacaaacuguucgaaaagaccaagaaacaguugcgagagaaugcugaagacaugggaaacggcugcuuuaagaucuaucacaaaugugauaacgccugcauuggguccauccgcaaugagacauacgaccauaacguauacagagacgaggcucuaaauaacagguuccagauaaagggaguggaacugaaaagcgguuauaaggauuggauccucuggauuucuuuugccaucucaugcuuccugcuuuguauugcacuguugggcuuuaucaugugggccugccagaaggggaauauacgguguaacauuugcaucugaggacuagucccuguucccagagcccacuuuuuuuucuuuuuuugaaauaaaauagccugucuuucagaucucaaaggcucuuuucagagccaccaaaaaaaaaaaaaaaaaaaaaaaaaaaaaaaaaaaaaaaaaaaaaaaaaaaaaaaaaaaaaaaaaaaaaaaaaaaaaaaaaaaaaaaaaaaaaaaaaaaaa

SEQ ID NO: 14411 - RNA, 1955 nt, Artificial Sequence
  FLUAV/H7N9/A/chicken/Zhejiang/C483/2013(H7N9)__AGN69400.1 hemagglutinin mRNA human (HA)
aggagagucccgcagucggcguccagcggcucugcuuguucgugugugugucguugcaggccuuauucaagcuuaccaugaacacccagauccugguguucgcccucauugcuauaauccccacaaaugcagacaagauuugccuuggccaccaugccgucagcaacgggacuaaaguuaauacgcugaccgagagaggaguggaaguagugaacgcgacagagacugucgaaaggaccaauaucccucggauuuguuccaaggguaaaaagacaguggauuugggccaaugcggguuacugggaaccaucacuggcccaccgcagugugaccaguuucuagaguucucugcugaucucauaaucgaacgccgagaggguucagacguuugcuaccccgggaaauuugugaacgaggaagcccugcgucagauucuuagagagaguggaggcaucgauaaggaagcaaugggcuucacauauagcgggauuaggaccaauggagccacguccgcuugucggcgcucugguucgucauuuuacgcagagaugaaguggcuguugagcaacacugacaaugccgcuuucccucaaaugaccaaaaguuauaagaacacaagaaaauccccagcccucaucgucuggggcauacaccauucugugagcacugcggagcagaccaagcuguacggguccggaaauaaacugguaacaguuggcucaaguaacuaucagcagagcuuugugcccucuccuggugcaaggccacaagucaaugggcaguccggacggauugauuuccacuggcucauguuaaaccccaaugacaccgugacguuuucauucaacggcgccuuuaucgcuccugaucgcgccagcuuccugcgaggcaagaguauggggauucagucuggagugcaggucgacgcaaacugcgaaggugauuguuaccauuccggcgggacuaucaucagcaaucuuccauuucaaaacauugacucgagagcuguuggaaagugcccgagguaugugaaacagcggucuuugcugcuagccacaggcaugaagaauguacccgagauaccuaaaggucguggccucuucggggcgaucgccggauucauugaaaacggcugggaggggcugaucgauggaugguacgguuuucgccaccagaaugcacaaggcgaagggaccgcugccgacuacaaguccacucagucagcuauagaccagauuacaggaaaacuuaacagacugaucgagaagaccaaucagcaauucgaguugaucgauaacgaauuuaaugagguggaaaaacagauuggcaacgucaucaauuggacgagggacaguauuaccgagguguggagcuauaacgccgaacuccugguugcaauggagaaucagcacacaauagauuuagccgacuccgagauggauaagcuguacgaacgggugaagcgacagcuccgcgagaacgcugaagaggacgguacuggguguuucgaaaucuuucauaaaugcgaugacgauuguauggcgucuauuagaaauaacaccuaugaccacagcaaguacagggaggaggcaaugcaaaaccggauccagaucgauccagucaaacuuucaaguggcuauaaggacgugauucugugguucuccuuuggagccagcugcuucauauugcuagcuaucguaaugggccugguuuuuauuugcgugaaaaaugggaacaugcgcuguacaaucugcauuugaggacuagucccuguucccagagcccacuuuuuuuucuuuuuuugaaauaaaauagccugucuuucagaucucaaaggcucuuuucagagccaccaaaaaaaaaaaaaaaaaaaaaaaaaaaaaaaaaaaaaaaaaaaaaaaaaaaaaaaaaaaaaaaaaaaaaaaaaaaaaaaaaaaaaaaaaaaaaaaaaaaaa

SEQ ID NO: 14412 - RNA, 1958 nt, Artificial Sequence
  FLUAV/H10N8/A/Jiangxi/IPB13/2013(H10N8)__AHK10761.1 hemagglutinin mRNA human (HA)
aggagagucccgcagucggcguccagcggcucugcuuguucgugugugugucguugcaggccuuauucaagcuuaccauguacaagaucguggucauuauagcccugcucggcgcuguuaaagggcuugacaagaucugccugggacaccaugcaguggccaacgguaccauuguaaaaacauugacuaaugagcaggaagaggugacgaacgcgaccgaaacagucgagagcacuggcaucaauagauuauguaugaaggggaggaaacacaaggaucugggaaacugccaucccauuggcaugcuaaucgguaccccugcuugugaccuccaccugacagggaugugggauacccuuauagaacgggagaaugccaucgcauauugcuacccaggagccacugugaacguugaggcucugcgccaaaagauuauggaauccggcggcaucaauaaaauuucuacaggguucaccuauggaucaaguaucaacagcgcagguacgacucgagccuguaugcguaauggcgggaacuccuuuuacgcugaguugaaguggcucgugucuaaaucgaagggacagaauuucccgcagaccacaaacacuuauagaaauaccgacacagccgaacaucugauaauguggggcauucaccaccccucaagcacccaggagaaaaacgaucuguacgguacgcaaagucucuccaucucugucgggagcuccacuuauaggaauaacuuugugccuguaguuggagcgcggccacaggugaacggccagucaggccgcauugacuuccauuggacauuaguccagcccggggauaauaucaccuuuagucacaacggaggucugaucgcaccuagcagagugucuaaacuuauuggcaggggguugggaauacaauccgacgccccaaucgauaauaacugcgagucaaaguguuucuggcggggcgguagcauuaauacucgccugcccuuucagaaccuaaguccucgaacaguggggcagugcccaaaguacgucaauagaaggucucucaugcuggcuaccggcaugcggaacguuccggaacuuauccagggacguggccuguucggggccauagcaggauuuuuggagaaugguugggaaggcaugguggacgggugguacggauuccgccaucaaaacgcucagggcacgggucaggccgcggauuauaaguccacccaagccgcaauugaccagaucacagggaaacucaauagacugguagagaagacuaacaccgaauuugagagcaucgagucggaguucucugaaauugaacaccagaucggcaaugugauuaacuggacaaaagauuccauaacugacaucuggaccuaccaggcugaguuacuggucgccauggaaaaucaacacacaauugacauggcugauucagagaugcucaaccuuuaugagagggugcggaagcagcugcgacagaacgccgaagaggacggaaaaggcuguuuugaaaucuaccaugcaugcgaugacaguuguauggagagcauccgcaauaacaccuaugaucacucccaguacagagaagaggccuugcuaaauaggcugaacauuaaucccguuacucucucuagcggguauaaggacauaauccugugguucucauucggagcuaguugcuuugugcuucuggcggucgugauggguuuguucuuuuucugccucaagaacggcaauaugcgguguacgauuugcaucugaggacuagucccuguucccagagcccacuuuuuuuucuuuuuuugaaauaaaauagccugucuuucagaucucaaaggcucuuuucagagccaccaaaaaaaaaaaaaaaaaaaaaaaaaaaaaaaaaaaaaaaaaaaaaaaaaaaaaaaaaaaaaaaaaaaaaaaaaaaaaaaaaaaaaaaaaaaaaaaaaaaaa

SEQ ID NO: 14413 - RNA, 2024 nt, Artificial Sequence
  FLUBV/H0N0/B/Colorado/06/2017__EPI1011552 hemagglutinin mRNA human (HA)
aggagagucccgcagucggcguccagcggcucugcuuguucgugugugugucguugcaggccuuauucaagcuuaccaugaaggccaucauugugcugcucauggucguuaccagcuccgcugacagaauaugcacaggcaucacuucuucaaacaguccccacgugguaaaaacggcaacccagggggaggugaaugucacaggagugauuccucuuacuaccacaccaaccaagagccauuucgccaaccugaaagguacugaaacaaggggcaaguuguguccgaaaugcuuaaauuguaccgaucuggacguugcgcuagggcggcccaagugcacgggaaagaucccuuccgcucgcgugucuauucuccacgagguccgaccagugacuucgggcuguuuucccaucaugcaugaucguaccaaaauaagacaacugccuaaccuucugagggguuacgaacacguacgguugucaacacauaauguuaucaacgccgagggggcaccaggaggccccuauaagauuggcacuagcgggaguugcccuaauaucaccaacggaaaugguuucuuugccacaauggcuugggcagugccagacaaaaacaagaccgccacgaauccgcucacuauugaaguccccuacguguguacagagggcgaggaucagaucaccguguggggguuccacuccgacaacgaaacucagauggcuaaacuguauggagauucuaagccucagaaguuuacaagcuccgccaauggcgucaccacgcacuacguuucacaaauagguggguucccaaaccagaccgaggacggaggccugccccagaguggccgcauugugguagauuauauggugcagaaaagcgggaagacaggaacuaucaccuaccaaagagguauucucuuaccucagaaagucuggugcgcgucuggcagguccaaggugaucaaagggucacugccacuuaucggagaagcagacuguuugcaugagaaguauggcggucugaauaaaagcaagcccuacuacacaggggagcacgccaaggcuauuggcaacugcccgauauggguuaaaacuccucuaaagcucgccaacggaaccaaauaucggcccccagcaaagcugcuuaaagaacgcggcuuuuucggggcuaucgccggauuucuggaggguggcugggaagggaugauugcgggauggcauggcuacacaagucacggugcccacgggguggcagucgcugccgauuugaagucuacccaggaggcuaucaauaagauaacuaaaaaccucaauucccugagcgaauuagaggugaagaaccugcagcgacucucgggcgccauggacgagcuucauaaugaaauucuggaguuggaugaaaaaguagacgaccuaagagcagauacgaucucuucccaaaucgagcuggccguucuccugucaaacgaaggaauuaucaauagugaggacgagcaccuucuggcuuuggaaaggaagcucaaaaagaugcugggcccuagcgcgguggagauugggaacggauguuucgaaacaaagcauaaaugcaaucagaccugcuuagauaagauagcagccgguacuuuugacgcuggcgaguucucccugcccaccuuugauucucuaaacaucacagccgcaagccucaaugacgaugggcuggacaaccacaccauucuuuuguauuacucaacugccgcuaguucccuggccgucacacucaugaucgcaaucuucguggucuauauggugagccgggauaauguuucuuguucaauuugccugugaggacuagucccuguucccagagcccacuuuuuuuucuuuuuuugaaauaaaauagccugucuuucagaucucaaaggcucuuuucagagccaccaaaaaaaaaaaaaaaaaaaaaaaaaaaaaaaaaaaaaaaaaaaaaaaaaaaaaaaaaaaaaaaaaaaaaaaaaaaaaaaaaaaaaaaaaaaaaaaaaaaaa

SEQ ID NO: 14414 - RNA, 2024 nt, Artificial Sequence
  FLUBV/H0N0/B/Colorado/06/2017__EPI1051642 hemagglutinin mRNA human (HA)
aggagagucccgcagucggcguccagcggcucugcuuguucgugugugugucguugcaggccuuauucaagcuuaccaugaaggccaucauugugcugcucauggucguuaccagcuccgcugacagaauaugcacaggcaucacuucuucaaacaguccccacgugguaaaaacggcaacccagggggaggugaaugucacaggagugauuccucuuacuaccacaccaaccaagagccauuucgccaaccugaaagguacugaaacaaggggcaaguuguguccgaaaugcuuaaauuguaccgaucuggacguugcgcuagggcggcccaagugcacgggaaagaucccuuccgcucgcgugucuauucuccacgagguccgaccagugacuucgggcuguuuucccaucaugcaugaucguaccaaaauaagacaacugccuaaccuucugagggguuacgaacacguacgguugucaacacauaauguuaucaacgccgagggggcaccaggaggccccuauaagauuggcacuagcgggaguugcccuaauaucaccaacggaaaugguuucuuugccacaauggcuugggcagugccagacaaaaacaagaccgccacgaauccgcucacuauugaaguccccuacguguguacagagggcgaggaucagaucaccguguggggguuccacuccgacacugaaacacagauggcuaaacuguauggagauucuaagccucagaaguuuaccagcuccgccaacggcgucacgacccacuacguuucacaaauagguggguucccaaaucagacagaggacggaggccugccccagaguggccgcauugugguagauuauauggugcagaaaagcgggaagacuggaaccaucacauaccaaagagguauucucuuaccucagaaagucuggugcgcgucuggcagguccaaggugaucaaagggucacugccacuuaucggagaagcagacuguuugcaugagaaguauggcggucugaacaaaagcaagcccuacuacacuggggagcacgccaaggcuauuggcaauugcccgauauggguuaaaaccccucuaaagcucgccaacggaacaaaauaucggcccccagcaaagcugcuuaaagaacgcggcuuuuucggggcuaucgccggauuucuggaggguggcugggaagggaugauugcgggauggcauggcuacaccagucacggugcccacgggguggcagucgcugccgauuugaagucuacucaggaggcuaucaacaagauaacgaaaaaucucaacucccugagcgaauuagaggugaagaaucugcagcgacucucgggcgccauggacgagcuucauaacgaaauucuggaguuggaugaaaaaguagacgaccuaagagcagauacaaucucuucccaaaucgagcuggccguucuccugucaaaugaaggaauuaucaacagugaggacgagcaccuucuggcuuuggaaaggaagcucaaaaagaugcugggcccuagcgcgguggagauugggaauggauguuucgaaaccaagcauaaaugcaaccagacuugcuuagauaagauagcagccgguaccuuugacgcuggcgaguucucccugcccacauuugauucucuaaauaucaccgccgcaagccucaacgacgaugggcuggacaaucacacuauucuuuuguauuacucaacagccgcuaguucccuggccgucacgcucaugaucgcaaucuucguggucuauauggugagccgggauaacguuucuuguucaauuugccugugaggacuagucccuguucccagagcccacuuuuuuuucuuuuuuugaaauaaaauagccugucuuucagaucucaaaggcucuuuucagagccaccaaaaaaaaaaaaaaaaaaaaaaaaaaaaaaaaaaaaaaaaaaaaaaaaaaaaaaaaaaaaaaaaaaaaaaaaaaaaaaaaaaaaaaaaaaaaaaaaaaaaa

SEQ ID NO: 14415 - RNA, 2024 nt, Artificial Sequence
  FLUBV/H0N0/B/Colorado/06/2017 BX-71__EPI1151760 hemagglutinin mRNA human (HA)
aggagagucccgcagucggcguccagcggcucugcuuguucgugugugugucguugcaggccuuauucaagcuuaccaugaaggccaucauugugcugcucauggucguuaccagcuccgcugacagaauaugcacaggcaucacuucuucaaacaguccccacgugguaaaaacggcaacccagggggaggugaaugucacaggagugauuccucuuacuaccacaccaaccaagagccauuucgccaaccugaaagguacugaaacaaggggcaaguuguguccgaaaugcuuaaauuguaccgaucuggacguugcgcuagggcggcccaagugcacgggaaagaucccuuccgcucgcgugucuauucuccacgagguccgaccagugacuucgggcuguuuucccaucaugcaugaucguaccaaaauaagacaacugccuaaccuucugagggguuacgaacacguacgguugucaacacauaauguuaucaacgccgagggggcaccaggaggccccuauaagauuggcacuagcgggaguugcccuaauaucaccaacggaaaugguuucuuugccacaauggcuugggcagugccagacaaaaacaagaccgccacgaauccgcucacuauugaaguccccuacguguguacagagggcgaggaucagaucaccguguggggguuccacuccgacacugaaacacagauggcuaaacuguauggagauucuaagccucagaaguuuaccagcuccgccaacggcgucacgacccacuacguuucacaaauagguggguucccaaaucagacagaggacggaggccgcccccagaguggcagaauugugguagauuauauggugcagaaaagcgggaagacuggaaccaucacauaccaaagggguauucugcucccucagaaagucuggugcgcgucuggccgguccaaggugaucaaagggucauuaccacugaucggagaagcagacugucuucaugagaaguauggcgguuugaacaaaagcaagcccuacuacacuggggagcacgccaaggcuauuggcaauugcccgauauggguuaaaaccccucugaagcuagccaacggaacaaaauaucgacccccagcaaagcuccugaaagaacgcggcuuuuucggggcuaucgccggauuucuugaggguggcugggaagggaugauugcgggauggcauggcuacaccagucacggugcccacgggguggcagucgcugccgaucugaagucuacucaggaggcuaucaacaagauaacgaaaaauuugaacucccucagcgaacuggaggugaagaauuuacagagacugucgggcgccauggacgagcuccauaacgaaauucuugagcuggaugaaaaaguagacgacuugagggcagauacaaucucuucccaaaucgagcuagccguucugcucucaaaugaaggaauuaucaacagugaggacgagcaucugcuugcucuggaacggaaguugaaaaagaugcucggcccuagcgcgguggagauugggaauggauguuucgaaaccaagcacaaaugcaaccagacuugccuggauaagauagcagccgguaccuuugacgcuggcgaguucuccuuacccacauuugauucucugaauaucaccgccgcaagccuaaacgacgaugggcucgacaaucacacuauucugcuuuauuacucaacagccgcuaguuccuuggccgucacgcugaugaucgcaaucuucguggucuauauggugagccgugauaacguuucuuguucaauuugccucugaggacuagucccuguucccagagcccacuuuuuuuucuuuuuuugaaauaaaauagccugucuuucagaucucaaaggcucuuuucagagccaccaaaaaaaaaaaaaaaaaaaaaaaaaaaaaaaaaaaaaaaaaaaaaaaaaaaaaaaaaaaaaaaaaaaaaaaaaaaaaaaaaaaaaaaaaaaaaaaaaaaaa

SEQ ID NO: 14416 - RNA, 2021 nt, Artificial Sequence
  FLUBV/H0N0/B/Washington/02/2019__EPI1368874 hemagglutinin mRNA human (HA)
aggagagucccgcagucggcguccagcggcucugcuuguucgugugugugucguugcaggccuuauucaagcuuaccaugaaggccaucauugugcugcucauggucguuaccagcaacgcugacagaauaugcacaggcaucacuuccucuaauucaccccacgugguaaaaacggcaacccagggggaagugaacgucacaggagugauuccucuuacuaccacaccaaccaagagucauuucgccaaucugaaagguacugaaacaaggggcaaguuguguccgaaaugcuuaaacuguaccgaucuggacguugcgcuagggcggcccaagugcacgggaaagaucccuagcgcucgcguguccauucuccacgagguccgaccagugacuucuggcuguuuucccaucaugcaugaucguaccaaaauaagacaacugccuaaucuucugagggguuacgaacacguacgguugucgacacauaacguuaucaaugccgaggacgcaccagggcgccccuaugaaauuggaacuucaggcagcugcccuaacaucaccaauggcaacggguucuuugccacaauggcuugggcagugccaaagaauaaaaccgccacgaacccgcucacuauugagguccccuacaucuguacagagggagaagaucagauaaccgugugggguuuccacagugacaaugagacucagauggcuaagcuguauggcgauuccaaaccucagaaguuuacaucuagcgccaacggggugaccacgcacuacgucucccaaauuggaggcuucccaaaucagaccgaagacggugggcugccccagucaggaagaaucguuguggauuauaugguacagaagaguggcaaaacaggcacuauuaccuaccaaagggggauccucuuaccucagaagguguggugcgcgagcggacggucuaaagucaucaaggguucccugccacuuauuggcgaggcagacuguuugcaugagaaauaugggggacugaacaagucaaaacccuacuacacaggcgaacacgccaaggcuauagguaacugcccgaucugggugaagacuccucuaaaacucgccaaugggaccaaguaucgacccccagcaaaacugcuuaaggagcgcggcuuuuucggagcuauugccggcuuucuggaagggggaugggaggguaugaucgcgggcuggcauggguacacaagccacggagcccacggcguugcaguggcugccgauuugaaaaguacccaggaagcuauaaacaagauuacuaagaaucucaacucucuguccgaguuagaggucaaaaaucugcagagacucagcggugccauggacgaacuucauaacgagauccuggaauuggaugagaagguggacgaccuaagggcagauacgaucucgucucaaauugaacuggccguacuccuguccaaugaggggaucauuaacucagaggacgaacaccuucuggcuuuggagcggaaacucaagaaaaugcugggcccuagugcgguugaaauaggaaauggcuguuucgagacaaagcauaagugcaaccagaccugcuuagaucguaucgcagccgggacuuuugacgcuggagaguucagccugcccaccuuugauucccuaaauauuacagccgcaucucucaacgacgauggucuggacaaucacaccauccuuuuguauuacagcacugccgcuucaagucuggccgugacacucaugaucgcaauuuucgucguguauauggucucccgcgauaacgugagcuguucuauaugccugugaggacuagucccuguucccagagcccacuuuuuuuucuuuuuuugaaauaaaauagccugucuuucagaucucaaaggcucuuuucagagccaccaaaaaaaaaaaaaaaaaaaaaaaaaaaaaaaaaaaaaaaaaaaaaaaaaaaaaaaaaaaaaaaaaaaaaaaaaaaaaaaaaaaaaaaaaaaaaaaaaaaaa

SEQ ID NO: 14417 - RNA, 2021 nt, Artificial Sequence
  FLUBV/H0N0/B/Washington/02/2019__EPI1422452 hemagglutinin mRNA human (HA)
aggagagucccgcagucggcguccagcggcucugcuuguucgugugugugucguugcaggccuuauucaagcuuaccaugaaggccaucauugugcugcucauggucguuaccagcaacgcugacagaauaugcacaggcaucacuuccucuaauucaccccacgugguaaaaacggcaacccagggggaagugaacgucacaggagugauuccucuuacuaccacaccaaccaagagucauuucgccaaucugaaagguacugaaacaaggggcaaguuguguccgaaaugcuuaaacuguaccgaucuggacguugcgcuagggcggcccaagugcacgggaaagaucccuagcgcucgcguguccauucuccacgagguccgaccagugacuucuggcuguuuucccaucaugcaugaucguaccaaaauaagacaacugccuaaucuucugagggguuacgaacacguacgguugucgacacauaacguuaucaaugccgaggacgcaccagggcgccccuaugaaauuggaacuucaggcagcugcccuaacaucaccaauggcaacggguucuuugccacaauggcuugggcagugccaaagaauaaaaccgccacgaacccgcucacuauugagguccccuacaucuguacagagggagaagaucagauaaccgugugggguuuccacagugacuccgagacucagauggcuaagcuguauggcgauucuaaaccucagaaguuuacaagcuccgccaauggggugaccacgcacuacgucucacaaauuggaggcuucccaaaccagaccgaagacggugggcugccccagaguggaagaaucguuguggauuauaugguacaaaagagcggcaaaacaggcacuauuaccuaccagagggggauccucuuaccucagaagguguggugcgcgucuggacgguccaaagucaucaaggguucacugccacuuauuggcgaggcagacuguuugcaugagaaauaugggggacugaauaagagcaaacccuacuacacaggcgaacacgccaaggcuauagguaacugcccgaucugggugaagacuccucuaaaacucgccaacgggaccaaguaucgacccccagcaaaacugcuuaaggagcgcggcuuuuucggagcuauugccggcuuucuggaagggggaugggaggguaugaucgcgggcuggcauggguacacaagucacggagcccacggcguugcaguggcugccgauuugaaaucuacccaggaagcuauaaauaagauuacuaagaaccucaauucccugagcgaguuagaggucaaaaaccugcagagacucucgggugccauggacgaacuucauaaugagauccuggaauuggaugagaagguggacgaccuaagggcagauacgaucucuucccaaauugaacuggccguacuccugucaaacgaggggaucauuaauagugaggacgaacaccuucuggcuuuggagcggaaacucaagaaaaugcugggcccuagcgcgguugaaauaggaaacggcuguuucgagacaaagcauaagugcaaucagaccugcuuagaucguaucgcagccgggacuuuugacgcuggagaguucucccugcccaccuuugauucucuaaacauuacagccgcaagccucaaugacgauggucuggacaaccacaccauccuuuuguauuacucaacugccgcuaguucccuggccgugacacucaugaucgcaauuuucgucguguauauggucagccgcgauaaugugucuuguucaauaugccugugaggacuagucccuguucccagagcccacuuuuuuuucuuuuuuugaaauaaaauagccugucuuucagaucucaaaggcucuuuucagagccaccaaaaaaaaaaaaaaaaaaaaaaaaaaaaaaaaaaaaaaaaaaaaaaaaaaaaaaaaaaaaaaaaaaaaaaaaaaaaaaaaaaaaaaaaaaaaaaaaaaaaa

SEQ ID NO: 14418 - RNA, 1682 nt, Artificial Sequence
  FLUAV/H1N1/A/California/7/2009__GQ906802 neuraminidase mRNA human (NA)
aggagagucccgcagucggcguccagcggcucugcuuguucgugugugugucguugcaggccuuauucaagcuuaccaugaaccccaaucagaagaucauuaccauaggcagcgugugcaugacaaucgggauggccaaccugauucuccaaaucggaaauauuaucuccauauggaucucucacucaauucagcuugguaaccagaaucagaucgagacuuguaaccaaagugucauuacguacgaaaauaacaccuggguuaaucagacauaugugaacaucagcaauacuaacuucgcugcaggccaguccguagugucugucaaacuggccggaaauucgucauugugcccugugagcggaugggcgauauacaguaaggacaacuccguuagaauuggcucuaaaggugauguguuugucaucagggagccauucauuagcuguuccccguuagaaugccggaccuuuuuccugacacagggggcucuacucaaugacaagcauucaaacggaaccaucaaagaucgcagucccuaucgaacucugaugagcuguccuaucggcgaggugccaucucccuacaacucccguuuugaaucaguagccuggagcgcaagugccugccacgacggcauuaauuggcuuacaauagggaucucuggaccugauaacggugcuguugcagugcugaaguauaauggcauuaucaccgacacgauaaaguccuggagaaacaauauuuugaggacucaagagagcgagugugccugcgucaacgggucguguuucaccgugaugacagauggaccaucuaauggccaggcuuccuacaaaaucuuucggaucgaaaaggguaaaauugugaagucagucgagaugaacgcccccaauuaucauuacgaagagugcaguuguuacccugacagcuccgagaucacuugcguuugccgcgauaacuggcacgggucuaauagaccaugggugagcuucaaccagaaucucgaauaucagauuggauacauauguucaggcaucuuuggcgacaacccgaggcccaaugauaaaaccgggaguugcggaccuguauccagcaacggugcgaacggcgugaagggguucucuuuuaaguauggaaauggcgucuggauuggucggacaaaaucaaucaguagccgcaacggguucgagaugaucugggacccaaauggcuggaccggaacggauaacaauuuuuccauuaagcaagacauagugggcaucaacgaauggucuggguacucggggagcuucguucagcaucccgagcugacuggucuggacuguauucgaccuugcuucuggguggaacucaucagaggcaggccaaaagagaauacaauuuggaccuccgggucaaguaucucuuuuuguggagucaacagcgauacugugggcugguccuggcccgacggugcagaguuaccguucacaauagauaagugaggacuagucccuguucccagagcccacuuuuuuuucuuuuuuugaaauaaaauagccugucuuucagaucucaaaggcucuuuucagagccaccaaaaaaaaaaaaaaaaaaaaaaaaaaaaaaaaaaaaaaaaaaaaaaaaaaaaaaaaaaaaaaaaaaaaaaaaaaaaaaaaaaaaaaaaaaaaaaaaaaaaa

SEQ ID NO: 14419 - RNA, 1682 nt, Artificial Sequence
  FLUAV/H1N1/A/Michigan/45/2015__EPI662593 neuraminidase mRNA human (NA)
aggagagucccgcagucggcguccagcggcucugcuuguucgugugugugucguugcaggccuuauucaagcuuaccaugaaccccaaucagaagaucauuaccauaggcagcaucugcaugacaauugggauggccaaccugauccuccaaauuggaaauaucauauccaucugggugucucacucaauucagaucgguaaccagagucagauugagacuuguaaucaaagcgucaucacguacgaaaacaauaccuggguuaaccagacauaugugaauauauccaacacuaauuucgcugcaggccagucuguagugucggucaaacuugccgggaacucaagccugugcccugugaguggaugggcgauuuacuccaaggacaauucuguuagaaucggcagcaaaggugauguguuugucauuagggagccauucaucuccuguucaccguuggaaugccggaccuuuuucuuaacacagggggcucugcuaaacgacaagcauaguaauggaaccaucaaagaucgcagccccuaucgaacucucaugucuuguccuauuggcgaggugccaucccccuacaacucacguuuugaaagcguagccuggagugcaucugccugccacgacggcauaaacuggcugacaaucgggauuuccggaccugauagcggugcuguugcagugcuuaaguauaauggcaucauaaccgacacgauuaagucguggagaaacaauauccugaggacucaagagucugagugugccugcgucaacggguccuguuucaccaucaugacagauggaccaucagacggccaggcuaguuacaaaauuuuucggaucgaaaaggguaaaauuauaaagagcguggagaugaaagcccccaauuaucauuacgaagagugcuccuguuacccugauucuagcgagaucacuugcgugugccgcgacaacuggcacgggucaaauagaccaugggucaguuucaaccagaauuuggaauaucagaugggauacauuuguuccggcguuuuuggcgauaacccgaggcccaaugacaagaccgggagcugcggaccugugucuucaaacggugcgaauggcguaaagggguucaguuuuaaauauggaaacggcguguggaucggucggacaaagagcaucuccucucgcaaaggguucgagaugauuugggauccaaauggcuggaccggaacggacaacaaguuuucgauaaaacaagacaucgucggcauuaacgaauggagcggguacuccggaucauucgugcagcaucccgagcucacuggucuggauuguauccgaccuugcuucuggguugaacugauuagaggcaggccagaggagaauacaaucuggaccagugggucuagcauauccuuuuguggagugaacucagacacugucggcuggagcuggcccgauggugcagaacucccguucacaaucgacaagugaggacuagucccuguucccagagcccacuuuuuuuucuuuuuuugaaauaaaauagccugucuuucagaucucaaaggcucuuuucagagccaccaaaaaaaaaaaaaaaaaaaaaaaaaaaaaaaaaaaaaaaaaaaaaaaaaaaaaaaaaaaaaaaaaaaaaaaaaaaaaaaaaaaaaaaaaaaaaaaaaaaaa

SEQ ID NO: 14420 - RNA, 1682 nt, Artificial Sequence
  FLUAV/H1N1/A/Netherlands/602/2009__AGU92703 neuraminidase mRNA human (NA)
aggagagucccgcagucggcguccagcggcucugcuuguucgugugugugucguugcaggccuuauucaagcuuaccaugaaccccaaucagaagaucauuaccauaggcagcgugugcaugacaaucgggauggccaaccugauucuccaaaucggaaauauuaucuccauauggaucucucacucaauucagcuugguaaccagaaucagaucgagacuuguaaccaaagugucauuacguacgaaaauaacaccuggguuaaucagacauaugugaacaucagcaauacuaacuucgcugcaggccaguccguagugucugucaaacuggccggaaauucgucauugugcccugugagcggaugggcgauauacaguaaggacaacuccguuagagugggcucuaaaggugaugucuuugugauuagggagccauucaucagcuguuccccguuagaaugccggaccuuuuuccugacacagggggcucuacucaaugacaagcauucaaacggaaccauuaaagaucgcagucccuaucgaacucugaugagcuguccuaucggcgagguaccaucucccuacaacucccguuuugaaucaguugccuggagcgcaagugccugccacgacggcaucaauuggcuuacaauugggauaucuggaccugauaacggugcuguggcaguccugaaguauaauggcaucauuaccgacacgaucaaguccuggagaaacaauauauugaggacucaagagagcgagugugccugcgugaacgggucguguuucaccgugaugacagauggaccaucuaauggccaggcuuccuacaaaauuuuucggaucgaaaaggguaaaaucgucaagucaguugagaugaacgcccccaauuaucauuacgaagagugcaguuguuacccugacagcuccgagauuacuugcgugugccgcgauaacuggcacgggucuaauagaccaugggugagcuucaaccagaaucucgaauaucagaucggauacauuuguucaggcauauuuggcgacaacccgaggcccaaugauaaaaccgggaguugcggaccuguauccagcaacggugcgaacggcgucaagggguucucuuuuaaguauggaaauggcguguggaucggucggacaaaaucaauuaguagccgcaacggguucgagaugaucugggacccaaauggcuggaccggaacggauaacaauuuuuccaucaagcaagacauuguuggcauaaacgaauggucuggguacucggggagcuucauccagcaucccgagcugacuggucuggacuguauucgaccuugcuucuggguggaacucaucagaggcaggccaaaagagaauacaauuuggaccuccgggucaaguaucucuuuuuguggagucaacagcgauacugugggcugguccuggcccgacggugcagaguuaccguucacaauagauaagugaggacuagucccuguucccagagcccacuuuuuuuucuuuuuuugaaauaaaauagccugucuuucagaucucaaaggcucuuuucagagccaccaaaaaaaaaaaaaaaaaaaaaaaaaaaaaaaaaaaaaaaaaaaaaaaaaaaaaaaaaaaaaaaaaaaaaaaaaaaaaaaaaaaaaaaaaaaaaaaaaaaaa

SEQ ID NO: 14421 - RNA, 1682 nt, Artificial Sequence
  FLUAV/H3N2/A/Hong Kong/4801/2014__EPI578429 neuraminidase mRNA human (NA)
aggagagucccgcagucggcguccagcggcucugcuuguucgugugugugucguugcaggccuuauucaagcuuaccaugaaccccaaucagaagaucauuaccauaggcagcgugucccugacaaucucuacuauuugcuucuuuaugcaaaucgccauucucaucacgaccgucacacuucacuucaaacaguacgaguuuaacucaccuccaaauaaccagguuaugcugugugaaccgacuauaaucgagagaaauauuaccgaaaucguguauuugacaaacaccacuauugagaaggaaaucugccccaaaccugcugaguacaggaauuggaguaagccacagugugggauaacaggauucgcacccuuuagcaaagacaacuccauucgguuaucugccgguggcgauaucuggguaacccgcgagccuuaugugucgugcgacccagauaaguguuaccaauucgcgcuggggcagggaacgacucuaaauaacguccauucaaauaacaccgugcgagaccguacacccuauagaacucuccugaugaaugaacuuggcguuccuuuucaccuggguaccaaacaggugugcauugcuuggagcaguuccucuugucaugaugggaaggccugguugcacgucugcaucacaggagacgauaagaacgcaaccgccagcuucaucuacaauggcaggcucguggacuccguaguuucauggaguaaagauauucugcggacgcaggagagcgaauguauaugcaucaacggcacuuguacaguggucaugaccgacgggucugcuuccggaaaggcagauacuaaaauucuguuuaucgaggaggguaagauagugcauacaucaacccucagcggcagugcccaacacguggaagagugcucuugcuauccacgcuacccgggggucagauguguuugcagggacaacuggaagggauccaaucggcccauuguggauaucaacaucaaagaccacagcauuguaucgucuuacguguguuccggcuuagucggugacacgccucgcaagaaugauucaaguagcuccucucauugccuggacccaaacaaugaagaagggggacacggcgugaaaggcugggcuuucgaugacgggaacgauguuuggaugggacgaaccaucaaugagacaagcagacuugguuaugagacuuuuaaggugauugagggcuggucaaaccccaaaaguaaguugcagaccaauaggcaggucauaguggaccguggggaucgguccggauacagcggcaucuucucuguagaagguaaaucauguauuaaccgcugcuuuuauguugagcugaucagagggaggaaggaagagacagaagugcuauggaccaguaauagcaucgucguguucuguggcacuuccggaacauacggcaccgggucuuggccugacggagccgaucucaaccugaugccaauuugaggacuagucccuguucccagagcccacuuuuuuuucuuuuuuugaaauaaaauagccugucuuucagaucucaaaggcucuuuucagagccaccaaaaaaaaaaaaaaaaaaaaaaaaaaaaaaaaaaaaaaaaaaaaaaaaaaaaaaaaaaaaaaaaaaaaaaaaaaaaaaaaaaaaaaaaaaaaaaaaaaaaa

SEQ ID NO: 14422 - RNA, 1673 nt, Artificial Sequence
  FLUBV/H0N0/B/Brisbane/60/2008__EPI173278 neuraminidase mRNA human (NA)
aggagagucccgcagucggcguccagcggcucugcuuguucgugugugugucguugcaggccuuauucaagcuuaccaugcugcccagcaccauccagacacucacucuuuuccugacguccggcgggguguuguuaucucuguacgucucagccagucuaagcuaucuccuguacuccgacauucuucugaaguuuucuccuaccgagauaacagcuccaacuaugccguuggauugcgcaaacgccucgaauguucaagcggugaacagaucagcuaccaaaggaguaacacuccugcugcccgaaccugaguggaccuauccaaggcucagcugucccgguaguacuuuccagaaggccuuacugaucuccccucaccgguuuggcgaaacaaaaggaaauucugcaccacuuauuauccgcgagcccuucauugccugcgggccuaacgaauguaagcauuuugcuuugacccacuacgcagcccagccaggcgguuauuacaaugggacgcgaggagaccguaacaaacugagacaucuaaucagcgugaagcucggcaagauaccgacugucgaaaauuccaucuuccacauggcugccuggucaggcagugcgugccaugaugggaaagaguggaccuauauuggaguggacggucccgauaacaaugcacugcuuaagguuaaauacggcgaggccuacacagacacuuaucacagcuacgcuaacaagauccugaggacccaggagucugccuguaauugcauugggggaaacuguuauuugaugaucacagauggcuccgcaucaggugugagcgaaugccgguuucucaaaauacgcgaggggagaauuaucaaggagauuuucccuaccggaagggucaagcacacggaagaguguacuugcggcuuugcuaguaauaaaacaaucgaaugugccugccgggacaacucuuacaccgcgaagcgcccauucgugaaacugaauguagagacugauacagccgaaauccgauuaaugugcaccgacacguaucuggauacccccagaccuaacgacggcuccauuacagggccaugugagagcaacggagauaaggguucgggcgggauaaaaggaggcuuuguucaucaaaggauggagucuaagaucggucggugguacucccguacuaugucaaaaaccgaacgcauggggaugggccucuaugugaaguacgacggagaccccugggcagauagugacgcucuugccuucagcggcgucaugguguccaugaaggagccggggugguacucuuuuggauucgaaauuaaagauaagaaaugcgacgugccuuguaucgguauagagaugguccacgauggcgggaaggaaacauggcauagcgcugccacugcaauuuauugccugaugggaucaggccaguugcuaugggacaccguuacagguguggauauggcccugugaggacuagucccuguucccagagcccacuuuuuuuucuuuuuuugaaauaaaauagccugucuuucagaucucaaaggcucuuuucagagccaccaaaaaaaaaaaaaaaaaaaaaaaaaaaaaaaaaaaaaaaaaaaaaaaaaaaaaaaaaaaaaaaaaaaaaaaaaaaaaaaaaaaaaaaaaaaaaaaaaaaaa

SEQ ID NO: 14423 - RNA, 1673 nt, Artificial Sequence
  FLUBV/H0N0/B/Phuket/3073/2013__EPI540672 neuraminidase mRNA human (NA)
aggagagucccgcagucggcguccagcggcucugcuuguucgugugugugucguugcaggccuuauucaagcuuaccaugcugcccagcaccauccagacacucacucuuuuccugacguccggcgggguguuguuaucucuguacgucucagccagucuaagcuaucuccuguacuccgacauucuucugaaguuuucuagaaccgagguuacagcuccuauaaugccauuggauugcgcaaacgccucgaaugugcaagcgguaaacaggucagcuacuaaaggagugaccccgcuccugcccgaaccugaguggacauauccacggcugagcugucccgguaguaccuuccagaaggcccucuuaaucuccccucaccgcuuuggcgaaacuaaaggaaauucugcaccacugauuauccgagagcccuucauugccugcgggccuaaggaauguaaacauuuugcucuuacacacuacgcagcccagccaggcgguuauuacaacgggacccgugaggacagaaauaaguugaggcaucugaucagcgucaagcuaggaaaaauaccgacgguggagaacuccaucuuccacauggcugccuggucaggcagugcgugccaugauggccgggaauggacuuauauugggguugacggacccgauagcaaugcacuccugaagaucaaauacggugaggccuacaccgacacauaucacucuuacgcuaagaacauucuucgcacucaggaauccgccuguaauugcaucggcggggauuguuaucugaugauaaccgacggaccugcaucaggcauuagcgagugcagauuuuugaaaaucagggagggucggauuaucaaggaaaucuucccaacagggcgcgugaagcacaccgaggaauguacgugcggauuugcuaguaacaaaacuauugagugugccugccgagauaauucuuacacagcgaagagacccuucgucaaacucaacguggaaaccgacacugccgagauaaggcugaugugcacaaagaccuauuuagauacgccucggccaaaugacggcuccaucaccggccccugugagagcgauggggacgaaggaucggguggcauuaaagggggauuuguacaucaacguauggcaucuaagaucggccgcugguacuccagaacaaugucaaaaacuaagaggauggguauggggcuguauguuaaguacgacggcgauccguggaccgacagugaggcucucgcccuuagcggagugauggucuccauggaggaaccuggcugguacucuuucggguuugaaauaaaagauaagaaaugcgacgugcccuguauuggaaucgagauggugcacgaugguggcaagacaacuuggcauagcgcugccaccgcaaucuauugccugauggggucaggacaguugcuaugggacacagucaccggcguuaacaugacucugugaggacuagucccuguucccagagcccacuuuuuuuucuuuuuuugaaauaaaauagccugucuuucagaucucaaaggcucuuuucagagccaccaaaaaaaaaaaaaaaaaaaaaaaaaaaaaaaaaaaaaaaaaaaaaaaaaaaaaaaaaaaaaaaaaaaaaaaaaaaaaaaaaaaaaaaaaaaaaaaaaaaaa

SEQ ID NO: 14424 - RNA, 1682 nt, Artificial Sequence
  FLUAV/H1N1/A/Brisbane/02/2018__EPI1212833 neuraminidase mRNA human (NA)
aggagagucccgcagucggcguccagcggcucugcuuguucgugugugugucguugcaggccuuauucaagcuuaccaugaaccccaaucagaagaucauuaccauaggcagcacaugcaugacuaucgggauggccaaccugauucuccaaaucggaaauauuaucuccauaugggugucucacucaauccagauugguaaccagagucagaucgagacguguaaucaaagcgucauuaccuacgaaaacaauacauggguuaaccagacuuaugugaauaucuccaacaccaauuucgcugcaagacagucuguagccucggugaaacuugcgggcaacucaagccugugcccugucagugggugggcuauauacuccaaggacaauucugugaggauuggaagcaaaggcgauguuuuugugauccgggagccauucauuuccuguucaccguuggaaugccgcacauuuuucuuaacccagggugcccugcuaaacgacaagcauaguaaugggacuaucaaagaucgaagccccuaucguacacucaugucuuguccuaucggagaggucccaucccccuacaacucaagauuugaaagcguggcauggagugccucugcuugccacgacggcaccaacuggcugacgauuggcauauccgggccugauagcggagcaguagccguucuuaaguauaaugguaucauuacugacaccaucaagucguggaggaacaauauacugcggacacaagagucugagugugcuugcgugaacggcuccuguuucacuauuaugaccgaugggccaucagacggacaggccaguuacaaaaucuuucgcaucgaaaagggcaaaauuaucaagagcgucgagaugaaagcgcccaauuaucauuacgaagagugcuccuguuacccugauucuagcgagauuacaugcgugugcagagacaacuggcacgguucaaauaggccaugggugaguuucaaccagaauuuggaauaucagaugggguacauauguuccggagucuuuggcgauaacccgcggcccaaugacaagaccggcagcugcgggccuguuucuucaaacggagcaaauggugugaagggcuucaguuuuaaauaugggaacggaguauggaucggccgcacuaagagcauuuccucucgaaaagguuucgagaugaucugggauccaaauggguggacgggcacagacaacaaguuuucgaucaaacaagacauugugggaauaaacgaauggagcggcuacuccgggucauucguccagcaucccgagcucaccggacuggauuguaucagaccuugcuucuggguggaacugauuaggggucggccagaggagaauacuaucuggacaaguggcucuagcauuuccuuuugugggguugacucagauaccgugggauggagcuggcccgacggcgccgaacucccguucacgaucgauaagugaggacuagucccuguucccagagcccacuuuuuuuucuuuuuuugaaauaaaauagccugucuuucagaucucaaaggcucuuuucagagccaccaaaaaaaaaaaaaaaaaaaaaaaaaaaaaaaaaaaaaaaaaaaaaaaaaaaaaaaaaaaaaaaaaaaaaaaaaaaaaaaaaaaaaaaaaaaaaaaaaaaaa

SEQ ID NO: 14425 - RNA, 1682 nt, Artificial Sequence
  FLUAV/H1N1/A/Guangdong-Maonan/SWL1536/2019__EPI1542569 neuraminidase mRNA human (NA)
aggagagucccgcagucggcguccagcggcucugcuuguucgugugugugucguugcaggccuuauucaagcuuaccaugaaccccaaucagaagaucauuaccauaggcagcaucugcaugacaauugggauggccaaccugauccuccaaauuggaaauaucauauccaucugggugucucacucaauucagaucgguaaccagagucagauugagacuuguaauaaaaacgucaucacguacgaaaauaacaccuggguuaaucaaacauaugugaacauaagcaauacuaacuccgcugcaagacagucuguagccucggugaaacuugcgggcaauucaagccugugcccugucagugggugggcuauuuacuccaaggacaacucugugaggaucggaagcaagggcgauguuuucgugauucgggagccauuuaucuccuguucaccguuggaaugccgcaccuucuuuuuaacacagggugcccugcuaaaugacaaacauaguaacgggaccaucaaggaucgaagccccuaucguacucucaugucuuguccuauuggagaggucccaucccccuacaacucaagauucgaaagcguggcauggagugccucugcuugccacgacggcacaaauuggcugaccauaggcaucuccgggccugauagcggagcaguagccguucuuaaguauaacgguauuaucacggacacuauaaaaucguggaggaauaacauucugcggacccaggagucugagugugcuugcgugaauggcuccuguuuuacaaucaugacugaugggccaucagacggacaagccaguuacaagaucuuccgcauugaaaaaggcaagaucauuaaaagcgucgagaugaaggcgcccaacuaucauuacgaagagugcuccuguuacccugauucuagcgagauaaccugcgugugcagagacaauuggcacgguucaaacaggccaugggugaguuuuaaucagaacuuggaauaucagaugggguacaucuguuccggagucuucggcgauaauccgcggcccaacgacaagacaggcagcugcgggccuguuucuucaaauggagcaaacggugugaaaggcuuuaguuucaaguaugggaauggaguauggauuggccgcaccaaaagcaucuccucucgaaaggguuuugagaugaucugggauccaaacggguggacgggcacugacaacaaauucucgaagaaacaggacauugugggaauaaaugaauggagcggcuacuccgggucauuuguccaacaucccgagcucacaggacugaacuguaucagaccuugcuucuggguggaacugauuaggggucggccagaggagaauaccaucuggacaaguggcucuagcauuuccuucugugggguugauucagacaucgugggauggagcuggcccgauggcgccgaacucccguuuacuauagacaagugaggacuagucccuguucccagagcccacuuuuuuuucuuuuuuugaaauaaaauagccugucuuucagaucucaaaggcucuuuucagagccaccaaaaaaaaaaaaaaaaaaaaaaaaaaaaaaaaaaaaaaaaaaaaaaaaaaaaaaaaaaaaaaaaaaaaaaaaaaaaaaaaaaaaaaaaaaaaaaaaaaaaa

SEQ ID NO: 14426 - RNA, 1682 nt, Artificial Sequence
  FLUAV/H3N2/A/Singapore/INFIMH-16-0019/2016__EPI1047603 neuraminidase mRNA human (NA)
aggagagucccgcagucggcguccagcggcucugcuuguucgugugugugucguugcaggccuuauucaagcuuaccaugaaccccaaucagaagaucauuaccauaggcagcgugucccugacaaucucuacuauuugcuucuuuaugcagaucgccauucucaucacgaccgucacacuucacuucaaacaguacgaguuuaacucaccuccaaauaaccagguuaugcugugugaaccgacuauaaucgagagaaauauuaccgaaaucguguauuugacaaacaccacuauugagaaggaaaucugccccaaaccugcugaguacaggaauuggaguaagccacagugugggauaacaggauucgcacccuuuagcaaagacaacuccauucgguuaucugccgguggcgauaucuggguaacccgcgagccuuaugugucgugcgacccagauaaguguuaccaauucgcgcuggggcagggaacgacucuaaauaacguccauucaaauaacaccgugcgagaccguacacccuauagaacucuccugaugaaugaacuuggcguuccuuuucaccuggguaccaaacaggugugcauugcuuggagcaguuccucuugucaugaugggaaggccugguugcacgucugcaucacaggagacgauaagaacgcaaccgccagcuucaucuacaauggcaggcucauugacuccgugguaucauggaguaaagauauacugcggacgcaggagagcgaauguguuugcaucaacggcacuuguacaguggucaugaccgacgggaacgcuacuggaaaggcagauacaaaaauucuguuuaucgaggaggguaagauagugcauaccucuaagcucuccggcucagcccaacacguggaagagugcagcugcuauccacgcuacccgggggucagauguguuugcagggacaauuggaaaggaaguaaccggcccauuguggauaucaauaucaaggaccacucuauuguauccagcuacguguguucgggcuuagucggugacacgccucgcaaaaacgauucuuccucaaguagccauugccugaauccaaacaaugaagaagggggacacggcgugaagggcugggcuuucgacgaugggaacgacguuuggaugggacgaaccaucaaugagacauccagacuugguuaugagacuuuuaaaguggucgagggcuggucuaaccccaagagcaaauugcagauuaauaggcaagugauaguagaucguggggaccggucaggauacaguggcaucuucuccguugaagguaagagcuguauuaaccgcugcuuuuauguggagcugaucagagggaggaaggaagagaccgaaguccuauggacaucuaauucaaucguggucuucuguggcaccaguggaacuuacggcacagggagcuggccugauggagccgaccucaaccugaugcauauuugaggacuagucccuguucccagagcccacuuuuuuuucuuuuuuugaaauaaaauagccugucuuucagaucucaaaggcucuuuucagagccaccaaaaaaaaaaaaaaaaaaaaaaaaaaaaaaaaaaaaaaaaaaaaaaaaaaaaaaaaaaaaaaaaaaaaaaaaaaaaaaaaaaaaaaaaaaaaaaaaaaaaa

SEQ ID NO: 14427 - RNA, 1682 nt, Artificial Sequence
  FLUAV/H3N2/A/Kansas/14/2017__EPI1146344 neuraminidase mRNA human (NA)
aggagagucccgcagucggcguccagcggcucugcuuguucgugugugugucguugcaggccuuauucaagcuuaccaugaaccccaaucagaagaucauuaccauaggcagcgugucccugacaaucucuacuauuugcuucuuuaugcagaucgccauucucaucacgaccgucacacuucacuucaaacaguacgaguuuaacucaccuccaaauaaccagguuaugcugugugaaccgacuauaaucgagagaaauauuaccgaaaucguguauuugacaaacaccacuauugagagggaaaucugccccaagccugcugaguaccggaauuggaguaaaccacagugugggauaacaggauucgcacccuuuagcaaggacaacuccauucgcuuaucugccgguggcgauaucuggguaacccgagagccuuaugugucgugcgacccagauaaauguuaccaauucgcgcuggggcagggaacgacuauuaauaacguccauucaaauaacaccgcucgugacagaacaccccacaggacucuacucaugaaugaacugggcgugccuuuucaucuugguaccaagcagguuugcaucgccuggagcaguuccucuugucacgaugggaaggcauggcugcaugugugcaucacaggagacgauaaaaacgccaccgcuagcuucauuuauaauggccgguuggucgacuccgugguaucauggaguaaggauauacuccgcacgcaggagagcgaauguguuugcaucaacggcacuuguacaguggucaugaccgacgggaacgcaacuggaaaagccgauacaaagauucuguuuaucgaggaggguaaaauagugcacaccucuaagcuguccggcucagcucaacacguggaagagugcagcugcuacccaagauauccgggggucagguguguuugccgggacaauuggaagggaaguaaccgccccauuguggauaucaauaucaaagaccauucuauuguauccagcuacguguguucgggccucgucggugacacgccucgaaagaccgauucuuccucaaguagccacugcuuaaacccaaauaacgaaaaagggggacauggcgugaagggcugggccuucgacgaugggaaugacguuuggaugggaagaacaaucaacgagacuuccaggcuggguuacgaaaccuuuaaaguggucgagggcuggucuaaucccaagagcaaacuucagauuaaccggcaagugauaguagaucguggggaccgcucaggauauaguggcaucuucuccguugaggguaagagcuguauuaauagaugcuuuuacguggaauugaucagggggcggaaggaggaaacagagguccuguggacuucuaacucaaucguggucuucuguggcaccaguggaacauauggcaccgggagcuggccugauggagcggaccuaaaucucaugcacauuugaggacuagucccuguucccagagcccacuuuuuuuucuuuuuuugaaauaaaauagccugucuuucagaucucaaaggcucuuuucagagccaccaaaaaaaaaaaaaaaaaaaaaaaaaaaaaaaaaaaaaaaaaaaaaaaaaaaaaaaaaaaaaaaaaaaaaaaaaaaaaaaaaaaaaaaaaaaaaaaaaaaaa

SEQ ID NO: 14428 - RNA, 1682 nt, Artificial Sequence
  FLUAV/H3N2/A/Kansas/14/2017-CDC-LV24A__EPI1444881 neuraminidase mRNA human (NA)
aggagagucccgcagucggcguccagcggcucugcuuguucgugugugugucguugcaggccuuauucaagcuuaccaugaaccccaaucagaagaucauuaccauaggcagcgugucccugacaaucucuacuauuugcuucuuuaugcagaucgccauucucaucacgaccgucacacuucacuucaaacaguacgaguuuaacucaccuccaaauaaccagguuaugcugugugaaccgacuauaaucgagagaaauauuaccgaaaucguguauuugacaaacaccacuauugagagggaaaucugccccaagccugcugaguaccggaauuggaguaaaccacagugugggauaacaggauucgcacccuuuagcaaggacaacuccauucgcuuaucugccgguggcgauaucuggguaacccgagagccuuaugugucgugcgacccagauaaauguuaccaauucgcgcuggggcagggaacgacuauuaauaacguccauucaaauaacaccgcucgugacagaacaccccacaggacucuacucaugaaugaacugggcgugccuuuucaucuugguaccaagcagguuugcaucgccuggagcaguuccucuugucacgaugggaaggcauggcugcaugugugcaucacaggagacgauaaaaacgccaccgcuagcuucauuuauaauggccgguuggucgacuccgugguaucauggaguaaggauauacuccgcacgcaggagagcgaauguguuugcaucaacggcacuuguacaguggucaugaccgacgggaacgcaacuggaaaagccgauacaaagauucuguuuaucgaggaggguaaaauagugcacaccucuaagcuguccggcucagcucaacacguggaagagugcagcugcuacccaagauauccgggggucagguguguuugccgggacaauuggaagggaaguaaccgccccauuguggauaucaauaucaaagaccauucuauuguauccagcuacguguguucgggccucgucggugacacgccucgaaagaccgauaacucuuccucaagucacugcuuaaauccaaacaaugaaaaagggggacauggcgugaagggcugggccuucgacgaugggaacgacguuuggaugggaagaacaaucaaugagacuagcaggcuggguuacgaaaccuuuaaaguggucgagggcugguccaaccccaagucuaaacuucagauuaaucggcaagugauaguagaucguggggaccgcagcggauauucaggcaucuucaguguugaggguaaguccuguauuaacagaugcuuuuacguggaauugaucagggggcggaaggaggaaacagagguccuguggacuagcaauucuaucguggucuucuguggcaccucaggaacauauggcaccgggaguuggccugauggagcggaccuaaaccucaugcacauuugaggacuagucccuguucccagagcccacuuuuuuuucuuuuuuugaaauaaaauagccugucuuucagaucucaaaggcucuuuucagagccaccaaaaaaaaaaaaaaaaaaaaaaaaaaaaaaaaaaaaaaaaaaaaaaaaaaaaaaaaaaaaaaaaaaaaaaaaaaaaaaaaaaaaaaaaaaaaaaaaaaaaa

SEQ ID NO: 14429 - RNA, 1682 nt, Artificial Sequence
  FLUAV/H3N2/A/Switzerland/8060/2017__EPI1154879 neuraminidase mRNA human (NA)
aggagagucccgcagucggcguccagcggcucugcuuguucgugugugugucguugcaggccuuauucaagcuuaccaugaaccccaaucagaagaucauuaccauaggcagcgugucccugacaaucucuacuauuugcuucuuuaugcaaaucgccauucucaucacgaccgucacacuucacuucaaacaguacgaguuuaacucaccuccaaauaaccagguuaugcugugugaaccgacuauaaucgagagaaauauuaccgaaaucguguauuugacaaacaccacuauugagaaggaaaucugccccaaaccugcugaguacaggaauuggaguaagccacagugugggauaacaggauucgcacccuuuagcaaagacaacuccauucgguuaucugccgguggcgauaucuggguaacccgcgagccuuaugugucgugcgacccagauaaguguuaccaauucgcgcuggggcagggaacgacucuaaauaacguccauucaaauaacaccgugcgagaccguacacccuauagaacucuccugaugaaugaacuuggcguuccuuuucaccuggguaccaaacaggugugcauggcuuggagcaguuccucuugucaugaugggaaggccugguugcacgucugcgugacaggagacgauaagaacgcaaccgccagcuucauuuacaauggcaggcucguagacuccguugugucauggaguaaagauauccugcggacgcaggagagcgaaugugucugcaucaacggcacuuguacaguggugaugaccgacgggaacgcuacuggaaaggcagauacaaaaauucuguuuauagaggaggguaagaucguccauaccucuaagcucuccggcucagcccaacacguugaagagugcagcugcuauccacgcuacccgggggugagauguguaugcagggacaauuggaaaggaaguaaccggcccauuguggauaucaauauaaaggaccacucuauugucuccagcuacguguguucgggcuuaguuggugacacgccucgcaaaucugauuccucaaguagcucccauugccugaacccaaauaacgaagaagggggacacggcgugaagggcugggcuuucgacgaugggaaugacgucuggaugggacgaaccaucaacgagacaucuagacuugguuaugagacuuuuaaagugguagagggcuggagcaauucaaagaguaaauugcagaucaacaggcagguuauuguggaucguggggaccgguccggauacagcggcaucuucucugucgaagguaagucauguauuaaucgcugcuuuuauguggagcugauaagagggaggaaggaagagaccgaaguccuauggacaaguaacagcaucgugguuuucuguggcacuuccggaaccuacggcacagggucuuggcccgauggagccgaccucaaucugaugcauauuugaggacuagucccuguucccagagcccacuuuuuuuucuuuuuuugaaauaaaauagccugucuuucagaucucaaaggcucuuuucagagccaccaaaaaaaaaaaaaaaaaaaaaaaaaaaaaaaaaaaaaaaaaaaaaaaaaaaaaaaaaaaaaaaaaaaaaaaaaaaaaaaaaaaaaaaaaaaaaaaaaaaaa

SEQ ID NO: 14430 - RNA, 1682 nt, Artificial Sequence
  FLUAV/H3N2/A/Switzerland/8060/2017(H3N2)-CDC-LV21A__EPI1364258 neuraminidase mRNA human (NA)
aggagagucccgcagucggcguccagcggcucugcuuguucgugugugugucguugcaggccuuauucaagcuuaccaugaaccccaaucagaagaucauuaccauaggcagcgugucccugacaaucucuacuauuugcuucuuuaugcaaaucgccauucucaucacgaccgucacacuucacuucaaacaguacgaguuuaacucaccuccaaauaaccagguuaugcugugugaaccgacuauaaucgagagaaauauuaccgaaaucguguauuugacaaacaccacuauugagaaggaaaucugccccaaaccugcugaguacaggaauuggaguaagccacagugugggauaacaggauucgcacccuuuagcaaagacaacuccauucgguuaucugccgguggcgauaucuggguaacccgcgagccuuaugugucgugcgacccagauaaguguuaccaauucgcgcuggggcagggaacgacucuaaauaacguccauucaaauaacaccgugcgagaccguacacccuauagaacucuccugaugaaugaacuuggcguuccuuuucaccuggguaccaaacaggugugcauggcuuggagcaguuccucuugucaugaugggaaggccugguugcacgucugcgugacaggagacgauaagaacgcaaccgccagcuucauuuacaauggcaggcucguagacuccguugugucauggaguaaagauauccugcggacgcaggagagcgaaugugucugcaucaacggcacuuguacaguggugaugaccgacgggaacgcuacuggaaaggcagauacaaaaauucuguuuauagaggaggguaagaucguccauaccucuaagcucuccggcucagcccaacacguugaagagugcagcugcuauccacgcuacccgggggugagauguguaugcagggacaauuggaaaggaaguaaccggcccauuguggauaucaauauaaaggaccacucuauugucuccagcuacguguguucgcgcuuaguuggcgacacgccucgaaaaucugauuccucaaguagcucccauugccugaacccaaauaacgaagagggugggcacggagugaagggcugggcuuucgacgauggcaaugacgucuggauggggagaaccaucaacgaaacaucuaggcuuggauaugagacuuuuaaagugguagaggguuggagcaauucaaagaguaaauugcagaucaaccggcagguuauuguggaucguggcgaccgcuccggguacagcggaaucuucucugucgaaggcaagucauguauuaauagaugcuuuuauguggagcugauaaggggucggaaggaagagaccgaaguccuauggacaaguaacagcaucgugguuuucugugggacuuccggcaccuacggaacaggcucuuggcccgauggggccgaccucaaucugaugcauauuugaggacuagucccuguucccagagcccacuuuuuuuucuuuuuuugaaauaaaauagccugucuuucagaucucaaaggcucuuuucagagccaccaaaaaaaaaaaaaaaaaaaaaaaaaaaaaaaaaaaaaaaaaaaaaaaaaaaaaaaaaaaaaaaaaaaaaaaaaaaaaaaaaaaaaaaaaaaaaaaaaaaaa

SEQ ID NO: 14431 - RNA, 1682 nt, Artificial Sequence
  FLUAV/H3N2/A/Hong Kong/2671/2019__EPI1543099 neuraminidase mRNA human (NA)
aggagagucccgcagucggcguccagcggcucugcuuguucgugugugugucguugcaggccuuauucaagcuuaccaugaaccccaaucagaagaucauuaccauaggcagcgugucccugacaaucucuacuauuugcuucuuuaugcagaucgccauucucaucacgaccgucacacuucacuucaaacaguacgaguuuaacucaccuccaaauaaccagguuaugcugugugaaccgacuauaaucgagagaaauauuaccgaaaucguguauuugacaaacaccacuauugagaaggaaaucugccccaaaccugcugaguacaggaauuggaguaagccacagugugggauaacaggauucgcacccuuuagcaaagacaacuccauucgguuaucugccgguggcgauaucuggguaacccgcgagccuuaugugucgugcgaccuggauaaguguuaccaauucgcgcuagggcagggaacgacucucaauaacguccauucaaauaacaccgugcgagaccguacaccauauagaacucugcuuaugaaugaacugggcguucccuuucacuuggguaccaaacaggugugcauugcuuggagcaguuccucuugucaugaugggaaggccuggcuccacgucugcaucacaggagacgauaagaacgcaaccgccagcuucaucuacaauggcaggcugguggacuccguaguuucauggaguaacgauauucugcggacgcaggagagcgaaugugugugcauaaacggcacuuguacagucgugaugaccgacgggaaugcuacuggaaaagcagauacaaagauccucuuuauugaggaggguaaaaucgugcauaccucuaaguuauccggcucagcccaacacgucgaagagugcagcugcuauccucgcuacccagggguuagaugugugugcagggacaacuggaagggaaguaaucggccgauaauugauaucaacaucaaagaccacucuauuguauccagcuacguguguucgggccuggucggugacacgccccgcaagucugauuccucaaguagcucccauugccuuaauccuaacaaugaagaagggggacacggcgugaaaggcugggcuuucgacgaugggaacgacguuuggaugggacgaaccaucaaugagacaucuagauuggguuaugagacuuuuaagguggucgagggcuggagcaacccaaaaucaaagcugcagauuaauaggcaagugauaguagaucguggggaccggaguggauacuccggcaucuucagcguugaagguaaaucuuguauuaaccgcugcuuuuauguggagcuaaucagagggaggaaggaagagaccgaaguccucuggacaucaaauaguaucguggucuucuguggcacuagcggaaccuacggcacaggguccuggcccgauggagccgaccugaaccuuaugcauaccugaggacuagucccuguucccagagcccacuuuuuuuucuuuuuuugaaauaaaauagccugucuuucagaucucaaaggcucuuuucagagccaccaaaaaaaaaaaaaaaaaaaaaaaaaaaaaaaaaaaaaaaaaaaaaaaaaaaaaaaaaaaaaaaaaaaaaaaaaaaaaaaaaaaaaaaaaaaaaaaaaaaaa

SEQ ID NO: 14432 - RNA, 1682 nt, Artificial Sequence
  FLUAV/H3N2/A/Hong Kong/45/2019__EPI1691929 neuraminidase mRNA human (NA)
aggagagucccgcagucggcguccagcggcucugcuuguucgugugugugucguugcaggccuuauucaagcuuaccaugaaccccaaucagaagaucauuaccauaggcagcgugucccugacaaucucuacuauuugcuucuuuaugcagaucgccauucucaucacgaccgucacacuucacuucaaacaguacgaguuuaacucacugccuaauaaccagguuauguugugugaaccaacuauaaucgagagaaauauuaccgaaaucguguauuuaacaaacaccacuauugagaaggaaaucugcccgaaacccgcugaguacaggaauuggaguaagccucagugugggauaacaggauucgcaccauuuagcaaagacaacuccauucggcugucugccgguggcgauaucuggguaacccgcgagcccuaugugucgugcgaccuagauaaguguuaccaauucgcgcucgggcagggaacgacucugaauaacguccauucaaauaacaccgugcgagaccguacaccuuauagaacucuucugaugaaugaauugggcguuccauuucaccucgguaccaaacaggugugcauugcuuggagcaguuccucuugucaugaugggaaggccuggcugcacgucugcaucacaggagacgauaagaacgcaaccgccagcuucaucuacaauggcaggcugguggacuccguaguuucauggaguaacgauauucuccggacgcaggagagcgaaugugugugcauaaacggcacuuguacagucgugaugaccgacgggaaugcuacuggaaaagcagauacaaagaucuuauuuauugaggaggguaaaaucgugcauaccucuaagcuguccggcucagcccaacacgucgaagagugcagcugcuauccccgcuacccugggguuagaugugugugcagggacaacuggaagggaaguaaucggccaauaauugauaucaacaucaaagaccacucuauuguauccagcuacguguguucgggccuugucggugacacgccgcgcaagucugauuccucaaguagcucccauugcuugaaucccaacaaugaagaagggggacacggcgugaaaggcugggcuuucgacgaugggaacgacguuuggaugggacgaaccaucaaugagacaucuagacuggguuaugagacuuuuaagguggucgagggcuggagcaacccuaaaucaaagcuacagauuaauaggcaagugauaguagaucguggggaccggaguggauacuccggcaucuucagcguugaagguaaaucuuguauuaaccgcugcuuuuauguggagcucaucagagggaggaaggaagagaccgaaguccuguggacaucaaauaguaucguggucuucuguggcacuagcggaaccuacggcacaggguccuggccagauggagccgaccuuaaccugaugcauauuugaggacuagucccuguucccagagcccacuuuuuuuucuuuuuuugaaauaaaauagccugucuuucagaucucaaaggcucuuuucagagccaccaaaaaaaaaaaaaaaaaaaaaaaaaaaaaaaaaaaaaaaaaaaaaaaaaaaaaaaaaaaaaaaaaaaaaaaaaaaaaaaaaaaaaaaaaaaaaaaaaaaaa

SEQ ID NO: 14433 - RNA, 1682 nt, Artificial Sequence
  FLUAV/H3N2/A/South Australia/34/2019__EPI1387330 neuraminidase mRNA human (NA)
aggagagucccgcagucggcguccagcggcucugcuuguucgugugugugucguugcaggccuuauucaagcuuaccaugaaccccaaucagaagaucauuaccauaggcagcgugucccugacaaucucuacuauuugcuucuuuaugcagaucgccauucucaucacgaccgucacacuucacuucaaacaguacgaguuuaacucaccuccaaauaaccagguuaugcugugugaaccgacuauaaucgagagaaauauuaccgaaaucguguauuugacaaacaccacuauugagaaggaaaucugccccaaaccugcugaguacaggaauuggaguaagccacagugugggauaacaggauucgcacccuuuagcaaagacaacuccauucgguuaucugccgguggcgauaucuggguaacccgcgagccuuaugugucgugcgaccuggauaaguguuaccaauucgcgcuagggcagggaacgacucucaauaacguccauucaaauaacaccgugcgagaccguacaccauauagaacucugcuuaugaaugaacugggcguucccuuucacuuggguaccaaacaggugugcauugcuuggagcaguuccucuugucaugaugggaaggccuggcuccacgucugcaucacaggagacgauaagaacgcaaccgccagcuucaucuacaauggcaggcugguggacuccguaguuucauggaguaacgauauucugcggacgcaggagagcgaaugugugugcauaaacggcacuuguacagucgugaugaccgacgggaaugcuacuggaaaagcagauacaaagauccucuuuauugaggaggguaaaaucgugcauaccucuaaguuauccggcucagcccaacacgucgaagagugcagcugcuauccucgcuacccagggguuagaugugugugcagggacaacuggaagggaaguaaucggccgauaauugauaucaacaucaaagaccacucuauuguaucccgcuacguguguagcggccuggucggugacacgccccgaaagucggauucuuccucaaguagccauugccuuaauccuaacaaugaaaaagggggacacggcgugaagggcugggcuuucgacgaugggaacgacguuuggaugggaagaaccaucaaugagacauccagguuggguuaugaaacuuuuaaaguggucgagggcuggucuaacccaaagagcaaacugcagauuaaucggcaagugauaguagaucguggggaccgcucaggauacaguggcaucuucuccguugaggguaagagcuguauuaacagaugcuuuuauguggaacuaaucagggggcggaaggaggaaaccgagguccucuggacaucuaauucaaucguggucuucuguggcaccaguggaacuuacggcacagggagcuggcccgauggagccgaccugaaccuuaugcauauuugaggacuagucccuguucccagagcccacuuuuuuuucuuuuuuugaaauaaaauagccugucuuucagaucucaaaggcucuuuucagagccaccaaaaaaaaaaaaaaaaaaaaaaaaaaaaaaaaaaaaaaaaaaaaaaaaaaaaaaaaaaaaaaaaaaaaaaaaaaaaaaaaaaaaaaaaaaaaaaaaaaaaa

SEQ ID NO: 14434 - RNA, 1670 nt, Artificial Sequence
  FLUAV/H7N9/A/chicken/Zhejiang/C483/2013(H7N9)__AGN69396.1 neuraminidase mRNA human (NA)
aggagagucccgcagucggcguccagcggcucugcuuguucgugugugugucguugcaggccuuauucaagcuuaccaugaaccccaaucagaagauccugugcaccagcgccacagcuauuauaaucggcgcaauugccgugcucaucgggauugcgaaccuuggacugaauaucgguuugcacuuaaaaccuggcuguaacugcucccauucucaaccagagacuacgaauaccucacagacaauaaucaacaauuacuauaacgaaacuaauauuaccaacauccagauggaggaaagaacaaguaggaauuucaacaaucugaccaaggggcuauguacuauuaacagcuggcacaucuacggaaaagacaaugcuguccggauaggcgaguccucugauguucucgugacacgcgaaccguauguaucgugcgaccccgaugagugucgauuuuacgcccugucacaggguaccacgauucgugggaagcauagcaacggaacuauccacgacagaagucaauauagggcacuuauuuccuggccucugucuagcccacccaccguguacaacucccgggucgagugcaucggcuggucaaguacaagcugucaugauggcaaaucucgcauguccaucugcauuucagggccuaauaacaaugccagcgcugugguuugguauaacagaaggccaguggcagaaauaaauacuugggcccggaacaucuugcgcacccaggagagugaaugugucugccacaauggagugugucccguaguuuucacagacgguucugcuaccggcccugccgauacgcgaauuuacuacuuuaaggaggggaagauccucaaaugggagucccugacuggaacagcgaagcacauagaagagugcagcugcuauggcgaaagaaccgguauuacuuguacaugcagggacaacuggcaggggucgaaucggccagugauccagaucgauccggucgcaaugacccauacgucucaauacauuuguucccccgugcugaccgacaacccucguccaaaugaucccaacaucggaaaaugcaaugacccuuauccaggcaacaauaacaacggcgugaagggguucucauaccucgauggagccaauacaugguuaggucgcacuauuaguaccgcuagcagauccggcuaugagaugcugaaaguccccaacgcccuuacagacgacaggucuaagccgauacaggggcagacuaucguuuugaaugcagauuggagcggauacucaggcaguuuuauggacuauugggcugaaggugauuguuaccgggccugcuucuacguggagcugauucgagggcgcccuaaggaggacaaaguaugguggaccuccaacagcaucgugucuauguguucaaguacagaauuucuaggccaguggaauuggcccgauggagcgaagaucgaguauuuccucugaggacuagucccuguucccagagcccacuuuuuuuucuuuuuuugaaauaaaauagccugucuuucagaucucaaaggcucuuuucagagccaccaaaaaaaaaaaaaaaaaaaaaaaaaaaaaaaaaaaaaaaaaaaaaaaaaaaaaaaaaaaaaaaaaaaaaaaaaaaaaaaaaaaaaaaaaaaaaaaaaaaaa

SEQ ID NO: 14435 - RNA, 1685 nt, Artificial Sequence
  FLUAV/H10N8/A/Jiangxi/IPB13/2013(H10N8)__AHK10769.1 neuraminidase mRNA human (NA)
aggagagucccgcagucggcguccagcggcucugcuuguucgugugugugucguugcaggccuuauucaagcuuaccaugaaccccaaucagaagaucauuaccauaggcagcgugucccuggggcucgucauccuuaacauucuguugcacaucguuucuauuacagugacuguauuagugcugccuggaaaugguaacaaugagucaugcaacgaaacggucaucagagaguacaaugaaaccgugaggguugagaaagugacacaauggcauaacacuaaugucauagaauauaucgagcggccagagaacgaccacuucaugaauaacaccgaagcccuaugugaugcuaagggcuuugcaccguucaguaaagacaaugggauucgcaucggaagccgaggccauguguuuguaauucgugagcccuucguuuccugcucuccuacagaauguagaaccuuuuuccucacucaggguucgcugcuuaacgauaagcacucaaaugggacagugaaagacaggagcccauaccggacccugaugagugucgagaucggacagucccccaacguguaucaggcccgcuuugaggcgguggcuuggucugccacggcaugccaugauggcaagaaguggaugacuauaggcgucaccgggccugacgccaaagcuguugcagugguacacuacggagguauuccaacagaugugaucaacagcugggccggcgacauuuugagaacucaagaauccucauguaccugcauccagggggaguguuucugggucaugacagauggacccgcuaauaggcaggcccaguaucgggcguuuaaggcaaaacaaggcaagaucgugggucaggccgaaauuaguuucaacgggggacacauagaggaaugcagcuguuacccuaaugagggcaaaguugagugcgugugucgcgacaacuggaccggcacgaaucgaccaguccucgugaucucuccggaucuguccuauagaguaggguaccugugcgcuggacuccccucagacacuccuaggggugaagauagccaguuuacaggcaguugcaccucuccaauggggaaccagggauacggcguuaaggguuucggguuucggcaaggcaaugacguguggaugggacguacuauuucccgcacaagcagaucgggcuucgagaucuuaaaggucaggaacgggugggugcaaaauucuaaagaacagauaaagcggcaggucgugguugacaaccugaauugguccggauauucagguaguuucacccuucccgccgaguugacgaaacgaaacugucuggugccuugcuuuuggguagaaaugauucgcggcaauccagaggagaagaccaucuggacaagcuccucuagcaucgucaugugugggguggaucaugaaauugcagacuggucauggcacgauggagcuauccuacccuucgacauugauaaaaugugaggacuagucccuguucccagagcccacuuuuuuuucuuuuuuugaaauaaaauagccugucuuucagaucucaaaggcucuuuucagagccaccaaaaaaaaaaaaaaaaaaaaaaaaaaaaaaaaaaaaaaaaaaaaaaaaaaaaaaaaaaaaaaaaaaaaaaaaaaaaaaaaaaaaaaaaaaaaaaaaaaaaa

SEQ ID NO: 14436 - RNA, 1673 nt, Artificial Sequence
  FLUBV/H0N0/B/Colorado/06/2017__EPI1001930 neuraminidase mRNA human (NA)
aggagagucccgcagucggcguccagcggcucugcuuguucgugugugugucguugcaggccuuauucaagcuuaccaugcugcccagcaccauccagacacucacucuuuuccugacguccggcgggguguuguuaucucuguacgucucagccagucuaagcuaucuccuguacuccgacauucuucugaaguuuucuccuaccgagauaacagcuccaacuaugccguuggauugcgcaaacgccucgaauguucaagcggugaacagaucagcuaccaaaggaguaacacuccugcugcccgaaccugaguggaccuauccaaggcucagcugucccgguaguacuuuccagaaggccuuacugaucuccccucaccgguuuggcgaaacaaaaggaaauucugcaccacuuauuauccgcgagcccuucguggccugcgggccuaacgaauguaagcauuuugcuuugacccacuacgcagcccagccaggcgguuauuacaaugggacgcgaggagaccguaacaaacugagacaucuaauuagcgucaagcucggcaagaucccgacuguggaaaauuccauauuccacauggcugccuggucaggcagugcgugccaugaugggaaagaguggaccuauaucggaguugacggucccgauaacaaugcacugcuuaaggugaaauacggcgaggccuacacagacacuuaucacagcuacgcuaacaauauucugaggacccaggagucugccuguaacugcaucgggggaaauuguuauuugaugauuacagauggcuccgcaucaggugucagcgaaugccgguuucucaagauccgcgaggggagaauaauuaaagagaucuucccuaccggaagggugaagcacacggaagaguguacuugcggcuuugcuaguaacaagacaauugaaugugccugccgggacaaucgcuacaccgcgaaacgaccauucguaaagcugaacguugagacugauacagccgaaaucagauuaaugugcaccgacacguaucuggauacccccaggccuaacgacggcucuaucacagggccaugugaguccgauggagacaaagguagcggcgggauuaagggaggcuuugugcaucaacggaugaaaucgaagauaggucguugguacucucgcacuaugucccagaccgagagaauggggaugggccucuaugucaaauacggaggcgaccccugggcagauucagacgcucuugccuucaguggggugauggugagcaugaaggaaccgggaugguacuccuuugguuucgagaucaaggauaaaaagugcgacgucccuuguauuggcaucgaaaugguucacgaugggggaaaagagacauggcauucugcugccacugcaauauauugccugaugggcagcggucaguugcuaugggacaccgugacagggguagauauggcccugugaggacuagucccuguucccagagcccacuuuuuuuucuuuuuuugaaauaaaauagccugucuuucagaucucaaaggcucuuuucagagccaccaaaaaaaaaaaaaaaaaaaaaaaaaaaaaaaaaaaaaaaaaaaaaaaaaaaaaaaaaaaaaaaaaaaaaaaaaaaaaaaaaaaaaaaaaaaaaaaaaaaaa

SEQ ID NO: 14437 - RNA, 1673 nt, Artificial Sequence
  FLUBV/H0N0/B/Washington/02/2019__EPI1368872 neuraminidase mRNA human (NA)
aggagagucccgcagucggcguccagcggcucugcuuguucgugugugugucguugcaggccuuauucaagcuuaccaugcugcccagcaccauccagacacucacucuuuuccugacguccggcgggguguuguuaucucuguacgucucagccagucuaagcuaucuccuguacuccgacauucuucugaaguuuucuccuaccgagauaacagcuccaacuaugccguuggauugcgcaaacgccucgaauguucaagcggugaacagaucagcuaccaaaggaguaacacuccugcugcccgaaccugaguggaccuauccaaggcucagcugucccgguaguacuuuccagaaggccuuacugaucuccccucaccgguuuggcgaaacaaaaggaaauucugcaccacuuauuauccgcgagcccuucguggccugcgggccuaacgaauguaagcauuuugcuuugacccacuacgcagcccagccaggcgguuauuacaaugggacgcgaggagaccguaacaaacugagacaucuaauuagcgucaagcucggcaagaucccgacuguggaaaauuccauauuccacauggcugccuggucaggcagugcgugccaugaugggaaagaguggaccuauaucggaguugacggucccgauaacaaugcacugcuuaaggugaaauacggcgaggccuacacagacacuuaucacagcuacgcuaacaauauucugaggacccaggagucugccuguaacugcaucgggggaaauuguuauuugaugauuacagauggcuccgcaucaggugucagcgaaugccgguuucucaagauccgcgaggggagaauaauuaaagagaucuucccuaccggaagggugaagcacacggaagaguguacuugcggcuuugcuaguaacaagacaauugaaugugccugccgggacaaucgcuacaccgcgaaacgaccauucguaaagcugaacguugagacugauacagccgaaaucagauuaaugugcaccgacacguaucuggauacccccaggccuaacgacggcucuaucacagggccaugugaguccgauggagacaaagguagcggcgggauuaagggaggcuuugugcaucaacggaugaaaucgaagauaggucguugguacucucgcacuauguccaaaaccgagagaauggggaugggccucuaugucaaguacggaggcgaccccugggcagauucagacgcucuuacauucaguggggugauggugagcaugaaggaaccgggaugguacuccuuugguuucgagaucaaagauaagaaaugcgacgucccuuguauuggcaucgaaaugguucacgaugggggaaaggagacuuggcauucugccgcuaccgccauauauugccugaugggcagcggucaguugcuaugggacacagugaccgggguagauauggcacugugaggacuagucccuguucccagagcccacuuuuuuuucuuuuuuugaaauaaaauagccugucuuucagaucucaaaggcucuuuucagagccaccaaaaaaaaaaaaaaaaaaaaaaaaaaaaaaaaaaaaaaaaaaaaaaaaaaaaaaaaaaaaaaaaaaaaaaaaaaaaaaaaaaaaaaaaaaaaaaaaaaaaa

SEQ ID NO: 14438 - RNA, 1918 nt, Artificial Sequence
  FLUAV/H1N1/A/California/7/2009__ACP41953 hemagglutinin mRNA gc (HA)
aggagaaagcuuaccaugaaggccauccuggugguccuccuguacaccuucgccaccgcgaacgccgacacgcugugcaucggcuaccacgccaacaacagcaccgacaccguggacaccgugcucgagaagaacgucacggugacccacuccgugaaccugcuggaggacaagcacaacgggaagcucugcaagcugcggggcgucgccccgcugcaccucgggaagugcaacaucgccggcuggauccuggggaacccggagugcgagagccuguccaccgcgagcuccuggagcuacaucguggagacccccuccagcgacaacggcacgugcuaccccggcgacuucaucgacuacgaggagcuccgcgagcagcuguccagcguguccagcuucgagcgguucgagaucuuccccaagaccuccagcuggccgaaccacgacuccaacaagggggucaccgccgccugcccccacgccggcgccaagagcuucuacaagaaccugaucuggcucgugaagaaggggaacuccuaccccaagcugagcaaguccuacaucaacgacaagggcaaggaggugcugguccucugggggauccaccaccccagcaccagcgcggaccagcagucccuguaccagaacgccgacgccuacguguucgugggcagcucccgcuacagcaagaaguucaagccggagaucgccauccggcccaagguccgcgaccaggagggccgcaugaacuacuacuggacccugguggagcccggggacaagaucaccuucgaggcgaccggcaaccucguggucccccgguacgccuucgccauggagcgcaacgccggguccggcaucaucaucagcgacacgccggugcacgacugcaacacgaccugccagacccccaagggcgccaucaacaccucccugcccuuccagaacauccaccccaucaccaucgggaagugcccgaaguacgucaagagcaccaagcugcggcucgcgaccggccugcgcaacauccccuccauccagagccgggggcuguucggcgccaucgccggguucaucgagggcggcuggacggggaugguggacggcugguacggguaccaccaccagaacgagcagggcagcggguacgccgccgaccucaaguccacgcagaacgcgaucgacgagaucaccaacaaggugaacagcgucaucgagaagaugaacacccaguucaccgccgugggcaaggaguucaaccaccuggagaagcggaucgagaaccugaacaagaaggucgacgacggcuuccucgacaucuggacguacaacgccgagcugcuggugcuccuggagaacgagcgcacccuggacuaccacgacuccaacgugaagaaccucuacgagaagguccggagccagcugaagaacaacgccaaggagaucgggaacggcugcuucgaguucuaccacaagugcgacaacacgugcauggaguccgugaagaacgggaccuacgacuaccccaaguacagcgaggaggccaagcugaaccgcgaggagaucgacggcgugaagcucgaguccacccggaucuaccagauccuggcgaucuacagcaccgucgccagcucccuggugcucguggucagccugggggccaucuccuucuggaugugcagcaacggcucccugcagugccgcaucugcaucugaggacuaguuauaagacugacuagcccgaugggccucccaacgggcccuccuccccuccuugcaccgagauuaauaaaaaaaaaaaaaaaaaaaaaaaaaaaaaaaaaaaaaaaaaaaaaaaaaaaaaaaaaaaaaaaaugcaucccccccccccccccccccccccccccccccaaaggcucuuuucagagccaccagaauu

SEQ ID NO: 14439 - RNA, 1918 nt, Artificial Sequence
  FLUAV/H1N1/A/Michigan/45/2015__EPI662594 hemagglutinin mRNA gc (HA)
aggagaaagcuuaccaugaaggccauccuggugguccuccuguacaccuucaccacggccaacgcggacacccugugcaucggcuaccacgccaacaacagcaccgacaccguggacacggugcucgagaagaacgucaccgugacccacuccgugaaccugcuggaggacaagcacaacgggaagcucugcaagcugcgcggcgucgcgccccugcaccucgggaagugcaacaucgccggcuggauccuggggaacccggagugcgagagccuguccaccgccagcuccuggagcuacaucguggagacguccaacagcgacaacgggaccugcuaccccggcgacuucaucaacuacgaggagcuccgggagcagcuguccagcguguccagcuucgagcgcuucgagaucuuccccaagaccuccagcuggcccaaccacgacuccaacaagggcgucaccgccgccugcccgcacgccggcgccaagagcuucuacaagaaccugaucuggcucgugaagaaggggaacuccuaccccaagcugaaccagagcuacaucaacgacaagggcaaggaggugcugguccucugggggauccaccaccccuccacgaccgcggaccagcagagccuguaccagaacgccgacgccuacguguucgugggcaccagccgguacuccaagaaguucaagcccgagaucgccacccgcccgaagguccgggaccaggagggccgcaugaacuacuacuggacgcugguggagcccggggacaagaucaccuucgaggccaccggcaaccucguggucccccgguacgcguucaccauggagcgcaacgccgggagcggcaucaucaucuccgacacgcccgugcacgacugcaacacgaccugccagaccccggagggcgccaucaacaccagccugcccuuccagaacauccaccccaucaccaucgggaagugccccaaguacgugaaguccaccaagcugcggcucgccaccggccugcgcaacgucccgagcauccagucccgggggcuguucggcgccaucgcgggguucaucgagggcggcuggacggggaugguggacggcugguacggguaccaccaccagaacgagcagggcagcggguacgccgccgaccucaaguccacccagaacgccaucgacaagaucaccaacaaggugaacagcgucaucgagaagaugaacacccaguucacggccgugggcaaggaguucaaccaccuggagaagcgcaucgagaaccugaacaagaaggucgacgacggcuuccucgacaucuggaccuacaacgcggagcugcuggugcuccuggagaacgagcggacccuggacuaccacgacuccaacgugaagaaccucuacgagaagguccgcaaccagcugaagaacaacgccaaggagaucgggaacggcugcuucgaguucuaccacaagugcgacaacacgugcauggagagcgugaagaacgggaccuacgacuaccccaaguacuccgaggaggccaagcugaaccgggagaagaucgacggcgugaagcucgagagcacccgcaucuaccagauccuggccaucuacuccaccgucgccagcucccuggugcucguggucagccugggggcgaucuccuucuggaugugcagcaacggcagccugcagugccggaucugcaucugaggacuaguuauaagacugacuagcccgaugggccucccaacgggcccuccuccccuccuugcaccgagauuaauaaaaaaaaaaaaaaaaaaaaaaaaaaaaaaaaaaaaaaaaaaaaaaaaaaaaaaaaaaaaaaaaugcaucccccccccccccccccccccccccccccccaaaggcucuuuucagagccaccagaauu

SEQ ID NO: 14440 - RNA, 1918 nt, Artificial Sequence
  FLUAV/H1N1/A/Netherlands/602/2009__ACQ45338 hemagglutinin mRNA gc (HA)
aggagaaagcuuaccaugaaggccauccuggugguccuccuguacaccuucgccaccgcgaacgccgacacgcugugcaucggcuaccacgccaacaacagcaccgacaccguggacaccgugcucgagaagaacgucacggugacccacuccgugaaccugcuggaggacaagcacaacgggaagcucugcaagcugcggggcgucgccccgcugcaccucgggaagugcaacaucgccggcuggauccuggggaacccggagugcgagagccuguccaccgcgagcuccuggagcuacaucguggagaccuccagcuccgacaacggcacgugcuaccccggcgacuucaucgacuacgaggagcuccgcgagcagcugagcuccgugagcuccuucgagcgguucgagaucuuccccaagaccagcuccuggcccaaccacgacagcaacaagggggucaccgccgccugcccgcacgccggcgcgaaguccuucuacaagaaccugaucuggcucgugaagaaggggaacagcuaccccaagcuguccaagagcuacaucaacgacaagggcaaggaggugcugguccucugggggauccaccaccccagcaccuccgccgaccagcagagccuguaccagaacgccgacgccuacguguucgugggcuccagccgcuacuccaagaaguucaagcccgagaucgccauccggccgaagguccgcgaccaggagggccggaugaacuacuacuggacgcugguggagcccggggacaagaucaccuucgaggcgaccggcaaccucguggucccccgcuacgccuucgccauggagcggaacgccgggagcggcaucaucaucuccgacacccccgugcacgacugcaacacgaccugccagaccccgaagggcgccaucaacaccagccugcccuuccagaacauccaccccaucacgaucgggaagugccccaaguacgugaaguccaccaagcugcgccucgcgaccggccugcggaacgucccgagcauccagucccgcgggcuguucggcgccaucgccggguucaucgagggcggcuggaccgggaugguggacggcugguacggguaccaccaccagaacgagcagggcagcggguacgccgccgaccucaaguccacgcagaacgcgaucgacgagaucaccaacaaggugaacagcgucaucgagaagaugaacacccaguucaccgccgugggcaaggaguucaaccaccuggagaagcggaucgagaaccugaacaagaaggucgacgacggcuuccucgacaucuggacguacaacgccgagcugcuggugcuccuggagaacgagcgcacccuggacuaccacgacuccaacgugaagaaccucuacgagaagguccggagccagcugaagaacaacgccaaggagaucgggaacggcugcuucgaguucuaccacaagugcgacaacaccugcauggaguccgugaagaacgggaccuacgacuaccccaaguacagcgaggaggccaagcugaaccgcgaggagaucgacggcgugaagcucgaguccacgcggaucuaccagauccuggcgaucuacagcaccgucgccagcucccuggugcucguggucagccugggggccaucuccuucuggaugugcagcaacggcucccugcagugccgcaucugcaucugaggacuaguuauaagacugacuagcccgaugggccucccaacgggcccuccuccccuccuugcaccgagauuaauaaaaaaaaaaaaaaaaaaaaaaaaaaaaaaaaaaaaaaaaaaaaaaaaaaaaaaaaaaaaaaaaugcaucccccccccccccccccccccccccccccccaaaggcucuuuucagagccaccagaauu

SEQ ID NO: 14441 - RNA, 1918 nt, Artificial Sequence
  FLUAV/H3N2/A/Hong Kong/4801/2014__EPI643118 hemagglutinin mRNA gc (HA)
aggagaaagcuuaccaugaagaccaucaucgcccugagcuacauccucugccugguguucgcccagaagauccccggcaacgacaacuccaccgcgacgcugugccucgggcaccacgccgucccgaacggcaccaucgugaagaccaucaccaacgaccgcaucgaggugacgaacgccaccgagcugguccagaacagcuccaucggggagaucugcgacagcccccaccagauccuggacggcgagaacugcacccucaucgacgcccugcugggggacccccagugcgacggcuuccagaacaagaagugggaccucuucguggagcgguccaaggccuacagcaacugcuaccccuacgacgugccggacuacgcgucccugcgcagccuggucgccuccagcggcacccucgaguucaacaacgaguccuucaacuggacgggggugacccagaacggcaccagcuccgccugcauccggcgcagcuccagcuccuucuucagccggcugaacuggcugacccaccucaacuacaaguaccccgcccugaacgugacgaugcccaacaacgagcaguucgacaagcuguacaucuggggcguccaccaccccgggaccgacaaggaccagaucuucccguacgcgcaguccagcgggcgcaucaucgugagcaccaagcggucccagcaggccgugauccccaacaucggcagccgcccccggauccgcgacaucccgucccggaucagcaucuacuggaccaucgucaagccgggcgacauccuccugaucaacuccacggggaaccugaucgccccgcgcggcuacuucaagcuccggagcgggaaguccagcaucaugcgcuccgacgcccccaucggcaagugcaagagcgagugcaucacccccaacggcuccaucccgaacgacaagcccuuccagaacgugaaccggaucaccuacggggccugcccccgcuacgugaagcacagcacccugaagcuggcgacgggcaugcggaacguccccgagaagcagacccgcgggaucuucggcgccaucgccggguucaucgagaacggcugggagggcaugguggacgggugguacggcuuccggcaccagaacuccgaggggcgcggccaggccgccgaccucaagagcacccaggcggccaucgaccagaucaacgggaagcugaaccggcugaucggcaagaccaacgagaaguuccaccagaucgagaaggaguucuccgagguggagggccgcauccaggaccucgagaaguacgucgaggacacgaagaucgaccuguggagcuacaacgccgagcugcucguggcccuggagaaccagcacaccaucgaccugaccgacuccgagaugaacaagcucuucgagaagaccaagaagcagcugcgcgagaacgccgaggacauggggaacggcugcuucaagaucuaccacaagugcgacaacgcgugcaucgggagcauccggaacggcacguacgaccacaacguguaccgcgacgaggcccugaacaaccgguuccagaucaagggggucgagcucaaguccggcuacaaggacuggauccuguggaucagcuucgccaucagcugcuuccugcucugcguggcccugcugggcuucaucaugugggccugccagaaggggaacauccgcugcaacaucugcaucugaggacuaguuauaagacugacuagcccgaugggccucccaacgggcccuccuccccuccuugcaccgagauuaauaaaaaaaaaaaaaaaaaaaaaaaaaaaaaaaaaaaaaaaaaaaaaaaaaaaaaaaaaaaaaaaaugcaucccccccccccccccccccccccccccccccaaaggcucuuuucagagccaccagaauu

SEQ ID NO: 14442 - RNA, 1975 nt, Artificial Sequence
  FLUBV/H0N0/B/Brisbane/60/2008__FJ766840 hemagglutinin mRNA gc (HA)
aggagaaagcuuaccaugaaggccaucaucgugcugcucauggucgugaccagcaacgccgaccggaucugcaccggcaucacguccagcaacuccccgcacguggucaagaccgcgacccagggggaggugaacgugaccggcgucaucccgcugacgaccacccccaccaagagccacuucgccaaccugaaagggacggagacccgcggcaagcucugccccaagugccugaacugcaccgaccuggacguggcccucgggcggcccaagugcaccggcaaaaucccguccgcccgcgugagcauccugcacgagguccggcccgugacguccggcugcuuccccaucaugcacgaccgcaccaagauccggcagcugcccaaccuccugcgcggguacgagcacauccggcugagcacccacaacgugaucaacgccgagaacgcgccgggcgggcccuacaagaucggcaccuccgggagcugccccaacaucacgaacggcaacggcuucuucgccaccauggccugggccguccccaagaacgacaagaacaaaaccgcgaccaacccgcucacgaucgaggugcccuacaucugcaccgagggggaggaccagaucaccguguggggcuuccacuccgacaacgagacccagauggccaagcuguacggggacagcaagccccagaaguucacguccagcgccaacggcgucaccacccacuacgugucccagaucggcggguuccccaaccagaccgaggacggcgggcugccgcagagcggccgcaucguggucgacuacauggugcagaaauccgggaagacgggcaccaucaccuaccagcggggcauccuccugccccagaagguguggugcgccagcgggcgcuccaaggucaucaaaggcagccugccccucaucggggaggccgacugccugcacgagaaguacggcgggcugaacaagagcaagcccuacuacaccggcgagcacgcgaaagccaucggcaacugcccgaucugggugaagacgccccucaagcuggccaacgggaccaaguaccggccgcccgccaaacugcucaaggagcgcggcuucuucggggccaucgcgggcuuccuggagggcgggugggagggcaugaucgccggguggcacggcuacaccucccacggggcccacggcguggccgucgccgcggaccucaagagcacccaggaggccaucaacaaaaucacgaagaaccugaacucccugagcgagcuggaggugaagaaccuccagcggcuguccggcgccauggacgagcugcacaacgagauccucgagcuggacgagaaggucgacgaccugcgcgccgacaccaucagcucccagaucgagcucgccgugcugcugagcaacgaggggaucaucaacuccgaggacgagcaccuccuggcgcuggagcggaaacucaagaagaugcugggccccagcgccguggagaucgggaacggcugcuucgagaccaagcacaagugcaaccagaccugccuggaccgcaucgccgccgggaccuucgacgcgggcgaguucucccuccccacguucgacagccugaacaucaccgccgccucccugaacgacgacggccuggacaaccacaccauccuccuguacuacagcaccgccgccuccagccuggcggucacgcucaugaucgccaucuucgugguguacauggucucccgggacaacgugagcugcuccaucugccugugaggacuaguuauaagacugacuagcccgaugggccucccaacgggcccuccuccccuccuugcaccgagauuaauaaaaaaaaaaaaaaaaaaaaaaaaaaaaaaaaaaaaaaaaaaaaaaaaaaaaaaaaaaaaaaaaugcaucccccccccccccccccccccccccccccccaaaggcucuuuucagagccaccagaauu

SEQ ID NO: 14443 - RNA, 1972 nt, Artificial Sequence
  FLUBV/H0N0/B/Phuket/3073/2013__EPI540671 hemagglutinin mRNA gc (HA)
aggagaaagcuuaccaugaaggccaucaucgugcugcucauggucgugaccagcaacgccgaccgcaucugcaccggcaucacguccagcaacuccccgcacguggucaagaccgcgacccagggggaggugaacgugaccggcgucaucccccugacgaccacccccaccaagagcuacuucgccaaccugaaggggacgcggacccgcggcaaacucugccccgacugccugaacugcaccgaccuggacguggcccucgggcggcccaugugcgugggcaccacgccguccgccaaggccagcauccugcacgagguccgccccgugaccuccggcugcuuccccaucaugcacgaccggaccaagauccgccagcugcccaaccuccugcggggguacgagaagauccgccugagcacccagaacgugaucgacgcggagaaagccccgggcgggcccuaccggcucggcacguccgggagcugccccaacgccaccuccaagaucggcuucuucgccaccauggcgugggccguccccaaggacaacuacaagaacgccaccaacccgcugacgguggaggugcccuacaucugcaccgagggcgaggaccagaucaccgucuggggguuccacagcgacaacaagacccagaugaaaucccuguacggcgacagcaacccccagaaguucacguccagcgccaacggggugaccacccacuacgugucccagaucggcgacuuccccgaccagaccgaggacggcgggcucccgcagagcggccgcaucgucguggacuacaugaugcagaagcccgggaagacgggcaccaucguguaccagcggggcguccugcugccccagaaaguguggugcgccuccgggcgcagcaaggugaucaagggcagccucccccugaucggggaggcggacugccugcacgaggaguacggcgggcucaacaaguccaaaccguacuacaccggcaagcacgccaaggccaucgggaacugccccaucugggucaagaccccgcugaaacuggccaacggcacgaaauaccggcccccggccaagcuccugaaggagcgcggcuucuucggggcgaucgccggcuuccuggagggcgggugggaggggaugaucgccggcuggcacggcuacaccagccacggggcccacggcguggccgucgcggccgaccucaaguccacccaggaggccaucaacaaaaucaccaagaaccugaacagccuguccgagcucgaggugaagaaccugcagcggcugagcggggccauggacgagcuccacaacgagauccuggagcuggacgagaagguggacgaccuccgcgccgacacgaucuccagccagaucgagcuggcgguccugcucuccaacgagggcaucaucaacagcgaggacgagcaccuccuggcccucgagcggaaacugaagaagaugcugggccccuccgccguggacaucgggaacggcugcuucgagaccaagcacaagugcaaccagaccugccucgaccgcaucgccgcggggaccuucaacgccggcgaguucagccugcccaccuucgacucccugaacaucacggccgccagccugaacgacgacgggcucgacaaccacaccauccugcuguacuacuccaccgccgcgagcucccucgccgugacccugaugcuggccaucuucaucgucuacauggugagccgggacaacguguccugcagcaucugccucugaggacuaguuauaagacugacuagcccgaugggccucccaacgggcccuccuccccuccuugcaccgagauuaauaaaaaaaaaaaaaaaaaaaaaaaaaaaaaaaaaaaaaaaaaaaaaaaaaaaaaaaaaaaaaaaaugcaucccccccccccccccccccccccccccccccaaaggcucuuuucagagccaccagaauu

SEQ ID NO: 14444 - RNA, 1912 nt, Artificial Sequence
  FLUAV/H1N1/A/Brisbane/02/2018__EPI1212834 hemagglutinin mRNA gc (HA)
aggagaaagcuuaccaugaaggccauccuggugguccuccuguacaccuucaccacggccaacgcggacacccugugcaucggcuaccacgccaacaacagcaccgacaccguggacacggugcucgagaagaacgucaccgugacccacuccgugaaccugcuggaggacaagcacaacgggaagcucugcaagcugggcggggucgcgccccugcaccucggcaagugcaacaucgccggguggauccugggcaacccggagugcgagagccuguccaccgcccgcagcugguccuacaucguggagacgagcaacuccgacaacgggaccugcuaccccggcgacuucaucaacuacgaggagcuccgggagcagcugagcuccgugagcuccuucgagcgcuucgagaucuuccccaagaccagcuccuggcccaaccacgacagcaacaagggcgucaccgccgccugcccgcacgccggggccaaguccuucuacaagaaccugaucuggcucgugaagaagggcaacagcuaccccaagcugaaccagacguacaucaacgacaaggggaaggaggugcugguccucuggggcauccaccacccgcccaccaccgcggaccagcagucccuguaccagaacgccgacgccuacguguucgugggcaccagccgguacuccaagaaguucaagcccgagaucgccacgcgccccaagguccgggaccgcgaggggcggaugaacuacuacuggacccugguggagcccggcgacaagaucaccuucgaggccaccgggaaccucguggucccccgcuacgcguucacgauggagcggaacgccggcagcggcaucaucaucagcgacaccccggugcacgacugcaacacgaccugccagaccgccgagggggccaucaacaccucccugcccuuccagaacgugcaccccgucaccaucggcaagugccccaaguacgucaagagcaccaagcugcgccucgccacggggcugcggaacgugccguccauccagagccgcggccuguucggggcgaucgccggcuucaucgagggcggguggaccggcaugguggacgggugguacggcuaccaccaccagaacgagcagggguccggcuacgccgccgaccucaagagcaacgccaucgacaagaucaccaacaaggugaacuccgucaucgagaagaugaacacccaguucacggcggugggcaaggaguucaaccaccuggagaagcggaucgagaaccugaacaagaagguggacgacggguuccucgacaucuggaccuacaacgccgagcugcugguccuccuggagaacgagcgcacccuggacuaccacgacagcaacgugaagaaccucuacgagaaggugcggaaccagcugaagaacaacgccaaggagaucggcaacgggugcuucgaguucuaccacaagugcgacaacacgugcauggaguccgucaagaacggcaccuacgacuaccccaaguacagcgaggaggccaagcugaaccgcgagaagaucgacggggugaagcucgaguccacccggaucuaccagauccuggccaucuacagcaccguggcguccagccugguccucguggugucccugggcgccaucagcuucuggaugugcuccaacggcagccugcagugccgcaucugcaucugaggacuaguuauaagacugacuagcccgaugggccucccaacgggcccuccuccccuccuugcaccgagauuaauaaaaaaaaaaaaaaaaaaaaaaaaaaaaaaaaaaaaaaaaaaaaaaaaaaaaaaaaaaaaaaaaugcaucccccccccccccccccccccccccccccccaaaggcucuuuucagagccaccagaauu

SEQ ID NO: 14445 - RNA, 1912 nt, Artificial Sequence
  FLUAV/H1N1/A/Brisbane/02/2018__EPI1671767 hemagglutinin mRNA gc (HA)
aggagaaagcuuaccaugaaggccauccuggugguccuccuguacaccuucaccacggccaacgcggacacccugugcaucggcuaccacgccaacaacagcaccgacaccguggacacggugcucgagaagaacgucaccgugacccacuccgugaaccugcuggaggacaagcacaacgggaagcucugcaagcugggcggggucgcgccccugcaccucggcaagugcaacaucgccggguggauccugggcaacccggagugcgagagccuguccaccgcccgcagcugguccuacaucguggagacgagcaacuccgacaacgggaccugcuaccccggcgacuucaucaacuacgaggagcuccgggagcagcugagcuccgugagcuccuucgagcgcuucgagaucuuccccaagaccagcuccuggcccaaccacgacagcaacaagggcgucaccgccgccugcccgcacgccggggccaaguccuucuacaagaaccugaucuggcucgugaagaagggcaacagcuaccccaagcugaaccagacguacaucaacgacaaggggaaggaggugcugguccucuggggcauccaccacccgcccaccaccgcggaccagcagucccuguaccagaacgccgacgccuacguguucgugggcaccagccgguacuccaagaaguucaagcccgagaucgccacgcgccccaagguccgggaccaggaggggcgcaugaacuacuacuggacccugguggagcccggcgacaagaucaccuucgaggccaccgggaaccucguggucccccgguacgcguucacgauggagcgcaacgccggcagcggcaucaucaucagcgacaccccggugcacgacugcaacacgaccugccagaccgccgagggggccaucaacaccucccugcccuuccagaacgugcaccccgucaccaucggcaagugccccaaguacgucaagagcaccaagcugcggcucgccacggggcugcgcaacgugccguccauccagagccggggccuguucggggcgaucgccggcuucaucgagggcggguggaccggcaugguggacgggugguacggcuaccaccaccagaacgagcagggguccggcuacgccgccgaccucaagagcaacgccaucgacaagaucaccaacaaggugaacuccgucaucgagaagaugaacacccaguucacggcggugggcaaggaguucaaccaccuggagaagcgcaucgagaaccugaacaagaagguggacgacggguuccucgacaucuggaccuacaacgccgagcugcugguccuccuggagaacgagcggacccuggacuaccacgacagcaacgugaagaaccucuacgagaaggugcgcaaccagcugaagaacaacgccaaggagaucggcaacgggugcuucgaguucuaccacaagugcgacaacacgugcauggaguccgucaagaacggcaccuacgacuaccccaaguacagcgaggaggccaagcugaaccgggagaagaucgacggggugaagcucgaguccacccgcaucuaccagauccuggccaucuacagcaccguggcguccagccugguccucguggugucccugggcgccaucagcuucuggaugugcuccaacggcagccugcagugccggaucugcaucugaggacuaguuauaagacugacuagcccgaugggccucccaacgggcccuccuccccuccuugcaccgagauuaauaaaaaaaaaaaaaaaaaaaaaaaaaaaaaaaaaaaaaaaaaaaaaaaaaaaaaaaaaaaaaaaaugcaucccccccccccccccccccccccccccccccaaaggcucuuuucagagccaccagaauu

SEQ ID NO: 14446 - RNA, 1912 nt, Artificial Sequence
  FLUAV/H1N1/A/Guangdong-Maonan/SWL1536/2019__EPI1542570 hemagglutinin mRNA gc (HA)
aggagaaagcuuaccaugaaggccauccuggugguccuccuguacaccuucaccacggccaacgcggacacccugugcaucggcuaccacgccaacaacagcaccgacaccguggacacggugcucgagaagaacgucaccgugacccacuccgugaaccugcuggaggacaagcacaacgggaagcucugcaagcugcgcggcgucgcgccccugcaccucgggaagugcaacaucgccggcuggauccuggggaacccggagugcgagagccuguccaccgcccggagcugguccuacaucguggagacgagcaacuccgacaacgggaccugcuaccccggcgacuucaucaacuacgaggagcuccgcgagcagcugagcuccgugagcuccuucgagcgguucgagaucuuccccaagaccagcuccuggcccaaccacgacagcgacaagggcgucaccgccgccugcccgcacgccggcgccaaguccuucuacaagaaccugaucuggcucgugaagaaggggaacagcuaccccaagcugaaccagacguacaucaacgacaagggcaaggaggugcugguccucugggggauccaccacccgcccaccaucgcggcccaggagucccuguaccagaacgccgacgccuacguguucgugggcaccagccgcuacuccaagaaguucaagcccgagaucgccacccggcccaagguccgcgaccaggagggccggaugaacuacuacuggacgcugguggagcccggggacaagaucaccuucgaggcgaccggcaaccucguggucccccgcuacgccuucaccauggagcgggacgccgggagcggcaucaucaucagcgacacgccggugcacgacugcaacacgaccugccagacccccgagggcgccaucaacaccucccugcccuuccagaacgugcaccccaucaccaucgggaagugcccgaaguacgucaagagcaccaagcugcgccucgccaccggccugcggaacgugcccuccauccagagccgcgggcuguucggcgcgaucgccggguucaucgagggcggcuggacggggaugguggacggcugguacggguaccaccaccagaacgagcagggcuccggguacgccgccgaccucaagagcaacgccaucgacaagaucaccaacaaggucaacuccgugaucgagaagaugaacacccaguucaccgcggucggcaaggaguucaaccaccuggagaagcggaucgagaaccugaacaagaagguggacgacggcuuccucgacaucuggacguacaacgccgagcugcuggugcuccuggagaacgagcgcacccuggacuaccacgacagcaacgucaagaaccucuacgagaaggugcggaaccagcugaagaacaacgccaaggagaucgggaacggcugcuucgaguucuaccacaagugcgacaacacgugcauggaguccgugaagaacgggaccuacgacuaccccaaguacagcgaggaggccaagcugaaccgcgagaagaucgacggcgucaagcucgaguccacccggaucuaccagauccuggccaucuacagcaccguggcguccagccuggugcucgucgugucccugggggccaucagcuucuggaugugcuccaacggcagccugcagugccgcaucugcaucugaggacuaguuauaagacugacuagcccgaugggccucccaacgggcccuccuccccuccuugcaccgagauuaauaaaaaaaaaaaaaaaaaaaaaaaaaaaaaaaaaaaaaaaaaaaaaaaaaaaaaaaaaaaaaaaaugcaucccccccccccccccccccccccccccccccaaaggcucuuuucagagccaccagaauu

SEQ ID NO: 14447 - RNA, 1912 nt, Artificial Sequence
  FLUAV/H1N1/A/Guangdong-Maonan/SWL1536/2019__EPI1590725 hemagglutinin mRNA gc (HA)
aggagaaagcuuaccaugaaggccauccuggugguccuccuguacaccuucaccacggccaacgcggacacccugugcaucggcuaccacgccaacaacagcaccgacaccguggacacggugcucgagaagaacgucaccgugacccacuccgugaaccugcuggaggacaagcacaacgggaagcucugcaagcugcgcggcgucgcgccccugcaccucgggaagugcaacaucgccggcuggauccuggggaacccggagugcgagagccuguccaccgcccggagcugguccuacaucguggagacgagcaacuccgacaacgggaccugcuaccccggcgacuucaucaacuacgaggagcuccgcgagcagcugagcuccgugagcuccuucgagcgguucgagaucuuccccaagaccagcuccuggcccaaccacgacagcgacaagggcgucaccgccgccugcccgcacgccggcgccaaguccuucuacaagaaccugaucuggcucgugaagaaggggaacagcuaccccaagcugaaccagacguacaucaacgacaagggcaaggaggugcugguccucugggggauccaccacccgcccaccaucgcggugcaggagucccuguaccagaacgccgacgccuacguguucgucggcaccagccgcuacuccaagaaguucaagcccgagaucgccacccggcccaaggugcgcgaccaggagggccggaugaacuacuacuggacgcugguggagcccggggacaagaucaccuucgaggccaccggcaaccucgucgugccccgcuacgcguucaccauggagcgggacgccgggagcggcaucaucaucagcgacacgccggugcacgacugcaacacgaccugccagacccccgagggcgccaucaacaccucccugcccuuccagaacguccaccccaucaccaucgggaagugcccgaaguacgucaagagcaccaagcugcgccucgccaccggccugcggaacgugcccuccauccagagccgcgggcuguucggcgccaucgcgggguucaucgagggcggcuggacggggaugguggacggcugguacggguaccaccaccagaacgagcagggcuccggguacgccgccgaccucaagagcaacgccaucgacaagaucaccaacaaggugaacuccgucaucgagaagaugaacacccaguucaccgccgugggcaaggaguucaaccaccuggagaagcggaucgagaaccugaacaagaagguggacgacggcuuccucgacaucuggacguacaacgcggagcugcugguccuccuggagaacgagcgcacccuggacuaccacgacagcaacgugaagaaccucuacgagaaggugcggaaccagcugaagaacaacgccaaggagaucgggaacggcugcuucgaguucuaccacaagugcgacaacacgugcauggaguccgucaagaacgggaccuacgacuaccccaaguacagcgaggaggccaagcugaaccgcgagaagaucgacggcgugaagcucgaguccacccggaucuaccagauccuggccaucuacagcaccguggccuccagccugguccucguggugucccugggggcgaucagcuucuggaugugcuccaacggcagccugcagugccgcaucugcaucugaggacuaguuauaagacugacuagcccgaugggccucccaacgggcccuccuccccuccuugcaccgagauuaauaaaaaaaaaaaaaaaaaaaaaaaaaaaaaaaaaaaaaaaaaaaaaaaaaaaaaaaaaaaaaaaaugcaucccccccccccccccccccccccccccccccaaaggcucuuuucagagccaccagaauu

SEQ ID NO: 14448 - RNA, 1918 nt, Artificial Sequence
  FLUAV/H3N2/A/Singapore/INFIMH-16-0019/2016__EPI1106227 hemagglutinin mRNA gc (HA)
aggagaaagcuuaccaugaagaccaucaucgcccugagcuacauccucugccugguguucgcccagaagauccccggcaacgacaacuccaccgcgacgcugugccucgggcaccacgccgucccgaacggcaccaucgugaagaccaucaccaacgaccgcaucgaggugacgaacgccaccgagcugguccagaacagcuccaucggggagaucugcgacagcccccaccagauccuggacggcgagaacugcacccucaucgacgcccugcugggggacccccagugcgacggcuuccagaacaagaagugggaccucuucguggagcgguccaaggccuacagcaacugcuaccccuacgacgugccggacuacgcgucccugcgcagccuggucgccuccagcggcacccucgaguucaagaacgaguccuucaacuggacgggggugacccagaacggcaccagcuccgccugcauccgggggagcuccagcuccuucuucagccgccugaacuggcugacccaccucaacuacacguaccccgcccugaacgugaccaugcccaacaaggagcaguucgacaagcuguacaucuggggcguccaccaccccgggaccgacaaggaccagaucuuccucuacgcgcaguccagcggccggaucaccgugagcacgaagcgcucccagcaggccgugaucccgaacaucggcagccggccccgcauccgggacauccccucccgcaucagcaucuacuggaccaucgucaagcccggggacauccugcugaucaacuccaccggcaaccucaucgccccgcggggguacuucaagauccgcagcggcaaguccagcaucaugcgguccgacgcccccaucggcaagugcaagagcgagugcaucacccccaacggguccauccccaacgacaagccguuccagaacgugaaccgcaucacguacggcgccugcccccgguacgugaagcacagcacccugaagcuggcgaccgggaugcgcaacguccccgagaagcagacccggggcaucuucggggccaucgccggcuucaucgagaacggcugggaggggaugguggacggcugguacggguuccgccaccagaacuccgagggccgggggcaggccgccgaccucaagagcacgcaggcggccaucgaccagaucaacggcaagcugaaccgccugaucggcaagaccaacgagaaguuccaccagaucgagaaggaguucuccgagguggaggggcggguccaggaccucgagaaguacguggaggacaccaagaucgaccuguggagcuacaacgccgagcugcucguggcccuggagaaccagcacaccaucgaccugacggacuccgagaugaacaagcuguucgagaagaccaagaagcagcuccgcgagaacgccgaggacaugggcaacgggugcuucaagaucuaccacaagugcgacaacgcgugcaucgagagcauccgcaacgagaccuacgaccacaacgucuaccgggacgaggcccugaacaaccgcuuccagaucaagggcguggagcucaaguccggguacaaggacuggauccuguggaucagcuucgccaucagcugcuuccugcucugcguggcccugcugggcuucaucaugugggccugccagaagggcaacauccggugcaacaucugcaucugaggacuaguuauaagacugacuagcccgaugggccucccaacgggcccuccuccccuccuugcaccgagauuaauaaaaaaaaaaaaaaaaaaaaaaaaaaaaaaaaaaaaaaaaaaaaaaaaaaaaaaaaaaaaaaaaugcaucccccccccccccccccccccccccccccccaaaggcucuuuucagagccaccagaauu

SEQ ID NO: 14449 - RNA, 1918 nt, Artificial Sequence
  FLUAV/H3N2/A/Singapore/INFIMH-16-0019/2016__EPI1341068 hemagglutinin mRNA gc (HA)
aggagaaagcuuaccaugaagaccaucaucgcccugagcuacauccucugccugguguucgcccagaagauccccggcaacgacaacuccaccgcgacgcugugccucgggcaccacgccgucccgaacggcaccaucgugaagaccaucaccaacgaccgcaucgaggugacgaacgccaccgagcugguccagaacagcuccaucggggagaucugcgacagcccccaccagauccuggacggcgagaacugcacccucaucgacgcccugcugggggacccccagugcgacggcuuccagaacaagaagugggaccucuucguggagcgguccaaggccuacagcaacugcuaccccuacgacgugccggacuacgcgucccugcgcagccuggucgccuccagcggcacccucgaguucaagaacgaguccuucaacuggacgggggugacccagaacggcaccagcuccgccugcauccgggggagcuccagcuccuucuucagccgccugaacuggcugacccaccucaacuacaaguaccccgcccugaacgugacgaugcccaacaaggagcaguucgacaagcuguacaucuggggcguccaccaccccgggaccgacaaggaccagaucuucccguacgcgcaguccagcggccggaucaccgugagcaccaagcgcucccagcaggccgugauccccaacaucggcagccggccccgcauccgggggauccccucccgcaucagcaucuacuggacgaucgucaagccgggcgacauccuccugaucaacuccaccgggaaccugaucgcgccccggggcuacuucaagauccgcagcggcaaguccagcaucaugcgguccgacgcccccaucgggaagugcaagagcgagugcaucacccccaacggcuccaucccgaacgacaagcccuuccagaacgugaaccgcaucaccuacggggccugcccccgguacgugaagcacagcacgcucaagcuggccaccggcaugcgcaacguccccgagaagcagacccgggggaucuucggcgccaucgccggcuucaucgagaacgggugggagggcaugguggacgggugguacggcuuccgccaccagaacuccgaggggcggggccaggccgccgaccucaagagcacccaggcggccaucgaccagaucaacggcaagcugaaccgccugaucgggaagacgaacgagaaguuccaccagaucgagaaggaguucuccgagguggagggccggguccaggaccuggagaaguacguggaggacaccaagaucgaccucuggagcuacaacgccgagcugcugguggcccucgagaaccagcacaccaucgaccugaccgacuccgagaugaacaagcuguucgagaagacgaagaagcagcuccgcgagaacgccgaggacauggggaacggcugcuucaagaucuaccacaagugcgacaacgcgugcaucgagagcauccgcaacgagaccuacgaccacaacgucuaccgggacgaggcccugaacaaccgcuuccagaucaaggggguggagcugaaguccggcuacaaggacuggauccucuggaucagcuucgccaucagcugcuuccugcugugcguggcccuccugggcuucaucaugugggccugccagaaggggaacauccggugcaacaucugcaucugaggacuaguuauaagacugacuagcccgaugggccucccaacgggcccuccuccccuccuugcaccgagauuaauaaaaaaaaaaaaaaaaaaaaaaaaaaaaaaaaaaaaaaaaaaaaaaaaaaaaaaaaaaaaaaaaugcaucccccccccccccccccccccccccccccccaaaggcucuuuucagagccaccagaauu

SEQ ID NO: 14450 - RNA, 1918 nt, Artificial Sequence
  FLUAV/H3N2/A/Singapore/INFIMH-16-0019/2016 NYMC-X-307__EPI1259099 hemagglutinin mRNA gc (HA)
aggagaaagcuuaccaugaagaccaucaucgcccugagcuacauccucugccugguguucgcccagaagauccccggcaacgacaacuccaccgcgacgcugugccucgggcaccacgccgucccgaacggcaccaucgugaagaccaucaccaacgaccgcaucgaggugacgaacgccaccgagcugguccagaacagcuccaucggggagaucugcgacagcccccaccagauccuggacggcgagaacugcacccucaucgacgcccugcugggggacccccagugcgacggcuuccagaacaagaagugggaccucuucguggagcgguccaaggccuacagcaacugcuaccccuacgacgugccggacuacgcgucccugcgcagccuggucgccuccagcggcacccucgaguucaagaacgaguccuucaacuggacgggggugacccagaacggcaccagcuccgccugcauccgggggagcuccagcuccuucuucagccgccugaacuggcugacccaccucaacuacaaguaccccgcccugaacgugacgaugcccaacaaggagcaguucgacaagcuguacaucuggggcguccaccaccccgggaccgacaaggaccagaucuucccguacgcgcaguccagcggccggaucaccgugagcaccaagcgcucccagcaggccgugauccccaacaucggcagccggccccgcauccgggggauccccucccgcaucagcaucuacuggacgaucgucaagccgggcgacauccuccugaucaacuccaccgggaaccugaucgcgccccggggcuacuucaagauccgcagcggcaaguccagcaucaugcgguccgacgcccccaucgggaagugcaagagcgagugcaucacccccaacggcuccaucccgaacgacaagcccuuccagaacgugaacaagaucaccuacggggccugcccccgcuacgugaagcacagcacgcucaagcuggccaccggcaugcggaacguccccgagaagcagacccgcgggaucuucggcgccaucgccggcuucaucgagaacgggugggagggcaugguggacgggugguacggcuuccggcaccagaacuccgaggggcgcggccaggccgccgaccucaagagcacccaggcggccaucgaccagaucaacggcaagcugaaccggcugaucgggaagacgaacgagaaguuccaccagaucgagaaggaguucuccgagguggagggccgcguccaggaccuggagaaguacguggaggacaccaagaucgaccucuggagcuacaacgccgagcugcugguggcccucgagaaccagcacaccaucgaccugaccgacuccgagaugaacaagcuguucgagaagacgaagaagcagcuccgggagaacgccgaggacauggggaacggcugcuucaagaucuaccacaagugcgacaacgcgugcaucgagagcauccgcaacgagaccuacgaccacaacgucuaccgcgacgaggcccugaacaaccgguuccagaucaaggggguggagcugaaguccggcuacaaggacuggauccucuggaucagcuucgccaucagcugcuuccugcugugcguggcccuccugggcuucaucaugugggccugccagaaggggaacauccgcugcaacaucugcaucugaggacuaguuauaagacugacuagcccgaugggccucccaacgggcccuccuccccuccuugcaccgagauuaauaaaaaaaaaaaaaaaaaaaaaaaaaaaaaaaaaaaaaaaaaaaaaaaaaaaaaaaaaaaaaaaaugcaucccccccccccccccccccccccccccccccaaaggcucuuuucagagccaccagaauu

SEQ ID NO: 14451 - RNA, 1918 nt, Artificial Sequence
  FLUAV/H3N2/A/Singapore/INFIMH-16-0019/2016-CDC-LV18A__EPI1583318 hemagglutinin mRNA gc (HA)
aggagaaagcuuaccaugaagaccaucaucgcccugagcuacauccucugccugguguucgcccagaagauccccggcaacgacaacuccaccgcgacgcugugccucgggcaccacgccgucccgaacggcaccaucgugaagaccaucaccaacgaccgcaucgaggugacgaacgccaccgagcugguccagaacagcuccaucggggagaucugcgacagcccccaccagauccuggacggcgagaacugcacccucaucgacgcccugcugggggacccccagugcgacggcuuccagaacaagaagugggaccucuucguggagcgguccaaggccuacagcaacugcuaccccuacgacgugccggacuacgcgucccugcgcagccuggucgccuccagcggcacccucgaguucaagaacgaguccuucaacuggacgggggugacccagaacggcaccagcuccgccugcauccgggggagcuccagcuccuucuucagccgccugaacuggcugacccaccucaacuacaaguaccccgcccugaacgugacgaugcccaacaaggagcaguucgacaagcuguacaucuggggcguccaccaccccgggaccgacaaggaccagaucuucccguacgcgcaguccagcggccggaucaucgugagcaccaagcgcucccagcaggccgugauccccaacaucggcagccggccccgcauccgggacauccccucccgcaucagcaucuacuggaccaucgucaagccgggggacauccuccugaucaacuccacgggcaaccugaucgcgccccggggguacuucaagauccgcagcggcaaguccagcaucaugcgguccgacgcccccaucggcaagugcaagagcgagugcaucacccccaacggguccaucccgaacgacaagcccuuccagaacgugaaccgcaucaccuacggcgccugcccccgguacgugaagcacagcacccucaagcuggccacggggaugcgcaacguccccgagaagcagacccggggcaucuucggggccaucgccggcuucaucgagaacggcugggaggggaugguggacggcugguacggguuccgccaccagaacuccgagggccgggggcaggccgccgaccucaagagcacccaggcggccaucgaccagaucaacggcaagcugaaccgccugaucggcaagaccaacgagaaguuccaccagaucgagaaggaguucuccgagguggaggggcggguccaggaccuggagaaguacguggaggacacgaagaucgaccucuggagcuacaacgccgagcugcugguggcccucgagaaccagcacaccaucgaccugaccgacuccgagaugaacaagcuguucgagaagaccaagaagcagcuccgcgagaacgccgaggacaugggcaacgggugcuucaagaucuaccacaagugcgacaacgcgugcaucgagagcauccgcaacgagacguacgaccacaacgucuaccgggacgaggcccugaacaaccgcuuccagaucaagggcguggagcugaaguccggguacaaggacuggauccucuggaucagcuucgccaucagcugcuuccugcugugcguggcccuccugggcuucaucaugugggccugccagaagggcaacauccggugcaacaucugcaucugaggacuaguuauaagacugacuagcccgaugggccucccaacgggcccuccuccccuccuugcaccgagauuaauaaaaaaaaaaaaaaaaaaaaaaaaaaaaaaaaaaaaaaaaaaaaaaaaaaaaaaaaaaaaaaaaugcaucccccccccccccccccccccccccccccccaaaggcucuuuucagagccaccagaauu

SEQ ID NO: 14452 - RNA, 1918 nt, Artificial Sequence
  FLUAV/H3N2/A/Kansas/14/2017__EPI1146345 hemagglutinin mRNA gc (HA)
aggagaaagcuuaccaugaagaccaucaucgcccugagcugcauccucugccugguguucgcccagaagauccccggcaacgacaacuccaccgcgacgcugugccucgggcaccacgccgucccgaacggcaccaucgugaagaccaucaccaacgaccgcaucgaggugacgaacgccaccgagcugguccagaacagcuccaucggggagaucugcgacagcccccaccagauccuggacggcgagaacugcacccucaucgacgcccugcugggggacccccagugcgacggcuuccagaacaagaagugggaccucuucguggagcggaacaaggccuacuccaacugcuaccccuacgacgugccggacuacgcgagccugcgcucccuggucgccagcuccggcacccucgaguucaacaacgagagcuucaacugggccggggugacgcagaacggcaccuccagcuccugcauccgggggagcaaguccagcuucuucucccgccugaacuggcugacccaccucaacagcaaguaccccgcccugaacgugaccaugcccaacaacgagcaguucgacaagcuguacaucuggggcguccaccaccccgggacggacaaggaccagaucucccucuacgcgcagagcagcggccggaucaccguguccaccaagcgcagccagcaggccgugaucccgaacaucggcucccggccccgcauccgggacauccccagccgcaucuccaucuacuggaccaucgucaagcccggggacauccugcugaucaacagcacgggcaaccucaucgccccgcggggguacuucaagauccgcuccggcaagagcuccaucaugcggagcgacgcccccaucggcaagugcaaguccgagugcaucacccccaacgggagcauccccaacgacaagccguuccagaacgugaaccgcaucaccuacggcgccugcccccgguacgugaagcaguccacccugaagcuggcgacggggaugcgcaacguccccgagcggcagacccgcggcaucuucggggccaucgccggcuucaucgagaacggcugggaggggaugguggacggcugguacggguuccggcaccagaacagcgagggccgcgggcaggccgccgaccucaaguccacccaggcggccaucgaccagaucaacggcaagcugaaccggcugaucggcaagaccaacgagaaguuccaccagaucgagaaggaguucagcgagguggaggggcgcauccaggaccucgagaaguacgucgaggacacgaagaucgaccugugguccuacaacgccgagcugcucguggcccuggagaaccagcacaccaucgaccugaccgacagcgagaugaacaagcuguucgagaagaccaagaagcagcuccgcgagaacgccgaggacaugggcaacgggugcuucaagaucuaccacaagugcgacaacgcgugcaugggcuccauccggaacgggacguacgaccacaacguguaccgcgacgaggcccugaacaaccgguuccagaucaagggcgucgagcucaagagcggcuacaaggacuggauccuguggaucagcuucgccaucuccugcuuccugcucugcguggcccugcugggguucaucaugugggccugccagaagggcaacauccgcugcaacaucugcaucugaggacuaguuauaagacugacuagcccgaugggccucccaacgggcccuccuccccuccuugcaccgagauuaauaaaaaaaaaaaaaaaaaaaaaaaaaaaaaaaaaaaaaaaaaaaaaaaaaaaaaaaaaaaaaaaaugcaucccccccccccccccccccccccccccccccaaaggcucuuuucagagccaccagaauu

SEQ ID NO: 14453 - RNA, 1918 nt, Artificial Sequence
  FLUAV/H3N2/A/Kansas/14/2017__EPI1261067 hemagglutinin mRNA gc (HA)
aggagaaagcuuaccaugaagaccaucaucgcccugagcugcauccucugccugguguucgcccagaagauccccggcaacgacaacuccaccgcgacgcugugccucgggcaccacgccgucccgaacggcaccaucgugaagaccaucaccaacgaccgcaucgaggugacgaacgccaccgagcugguccagaacagcuccaucggggagaucugcgacagcccccaccagauccuggacggcgagaacugcacccucaucgacgcccugcugggggacccccagugcgacggcuuccagaacaagaagugggaccucuucguggagcggaacaaggccuacuccaacugcuaccccuacgacgugccggacuacgcgagccugcgcucccuggucgccagcuccggcacccucgaguucaacaacgagagcuucaacugggccggggugacgcagaacggcaccuccagcuccugcauccgggggagcaaguccagcuucuucucccgccugaacuggcugacccaccucaacagcaaguaccccgcccugaacgugaccaugcccaacaacgagcaguucgacaagcuguacaucuggggcguccaccaccccgggacggacaagaaccagaucucccucuacgcgcagagcagcggccggaucaccguguccaccaagcgcagccagcaggccgugaucccgaacaucggcucccggccccgcauccgggacauccccagccgcaucuccaucuacuggaccaucgucaagcccggggacauccugcugaucacgagcaccggcaaccucaucgccccgcggggguacuucaagauccgcuccggcaagagcuccaucaugcggagcgacgcccccaucggcaagugcaaguccgagugcaucacccccaacgggagcauccccaacgacaagccguuccagaacgugaaccgcaucaccuacggcgccugcccccgguacgugaagcaguccacgcugaagcuggcgaccgggaugcgcaacguccccgagcggcagacccgcggcaucuucggggccaucgccggcuucaucgagaacggcugggaggggaugguggacggcugguacggguuccggcaccagaacagcgagggccgcgggcaggccgccgaccucaaguccacccaggcggccaucgaccagaucaacggcaagcugaaccggcugaucggcaagacgaacgagaaguuccaccagaucgagaaggaguucagcgagguggaggggcgcauccaggaccucgagaaguacgucgaggacaccaagaucgaccugugguccuacaacgccgagcugcucguggcccuggagaaccagcacaccaucgaccugaccgacagcgagaugaacaagcuguucgagaagacgaagaagcagcuccgcgagaacgccgaggacaugggcaacgggugcuucaagaucuaccacaagugcgacaacgcgugcaugggcuccauccggaacgggaccuacgaccacaacguguaccgcgacgaggcccugaacaaccgguuccagaucaagggcgucgagcucaagagcggcuacaaggacuggauccuguggaucagcuucgccaucuccugcuuccugcucugcguggcccugcugggguucaucaugugggccugccagaagggcaacauccgcugcaacaucugcaucugaggacuaguuauaagacugacuagcccgaugggccucccaacgggcccuccuccccuccuugcaccgagauuaauaaaaaaaaaaaaaaaaaaaaaaaaaaaaaaaaaaaaaaaaaaaaaaaaaaaaaaaaaaaaaaaaugcaucccccccccccccccccccccccccccccccaaaggcucuuuucagagccaccagaauu

SEQ ID NO: 14454 - RNA, 1918 nt, Artificial Sequence
  FLUAV/H3N2/A/Kansas/14/2017__EPI1691978 hemagglutinin mRNA gc (HA)
aggagaaagcuuaccaugaagaccaucaucgcccugagcugcauccucugccugguguucgcccagaagauccccggcaacgacaacuccaccgcgacgcugugccucgggcaccacgccgucccgaacggcaccaucgugaagaccaucaccaacgaccgcaucgaggugacgaacgccaccgagcugguccagaacagcuccaucggggagaucugcgacagcccccaccagauccuggacggcgagaacugcacccucaucgacgcccugcugggggacccccagugcgacggcuuccagaacaagaagugggaccucuucguggagcggaacaaggccuacuccaacugcuaccccuacgacgugccggacuacgcgagccugcgcucccuggucgccagcuccggcacccucgaguucaacaacgagagcuucaacugggccggggugacgcagaacggcaccuccagcuccugcauccgggggagcaaguccagcuucuucucccgccugaacuggcugacccaccucaacagcaaguaccccgcccugaacgugaccaugcccaacaacgagcaguucgacaagcuguacaucuggggcguccaccaccccgugacggacaagaaccagaucucccucuacgcgcagagcagcgggcggaucaccguguccaccaagcgcagccagcaggccgucaucccgaacaucggcuaccggccccgcauccgggacauccccucccgcaucagcaucuacuggaccaucgugaagcccggcgacauccugcugaucaacuccacggggaaccucaucgccccgcggggcuacuucaagauccgcagcgggaaguccagcaucaugcgguccgacgcccccaucggcaagugcaagagcgagugcaucacccccaacggcuccauccccaacgacaagccguuccagaacgugaaccgcaucaccuacggggccugcccccgguacgucaagcagagcacccugaagcuggcgacgggcaugcgcaacgugcccgagcggcagacccgcgggaucuucggcgccaucgccggguucaucgagaacggcugggagggcaugguggacgggugguacggcuuccggcaccagaacuccgaggggcgcggccaggccgccgaccucaagagcacccaggcggccaucgaccagaucaacgggaagcugaaccggcugaucggcaagaccaacgagaaguuccaccagaucgagaaggaguucuccgaggucgagggccgcauccaggaccucgagaaguacguggaggacacgaagaucgaccuguggagcuacaacgccgagcugcucguggcccuggagaaccagcacaccaucgaccugaccgacuccgagaugaacaagcuguucgagaagaccaagaagcagcuccgcgagaacgccgaggacauggggaacggcugcuucaagaucuaccacaagugcgacaacgcgugcauggggagcauccggaacggcacguacgaccacaacgucuaccgcgacgaggcccugaacaaccgguuccagaucaaggggguggagcucaaguccggcuacaaggacuggauccuguggaucagcuucgccaucagcugcuuccugcucugcguggcccugcugggcuucaucaugugggccugccagaaggggaacauccgcugcaacaucugcaucugaggacuaguuauaagacugacuagcccgaugggccucccaacgggcccuccuccccuccuugcaccgagauuaauaaaaaaaaaaaaaaaaaaaaaaaaaaaaaaaaaaaaaaaaaaaaaaaaaaaaaaaaaaaaaaaaugcaucccccccccccccccccccccccccccccccaaaggcucuuuucagagccaccagaauu

SEQ ID NO: 14455 - RNA, 1918 nt, Artificial Sequence
  FLUAV/H3N2/A/Kansas/14/2017 CBER-22B CDC19A__EPI1388416 hemagglutinin mRNA gc (HA)
aggagaaagcuuaccaugaagaccaucaucgcccugagcugcauccucugccugguguucgcccagaagauccccggcaacgacaacuccaccgcgacgcugugccucgggcaccacgccgucccgaacggcaccaucgugaagaccaucaccaacgaccgcaucgaggugacgaacgccaccgagcugguccagaacagcuccaucggggagaucugcgacagcccccaccagauccuggacggcgagaacugcacccucaucgacgcccugcugggggacccccagugcgacggcuuccagaacaagaagugggaccucuucguggagcggaacaaggccuacuccaacugcuaccccuacgacgugccggacuacgcgagccugcgcucccuggucgccagcuccggcacccucgaguucaacaacgagagcuucaacugggccggggugacgcagaacggcaccuccagcuccugcauccgggggagcaaguccagcuucuucucccgccugaacuggcugacccaccucaacagcaaguaccccgcccugaacgugaccaugcccaacaacgagcaguucgacaagcuguacaucuggggcguccaccaccccgugacggacaagaaccagaucucccucuacgcgcagagcagcgggcggaucaccguguccaccaagcgcagccagcaggccgucaucccgaacaucggcuaccggccccgcauccgggacauccccucccgcaucagcaucuacuggaccaucgugaagcccggcgacauccugcugaucaacuccacggggaaccucaucgccccgcggggcuacuucaagauccgcagcgggaaguccagcaucaugcgguccgacgcccccaucggcaagugcaagagcgagugcaucacccccaacggcuccauccccaacgacaagccguuccagaacgugaaccgcaucaccuacggggccugcccccgguacgucaagcagagcacccugaagcuggcgacgggcaugcgcaacgugcccgagcggcagacccgcgggaucuucggcgccaucgccggguucaucgagaacggcugggagggcaugguggacgggugguacggcuuccggcaccagaacuccgaggggcgcggccaggccgccgaccucaagagcacccaggcggccaucgaccagaucaacgggaagcugaaccggcugaucggcaagaccaacgagaaguuccaccagaucgagaaggaguucuccgaggucgagggccgcauccaggaccucgagaaguacguggaggacacgaagaucgaccuguggagcuacaacgccgagcugcucguggcccuggagaaccagcacaccaucgaccugaccgacuccgagaugaacaagcuguucgagaagaccaagaagcagcuccgcgagaacgccgaggacauggggaacggcugcuucaagaucuaccacaagugcgacaacgcgugcaucgggagcauccggaacggcacguacgaccacaacgucuaccgcgacgaggcccugaacaaccgguuccagaucaaggggguggagcucaaguccggcuacaaggacuggauccuguggaucagcuucgccaucagcugcuuccugcucugcguggcccugcugggcuucaucaugugggccugccagaaggggaacauccgcugcaacaucugcaucugaggacuaguuauaagacugacuagcccgaugggccucccaacgggcccuccuccccuccuugcaccgagauuaauaaaaaaaaaaaaaaaaaaaaaaaaaaaaaaaaaaaaaaaaaaaaaaaaaaaaaaaaaaaaaaaaugcaucccccccccccccccccccccccccccccccaaaggcucuuuucagagccaccagaauu

SEQ ID NO: 14456 - RNA, 1918 nt, Artificial Sequence
  FLUAV/H3N2/A/Switzerland/8060/2017__EPI1154878 hemagglutinin mRNA gc (HA)
aggagaaagcuuaccaugaagaccaucaucgcccugagcuacauccucugccugguguucgcccagaagauccccggcaacgacaacuccaccgcgacgcugugccucgggcaccacgccgucccgaacggcaccaucgugaagaccaucaccaacgaccgcaucgaggugacgaacgccaccgagcugguccagaacagcuccaucggggagaucugcgacagcccccaccagauccuggacggcgagaacugcacccucaucgacgcccugcugggggacccccagugcgacggcuuccagaacaagaagugggaccucuucguggagcgguccaaggccuacagcuccugcuaccccuacgacgugccggacuacgcgagccugcgcucccuggucgccagcuccggcacccucgaguucaacaacgagagcuucaacuggacgggggugaagcagaacggcaccuccagcgccugcauccggaaguccagcuccagcuucuucucccgccugaacuggcugacccaccucaacuacaccuaccccgcccugaacgugacgaugcccaacaacgagcaguucgacaagcuguacaucuggggcguccaccaccccgggaccgacaaggaccagaucuuccucuacgcgcagagcagcgggcggaucaccguguccaccaagcgcagccagcaggccgugaucccgaacaucggcucccggccccgcauccgggacauccccagccgcaucuccaucuacuggacgaucgucaagcccggcgacauccugcugaucaacagcaccgggaaccucaucgccccgcggggcuacuucaagauccaguccggcaagagcuccaucaugcgcagcgacgcccccaucgggaagugcaaguccgagugcaucacccccaacggcagcauccccaacgacaagccguuccagaacgugaaccggaucaccuacggggccugcccccgcuacgugaagcacuccacgcugaagcuggcgaccggcaugcggaacguccccgagaagcagacccgcgggaucuucggcgccaucgccggguucaucgagaacggcugggagggcaugguggacgggugguacggcuuccggcaccagaacagcgaggggcgcggccaggccgccgaccucaaguccacccaggcggccaucgaccagaucaacgggaagcugaaccggcugaucggcaagacgaacgagaaguuccaccagaucgagaaggaguucagcgagguggagggccgcauccaggaccucgagaaguacgucgaggacaccaagaucgaccugugguccuacaacgccgagcugcucguggcccuggagaaccagcacaccaucgaccugaccgacagcgagaugaacaagcuguucgagaagacgaagaagcagcuccgggagaacgccgaggacauggggaacggcugcuucaagaucuaccacaagugcgacaacgcgugcaucggguccauccgcaacggcaccuacgaccacaacguguaccgcgacgaggcccugaacaaccgguuccagaucaagggggucgagcucaagagcggcuacaaggacuggauccuguggaucagcuucgccaucuccugcuuccugcucugcguggcccugcugggcuucaucaugugggccugccagaaggggaacauccgcugcaacaucugcaucugaggacuaguuauaagacugacuagcccgaugggccucccaacgggcccuccuccccuccuugcaccgagauuaauaaaaaaaaaaaaaaaaaaaaaaaaaaaaaaaaaaaaaaaaaaaaaaaaaaaaaaaaaaaaaaaaugcaucccccccccccccccccccccccccccccccaaaggcucuuuucagagccaccagaauu

SEQ ID NO: 14457 - RNA, 1918 nt, Artificial Sequence
  FLUAV/H3N2/A/Switzerland/8060/2017__EPI1266285 hemagglutinin mRNA gc (HA)
aggagaaagcuuaccaugaagaccaucaucgcccugagcuacauccucugccugguguucgcccagaagauccccggcaacgacaacuccaccgcgacgcugugccucgggcaccacgccgucccgaacggcaccaucgugaagaccaucaccaacgaccgcaucgaggugacgaacgccaccgagcugguccagaacagcuccaucggggagaucugcgacagcccccaccagauccuggacggcgagaacugcacccucaucgacgcccugcugggggacccccagugcgacggcuuccagaacaagaagugggaccucuucguggagcgguccaaggccuacagcuccugcuaccccuacgacgugccggacuacgcgagccugcgcucccuggucgccagcuccggcacccucgaguucaacaacgagagcuucaacuggacgggggugaagcagaacggcaccuccagcgccugcauccggaaguccagcuccagcuucuucucccgccugaacuggcugacccaccucaacuacaaguaccccgcccugaacgugaccaugcccaacaacgagcaguucgacaagcuguacaucuggggcguccaccaccccgggacggacaaggaccagaucuucccguacgcgcagagcagcgggcggaucaccguguccaccaagcgcagccagcaggccgugauccccaacaucggcucccggccccgcauccgggacauccccagccgcaucuccaucuacuggaccaucgucaagccgggcgacauccuccugaucaacagcacggggaaccugaucgcgccccggggcuacuucaagauccaguccggcaagagcuccaucaugcgcagcgacgcccccaucgggaagugcaaguccgagugcaucacccccaacggcagcaucccgaacgacaagcccuuccagaacgugaaccggaucaccuacggggccugcccccgcuacgugaagcacuccacccucaagcuggccacgggcaugcggaacguccccgagaagcagacccgcgggaucuucggcgccaucgccggguucaucgagaacggcugggagggcaugguggacgggugguacggcuuccggcaccagaacagcgaggggcgcggccaggccgccgaccugaaguccacccaggcggccaucgaccagaucaacgggaagcucaaccggcugaucggcaagaccaacgagaaguuccaccagaucgagaaggaguucagcgagguggagggccgcauccaggaccuggagaaguacgucgaggacacgaagaucgaccucugguccuacaacgccgagcugcugguggcccucgagaaccagcacaccaucgaccugaccgacagcgagaugaacaagcuguucgagaagaccaagaagcagcuccgggagaacgccgaggacauggggaacggcugcuucaagaucuaccacaagugcgacaacgcgugcaucggguccauccgcaacggcacguacgaccacaacguguaccgcgacgaggcccugaacaaccgguuccagaucaagggggucgagcucaagagcggcuacaaggacuggauccuguggaucagcuucgccaucuccugcuuccugcugugcguggcccuccugggcuucaucaugugggccugccagaaggggaacauccgcugcaacaucugcaucugaggacuaguuauaagacugacuagcccgaugggccucccaacgggcccuccuccccuccuugcaccgagauuaauaaaaaaaaaaaaaaaaaaaaaaaaaaaaaaaaaaaaaaaaaaaaaaaaaaaaaaaaaaaaaaaaugcaucccccccccccccccccccccccccccccccaaaggcucuuuucagagccaccagaauu

SEQ ID NO: 14458 - RNA, 1918 nt, Artificial Sequence
  FLUAV/H3N2/A/Hong Kong/2671/2019__EPI1543098 hemagglutinin mRNA gc (HA)
aggagaaagcuuaccaugaagaccaucaucgcccugagcuacauccucugccugguguucacccagaagauccccggcaacgacaacuccacggccacccugugccucgggcaccacgcggucccgaacggcaccaucgugaagaccaucacgaacgaccgcaucgaggugaccaacgccaccgagcugguccagaacagcuccaucggggagaucugcgacagcccccaccagauccuggacggcgggaacugcacccucaucgacgcccugcugggcgacccccagugcgacggcuuccagaacaagaagugggaccucuucguggagcggucccgcgccuacagcaacugcuaccccuacgacgugccggacuacgccucccugcggagccuggucgcguccagcgggacgcucgaguucaagaacgaguccuucaacugggccggcgugacccagaacggcaagagcuucuccugcauccgcgggagcuccagcuccuucuucagccggcugaacuggcugacccaccucaacuacaccuaccccgcccugaacgugacgaugcccaacaaggagcaguucgacaagcuguacaucuggggcguccaccaccccgggaccgacaaggaccagaucucccucuacgcccagagcagcggccgcaucaccguguccaccaagcggagccagcaggcggugaucccgaacaucgggucccgcccccggauccgcgacauccccagccggaucuccaucuacuggacgaucgucaagcccggcgacauccugcugaucaacagcaccgggaaccucaucgccccgcgcggcuacuucaagauccgguccggcaagagcuccaucaugcgcagcgacgcccccaucgggaagugcaaguccgagugcaucacccccaacggcagcauccccaacgacaagccguuccagaacgugaaccggaucaccuacggggccugcccccgcuacgugaagcaguccacgcugaagcuggccaccggcaugcggaacguccccgagaagcagacccgcgggaucuucggcgcgaucgccggcuucaucgagaacgggugggagggcaugguggacgggugguacggcuuccggcaccagaacagcgaggggcgcggccaggccgccgaccucaaguccacccaggccgcgaucgaccagaucaacggcaagcugaaccggcugaucgggaagacgaacgagaaguuccaccagaucgagaaggaguucagcgagguggagggccgcguccaggaccucgagaaguacguggaggacaccaagaucgaccugugguccuacaacgccgagcugcucguggcccuggagaaccagcacaccaucgaccugaccgacagcgagaugaacaagcuguucgagaagacgaagaagcagcuccgcgagaacgccgaggacauggggaacggcugcuucaagaucuaccacaagugcgacaacgccugcaucggguccauccggaacgagaccuacgaccacaacgucuaccgcgacgaggcgcugaacaaccgguuccagaucaagggcguggagcucaagagcggcuacaaggacuggauccuguggaucagcuucgccaucuccugcuuccugcucugcguggcccugcugggguucaucaugugggccugccagaagggcaacauccgcugcaacaucugcaucugaggacuaguuauaagacugacuagcccgaugggccucccaacgggcccuccuccccuccuugcaccgagauuaauaaaaaaaaaaaaaaaaaaaaaaaaaaaaaaaaaaaaaaaaaaaaaaaaaaaaaaaaaaaaaaaaugcaucccccccccccccccccccccccccccccccaaaggcucuuuucagagccaccagaauu

SEQ ID NO: 14459 - RNA, 1918 nt, Artificial Sequence
  FLUAV/H3N2/A/Hong Kong/2671/2019__EPI1642843 hemagglutinin mRNA gc (HA)
aggagaaagcuuaccaugaagaccaucaucgcccugagcuacauccucugccugguguucacccagaagauccccggcaacgacaacuccacggccacccugugccucgggcaccacgcggucccgaacggcaccaucgugaagaccaucacgaacgaccgcaucgaggugaccaacgccaccgagcugguccagaacagcuccaucggggagaucugcgacagcccccaccagauccuggacggcgggaacugcacccucaucgacgcccugcugggcgacccccagugcgacggcuuccagaacaagaagugggaccucuucguggagcggucccgcgccuacagcaacugcuaccccuacgacgugccggacuacgccucccugcggagccuggucgcguccagcgggacgcucgaguucaagaacgaguccuucaacugggccggcgugacccagaacggcaagagcuucuccugcauccgcgggagcuccagcuccuucuucagccggcugaacuggcugacccaccucaacuacaucuaccccgcccugaacgugaccaugcccaacaaggagcaguucgacaagcuguacaucuggggcguccaccaccccgugacggacaaggaccagaucucccucuacgcccagagcagcgggcgcaucaccguguccaccaagcggagccagcaggcggucaucccgaacaucggcucccgcccccggauccgcaacauccccagccggaucuccaucuacuggaccaucgugaagcccggggacauccugcugaucaacagcacgggcaaccucaucgccccgcgcggguacuucaagauccgguccggcaagagcuccaucaugcgcagcgacgcccccaucggcaagugcaaguccgagugcaucacccccaacgggagcauccccaacgacaagccguuccagaacgugaaccggaucaccuacggcgccugcccccgcuacgucaagcaguccacccugaagcuggccacggggaugcggaacgugcccgagaagcagacccgcggcaucuucggggcgaucgccggcuucaucgagaacggcugggaggggaugguggacggcugguacggguuccggcaccagaacagcgagggccgcgggcaggccgccgaccucaaguccacccaggccgcgaucgaccagaucaacggcaagcugaaccggcugaucggcaagaccaacgagaaguuccaccagaucgagaaggaguucagcgaggucgaggggcgcgugcaggaccucgagaaguacguggaggacacgaagaucgaccugugguccuacaacgccgagcugcucgucgcccuggagaaccagcacaccaucgaccugaccgacagcgagaugaacaagcuguucgagaagaccaagaagcagcuccgcgagaacgccgaggacaugggcaacgggugcuucaagaucuaccacaagugcgacaacgccugcaucggcuccauccggaacgagacguacgaccacaacguguaccgcgacgaggcgcugaacaaccgguuccagaucaaggggguggagcucaagagcggcuacaaggacuggauccuguggaucagcuucgccaucuccugcuuccugcucugcgucgcccugcugggcuucaucaugugggccugccagaaggggaacauccgcugcaacaucugcaucugaggacuaguuauaagacugacuagcccgaugggccucccaacgggcccuccuccccuccuugcaccgagauuaauaaaaaaaaaaaaaaaaaaaaaaaaaaaaaaaaaaaaaaaaaaaaaaaaaaaaaaaaaaaaaaaaugcaucccccccccccccccccccccccccccccccaaaggcucuuuucagagccaccagaauu

SEQ ID NO: 14460 - RNA, 1918 nt, Artificial Sequence
  FLUAV/H3N2/A/Hong Kong/45/2019__EPI1691930 hemagglutinin mRNA gc (HA)
aggagaaagcuuaccaugaagaccaucaucgcccugagcuacauccucugccugggcuucacccagaagauccccgggaacgacaacuccacggccacccugugccucggccaccacgcggugccgaacgggaccaucgucaagaccaucacgaacgaccgcaucgaggugaccaacgccaccgagcuggugcagaacagcuccaucggcgagaucugcgacagcccccaccagauccuggacgggggcaacugcacccucaucgacgcccugcugggcgacccccagugcgacggguuccagaacaagaagugggaccucuucgucgagcggucccgcgccuacagcaacugcuaccccuacgacgugccggacuacgccucccugcggagccugguggcguccagcggcacgcucgaguucaagaacgaguccuucaacugggccggggucacccagaacggcaagagcuucuccugcauccgcgggagcuccagcuccuucuucagccggcugaacuggcugacccaccucaacuacaccuaccccgcccugaacgugacgaugcccaacaaggagcaguucgacaagcuguacaucuggggcgugcaccaccccggcaccgacaaggaccagaucucccucuacgcccagagcagcgggcgcaucaccgucuccaccaagcggagccagcaggcggugaucccgaacaucggcucccgcccccggauccgcgacauccccagccggaucuccaucuacuggacgaucgugaagcccggggacauccugcugaucaacagcaccggcaaccucaucgccccgcgcggcuacuucaagauccgguccggcaagagcuccaucaugcgcagcgacgcccccaucgggaagugcaaguccgagugcaucacccccaacgggagcauccccaacgacaagccguuccagaacgucaaccggaucaccuacggcgccugcccccgcuacgugaagcagaacacgcugaagcuggccaccgggaugcggaacgugcccgagaagcagacccgcggcaucuucggcgcgaucgccggguucaucgagaacggcugggaggggauggucgacggcugguacggguuccggcaccagaacuccgagggccgcggccaggccgccgaccucaagagcacccaggccgcgaucgaccagaucaacgggaagcugaaccggcugaucggcaagacgaacgagaaguuccaccagaucgagaaggaguucuccgagguggaggggcgcgugcaggaccucgagaaguacgucgaggacaccaagaucgaccuguggagcuacaacgccgagcugcucguggcccuggagaaccagcacaccaucgaccugaccgacuccgagaugaacaagcuguucgagaagacgaagaagcagcuccgcgagaacgccgaggacaugggcaacgggugcuucaagaucuaccacaagugcgacaacgccugcaucggcagcauccggaacgagaccuacgaccacaacguguaccgcgacgaggcgcugaacaaccgguuccagaucaagggcgucgagcucaaguccggguacaaggacuggauccuguggaucagcuucgccaucagcugcuuccugcucugcguggcccugcugggcuucaucaugugggccugccagaaggggaacauccgcugcaacaucugcaucugaggacuaguuauaagacugacuagcccgaugggccucccaacgggcccuccuccccuccuugcaccgagauuaauaaaaaaaaaaaaaaaaaaaaaaaaaaaaaaaaaaaaaaaaaaaaaaaaaaaaaaaaaaaaaaaaugcaucccccccccccccccccccccccccccccccaaaggcucuuuucagagccaccagaauu

SEQ ID NO: 14461 - RNA, 1918 nt, Artificial Sequence
  FLUAV/H3N2/A/South Australia/34/2019__EPI1387331 hemagglutinin mRNA gc (HA)
aggagaaagcuuaccaugaagaccaucaucgcccugagcuacauccucugccugguguucgcccagaagauccccggcaacgacaacuccaccgcgacgcugugccucgggcaccacgccgucccgaacggcaccaucgugaagaccaucaccaacgaccgcaucgaggugacgaacgccaccgagcugguccagaacagcuccaucggggagaucugcgacagcccccaccagauccuggacggcgggaacugcacccucaucgacgcccugcugggcgacccccagugcgacggcuuccagaacaagaagugggaccucuucguggagcggucccgcgccuacagcaacugcuaccccuacgacgugccggacuacgcgucccugcggagccuggucgccuccagcgggacccucgaguucaagaacgaguccuucaacuggacgggcgugaagcagaacgggaccagcuccgccugcauccgcggcagcuccagcuccuucuucagccggcugaacuggcugacccaccucaacuacaccuaccccgcccugaacgugacgaugcccaacaaggagcaguucgacaagcuguacaucuggggcguccaccaccccgggaccgacaaggaccagaucuuccucuacgcgcaguccagcggccgcaucaccgugagcaccaagcggucccagcaggccgugaucccgaacaucggguuccgcccccggauccgcgacauccccagccggaucuccaucuacuggacgaucgucaagcccggcgacauccugcugaucaacagcaccgggaaccucaucgccccgcgcggcuacuucaagauccgguccggcaagagcuccaucaugcgcagcgacgcccccaucgggaagugcaaguccgagugcaucacccccaacggcagcauccccaacgacaagccguuccagaacgugaaccggaucaccuacggggccugcccccgcuacgugaagcaguccacgcugaagcuggcgaccggcaugcggaacguccccgagaagcagacccgcgggaucuucggcgccaucgccggcuucaucgagaacgggugggagggcaugauggacgggugguacggcuuccggcaccagaacagcgaggggcgcggccaggccgccgaccucaaguccacccaggcggccaucgaccagaucaacggcaagcugaaccggcugaucgggaagacgaacgagaaguuccaccagaucgagaaggaguucagcgagguggagggccgcgugcaggaccucgagaaguacgucgaggacaccaagaucgaccugugguccuacaacgccgagcugcucguggcccuggagaaccagcacaccaucgaccugaccgacagcgagaugaacaagcuguucgagaagacgaagaagcagcuccgcgagaacgccgaggacauggggaacggcugcuucaagaucuaccacaagugcgacaacgcgugcaucggguccauccggaacgagaccuacgaccacaacguguaccgcgacgaggcccugaacaaccgguuccagaucaagggcgucgagcucaagagcggcuacaaggacuggauccuguggaucuccuucgccaucagcugcuuccugcucugcaucgcccugcugggguucaucaugugggccugccagaagggcaacauccgcugcaacaucugcaucugaggacuaguuauaagacugacuagcccgaugggccucccaacgggcccuccuccccuccuugcaccgagauuaauaaaaaaaaaaaaaaaaaaaaaaaaaaaaaaaaaaaaaaaaaaaaaaaaaaaaaaaaaaaaaaaaugcaucccccccccccccccccccccccccccccccaaaggcucuuuucagagccaccagaauu

SEQ ID NO: 14462 - RNA, 1918 nt, Artificial Sequence
  FLUAV/H3N2/A/South Australia/34/2019__EPI1440494 hemagglutinin mRNA gc (HA)
aggagaaagcuuaccaugaagaccaucaucgcccugagcuacauccucugccugguguucgcccagaagauccccggcaacgacaacuccaccgcgacgcugugccucgggcaccacgccgucccgaacggcaccaucgugaagaccaucaccaacgaccgcaucgaggugacgaacgccaccgagcugguccagaacagcuccaucggggagaucugcgacagcccccaccagauccuggacggcgggaacugcacccucaucgacgcccugcugggcgacccccagugcgacggcuuccagaacaagaagugggaccucuucguggagcggucccgcgccuacagcaacugcuaccccuacgacgugccggacuacgcgucccugcggagccuggucgccuccagcgggacccucgaguucaagaacgaguccuucaacuggacgggcgugaagcagaacgggaccagcuccgccugcauccgcggcagcuccagcuccuucuucagccggcugaacuggcugacccaccucaacuacaaguaccccgcccugaacgugaccaugcccaacaaggagcaguucgacaagcuguacaucuggggcguccaccaccccaucacggacaaggaccagaucuuccucuacgcgcaguccagcgggcgcaucaccgugagcaccaagcggucccagcaggccgugaucccgaacaucggcuuccgcccccggauccgcgacauccccagccggaucuccaucuacuggaccaucgucaagcccggggacauccugcugaucaacagcacgggcaaccucaucgccccgcgcggguacuucaagauccgguccggcaagagcuccaucaugcgcagcgacgcccccaucggcaagugcaaguccgagugcaucacccccaacgggagcauccccaacgacaagccguuccagaacgugaaccggaucaccuacggcgccugcccccgcuacgugaagcaguccacccugaagcuggcgacggggaugcggaacguccccgagaagcagacccgcggcaucuucggggccaucgccggcuucaucgagaacggcugggaggggaugauggacggcugguacggguuccggcaccagaacagcgagggccgcgggcaggccgccgaccucaaguccacccaggcggccaucgaccagaucaacggcaagcugaaccggcugaucggcaagaccaacgagaaguuccaccagaucgagaaggaguucagcgagguggaggggcgcgugcaggaccucgagaaguacgucgaggacacgaagaucgaccugugguccuacaacgccgagcugcucguggcccuggagaaccagcacaccaucgaccugaccgacagcgagaugaacaagcuguucgagaagaccaagaagcagcuccgcgagaacgccgaggacaugggcaacgggugcuucaagaucuaccacaagugcgacaacgcgugcaucggcuccauccggaacgagacguacgaccacaacguguaccgcgacgaggcccugaacaaccgguuccagaucaagggggucgagcucaagagcggcuacaaggacuggauccuguggaucuccuucgccaucagcugcuuccugcucugcaucgcccugcugggcuucaucaugugggccugccagaaggggaacauccgcugcaacaucugcaucugaggacuaguuauaagacugacuagcccgaugggccucccaacgggcccuccuccccuccuugcaccgagauuaauaaaaaaaaaaaaaaaaaaaaaaaaaaaaaaaaaaaaaaaaaaaaaaaaaaaaaaaaaaaaaaaaugcaucccccccccccccccccccccccccccccccaaaggcucuuuucagagccaccagaauu

SEQ ID NO: 14463 - RNA, 1900 nt, Artificial Sequence
  FLUAV/H7N9/A/chicken/Zhejiang/C483/2013(H7N9)__AGN69400.1 hemagglutinin mRNA gc (HA)
aggagaaagcuuaccaugaacacccagauccugguguucgcccucaucgccaucauccccaccaacgcggacaagaucugccugggccaccacgccgucagcaacgggacgaaggugaacacccugaccgagcgcggcguggaggucgugaacgccaccgagacgguggagcggaccaacaucccgcgcaucugcuccaaggggaagaagaccgucgaccucggccagugcgggcugcugggcaccaucacgggcccgccccagugcgaccaguuccucgaguucagcgccgaccugaucaucgagcggcgcgagggguccgacgugugcuaccccggcaaguucgugaacgaggaggcccugcggcagauccuccgcgagagcgggggcaucgacaaggaggcgaugggguucaccuacuccggcauccggaccaacggcgccaccagcgccugccgccgguccgggagcuccuucuacgccgagaugaaguggcugcugagcaacacggacaacgcggccuucccgcagaugaccaaguccuacaagaacacccgcaagagccccgcccucaucgucuggggcauccaccacuccgugagcaccgccgagcagacgaagcuguacggguccggcaacaagcuggugaccgucggcagcuccaacuaccagcagagcuucgugcccucccccggggcccggccccaggugaacggccagagcgggcgcaucgacuuccacuggcucaugcugaaccccaacgacaccgucaccuucagcuucaacggcgcguucaucgcccccgaccgggccuccuuccugcgcggcaagagcauggggauccaguccggcguccagguggacgccaacugcgagggggacugcuaccacagcggcgggacgaucaucuccaaccuccccuuccagaacaucgacagccgggccgugggcaagugcccgcgcuacgugaagcagcggucccugcugcucgcgaccgggaugaagaacgugcccgagauccccaagggccgcggccuguucggggccaucgccggcuucaucgagaacgggugggagggccugaucgacgggugguacggcuuccggcaccagaacgcccagggcgaggggaccgccgcggacuacaagagcacccaguccgccaucgaccagaucacgggcaagcucaaccgccugaucgagaagaccaaccagcaguucgagcugaucgacaacgaguucaacgaggucgagaagcagaucgggaacgugaucaacuggacccgggacagcaucaccgaggugugguccuacaacgccgagcuccuggucgccauggagaaccagcacacgaucgaccuggccgacagcgagauggacaagcucuacgagcgcgugaagcgccagcugcgggagaacgcggaggaggacggcaccggcugcuucgagaucuuccacaagugcgacgacgacugcauggccuccauccgcaacaacaccuacgaccacagcaaguaccgggaggaggccaugcagaaccgcauccagaucgaccccgucaagcuguccagcggguacaaggacgugauccucugguucuccuucggcgccagcugcuucauccugcuggcgaucgugauggggcucgucuucaucugcgugaagaacggcaacaugcggugcaccaucugcaucugaggacuaguuauaagacugacuagcccgaugggccucccaacgggcccuccuccccuccuugcaccgagauuaauaaaaaaaaaaaaaaaaaaaaaaaaaaaaaaaaaaaaaaaaaaaaaaaaaaaaaaaaaaaaaaaaugcaucccccccccccccccccccccccccccccccaaaggcucuuuucagagccaccagaauu

SEQ ID NO: 14464 - RNA, 1903 nt, Artificial Sequence
  FLUAV/H10N8/A/Jiangxi/IPB13/2013(H10N8)__AHK10761.1 hemagglutinin mRNA gc (HA)
aggagaaagcuuaccauguacaagaucguggucaucaucgcccugcucggcgccgugaaggggcuggacaagaucugccugggccaccacgcgguggccaacgggaccaucgucaagacccucacgaacgagcaggaggaggugaccaacgccaccgagaccguggagagcacgggcaucaaccgccugugcaugaaggggcggaagcacaaggaccugggcaacugccaccccaucggcaugcucaucgggaccccggccugcgaccugcaccugaccggcaugugggacacccucaucgagcgcgagaacgccaucgcguacugcuaccccggggccacggucaacguggaggcccugcggcagaagaucauggaguccggcgggaucaacaagaucagcaccggcuucaccuacggcuccagcaucaacuccgccgggaccacgcgcgcgugcaugcggaacggcgggaacagcuucuacgccgagcugaaguggcucguguccaagagcaagggccagaacuucccccagaccaccaacaccuaccgcaacacggacaccgccgagcaccugaucauguggggcauccaccaccccuccagcacccaggagaagaacgaccuguacgggacccagucccucagcaucuccgucggcagcuccacguaccggaacaacuucgugccgguggucggggcccgcccccaggugaacggccagagcgggcggaucgacuuccacuggacccuggugcagcccggcgacaacaucaccuucucccacaacggcgggcugaucgcccccagccgcgucuccaagcucaucggccgggggcugggcauccagagcgacgcgccgaucgacaacaacugcgagagcaagugcuucuggcgcgggggcuccaucaacacccggcugcccuuccagaaccucagcccccgcacggugggccagugccccaaguacgugaaccggcgcucccugaugcuggccaccgggaugcggaacgucccggagcucauccagggccgcgggcuguucggcgccaucgccggguuccuggagaacggcugggagggcaugguggacgggugguacggcuuccggcaccagaacgcccaggggaccggccaggcggccgacuacaagagcacccaggccgccaucgaccagaucacgggcaagcucaaccgccugguggagaagaccaacaccgaguucgaguccaucgagagcgaguucuccgagaucgagcaccagaucgggaacgucaucaacuggaccaaggacagcaucacggacaucuggaccuaccaggccgagcugcucguggcgauggagaaccagcacaccaucgacauggccgacuccgagaugcugaaccuguacgagcgggugcgcaagcagcuccgccagaacgccgaggaggacggcaaggggugcuucgagaucuaccacgccugcgacgacagcugcauggaguccauccggaacaacaccuacgaccacagccaguaccgcgaggaggcccugcugaaccggcucaacaucaaccccgucacgcuguccagcggcuacaaggacaucauccugugguucuccuucggggcgagcugcuucgugcuccuggccgucgugaugggccuguucuucuucugccucaagaacggcaacaugcgcugcaccaucugcaucugaggacuaguuauaagacugacuagcccgaugggccucccaacgggcccuccuccccuccuugcaccgagauuaauaaaaaaaaaaaaaaaaaaaaaaaaaaaaaaaaaaaaaaaaaaaaaaaaaaaaaaaaaaaaaaaaugcaucccccccccccccccccccccccccccccccaaaggcucuuuucagagccaccagaauu

SEQ ID NO: 14465 - RNA, 1969 nt, Artificial Sequence
  FLUBV/H0N0/B/Colorado/06/2017__EPI1011552 hemagglutinin mRNA gc (HA)
aggagaaagcuuaccaugaaggccaucaucgugcugcucauggucgugaccagcuccgccgaccgcaucugcaccggcaucacgagcuccaacagcccccacguggucaagaccgcgacccagggggaggugaacgugaccggcgucaucccgcugacgaccacccccaccaagucccacuucgccaaccugaaggggacggagacccggggcaagcucugccccaagugccugaacugcaccgaccuggacguggcccucgggcgccccaagugcaccggcaagaucccgagcgcccggguguccauccugcacgagguccgccccgugacgagcggcugcuuccccaucaugcacgaccggaccaagauccgccagcugcccaaccuccugcggggguacgagcacgugcgccuguccacccacaacgucaucaacgccgagggcgcgcccgggggccccuacaagaucgggaccagcggcuccugccccaacaucacgaacggcaacggguucuucgccaccauggccugggccgugcccgacaagaacaagaccgcgaccaacccgcucacgaucgaggugcccuacgucugcaccgagggcgaggaccagaucaccguguggggguuccacagcgacaacgagacccagauggccaagcuguacggcgacuccaagccccagaaguucacgagcuccgccaacggcgugaccacccacuacgucagccagaucgggggcuuccccaaccagaccgaggacgggggccugccgcaguccgggcggaucgugguggacuacaugguccagaaguccggcaagacgggcaccaucaccuaccagcgcgggauccuccugccccagaagguguggugcgccagcggccggagcaaggugaucaaggggagccugccccucaucggcgaggccgacugccugcacgagaaguacgggggccugaacaaguccaagcccuacuacaccggcgagcacgcgaaggccaucgggaacugcccgaucugggucaagacgccccucaagcuggccaacggcaccaaguaccgcccgcccgccaagcugcucaaggagcggggguucuucggcgccaucgcgggguuccuggagggcggcugggaggggaugaucgccggcuggcacggguacaccagccacggcgcccacggcguggccgucgccgcggaccugaaguccacccaggaggccaucaacaagaucacgaagaaccucaacagccuguccgagcuggaggugaagaaccuccagcgccugagcggggccauggacgagcugcacaacgagauccucgagcuggacgagaagguggacgaccugcgggccgacaccaucuccagccagaucgagcucgccguccugcuguccaacgagggcaucaucaacagcgaggacgagcaccuccuggcgcuggagcgcaagcucaagaagaugcuggggccguccgccguggagaucggcaacgggugcuucgagaccaagcacaagugcaaccagaccugccuggacaagaucgccgccggcaccuucgacgcgggcgaguucagccuccccacguucgacucccugaacaucaccgccgccagccugaacgacgacgggcuggacaaccacaccauccuccuguacuacuccaccgccgccagcucccuggcggugacgcucaugaucgccaucuucgucguguacauggugagccgggacaacgucuccugcagcaucugccugugaggacuaguuauaagacugacuagcccgaugggccucccaacgggcccuccuccccuccuugcaccgagauuaauaaaaaaaaaaaaaaaaaaaaaaaaaaaaaaaaaaaaaaaaaaaaaaaaaaaaaaaaaaaaaaaaugcaucccccccccccccccccccccccccccccccaaaggcucuuuucagagccaccagaauu

SEQ ID NO: 14466 - RNA, 1969 nt, Artificial Sequence
  FLUBV/H0N0/B/Colorado/06/2017__EPI1051642 hemagglutinin mRNA gc (HA)
aggagaaagcuuaccaugaaggccaucaucgugcugcucauggucgugaccagcuccgccgaccgcaucugcaccggcaucacgagcuccaacagcccccacguggucaagaccgcgacccagggggaggugaacgugaccggcgucaucccgcugacgaccacccccaccaagucccacuucgccaaccugaaggggacggagacccggggcaagcucugccccaagugccugaacugcaccgaccuggacguggcccucgggcgccccaagugcaccggcaagaucccgagcgcccggguguccauccugcacgagguccgccccgugacgagcggcugcuuccccaucaugcacgaccggaccaagauccgccagcugcccaaccuccugcggggguacgagcacgugcgccuguccacccacaacgucaucaacgccgagggcgcgcccgggggccccuacaagaucgggaccagcggcuccugccccaacaucacgaacggcaacggguucuucgccaccauggccugggccgugcccgacaagaacaagaccgcgaccaacccgcucacgaucgaggugcccuacgucugcaccgagggcgaggaccagaucaccguguggggguuccacagcgacaccgagacgcagauggccaagcuguacggcgacuccaagccccagaaguucaccagcuccgccaacggcgugaccacccacuacgucagccagaucgggggcuuccccaaccagacggaggacgggggccugccgcaguccgggcggaucgugguggacuacaugguccagaaguccggcaagaccggcaccaucaccuaccagcgcgggauccuccugccccagaagguguggugcgccagcggccggagcaaggugaucaaggggagccugccccucaucggcgaggccgacugccugcacgagaaguacgggggccugaacaaguccaagcccuacuacacgggcgagcacgcgaaggccaucgggaacugcccgaucugggucaagacgccccucaagcuggccaacggcaccaaguaccgcccgcccgccaagcugcucaaggagcggggguucuucggcgccaucgcgggguuccuggagggcggcugggaggggaugaucgccggcuggcacggguacaccagccacggcgcccacggcguggccgucgccgcggaccugaaguccacccaggaggccaucaacaagaucaccaagaaccucaacagccuguccgagcuggaggugaagaaccuccagcgccugagcggggccauggacgagcugcacaacgagauccucgagcuggacgagaagguggacgaccugcgggccgacaccaucuccagccagaucgagcucgccguccugcuguccaacgagggcaucaucaacagcgaggacgagcaccuccuggcgcuggagcgcaagcucaagaagaugcuggggccguccgccguggagaucggcaacgggugcuucgagaccaagcacaagugcaaccagaccugccuggacaagaucgccgccggcacguucgacgcgggcgaguucagccuccccaccuucgacucccugaacaucaccgccgccagccugaacgacgacgggcuggacaaccacaccauccuccuguacuacuccacggccgccagcucccuggcggugacccucaugaucgccaucuucgucguguacauggugagccgggacaacgucuccugcagcaucugccugugaggacuaguuauaagacugacuagcccgaugggccucccaacgggcccuccuccccuccuugcaccgagauuaauaaaaaaaaaaaaaaaaaaaaaaaaaaaaaaaaaaaaaaaaaaaaaaaaaaaaaaaaaaaaaaaaugcaucccccccccccccccccccccccccccccccaaaggcucuuuucagagccaccagaauu

SEQ ID NO: 14467 - RNA, 1969 nt, Artificial Sequence
  FLUBV/H0N0/B/Colorado/06/2017 BX-71__EPI1151760 hemagglutinin mRNA gc (HA)
aggagaaagcuuaccaugaaggccaucaucgugcugcucauggucgugaccagcuccgccgaccgcaucugcaccggcaucacgagcuccaacagcccccacguggucaagaccgcgacccagggggaggugaacgugaccggcgucaucccgcugacgaccacccccaccaagucccacuucgccaaccugaaggggacggagacccggggcaagcucugccccaagugccugaacugcaccgaccuggacguggcccucgggcgccccaagugcaccggcaagaucccgagcgcccggguguccauccugcacgagguccgccccgugacgagcggcugcuuccccaucaugcacgaccggaccaagauccgccagcugcccaaccuccugcggggguacgagcacgugcgccuguccacccacaacgucaucaacgccgagggcgcgcccgggggccccuacaagaucgggaccagcggcuccugccccaacaucacgaacggcaacggguucuucgccaccauggccugggccgugcccgacaagaacaagaccgcgaccaacccgcucacgaucgaggugcccuacgucugcaccgagggcgaggaccagaucaccguguggggguuccacagcgacaccgagacgcagauggccaagcuguacggcgacuccaagccccagaaguucaccagcuccgccaacggcgugaccacccacuacgucagccagaucgggggcuuccccaaccagacggaggacgggggccggccgcaguccgggcgcaucgugguggacuacaugguccagaaguccggcaagaccggcaccaucaccuaccagcgggggauccugcucccccagaagguguggugcgccagcggccgcagcaaggugaucaaggggagccugccccugaucggcgaggccgacugccuccacgagaaguacgggggccugaacaaguccaagcccuacuacacgggcgagcacgcgaaggccaucgggaacugcccgaucugggucaagacgccccugaagcucgccaacggcaccaaguaccggccgcccgccaagcugcugaaggagcgcggguucuucggcgccaucgcgggguuccucgagggcggcugggaggggaugaucgccggcuggcacggguacaccagccacggcgcccacggcguggccgucgccgcggaccugaaguccacccaggaggccaucaacaagaucaccaagaaccugaacagccucuccgagcuggaggugaagaaccugcagcggcucagcggggccauggacgagcugcacaacgagauccuggagcucgacgagaagguggacgaccugcgcgccgacaccaucuccagccagaucgagcuggccguccuccuguccaacgagggcaucaucaacagcgaggacgagcaccuccuggcgcuggagcggaagcugaagaagaugcucgggccguccgccguggagaucggcaacgggugcuucgagaccaagcacaagugcaaccagaccugccuggacaagaucgccgccggcacguucgacgcgggcgaguucagccugcccaccuucgacucccucaacaucaccgccgccagccugaacgacgacgggcuggacaaccacaccauccugcucuacuacuccacggccgccagcucccuggcggugacccugaugaucgccaucuucgucguguacauggugagccgcgacaacgucuccugcagcaucugccucugaggacuaguuauaagacugacuagcccgaugggccucccaacgggcccuccuccccuccuugcaccgagauuaauaaaaaaaaaaaaaaaaaaaaaaaaaaaaaaaaaaaaaaaaaaaaaaaaaaaaaaaaaaaaaaaaugcaucccccccccccccccccccccccccccccccaaaggcucuuuucagagccaccagaauu

SEQ ID NO: 14468 - RNA, 1966 nt, Artificial Sequence
  FLUBV/H0N0/B/Washington/02/2019__EPI1368874 hemagglutinin mRNA gc (HA)
aggagaaagcuuaccaugaaggccaucaucgugcugcucauggucgugaccagcaacgccgaccgcaucugcaccggcaucacguccagcaacagcccccacguggucaagaccgcgacccagggggaggugaacgugaccggcgucaucccgcugacgaccacccccaccaagagccacuucgccaaccugaaggggacggagacccggggcaagcucugccccaagugccugaacugcaccgaccuggacguggcccucgggcgccccaagugcaccggcaagaucccguccgcccgggugagcauccugcacgagguccgccccgugacguccggcugcuuccccaucaugcacgaccggaccaagauccgccagcugcccaaccuccugcggggguacgagcacgugcgccugagcacccacaacgucaucaacgccgaggacgcgccgggccggcccuacgagaucgggaccuccggcagcugccccaacaucacgaacgggaacggcuucuucgccaccauggccugggccgugcccaagaacaagaccgcgaccaacccgcucacgaucgaggugcccuacaucugcaccgagggcgaggaccagaucaccgucuggggguuccacuccgacaacgagacccagauggccaagcuguacggcgacagcaagccccagaaguucacguccagcgccaacggggugaccacccacuacgugucccagaucggcggcuuccccaaccagaccgaggacgggggccugccgcagagcgggcgcaucgucguggacuacauggugcagaaguccggcaagacggggaccaucaccuaccagcggggcauccuccugccccagaaggucuggugcgccagcggccgcuccaaggugaucaaggggagccugccccucaucggcgaggccgacugccugcacgagaaguacgggggccugaacaagagcaagcccuacuacaccggggagcacgcgaaggccaucggcaacugcccgaucugggugaagacgccccucaagcuggccaacggcaccaaguaccggccgcccgccaagcugcucaaggagcgcggguucuucggcgccaucgcgggguuccuggagggcgggugggagggcaugaucgccggcuggcacggguacaccucccacggcgcccacggggucgccguggccgcggaccugaaguccacccaggaggccaucaacaagaucacgaagaaccucaacucccugagcgagcuggaggucaagaaccuccagcggcuguccggcgccauggacgagcugcacaacgagauccucgagcuggacgagaagguggacgaccugcgcgccgacaccaucagcucccagaucgagcucgccgugcugcugagcaacgagggcaucaucaacuccgaggacgagcaccuccuggcgcuggagcggaagcucaagaagaugcuggggcccagcgccgucgagaucggcaacgggugcuucgagaccaagcacaagugcaaccagaccugccuggaccgcaucgccgccggcaccuucgacgcgggggaguucucccuccccacguucgacagccugaacaucaccgccgccucccugaacgacgacggccuggacaaccacaccauccuccuguacuacagcaccgccgccuccagccuggcggugacgcucaugaucgccaucuucguggucuacauggugucccgggacaacgugagcugcuccaucugccugugaggacuaguuauaagacugacuagcccgaugggccucccaacgggcccuccuccccuccuugcaccgagauuaauaaaaaaaaaaaaaaaaaaaaaaaaaaaaaaaaaaaaaaaaaaaaaaaaaaaaaaaaaaaaaaaaugcaucccccccccccccccccccccccccccccccaaaggcucuuuucagagccaccagaauu

SEQ ID NO: 14469 - RNA, 1966 nt, Artificial Sequence
  FLUBV/H0N0/B/Washington/02/2019__EPI1422452 hemagglutinin mRNA gc (HA)
aggagaaagcuuaccaugaaggccaucaucgugcugcucauggucgugaccagcaacgccgaccgcaucugcaccggcaucacguccagcaacagcccccacguggucaagaccgcgacccagggggaggugaacgugaccggcgucaucccgcugacgaccacccccaccaagagccacuucgccaaccugaaggggacggagacccggggcaagcucugccccaagugccugaacugcaccgaccuggacguggcccucgggcgccccaagugcaccggcaagaucccguccgcccgggugagcauccugcacgagguccgccccgugacguccggcugcuuccccaucaugcacgaccggaccaagauccgccagcugcccaaccuccugcggggguacgagcacgugcgccugagcacccacaacgucaucaacgccgaggacgcgccgggccggcccuacgagaucgggaccuccggcagcugccccaacaucacgaacgggaacggcuucuucgccaccauggccugggccgugcccaagaacaagaccgcgaccaacccgcucacgaucgaggugcccuacaucugcaccgagggcgaggaccagaucaccgucuggggguuccacuccgacagcgagacccagauggccaagcuguacggcgacuccaagccccagaaguucacgagcuccgccaacggggugaccacccacuacgugagccagaucggcggcuuccccaaccagaccgaggacgggggccugccgcaguccgggcgcaucgucguggacuacauggugcagaaguccggcaagacggggaccaucaccuaccagcggggcauccuccugccccagaaggucuggugcgccuccggccgcagcaaggugaucaaggggagccugccccucaucggcgaggccgacugccugcacgagaaguacgggggccugaacaaguccaagcccuacuacaccggggagcacgcgaaggccaucggcaacugcccgaucugggugaagacgccccucaagcuggccaacggcaccaaguaccggccgcccgccaagcugcucaaggagcgcggguucuucggcgccaucgcgggguuccuggagggcgggugggagggcaugaucgccggcuggcacggguacaccagccacggcgcccacggggucgccguggccgcggaccugaaguccacccaggaggccaucaacaagaucacgaagaaccucaacagccuguccgagcuggaggucaagaaccuccagcggcugagcggcgccauggacgagcugcacaacgagauccucgagcuggacgagaagguggacgaccugcgcgccgacaccaucuccagccagaucgagcucgccgugcugcuguccaacgagggcaucaucaacagcgaggacgagcaccuccuggcgcuggagcggaagcucaagaagaugcuggggcccuccgccgucgagaucggcaacgggugcuucgagaccaagcacaagugcaaccagaccugccuggaccgcaucgccgccggcaccuucgacgcgggggaguucagccuccccacguucgacucccugaacaucaccgccgccagccugaacgacgacggccuggacaaccacaccauccuccuguacuacuccaccgccgccagcucccuggcggugacgcucaugaucgccaucuucguggucuacauggugagccgggacaacguguccugcagcaucugccugugaggacuaguuauaagacugacuagcccgaugggccucccaacgggcccuccuccccuccuugcaccgagauuaauaaaaaaaaaaaaaaaaaaaaaaaaaaaaaaaaaaaaaaaaaaaaaaaaaaaaaaaaaaaaaaaaugcaucccccccccccccccccccccccccccccccaaaggcucuuuucagagccaccagaauu

SEQ ID NO: 14470 - RNA, 1627 nt, Artificial Sequence
  FLUAV/H1N1/A/California/7/2009__GQ906802 neuraminidase mRNA gc (NA)
aggagaaagcuuaccaugaaccccaaccagaagaucaucaccaucggcuccgugugcaugaccaucgggauggccaaccugauccuccagaucggcaacaucaucuccaucuggaucucccacuccauccagcuggggaaccagaaccagaucgagacgugcaaccaguccgucaucaccuacgagaacaacaccugggugaaccagaccuacgugaacaucuccaacacgaacuucgccgcgggccaguccgucguguccgugaagcuggccgggaacagcucccucugcccggucuccggcugggccaucuacuccaaggacaacuccgugcggaucggcuccaagggggacgucuucgugauccgcgagccguucaucuccugcuccccccuggagugccggaccuucuuccugacccagggcgcccuccugaacgacaagcacuccaacgggaccaucaaggaccgcucccccuaccggacgcugauguccugcccgaucggcgaggugcccucccccuacaacucccgcuucgaguccgucgccugguccgcguccgccugccacgacgggaucaacuggcucaccaucggcaucuccggccccgacaacggggccguggccgugcugaaguacaacggcaucaucaccgacaccaucaaguccuggcggaacaacauccugcgcacgcaggaguccgagugcgcgugcgucaacggguccugcuucaccgugaugaccgacggcccguccaacggccaggccuccuacaagaucuuccggaucgagaaggggaagaucgugaaguccgucgagaugaacgcccccaacuaccacuacgaggagugcuccugcuaccccgacuccuccgagaucaccugcgugugccgcgacaacuggcacggcuccaaccggcccuggguguccuucaaccagaaccucgaguaccagaucggguacaucugcuccggcaucuucggggacaacccgcgccccaacgacaagacgggcuccugcggccccgucuccagcaacggggccaacggcgugaagggguucuccuucaaguacggcaacgggguguggaucggccggaccaaguccaucuccucccgcaacggcuucgagaugaucugggaccccaacggguggaccggcaccgacaacaacuucuccaucaagcaggacaucgucgggaucaacgagugguccggcuacuccggguccuucgugcagcacccggagcugacgggccuggacugcauccggcccugcuucuggguggagcucauccgcggccggcccaaggagaacaccaucuggaccuccggguccuccaucuccuucugcggcgucaacuccgacaccguggggugguccuggcccgacggcgccgagcugccguucacgaucgacaagugaggacuaguuauaagacugacuagcccgaugggccucccaacgggcccuccuccccuccuugcaccgagauuaauaaaaaaaaaaaaaaaaaaaaaaaaaaaaaaaaaaaaaaaaaaaaaaaaaaaaaaaaaaaaaaaaugcaucccccccccccccccccccccccccccccccaaaggcucuuuucagagccaccagaauu

SEQ ID NO: 14471 - RNA, 1627 nt, Artificial Sequence
  FLUAV/H1N1/A/Michigan/45/2015__EPI662593 neuraminidase mRNA gc (NA)
aggagaaagcuuaccaugaaccccaaccagaagaucaucaccaucggcagcaucugcaugaccaucgggauggccaaccugauccuccagaucggcaacaucaucuccaucugggugagccacuccauccagaucgggaaccagagccagaucgagacgugcaaccaguccgucaucaccuacgagaacaacaccugggugaaccagaccuacgugaacaucagcaacacgaacuucgccgcgggccaguccgucgugagcgugaagcuggccgggaacuccagccugugcccggucuccggcugggccaucuacagcaaggacaacuccgugcgcaucggcagcaagggggacguguucgucauccgggagcccuucaucuccugcagcccccucgagugccgcaccuucuuccugacccagggcgcccugcucaacgacaagcacuccaacgggaccaucaaggaccggagccccuaccgcacgcugauguccugcccgaucggcgaggugcccagccccuacaacagccgguucgaguccguggccuggagcgcguccgccugccacgacgggaucaacuggcugaccaucggcaucagcggccccgacuccggggccgucgccgugcucaaguacaacggcaucaucaccgacaccaucaagagcuggcgcaacaacauccugcggacgcaggaguccgagugcgcgugcgugaacgggagcugcuucaccaucaugaccgacggcccguccgacggccaggccagcuacaagaucuuccgcaucgagaaggggaagaucaucaaguccgucgagaugaaggcccccaacuaccacuacgaggagugcagcugcuaccccgacuccagcgagaucacgugcgugugccgggacaacuggcacggcuccaaccgccccugggugagcuucaaccagaaccuggaguaccagaugggguacaucugcuccggcgucuucggggacaacccgcggcccaacgacaagaccggcagcugcggccccguguccagcaacggggccaacggcgugaagggguucagcuucaaguacggcaacggggucuggaucggccgcaccaaguccaucagcucccggaagggcuucgagaugaucugggaccccaacggguggaccggcaccgacaacaaguucagcaucaagcaggacaucguggggaucaacgagugguccggcuacagcggguccuucgugcagcacccggagcucacgggccuggacugcauccgccccugcuucugggucgagcugauccggggccgccccgaggagaacaccaucuggaccagcggguccagcaucuccuucugcggcgugaacagcgacaccgucgggugguccuggcccgacggcgccgagcucccguucacgaucgacaagugaggacuaguuauaagacugacuagcccgaugggccucccaacgggcccuccuccccuccuugcaccgagauuaauaaaaaaaaaaaaaaaaaaaaaaaaaaaaaaaaaaaaaaaaaaaaaaaaaaaaaaaaaaaaaaaaugcaucccccccccccccccccccccccccccccccaaaggcucuuuucagagccaccagaauu

SEQ ID NO: 14472 - RNA, 1627 nt, Artificial Sequence
  FLUAV/H1N1/A/Netherlands/602/2009__AGU92703 neuraminidase mRNA gc (NA)
aggagaaagcuuaccaugaaccccaaccagaagaucaucaccaucggcagcgugugcaugaccaucgggauggccaaccugauccuccagaucggcaacaucaucuccaucuggaucagccacuccauccagcuggggaaccagaaccagaucgagacgugcaaccagagcgucaucaccuacgagaacaacaccugggugaaccagaccuacgugaacaucuccaacacgaacuucgccgcgggccagagcgucguguccgugaagcuggccgggaacagcucccucugcccggucagcggcugggccaucuacuccaaggacaacagcgugcgggugggcuccaagggggacgucuucgugauccgcgagccguucaucagcugcuccccccuggagugccggaccuucuuccugacccagggcgcccuccugaacgacaagcacagcaacgggaccaucaaggaccgcucccccuaccggacgcugaugagcugcccgaucggcgaggugcccucccccuacaacagccgcuucgagagcgucgccugguccgcgagcgccugccacgacgggaucaacuggcucaccaucggcaucuccggccccgacaacggggccguggccgugcugaaguacaacggcaucaucaccgacaccaucaagagcuggcggaacaacauccugcgcacgcaggaguccgagugcgcgugcgucaacgggagcugcuucaccgugaugaccgacggcccguccaacggccaggccagcuacaagaucuuccggaucgagaaggggaagaucgugaaguccgucgagaugaacgcccccaacuaccacuacgaggagugcagcugcuaccccgacuccagcgagaucaccugcgugugccgcgacaacuggcacggcuccaaccggcccugggugagcuucaaccagaaccucgaguaccagaucggguacaucugcuccggcaucuucggggacaacccgcgccccaacgacaagacgggcagcugcggccccgucuccagcaacggggccaacggcgugaagggguucuccuucaaguacggcaacgggguguggaucggccggaccaagagcaucagcucccgcaacggcuucgagaugaucugggaccccaacggguggaccggcaccgacaacaacuucagcaucaagcaggacaucgucgggaucaacgagugguccggcuacagcggguccuucauccagcacccggagcugacgggccuggacugcauccggcccugcuucuggguggagcucauccgcggccggcccaaggagaacaccaucuggaccagcggguccagcaucuccuucugcggcgucaacagcgacaccguggggugguccuggcccgacggcgccgagcugccguucacgaucgacaagugaggacuaguuauaagacugacuagcccgaugggccucccaacgggcccuccuccccuccuugcaccgagauuaauaaaaaaaaaaaaaaaaaaaaaaaaaaaaaaaaaaaaaaaaaaaaaaaaaaaaaaaaaaaaaaaaugcaucccccccccccccccccccccccccccccccaaaggcucuuuucagagccaccagaauu

SEQ ID NO: 14473 - RNA, 1627 nt, Artificial Sequence
  FLUAV/H3N2/A/Hong Kong/4801/2014__EPI578429 neuraminidase mRNA gc (NA)
aggagaaagcuuaccaugaaccccaaccagaagaucaucaccaucggcuccgugucccugaccaucuccacgaucugcuucuucaugcagaucgccauccucaucaccaccgucacccugcacuucaagcaguacgaguucaacuccccgcccaacaaccaggugaugcugugcgagcccacgaucaucgagcgcaacaucaccgagaucguguaccucaccaacaccacgaucgagaaggagaucugccccaagccggccgaguaccggaacugguccaagccccagugcgggaucaccggcuucgcgcccuucuccaaggacaacuccauccgccuguccgccgggggcgacaucugggucacccgggagcccuacguguccugcgacccggacaagugcuaccaguucgcccuggggcagggcaccacgcucaacaacgugcacuccaacaacaccguccgcgaccggacccccuaccgcacccugcugaugaacgagcucggcgugcccuuccaccuggggacgaagcaggucugcaucgccugguccuccagcuccugccacgacggcaaggccuggcugcacgucugcaucaccggggacgacaagaacgcgaccgccuccuucaucuacaacggccggcucguggacuccguggucagcugguccaaggacauccugcgcacccaggaguccgagugcaucugcaucaacgggacgugcaccguggugaugaccgacggcuccgccuccggcaaggccgacaccaagauccuguucaucgaggaggggaagaucguccacacguccacccucuccggcuccgcgcagcacguggaggagugcuccugcuacccccgguacccgggggugcgcugcgucugccgggacaacuggaagggcuccaaccgcccgaucguggacaucaacaucaaggaccacuccaucgugagcuccuacgucugcuccggccuggugggggacaccccgcggaagaacgacuccagcuccagcucccacugccuggaccccaacaacgaggagggcgggcacggcgugaaggggugggccuucgacgacggcaacgacgucuggaugggccgcaccaucaacgagacgucccggcucggguacgagaccuucaaggugaucgagggcugguccaacccgaaguccaagcugcagaccaaccgccaggucaucguggaccggggcgaccgcuccggguacuccgggaucuucuccguggagggcaaguccugcaucaaccggugcuucuacgucgagcugauccgcggccggaaggaggagaccgaggugcucuggacgagcaacuccaucguggucuucugcgggaccagcggcaccuacgggaccggcuccuggcccgacggggccgaccugaaccugaugcccaucugaggacuaguuauaagacugacuagcccgaugggccucccaacgggcccuccuccccuccuugcaccgagauuaauaaaaaaaaaaaaaaaaaaaaaaaaaaaaaaaaaaaaaaaaaaaaaaaaaaaaaaaaaaaaaaaaugcaucccccccccccccccccccccccccccccccaaaggcucuuuucagagccaccagaauu

SEQ ID NO: 14474 - RNA, 1618 nt, Artificial Sequence
  FLUBV/H0N0/B/Brisbane/60/2008__EPI173278 neuraminidase mRNA gc (NA)
aggagaaagcuuaccaugcugcccagcaccauccagacccucacgcuguuccugaccuccggcggggugcuccugagccuguacgucuccgccagccucuccuaccugcuguacagcgacauccuccugaaguucuccccgaccgagaucaccgcccccacgaugccccuggacugcgcgaacgccagcaacgugcaggccgugaaccgcuccgccaccaagggcgucacccuccugcugcccgagccggaguggaccuacccccggcucagcugccccggguccacguuccagaaggcccugcugaucagcccccaccgcuucggcgagaccaaggggaacuccgcgccgcucaucauccgggagcccuucaucgccugcggccccaacgagugcaagcacuucgcccugacccacuacgccgcgcagcccggcggguacuacaacggcacccgcggggaccggaacaagcugcgccaccucaucagcgugaagcugggcaagaucccgacgguggagaacuccaucuuccacauggccgccuggagcggguccgccugccacgacggcaaggaguggaccuacaucggcgucgacgggcccgacaacaacgcccugcucaaggugaaguacggcgaggcguacaccgacaccuaccacagcuacgccaacaagauccugcggacgcaggaguccgccugcaacugcaucgggggcaacugcuaccugaugaucaccgacggcagcgccagcgggguguccgagugccgcuuccucaagauccgggagggccgcaucaucaaggagaucuuccccaccgggcgggucaagcacaccgaggagugcacgugcggcuucgccagcaacaagaccaucgagugcgcgugccgcgacaacuccuacaccgccaagcggcccuucgugaagcugaacguggagaccgacacggccgagauccgccugaugugcaccgacaccuaccucgacaccccgcggcccaacgacgggagcaucacgggccccugcgaguccaacggcgacaaggggagcggcgggaucaagggcggguucguccaccagcgcauggaguccaagaucggccggugguacagccgcaccauguccaagaccgagcggaugggcauggggcuguacgugaaguacgacggcgaccccugggccgacagcgacgcccuggcguucuccggggugauggucagcaugaaggagccgggcugguacuccuucggguucgagaucaaggacaagaagugcgacgugcccugcaucggcaucgagauggugcacgacggcgggaaggagaccuggcacagcgccgccacggccaucuacugccucaugggcuccgggcagcugcugugggacaccgucaccggcguggacauggcccucugaggacuaguuauaagacugacuagcccgaugggccucccaacgggcccuccuccccuccuugcaccgagauuaauaaaaaaaaaaaaaaaaaaaaaaaaaaaaaaaaaaaaaaaaaaaaaaaaaaaaaaaaaaaaaaaaugcaucccccccccccccccccccccccccccccccaaaggcucuuuucagagccaccagaauu

SEQ ID NO: 14475 - RNA, 1618 nt, Artificial Sequence
  FLUBV/H0N0/B/Phuket/3073/2013__EPI540672 neuraminidase mRNA gc (NA)
aggagaaagcuuaccaugcugcccagcaccauccagacccucacgcuguuccugaccuccggcggggugcuccugagccuguacgucuccgccagccucuccuaccugcuguacagcgacauccuccugaaguucucccgcaccgaggugaccgccccgaucaugccccuggacugcgcgaacgccagcaacgugcaggccgucaaccgguccgccacgaagggcgugacgccccuccugcccgagccggaguggaccuacccccgccugagcugccccggguccaccuuccagaaggcccuccugaucagcccccaccgguucggcgagaccaaggggaacuccgcgccgcugaucauccgcgagcccuucaucgccugcggccccaaggagugcaagcacuucgcccucacccacuacgccgcgcagcccggcggguacuacaacggcacccgggaggaccgcaacaagcugcggcaccugaucagcgugaagcucgggaagaucccgaccgucgagaacuccaucuuccacauggccgccuggagcggcuccgccugccacgacgggcgcgaguggacguacaucggcguggacggccccgacagcaacgcccugcugaagaucaaguacggggaggcguacaccgacaccuaccacuccuacgccaagaacauccuccggacccaggagagcgccugcaacugcaucggcggggacugcuaccugaugaucacggacggccccgccagcggcaucuccgagugccgcuuccugaagauccgggaggggcgcaucaucaaggagaucuuccccaccggccgggugaagcacaccgaggagugcacgugcggguucgccagcaacaagaccaucgagugcgcgugccgcgacaacuccuacaccgccaagcggccguucgucaagcucaacguggagaccgacaccgccgagauccgccugaugugcacgaagaccuaccuggacacgccccggcccaacgacggcagcaucaccgggcccugcgaguccgacggcgacgagggcagcgggggcaucaagggcggguucgugcaccagcgcauggccuccaagaucgggcggugguacagccgcaccauguccaagaccaagcggaugggcaugggccucuacgucaaguacgacggggacccguggaccgacagcgaggcccuggcgcuguccggcgugauggugagcauggaggagcccgggugguacuccuucggcuucgagaucaaggacaagaagugcgacguccccugcaucgggaucgagauggugcacgacggcggcaagaccacguggcacagcgccgccaccgccaucuacugccucaugggguccggccagcugcugugggacaccgugaccggggucaacaugacgcucugaggacuaguuauaagacugacuagcccgaugggccucccaacgggcccuccuccccuccuugcaccgagauuaauaaaaaaaaaaaaaaaaaaaaaaaaaaaaaaaaaaaaaaaaaaaaaaaaaaaaaaaaaaaaaaaaugcaucccccccccccccccccccccccccccccccaaaggcucuuuucagagccaccagaauu

SEQ ID NO: 14476 - RNA, 1627 nt, Artificial Sequence
  FLUAV/H1N1/A/Brisbane/02/2018__EPI1212833 neuraminidase mRNA gc (NA)
aggagaaagcuuaccaugaaccccaaccagaagaucaucaccaucggcagcacgugcaugaccaucgggauggccaaccugauccuccagaucggcaacaucaucuccaucugggugagccacuccauccagaucgggaaccagagccagaucgagaccugcaaccaguccgucaucaccuacgagaacaacaccugggugaaccagacguacgugaacaucagcaacaccaacuucgccgcgcgccaguccgucgccagcgugaagcuggccggcaacuccagccugugcccgguguccgggugggccaucuacagcaaggacaacuccguccggaucggcagcaagggcgacguguucgugauccgcgagcccuucaucuccugcagcccccucgagugccggaccuucuuccugacccagggggcccugcucaacgacaagcacuccaacggcacgaucaaggaccgcagccccuaccggacccugauguccugcccgaucggggagguccccagccccuacaacagccgcuucgaguccguggcguggagcgccuccgccugccacgacggcaccaacuggcugaccaucgggaucagcggccccgacuccggcgccguggcgguccucaaguacaacgggaucaucacggacaccaucaagagcuggcggaacaacauccugcgcacccaggaguccgagugcgccugcgugaacggcagcugcuucaccaucaugacggacgggccguccgacggccaggccagcuacaagaucuuccggaucgagaagggcaagaucaucaaguccguggagaugaaggcccccaacuaccacuacgaggagugcagcugcuaccccgacuccagcgagaucacgugcgucugccgcgacaacuggcacggguccaaccggcccugggugagcuucaaccagaaccuggaguaccagaugggcuacaucugcuccgggguguucggcgacaacccgcgccccaacgacaagaccgggagcugcggccccgucuccagcaacggcgccaacggggugaagggcuucagcuucaaguacgggaacggcguguggaucgggcggaccaaguccaucagcucccgcaagggcuucgagaugaucugggaccccaacggcuggaccgggaccgacaacaaguucagcaucaagcaggacaucgucggcaucaacgagugguccggguacagcggcuccuucgugcagcacccggagcucaccgggcuggacugcauccggcccugcuucuggguggagcugauccgcggccggcccgaggagaacaccaucuggacgagcggcuccagcaucuccuucugcggggucgacagcgacaccgugggcugguccuggcccgacggggcggagcucccguucaccaucgacaagugaggacuaguuauaagacugacuagcccgaugggccucccaacgggcccuccuccccuccuugcaccgagauuaauaaaaaaaaaaaaaaaaaaaaaaaaaaaaaaaaaaaaaaaaaaaaaaaaaaaaaaaaaaaaaaaaugcaucccccccccccccccccccccccccccccccaaaggcucuuuucagagccaccagaauu

SEQ ID NO: 14477 - RNA, 1627 nt, Artificial Sequence
  FLUAV/H1N1/A/Guangdong-Maonan/SWL1536/2019__EPI1542569 neuraminidase mRNA gc (NA)
aggagaaagcuuaccaugaaccccaaccagaagaucaucaccaucggcagcaucugcaugaccaucgggauggccaaccugauccuccagaucggcaacaucaucuccaucugggugagccacuccauccagaucgggaaccagagccagaucgagacgugcaacaagaacgucaucaccuacgagaacaacaccugggugaaccagaccuacgugaacaucuccaacacgaacagcgccgcgcgccaguccgucgccagcgugaagcuggccggcaacuccagccugugcccgguguccgggugggccaucuacagcaaggacaacuccguccggaucggcagcaagggcgacguguucgugauccgcgagcccuucaucuccugcagcccccucgagugccggaccuucuuccugacccagggggcccugcucaacgacaagcacuccaacggcaccaucaaggaccgcagccccuaccggacgcugauguccugcccgaucggggagguccccagccccuacaacagccgcuucgaguccguggcguggagcgccuccgccugccacgacggcaccaacuggcugaccaucgggaucagcggccccgacuccggcgccguggcgguccucaaguacaacgggaucaucaccgacacgaucaagagcuggcggaacaacauccugcgcacccaggaguccgagugcgccugcgugaacggcagcugcuucaccaucaugaccgacgggccguccgacggccaggccagcuacaagaucuuccggaucgagaagggcaagaucaucaaguccguggagaugaaggcccccaacuaccacuacgaggagugcagcugcuaccccgacuccagcgagaucacgugcgucugccgcgacaacuggcacggguccaaccggcccugggugagcuucaaccagaaccuggaguaccagaugggcuacaucugcuccgggguguucggcgacaacccgcgccccaacgacaagaccgggagcugcggccccgucuccagcaacggcgccaacggggugaagggcuucagcuucaaguacgggaacggcguguggaucgggcggaccaaguccaucagcucccgcaagggcuucgagaugaucugggaccccaacggcuggaccgggacggacaacaaguucagcaagaagcaggacaucgucggcaucaacgagugguccggguacagcggcuccuucgugcagcacccggagcucaccgggcugaacugcauccggcccugcuucuggguggagcugauccgcggccggcccgaggagaacaccaucuggaccagcggcuccagcaucuccuucugcggggucgacagcgacaucgugggcugguccuggcccgacggggcggagcucccguucacgaucgacaagugaggacuaguuauaagacugacuagcccgaugggccucccaacgggcccuccuccccuccuugcaccgagauuaauaaaaaaaaaaaaaaaaaaaaaaaaaaaaaaaaaaaaaaaaaaaaaaaaaaaaaaaaaaaaaaaaugcaucccccccccccccccccccccccccccccccaaaggcucuuuucagagccaccagaauu

SEQ ID NO: 14478 - RNA, 1627 nt, Artificial Sequence
  FLUAV/H3N2/A/Singapore/INFIMH-16-0019/2016__EPI1047603 neuraminidase mRNA gc (NA)
aggagaaagcuuaccaugaaccccaaccagaagaucaucaccaucggcagcgugucccugaccaucagcacgaucugcuucuucaugcagaucgccauccucaucaccaccgucacccugcacuucaagcaguacgaguucaacuccccgcccaacaaccaggugaugcugugcgagcccacgaucaucgagcgcaacaucaccgagaucguguaccucaccaacaccacgaucgagaaggagaucugccccaagccggccgaguaccggaacuggagcaagccccagugcgggaucaccggcuucgcgcccuucuccaaggacaacagcauccgccuguccgccgggggcgacaucugggucacccgggagcccuacgugagcugcgacccggacaagugcuaccaguucgcccuggggcagggcaccacgcucaacaacgugcacuccaacaacaccguccgcgaccggacccccuaccgcacccugcugaugaacgagcucggcgugcccuuccaccuggggacgaagcaggucugcaucgccuggagcuccagcuccugccacgacggcaaggccuggcugcacgugugcaucaccggggacgacaagaacgcgaccgccagcuucaucuacaacggccggcucaucgacuccguggugagcugguccaaggacauccugcgcacccaggagagcgagugcgucugcaucaacgggacgugcaccguggugaugaccgacggcaacgccaccggcaaggccgacacgaagauccuguucaucgaggaggggaagaucguccacaccuccaagcucagcggcagcgcgcagcacguggaggagugcuccugcuacccccgguacccgggggugcgcugcgucugccgggacaacuggaagggcagcaaccgccccaucguggacaucaacaucaaggaccacuccaucgugagcuccuacgucugcagcggccuggugggggacaccccgcggaagaacgacuccagcuccagcucccacugccugaaccccaacaacgaggagggcgggcacggcgugaaggggugggccuucgacgacggcaacgacgucuggaugggccgcaccaucaacgagacgagccggcucggguacgagaccuucaagguggucgagggcugguccaaccccaagagcaagcugcagaucaaccgccaggugaucguggaccgcggggaccgguccggcuacagcgggaucuucuccgucgagggcaagagcugcaucaaccggugcuucuacguggagcugauccgcggccggaaggaggagaccgaggugcucuggaccuccaacagcaucgucguguucugcgggacgagcggcaccuacgggaccggcuccuggcccgacggggccgaccugaaccugaugcacaucugaggacuaguuauaagacugacuagcccgaugggccucccaacgggcccuccuccccuccuugcaccgagauuaauaaaaaaaaaaaaaaaaaaaaaaaaaaaaaaaaaaaaaaaaaaaaaaaaaaaaaaaaaaaaaaaaugcaucccccccccccccccccccccccccccccccaaaggcucuuuucagagccaccagaauu

SEQ ID NO: 14479 - RNA, 1627 nt, Artificial Sequence
  FLUAV/H3N2/A/Kansas/14/2017__EPI1146344 neuraminidase mRNA gc (NA)
aggagaaagcuuaccaugaaccccaaccagaagaucaucaccaucggcagcgugucccugaccaucagcacgaucugcuucuucaugcagaucgccauccucaucaccaccgucacccugcacuucaagcaguacgaguucaacuccccgcccaacaaccaggugaugcugugcgagcccacgaucaucgagcgcaacaucaccgagaucguguaccucaccaacaccacgaucgagcgggagaucugccccaagccggccgaguaccgcaacuggagcaagccccagugcgggaucaccggcuucgcgcccuucuccaaggacaacagcauccggcuguccgccgggggcgacaucugggucacccgcgagcccuacgugagcugcgacccggacaagugcuaccaguucgcccuggggcagggcaccacgaucaacaacgugcacuccaacaacaccgcccgggaccgcaccccgcaccggacccuccugaugaacgagcugggcguccccuuccaccucgggacgaagcaggucugcaucgccuggagcuccagcuccugccacgacggcaaggcguggcugcacgugugcaucaccggggacgacaagaacgccaccgccagcuucaucuacaacggccgccugguggacuccguggugagcugguccaaggacauccuccggacccaggagagcgagugcgucugcaucaacgggacgugcaccguggugaugaccgacggcaacgccaccggcaaggcggacacgaagauccuguucaucgaggaggggaagaucguccacaccuccaagcugagcggcagcgcccagcacguggaggagugcuccugcuacccccgcuacccgggggugcggugcgucugccgcgacaacuggaagggcagcaaccggcccaucguggacaucaacaucaaggaccacuccaucgugagcuccuacgucugcagcggccucgugggggacacgccccgcaagaccgacuccagcuccagcucccacugccugaaccccaacaacgagaagggcgggcacggcgugaaggggugggccuucgacgacggcaacgacgucuggaugggccggaccaucaacgagaccagccgccugggguacgagaccuucaagguggucgagggcugguccaaccccaagagcaagcuccagaucaaccggcaggucaucguggaccgcggggaccgguccggcuacagcgggaucuucuccguggagggcaagagcugcaucaaccgcugcuucuacguggagcugauccggggccgcaaggaggagaccgaggugcuguggacguccaacagcaucgucguguucugcgggaccagcggcaccuacgggaccggcuccuggcccgacggggccgaccucaaccugaugcacaucugaggacuaguuauaagacugacuagcccgaugggccucccaacgggcccuccuccccuccuugcaccgagauuaauaaaaaaaaaaaaaaaaaaaaaaaaaaaaaaaaaaaaaaaaaaaaaaaaaaaaaaaaaaaaaaaaugcaucccccccccccccccccccccccccccccccaaaggcucuuuucagagccaccagaauu

SEQ ID NO: 14480 - RNA, 1627 nt, Artificial Sequence
  FLUAV/H3N2/A/Kansas/14/2017-CDC-LV24A__EPI1444881 neuraminidase mRNA gc (NA)
aggagaaagcuuaccaugaaccccaaccagaagaucaucaccaucggcagcgugucccugaccaucagcacgaucugcuucuucaugcagaucgccauccucaucaccaccgucacccugcacuucaagcaguacgaguucaacuccccgcccaacaaccaggugaugcugugcgagcccacgaucaucgagcgcaacaucaccgagaucguguaccucaccaacaccacgaucgagcgggagaucugccccaagccggccgaguaccgcaacuggagcaagccccagugcgggaucaccggcuucgcgcccuucuccaaggacaacagcauccggcuguccgccgggggcgacaucugggucacccgcgagcccuacgugagcugcgacccggacaagugcuaccaguucgcccuggggcagggcaccacgaucaacaacgugcacuccaacaacaccgcccgggaccgcacgccccaccggacccuccugaugaacgagcugggcguccccuuccaccucgggaccaagcaggucugcaucgccuggagcuccagcuccugccacgacggcaaggcguggcugcacgugugcaucaccggggacgacaagaacgccaccgccagcuucaucuacaacggccgccugguggacuccguggugagcugguccaaggacauccuccggacccaggagagcgagugcgucugcaucaacgggacgugcaccguggugaugaccgacggcaacgccaccggcaaggcggacacgaagauccuguucaucgaggaggggaagaucguccacaccuccaagcugagcggcagcgcccagcacguggaggagugcuccugcuacccccgcuacccgggggugcggugcgucugccgcgacaacuggaagggcagcaaccggcccaucguggacaucaacaucaaggaccacuccaucgugagcuccuacgucugcagcggccucgugggggacacgccccgcaagaccgacaacuccagcuccagccacugccugaaccccaacaacgagaagggcgggcacggcgugaaggggugggccuucgacgacggcaacgacgucuggaugggccggaccaucaacgagaccucccgccugggguacgagaccuucaagguggucgagggcuggagcaacccgaaguccaagcuccagaucaaccggcaggucaucguggaccgcggggaccggagcggcuacuccgggaucuucagcguggagggcaaguccugcaucaaccgcugcuucuacguggagcugauccggggccgcaaggaggagaccgaggugcuguggacgagcaacuccaucgucguguucugcgggaccagcggcaccuacgggaccggcagcuggcccgacggggccgaccucaaccugaugcacaucugaggacuaguuauaagacugacuagcccgaugggccucccaacgggcccuccuccccuccuugcaccgagauuaauaaaaaaaaaaaaaaaaaaaaaaaaaaaaaaaaaaaaaaaaaaaaaaaaaaaaaaaaaaaaaaaaugcaucccccccccccccccccccccccccccccccaaaggcucuuuucagagccaccagaauu

SEQ ID NO: 14481 - RNA, 1627 nt, Artificial Sequence
  FLUAV/H3N2/A/Switzerland/8060/2017__EPI1154879 neuraminidase mRNA gc (NA)
aggagaaagcuuaccaugaaccccaaccagaagaucaucaccaucggcagcgugucccugaccaucagcacgaucugcuucuucaugcagaucgccauccucaucaccaccgucacccugcacuucaagcaguacgaguucaacuccccgcccaacaaccaggugaugcugugcgagcccacgaucaucgagcgcaacaucaccgagaucguguaccucaccaacaccacgaucgagaaggagaucugccccaagccggccgaguaccggaacuggagcaagccccagugcgggaucaccggcuucgcgcccuucuccaaggacaacagcauccgccuguccgccgggggcgacaucugggucacccgggagcccuacgugagcugcgacccggacaagugcuaccaguucgcccuggggcagggcaccacgcucaacaacgugcacuccaacaacaccguccgcgaccggacccccuaccgcacccugcugaugaacgagcucggcgugcccuuccaccuggggacgaagcaggucugcauggccuggagcuccagcuccugccacgacggcaaggccuggcugcacgugugcgugaccggggacgacaagaacgcgaccgccagcuucaucuacaacggccggcucguggacuccgucgugagcugguccaaggacauccugcgcacccaggagagcgagugcgugugcaucaacgggacgugcaccgucgugaugaccgacggcaacgccaccggcaaggccgacacgaagauccuguucaucgaggaggggaagaucgugcacaccuccaagcucagcggcagcgcgcagcacgucgaggagugcuccugcuacccccgguacccgggggugcgcugcgugugccgggacaacuggaagggcagcaaccgccccaucgucgacaucaacaucaaggaccacuccaucgugagcuccuacgugugcagcggccuggucggggacacgccccggaaguccgacagcuccagcuccagccacugccugaaccccaacaacgaggagggcgggcacggcgugaaggggugggccuucgacgacggcaacgacgucuggaugggccgcaccaucaacgagaccucccggcucggguacgagaccuucaaggugguggagggcuggagcaacuccaagagcaagcugcagaucaaccgccaggucaucguggaccgcggggaccgguccggcuacagcgggaucuucuccguggagggcaagagcugcaucaaccggugcuucuacgucgagcugauccgcggccggaaggaggagaccgaggugcucuggaccagcaacuccaucguggucuucugcgggacgagcggcaccuacgggaccggcuccuggccggacggggccgaccugaaccugaugcacaucugaggacuaguuauaagacugacuagcccgaugggccucccaacgggcccuccuccccuccuugcaccgagauuaauaaaaaaaaaaaaaaaaaaaaaaaaaaaaaaaaaaaaaaaaaaaaaaaaaaaaaaaaaaaaaaaaugcaucccccccccccccccccccccccccccccccaaaggcucuuuucagagccaccagaauu

SEQ ID NO: 14482 - RNA, 1627 nt, Artificial Sequence
  FLUAV/H3N2/A/Switzerland/8060/2017(H3N2)-CDC-LV21A__EPI1364258 neuraminidase mRNA gc (NA)
aggagaaagcuuaccaugaaccccaaccagaagaucaucaccaucggcagcgugucccugaccaucagcacgaucugcuucuucaugcagaucgccauccucaucaccaccgucacccugcacuucaagcaguacgaguucaacuccccgcccaacaaccaggugaugcugugcgagcccacgaucaucgagcgcaacaucaccgagaucguguaccucaccaacaccacgaucgagaaggagaucugccccaagccggccgaguaccggaacuggagcaagccccagugcgggaucaccggcuucgcgcccuucuccaaggacaacagcauccgccuguccgccgggggcgacaucugggucacccgggagcccuacgugagcugcgacccggacaagugcuaccaguucgcccuggggcagggcaccacgcucaacaacgugcacuccaacaacaccguccgcgaccggacccccuaccgcacccugcugaugaacgagcucggcgugcccuuccaccuggggacgaagcaggucugcauggccuggagcuccagcuccugccacgacggcaaggccuggcugcacgugugcgugaccggggacgacaagaacgcgaccgccagcuucaucuacaacggccggcucguggacuccgucgugagcugguccaaggacauccugcgcacccaggagagcgagugcgugugcaucaacgggacgugcaccgucgugaugaccgacggcaacgccaccggcaaggccgacacgaagauccuguucaucgaggaggggaagaucgugcacaccuccaagcucagcggcagcgcgcagcacgucgaggagugcuccugcuacccccgguacccgggggugcgcugcgugugccgggacaacuggaagggcagcaaccgccccaucgucgacaucaacaucaaggaccacuccaucgugagcuccuacgugugcagccggcuggucggcgacacgccccgcaaguccgacagcuccagcuccagccacugccugaaccccaacaacgaggagggcgggcacggggugaagggcugggccuucgacgacgggaacgacgucuggaugggccggaccaucaacgagaccucccgccucggcuacgagaccuucaaggugguggagggguggagcaacuccaagagcaagcugcagaucaaccggcaggucaucguggaccgcggcgaccgguccggguacagcggcaucuucuccguggagggcaagagcugcaucaaccgcugcuucuacgucgagcugauccgggggcgcaaggaggagaccgaggugcucuggaccagcaacuccaucguggucuucugcggcacgagcgggaccuacggcaccggguccuggccggacggcgccgaccugaaccugaugcacaucugaggacuaguuauaagacugacuagcccgaugggccucccaacgggcccuccuccccuccuugcaccgagauuaauaaaaaaaaaaaaaaaaaaaaaaaaaaaaaaaaaaaaaaaaaaaaaaaaaaaaaaaaaaaaaaaaugcaucccccccccccccccccccccccccccccccaaaggcucuuuucagagccaccagaauu

SEQ ID NO: 14483 - RNA, 1627 nt, Artificial Sequence
  FLUAV/H3N2/A/Hong Kong/2671/2019__EPI1543099 neuraminidase mRNA gc (NA)
aggagaaagcuuaccaugaaccccaaccagaagaucaucaccaucggcagcgugucccugaccaucagcacgaucugcuucuucaugcagaucgccauccucaucaccaccgucacccugcacuucaagcaguacgaguucaacuccccgcccaacaaccaggugaugcugugcgagcccacgaucaucgagcgcaacaucaccgagaucguguaccucaccaacaccacgaucgagaaggagaucugccccaagccggccgaguaccggaacuggagcaagccccagugcgggaucaccggcuucgcgcccuucuccaaggacaacagcauccgccuguccgccgggggcgacaucugggucacccgggagcccuacgugagcugcgaccuggacaagugcuaccaguucgcccucgggcagggcaccacgcugaacaacgugcacuccaacaacaccguccgcgaccggaccccguaccgcacccugcucaugaacgagcugggcgugcccuuccaccuggggacgaagcaggucugcaucgccuggagcuccagcuccugccacgacggcaaggccuggcuccacgugugcaucaccggggacgacaagaacgcgaccgccagcuucaucuacaacggccggcugguggacuccguggucagcugguccaacgacauccugcgcacccaggagagcgagugcgugugcaucaacgggacgugcaccguggucaugaccgacggcaacgccaccggcaaggccgacacgaagauccucuucaucgaggaggggaagaucgugcacaccuccaagcugagcggcagcgcgcagcacguggaggagugcuccugcuacccccgguaccccgggguccgcugcgugugccgggacaacuggaagggcagcaaccgcccgaucaucgacaucaacaucaaggaccacuccaucgugagcuccuacgucugcagcggccuggugggggacacgccccggaaguccgacagcuccagcuccagccacugccucaaccccaacaacgaggagggcgggcacggcgugaaggggugggccuucgacgacggcaacgacgucuggaugggccgcaccaucaacgagaccucccggcugggguacgagaccuucaagguggucgagggcuggagcaaccccaaguccaagcugcagaucaaccgccaggugaucguggaccgcggggaccggagcggcuacuccgggaucuucagcgucgagggcaaguccugcaucaaccggugcuucuacguggagcucauccgcggccggaaggaggagaccgaggugcuguggaccagcaacagcaucgucguguucugcgggacguccggcaccuacgggaccggcagcuggccggacggggccgaccugaaccucaugcacaccugaggacuaguuauaagacugacuagcccgaugggccucccaacgggcccuccuccccuccuugcaccgagauuaauaaaaaaaaaaaaaaaaaaaaaaaaaaaaaaaaaaaaaaaaaaaaaaaaaaaaaaaaaaaaaaaaugcaucccccccccccccccccccccccccccccccaaaggcucuuuucagagccaccagaauu

SEQ ID NO: 14484 - RNA, 1627 nt, Artificial Sequence
  FLUAV/H3N2/A/Hong Kong/45/2019__EPI1691929 neuraminidase mRNA gc (NA)
aggagaaagcuuaccaugaaccccaaccagaagaucaucaccaucggcagcgugucccugaccaucagcacgaucugcuucuucaugcagaucgccauccucaucaccaccgucacccugcacuucaagcaguacgaguucaacucccugccgaacaaccaggugaugcucugcgagcccacgaucaucgagcgcaacaucaccgagaucguguaccugaccaacaccacgaucgagaaggagaucugccccaagcccgccgaguaccggaacuggagcaagccgcagugcgggaucaccggcuucgcgcccuucuccaaggacaacagcauccgccuguccgccgggggcgacaucugggucacccgggagcccuacgugagcugcgaccucgacaagugcuaccaguucgcccuggggcagggcaccacgcugaacaacgugcacuccaacaacaccguccgcgaccggacccccuaccgcacccuccugaugaacgagcugggcgugccguuccaccucgggacgaagcaggucugcaucgccuggagcuccagcuccugccacgacggcaaggccuggcugcacgugugcaucaccggggacgacaagaacgcgaccgccagcuucaucuacaacggccggcugguggacuccguggucagcugguccaacgacauccuccgcacccaggagagcgagugcgugugcaucaacgggacgugcaccguggucaugaccgacggcaacgccaccggcaaggccgacacgaagauccuguucaucgaggaggggaagaucgugcacaccuccaagcugagcggcagcgcgcagcacguggaggagugcuccugcuacccccgguaccccgggguccgcugcgugugccgggacaacuggaagggcagcaaccgccccaucaucgacaucaacaucaaggaccacuccaucgugagcuccuacgucugcagcggccucgugggggacaccccgcggaaguccgacagcuccagcuccagccacugccugaaccccaacaacgaggagggcgggcacggcgugaaggggugggccuucgacgacggcaacgacgucuggaugggccgcaccaucaacgagacgucccggcugggguacgagaccuucaagguggucgagggcuggagcaaccccaaguccaagcuccagaucaaccgccaggugaucguggaccgcggggaccggagcggcuacuccgggaucuucagcgucgagggcaaguccugcaucaaccggugcuucuacguggagcugauccgcggccggaaggaggagaccgaggugcuguggaccagcaacagcaucgucguguucugcgggacguccggcaccuacgggaccggcagcuggcccgacggggccgaccucaaccugaugcacaucugaggacuaguuauaagacugacuagcccgaugggccucccaacgggcccuccuccccuccuugcaccgagauuaauaaaaaaaaaaaaaaaaaaaaaaaaaaaaaaaaaaaaaaaaaaaaaaaaaaaaaaaaaaaaaaaaugcaucccccccccccccccccccccccccccccccaaaggcucuuuucagagccaccagaauu

SEQ ID NO: 14485 - RNA, 1627 nt, Artificial Sequence
  FLUAV/H3N2/A/South Australia/34/2019__EPI1387330 neuraminidase mRNA gc (NA)
aggagaaagcuuaccaugaaccccaaccagaagaucaucaccaucggcagcgugucccugaccaucagcacgaucugcuucuucaugcagaucgccauccucaucaccaccgucacccugcacuucaagcaguacgaguucaacuccccgcccaacaaccaggugaugcugugcgagcccacgaucaucgagcgcaacaucaccgagaucguguaccucaccaacaccacgaucgagaaggagaucugccccaagccggccgaguaccggaacuggagcaagccccagugcgggaucaccggcuucgcgcccuucuccaaggacaacagcauccgccuguccgccgggggcgacaucugggucacccgggagcccuacgugagcugcgaccuggacaagugcuaccaguucgcccucgggcagggcaccacgcugaacaacgugcacuccaacaacaccguccgcgaccggaccccguaccgcacccugcucaugaacgagcugggcgugcccuuccaccuggggacgaagcaggucugcaucgccuggagcuccagcuccugccacgacggcaaggccuggcuccacgugugcaucaccggggacgacaagaacgcgaccgccagcuucaucuacaacggccggcugguggacuccguggucagcugguccaacgacauccugcgcacccaggagagcgagugcgugugcaucaacgggacgugcaccguggucaugaccgacggcaacgccaccggcaaggccgacacgaagauccucuucaucgaggaggggaagaucgugcacaccuccaagcugagcggcagcgcgcagcacguggaggagugcuccugcuacccccgguaccccgggguccgcugcgugugccgggacaacuggaagggcagcaaccgcccgaucaucgacaucaacaucaaggaccacuccaucgugagccgguacgucugcuccggccuggugggggacacgccccgcaagagcgacuccagcuccagcucccacugccucaaccccaacaacgagaagggcgggcacggcgugaaggggugggccuucgacgacggcaacgacgucuggaugggccggaccaucaacgagaccagccgccugggguacgagaccuucaagguggucgagggcugguccaaccccaagagcaagcugcagaucaaccggcaggucaucguggaccgcggggaccgguccggcuacagcgggaucuucuccguggagggcaagagcugcaucaaccgcugcuucuacguggagcucauccggggccgcaaggaggagaccgaggugcuguggaccuccaacagcaucgucguguucugcgggacgagcggcaccuacgggaccggcuccuggccggacggggccgaccugaaccucaugcacaucugaggacuaguuauaagacugacuagcccgaugggccucccaacgggcccuccuccccuccuugcaccgagauuaauaaaaaaaaaaaaaaaaaaaaaaaaaaaaaaaaaaaaaaaaaaaaaaaaaaaaaaaaaaaaaaaaugcaucccccccccccccccccccccccccccccccaaaggcucuuuucagagccaccagaauu

SEQ ID NO: 14486 - RNA, 1615 nt, Artificial Sequence
  FLUAV/H7N9/A/chicken/Zhejiang/C483/2013(H7N9)__AGN69396.1 neuraminidase mRNA gc (NA)
aggagaaagcuuaccaugaaccccaaccagaagauccugugcaccagcgccaccgccaucaucaucggcgcgaucgccgugcucaucgggaucgccaaccugggccugaacaucgggcuccaccugaagccgggcugcaacugcucccacagccagcccgagacgaccaacaccucccagaccaucaucaacaacuacuacaacgagacgaacaucaccaacauccagauggaggagcgcaccagccggaacuucaacaaccugaccaaggggcucugcacgaucaacuccuggcacaucuacggcaaggacaacgccguccgcaucggcgagagcuccgacgugcuggugacccgggagcccuacgucagcugcgaccccgacgagugccgcuucuacgcccugucccaggggaccaccauccggggcaagcacagcaacgggacgauccacgaccgcucccaguaccgggcgcucaucagcuggccgcuguccagcccgcccaccguguacaacucccgcguggagugcaucggcuggagcuccaccagcugccacgacgggaagucccggaugagcaucugcaucagcggccccaacaacaacgccuccgccgucgugugguacaaccgccggcccguggccgagaucaacaccugggcgcgcaacauccugcggacgcaggagagcgagugcgucugccacaacggcgugugccccguggucuucaccgacggguccgccaccggccccgccgacacccgcaucuacuacuucaaggaggggaagauccucaagugggagagccugacgggcaccgccaagcacaucgaggagugcuccugcuacggcgagcggaccgggaucacgugcacgugccgcgacaacuggcagggcagcaaccggcccgugauccagaucgacccgguggccaugacccacaccucccaguacaucugcagccccguccugaccgacaacccccgccccaacgacccgaacaucgggaagugcaacgaccccuaccccggcaacaacaacaacggggugaagggcuucuccuaccucgacggcgcgaacaccuggcuggggcggaccaucagcaccgccucccgcagcggcuacgagaugcugaaggugcccaacgcccucaccgacgaccgguccaagccgauccaggggcagacgaucguccugaacgccgacuggagcggcuacuccgggagcuucauggacuacugggccgagggcgacugcuaccgcgcgugcuucuacguggagcugauccgcggccggcccaaggaggacaaggugugguggaccuccaacagcaucgucuccaugugcagcagcaccgaguuccucgggcaguggaacuggcccgacggcgccaagaucgaguacuuccugugaggacuaguuauaagacugacuagcccgaugggccucccaacgggcccuccuccccuccuugcaccgagauuaauaaaaaaaaaaaaaaaaaaaaaaaaaaaaaaaaaaaaaaaaaaaaaaaaaaaaaaaaaaaaaaaaugcaucccccccccccccccccccccccccccccccaaaggcucuuuucagagccaccagaauu

SEQ ID NO: 14487 - RNA, 1630 nt, Artificial Sequence
  FLUAV/H10N8/A/Jiangxi/IPB13/2013(H10N8)__AHK10769.1 neuraminidase mRNA gc (NA)
aggagaaagcuuaccaugaaccccaaccagaagaucaucaccaucggcagcgugucccuggggcucgucauccugaacauccugcuccacaucgugagcaucaccgugacgguccuggugcugccgggcaacgggaacaacgaguccugcaacgagaccgugauccgcgaguacaacgagaccguccggguggagaaggugacccaguggcacaacacgaacgucaucgaguacaucgagcgccccgagaacgaccacuucaugaacaacaccgaggcccucugcgacgccaagggcuucgcgcccuucagcaaggacaacgggauccggaucggcucccgcggccacguguucgugauccgggagcccuucgucagcugcuccccgaccgagugccgcaccuucuuccugacgcaggggagccugcucaacgacaagcacuccaacggcaccgugaaggaccggagccccuaccgcacccugauguccguggagaucgggcagagccccaacgucuaccaggcccgguucgaggccguggccugguccgccaccgcgugccacgacggcaagaaguggaugacgaucggggugaccggccccgacgccaaggccgucgccguggugcacuacggcgggaucccgaccgacgucaucaacagcugggcgggcgacauccugcgcacccaggaguccagcugcacgugcauccagggggagugcuucugggugaugaccgacggccccgccaaccggcaggcccaguaccgcgccuucaaggccaagcagggcaagaucguggggcaggcggagaucuccuucaacggcgggcacaucgaggagugcagcugcuaccccaacgagggcaaggucgagugcgugugccgggacaacuggaccgggaccaaccgccccguccucgugaucuccccggaccugagcuaccgggugggcuaccugugcgccggccuccccagcgacacgccccgcggggaggacucccaguucaccggcagcugcaccucccccauggggaaccagggcuacggggucaagggcuucggcuuccggcaggggaacgacguguggaugggccgcaccaucagccggacgucccgcagcggguucgagauccugaaggugcggaacggcuggguccagaacuccaaggagcagaucaagcgccaggugguggucgacaaccugaacuggagcggguacuccggcagcuucacccucccggccgagcugaccaagcgcaacugccuggugcccugcuucuggguggagaugauccggggcaaccccgaggagaagaccaucuggacguccagcuccagcaucgucaugugcgggguggaccacgagaucgccgacugguccuggcacgacggcgccauccuccccuucgacaucgacaagaugugaggacuaguuauaagacugacuagcccgaugggccucccaacgggcccuccuccccuccuugcaccgagauuaauaaaaaaaaaaaaaaaaaaaaaaaaaaaaaaaaaaaaaaaaaaaaaaaaaaaaaaaaaaaaaaaaugcaucccccccccccccccccccccccccccccccaaaggcucuuuucagagccaccagaauu

SEQ ID NO: 14488 - RNA, 1618 nt, Artificial Sequence
  FLUBV/H0N0/B/Colorado/06/2017__EPI1001930 neuraminidase mRNA gc (NA)
aggagaaagcuuaccaugcugcccagcaccauccagacccucacgcuguuccugaccuccggcggggugcuccugagccuguacgucuccgccagccucuccuaccugcuguacagcgacauccuccugaaguucuccccgaccgagaucaccgcccccacgaugccccuggacugcgcgaacgccagcaacgugcaggccgugaaccgcuccgccaccaagggcgucacccuccugcugcccgagccggaguggaccuacccccggcucagcugccccggguccacguuccagaaggcccugcugaucagcccccaccgcuucggcgagaccaaggggaacuccgcgccgcucaucauccgggagcccuucguggccugcggccccaacgagugcaagcacuucgcccugacccacuacgccgcgcagcccggcggguacuacaacggcacccgcggggaccggaacaagcugcgccaccucaucagcgugaagcugggcaagaucccgacggucgagaacuccaucuuccacauggccgccuggagcggguccgccugccacgacggcaaggaguggaccuacaucggcguggacgggcccgacaacaacgcccugcucaaggugaaguacggcgaggcguacaccgacaccuaccacagcuacgccaacaacauccugcggacgcaggaguccgccugcaacugcaucgggggcaacugcuaccugaugaucaccgacggcagcgccagcggggucuccgagugccgcuuccucaagauccgggagggccgcaucaucaaggagaucuuccccaccgggcgggugaagcacaccgaggagugcacgugcggcuucgccagcaacaagaccaucgagugcgcgugccgcgacaaccgguacaccgccaagcgccccuucgugaagcugaacgucgagaccgacacggccgagauccggcugaugugcaccgacaccuaccucgacaccccgcgccccaacgacggguccaucacgggccccugcgagagcgacggcgacaagggguccggcgggaucaagggcggguucgugcaccagcggaugaaguccaagaucggccgcugguacagccggaccaugagccagaccgagcgcaugggcauggggcuguacgugaaguacggcggggaccccugggccgacuccgacgcccuggcguucagcggcgucaugguguccaugaaggagccggggugguacagcuucggcuucgagaucaaggacaagaagugcgacgugcccugcaucggcaucgagaugguccacgacgggggcaaggagaccuggcacuccgccgccacggccaucuacugccucauggggagcggccagcugcugugggacaccgugaccggcguggacauggcccucugaggacuaguuauaagacugacuagcccgaugggccucccaacgggcccuccuccccuccuugcaccgagauuaauaaaaaaaaaaaaaaaaaaaaaaaaaaaaaaaaaaaaaaaaaaaaaaaaaaaaaaaaaaaaaaaaugcaucccccccccccccccccccccccccccccccaaaggcucuuuucagagccaccagaauu

SEQ ID NO: 14489 - RNA, 1618 nt, Artificial Sequence
  FLUBV/H0N0/B/Washington/02/2019__EPI1368872 neuraminidase mRNA gc (NA)
aggagaaagcuuaccaugcugcccagcaccauccagacccucacgcuguuccugaccuccggcggggugcuccugagccuguacgucuccgccagccucuccuaccugcuguacagcgacauccuccugaaguucuccccgaccgagaucaccgcccccacgaugccccuggacugcgcgaacgccagcaacgugcaggccgugaaccgcuccgccaccaagggcgucacccuccugcugcccgagccggaguggaccuacccccggcucagcugccccggguccacguuccagaaggcccugcugaucagcccccaccgcuucggcgagaccaaggggaacuccgcgccgcucaucauccgggagcccuucguggccugcggccccaacgagugcaagcacuucgcccugacccacuacgccgcgcagcccggcggguacuacaacggcacccgcggggaccggaacaagcugcgccaccucaucagcgugaagcugggcaagaucccgacggucgagaacuccaucuuccacauggccgccuggagcggguccgccugccacgacggcaaggaguggaccuacaucggcguggacgggcccgacaacaacgcccugcucaaggugaaguacggcgaggcguacaccgacaccuaccacagcuacgccaacaacauccugcggacgcaggaguccgccugcaacugcaucgggggcaacugcuaccugaugaucaccgacggcagcgccagcggggucuccgagugccgcuuccucaagauccgggagggccgcaucaucaaggagaucuuccccaccgggcgggugaagcacaccgaggagugcacgugcggcuucgccagcaacaagaccaucgagugcgcgugccgcgacaaccgguacaccgccaagcgccccuucgugaagcugaacgucgagaccgacacggccgagauccggcugaugugcaccgacaccuaccucgacaccccgcgccccaacgacggguccaucacgggccccugcgagagcgacggcgacaagggguccggcgggaucaagggcggguucgugcaccagcggaugaaguccaagaucggccgcugguacagccggaccaugagcaagaccgagcgcaugggcauggggcuguacgugaaguacggcggggaccccugggccgacuccgacgcccugaccuucagcggcgucaugguguccaugaaggagccggggugguacagcuucggcuucgagaucaaggacaagaagugcgacgugcccugcaucggcaucgagaugguccacgacgggggcaaggagacguggcacuccgcggccaccgccaucuacugccucauggggagcggccagcugcugugggacaccgugaccggcguggacauggcccucugaggacuaguuauaagacugacuagcccgaugggccucccaacgggcccuccuccccuccuugcaccgagauuaauaaaaaaaaaaaaaaaaaaaaaaaaaaaaaaaaaaaaaaaaaaaaaaaaaaaaaaaaaaaaaaaaugcaucccccccccccccccccccccccccccccccaaaggcucuuuucagagccaccagaauu

SEQ ID NO: 14490 - RNA, 1918 nt, Artificial Sequence
  FLUAV/H1N1/A/California/7/2009__ACP41953 hemagglutinin mRNA human (HA)
aggagaaagcuuaccaugaaggccauccuggugguccuccuuuacaccuucgcuacagcaaacgccgacacucugugcauuggcuaucacgcgaauaacagcacggauaccguugacacaguguuggagaagaauguaacugugacccauuccgucaacuuacuggaagauaagcacaaugggaaacuauguaagcucagaggaguggcuccccugcaucuugguaaaugcaacauagccggcuggauccuggggaauccugagugugaaucuuugucaacagcaaguagcugguccuacauuguugagaccccaucuucggacaacggaacuugcuauccgggcgauuuuaucgacuacgaggagcucagggagcagcugucaagcgugaguuccuucgaacgguuugagauuuuccccaagacaucuagcuggccuaaucacgauuccaacaagggugucaccgccgcuuguccacaugcaggggccaaaucauuuuauaagaaucugaucuggcucgugaaaaagggaaacaguuaccccaaauuaagcaagucuuauauaaaugacaagggcaaagaaguacugguucuuuggggcauccaccacccuuccacgucagcugaucaacagagcuuguaccagaacgccgacgcguacguguucgucgggaguucucgcuauuccaagaaauuuaagccagagauugcaauccgacccaaagugcgugaucaggagggaagaaugaauuacuauuggacucugguggaaccuggugacaagauuaccuucgaggccacaggcaaccuagucguuccaagguacgcuuuugccauggaacggaacgcagggagcggaaucauaauuucggauacuccggugcaugacugcaauaccacaugucaaacccccaaaggcgcuaucaacacgucucucccuuuccagaauauucacccaaucacuaucgguaagugccccaaguauguaaaauccacaaagcugcgccuugccaccgggcugagaaacauuccuucaauacagaguaggggauuguuuggcgcgaucgccggcuucauugaagggggauggacugguaugguggacggcugguacggguaucaucaccagaaugaacaaggaagcggcuacgcagcugaucucaaauccacacagaacgccaucgacgagauaaccaauaaggucaacucugugauugagaaaaugaauacgcaguuuaccgcuguugguaaggaguucaaccaccuggaaaagcggaucgaaaauuuaaacaaaaagguggaugacggguuccuggauaucuggacauacaaugccgagcuccuuguccuguuggaaaacgagcgcacucuagacuaucaugauagcaaugugaaaaaccuguacgagaagguacgaucacagcucaaaaacaaugcaaaggaaauuggcaacggauguuuugaguucuaucacaagugcgacaauaccuguauggaaaguguuaaaaacggcacauacgauuauccaaaguacuccgaggaagccaaacugaauagagaggagaucgacggggugaaacuugaaagcacuaggauuuaucaaauacuggcuaucuacucuaccgucgcgucaaguuuggugcucgucgugagccugggagcaauuuccuuuuggaugugcucuaacgguucguuacagugccggaucuguaucugaggacuaguuauaagacugacuagcccgaugggccucccaacgggcccuccuccccuccuugcaccgagauuaauaaaaaaaaaaaaaaaaaaaaaaaaaaaaaaaaaaaaaaaaaaaaaaaaaaaaaaaaaaaaaaaaugcaucccccccccccccccccccccccccccccccaaaggcucuuuucagagccaccagaauu

SEQ ID NO: 14491 - RNA, 1918 nt, Artificial Sequence
  FLUAV/H1N1/A/Michigan/45/2015__EPI662594 hemagglutinin mRNA human (HA)
aggagaaagcuuaccaugaaggccauccuggugguccuccuuuacaccuucacaacugcuaacgcagacacgcugugcauuggcuaucacgccaauaacagcaccgauacaguugacacuguguuggagaagaauguaaccgugacacauuccgucaacuuacuggaagauaagcacaaugggaaacuauguaagcucagaggaguggcgccccugcaucuugguaaaugcaacauagcuggcuggauccuggggaauccugagugugaaucuuugucaaccgccaguagcugguccuacauuguugagacuucuaacucggacaauggaacaugcuauccaggcgauuuuaucaacuacgaagaacucagggagcagcugucaagcgugaguuccuucgaacgguuugagauuuucccgaagaccucuagcuggcccaaucacgacuccaacaagggugucacggcagccuguccucaugcuggggcaaaaucauuuuauaagaaucugaucuggcucgugaaaaagggaaacaguuacccaaaauuaaaucaaagcuauauaaacgauaagggcaaggaaguacugguucuuuggggcauccaccaccccucuacuaccgccgaccagcaguccuuguaccagaacgcugaugccuacguguucgucgggacaucacgcuauagcaaaaaguuuaaaccugagauugcgacucgaccaaaggugcgugaccaagagggaagaaugaauuacuauuggacccugguggaacccggugauaaaaucacauucgaggcaaccggcaaccuagucguuccuagguacgccuuuacgauggaacggaaugcugggaguggaauuaucauaucugacacuccagugcaugauugcaacacaaccugucagacuccggagggcgccauuaauacaucccuccccuuccagaacauccacccuauuaccaucgguaagugcccaaaauauguaaagagcacgaagcugcgccuugcaaccgggcugagaaaugugcccucgauccagucuaggggauuguuuggcgcuauugccggcuucauagaagggggauggacagguauggucgacggcugguacggguaucaucaccaaaacgagcagggauccggcuacgcggccgaccucaaaucaacucagaaugcaaucgauaagauuaccaacaaagugaauaguguuaucgagaagaugaacacacaguuuacugcuguggguaaagaguucaaucaccuggagaagcggauagaaaacuuaaauaagaaagucgacgauggguuccuggacauuuggaccuacaacgccgagcuccuugugcuguuggaaaacgagcgcacacuagauuaucaugacagcaauguaaagaaccuguacgagaaaguucgaaaucaacucaagaacaaugcuaaagaaaucggcaacggauguuuugaguucuaucacaagugcgauaauaccuguauggaauccgugaagaacggcacuuacgacuauccuaaauacucugaggaagccaagcugaauagagagaaaaucgauggggucaaacuugagagcacgaggauuuaucagauccuggcaauuuacucaacaguggccaguuccuugguccucgugguuagccugggagcuauaucuuuuuggaugugcucaaacgguaguuuacagugccggaucuguauuugaggacuaguuauaagacugacuagcccgaugggccucccaacgggcccuccuccccuccuugcaccgagauuaauaaaaaaaaaaaaaaaaaaaaaaaaaaaaaaaaaaaaaaaaaaaaaaaaaaaaaaaaaaaaaaaaugcaucccccccccccccccccccccccccccccccaaaggcucuuuucagagccaccagaauu

SEQ ID NO: 14492 - RNA, 1918 nt, Artificial Sequence
  FLUAV/H1N1/A/Netherlands/602/2009__ACQ45338 hemagglutinin mRNA human (HA)
aggagaaagcuuaccaugaaggccauccuggugguccuccuuuacaccuucgcuacagcaaacgccgacacucugugcauuggcuaucacgcgaauaacagcacggauaccguugacacaguguuggagaaaaauguaacugugacccauuccgucaacuuacuggaagauaagcacaaugggaaacuauguaagcucagaggaguggcuccccugcaucuugguaaaugcaacauagccggcuggauccuggggaauccugagugugaaucuuugucaacagcaaguagcugguccuacauuguugagaccucuucgucagacaacggaacuugcuauccaggcgauuuuaucgacuacgaggagcucagggagcagcugagcaguguguccucuuucgaacgguuugagauuuucccgaagacaagcuccuggcccaaucacgauucaaacaagggugucaccgccgcuuguccucaugcaggggccaaaaguuuuuauaagaaucugaucuggcucgugaaaaagggaaacagcuacccaaaauuaucuaaguccuauauaaaugacaagggcaaagaaguacugguucuuuggggcauccaccaccccucaacgagcgcugaucaacagaguuuguaccagaacgccgacgcguacguguucgucgggucuucccgcuauagcaagaaauuuaagccugagauugcaauccgaccaaaagugcgugaucaggagggaagaaugaauuacuauuggacucugguggaacccggugacaagauuaccuucgaggccacaggcaaccuagucguuccuagguacgcuuuugccauggaacggaacgcagggucgggaaucauaauuucugauacuccagugcaugacugcaauaccacaugucaaaccccgaaaggcgcuaucaacacgucccuccccuuccagaauauucacccuaucacuaucgguaagugcccaaaguauguaaaaucaacaaagcugcgccuugccaccgggcugagaaacgugcccaguauucagagcaggggauuguuuggcgcgauagccggcuucaucgaagggggauggacugguauggucgacggcugguacggguaucaucaccagaaugaacaaggauccggcuacgcagcugaucucaaaucuacacagaacgccauugacgagaucaccaauaaggugaacagcguuauagagaaaaugaauacgcaguuuaccgcuguggguaaggaguucaaccaccuggaaaagcggauugaaaauuuaaacaaaaaggucgaugacggguuccuggauaucuggacauacaaugccgagcuccuugugcuguuggaaaacgagcgcacucuagacuaucaugauucaaauguaaagaaccuguacgagaagguucgaagucagcucaaaaacaaugcaaaggaaaucggcaacggauguuuugaguucuaucacaagugcgacaauaccuguauggaauccgugaaaaacggcacauacgauuauccuaaguacagcgaggaagccaaacugaauagagaggagauugacggggucaaacuugaaucuacuaggaucuaucaaauucuggcuauauacucaaccguggcgaguagcuugguccucgugguuucccugggagcaaucucuuuuuggaugugcucgaacgguagcuuacagugccggauuuguaucugaggacuaguuauaagacugacuagcccgaugggccucccaacgggcccuccuccccuccuugcaccgagauuaauaaaaaaaaaaaaaaaaaaaaaaaaaaaaaaaaaaaaaaaaaaaaaaaaaaaaaaaaaaaaaaaaugcaucccccccccccccccccccccccccccccccaaaggcucuuuucagagccaccagaauu

SEQ ID NO: 14493 - RNA, 1918 nt, Artificial Sequence
  FLUAV/H3N2/A/Hong Kong/4801/2014__EPI643118 hemagglutinin mRNA human (HA)
aggagaaagcuuaccaugaagaccaucauugcccugagcuacauacucugccuuguguucgcucagaaaauccccggcaacgacaauuccacagcaacucuguguuuggggcaccaugccgucccuaacggaacgauuguuaagaccaucacaaaugauagaauugaggugacuaacgcgaccgaauuaguacaaaauucuucaaucggugagauaugcgacaguccacaccagauccuggauggcgaaaacuguacacuaauugacgcucuccugggggauccgcagugcgacggauuucagaauaaaaagugggaucuuuucguggagaggagcaaagccuauuccaacuguuaccccuaugacgucccugauuacgcaucucugcggucguugguggccucaagcggcacccucgaauuuaauaacgagaguuucaauuggacugguguuacacaaaacgggaccuccucugcuugcauccgccgaagcuccucaaguuucuucagccgucugaauuggcugacgcaucucaacuauaaguacccagcauuaaaugugacuaugcccaacaacgagcaguuugacaagcuguauauuuggggaguccaccauccuggcaccgauaaagaccagaucuucccauacgcccagucuuccggcagaauaauugugucaacaaagaggagccaacaggcuguaauccccaauauugggagucggccucgcaucagagauaucccaucuaggauuuccauauacuggacuaucguuaaaccgggagacauucuuuugaucaacagcaccgguaaucugauagcgccccggggcuauuuuaagcuacgcucggggaaaucuuccauuaugcgaucagacgccccuaucggaaaguguaagagugaaugcaucacaccaaacggcagcauucccaaugauaaaccuuuccagaacgugaauagaaucaccuacggugcauguccaagguaugucaagcacuccacgcucaaacuggccacugggaugcggaacgugcccgagaagcagacacguggaauuuuuggcgcuauagccggcuucaucgaaaaugggugggagggaaugguggacgguugguacggcuuucgccaccaaaacucugaggggagaggacaggcagcugaucuuaaaagcacccaggccgcgauugaccaaaucaauggcaagcugaacagguugaucgguaaaacuaaugaaaaguuccaucagauugagaaggaauuuucagaggucgaagggcggauacaggaucucgagaaauauguugaggacacaaagaucgaucuguggaguuacaacgccgaauuacugguggcacucgagaaucagcacaccauugaccuuacggauuccgaaaugaacaaacuguuugagaagaccaaaaagcaauugcgagaaaacgcugaggacaugggcaauggaugcuucaagaucuaucauaaaugugauaacgccugcauuggcagcauccgcaaugggacauacgaccacaacguauacagagacgaggcucuaaauaacagguuucagauaaagggaguggaacugaaaucugguuauaaggauuggauccucuggauuucauucgccaucaguugcuuucugcuuugugucgcacuguugggcuucauuaugugggccugccagaaagggaauauccgguguaacauaugcauuugaggacuaguuauaagacugacuagcccgaugggccucccaacgggcccuccuccccuccuugcaccgagauuaauaaaaaaaaaaaaaaaaaaaaaaaaaaaaaaaaaaaaaaaaaaaaaaaaaaaaaaaaaaaaaaaaugcaucccccccccccccccccccccccccccccccaaaggcucuuuucagagccaccagaauu

SEQ ID NO: 14494 - RNA, 1975 nt, Artificial Sequence
  FLUBV/H0N0/B/Brisbane/60/2008__FJ766840 hemagglutinin mRNA human (HA)
aggagaaagcuuaccaugaaggccaucauugugcugcucauggucguuaccagcaacgcugacagaauaugcacaggcaucacuuccucuaauucaccccacgugguaaaaacggcaacccagggggaggugaacgucacaggagugauuccucuuacuaccacaccaaccaagagucauuucgccaaucugaaagguacugaaacaaggggcaaguuguguccgaaaugcuuaaacuguaccgaucuggacguugcgcuagggcggcccaagugcacgggaaagaucccuagcgcucgcguguccauucuccacgagguccgaccagugacuucuggcuguuuucccaucaugcaugaucguaccaaaauaagacaacugccuaaucuucugagggguuacgaacacauccgguugucgacacauaacguaauuaaugccgagaacgcaccagggggacccuauaagaucggcacuucaggcagcugcccuaauauuaccaacgggaauggauucuuugccacaauggcuugggcaguuccgaaaaacgacaagaauaaaaccgccacgaacccacucacuaucgaagugcccuacauauguacagagggugaggaucagauuaccgucuggggcuuccacagugacaaugaaacucagauggcuaagcuguauggggauuccaagccucagaaauuuacaucuagcgccaacggagugaccacgcacuacgugucccaaaucggcgguuucccaaaccagaccgaggacgggggacugccccagucaggccgcauugucguugauuauauggugcagaagaguggcaaaacagggacuaucaccuaccaaagaggaauccucuuaccucagaagguauggugcgcgagcgguaggucuaaagugauuaagggcucccugccacuuauaggggaagcagacuguuugcaugagaaauauggaggccugaauaagucaaagcccuacuacacaggugagcacgccaaagcuaucgggaacugcccgauuugggucaagacuccucuaaaacucgccaauggcaccaaguaucggcccccagcaaaacugcuuaaggaacgcggauuuuucggcgcuaucgccggguuucuggagggagguugggaaggcaugauagcgggguggcauggauacacaagccacggcgcccacgguguggcaguugcugccgauuugaagaguacccaggaggcuauuaacaaaaucacuaagaaucucaacucucuguccgaauuagaggugaaaaaucugcagcgacucagcggggccauggacgagcuucauaacgaaauccuggaguuggaugaaaaggucgacgaccuaagagcagauacgauuucgucucaaaucgagcuggccgugcuccuguccaaugaaggcauuauaaacucagaggacgagcaccuucuggcuuuggaaaggaaacucaagaagaugcugggaccuagugcgguagagaucggcaauggguguuucgaaacaaaacauaagugcaaccagaccugcuuagaucggauugcagccggaacuuuugacgcuggugaguucagccugcccaccuuugauucccuaaauaucacagccgcaucucucaacgacgauggccuggacaaucacaccauccuuuuguauuacagcacugccgcuucaagucuggccguuacacucaugauugcaauauucguggucuauauggugucccgugauaacgucagcuguucuaucugccugugaggacuaguuauaagacugacuagcccgaugggccucccaacgggcccuccuccccuccuugcaccgagauuaauaaaaaaaaaaaaaaaaaaaaaaaaaaaaaaaaaaaaaaaaaaaaaaaaaaaaaaaaaaaaaaaaugcaucccccccccccccccccccccccccccccccaaaggcucuuuucagagccaccagaauu

SEQ ID NO: 14495 - RNA, 1972 nt, Artificial Sequence
  FLUBV/H0N0/B/Phuket/3073/2013__EPI540671 hemagglutinin mRNA human (HA)
aggagaaagcuuaccaugaaggccaucauugugcugcucauggucguuaccagcaacgcugacagaauaugcacaggcaucacuuccucuaauucaccccacgugguaaaaacggcaacccagggggaagugaacgucacaggagugauuccucuuacuaccacaccaaccaagaguuacuucgccaaucugaaagguacuaggacacggggcaaguuguguccggauugcuuaaacuguaccgaccuggauguugcgcuagggcgccccaugugcgugggaacgacuccuagcgcuaaagccuccauccuccaugaaguccgaccagugaccucuggcuguuuucccauuaugcacgaccguacaaagaucagacaacugccuaaucuucugagggguuaugagaagauacgguugucgacucagaacguaaucgaugcagaaaaagccccagggggacccuaccgccucggcaccucaggcagcugcccuaaugcuacaaguaagauuggguucuuugcaaccauggccugggcuguuccaaaagacaacuauaagaaugccacgaacccgcugacuguggagguccccuacaucuguacagaaggagaggaucagauuaccgugugggguuuccauuccgacaauaaaacucagaugaagucucuguauggcgauagcaacccucaaaaguuuacauccucagcgaauggggugaccacgcacuacgucagucagaucggagacuucccagaucagaccgaggacggcggucucccccagagcgggagaauaguuguggauuauaugaugcaaaaaccuggaaagacaggcacuauuguauaccagaggggcguguuacugccacagaaagucuggugcgcaucugggcgguccaaggugaucaaaggaucacuucccuugauuggugaagccgacugucugcaugaggaauacggcgggcuaaacaagagcaaaccguauuacaccggaaagcacgcuaaggccaucggcaauugcccuaucuggguuaaaacaccccucaagcuggcaaacgguacuaaauaucgcccuccagcuaaacuucugaaggagcgaggguuuuucggcgccauugcgggauuuuuggagggcgggugggaaggaaugauagccgguuggcacggcuacaccagucauggggcacacggaguggcugucgccgcugaccucaagucuacacaggaggccaucaacaagauuaccaaaaaucugaacuccuuaagcgaacuggaggugaagaaucuccaaagacuuucgggcgcaauggaugaacugcauaacgagaucuuggagcuagacgaaaaaguagaugaccugagggccgauacuauaucuucccagauugagcucgcuguucugcuuucaaaugaagguaucaucaacagugaggacgaacaccuguuggcgcucgagcggaagcugaaaaagauguuagggcccagcgcaguggauauuggcaauggauguuucgagacgaagcacaaaugcaaccagacaugccuggaccguaucgccgcuggcaccuuuaaugccggggaguucucccuaccaacuuuugauucucucaacauuaccgcagccagccugaaugacgauggacuugacaaccauacaauauugcuguauuacucaaccgcugccaguucccucgcagucacucugaugcuugcgaucuucauuguguauauggucagccgcgacaaugugucuuguucaaucugccugugaggacuaguuauaagacugacuagcccgaugggccucccaacgggcccuccuccccuccuugcaccgagauuaauaaaaaaaaaaaaaaaaaaaaaaaaaaaaaaaaaaaaaaaaaaaaaaaaaaaaaaaaaaaaaaaaugcaucccccccccccccccccccccccccccccccaaaggcucuuuucagagccaccagaauu

SEQ ID NO: 14496 - RNA, 1912 nt, Artificial Sequence
  FLUAV/H1N1/A/Brisbane/02/2018__EPI1212834 hemagglutinin mRNA human (HA)
aggagaaagcuuaccaugaaggccauccuggugguccuccuuuacaccuucacaacugcuaacgcagacacgcugugcauuggcuaucacgccaauaacagcaccgauacaguugacacuguguuggagaagaauguaaccgugacacauuccgucaacuuacuggaagauaagcacaaugggaaacuauguaagcucggagguguggcgccccugcaucuuggcaaaugcaacauagcuggguggauccugggaaauccugagugugaaucuuugucaaccgccagaaguuggagcuacauuguugagacuuccaacucugacaauggcacaugcuauccaggugauuuuaucaacuacgaagaacucagggagcagcugucgucagugagcaguuucgaacgguuugagauuuucccgaagaccuccucuuggcccaaucacgacagcaacaagggggucacggcagccuguccucaugcuggagcaaaauccuuuuauaagaaucugaucuggcucgugaaaaagggcaacucauacccaaaauuaaaucaaacuuauauaaacgauaagggcaaggaaguacugguucuuugggggauccaccaucccccuaccacagccgaccagcagaguuuguaccagaacgcugaugccuacguguucgucggaacuagccgcuauucuaaaaaguuuaaaccagagauugcgacccgacccaaggugcgugacagagaggguaggaugaauuacuauuggacacugguggaaccuggcgauaaaaucaccuucgaggcaacggggaaccuagucguuccacgguacgccuuuacuauggaacgcaaugcuggauccggcauuaucauaucagacacaccggugcacgauugcaacaccacuugucaaacagccgagggugcaauuaauaccagccuccccuuccagaacguacacccugugacgaucgggaagugcccaaaauaugucaagaguaccaagcugagacuugcuacaggacugaggaaugugcccucuauucagucccggggcuuguuuggcgccaucgcgggguucaucgaaggagguuggacuggcaugguugacgggugguacggauaucaucaccagaacgagcaaggcagcgguuacgccgcagaccucaaaucgaaugcuauugauaagauaaccaacaaagucaauucugugaucgagaagaugaacacacaguuuacugccguggggaaagaguucaaucaccuggagaagcgcauugaaaacuuaaauaagaaaguagacgauggcuuccuggacaucuggaccuacaacgcugagcuccuuguucuguuggaaaacgagcgaacacuagauuaucaugacuccaaugugaagaaccuguacgagaaagucagaaaucagcucaagaacaaugccaaagaaauaggaaacggcuguuuugaguucuaucacaagugcgauaauaccuguauggaaucagugaagaacgggacuuacgacuauccuaaauacagugaggaagcaaagcugaauagggagaaaauugauggagucaaacuugagagcacgcggaucuaucagauccuggccauuuacuccacaguggcuucuagcuugguucucgugguaucacugggugcgaucaguuuuuggaugugcuccaacggcagcuuacaaugccguauuuguauaugaggacuaguuauaagacugacuagcccgaugggccucccaacgggcccuccuccccuccuugcaccgagauuaauaaaaaaaaaaaaaaaaaaaaaaaaaaaaaaaaaaaaaaaaaaaaaaaaaaaaaaaaaaaaaaaaugcaucccccccccccccccccccccccccccccccaaaggcucuuuucagagccaccagaauu

SEQ ID NO: 14497 - RNA, 1912 nt, Artificial Sequence
  FLUAV/H1N1/A/Brisbane/02/2018__EPI1671767 hemagglutinin mRNA human (HA)
aggagaaagcuuaccaugaaggccauccuggugguccuccuuuacaccuucacaacugcuaacgcagacacgcugugcauuggcuaucacgccaauaacagcaccgauacaguugacacuguguuggagaagaauguaaccgugacacauuccgucaacuuacuggaagauaagcacaaugggaaacuauguaagcucggagguguggcgccccugcaucuuggcaaaugcaacauagcuggguggauccugggaaauccugagugugaaucuuugucaaccgccagaaguuggagcuacauuguugagacuuccaacucugacaauggcacaugcuauccaggugauuuuaucaacuacgaagaacucagggagcagcugucgucagugagcaguuucgaacgguuugagauuuucccgaagaccuccucuuggcccaaucacgacagcaacaagggggucacggcagccuguccucaugcuggagcaaaauccuuuuauaagaaucugaucuggcucgugaaaaagggcaacucauacccaaaauuaaaucaaacuuauauaaacgauaagggcaaggaaguacugguucuuugggggauccaccaucccccuaccacagccgaccagcagaguuuguaccagaacgcugaugccuacguguucgucggaacuagccgcuauucuaaaaaguuuaaaccagagauugcgacccgacccaaggugcgugaccaagaggguagaaugaauuacuauuggacacugguggaaccuggcgauaaaaucaccuucgaggcaacggggaaccuagucguuccaagguacgccuuuacuauggaacggaaugcuggauccggcauuaucauaucagacacaccggugcacgauugcaacaccacuugucagacagccgagggugcaauuaauaccagccuccccuuccagaacguacacccugugacgaucgggaagugcccaaaauaugucaagaguaccaagcugcgccuugcuacaggacugagaaaugugcccucuauucaguccaggggcuuguuuggcgccaucgcgggguucaucgaaggagguuggacuggcaugguugacgggugguacggauaucaucaccaaaacgagcagggcagcgguuacgccgcagaccucaaaucgaaugcuauugauaagauaaccaacaaagucaauucugugaucgagaagaugaacacacaguuuacugccguggggaaagaguucaaucaccuggagaagcggauugaaaacuuaaauaagaaaguagacgauggcuuccuggacaucuggaccuacaacgcugagcuccuuguucuguuggaaaacgagcgcacacuagauuaucaugacuccaaugugaagaaccuguacgagaaaguccgaaaucagcucaagaacaaugccaaagaaauaggaaacggcuguuuugaguucuaucacaagugcgauaauaccuguauggaaucagugaagaacgggacuuacgacuauccuaaauacagugaggaagcaaagcugaauagagagaaaauugauggagucaaacuugagagcacgaggaucuaucaaauccuggccauuuacuccacaguggcuucuagcuugguucucgugguaucacugggugcgaucaguuuuuggaugugcuccaacggcagcuuacagugccggauuuguauaugaggacuaguuauaagacugacuagcccgaugggccucccaacgggcccuccuccccuccuugcaccgagauuaauaaaaaaaaaaaaaaaaaaaaaaaaaaaaaaaaaaaaaaaaaaaaaaaaaaaaaaaaaaaaaaaaugcaucccccccccccccccccccccccccccccccaaaggcucuuuucagagccaccagaauu

SEQ ID NO: 14498 - RNA, 1912 nt, Artificial Sequence
  FLUAV/H1N1/A/Guangdong-Maonan/SWL1536/2019__EPI1542570 hemagglutinin mRNA human (HA)
aggagaaagcuuaccaugaaggccauccuggugguccuccuuuacaccuucacaacugcuaacgcagacacgcugugcauuggcuaucacgccaauaacagcaccgauacaguugacacuguguuggagaagaauguaaccgugacacauuccgucaacuuacuggaagauaagcacaaugggaaacuauguaagcucagaggaguggcgccccugcaucuugguaaaugcaacauagcuggcuggauccuggggaauccugagugugaaucuuugucaaccgccaggaguuggagcuacauuguugagacuuccaacucugacaauggaacaugcuauccaggcgauuuuaucaacuacgaggagcuccgggagcagcugucgucagugagcaguuucgaacgcuuugagauuuucccgaagaccuccucuuggcccaaucacgacagcgauaagggugucacggcagccuguccucaugcuggggcaaaauccuuuuauaagaaccugaucuggcucgugaaaaagggaaauucauacccaaaauuaaaccaaacuuauauaaaugacaagggcaaggaaguacugguucuuuggggcauccaccaucccccuaccauugccgcucaggagaguuuguaccagaacgccgaugcguacguguucgucgggacaagccgauauucuaaaaaguuuaaaccagagaucgcaacucgucccaaggugagagaccaggaaggaaggaugaacuacuauuggacccugguggagccuggugauaaaauuacauucgaagccaccggcaaucuagucguuccacgguacgcuuuuacgauggagcgcgacgccggguccggaaucauaauuucagauacuccggugcacgacugcaacacaaccugucaaacucccgaaggcgcaaucaauacaagccucccuuuccagaacguacacccaauuaccaucgguaagugccccaaauaugugaagaguacgaagcugagacuugcuaccgggcugaggaaugucccuucuauccagucccggggauuguuuggcgccauugcgggcuucauagaagggggauggacagguaugguggacggcugguacggguaucaucaccagaacgagcaaggaagcggcuacgccgcagaucucaaaucgaaugcuaucgacaagauuacuaacaaaguuaauucugugaucgaaaagaugaacacccaguuuacagccgucgguaaagaguucaaucaccuggaaaagcgcauagagaacuuaaauaagaaaguggaugacggguuccuggauauuuggacuuacaacgcugaacuccuuguacuguuggagaaugagcgaacccuagacuaucaugauuccaacguuaagaaccuguacgaaaaagugagaaaucagcucaagaacaaugccaaagagaucggcaacggauguuuugaguucuaucacaagugcgacaauacauguauggaaucagucaagaacggcaccuacgauuauccaaaauacagugaagaggcaaagcugaauagggagaaaaucgacggggugaaacuugaaagcacucggauuuaucagauccuggccauuuacuccacggucgcuucuagcuuggugcucguugugucacugggagcgauaaguuuuuggaugugcuccaacgguagcuuacaaugccguaucuguauuugaggacuaguuauaagacugacuagcccgaugggccucccaacgggcccuccuccccuccuugcaccgagauuaauaaaaaaaaaaaaaaaaaaaaaaaaaaaaaaaaaaaaaaaaaaaaaaaaaaaaaaaaaaaaaaaaugcaucccccccccccccccccccccccccccccccaaaggcucuuuucagagccaccagaauu

SEQ ID NO: 14499 - RNA, 1912 nt, Artificial Sequence
  FLUAV/H1N1/A/Guangdong-Maonan/SWL1536/2019__EPI1590725 hemagglutinin mRNA human (HA)
aggagaaagcuuaccaugaaggccauccuggugguccuccuuuacaccuucacaacugcuaacgcagacacgcugugcauuggcuaucacgccaauaacagcaccgauacaguugacacuguguuggagaagaauguaaccgugacacauuccgucaacuuacuggaagauaagcacaaugggaaacuauguaagcucagaggaguggcgccccugcaucuugguaaaugcaacauagcuggcuggauccuggggaauccugagugugaaucuuugucaaccgccaggaguuggagcuacauuguugagacuuccaacucugacaauggaacaugcuauccaggcgauuuuaucaacuacgaggagcuccgggagcagcugucgucagugagcaguuucgaacgcuuugagauuuucccgaagaccuccucuuggcccaaucacgacagcgauaagggugucacggcagccuguccucaugcuggggcaaaauccuuuuauaagaaccugaucuggcucgugaaaaagggaaauucauacccaaaauuaaaccaaacuuauauaaaugacaagggcaaggaaguacugguucuuuggggcauccaccaucccccuaccauugccgugcaggagaguuuguaccagaacgcugaugccuacgucuucguggggacaagccgauauucuaaaaaguuuaaaccagagaucgcgacucgucccaaggugagagaccaggaaggaaggaugaacuacuauuggacccuggucgagccuggugauaaaauuacauucgaagcaaccggcaaucuaguugugccacgguacgccuuuacgauggagcgcgacgcuggguccggaaucauaauuucagauacuccgguacacgacugcaacacaaccugucaaacucccgaaggcgccaucaauacaagccucccuuuccagaacgugcacccaauuaccaucgguaagugccccaaauaugucaagaguacgaagcugagacuugcaaccgggcugaggaaugugccuucuauccagucccggggauuguuuggcgcuauugccggcuucauagaagggggauggacagguaugguugacggcugguacggguaucaucaccagaacgagcaaggaagcggcuacgcggccgaucucaaaucgaaugcaaucgacaagauuacuaacaaagucaauucugugaucgaaaagaugaacacccaguuuacagcuguggguaaagaguucaaucaccuggaaaagcgcauagagaacuuaaauaagaaaguagaugacggguuccuggauauuuggacuuacaacgccgaacuccuuguucuguuggagaaugagcgaacccuagacuaucaugauuccaacgugaagaaccuguacgaaaaagucagaaaucagcucaagaacaaugcuaaagagaucggcaacggauguuuugaguucuaucacaagugcgacaauacauguauggaaucagugaagaacggcaccuacgauuauccaaaauacagugaagaggccaagcugaauagggagaaaaucgacggggucaaacuugaaagcacucggauuuaucagauccuggcaauuuacuccacgguggccucuagcuugguucucgugguaucacugggagcuauaaguuuuuggaugugcuccaacgguagcuuacaaugccguaucuguauuugaggacuaguuauaagacugacuagcccgaugggccucccaacgggcccuccuccccuccuugcaccgagauuaauaaaaaaaaaaaaaaaaaaaaaaaaaaaaaaaaaaaaaaaaaaaaaaaaaaaaaaaaaaaaaaaaugcaucccccccccccccccccccccccccccccccaaaggcucuuuucagagccaccagaauu

SEQ ID NO: 14500 - RNA, 1918 nt, Artificial Sequence
  FLUAV/H3N2/A/Singapore/INFIMH-16-0019/2016__EPI1106227 hemagglutinin mRNA human (HA)
aggagaaagcuuaccaugaagaccaucauugcccugagcuacauacucugccuuguguucgcucagaaaauccccggcaacgacaauuccacagcaacucuguguuuggggcaccaugccgucccuaacggaacgauuguuaagaccaucacaaaugauagaauugaggugacuaacgcgaccgaauuaguacaaaauucuucaaucggugagauaugcgacaguccacaccagauccuggauggcgaaaacuguacacuaauugacgcucuccugggggauccgcagugcgacggauuucagaauaaaaagugggaucuuuucguggagaggagcaaagccuauuccaacuguuaccccuaugacgucccugauuacgcaucucugcggucguugguggccucaagcggcacccucgaauuuaagaaugagaguuucaacuggacugguguuacacaaaaugggaccuccucugcuugcauccgcggaagcuccucaaguuucuucagccgacugaacuggcugacgcaucucaauuauacuuacccagcauuaaacgugaccaugcccaauaaggagcaguuugacaaacuguauauuuggggcguccaccauccuggcacagauaaggaccagaucuuccuuuacgcccagucuuccgggcguauaacugugucaaccaaaagaagccaacaggcuguaauuccaaacaucggaaguaggccccggauucgcgauaucccuucuagaaucuccauuuacuggacaauaguuaagccaggugacaucuugcugauuaacagcaccggcaaucuaaucgccccgaggggguauuuuaaaauacggucgggaaagucuuccauuaugcgcucagacgcgcccaucggcaaguguaaaagugaaugcaucacgccuaacgguagcauuccaaaugauaagcccuuccagaacgugaaucgaaucacuuacggggcauguccuagauaugucaaacacuccacacucaagcuggccaccggaaugaggaacgugccagagaaacagacucggggcauuuuuggcgcuauagccggguucaucgaaaauggaugggaggguaugguggacggcugguacggguuucgucaccaaaacucugagggacgcggccaggcagcugaucuuaagagcacacaggccgcgauugaccaaaucaaugguaaacugaacagauugaucgggaagaccaaugaaaaguuccaucagauugagaaagaauuuucagaggucgaaggcaggguucaggaucucgagaaguauguggaggacacgaaaauagaucuguggaguuacaacgccgaauuacugguagcacucgagaaucagcacaccaucgaccuuacagauuccgaaaugaacaagcuguuugagaaaacuaagaagcaauugcgggaaaaugcugaggacaugggaaacggcugcuucaaaauuuaucauaagugugauaacgccugcaucgagagcauucgaaaugaaaccuacgaccacaacguguaccgcgacgaggcucuaaauaacagauuucagaucaaaggggucgaacugaagucuggauauaaagauuggauacucuggaucucauucgccauuaguugcuuucugcuuuguguggcacuguuggguuucaucaugugggccugccagaagggcaauauuagguguaacaucugcauaugaggacuaguuauaagacugacuagcccgaugggccucccaacgggcccuccuccccuccuugcaccgagauuaauaaaaaaaaaaaaaaaaaaaaaaaaaaaaaaaaaaaaaaaaaaaaaaaaaaaaaaaaaaaaaaaaugcaucccccccccccccccccccccccccccccccaaaggcucuuuucagagccaccagaauu

SEQ ID NO: 14501 - RNA, 1918 nt, Artificial Sequence
  FLUAV/H3N2/A/Singapore/INFIMH-16-0019/2016__EPI1341068 hemagglutinin mRNA human (HA)
aggagaaagcuuaccaugaagaccaucauugcccugagcuacauacucugccuuguguucgcucagaaaauccccggcaacgacaauuccacagcaacucuguguuuggggcaccaugccgucccuaacggaacgauuguuaagaccaucacaaaugauagaauugaggugacuaacgcgaccgaauuaguacaaaauucuucaaucggugagauaugcgacaguccacaccagauccuggauggcgaaaacuguacacuaauugacgcucuccugggggauccgcagugcgacggauuucagaauaaaaagugggaucuuuucguggagaggagcaaagccuauuccaacuguuaccccuaugacgucccugauuacgcaucucugcggucguugguggccucaagcggcacccucgaauuuaagaaugagaguuucaacuggacugguguuacacaaaaugggaccuccucugcuugcauccgcggaagcuccucaaguuucuucagccgacugaacuggcugacgcaucucaauuauaaguacccagcauuaaacgugacuaugcccaauaaagagcaguuugacaagcuguauauuuggggcguccaccauccuggcaccgauaaagaccagaucuucccauacgcccagucuuccgggcguauaacagugucaacuaagagaagccaacaggcuguaauucccaacaucggaaguaggccucggauucgcgguaucccaucuagaaucuccauuuacuggaccauaguuaaaccgggcgauauccuuuugauuaacagcacagggaaucugaucgcccccaggggauauuuuaagauacggucgggcaagucuuccauuaugcgcucagacgcgccuaucgguaaauguaagagugaaugcaucaccccaaacgggagcauucccaaugacaaaccuuuccagaacgugaaucgaaucacguacggagcauguccaagauaugucaagcacuccacucuaaaacucgccacaggcaugaggaacgugcccgagaagcagacccggggcauuuuuggggcuauagccggauucaucgaaaaugguugggagggcaugguggaugggugguacggauuucgucaccaaaacucugagggccgcggucaggcagcugaccugaaaagcacucaggccgcgauugaucaaaucaaugggaaacuuaacagacugaucggcaagacaaaugaaaaguuccaucagauugagaaggaauuuucagaggucgaaggaaggguucaggacuuggagaaauauguggaggauaccaagauagaccucuggaguuacaacgccgaacuguuaguagcacuggagaaucagcacacgaucgaucucaccgacuccgaaaugaacaaacuuuuugagaagacaaagaaacaacugcgggaaaaugcugaggauaugggcaacgggugcuucaagauuuaucauaaaugugacaacgccugcaucgagagcauucgaaaugaaacuuacgaucacaacguguaccgcgacgaggcuuugaauaacagauuucagaucaagggagucgaacuaaaaucugguuauaaggacuggauacuguggaucucauucgccauuaguugcuuucuccuguguguggcacuucugggcuucaucaugugggccugccagaaggggaauauuagguguaacaucugcauaugaggacuaguuauaagacugacuagcccgaugggccucccaacgggcccuccuccccuccuugcaccgagauuaauaaaaaaaaaaaaaaaaaaaaaaaaaaaaaaaaaaaaaaaaaaaaaaaaaaaaaaaaaaaaaaaaugcaucccccccccccccccccccccccccccccccaaaggcucuuuucagagccaccagaauu

SEQ ID NO: 14502 - RNA, 1918 nt, Artificial Sequence
  FLUAV/H3N2/A/Singapore/INFIMH-16-0019/2016 NYMC-X-307__EPI1259099 hemagglutinin mRNA human (HA)
aggagaaagcuuaccaugaagaccaucauugcccugagcuacauacucugccuuguguucgcucagaaaauccccggcaacgacaauuccacagcaacucuguguuuggggcaccaugccgucccuaacggaacgauuguuaagaccaucacaaaugauagaauugaggugacuaacgcgaccgaauuaguacaaaauucuucaaucggugagauaugcgacaguccacaccagauccuggauggcgaaaacuguacacuaauugacgcucuccugggggauccgcagugcgacggauuucagaauaaaaagugggaucuuuucguggagaggagcaaagccuauuccaacuguuaccccuaugacgucccugauuacgcaucucugcggucguugguggccucaagcggcacccucgaauuuaagaaugagaguuucaacuggacugguguuacacaaaaugggaccuccucugcuugcauccgcggaagcuccucaaguuucuucagccgacugaacuggcugacgcaucucaauuauaaguacccagcauuaaacgugacuaugcccaauaaagagcaguuugacaagcuguauauuuggggcguccaccauccuggcaccgauaaagaccagaucuucccauacgcccagucuuccgggcguauaacagugucaacuaagagaagccaacaggcuguaauucccaacaucggaaguaggccucggauucgcgguaucccaucuagaaucuccauuuacuggaccauaguuaaaccgggcgauauccuuuugauuaacagcacagggaaucugaucgcccccaggggauauuuuaagauacggucgggcaagucuuccauuaugcgcucagacgcgccuaucgguaaauguaagagugaaugcaucaccccaaacgggagcauucccaaugacaaaccuuuccagaacgugaauaagaucacguacggagcauguccacgauaugucaaacacuccacucuaaagcucgccacaggcaugagaaacgugcccgagaaacagaccaggggcauuuuuggggcuauagccggauucaucgaaaaugguugggagggcaugguggaugggugguacggauuucggcaccaaaacucugagggccguggucaggcagcugaccuuaagagcacucaggccgcgauugaucaaaucaaugggaagcugaaccgccugaucggcaaaacaaaugaaaaguuccaucagauugagaaagaauuuucagaggucgaaggaagaguucaggacuuggagaaguauguggaggauaccaaaauagaccucuggaguuacaacgccgaacuguuaguagcacuggagaaucagcacacgaucgaucucaccgacuccgaaaugaacaaacuuuuugagaagacaaagaagcaacugagggaaaaugcugaggauaugggcaacgggugcuucaaaauuuaucauaagugugacaacgccugcaucgagagcauucggaaugaaacuuacgaucacaacguguaccgagacgaggcuuugaauaaccgcuuucagaucaaaggagucgaacuaaagucugguuauaaggacuggauacuguggaucucauucgccauuaguugcuuucuccuguguguggcacuucugggcuucaucaugugggccugccagaaagggaauauuagauguaacaucugcauaugaggacuaguuauaagacugacuagcccgaugggccucccaacgggcccuccuccccuccuugcaccgagauuaauaaaaaaaaaaaaaaaaaaaaaaaaaaaaaaaaaaaaaaaaaaaaaaaaaaaaaaaaaaaaaaaaugcaucccccccccccccccccccccccccccccccaaaggcucuuuucagagccaccagaauu

SEQ ID NO: 14503 - RNA, 1918 nt, Artificial Sequence
  FLUAV/H3N2/A/Singapore/INFIMH-16-0019/2016-CDC-LV18A__EPI1583318 hemagglutinin mRNA human (HA)
aggagaaagcuuaccaugaagaccaucauugcccugagcuacauacucugccuuguguucgcucagaaaauccccggcaacgacaauuccacagcaacucuguguuuggggcaccaugccgucccuaacggaacgauuguuaagaccaucacaaaugauagaauugaggugacuaacgcgaccgaauuaguacaaaauucuucaaucggugagauaugcgacaguccacaccagauccuggauggcgaaaacuguacacuaauugacgcucuccugggggauccgcagugcgacggauuucagaauaaaaagugggaucuuuucguggagaggagcaaagccuauuccaacuguuaccccuaugacgucccugauuacgcaucucugcggucguugguggccucaagcggcacccucgaauuuaagaaugagaguuucaacuggacugguguuacacaaaaugggaccuccucugcuugcauccgcggaagcuccucaaguuucuucagccgacugaacuggcugacgcaucucaauuauaaguacccagcauuaaacgugacuaugcccaauaaagagcaguuugacaagcuguauauuuggggcguccaccauccuggcaccgauaaagaccagaucuucccauacgcccagucuuccgggcguauaauugugucaacaaagagaagccaacaggcuguaauccccaacauuggaaguaggccucggauccgcgauaucccaucuagaauuuccauauacuggacuaucguuaaaccgggugacauucuuuugaucaacagcaccggcaaucugauagcccccaggggguauuuuaagauucggucgggaaagucuuccaucaugcgcucagacgcgccuaucggcaaauguaagagugaaugcauuacaccaaacgguagcauccccaaugauaaaccuuuccagaacgugaaucgaauuaccuacggggcauguccaagauaugucaagcacuccacgcuaaaacucgccacuggaaugaggaacgugcccgagaagcagacacggggcauauuuggcgcuaucgccggguucauugaaaauggaugggaggguaugguggacggcugguacggguuucgucaccaaaacucugagggacgcggccaggcagcugaucugaaaagcacccaggccgcgaucgaccaaaucaaugguaaacuuaacagacugauugggaagacuaaugaaaaguuccaucagauagagaaggaauuuucagaggucgaaggcaggguucaggauuuggagaaauauguggaggacacaaagaucgaucucuggaguuacaacgccgaacuguuaguagcacuggagaaucagcacaccauugaccucacggauuccgaaaugaacaaacuuuuugagaagaccaagaaacaacugcgggaaaaugcugaggacaugggaaacggcugcuucaagaucuaucauaaaugugauaacgccugcauugagagcauccgaaaugaaacauacgaccacaacguguaccgcgacgaggcuuugaauaacagauuucagauaaagggggucgaacuaaaaucuggauauaaggauuggauccuguggauuucauucgccaucaguugcuuucuccuguguguggcacuucuggguuucauuaugugggccugccagaagggcaauaucagguguaacauaugcauuugaggacuaguuauaagacugacuagcccgaugggccucccaacgggcccuccuccccuccuugcaccgagauuaauaaaaaaaaaaaaaaaaaaaaaaaaaaaaaaaaaaaaaaaaaaaaaaaaaaaaaaaaaaaaaaaaugcaucccccccccccccccccccccccccccccccaaaggcucuuuucagagccaccagaauu

SEQ ID NO: 14504 - RNA, 1918 nt, Artificial Sequence
  FLUAV/H3N2/A/Kansas/14/2017__EPI1146345 hemagglutinin mRNA human (HA)
aggagaaagcuuaccaugaagaccaucauugcccugagcugcauacucugucuuguguucgcucagaaaauccccggcaacgacaauuccacagcaacucugugcuuggggcaccaugccgucccuaacggaacgauuguuaagaccaucacaaaugauagaauugaggugacuaacgcgaccgaauuaguacaaaauucuucaaucggugagauaugugacaguccacaccagauccuggauggcgaaaacugcacacuaauugacgcucuccugggggauccgcagugugacggauuucagaauaaaaagugggaucuuuucguggagaggaacaaagccuacagcaauugcuaucccuacgacgucccugauuaugcaucccugcggucuuugguggccucgucaggcacccucgaauuuaacaaugagagcuucaacugggcugguguuacucaaaaugggacaaguuccucuuguauccgcggaagcaaguccucauuuuucagucgacugaacuggcugacccaucucaauagcaaguacccagcauuaaacgugacgaugcccaacaaugagcaguuugacaaacuguauauuuggggcguccaccauccuggcacugauaaggaccagaucucucuuuacgcccaguccucagggcguauaaccgugagcacaaaaagaagucaacaggcuguaauuccaaacaucggaucuaggccccggauucgcgauaucccuuccagaaucagcauuuauuggacuauaguuaagccaggugacaucuugcugauuaauucgaccggcaaccuaaucgccccgaggggguacuucaaaauacggucuggaaaguccucaauuaugcgcagugacgcgcccaucggcaagugcaaaagcgaauguaucacaccuaaugguuccauuccaaacgauaagcccuuucagaaugugaaccgaaucaccuacggggcaugcccuagauaugucaaacagucuacgcucaagcuggccacuggaaugaggaaugugccagagcggcaaacacguggcauuuucggcgcuauagccggguuuaucgaaaacggaugggaggguaugguggacggcugguacggguuccgccaccagaauagcgagggaagaggccaggcagcugaucuuaaaucaacccaagccgcgauugaccagaucaacgguaagcugaauagguugaucgggaaaacuaacgaaaaguuucaccagauugagaaggaguucagugaagucgaaggccggauacaggaucucgagaaauauguugaggacacaaagaucgaucugugguccuacaaugccgaauuacugguggcacucgagaaccaacauaccauugaccuuacggauagcgaaaugaacaaacuguucgagaagaccaaaaagcaguugcgagaaaaugcugaggacaugggaaacggcuguuuuaagaucuaucacaaaugcgauaaugccugcauggggucuauucgcaacggaacauacgaccauaauguauauagagacgaggcucuaaacaauagguuccagaucaaggguguggaacugaaaucaggcuacaaggauuggauacucuggaucaguuuugccauuagcuguuuccugcuuugcgucgcacuguugggguuuaucaugugggccugucagaaaggaaacauucggugcaauaucuguauaugaggacuaguuauaagacugacuagcccgaugggccucccaacgggcccuccuccccuccuugcaccgagauuaauaaaaaaaaaaaaaaaaaaaaaaaaaaaaaaaaaaaaaaaaaaaaaaaaaaaaaaaaaaaaaaaaugcaucccccccccccccccccccccccccccccccaaaggcucuuuucagagccaccagaauu

SEQ ID NO: 14505 - RNA, 1918 nt, Artificial Sequence
  FLUAV/H3N2/A/Kansas/14/2017__EPI1261067 hemagglutinin mRNA human (HA)
aggagaaagcuuaccaugaagaccaucauugcccugagcugcauacucugucuuguguucgcucagaaaauccccggcaacgacaauuccacagcaacucugugcuuggggcaccaugccgucccuaacggaacgauuguuaagaccaucacaaaugauagaauugaggugacuaacgcgaccgaauuaguacaaaauucuucaaucggugagauaugugacaguccacaccagauccuggauggcgaaaacugcacacuaauugacgcucuccugggggauccgcagugugacggauuucagaauaaaaagugggaucuuuucguggagaggaacaaagccuacagcaauugcuaucccuacgacgucccugauuaugcaucccugcggucuuugguggccucgucaggcacccucgaauuuaacaaugagagcuucaacugggcugguguuacucaaaaugggacaaguuccucuuguauccgcggaagcaaguccucauuuuucagucgacugaacuggcugacccaucucaauagcaaguacccagcauuaaacgugacgaugcccaacaaugagcaguuugacaaacuguauauuuggggcguccaccauccuggcacugauaagaaccagaucucucuuuacgcccaguccucagggcguauaaccgugagcacaaaaagaagucaacaggcuguaauuccaaauaucggaucuaggccccggauucgcgacaucccuuccagaaucagcauuuauuggacuauaguuaagccaggugauaucuugcugauuaccucgacaggcaaccuaaucgccccgaggggguacuucaaaauacggucuggaaaguccucaauuaugcgcagugacgcgcccaucggcaagugcaaaagcgaauguaucaccccuaaugguuccauuccaaacgacaagcccuuucagaaugugaaccgaaucacguacggggcaugcccuagauaugucaaacagucuacucucaagcuggccacaggaaugaggaaugugccagagcggcaaacccguggcauuuucggcgcuauagccggguuuaucgaaaacggaugggaggguaugguggauggcugguacggguuccgccaccagaauagcgagggaagaggccaggcagcugaccuuaaaucaacucaagccgcgauugaucagaucaacgguaagcugaauagguugaucgggaaaacaaacgaaaaguuucaccagauugagaaggaguucagugaagucgaaggccggauacaggaccucgagaaauauguugaggauaccaagaucgaccugugguccuacaaugccgaauuacugguggcacucgagaaccaacauacgauugaucuuaccgacagcgaaaugaacaaacuguucgagaagacuaaaaagcaguugcgagaaaaugcugaggauaugggaaacggcuguuuuaagaucuaucacaaaugcgacaaugccugcauggggucuauucgcaacggaacauacgaucauaauguauauagagacgaggcucuaaacaauagguuccagaucaaggguguggaacugaaaucaggcuacaaggacuggauacucuggaucaguuuugccauuagcuguuuccugcuuugcgucgcacuguugggguuuaucaugugggccugucagaaaggaaacauucggugcaauaucuguauaugaggacuaguuauaagacugacuagcccgaugggccucccaacgggcccuccuccccuccuugcaccgagauuaauaaaaaaaaaaaaaaaaaaaaaaaaaaaaaaaaaaaaaaaaaaaaaaaaaaaaaaaaaaaaaaaaugcaucccccccccccccccccccccccccccccccaaaggcucuuuucagagccaccagaauu

SEQ ID NO: 14506 - RNA, 1918 nt, Artificial Sequence
  FLUAV/H3N2/A/Kansas/14/2017__EPI1691978 hemagglutinin mRNA human (HA)
aggagaaagcuuaccaugaagaccaucauugcccugagcugcauacucugucuuguguucgcucagaaaauccccggcaacgacaauuccacagcaacucugugcuuggggcaccaugccgucccuaacggaacgauuguuaagaccaucacaaaugauagaauugaggugacuaacgcgaccgaauuaguacaaaauucuucaaucggugagauaugugacaguccacaccagauccuggauggcgaaaacugcacacuaauugacgcucuccugggggauccgcagugugacggauuucagaauaaaaagugggaucuuuucguggagaggaacaaagccuacagcaauugcuaucccuacgacgucccugauuaugcaucccugcggucuuugguggccucgucaggcacccucgaauuuaacaaugagagcuucaacugggcugguguuacucaaaaugggacaaguuccucuuguauccgcggaagcaaguccucauuuuucagucgacugaacuggcugacccaucucaauagcaaguacccagcauuaaacgugacgaugcccaacaaugagcaguuugacaaacuguauauuuggggcguccaccauccugugacugauaagaaccagaucucucuuuacgcccaguccucaggccguauaaccguaagcacaaaaagaagucaacaggcuguuauuccaaauaucggguauaggccccggauucgcgacaucccuucuagaaucuccauuuacuggacuauagugaagccaggagauaucuugcugauuaacagcaccgguaaucuaaucgccccgaggggcuacuucaaaauacggucggggaagucuuccauuaugcgcucagacgcgcccaucggaaagugcaaaagugaauguaucacaccuaacggcagcauuccaaaugacaagcccuuucagaacgucaaucgaaucaccuauggugcaugcccuagauacgugaaacaguccacgcucaagcuggccacugggaugaggaacgugccagagcggcaaacacguggaauuuucggcgcuauagccggcuuuaucgaaaaugggugggagggaauggucgaugguugguauggcuuccgccaccagaacucugaggggagaggacaggcagcugaccuuaaaagcacccaagccgcgauugaucagaucaauggcaagcugaacagguugaucgguaaaacuaaugaaaaguuucaccagauugagaaggaguucucagaaguugaagggcggauacaggaccucgagaaauacguggaggauacaaagaucgaccuguggaguuauaacgccgaauuacugguagcacucgagaaccaacauaccauugaucuuacggacuccgaaaugaauaaacuguucgagaagaccaaaaagcaguugcgagaaaacgcugaggauaugggcaauggauguuuuaagaucuaccacaaaugcgacaacgccugcaugggcagcauucgcaaugggacauaugaucauaacguguacagagacgaggcucuaaauaacagguuccagaucaagggagucgaacugaaaucugguuacaaggacuggauacucuggaucucauuugccauuaguuguuuccugcuuugcguggcacuguugggcuuuaucaugugggccugucagaaagggaauauucggugcaacaucuguauaugaggacuaguuauaagacugacuagcccgaugggccucccaacgggcccuccuccccuccuugcaccgagauuaauaaaaaaaaaaaaaaaaaaaaaaaaaaaaaaaaaaaaaaaaaaaaaaaaaaaaaaaaaaaaaaaaugcaucccccccccccccccccccccccccccccccaaaggcucuuuucagagccaccagaauu

SEQ ID NO: 14507 - RNA, 1918 nt, Artificial Sequence
  FLUAV/H3N2/A/Kansas/14/2017 CBER-22B CDC19A__EPI1388416 hemagglutinin mRNA human (HA)
aggagaaagcuuaccaugaagaccaucauugcccugagcugcauacucugucuuguguucgcucagaaaauccccggcaacgacaauuccacagcaacucugugcuuggggcaccaugccgucccuaacggaacgauuguuaagaccaucacaaaugauagaauugaggugacuaacgcgaccgaauuaguacaaaauucuucaaucggugagauaugugacaguccacaccagauccuggauggcgaaaacugcacacuaauugacgcucuccugggggauccgcagugugacggauuucagaauaaaaagugggaucuuuucguggagaggaacaaagccuacagcaauugcuaucccuacgacgucccugauuaugcaucccugcggucuuugguggccucgucaggcacccucgaauuuaacaaugagagcuucaacugggcugguguuacucaaaaugggacaaguuccucuuguauccgcggaagcaaguccucauuuuucagucgacugaacuggcugacccaucucaauagcaaguacccagcauuaaacgugacgaugcccaacaaugagcaguuugacaaacuguauauuuggggcguccaccauccugugacugauaagaaccagaucucucuuuacgcccaguccucaggccguauaaccguaagcacaaaaagaagucaacaggcuguuauuccaaauaucggguauaggccccggauucgcgacaucccuucuagaaucuccauuuacuggacuauagugaagccaggagauaucuugcugauuaacagcaccgguaaucuaaucgccccgaggggcuacuucaaaauacggucggggaagucuuccauuaugcgcucagacgcgcccaucggaaagugcaaaagugaauguaucacaccuaacggcagcauuccaaaugacaagcccuuucagaacgucaaucgaaucaccuauggugcaugcccuagauacgugaaacaguccacgcucaagcuggccacugggaugaggaacgugccagagcggcaaacacguggaauuuucggcgcuauagccggcuuuaucgaaaaugggugggagggaauggucgaugguugguauggcuuccgccaccagaacucugaggggagaggacaggcagcugaccuuaaaagcacccaagccgcgauugaucagaucaauggcaagcugaacagguugaucgguaaaacuaaugaaaaguuucaccagauugagaaggaguucucagaaguugaagggcggauacaggaccucgagaaauacguggaggauacaaagaucgaccuguggaguuauaacgccgaauuacugguagcacucgagaaccaacauaccauugaucuuacggacuccgaaaugaauaaacuguucgagaagaccaaaaagcaguugcgagaaaacgcugaggauaugggcaauggauguuuuaagaucuaccacaaaugcgacaacgccugcauuggcagcauccgcaaugggacauaugaucauaacguguacagagacgaggcucuaaauaacagguuccagauaaagggagucgaacugaaaucugguuacaaggacuggauccucuggauuucauuugccaucaguuguuuccugcuuugcguggcacuguugggcuuuauuaugugggccugucagaaagggaauauccggugcaacauauguauuugaggacuaguuauaagacugacuagcccgaugggccucccaacgggcccuccuccccuccuugcaccgagauuaauaaaaaaaaaaaaaaaaaaaaaaaaaaaaaaaaaaaaaaaaaaaaaaaaaaaaaaaaaaaaaaaaugcaucccccccccccccccccccccccccccccccaaaggcucuuuucagagccaccagaauu

SEQ ID NO: 14508 - RNA, 1918 nt, Artificial Sequence
  FLUAV/H3N2/A/Switzerland/8060/2017__EPI1154878 hemagglutinin mRNA human (HA)
aggagaaagcuuaccaugaagaccaucauugcccugagcuacauacucugccuuguguucgcucagaaaauccccggcaacgacaauuccacagcaacucuguguuuggggcaccaugccgucccuaacggaacgauuguuaagaccaucacaaaugauagaauugaggugacuaacgcgaccgaauuaguacaaaauucuucaaucggugagauaugcgacaguccacaccagauccuggauggcgaaaacuguacacuaauugacgcucuccugggggauccgcagugcgacggauuucagaauaaaaagugggaucuuuucguggagaggagcaaagccuauuccucuuguuaccccuaugacgucccugauuacgcaucgcugcggucauugguggccagcaguggcacccucgaauuuaacaaugaguccuucaacuggacugguguuaagcaaaaugggacaucuagcgcuugcauccgcaaguccucaaguagcuuuuucucucgacugaacuggcugacccaucucaauuauacguacccagcauuaaacgugacuaugcccaauaacgagcaguuugacaaacuguauauuuggggaguccaccauccuggcaccgauaaggaccagaucuuccuuuacgcccaguccucaggccguauaacagugagcacuaaaagaagucaacaggcuguaauuccaaacaucgggucuaggccccggauucgcgauaucccuuccagaaucagcauuuacuggaccauaguuaagccaggagacaucuugcugauuaauucgacagguaaccuaaucgccccgaggggcuauuuuaaaauacagucugggaaguccucaauuaugcggagugacgcgcccaucggaaaguguaaaagcgaaugcaucaccccuaauggcuccauuccaaacgauaagcccuuccagaaugugaaccgcaucacguacggugcauguccucgauaugucaaacacucuacucucaagcuggccacagggaugagaaaugugccagagaaacaaaccaggggaauuuuuggcgcuauagccggcuucaucgaaaacgggugggagggaaugguggacgguugguacggcuuucggcaccagaauagcgaggggcguggacaggcagcugaucuuaagucaacucaagccgcgauugaccagaucaacggcaaacugaaucgcuugaucgguaagacaaacgaaaaguuccaucagauugagaaagaguucagugaagucgaagggagaauacaggaucucgagaaguauguugaggacaccaaaaucgaucugugguccuacaaugccgaauuacugguggcacucgagaaccaacacacgauugaccuuaccgauagcgaaaugaauaagcuguuugagaaaacaaagaagcaguugagggaaaacgcugaggacaugggcaacggaugcuucaaaaucuaucauaagugugauaaugccugcauuggcucuauccggaacgggacuuacgaccacaauguauaccgagacgaggcucuaaacaaucgcuuucagauaaaaggaguggaacugaagucagguuauaaagauuggauccucuggauuaguuucgccaucagcugcuuucugcuuugugucgcacuguugggcuucauuaugugggccugccagaaggggaacaucagauguaauauaugcauuugaggacuaguuauaagacugacuagcccgaugggccucccaacgggcccuccuccccuccuugcaccgagauuaauaaaaaaaaaaaaaaaaaaaaaaaaaaaaaaaaaaaaaaaaaaaaaaaaaaaaaaaaaaaaaaaaugcaucccccccccccccccccccccccccccccccaaaggcucuuuucagagccaccagaauu

SEQ ID NO: 14509 - RNA, 1918 nt, Artificial Sequence
  FLUAV/H3N2/A/Switzerland/8060/2017__EPI1266285 hemagglutinin mRNA human (HA)
aggagaaagcuuaccaugaagaccaucauugcccugagcuacauacucugccuuguguucgcucagaaaauccccggcaacgacaauuccacagcaacucuguguuuggggcaccaugccgucccuaacggaacgauuguuaagaccaucacaaaugauagaauugaggugacuaacgcgaccgaauuaguacaaaauucuucaaucggugagauaugcgacaguccacaccagauccuggauggcgaaaacuguacacuaauugacgcucuccugggggauccgcagugcgacggauuucagaauaaaaagugggaucuuuucguggagaggagcaaagccuauuccucuuguuaccccuaugacgucccugauuacgcaucgcugcggucauugguggccagcaguggcacccucgaauuuaacaaugaguccuucaacuggacugguguuaagcaaaaugggacaucuagcgcuugcauccgcaaguccucaaguagcuuuuucucucgacugaacuggcugacccaucucaauuauaaauacccagcauuaaacgugacgaugcccaauaacgagcaguuugacaagcuguauauuuggggaguccaccauccuggcacugauaaagaccagaucuucccauacgcccaguccucaggccguauaaccgugagcacaaagagaagucaacaggcuguaauucccaacaucgggucuaggccucggauucgcgauaucccauccagaaucagcauuuacuggacuauaguuaaaccgggagacauccuuuugauuaauucgaccgguaaccugaucgcccccaggggcuauuuuaagauacagucugggaaguccucaauuaugcggagugacgcgccuaucggaaaauguaagagcgaaugcaucacaccaaauggcuccauucccaacgauaaaccuuuccagaaugugaaccgcaucaccuacggugcauguccacgauaugucaagcacucuacgcuaaaacucgccacugggaugagaaaugugcccgagaagcaaacaaggggaauuuuuggcgcuauagccggcuucaucgaaaacgggugggagggaaugguggacgguugguacggcuuucggcaccagaauagcgaggggcguggacaggcagcugaucugaaaucaacccaagccgcgauugaccagaucaacggcaaacuuaaucgccugaucgguaagacuaacgaaaaguuccaucagauugagaaggaguucagugaagucgaagggagaauacaggauuuggagaaauauguugaggacacaaagaucgaucucugguccuacaaugccgaacuguuaguggcacuggagaaccaacacaccauugaccucacggauagcgaaaugaauaaacuuuuugagaagaccaagaaacagcugagggaaaacgcugaggacaugggcaacggaugcuucaagaucuaucauaaaugugauaaugccugcauuggcucuauccggaacgggacauacgaccacaauguauaccgagacgaggcuuugaacaaucgcuuucagauaaagggaguggaacuaaaaucagguuauaaggauuggauccuguggauuaguuucgccaucagcugcuuucuccugugugucgcacuucugggcuucauuaugugggccugccagaaggggaacaucagauguaauauaugcauuugaggacuaguuauaagacugacuagcccgaugggccucccaacgggcccuccuccccuccuugcaccgagauuaauaaaaaaaaaaaaaaaaaaaaaaaaaaaaaaaaaaaaaaaaaaaaaaaaaaaaaaaaaaaaaaaaugcaucccccccccccccccccccccccccccccccaaaggcucuuuucagagccaccagaauu

SEQ ID NO: 14510 - RNA, 1918 nt, Artificial Sequence
  FLUAV/H3N2/A/Hong Kong/2671/2019__EPI1543098 hemagglutinin mRNA human (HA)
aggagaaagcuuaccaugaagaccaucauugcccugagcuacauacucugccuuguguucacacagaaaauccccggcaacgacaauuccacugcuacgcuguguuuggggcaccaugcagucccuaacggaaccauuguuaagacaaucacuaaugauagaauugaggugaccaacgccacagaauuaguacaaaauucuucaaucggugagauaugcgacaguccacaccagauccuggauggcgggaacuguacccuaauugacgcgcuccugggagauccgcagugcgacggcuuucagaauaaaaagugggaucuuuucguggaaaggagccgggcuuauuccaacuguuaccccuaugacgucccugauuacgccucucugcgcucguugguggcaucaagcgguacucucgaguuuaaaaaugaaaguuucaacugggccgggguuacacaaaauggaaaguccuuuucuugcauccgaggcagcuccucaaguuucuuuagccgucugaacuggcugacccaucucaauuauacguacccagcuuuaaacgugacuaugcccaauaaggagcaguucgacaaacuguauauuuggggcguccaccauccugggaccgauaaggaccagaucucucuuuacgcacaguccucaggaagaauaacagugagcacuaaaaggagucaacaggccguaauuccaaacaucgguucucggccccgcauuagagauaucccuuccaggaucagcauuuacuggaccauaguuaagccaggcgacaucuugcugauuaacucgacagggaaucuaaucgcuccgcggggauauuuuaaaauacgcucuggcaaguccucaauuaugcgaagugacgcccccaucgguaaguguaaaagcgagugcaucaccccuaacggguccauuccaaaugauaagcccuuccagaacgugaauagaaucacguacggagcguguccuagguaugucaaacagucuacucucaagcuggcaacaggcaugcggaacgugccagaaaaacaaacccguggcauuuuuggggccauagcuggauucaucgagaaugguugggaaggcaugguggacgggugguacggauuucgccaccagaacagcgagggcagaggucaggccgcagaucuuaagucaacucaagcugccauugaccagaucaaugggaaacugaacagguugaucggcaagacaaaugagaaguuccaccagauugaaaaagaguucagugaagucgagggacggguucaggaucucgaaaaguauguggaggacaccaaaauagaucugugguccuacaacgcggaguuacugguagcccucgaaaaucaacauacgaucgaccuuaccgauagcgagaugaacaagcuguuugagaaaacaaagaagcaguugcgagaaaaugcagaagacaugggcaacgggugcuucaaaauuuaucacaagugugauaacgcuugcaucggaucuauucgcaaugagacuuacgaccauaacguguacagagacgaggcccuaaauaacagguuucagaucaaaggugucgaacugaagucaggcuauaaagauuggauacucuggaucaguuucgcuauuagcugcuuucugcuuuguguggcccuguugggguucaucaugugggcaugccagaagggaaauauucgguguaacaucugcauaugaggacuaguuauaagacugacuagcccgaugggccucccaacgggcccuccuccccuccuugcaccgagauuaauaaaaaaaaaaaaaaaaaaaaaaaaaaaaaaaaaaaaaaaaaaaaaaaaaaaaaaaaaaaaaaaaugcaucccccccccccccccccccccccccccccccaaaggcucuuuucagagccaccagaauu

SEQ ID NO: 14511 - RNA, 1918 nt, Artificial Sequence
  FLUAV/H3N2/A/Hong Kong/2671/2019__EPI1642843 hemagglutinin mRNA human (HA)
aggagaaagcuuaccaugaagaccaucauugcccugagcuacauacucugccuuguguucacacagaaaauccccggcaacgacaauuccacugcuacgcuguguuuggggcaccaugcagucccuaacggaaccauuguuaagacaaucacuaaugauagaauugaggugaccaacgccacagaauuaguacaaaauucuucaaucggugagauaugcgacaguccacaccagauccuggauggcgggaacuguacccuaauugacgcgcuccugggagauccgcagugcgacggcuuucagaauaaaaagugggaucuuuucguggaaaggagccgggcuuauuccaacuguuaccccuaugacgucccugauuacgccucucugcgcucguugguggcaucaagcgguacucucgaguuuaaaaaugaaaguuucaacugggccgggguuacacaaaauggaaaguccuuuucuugcauccgaggcagcuccucaaguuucuuuagccgucugaacuggcugacccaucucaauuauauuuacccagcuuuaaacgugacgaugcccaauaaggagcaguucgacaaacuguauaucuggggcguccaccauccugugacugauaaggaccagauaucucuuuacgcacaguccucagggagaauuaccguaagcacaaaaaggagucaacaggccguuaucccaaacauuggaucucggccccgcaucagaaacaucccuuccaggauuagcauauacuggacuaucgugaagccaggugauauuuugcugaucaauucgaccggcaaccuaauagcuccgcggggguauuuuaaaauucgcucuggaaaguccucaaucaugcgaagugacgcccccaucggcaaguguaaaagcgagugcauuacaccuaaugguuccaucccaaacgacaagcccuuccagaaugucaacagaauuaccuacggggcguguccuagguaugugaaacagucuacgcucaagcuggcaacuggaaugcggaaugugccagaaaaacaaacacguggcauauuuggcgccaucgcuggguucauugagaacggaugggaagguauggucgauggcugguacggguuucgccaccagaauagcgagggaagaggccaggccgcagaccuuaagucaacccaagcugccaucgaucagaucaacgguaaacugaauagguugauugggaagacuaacgagaaguuccaccagauagaaaaagaguucagugaaguugagggccgggugcaggaccucgaaaaguauguagaggauacaaaaaucgaccugugguccuacaaugcggaguuacugguggcccucgaaaaccaacauaccauugaucuuacggacagcgagaugaauaagcuguuugagaaaaccaagaagcaguugcgagaaaacgcagaagauaugggaaacggcugcuucaaaaucuaucacaagugugacaaugcuugcauugggucuauccgcaacgagacauacgaucauaaugucuacagagacgaggcccuaaacaauagguuucagauaaaaggaguggaacugaagucagguuauaaagacuggauccucuggauuaguuucgcuaucagcugcuuucugcuuuguguugcccuguugggcuucauuaugugggcaugccagaaggggaacauccgguguaauauaugcauuugaggacuaguuauaagacugacuagcccgaugggccucccaacgggcccuccuccccuccuugcaccgagauuaauaaaaaaaaaaaaaaaaaaaaaaaaaaaaaaaaaaaaaaaaaaaaaaaaaaaaaaaaaaaaaaaaugcaucccccccccccccccccccccccccccccccaaaggcucuuuucagagccaccagaauu

SEQ ID NO: 14512 - RNA, 1918 nt, Artificial Sequence
  FLUAV/H3N2/A/Hong Kong/45/2019__EPI1691930 hemagglutinin mRNA human (HA)
aggagaaagcuuaccaugaagaccaucauugcccugagcuacauacucugccuuggcuucacacagaaaauccccgggaacgacaauuccacugcuacgcuguguuugggacaccaugcagugccuaacgguaccauugucaagacaaucacuaaugauagaauugagguuaccaacgccacagaauuagugcaaaauucuucaaucggcgagauaugcgacaguccacaccagauccuggaugggggaaacuguacccuaauugacgcgcuccugggcgauccgcagugcgacgguuuucagaauaaaaagugggaucuuuucguagaaaggagccgggcuuauuccaacuguuaccccuaugacgugccugauuacgccucucugcgcucguuggucgcaucaagcgggacucucgaguuuaaaaaugaaaguuucaacugggccggagugacacaaaauggcaaguccuuuucuugcauccgaggcagcuccucaaguuucuuuagccgucugaacuggcugacccaucucaauuauacguacccagcuuuaaacguuacuaugcccaauaaggagcaguucgacaaacuguauauuuggggagugcaccauccugggaccgauaaggaccagaucucucuuuacgcacaguccucagguagaauaacagucagcacuaaaaggagucaacaggccgugauuccaaacaucggcucucggccccgcauuagagauaucccuuccaggaucagcauuuacuggaccauaguaaagccaggggacaucuugcugauuaacucgacaggaaaucuaaucgcuccgcggggcuauuuuaaaauacgcucugguaaguccucaauuaugcgaagugacgcccccaucgggaaguguaaaagcgagugcaucaccccuaacggauccauuccaaaugauaagcccuuccagaacguuaauagaaucacguacggcgcguguccuagguaugugaaacagaacacucucaagcuggcaacaggcaugcggaaugucccagaaaaacaaacccgugggauuuuuggagccauagcugguuucaucgagaacggcugggaagggaugguggacggaugguacggcuuucgccaccaaaauucugaggguagagggcaggccgcagaucuuaagagcacucaggcugccauugaccagaucaacggcaaacugaauagguugaucggaaagacaaacgagaaguuccaccagauugaaaaagaguucucagaaguggagggccggguccaggaucucgaaaaguauguugaggacaccaaaauagaucuguggaguuacaaugcggaguuacugguggcccucgaaaaccaacauacgaucgaccuuaccgauuccgagaugaauaagcuguuugagaaaacaaagaagcaguugcgagaaaacgcagaagacauggggaacggaugcuucaaaauuuaucacaagugugauaaugcuugcaucgguagcauucgcaacgagacuuacgaccauaauguauacagagacgaggcccuaaacaauagguuucagaucaaaggcguggaacugaagucuggguauaaagauuggauacucuggaucucauucgcuauuaguugcuuucugcuuugugucgcccuguugggauucaucaugugggcaugccagaagggcaacauucgguguaauaucugcauaugaggacuaguuauaagacugacuagcccgaugggccucccaacgggcccuccuccccuccuugcaccgagauuaauaaaaaaaaaaaaaaaaaaaaaaaaaaaaaaaaaaaaaaaaaaaaaaaaaaaaaaaaaaaaaaaaugcaucccccccccccccccccccccccccccccccaaaggcucuuuucagagccaccagaauu

SEQ ID NO: 14513 - RNA, 1918 nt, Artificial Sequence
  FLUAV/H3N2/A/South Australia/34/2019__EPI1387331 hemagglutinin mRNA human (HA)
aggagaaagcuuaccaugaagaccaucauugcccugagcuacauacucugccuuguguucgcucagaaaauccccggcaacgacaauuccacagcaacucuguguuuggggcaccaugccgucccuaacggaacgauuguuaagaccaucacaaaugauagaauugaggugacuaacgcgaccgaauuaguacaaaauucuucaaucggugagauaugcgacaguccacaccagauccuggauggcgggaacuguacacuaauugacgcucuccugggagauccgcagugcgacggcuuucagaauaaaaagugggaucuuuucguggaaaggagccgggccuauuccaacuguuaccccuaugacgucccugauuacgcaucucugcgcucguugguggccucaagcgguacccucgaguuuaaaaaugaaaguuucaacuggacugggguuaagcaaaauggaacauccucugcuugcauccgaggcagcuccucaaguuucuuuagccgucugaacuggcugacccaucucaauuauacguacccagcauuaaacgugacuaugcccaauaaggagcaguuugacaaacuguauauuuggggcguccaccauccugggaccgauaaggaccagaucuuccuuuacgcccagucuuccggaagaauaacagugucaacuaaaaggagccaacaggcuguaauuccaaacaucgguuuucggccccgcauuagagauaucccuaguaggaucucuauuuacuggaccauaguuaagccaggcgacaucuugcugauuaacuccacagggaaucuaaucgccccgcggggauauuucaaaauacgcagcggcaagucgucuauuaugcgauccgacgcgcccaucgguaaguguaaaucagagugcaucaccccuaacgggaguauuccaaaugauaagcccuuucagaacgugaauagaaucacguacggagcauguccuagguaugucaaacagagcacucucaagcuggccacaggcaugcggaacgugccagaaaaacaaacccguggcauuuucggggcuauagccggauuuaucgagaaugguugggaaggcaugauggacgggugguacggauuccgccaccagaacuccgagggcagaggucaggcagcugaucuuaagucuacucaagccgcgauugaccagaucaaugggaaacugaacagguugaucggcaagacaaaugagaaguuccaccagauugaaaaagaguuuagcgaaguggagggacggguccaggaucucgaaaaguauguugaggacaccaaaauagaucuguggucauacaacgccgaguuacugguggcacucgaaaaucaacauacgaucgaccuuaccgauagugagaugaacaagcuguucgaaaagacaaagaagcaguugcgagagaaugcugaagacaugggcaacgggugcuuuaaaauuuaucacaagugugauaacgccugcaucggauccauucgcaaugagacuuacgaccauaacguauacagagacgaggcucuaaauaacagguuccagaucaaagguguggaacugaaaagcggcuauaaagauuggauacucuggaucucuuuugccauuucaugcuuccugcuuuguaucgcacuguugggguuuauuaugugggccugccagaagggaaauauccgguguaacauaugcauuugaggacuaguuauaagacugacuagcccgaugggccucccaacgggcccuccuccccuccuugcaccgagauuaauaaaaaaaaaaaaaaaaaaaaaaaaaaaaaaaaaaaaaaaaaaaaaaaaaaaaaaaaaaaaaaaaugcaucccccccccccccccccccccccccccccccaaaggcucuuuucagagccaccagaauu

SEQ ID NO: 14514 - RNA, 1918 nt, Artificial Sequence
  FLUAV/H3N2/A/South Australia/34/2019__EPI1440494 hemagglutinin mRNA human (HA)
aggagaaagcuuaccaugaagaccaucauugcccugagcuacauacucugccuuguguucgcucagaaaauccccggcaacgacaauuccacagcaacucuguguuuggggcaccaugccgucccuaacggaacgauuguuaagaccaucacaaaugauagaauugaggugacuaacgcgaccgaauuaguacaaaauucuucaaucggugagauaugcgacaguccacaccagauccuggauggcgggaacuguacacuaauugacgcucuccugggagauccgcagugcgacggcuuucagaauaaaaagugggaucuuuucguggaaaggagccgggccuauuccaacuguuaccccuaugacgucccugauuacgcaucucugcgcucguugguggccucaagcgguacccucgaguuuaaaaaugaaaguuucaacuggacugggguuaagcaaaauggaacauccucugcuugcauccgaggcagcuccucaaguuucuuuagccgucugaacuggcugacccaucucaauuauaaguacccagcauuaaacgugacgaugcccaauaaagagcaguuugacaagcuguauauuuggggcguccaccauccuaucacugauaaagaccagauauuccuuuacgcccagucuuccgggagaauuaccgugucaacaaagaggagccaacaggcuguaaucccaaacauuggauuucggccccgcaucagagauaucccuaguaggauuucuauauacuggacuaucguuaaaccaggugacauuuugcugaucaacuccaccggcaaucuaauagccccgcggggguauuucaagauucgcagcggaaagucgucuaucaugcgauccgacgcgcccaucggcaaauguaagucagagugcauuacaccuaacgguaguaucccaaaugauaaacccuuucagaacgugaauagaauuaccuacggggcauguccuagguaugucaagcagagcacgcucaaacuggccacuggaaugcggaacgugccagaaaagcaaacacguggcauauucggcgcuaucgccggguuuauugagaauggaugggaagguaugauggacggcugguacggguuccgccaccagaacuccgagggaagaggccaggcagcugaucuuaaaucuacccaagccgcgaucgaccagaucaaugguaagcugaacagguugauugggaagacuaaugagaaauuccaccagauagaaaaggaguuuagcgaaguggagggccggguccaggaucucgaaaaauauguugaggacacaaagaucgaucuguggucauacaacgccgaguuacugguggcacucgaaaaucaacauaccauugaccuuacggauagugagaugaacaaacuguucgaaaagaccaagaaacaguugcgagagaaugcugaagacaugggaaacggcugcuuuaagaucuaucacaaaugugauaacgccugcauuggguccauccgcaaugagacauacgaccauaacguauacagagacgaggcucuaaauaacagguuccagauaaagggaguggaacugaaaagcgguuauaaggauuggauccucuggauuucuuuugccaucucaugcuuccugcuuuguauugcacuguugggcuuuaucaugugggccugccagaaggggaauauacgguguaacauuugcaucugaggacuaguuauaagacugacuagcccgaugggccucccaacgggcccuccuccccuccuugcaccgagauuaauaaaaaaaaaaaaaaaaaaaaaaaaaaaaaaaaaaaaaaaaaaaaaaaaaaaaaaaaaaaaaaaaugcaucccccccccccccccccccccccccccccccaaaggcucuuuucagagccaccagaauu

SEQ ID NO: 14515 - RNA, 1900 nt, Artificial Sequence
  FLUAV/H7N9/A/chicken/Zhejiang/C483/2013(H7N9)__AGN69400.1 hemagglutinin mRNA human (HA)
aggagaaagcuuaccaugaacacccagauccugguguucgcccucauugcuauaauccccacaaaugcagacaagauuugccuuggccaccaugccgucagcaacgggacuaaaguuaauacgcugaccgagagaggaguggaaguagugaacgcgacagagacugucgaaaggaccaauaucccucggauuuguuccaaggguaaaaagacaguggauuugggccaaugcggguuacugggaaccaucacuggcccaccgcagugugaccaguuucuagaguucucugcugaucucauaaucgaacgccgagaggguucagacguuugcuaccccgggaaauuugugaacgaggaagcccugcgucagauucuuagagagaguggaggcaucgauaaggaagcaaugggcuucacauauagcgggauuaggaccaauggagccacguccgcuugucggcgcucugguucgucauuuuacgcagagaugaaguggcuguugagcaacacugacaaugccgcuuucccucaaaugaccaaaaguuauaagaacacaagaaaauccccagcccucaucgucuggggcauacaccauucugugagcacugcggagcagaccaagcuguacggguccggaaauaaacugguaacaguuggcucaaguaacuaucagcagagcuuugugcccucuccuggugcaaggccacaagucaaugggcaguccggacggauugauuuccacuggcucauguuaaaccccaaugacaccgugacguuuucauucaacggcgccuuuaucgcuccugaucgcgccagcuuccugcgaggcaagaguauggggauucagucuggagugcaggucgacgcaaacugcgaaggugauuguuaccauuccggcgggacuaucaucagcaaucuuccauuucaaaacauugacucgagagcuguuggaaagugcccgagguaugugaaacagcggucuuugcugcuagccacaggcaugaagaauguacccgagauaccuaaaggucguggccucuucggggcgaucgccggauucauugaaaacggcugggaggggcugaucgauggaugguacgguuuucgccaccagaaugcacaaggcgaagggaccgcugccgacuacaaguccacucagucagcuauagaccagauuacaggaaaacuuaacagacugaucgagaagaccaaucagcaauucgaguugaucgauaacgaauuuaaugagguggaaaaacagauuggcaacgucaucaauuggacgagggacaguauuaccgagguguggagcuauaacgccgaacuccugguugcaauggagaaucagcacacaauagauuuagccgacuccgagauggauaagcuguacgaacgggugaagcgacagcuccgcgagaacgcugaagaggacgguacuggguguuucgaaaucuuucauaaaugcgaugacgauuguauggcgucuauuagaaauaacaccuaugaccacagcaaguacagggaggaggcaaugcaaaaccggauccagaucgauccagucaaacuuucaaguggcuauaaggacgugauucugugguucuccuuuggagccagcugcuucauauugcuagcuaucguaaugggccugguuuuuauuugcgugaaaaaugggaacaugcgcuguacaaucugcauuugaggacuaguuauaagacugacuagcccgaugggccucccaacgggcccuccuccccuccuugcaccgagauuaauaaaaaaaaaaaaaaaaaaaaaaaaaaaaaaaaaaaaaaaaaaaaaaaaaaaaaaaaaaaaaaaaugcaucccccccccccccccccccccccccccccccaaaggcucuuuucagagccaccagaauu

SEQ ID NO: 14516 - RNA, 1903 nt, Artificial Sequence
  FLUAV/H10N8/A/Jiangxi/IPB13/2013(H10N8)__AHK10761.1 hemagglutinin mRNA human (HA)
aggagaaagcuuaccauguacaagaucguggucauuauagcccugcucggcgcuguuaaagggcuugacaagaucugccugggacaccaugcaguggccaacgguaccauuguaaaaacauugacuaaugagcaggaagaggugacgaacgcgaccgaaacagucgagagcacuggcaucaauagauuauguaugaaggggaggaaacacaaggaucugggaaacugccaucccauuggcaugcuaaucgguaccccugcuugugaccuccaccugacagggaugugggauacccuuauagaacgggagaaugccaucgcauauugcuacccaggagccacugugaacguugaggcucugcgccaaaagauuauggaauccggcggcaucaauaaaauuucuacaggguucaccuauggaucaaguaucaacagcgcagguacgacucgagccuguaugcguaauggcgggaacuccuuuuacgcugaguugaaguggcucgugucuaaaucgaagggacagaauuucccgcagaccacaaacacuuauagaaauaccgacacagccgaacaucugauaauguggggcauucaccaccccucaagcacccaggagaaaaacgaucuguacgguacgcaaagucucuccaucucugucgggagcuccacuuauaggaauaacuuugugccuguaguuggagcgcggccacaggugaacggccagucaggccgcauugacuuccauuggacauuaguccagcccggggauaauaucaccuuuagucacaacggaggucugaucgcaccuagcagagugucuaaacuuauuggcaggggguugggaauacaauccgacgccccaaucgauaauaacugcgagucaaaguguuucuggcggggcgguagcauuaauacucgccugcccuuucagaaccuaaguccucgaacaguggggcagugcccaaaguacgucaauagaaggucucucaugcuggcuaccggcaugcggaacguuccggaacuuauccagggacguggccuguucggggccauagcaggauuuuuggagaaugguugggaaggcaugguggacgggugguacggauuccgccaucaaaacgcucagggcacgggucaggccgcggauuauaaguccacccaagccgcaauugaccagaucacagggaaacucaauagacugguagagaagacuaacaccgaauuugagagcaucgagucggaguucucugaaauugaacaccagaucggcaaugugauuaacuggacaaaagauuccauaacugacaucuggaccuaccaggcugaguuacuggucgccauggaaaaucaacacacaauugacauggcugauucagagaugcucaaccuuuaugagagggugcggaagcagcugcgacagaacgccgaagaggacggaaaaggcuguuuugaaaucuaccaugcaugcgaugacaguuguauggagagcauccgcaauaacaccuaugaucacucccaguacagagaagaggccuugcuaaauaggcugaacauuaaucccguuacucucucuagcggguauaaggacauaauccugugguucucauucggagcuaguugcuuugugcuucuggcggucgugauggguuuguucuuuuucugccucaagaacggcaauaugcgguguacgauuugcaucugaggacuaguuauaagacugacuagcccgaugggccucccaacgggcccuccuccccuccuugcaccgagauuaauaaaaaaaaaaaaaaaaaaaaaaaaaaaaaaaaaaaaaaaaaaaaaaaaaaaaaaaaaaaaaaaaugcaucccccccccccccccccccccccccccccccaaaggcucuuuucagagccaccagaauu

SEQ ID NO: 14517 - RNA, 1969 nt, Artificial Sequence
  FLUBV/H0N0/B/Colorado/06/2017__EPI1011552 hemagglutinin mRNA human (HA)
aggagaaagcuuaccaugaaggccaucauugugcugcucauggucguuaccagcuccgcugacagaauaugcacaggcaucacuucuucaaacaguccccacgugguaaaaacggcaacccagggggaggugaaugucacaggagugauuccucuuacuaccacaccaaccaagagccauuucgccaaccugaaagguacugaaacaaggggcaaguuguguccgaaaugcuuaaauuguaccgaucuggacguugcgcuagggcggcccaagugcacgggaaagaucccuuccgcucgcgugucuauucuccacgagguccgaccagugacuucgggcuguuuucccaucaugcaugaucguaccaaaauaagacaacugccuaaccuucugagggguuacgaacacguacgguugucaacacauaauguuaucaacgccgagggggcaccaggaggccccuauaagauuggcacuagcgggaguugcccuaauaucaccaacggaaaugguuucuuugccacaauggcuugggcagugccagacaaaaacaagaccgccacgaauccgcucacuauugaaguccccuacguguguacagagggcgaggaucagaucaccguguggggguuccacuccgacaacgaaacucagauggcuaaacuguauggagauucuaagccucagaaguuuacaagcuccgccaauggcgucaccacgcacuacguuucacaaauagguggguucccaaaccagaccgaggacggaggccugccccagaguggccgcauugugguagauuauauggugcagaaaagcgggaagacaggaacuaucaccuaccaaagagguauucucuuaccucagaaagucuggugcgcgucuggcagguccaaggugaucaaagggucacugccacuuaucggagaagcagacuguuugcaugagaaguauggcggucugaauaaaagcaagcccuacuacacaggggagcacgccaaggcuauuggcaacugcccgauauggguuaaaacuccucuaaagcucgccaacggaaccaaauaucggcccccagcaaagcugcuuaaagaacgcggcuuuuucggggcuaucgccggauuucuggaggguggcugggaagggaugauugcgggauggcauggcuacacaagucacggugcccacgggguggcagucgcugccgauuugaagucuacccaggaggcuaucaauaagauaacuaaaaaccucaauucccugagcgaauuagaggugaagaaccugcagcgacucucgggcgccauggacgagcuucauaaugaaauucuggaguuggaugaaaaaguagacgaccuaagagcagauacgaucucuucccaaaucgagcuggccguucuccugucaaacgaaggaauuaucaauagugaggacgagcaccuucuggcuuuggaaaggaagcucaaaaagaugcugggcccuagcgcgguggagauugggaacggauguuucgaaacaaagcauaaaugcaaucagaccugcuuagauaagauagcagccgguacuuuugacgcuggcgaguucucccugcccaccuuugauucucuaaacaucacagccgcaagccucaaugacgaugggcuggacaaccacaccauucuuuuguauuacucaacugccgcuaguucccuggccgucacacucaugaucgcaaucuucguggucuauauggugagccgggauaauguuucuuguucaauuugccugugaggacuaguuauaagacugacuagcccgaugggccucccaacgggcccuccuccccuccuugcaccgagauuaauaaaaaaaaaaaaaaaaaaaaaaaaaaaaaaaaaaaaaaaaaaaaaaaaaaaaaaaaaaaaaaaaugcaucccccccccccccccccccccccccccccccaaaggcucuuuucagagccaccagaauu

SEQ ID NO: 14518 - RNA, 1969 nt, Artificial Sequence
  FLUBV/H0N0/B/Colorado/06/2017__EPI1051642 hemagglutinin mRNA human (HA)
aggagaaagcuuaccaugaaggccaucauugugcugcucauggucguuaccagcuccgcugacagaauaugcacaggcaucacuucuucaaacaguccccacgugguaaaaacggcaacccagggggaggugaaugucacaggagugauuccucuuacuaccacaccaaccaagagccauuucgccaaccugaaagguacugaaacaaggggcaaguuguguccgaaaugcuuaaauuguaccgaucuggacguugcgcuagggcggcccaagugcacgggaaagaucccuuccgcucgcgugucuauucuccacgagguccgaccagugacuucgggcuguuuucccaucaugcaugaucguaccaaaauaagacaacugccuaaccuucugagggguuacgaacacguacgguugucaacacauaauguuaucaacgccgagggggcaccaggaggccccuauaagauuggcacuagcgggaguugcccuaauaucaccaacggaaaugguuucuuugccacaauggcuugggcagugccagacaaaaacaagaccgccacgaauccgcucacuauugaaguccccuacguguguacagagggcgaggaucagaucaccguguggggguuccacuccgacacugaaacacagauggcuaaacuguauggagauucuaagccucagaaguuuaccagcuccgccaacggcgucacgacccacuacguuucacaaauagguggguucccaaaucagacagaggacggaggccugccccagaguggccgcauugugguagauuauauggugcagaaaagcgggaagacuggaaccaucacauaccaaagagguauucucuuaccucagaaagucuggugcgcgucuggcagguccaaggugaucaaagggucacugccacuuaucggagaagcagacuguuugcaugagaaguauggcggucugaacaaaagcaagcccuacuacacuggggagcacgccaaggcuauuggcaauugcccgauauggguuaaaaccccucuaaagcucgccaacggaacaaaauaucggcccccagcaaagcugcuuaaagaacgcggcuuuuucggggcuaucgccggauuucuggaggguggcugggaagggaugauugcgggauggcauggcuacaccagucacggugcccacgggguggcagucgcugccgauuugaagucuacucaggaggcuaucaacaagauaacgaaaaaucucaacucccugagcgaauuagaggugaagaaucugcagcgacucucgggcgccauggacgagcuucauaacgaaauucuggaguuggaugaaaaaguagacgaccuaagagcagauacaaucucuucccaaaucgagcuggccguucuccugucaaaugaaggaauuaucaacagugaggacgagcaccuucuggcuuuggaaaggaagcucaaaaagaugcugggcccuagcgcgguggagauugggaauggauguuucgaaaccaagcauaaaugcaaccagacuugcuuagauaagauagcagccgguaccuuugacgcuggcgaguucucccugcccacauuugauucucuaaauaucaccgccgcaagccucaacgacgaugggcuggacaaucacacuauucuuuuguauuacucaacagccgcuaguucccuggccgucacgcucaugaucgcaaucuucguggucuauauggugagccgggauaacguuucuuguucaauuugccugugaggacuaguuauaagacugacuagcccgaugggccucccaacgggcccuccuccccuccuugcaccgagauuaauaaaaaaaaaaaaaaaaaaaaaaaaaaaaaaaaaaaaaaaaaaaaaaaaaaaaaaaaaaaaaaaaugcaucccccccccccccccccccccccccccccccaaaggcucuuuucagagccaccagaauu

SEQ ID NO: 14519 - RNA, 1969 nt, Artificial Sequence
  FLUBV/H0N0/B/Colorado/06/2017 BX-71__EPI1151760 hemagglutinin mRNA human (HA)
aggagaaagcuuaccaugaaggccaucauugugcugcucauggucguuaccagcuccgcugacagaauaugcacaggcaucacuucuucaaacaguccccacgugguaaaaacggcaacccagggggaggugaaugucacaggagugauuccucuuacuaccacaccaaccaagagccauuucgccaaccugaaagguacugaaacaaggggcaaguuguguccgaaaugcuuaaauuguaccgaucuggacguugcgcuagggcggcccaagugcacgggaaagaucccuuccgcucgcgugucuauucuccacgagguccgaccagugacuucgggcuguuuucccaucaugcaugaucguaccaaaauaagacaacugccuaaccuucugagggguuacgaacacguacgguugucaacacauaauguuaucaacgccgagggggcaccaggaggccccuauaagauuggcacuagcgggaguugcccuaauaucaccaacggaaaugguuucuuugccacaauggcuugggcagugccagacaaaaacaagaccgccacgaauccgcucacuauugaaguccccuacguguguacagagggcgaggaucagaucaccguguggggguuccacuccgacacugaaacacagauggcuaaacuguauggagauucuaagccucagaaguuuaccagcuccgccaacggcgucacgacccacuacguuucacaaauagguggguucccaaaucagacagaggacggaggccgcccccagaguggcagaauugugguagauuauauggugcagaaaagcgggaagacuggaaccaucacauaccaaagggguauucugcucccucagaaagucuggugcgcgucuggccgguccaaggugaucaaagggucauuaccacugaucggagaagcagacugucuucaugagaaguauggcgguuugaacaaaagcaagcccuacuacacuggggagcacgccaaggcuauuggcaauugcccgauauggguuaaaaccccucugaagcuagccaacggaacaaaauaucgacccccagcaaagcuccugaaagaacgcggcuuuuucggggcuaucgccggauuucuugaggguggcugggaagggaugauugcgggauggcauggcuacaccagucacggugcccacgggguggcagucgcugccgaucugaagucuacucaggaggcuaucaacaagauaacgaaaaauuugaacucccucagcgaacuggaggugaagaauuuacagagacugucgggcgccauggacgagcuccauaacgaaauucuugagcuggaugaaaaaguagacgacuugagggcagauacaaucucuucccaaaucgagcuagccguucugcucucaaaugaaggaauuaucaacagugaggacgagcaucugcuugcucuggaacggaaguugaaaaagaugcucggcccuagcgcgguggagauugggaauggauguuucgaaaccaagcacaaaugcaaccagacuugccuggauaagauagcagccgguaccuuugacgcuggcgaguucuccuuacccacauuugauucucugaauaucaccgccgcaagccuaaacgacgaugggcucgacaaucacacuauucugcuuuauuacucaacagccgcuaguuccuuggccgucacgcugaugaucgcaaucuucguggucuauauggugagccgugauaacguuucuuguucaauuugccucugaggacuaguuauaagacugacuagcccgaugggccucccaacgggcccuccuccccuccuugcaccgagauuaauaaaaaaaaaaaaaaaaaaaaaaaaaaaaaaaaaaaaaaaaaaaaaaaaaaaaaaaaaaaaaaaaugcaucccccccccccccccccccccccccccccccaaaggcucuuuucagagccaccagaauu

SEQ ID NO: 14520 - RNA, 1966 nt, Artificial Sequence
  FLUBV/H0N0/B/Washington/02/2019__EPI1368874 hemagglutinin mRNA human (HA)
aggagaaagcuuaccaugaaggccaucauugugcugcucauggucguuaccagcaacgcugacagaauaugcacaggcaucacuuccucuaauucaccccacgugguaaaaacggcaacccagggggaagugaacgucacaggagugauuccucuuacuaccacaccaaccaagagucauuucgccaaucugaaagguacugaaacaaggggcaaguuguguccgaaaugcuuaaacuguaccgaucuggacguugcgcuagggcggcccaagugcacgggaaagaucccuagcgcucgcguguccauucuccacgagguccgaccagugacuucuggcuguuuucccaucaugcaugaucguaccaaaauaagacaacugccuaaucuucugagggguuacgaacacguacgguugucgacacauaacguuaucaaugccgaggacgcaccagggcgccccuaugaaauuggaacuucaggcagcugcccuaacaucaccaauggcaacggguucuuugccacaauggcuugggcagugccaaagaauaaaaccgccacgaacccgcucacuauugagguccccuacaucuguacagagggagaagaucagauaaccgugugggguuuccacagugacaaugagacucagauggcuaagcuguauggcgauuccaaaccucagaaguuuacaucuagcgccaacggggugaccacgcacuacgucucccaaauuggaggcuucccaaaucagaccgaagacggugggcugccccagucaggaagaaucguuguggauuauaugguacagaagaguggcaaaacaggcacuauuaccuaccaaagggggauccucuuaccucagaagguguggugcgcgagcggacggucuaaagucaucaaggguucccugccacuuauuggcgaggcagacuguuugcaugagaaauaugggggacugaacaagucaaaacccuacuacacaggcgaacacgccaaggcuauagguaacugcccgaucugggugaagacuccucuaaaacucgccaaugggaccaaguaucgacccccagcaaaacugcuuaaggagcgcggcuuuuucggagcuauugccggcuuucuggaagggggaugggaggguaugaucgcgggcuggcauggguacacaagccacggagcccacggcguugcaguggcugccgauuugaaaaguacccaggaagcuauaaacaagauuacuaagaaucucaacucucuguccgaguuagaggucaaaaaucugcagagacucagcggugccauggacgaacuucauaacgagauccuggaauuggaugagaagguggacgaccuaagggcagauacgaucucgucucaaauugaacuggccguacuccuguccaaugaggggaucauuaacucagaggacgaacaccuucuggcuuuggagcggaaacucaagaaaaugcugggcccuagugcgguugaaauaggaaauggcuguuucgagacaaagcauaagugcaaccagaccugcuuagaucguaucgcagccgggacuuuugacgcuggagaguucagccugcccaccuuugauucccuaaauauuacagccgcaucucucaacgacgauggucuggacaaucacaccauccuuuuguauuacagcacugccgcuucaagucuggccgugacacucaugaucgcaauuuucgucguguauauggucucccgcgauaacgugagcuguucuauaugccugugaggacuaguuauaagacugacuagcccgaugggccucccaacgggcccuccuccccuccuugcaccgagauuaauaaaaaaaaaaaaaaaaaaaaaaaaaaaaaaaaaaaaaaaaaaaaaaaaaaaaaaaaaaaaaaaaugcaucccccccccccccccccccccccccccccccaaaggcucuuuucagagccaccagaauu

SEQ ID NO: 14521 - RNA, 1966 nt, Artificial Sequence
  FLUBV/H0N0/B/Washington/02/2019__EPI1422452 hemagglutinin mRNA human (HA)
aggagaaagcuuaccaugaaggccaucauugugcugcucauggucguuaccagcaacgcugacagaauaugcacaggcaucacuuccucuaauucaccccacgugguaaaaacggcaacccagggggaagugaacgucacaggagugauuccucuuacuaccacaccaaccaagagucauuucgccaaucugaaagguacugaaacaaggggcaaguuguguccgaaaugcuuaaacuguaccgaucuggacguugcgcuagggcggcccaagugcacgggaaagaucccuagcgcucgcguguccauucuccacgagguccgaccagugacuucuggcuguuuucccaucaugcaugaucguaccaaaauaagacaacugccuaaucuucugagggguuacgaacacguacgguugucgacacauaacguuaucaaugccgaggacgcaccagggcgccccuaugaaauuggaacuucaggcagcugcccuaacaucaccaauggcaacggguucuuugccacaauggcuugggcagugccaaagaauaaaaccgccacgaacccgcucacuauugagguccccuacaucuguacagagggagaagaucagauaaccgugugggguuuccacagugacuccgagacucagauggcuaagcuguauggcgauucuaaaccucagaaguuuacaagcuccgccaauggggugaccacgcacuacgucucacaaauuggaggcuucccaaaccagaccgaagacggugggcugccccagaguggaagaaucguuguggauuauaugguacaaaagagcggcaaaacaggcacuauuaccuaccagagggggauccucuuaccucagaagguguggugcgcgucuggacgguccaaagucaucaaggguucacugccacuuauuggcgaggcagacuguuugcaugagaaauaugggggacugaauaagagcaaacccuacuacacaggcgaacacgccaaggcuauagguaacugcccgaucugggugaagacuccucuaaaacucgccaacgggaccaaguaucgacccccagcaaaacugcuuaaggagcgcggcuuuuucggagcuauugccggcuuucuggaagggggaugggaggguaugaucgcgggcuggcauggguacacaagucacggagcccacggcguugcaguggcugccgauuugaaaucuacccaggaagcuauaaauaagauuacuaagaaccucaauucccugagcgaguuagaggucaaaaaccugcagagacucucgggugccauggacgaacuucauaaugagauccuggaauuggaugagaagguggacgaccuaagggcagauacgaucucuucccaaauugaacuggccguacuccugucaaacgaggggaucauuaauagugaggacgaacaccuucuggcuuuggagcggaaacucaagaaaaugcugggcccuagcgcgguugaaauaggaaacggcuguuucgagacaaagcauaagugcaaucagaccugcuuagaucguaucgcagccgggacuuuugacgcuggagaguucucccugcccaccuuugauucucuaaacauuacagccgcaagccucaaugacgauggucuggacaaccacaccauccuuuuguauuacucaacugccgcuaguucccuggccgugacacucaugaucgcaauuuucgucguguauauggucagccgcgauaaugugucuuguucaauaugccugugaggacuaguuauaagacugacuagcccgaugggccucccaacgggcccuccuccccuccuugcaccgagauuaauaaaaaaaaaaaaaaaaaaaaaaaaaaaaaaaaaaaaaaaaaaaaaaaaaaaaaaaaaaaaaaaaugcaucccccccccccccccccccccccccccccccaaaggcucuuuucagagccaccagaauu

SEQ ID NO: 14522 - RNA, 1627 nt, Artificial Sequence
  FLUAV/H1N1/A/California/7/2009__GQ906802 neuraminidase mRNA human (NA)
aggagaaagcuuaccaugaaccccaaucagaagaucauuaccauaggcagcgugugcaugacaaucgggauggccaaccugauucuccaaaucggaaauauuaucuccauauggaucucucacucaauucagcuugguaaccagaaucagaucgagacuuguaaccaaagugucauuacguacgaaaauaacaccuggguuaaucagacauaugugaacaucagcaauacuaacuucgcugcaggccaguccguagugucugucaaacuggccggaaauucgucauugugcccugugagcggaugggcgauauacaguaaggacaacuccguuagaauuggcucuaaaggugauguguuugucaucagggagccauucauuagcuguuccccguuagaaugccggaccuuuuuccugacacagggggcucuacucaaugacaagcauucaaacggaaccaucaaagaucgcagucccuaucgaacucugaugagcuguccuaucggcgaggugccaucucccuacaacucccguuuugaaucaguagccuggagcgcaagugccugccacgacggcauuaauuggcuuacaauagggaucucuggaccugauaacggugcuguugcagugcugaaguauaauggcauuaucaccgacacgauaaaguccuggagaaacaauauuuugaggacucaagagagcgagugugccugcgucaacgggucguguuucaccgugaugacagauggaccaucuaauggccaggcuuccuacaaaaucuuucggaucgaaaaggguaaaauugugaagucagucgagaugaacgcccccaauuaucauuacgaagagugcaguuguuacccugacagcuccgagaucacuugcguuugccgcgauaacuggcacgggucuaauagaccaugggugagcuucaaccagaaucucgaauaucagauuggauacauauguucaggcaucuuuggcgacaacccgaggcccaaugauaaaaccgggaguugcggaccuguauccagcaacggugcgaacggcgugaagggguucucuuuuaaguauggaaauggcgucuggauuggucggacaaaaucaaucaguagccgcaacggguucgagaugaucugggacccaaauggcuggaccggaacggauaacaauuuuuccauuaagcaagacauagugggcaucaacgaauggucuggguacucggggagcuucguucagcaucccgagcugacuggucuggacuguauucgaccuugcuucuggguggaacucaucagaggcaggccaaaagagaauacaauuuggaccuccgggucaaguaucucuuuuuguggagucaacagcgauacugugggcugguccuggcccgacggugcagaguuaccguucacaauagauaagugaggacuaguuauaagacugacuagcccgaugggccucccaacgggcccuccuccccuccuugcaccgagauuaauaaaaaaaaaaaaaaaaaaaaaaaaaaaaaaaaaaaaaaaaaaaaaaaaaaaaaaaaaaaaaaaaugcaucccccccccccccccccccccccccccccccaaaggcucuuuucagagccaccagaauu

SEQ ID NO: 14523 - RNA, 1627 nt, Artificial Sequence
  FLUAV/H1N1/A/Michigan/45/2015__EPI662593 neuraminidase mRNA human (NA)
aggagaaagcuuaccaugaaccccaaucagaagaucauuaccauaggcagcaucugcaugacaauugggauggccaaccugauccuccaaauuggaaauaucauauccaucugggugucucacucaauucagaucgguaaccagagucagauugagacuuguaaucaaagcgucaucacguacgaaaacaauaccuggguuaaccagacauaugugaauauauccaacacuaauuucgcugcaggccagucuguagugucggucaaacuugccgggaacucaagccugugcccugugaguggaugggcgauuuacuccaaggacaauucuguuagaaucggcagcaaaggugauguguuugucauuagggagccauucaucuccuguucaccguuggaaugccggaccuuuuucuuaacacagggggcucugcuaaacgacaagcauaguaauggaaccaucaaagaucgcagccccuaucgaacucucaugucuuguccuauuggcgaggugccaucccccuacaacucacguuuugaaagcguagccuggagugcaucugccugccacgacggcauaaacuggcugacaaucgggauuuccggaccugauagcggugcuguugcagugcuuaaguauaauggcaucauaaccgacacgauuaagucguggagaaacaauauccugaggacucaagagucugagugugccugcgucaacggguccuguuucaccaucaugacagauggaccaucagacggccaggcuaguuacaaaauuuuucggaucgaaaaggguaaaauuauaaagagcguggagaugaaagcccccaauuaucauuacgaagagugcuccuguuacccugauucuagcgagaucacuugcgugugccgcgacaacuggcacgggucaaauagaccaugggucaguuucaaccagaauuuggaauaucagaugggauacauuuguuccggcguuuuuggcgauaacccgaggcccaaugacaagaccgggagcugcggaccugugucuucaaacggugcgaauggcguaaagggguucaguuuuaaauauggaaacggcguguggaucggucggacaaagagcaucuccucucgcaaaggguucgagaugauuugggauccaaauggcuggaccggaacggacaacaaguuuucgauaaaacaagacaucgucggcauuaacgaauggagcggguacuccggaucauucgugcagcaucccgagcucacuggucuggauuguauccgaccuugcuucuggguugaacugauuagaggcaggccagaggagaauacaaucuggaccagugggucuagcauauccuuuuguggagugaacucagacacugucggcuggagcuggcccgauggugcagaacucccguucacaaucgacaagugaggacuaguuauaagacugacuagcccgaugggccucccaacgggcccuccuccccuccuugcaccgagauuaauaaaaaaaaaaaaaaaaaaaaaaaaaaaaaaaaaaaaaaaaaaaaaaaaaaaaaaaaaaaaaaaaugcaucccccccccccccccccccccccccccccccaaaggcucuuuucagagccaccagaauu

SEQ ID NO: 14524 - RNA, 1627 nt, Artificial Sequence
  FLUAV/H1N1/A/Netherlands/602/2009__AGU92703 neuraminidase mRNA human (NA)
aggagaaagcuuaccaugaaccccaaucagaagaucauuaccauaggcagcgugugcaugacaaucgggauggccaaccugauucuccaaaucggaaauauuaucuccauauggaucucucacucaauucagcuugguaaccagaaucagaucgagacuuguaaccaaagugucauuacguacgaaaauaacaccuggguuaaucagacauaugugaacaucagcaauacuaacuucgcugcaggccaguccguagugucugucaaacuggccggaaauucgucauugugcccugugagcggaugggcgauauacaguaaggacaacuccguuagagugggcucuaaaggugaugucuuugugauuagggagccauucaucagcuguuccccguuagaaugccggaccuuuuuccugacacagggggcucuacucaaugacaagcauucaaacggaaccauuaaagaucgcagucccuaucgaacucugaugagcuguccuaucggcgagguaccaucucccuacaacucccguuuugaaucaguugccuggagcgcaagugccugccacgacggcaucaauuggcuuacaauugggauaucuggaccugauaacggugcuguggcaguccugaaguauaauggcaucauuaccgacacgaucaaguccuggagaaacaauauauugaggacucaagagagcgagugugccugcgugaacgggucguguuucaccgugaugacagauggaccaucuaauggccaggcuuccuacaaaauuuuucggaucgaaaaggguaaaaucgucaagucaguugagaugaacgcccccaauuaucauuacgaagagugcaguuguuacccugacagcuccgagauuacuugcgugugccgcgauaacuggcacgggucuaauagaccaugggugagcuucaaccagaaucucgaauaucagaucggauacauuuguucaggcauauuuggcgacaacccgaggcccaaugauaaaaccgggaguugcggaccuguauccagcaacggugcgaacggcgucaagggguucucuuuuaaguauggaaauggcguguggaucggucggacaaaaucaauuaguagccgcaacggguucgagaugaucugggacccaaauggcuggaccggaacggauaacaauuuuuccaucaagcaagacauuguuggcauaaacgaauggucuggguacucggggagcuucauccagcaucccgagcugacuggucuggacuguauucgaccuugcuucuggguggaacucaucagaggcaggccaaaagagaauacaauuuggaccuccgggucaaguaucucuuuuuguggagucaacagcgauacugugggcugguccuggcccgacggugcagaguuaccguucacaauagauaagugaggacuaguuauaagacugacuagcccgaugggccucccaacgggcccuccuccccuccuugcaccgagauuaauaaaaaaaaaaaaaaaaaaaaaaaaaaaaaaaaaaaaaaaaaaaaaaaaaaaaaaaaaaaaaaaaugcaucccccccccccccccccccccccccccccccaaaggcucuuuucagagccaccagaauu

SEQ ID NO: 14525 - RNA, 1627 nt, Artificial Sequence
  FLUAV/H3N2/A/Hong Kong/4801/2014__EPI578429 neuraminidase mRNA human (NA)
aggagaaagcuuaccaugaaccccaaucagaagaucauuaccauaggcagcgugucccugacaaucucuacuauuugcuucuuuaugcaaaucgccauucucaucacgaccgucacacuucacuucaaacaguacgaguuuaacucaccuccaaauaaccagguuaugcugugugaaccgacuauaaucgagagaaauauuaccgaaaucguguauuugacaaacaccacuauugagaaggaaaucugccccaaaccugcugaguacaggaauuggaguaagccacagugugggauaacaggauucgcacccuuuagcaaagacaacuccauucgguuaucugccgguggcgauaucuggguaacccgcgagccuuaugugucgugcgacccagauaaguguuaccaauucgcgcuggggcagggaacgacucuaaauaacguccauucaaauaacaccgugcgagaccguacacccuauagaacucuccugaugaaugaacuuggcguuccuuuucaccuggguaccaaacaggugugcauugcuuggagcaguuccucuugucaugaugggaaggccugguugcacgucugcaucacaggagacgauaagaacgcaaccgccagcuucaucuacaauggcaggcucguggacuccguaguuucauggaguaaagauauucugcggacgcaggagagcgaauguauaugcaucaacggcacuuguacaguggucaugaccgacgggucugcuuccggaaaggcagauacuaaaauucuguuuaucgaggaggguaagauagugcauacaucaacccucagcggcagugcccaacacguggaagagugcucuugcuauccacgcuacccgggggucagauguguuugcagggacaacuggaagggauccaaucggcccauuguggauaucaacaucaaagaccacagcauuguaucgucuuacguguguuccggcuuagucggugacacgccucgcaagaaugauucaaguagcuccucucauugccuggacccaaacaaugaagaagggggacacggcgugaaaggcugggcuuucgaugacgggaacgauguuuggaugggacgaaccaucaaugagacaagcagacuugguuaugagacuuuuaaggugauugagggcuggucaaaccccaaaaguaaguugcagaccaauaggcaggucauaguggaccguggggaucgguccggauacagcggcaucuucucuguagaagguaaaucauguauuaaccgcugcuuuuauguugagcugaucagagggaggaaggaagagacagaagugcuauggaccaguaauagcaucgucguguucuguggcacuuccggaacauacggcaccgggucuuggccugacggagccgaucucaaccugaugccaauuugaggacuaguuauaagacugacuagcccgaugggccucccaacgggcccuccuccccuccuugcaccgagauuaauaaaaaaaaaaaaaaaaaaaaaaaaaaaaaaaaaaaaaaaaaaaaaaaaaaaaaaaaaaaaaaaaugcaucccccccccccccccccccccccccccccccaaaggcucuuuucagagccaccagaauu

SEQ ID NO: 14526 - RNA, 1618 nt, Artificial Sequence
  FLUBV/H0N0/B/Brisbane/60/2008__EPI173278 neuraminidase mRNA human (NA)
aggagaaagcuuaccaugcugcccagcaccauccagacacucacucuuuuccugacguccggcgggguguuguuaucucuguacgucucagccagucuaagcuaucuccuguacuccgacauucuucugaaguuuucuccuaccgagauaacagcuccaacuaugccguuggauugcgcaaacgccucgaauguucaagcggugaacagaucagcuaccaaaggaguaacacuccugcugcccgaaccugaguggaccuauccaaggcucagcugucccgguaguacuuuccagaaggccuuacugaucuccccucaccgguuuggcgaaacaaaaggaaauucugcaccacuuauuauccgcgagcccuucauugccugcgggccuaacgaauguaagcauuuugcuuugacccacuacgcagcccagccaggcgguuauuacaaugggacgcgaggagaccguaacaaacugagacaucuaaucagcgugaagcucggcaagauaccgacugucgaaaauuccaucuuccacauggcugccuggucaggcagugcgugccaugaugggaaagaguggaccuauauuggaguggacggucccgauaacaaugcacugcuuaagguuaaauacggcgaggccuacacagacacuuaucacagcuacgcuaacaagauccugaggacccaggagucugccuguaauugcauugggggaaacuguuauuugaugaucacagauggcuccgcaucaggugugagcgaaugccgguuucucaaaauacgcgaggggagaauuaucaaggagauuuucccuaccggaagggucaagcacacggaagaguguacuugcggcuuugcuaguaauaaaacaaucgaaugugccugccgggacaacucuuacaccgcgaagcgcccauucgugaaacugaauguagagacugauacagccgaaauccgauuaaugugcaccgacacguaucuggauacccccagaccuaacgacggcuccauuacagggccaugugagagcaacggagauaaggguucgggcgggauaaaaggaggcuuuguucaucaaaggauggagucuaagaucggucggugguacucccguacuaugucaaaaaccgaacgcauggggaugggccucuaugugaaguacgacggagaccccugggcagauagugacgcucuugccuucagcggcgucaugguguccaugaaggagccggggugguacucuuuuggauucgaaauuaaagauaagaaaugcgacgugccuuguaucgguauagagaugguccacgauggcgggaaggaaacauggcauagcgcugccacugcaauuuauugccugaugggaucaggccaguugcuaugggacaccguuacagguguggauauggcccugugaggacuaguuauaagacugacuagcccgaugggccucccaacgggcccuccuccccuccuugcaccgagauuaauaaaaaaaaaaaaaaaaaaaaaaaaaaaaaaaaaaaaaaaaaaaaaaaaaaaaaaaaaaaaaaaaugcaucccccccccccccccccccccccccccccccaaaggcucuuuucagagccaccagaauu

SEQ ID NO: 14527 - RNA, 1618 nt, Artificial Sequence
  FLUBV/H0N0/B/Phuket/3073/2013__EPI540672 neuraminidase mRNA human (NA)
aggagaaagcuuaccaugcugcccagcaccauccagacacucacucuuuuccugacguccggcgggguguuguuaucucuguacgucucagccagucuaagcuaucuccuguacuccgacauucuucugaaguuuucuagaaccgagguuacagcuccuauaaugccauuggauugcgcaaacgccucgaaugugcaagcgguaaacaggucagcuacuaaaggagugaccccgcuccugcccgaaccugaguggacauauccacggcugagcugucccgguaguaccuuccagaaggcccucuuaaucuccccucaccgcuuuggcgaaacuaaaggaaauucugcaccacugauuauccgagagcccuucauugccugcgggccuaaggaauguaaacauuuugcucuuacacacuacgcagcccagccaggcgguuauuacaacgggacccgugaggacagaaauaaguugaggcaucugaucagcgucaagcuaggaaaaauaccgacgguggagaacuccaucuuccacauggcugccuggucaggcagugcgugccaugauggccgggaauggacuuauauugggguugacggacccgauagcaaugcacuccugaagaucaaauacggugaggccuacaccgacacauaucacucuuacgcuaagaacauucuucgcacucaggaauccgccuguaauugcaucggcggggauuguuaucugaugauaaccgacggaccugcaucaggcauuagcgagugcagauuuuugaaaaucagggagggucggauuaucaaggaaaucuucccaacagggcgcgugaagcacaccgaggaauguacgugcggauuugcuaguaacaaaacuauugagugugccugccgagauaauucuuacacagcgaagagacccuucgucaaacucaacguggaaaccgacacugccgagauaaggcugaugugcacaaagaccuauuuagauacgccucggccaaaugacggcuccaucaccggccccugugagagcgauggggacgaaggaucggguggcauuaaagggggauuuguacaucaacguauggcaucuaagaucggccgcugguacuccagaacaaugucaaaaacuaagaggauggguauggggcuguauguuaaguacgacggcgauccguggaccgacagugaggcucucgcccuuagcggagugauggucuccauggaggaaccuggcugguacucuuucggguuugaaauaaaagauaagaaaugcgacgugcccuguauuggaaucgagauggugcacgaugguggcaagacaacuuggcauagcgcugccaccgcaaucuauugccugauggggucaggacaguugcuaugggacacagucaccggcguuaacaugacucugugaggacuaguuauaagacugacuagcccgaugggccucccaacgggcccuccuccccuccuugcaccgagauuaauaaaaaaaaaaaaaaaaaaaaaaaaaaaaaaaaaaaaaaaaaaaaaaaaaaaaaaaaaaaaaaaaugcaucccccccccccccccccccccccccccccccaaaggcucuuuucagagccaccagaauu

SEQ ID NO: 14528 - RNA, 1627 nt, Artificial Sequence
  FLUAV/H1N1/A/Brisbane/02/2018__EPI1212833 neuraminidase mRNA human (NA)
aggagaaagcuuaccaugaaccccaaucagaagaucauuaccauaggcagcacaugcaugacuaucgggauggccaaccugauucuccaaaucggaaauauuaucuccauaugggugucucacucaauccagauugguaaccagagucagaucgagacguguaaucaaagcgucauuaccuacgaaaacaauacauggguuaaccagacuuaugugaauaucuccaacaccaauuucgcugcaagacagucuguagccucggugaaacuugcgggcaacucaagccugugcccugucagugggugggcuauauacuccaaggacaauucugugaggauuggaagcaaaggcgauguuuuugugauccgggagccauucauuuccuguucaccguuggaaugccgcacauuuuucuuaacccagggugcccugcuaaacgacaagcauaguaaugggacuaucaaagaucgaagccccuaucguacacucaugucuuguccuaucggagaggucccaucccccuacaacucaagauuugaaagcguggcauggagugccucugcuugccacgacggcaccaacuggcugacgauuggcauauccgggccugauagcggagcaguagccguucuuaaguauaaugguaucauuacugacaccaucaagucguggaggaacaauauacugcggacacaagagucugagugugcuugcgugaacggcuccuguuucacuauuaugaccgaugggccaucagacggacaggccaguuacaaaaucuuucgcaucgaaaagggcaaaauuaucaagagcgucgagaugaaagcgcccaauuaucauuacgaagagugcuccuguuacccugauucuagcgagauuacaugcgugugcagagacaacuggcacgguucaaauaggccaugggugaguuucaaccagaauuuggaauaucagaugggguacauauguuccggagucuuuggcgauaacccgcggcccaaugacaagaccggcagcugcgggccuguuucuucaaacggagcaaauggugugaagggcuucaguuuuaaauaugggaacggaguauggaucggccgcacuaagagcauuuccucucgaaaagguuucgagaugaucugggauccaaauggguggacgggcacagacaacaaguuuucgaucaaacaagacauugugggaauaaacgaauggagcggcuacuccgggucauucguccagcaucccgagcucaccggacuggauuguaucagaccuugcuucuggguggaacugauuaggggucggccagaggagaauacuaucuggacaaguggcucuagcauuuccuuuugugggguugacucagauaccgugggauggagcuggcccgacggcgccgaacucccguucacgaucgauaagugaggacuaguuauaagacugacuagcccgaugggccucccaacgggcccuccuccccuccuugcaccgagauuaauaaaaaaaaaaaaaaaaaaaaaaaaaaaaaaaaaaaaaaaaaaaaaaaaaaaaaaaaaaaaaaaaugcaucccccccccccccccccccccccccccccccaaaggcucuuuucagagccaccagaauu

SEQ ID NO: 14529 - RNA, 1627 nt, Artificial Sequence
  FLUAV/H1N1/A/Guangdong-Maonan/SWL1536/2019__EPI1542569 neuraminidase mRNA human (NA)
aggagaaagcuuaccaugaaccccaaucagaagaucauuaccauaggcagcaucugcaugacaauugggauggccaaccugauccuccaaauuggaaauaucauauccaucugggugucucacucaauucagaucgguaaccagagucagauugagacuuguaauaaaaacgucaucacguacgaaaauaacaccuggguuaaucaaacauaugugaacauaagcaauacuaacuccgcugcaagacagucuguagccucggugaaacuugcgggcaauucaagccugugcccugucagugggugggcuauuuacuccaaggacaacucugugaggaucggaagcaagggcgauguuuucgugauucgggagccauuuaucuccuguucaccguuggaaugccgcaccuucuuuuuaacacagggugcccugcuaaaugacaaacauaguaacgggaccaucaaggaucgaagccccuaucguacucucaugucuuguccuauuggagaggucccaucccccuacaacucaagauucgaaagcguggcauggagugccucugcuugccacgacggcacaaauuggcugaccauaggcaucuccgggccugauagcggagcaguagccguucuuaaguauaacgguauuaucacggacacuauaaaaucguggaggaauaacauucugcggacccaggagucugagugugcuugcgugaauggcuccuguuuuacaaucaugacugaugggccaucagacggacaagccaguuacaagaucuuccgcauugaaaaaggcaagaucauuaaaagcgucgagaugaaggcgcccaacuaucauuacgaagagugcuccuguuacccugauucuagcgagauaaccugcgugugcagagacaauuggcacgguucaaacaggccaugggugaguuuuaaucagaacuuggaauaucagaugggguacaucuguuccggagucuucggcgauaauccgcggcccaacgacaagacaggcagcugcgggccuguuucuucaaauggagcaaacggugugaaaggcuuuaguuucaaguaugggaauggaguauggauuggccgcaccaaaagcaucuccucucgaaaggguuuugagaugaucugggauccaaacggguggacgggcacugacaacaaauucucgaagaaacaggacauugugggaauaaaugaauggagcggcuacuccgggucauuuguccaacaucccgagcucacaggacugaacuguaucagaccuugcuucuggguggaacugauuaggggucggccagaggagaauaccaucuggacaaguggcucuagcauuuccuucugugggguugauucagacaucgugggauggagcuggcccgauggcgccgaacucccguuuacuauagacaagugaggacuaguuauaagacugacuagcccgaugggccucccaacgggcccuccuccccuccuugcaccgagauuaauaaaaaaaaaaaaaaaaaaaaaaaaaaaaaaaaaaaaaaaaaaaaaaaaaaaaaaaaaaaaaaaaugcaucccccccccccccccccccccccccccccccaaaggcucuuuucagagccaccagaauu

SEQ ID NO: 14530 - RNA, 1627 nt, Artificial Sequence
  FLUAV/H3N2/A/Singapore/INFIMH-16-0019/2016__EPI1047603 neuraminidase mRNA human (NA)
aggagaaagcuuaccaugaaccccaaucagaagaucauuaccauaggcagcgugucccugacaaucucuacuauuugcuucuuuaugcagaucgccauucucaucacgaccgucacacuucacuucaaacaguacgaguuuaacucaccuccaaauaaccagguuaugcugugugaaccgacuauaaucgagagaaauauuaccgaaaucguguauuugacaaacaccacuauugagaaggaaaucugccccaaaccugcugaguacaggaauuggaguaagccacagugugggauaacaggauucgcacccuuuagcaaagacaacuccauucgguuaucugccgguggcgauaucuggguaacccgcgagccuuaugugucgugcgacccagauaaguguuaccaauucgcgcuggggcagggaacgacucuaaauaacguccauucaaauaacaccgugcgagaccguacacccuauagaacucuccugaugaaugaacuuggcguuccuuuucaccuggguaccaaacaggugugcauugcuuggagcaguuccucuugucaugaugggaaggccugguugcacgucugcaucacaggagacgauaagaacgcaaccgccagcuucaucuacaauggcaggcucauugacuccgugguaucauggaguaaagauauacugcggacgcaggagagcgaauguguuugcaucaacggcacuuguacaguggucaugaccgacgggaacgcuacuggaaaggcagauacaaaaauucuguuuaucgaggaggguaagauagugcauaccucuaagcucuccggcucagcccaacacguggaagagugcagcugcuauccacgcuacccgggggucagauguguuugcagggacaauuggaaaggaaguaaccggcccauuguggauaucaauaucaaggaccacucuauuguauccagcuacguguguucgggcuuagucggugacacgccucgcaaaaacgauucuuccucaaguagccauugccugaauccaaacaaugaagaagggggacacggcgugaagggcugggcuuucgacgaugggaacgacguuuggaugggacgaaccaucaaugagacauccagacuugguuaugagacuuuuaaaguggucgagggcuggucuaaccccaagagcaaauugcagauuaauaggcaagugauaguagaucguggggaccggucaggauacaguggcaucuucuccguugaagguaagagcuguauuaaccgcugcuuuuauguggagcugaucagagggaggaaggaagagaccgaaguccuauggacaucuaauucaaucguggucuucuguggcaccaguggaacuuacggcacagggagcuggccugauggagccgaccucaaccugaugcauauuugaggacuaguuauaagacugacuagcccgaugggccucccaacgggcccuccuccccuccuugcaccgagauuaauaaaaaaaaaaaaaaaaaaaaaaaaaaaaaaaaaaaaaaaaaaaaaaaaaaaaaaaaaaaaaaaaugcaucccccccccccccccccccccccccccccccaaaggcucuuuucagagccaccagaauu

SEQ ID NO: 14531 - RNA, 1627 nt, Artificial Sequence
  FLUAV/H3N2/A/Kansas/14/2017__EPI1146344 neuraminidase mRNA human (NA)
aggagaaagcuuaccaugaaccccaaucagaagaucauuaccauaggcagcgugucccugacaaucucuacuauuugcuucuuuaugcagaucgccauucucaucacgaccgucacacuucacuucaaacaguacgaguuuaacucaccuccaaauaaccagguuaugcugugugaaccgacuauaaucgagagaaauauuaccgaaaucguguauuugacaaacaccacuauugagagggaaaucugccccaagccugcugaguaccggaauuggaguaaaccacagugugggauaacaggauucgcacccuuuagcaaggacaacuccauucgcuuaucugccgguggcgauaucuggguaacccgagagccuuaugugucgugcgacccagauaaauguuaccaauucgcgcuggggcagggaacgacuauuaauaacguccauucaaauaacaccgcucgugacagaacaccccacaggacucuacucaugaaugaacugggcgugccuuuucaucuugguaccaagcagguuugcaucgccuggagcaguuccucuugucacgaugggaaggcauggcugcaugugugcaucacaggagacgauaaaaacgccaccgcuagcuucauuuauaauggccgguuggucgacuccgugguaucauggaguaaggauauacuccgcacgcaggagagcgaauguguuugcaucaacggcacuuguacaguggucaugaccgacgggaacgcaacuggaaaagccgauacaaagauucuguuuaucgaggaggguaaaauagugcacaccucuaagcuguccggcucagcucaacacguggaagagugcagcugcuacccaagauauccgggggucagguguguuugccgggacaauuggaagggaaguaaccgccccauuguggauaucaauaucaaagaccauucuauuguauccagcuacguguguucgggccucgucggugacacgccucgaaagaccgauucuuccucaaguagccacugcuuaaacccaaauaacgaaaaagggggacauggcgugaagggcugggccuucgacgaugggaaugacguuuggaugggaagaacaaucaacgagacuuccaggcuggguuacgaaaccuuuaaaguggucgagggcuggucuaaucccaagagcaaacuucagauuaaccggcaagugauaguagaucguggggaccgcucaggauauaguggcaucuucuccguugaggguaagagcuguauuaauagaugcuuuuacguggaauugaucagggggcggaaggaggaaacagagguccuguggacuucuaacucaaucguggucuucuguggcaccaguggaacauauggcaccgggagcuggccugauggagcggaccuaaaucucaugcacauuugaggacuaguuauaagacugacuagcccgaugggccucccaacgggcccuccuccccuccuugcaccgagauuaauaaaaaaaaaaaaaaaaaaaaaaaaaaaaaaaaaaaaaaaaaaaaaaaaaaaaaaaaaaaaaaaaugcaucccccccccccccccccccccccccccccccaaaggcucuuuucagagccaccagaauu

SEQ ID NO: 14532 - RNA, 1627 nt, Artificial Sequence
  FLUAV/H3N2/A/Kansas/14/2017-CDC-LV24A__EPI1444881 neuraminidase mRNA human (NA)
aggagaaagcuuaccaugaaccccaaucagaagaucauuaccauaggcagcgugucccugacaaucucuacuauuugcuucuuuaugcagaucgccauucucaucacgaccgucacacuucacuucaaacaguacgaguuuaacucaccuccaaauaaccagguuaugcugugugaaccgacuauaaucgagagaaauauuaccgaaaucguguauuugacaaacaccacuauugagagggaaaucugccccaagccugcugaguaccggaauuggaguaaaccacagugugggauaacaggauucgcacccuuuagcaaggacaacuccauucgcuuaucugccgguggcgauaucuggguaacccgagagccuuaugugucgugcgacccagauaaauguuaccaauucgcgcuggggcagggaacgacuauuaauaacguccauucaaauaacaccgcucgugacagaacaccccacaggacucuacucaugaaugaacugggcgugccuuuucaucuugguaccaagcagguuugcaucgccuggagcaguuccucuugucacgaugggaaggcauggcugcaugugugcaucacaggagacgauaaaaacgccaccgcuagcuucauuuauaauggccgguuggucgacuccgugguaucauggaguaaggauauacuccgcacgcaggagagcgaauguguuugcaucaacggcacuuguacaguggucaugaccgacgggaacgcaacuggaaaagccgauacaaagauucuguuuaucgaggaggguaaaauagugcacaccucuaagcuguccggcucagcucaacacguggaagagugcagcugcuacccaagauauccgggggucagguguguuugccgggacaauuggaagggaaguaaccgccccauuguggauaucaauaucaaagaccauucuauuguauccagcuacguguguucgggccucgucggugacacgccucgaaagaccgauaacucuuccucaagucacugcuuaaauccaaacaaugaaaaagggggacauggcgugaagggcugggccuucgacgaugggaacgacguuuggaugggaagaacaaucaaugagacuagcaggcuggguuacgaaaccuuuaaaguggucgagggcugguccaaccccaagucuaaacuucagauuaaucggcaagugauaguagaucguggggaccgcagcggauauucaggcaucuucaguguugaggguaaguccuguauuaacagaugcuuuuacguggaauugaucagggggcggaaggaggaaacagagguccuguggacuagcaauucuaucguggucuucuguggcaccucaggaacauauggcaccgggaguuggccugauggagcggaccuaaaccucaugcacauuugaggacuaguuauaagacugacuagcccgaugggccucccaacgggcccuccuccccuccuugcaccgagauuaauaaaaaaaaaaaaaaaaaaaaaaaaaaaaaaaaaaaaaaaaaaaaaaaaaaaaaaaaaaaaaaaaugcaucccccccccccccccccccccccccccccccaaaggcucuuuucagagccaccagaauu

SEQ ID NO: 14533 - RNA, 1627 nt, Artificial Sequence
  FLUAV/H3N2/A/Switzerland/8060/2017__EPI1154879 neuraminidase mRNA human (NA)
aggagaaagcuuaccaugaaccccaaucagaagaucauuaccauaggcagcgugucccugacaaucucuacuauuugcuucuuuaugcaaaucgccauucucaucacgaccgucacacuucacuucaaacaguacgaguuuaacucaccuccaaauaaccagguuaugcugugugaaccgacuauaaucgagagaaauauuaccgaaaucguguauuugacaaacaccacuauugagaaggaaaucugccccaaaccugcugaguacaggaauuggaguaagccacagugugggauaacaggauucgcacccuuuagcaaagacaacuccauucgguuaucugccgguggcgauaucuggguaacccgcgagccuuaugugucgugcgacccagauaaguguuaccaauucgcgcuggggcagggaacgacucuaaauaacguccauucaaauaacaccgugcgagaccguacacccuauagaacucuccugaugaaugaacuuggcguuccuuuucaccuggguaccaaacaggugugcauggcuuggagcaguuccucuugucaugaugggaaggccugguugcacgucugcgugacaggagacgauaagaacgcaaccgccagcuucauuuacaauggcaggcucguagacuccguugugucauggaguaaagauauccugcggacgcaggagagcgaaugugucugcaucaacggcacuuguacaguggugaugaccgacgggaacgcuacuggaaaggcagauacaaaaauucuguuuauagaggaggguaagaucguccauaccucuaagcucuccggcucagcccaacacguugaagagugcagcugcuauccacgcuacccgggggugagauguguaugcagggacaauuggaaaggaaguaaccggcccauuguggauaucaauauaaaggaccacucuauugucuccagcuacguguguucgggcuuaguuggugacacgccucgcaaaucugauuccucaaguagcucccauugccugaacccaaauaacgaagaagggggacacggcgugaagggcugggcuuucgacgaugggaaugacgucuggaugggacgaaccaucaacgagacaucuagacuugguuaugagacuuuuaaagugguagagggcuggagcaauucaaagaguaaauugcagaucaacaggcagguuauuguggaucguggggaccgguccggauacagcggcaucuucucugucgaagguaagucauguauuaaucgcugcuuuuauguggagcugauaagagggaggaaggaagagaccgaaguccuauggacaaguaacagcaucgugguuuucuguggcacuuccggaaccuacggcacagggucuuggcccgauggagccgaccucaaucugaugcauauuugaggacuaguuauaagacugacuagcccgaugggccucccaacgggcccuccuccccuccuugcaccgagauuaauaaaaaaaaaaaaaaaaaaaaaaaaaaaaaaaaaaaaaaaaaaaaaaaaaaaaaaaaaaaaaaaaugcaucccccccccccccccccccccccccccccccaaaggcucuuuucagagccaccagaauu

SEQ ID NO: 14534 - RNA, 1627 nt, Artificial Sequence
  FLUAV/H3N2/A/Switzerland/8060/2017(H3N2)-CDC-LV21A__EPI1364258 neuraminidase mRNA human (NA)
aggagaaagcuuaccaugaaccccaaucagaagaucauuaccauaggcagcgugucccugacaaucucuacuauuugcuucuuuaugcaaaucgccauucucaucacgaccgucacacuucacuucaaacaguacgaguuuaacucaccuccaaauaaccagguuaugcugugugaaccgacuauaaucgagagaaauauuaccgaaaucguguauuugacaaacaccacuauugagaaggaaaucugccccaaaccugcugaguacaggaauuggaguaagccacagugugggauaacaggauucgcacccuuuagcaaagacaacuccauucgguuaucugccgguggcgauaucuggguaacccgcgagccuuaugugucgugcgacccagauaaguguuaccaauucgcgcuggggcagggaacgacucuaaauaacguccauucaaauaacaccgugcgagaccguacacccuauagaacucuccugaugaaugaacuuggcguuccuuuucaccuggguaccaaacaggugugcauggcuuggagcaguuccucuugucaugaugggaaggccugguugcacgucugcgugacaggagacgauaagaacgcaaccgccagcuucauuuacaauggcaggcucguagacuccguugugucauggaguaaagauauccugcggacgcaggagagcgaaugugucugcaucaacggcacuuguacaguggugaugaccgacgggaacgcuacuggaaaggcagauacaaaaauucuguuuauagaggaggguaagaucguccauaccucuaagcucuccggcucagcccaacacguugaagagugcagcugcuauccacgcuacccgggggugagauguguaugcagggacaauuggaaaggaaguaaccggcccauuguggauaucaauauaaaggaccacucuauugucuccagcuacguguguucgcgcuuaguuggcgacacgccucgaaaaucugauuccucaaguagcucccauugccugaacccaaauaacgaagagggugggcacggagugaagggcugggcuuucgacgauggcaaugacgucuggauggggagaaccaucaacgaaacaucuaggcuuggauaugagacuuuuaaagugguagaggguuggagcaauucaaagaguaaauugcagaucaaccggcagguuauuguggaucguggcgaccgcuccggguacagcggaaucuucucugucgaaggcaagucauguauuaauagaugcuuuuauguggagcugauaaggggucggaaggaagagaccgaaguccuauggacaaguaacagcaucgugguuuucugugggacuuccggcaccuacggaacaggcucuuggcccgauggggccgaccucaaucugaugcauauuugaggacuaguuauaagacugacuagcccgaugggccucccaacgggcccuccuccccuccuugcaccgagauuaauaaaaaaaaaaaaaaaaaaaaaaaaaaaaaaaaaaaaaaaaaaaaaaaaaaaaaaaaaaaaaaaaugcaucccccccccccccccccccccccccccccccaaaggcucuuuucagagccaccagaauu

SEQ ID NO: 14535 - RNA, 1627 nt, Artificial Sequence
  FLUAV/H3N2/A/Hong Kong/2671/2019__EPI1543099 neuraminidase mRNA human (NA)
aggagaaagcuuaccaugaaccccaaucagaagaucauuaccauaggcagcgugucccugacaaucucuacuauuugcuucuuuaugcagaucgccauucucaucacgaccgucacacuucacuucaaacaguacgaguuuaacucaccuccaaauaaccagguuaugcugugugaaccgacuauaaucgagagaaauauuaccgaaaucguguauuugacaaacaccacuauugagaaggaaaucugccccaaaccugcugaguacaggaauuggaguaagccacagugugggauaacaggauucgcacccuuuagcaaagacaacuccauucgguuaucugccgguggcgauaucuggguaacccgcgagccuuaugugucgugcgaccuggauaaguguuaccaauucgcgcuagggcagggaacgacucucaauaacguccauucaaauaacaccgugcgagaccguacaccauauagaacucugcuuaugaaugaacugggcguucccuuucacuuggguaccaaacaggugugcauugcuuggagcaguuccucuugucaugaugggaaggccuggcuccacgucugcaucacaggagacgauaagaacgcaaccgccagcuucaucuacaauggcaggcugguggacuccguaguuucauggaguaacgauauucugcggacgcaggagagcgaaugugugugcauaaacggcacuuguacagucgugaugaccgacgggaaugcuacuggaaaagcagauacaaagauccucuuuauugaggaggguaaaaucgugcauaccucuaaguuauccggcucagcccaacacgucgaagagugcagcugcuauccucgcuacccagggguuagaugugugugcagggacaacuggaagggaaguaaucggccgauaauugauaucaacaucaaagaccacucuauuguauccagcuacguguguucgggccuggucggugacacgccccgcaagucugauuccucaaguagcucccauugccuuaauccuaacaaugaagaagggggacacggcgugaaaggcugggcuuucgacgaugggaacgacguuuggaugggacgaaccaucaaugagacaucuagauuggguuaugagacuuuuaagguggucgagggcuggagcaacccaaaaucaaagcugcagauuaauaggcaagugauaguagaucguggggaccggaguggauacuccggcaucuucagcguugaagguaaaucuuguauuaaccgcugcuuuuauguggagcuaaucagagggaggaaggaagagaccgaaguccucuggacaucaaauaguaucguggucuucuguggcacuagcggaaccuacggcacaggguccuggcccgauggagccgaccugaaccuuaugcauaccugaggacuaguuauaagacugacuagcccgaugggccucccaacgggcccuccuccccuccuugcaccgagauuaauaaaaaaaaaaaaaaaaaaaaaaaaaaaaaaaaaaaaaaaaaaaaaaaaaaaaaaaaaaaaaaaaugcaucccccccccccccccccccccccccccccccaaaggcucuuuucagagccaccagaauu

SEQ ID NO: 14536 - RNA, 1627 nt, Artificial Sequence
  FLUAV/H3N2/A/Hong Kong/45/2019__EPI1691929 neuraminidase mRNA human (NA)
aggagaaagcuuaccaugaaccccaaucagaagaucauuaccauaggcagcgugucccugacaaucucuacuauuugcuucuuuaugcagaucgccauucucaucacgaccgucacacuucacuucaaacaguacgaguuuaacucacugccuaauaaccagguuauguugugugaaccaacuauaaucgagagaaauauuaccgaaaucguguauuuaacaaacaccacuauugagaaggaaaucugcccgaaacccgcugaguacaggaauuggaguaagccucagugugggauaacaggauucgcaccauuuagcaaagacaacuccauucggcugucugccgguggcgauaucuggguaacccgcgagcccuaugugucgugcgaccuagauaaguguuaccaauucgcgcucgggcagggaacgacucugaauaacguccauucaaauaacaccgugcgagaccguacaccuuauagaacucuucugaugaaugaauugggcguuccauuucaccucgguaccaaacaggugugcauugcuuggagcaguuccucuugucaugaugggaaggccuggcugcacgucugcaucacaggagacgauaagaacgcaaccgccagcuucaucuacaauggcaggcugguggacuccguaguuucauggaguaacgauauucuccggacgcaggagagcgaaugugugugcauaaacggcacuuguacagucgugaugaccgacgggaaugcuacuggaaaagcagauacaaagaucuuauuuauugaggaggguaaaaucgugcauaccucuaagcuguccggcucagcccaacacgucgaagagugcagcugcuauccccgcuacccugggguuagaugugugugcagggacaacuggaagggaaguaaucggccaauaauugauaucaacaucaaagaccacucuauuguauccagcuacguguguucgggccuugucggugacacgccgcgcaagucugauuccucaaguagcucccauugcuugaaucccaacaaugaagaagggggacacggcgugaaaggcugggcuuucgacgaugggaacgacguuuggaugggacgaaccaucaaugagacaucuagacuggguuaugagacuuuuaagguggucgagggcuggagcaacccuaaaucaaagcuacagauuaauaggcaagugauaguagaucguggggaccggaguggauacuccggcaucuucagcguugaagguaaaucuuguauuaaccgcugcuuuuauguggagcucaucagagggaggaaggaagagaccgaaguccuguggacaucaaauaguaucguggucuucuguggcacuagcggaaccuacggcacaggguccuggccagauggagccgaccuuaaccugaugcauauuugaggacuaguuauaagacugacuagcccgaugggccucccaacgggcccuccuccccuccuugcaccgagauuaauaaaaaaaaaaaaaaaaaaaaaaaaaaaaaaaaaaaaaaaaaaaaaaaaaaaaaaaaaaaaaaaaugcaucccccccccccccccccccccccccccccccaaaggcucuuuucagagccaccagaauu

SEQ ID NO: 14537 - RNA, 1627 nt, Artificial Sequence
  FLUAV/H3N2/A/South Australia/34/2019__EPI1387330 neuraminidase mRNA human (NA)
aggagaaagcuuaccaugaaccccaaucagaagaucauuaccauaggcagcgugucccugacaaucucuacuauuugcuucuuuaugcagaucgccauucucaucacgaccgucacacuucacuucaaacaguacgaguuuaacucaccuccaaauaaccagguuaugcugugugaaccgacuauaaucgagagaaauauuaccgaaaucguguauuugacaaacaccacuauugagaaggaaaucugccccaaaccugcugaguacaggaauuggaguaagccacagugugggauaacaggauucgcacccuuuagcaaagacaacuccauucgguuaucugccgguggcgauaucuggguaacccgcgagccuuaugugucgugcgaccuggauaaguguuaccaauucgcgcuagggcagggaacgacucucaauaacguccauucaaauaacaccgugcgagaccguacaccauauagaacucugcuuaugaaugaacugggcguucccuuucacuuggguaccaaacaggugugcauugcuuggagcaguuccucuugucaugaugggaaggccuggcuccacgucugcaucacaggagacgauaagaacgcaaccgccagcuucaucuacaauggcaggcugguggacuccguaguuucauggaguaacgauauucugcggacgcaggagagcgaaugugugugcauaaacggcacuuguacagucgugaugaccgacgggaaugcuacuggaaaagcagauacaaagauccucuuuauugaggaggguaaaaucgugcauaccucuaaguuauccggcucagcccaacacgucgaagagugcagcugcuauccucgcuacccagggguuagaugugugugcagggacaacuggaagggaaguaaucggccgauaauugauaucaacaucaaagaccacucuauuguaucccgcuacguguguagcggccuggucggugacacgccccgaaagucggauucuuccucaaguagccauugccuuaauccuaacaaugaaaaagggggacacggcgugaagggcugggcuuucgacgaugggaacgacguuuggaugggaagaaccaucaaugagacauccagguuggguuaugaaacuuuuaaaguggucgagggcuggucuaacccaaagagcaaacugcagauuaaucggcaagugauaguagaucguggggaccgcucaggauacaguggcaucuucuccguugaggguaagagcuguauuaacagaugcuuuuauguggaacuaaucagggggcggaaggaggaaaccgagguccucuggacaucuaauucaaucguggucuucuguggcaccaguggaacuuacggcacagggagcuggcccgauggagccgaccugaaccuuaugcauauuugaggacuaguuauaagacugacuagcccgaugggccucccaacgggcccuccuccccuccuugcaccgagauuaauaaaaaaaaaaaaaaaaaaaaaaaaaaaaaaaaaaaaaaaaaaaaaaaaaaaaaaaaaaaaaaaaugcaucccccccccccccccccccccccccccccccaaaggcucuuuucagagccaccagaauu

SEQ ID NO: 14538 - RNA, 1615 nt, Artificial Sequence
  FLUAV/H7N9/A/chicken/Zhejiang/C483/2013(H7N9)__AGN69396.1 neuraminidase mRNA human (NA)
aggagaaagcuuaccaugaaccccaaucagaagauccugugcaccagcgccacagcuauuauaaucggcgcaauugccgugcucaucgggauugcgaaccuuggacugaauaucgguuugcacuuaaaaccuggcuguaacugcucccauucucaaccagagacuacgaauaccucacagacaauaaucaacaauuacuauaacgaaacuaauauuaccaacauccagauggaggaaagaacaaguaggaauuucaacaaucugaccaaggggcuauguacuauuaacagcuggcacaucuacggaaaagacaaugcuguccggauaggcgaguccucugauguucucgugacacgcgaaccguauguaucgugcgaccccgaugagugucgauuuuacgcccugucacaggguaccacgauucgugggaagcauagcaacggaacuauccacgacagaagucaauauagggcacuuauuuccuggccucugucuagcccacccaccguguacaacucccgggucgagugcaucggcuggucaaguacaagcugucaugauggcaaaucucgcauguccaucugcauuucagggccuaauaacaaugccagcgcugugguuugguauaacagaaggccaguggcagaaauaaauacuugggcccggaacaucuugcgcacccaggagagugaaugugucugccacaauggagugugucccguaguuuucacagacgguucugcuaccggcccugccgauacgcgaauuuacuacuuuaaggaggggaagauccucaaaugggagucccugacuggaacagcgaagcacauagaagagugcagcugcuauggcgaaagaaccgguauuacuuguacaugcagggacaacuggcaggggucgaaucggccagugauccagaucgauccggucgcaaugacccauacgucucaauacauuuguucccccgugcugaccgacaacccucguccaaaugaucccaacaucggaaaaugcaaugacccuuauccaggcaacaauaacaacggcgugaagggguucucauaccucgauggagccaauacaugguuaggucgcacuauuaguaccgcuagcagauccggcuaugagaugcugaaaguccccaacgcccuuacagacgacaggucuaagccgauacaggggcagacuaucguuuugaaugcagauuggagcggauacucaggcaguuuuauggacuauugggcugaaggugauuguuaccgggccugcuucuacguggagcugauucgagggcgcccuaaggaggacaaaguaugguggaccuccaacagcaucgugucuauguguucaaguacagaauuucuaggccaguggaauuggcccgauggagcgaagaucgaguauuuccucugaggacuaguuauaagacugacuagcccgaugggccucccaacgggcccuccuccccuccuugcaccgagauuaauaaaaaaaaaaaaaaaaaaaaaaaaaaaaaaaaaaaaaaaaaaaaaaaaaaaaaaaaaaaaaaaaugcaucccccccccccccccccccccccccccccccaaaggcucuuuucagagccaccagaauu

SEQ ID NO: 14539 - RNA, 1630 nt, Artificial Sequence
  FLUAV/H10N8/A/Jiangxi/IPB13/2013(H10N8)__AHK10769.1 neuraminidase mRNA human (NA)
aggagaaagcuuaccaugaaccccaaucagaagaucauuaccauaggcagcgugucccuggggcucgucauccuuaacauucuguugcacaucguuucuauuacagugacuguauuagugcugccuggaaaugguaacaaugagucaugcaacgaaacggucaucagagaguacaaugaaaccgugaggguugagaaagugacacaauggcauaacacuaaugucauagaauauaucgagcggccagagaacgaccacuucaugaauaacaccgaagcccuaugugaugcuaagggcuuugcaccguucaguaaagacaaugggauucgcaucggaagccgaggccauguguuuguaauucgugagcccuucguuuccugcucuccuacagaauguagaaccuuuuuccucacucaggguucgcugcuuaacgauaagcacucaaaugggacagugaaagacaggagcccauaccggacccugaugagugucgagaucggacagucccccaacguguaucaggcccgcuuugaggcgguggcuuggucugccacggcaugccaugauggcaagaaguggaugacuauaggcgucaccgggccugacgccaaagcuguugcagugguacacuacggagguauuccaacagaugugaucaacagcugggccggcgacauuuugagaacucaagaauccucauguaccugcauccagggggaguguuucugggucaugacagauggacccgcuaauaggcaggcccaguaucgggcguuuaaggcaaaacaaggcaagaucgugggucaggccgaaauuaguuucaacgggggacacauagaggaaugcagcuguuacccuaaugagggcaaaguugagugcgugugucgcgacaacuggaccggcacgaaucgaccaguccucgugaucucuccggaucuguccuauagaguaggguaccugugcgcuggacuccccucagacacuccuaggggugaagauagccaguuuacaggcaguugcaccucuccaauggggaaccagggauacggcguuaaggguuucggguuucggcaaggcaaugacguguggaugggacguacuauuucccgcacaagcagaucgggcuucgagaucuuaaaggucaggaacgggugggugcaaaauucuaaagaacagauaaagcggcaggucgugguugacaaccugaauugguccggauauucagguaguuucacccuucccgccgaguugacgaaacgaaacugucuggugccuugcuuuuggguagaaaugauucgcggcaauccagaggagaagaccaucuggacaagcuccucuagcaucgucaugugugggguggaucaugaaauugcagacuggucauggcacgauggagcuauccuacccuucgacauugauaaaaugugaggacuaguuauaagacugacuagcccgaugggccucccaacgggcccuccuccccuccuugcaccgagauuaauaaaaaaaaaaaaaaaaaaaaaaaaaaaaaaaaaaaaaaaaaaaaaaaaaaaaaaaaaaaaaaaaugcaucccccccccccccccccccccccccccccccaaaggcucuuuucagagccaccagaauu

SEQ ID NO: 14540 - RNA, 1618 nt, Artificial Sequence
  FLUBV/H0N0/B/Colorado/06/2017__EPI1001930 neuraminidase mRNA human (NA)
aggagaaagcuuaccaugcugcccagcaccauccagacacucacucuuuuccugacguccggcgggguguuguuaucucuguacgucucagccagucuaagcuaucuccuguacuccgacauucuucugaaguuuucuccuaccgagauaacagcuccaacuaugccguuggauugcgcaaacgccucgaauguucaagcggugaacagaucagcuaccaaaggaguaacacuccugcugcccgaaccugaguggaccuauccaaggcucagcugucccgguaguacuuuccagaaggccuuacugaucuccccucaccgguuuggcgaaacaaaaggaaauucugcaccacuuauuauccgcgagcccuucguggccugcgggccuaacgaauguaagcauuuugcuuugacccacuacgcagcccagccaggcgguuauuacaaugggacgcgaggagaccguaacaaacugagacaucuaauuagcgucaagcucggcaagaucccgacuguggaaaauuccauauuccacauggcugccuggucaggcagugcgugccaugaugggaaagaguggaccuauaucggaguugacggucccgauaacaaugcacugcuuaaggugaaauacggcgaggccuacacagacacuuaucacagcuacgcuaacaauauucugaggacccaggagucugccuguaacugcaucgggggaaauuguuauuugaugauuacagauggcuccgcaucaggugucagcgaaugccgguuucucaagauccgcgaggggagaauaauuaaagagaucuucccuaccggaagggugaagcacacggaagaguguacuugcggcuuugcuaguaacaagacaauugaaugugccugccgggacaaucgcuacaccgcgaaacgaccauucguaaagcugaacguugagacugauacagccgaaaucagauuaaugugcaccgacacguaucuggauacccccaggccuaacgacggcucuaucacagggccaugugaguccgauggagacaaagguagcggcgggauuaagggaggcuuugugcaucaacggaugaaaucgaagauaggucguugguacucucgcacuaugucccagaccgagagaauggggaugggccucuaugucaaauacggaggcgaccccugggcagauucagacgcucuugccuucaguggggugauggugagcaugaaggaaccgggaugguacuccuuugguuucgagaucaaggauaaaaagugcgacgucccuuguauuggcaucgaaaugguucacgaugggggaaaagagacauggcauucugcugccacugcaauauauugccugaugggcagcggucaguugcuaugggacaccgugacagggguagauauggcccugugaggacuaguuauaagacugacuagcccgaugggccucccaacgggcccuccuccccuccuugcaccgagauuaauaaaaaaaaaaaaaaaaaaaaaaaaaaaaaaaaaaaaaaaaaaaaaaaaaaaaaaaaaaaaaaaaugcaucccccccccccccccccccccccccccccccaaaggcucuuuucagagccaccagaauu

SEQ ID NO: 14541 - RNA, 1618 nt, Artificial Sequence
  FLUBV/H0N0/B/Washington/02/2019__EPI1368872 neuraminidase mRNA human (NA)
aggagaaagcuuaccaugcugcccagcaccauccagacacucacucuuuuccugacguccggcgggguguuguuaucucuguacgucucagccagucuaagcuaucuccuguacuccgacauucuucugaaguuuucuccuaccgagauaacagcuccaacuaugccguuggauugcgcaaacgccucgaauguucaagcggugaacagaucagcuaccaaaggaguaacacuccugcugcccgaaccugaguggaccuauccaaggcucagcugucccgguaguacuuuccagaaggccuuacugaucuccccucaccgguuuggcgaaacaaaaggaaauucugcaccacuuauuauccgcgagcccuucguggccugcgggccuaacgaauguaagcauuuugcuuugacccacuacgcagcccagccaggcgguuauuacaaugggacgcgaggagaccguaacaaacugagacaucuaauuagcgucaagcucggcaagaucccgacuguggaaaauuccauauuccacauggcugccuggucaggcagugcgugccaugaugggaaagaguggaccuauaucggaguugacggucccgauaacaaugcacugcuuaaggugaaauacggcgaggccuacacagacacuuaucacagcuacgcuaacaauauucugaggacccaggagucugccuguaacugcaucgggggaaauuguuauuugaugauuacagauggcuccgcaucaggugucagcgaaugccgguuucucaagauccgcgaggggagaauaauuaaagagaucuucccuaccggaagggugaagcacacggaagaguguacuugcggcuuugcuaguaacaagacaauugaaugugccugccgggacaaucgcuacaccgcgaaacgaccauucguaaagcugaacguugagacugauacagccgaaaucagauuaaugugcaccgacacguaucuggauacccccaggccuaacgacggcucuaucacagggccaugugaguccgauggagacaaagguagcggcgggauuaagggaggcuuugugcaucaacggaugaaaucgaagauaggucguugguacucucgcacuauguccaaaaccgagagaauggggaugggccucuaugucaaguacggaggcgaccccugggcagauucagacgcucuuacauucaguggggugauggugagcaugaaggaaccgggaugguacuccuuugguuucgagaucaaagauaagaaaugcgacgucccuuguauuggcaucgaaaugguucacgaugggggaaaggagacuuggcauucugccgcuaccgccauauauugccugaugggcagcggucaguugcuaugggacacagugaccgggguagauauggcacugugaggacuaguuauaagacugacuagcccgaugggccucccaacgggcccuccuccccuccuugcaccgagauuaauaaaaaaaaaaaaaaaaaaaaaaaaaaaaaaaaaaaaaaaaaaaaaaaaaaaaaaaaaaaaaaaaugcaucccccccccccccccccccccccccccccccaaaggcucuuuucagagccaccagaauu

SEQ ID NO: 14542 - protein, 574 aa, Artificial Sequence
  HRSV-A/RSVA/Homo sapiens/USA/84I-215A-01/1984__AHY21375.1 fusion glycoprotein (F0)
MELPILKTNAITTILAAVTLCFASSQNITEEFYQSTCSAVSKGYLSALRTGWYTSVITIELSNIKENKCNGTDAKVKLIKQELDKYKNAVTELQLLMQSTPAANNRARRELPRFMNYTLNNTKNTNVTLSKKRKRRFLGFLLGVGSAIASGIAVSKVLHLEGEVNKIKSALLSTNKAVVSLSNGVSVLTSKVLDLKNYIDKQLLPIVNKQSCSISNIETVIEFQQKNNRLLEITREFSVNAGVTTPVSTYMLTNSELLSLINDMPITNDQKKLMSNNVQIVRQQSYSIMSIIKEEVLAYVVQLPLYGVIDTPCWKLHTSPLCTTNTKEGSNICLTRTDRGWYCDNAGSVSFFPQAETCKVQSNRVFCDTMNSLTLPSEVNLCNIDIFNPKYDCKIMTSKTDVSSSVITSLGAIVSCYGKTKCTASNKNRGIIKTFSNGCDYVSNKGVDTVSVGNTLYYVNKQEGKSLYVKGEPIINFYDPLVFPSDEFDASISQVNEKINQSLAFIRKSDELLHNVNAGKSTTNIMITTIIIVIIVILLSLIAVGLLLYCKARSTPVTLSKDQLSGINNIAFSN

SEQ ID NO: 14543 - protein, 574 aa, Artificial Sequence
  HRSV-A/A2__P03420.1 fusion glycoprotein (F0)
MELLILKANAITTILTAVTFCFASGQNITEEFYQSTCSAVSKGYLSALRTGWYTSVITIELSNIKENKCNGTDAKVKLIKQELDKYKNAVTELQLLMQSTPATNNRARRELPRFMNYTLNNAKKTNVTLSKKRKRRFLGFLLGVGSAIASGVAVSKVLHLEGEVNKIKSALLSTNKAVVSLSNGVSVLTSKVLDLKNYIDKQLLPIVNKQSCSISNIETVIEFQQKNNRLLEITREFSVNAGVTTPVSTYMLTNSELLSLINDMPITNDQKKLMSNNVQIVRQQSYSIMSIIKEEVLAYVVQLPLYGVIDTPCWKLHTSPLCTTNTKEGSNICLTRTDRGWYCDNAGSVSFFPQAETCKVQSNRVFCDTMNSLTLPSEVNLCNVDIFNPKYDCKIMTSKTDVSSSVITSLGAIVSCYGKTKCTASNKNRGIIKTFSNGCDYVSNKGVDTVSVGNTLYYVNKQEGKSLYVKGEPIINFYDPLVFPSDEFDASISQVNEKINQSLAFIRKSDELLHNVNAGKSTTNIMITTIIIVIIVILLSLIAVGLLLYCKARSTPVTLSKDQLSGINNIAFSN

SEQ ID NO: 14544 - protein, 553 aa, Artificial Sequence
  HRSV-A/A2__P03420.1 fusion glycoprotein (F-del)
MELLILKANAITTILTAVTFCFASGQNITEEFYQSTCSAVSKGYLSALRTGWYTSVITIELSNIKENKCNGTDAKVKLIKQELDKYKNAVTELQLLMQSTPATNNRARRELPRFMNYTLNNAKKTNVTLSKKRKRRFLGFLLGVGSAIASGVAVSKVLHLEGEVNKIKSALLSTNKAVVSLSNGVSVLTSKVLDLKNYIDKQLLPIVNKQSCSISNIETVIEFQQKNNRLLEITREFSVNAGVTTPVSTYMLTNSELLSLINDMPITNDQKKLMSNNVQIVRQQSYSIMSIIKEEVLAYVVQLPLYGVIDTPCWKLHTSPLCTTNTKEGSNICLTRTDRGWYCDNAGSVSFFPQAETCKVQSNRVFCDTMNSLTLPSEVNLCNVDIFNPKYDCKIMTSKTDVSSSVITSLGAIVSCYGKTKCTASNKNRGIIKTFSNGCDYVSNKGVDTVSVGNTLYYVNKQEGKSLYVKGEPIINFYDPLVFPSDEFDASISQVNEKINQSLAFIRKSDELLHNVNAGKSTTNIMITTIIIVIIVILLSLIAVGLLLYCKAR

SEQ ID NO: 14545 - protein, 574 aa, Artificial Sequence
  HRSV-A/A2__P03420.1 fusion glycoprotein (F0_DSCav1)
MELLILKANAITTILTAVTFCFASGQNITEEFYQSTCSAVSKGYLSALRTGWYTSVITIELSNIKENKCNGTDAKVKLIKQELDKYKNAVTELQLLMQSTPATNNRARRELPRFMNYTLNNAKKTNVTLSKKRKRRFLGFLLGVGSAIASGVAVCKVLHLEGEVNKIKSALLSTNKAVVSLSNGVSVLTFKVLDLKNYIDKQLLPILNKQSCSISNIETVIEFQQKNNRLLEITREFSVNAGVTTPVSTYMLTNSELLSLINDMPITNDQKKLMSNNVQIVRQQSYSIMCIIKEEVLAYVVQLPLYGVIDTPCWKLHTSPLCTTNTKEGSNICLTRTDRGWYCDNAGSVSFFPQAETCKVQSNRVFCDTMNSLTLPSEVNLCNVDIFNPKYDCKIMTSKTDVSSSVITSLGAIVSCYGKTKCTASNKNRGIIKTFSNGCDYVSNKGVDTVSVGNTLYYVNKQEGKSLYVKGEPIINFYDPLVFPSDEFDASISQVNEKINQSLAFIRKSDELLHNVNAGKSTTNIMITTIIIVIIVILLSLIAVGLLLYCKARSTPVTLSKDQLSGINNIAFSN

SEQ ID NO: 14546 - protein, 553 aa, Artificial Sequence
  HRSV-A/A2__P03420.1 fusion glycoprotein (F-del_DSCav1)
MELLILKANAITTILTAVTFCFASGQNITEEFYQSTCSAVSKGYLSALRTGWYTSVITIELSNIKENKCNGTDAKVKLIKQELDKYKNAVTELQLLMQSTPATNNRARRELPRFMNYTLNNAKKTNVTLSKKRKRRFLGFLLGVGSAIASGVAVCKVLHLEGEVNKIKSALLSTNKAVVSLSNGVSVLTFKVLDLKNYIDKQLLPILNKQSCSISNIETVIEFQQKNNRLLEITREFSVNAGVTTPVSTYMLTNSELLSLINDMPITNDQKKLMSNNVQIVRQQSYSIMCIIKEEVLAYVVQLPLYGVIDTPCWKLHTSPLCTTNTKEGSNICLTRTDRGWYCDNAGSVSFFPQAETCKVQSNRVFCDTMNSLTLPSEVNLCNVDIFNPKYDCKIMTSKTDVSSSVITSLGAIVSCYGKTKCTASNKNRGIIKTFSNGCDYVSNKGVDTVSVGNTLYYVNKQEGKSLYVKGEPIINFYDPLVFPSDEFDASISQVNEKINQSLAFIRKSDELLHNVNAGKSTTNIMITTIIIVIIVILLSLIAVGLLLYCKAR

SEQ ID NO: 14547 - protein, 535 aa, Artificial Sequence
  HRSV-A/A2__P03420.1 fusion glycoprotein (F_DSCav1_mut4)
MELLILKANAITTILTAVTFCFASGQNITEEFYQSTCSAVSKGYLSALRTGWYTSVITIELSNIKENKCNGTDAKVKLIKQELDKYKNAVTELQLLMQSTPATGSGSAICSGVAVCKVLHLEGEVNKIKSALLSTNKAVVSLSNGVSVLTFKVLDLKNYIDKQLLPILNKQSCSISNIETVIEFQQKNNRLLEITREFSVNAGVTTPVSTYMLTNSELLSLINDMPITNDQKKLMSNNVQIVRQQSYSIMCIIKEEVLAYVVQLPLYGVIDTPCWKLHTSPLCTTNTKEGSNICLTRTDRGWYCDNAGSVSFFPQAETCKVQSNRVFCDTMNSRTLPSEVNLCNVDIFNPKYDCKIMTSKTDVSSSVITSLGAIVSCYGKTKCTASNKNRGIIKTFSNGCDYVSNKGVDTVSVGNTLYCVNKQEGKSLYVKGEPIINFYDPLVFPSDEFDASISQVNEKINQSLAFIRKSDELLHNVNAGKSTTNIMITTIIIVIIVILLSLIAVGLLLYCKARSTPVTLSKDQLSGINNIAFSN

SEQ ID NO: 14548 - protein, 514 aa, Artificial Sequence
  HRSV-A/A2__P03420.1 fusion glycoprotein (F-del_DSCav1_mut4)
MELLILKANAITTILTAVTFCFASGQNITEEFYQSTCSAVSKGYLSALRTGWYTSVITIELSNIKENKCNGTDAKVKLIKQELDKYKNAVTELQLLMQSTPATGSGSAICSGVAVCKVLHLEGEVNKIKSALLSTNKAVVSLSNGVSVLTFKVLDLKNYIDKQLLPILNKQSCSISNIETVIEFQQKNNRLLEITREFSVNAGVTTPVSTYMLTNSELLSLINDMPITNDQKKLMSNNVQIVRQQSYSIMCIIKEEVLAYVVQLPLYGVIDTPCWKLHTSPLCTTNTKEGSNICLTRTDRGWYCDNAGSVSFFPQAETCKVQSNRVFCDTMNSRTLPSEVNLCNVDIFNPKYDCKIMTSKTDVSSSVITSLGAIVSCYGKTKCTASNKNRGIIKTFSNGCDYVSNKGVDTVSVGNTLYCVNKQEGKSLYVKGEPIINFYDPLVFPSDEFDASISQVNEKINQSLAFIRKSDELLHNVNAGKSTTNIMITTIIIVIIVILLSLIAVGLLLYCKAR

SEQ ID NO: 14549 - protein, 536 aa, Artificial Sequence
  HRSV-A/A2__P03420.1 fusion glycoprotein (F_DSCav1_mut5)
MELLILKANAITTILTAVTFCFASGQNITEEFYQSTCSAVSKGYLSALRTGWYTSVITIELSNIKENKCNGTDAKVKLIKQELDKYKNAVTELQLLMQSTPATGSGSAIASGVAVCKVLHLEGEVNKIKSALLSTNKAVVSLSGCGVSVLTFKVLDLKNYIDKQLLPILNKQSCSISNIETVIEFQQKNNRLLEITREFSVNAGVTTPVSTYMLTNSELLSLINDMPITNDQKKLMSNNVQIVRQQSYSIMCIIKEEVLAYVVQLPLYGVIDTPCWKLHTSPLCTTNTKEGSNICLTRTDRGWYCDNAGSVSFFPQAETCKVQSNRVFCDTMNSRTLPSEVNLCNVDIFNPKYDCKIMTSKTDVSSSVITSLGAIVSCYGKTKCTASNKCRGIIKTFSNGCDYVSNKGVDTVSVGNTLYYVNKQEGKSLYVKGEPIINFYDPLVFPSDEFDASISQVNEKINQSLAFIRKSDELLHNVNAGKSTTNIMITTIIIVIIVILLSLIAVGLLLYCKARSTPVTLSKDQLSGINNIAFSN

SEQ ID NO: 14550 - protein, 515 aa, Artificial Sequence
  HRSV-A/A2__P03420.1 fusion glycoprotein (F-del_DSCav1_mut5)
MELLILKANAITTILTAVTFCFASGQNITEEFYQSTCSAVSKGYLSALRTGWYTSVITIELSNIKENKCNGTDAKVKLIKQELDKYKNAVTELQLLMQSTPATGSGSAIASGVAVCKVLHLEGEVNKIKSALLSTNKAVVSLSGCGVSVLTFKVLDLKNYIDKQLLPILNKQSCSISNIETVIEFQQKNNRLLEITREFSVNAGVTTPVSTYMLTNSELLSLINDMPITNDQKKLMSNNVQIVRQQSYSIMCIIKEEVLAYVVQLPLYGVIDTPCWKLHTSPLCTTNTKEGSNICLTRTDRGWYCDNAGSVSFFPQAETCKVQSNRVFCDTMNSRTLPSEVNLCNVDIFNPKYDCKIMTSKTDVSSSVITSLGAIVSCYGKTKCTASNKCRGIIKTFSNGCDYVSNKGVDTVSVGNTLYYVNKQEGKSLYVKGEPIINFYDPLVFPSDEFDASISQVNEKINQSLAFIRKSDELLHNVNAGKSTTNIMITTIIIVIIVILLSLIAVGLLLYCKAR

SEQ ID NO: 14551 - protein, 194 aa, Artificial Sequence
  HRSV-A/A2__AAB86665.1 matrix protein (M2-1)
MSRRNPCKFEIRGHCLNGKRCHFSHNYFEWPPHALLVRQNFMLNRILKSMDKSIDTLSEISGAAELDRTEEYALGVVGVLESYIGSINNITKQSACVAMSKLLTELNSDDIKKLRDNEELNSPKIRVYNTVISYIESNRKNNKQTIHLLKRLPADVLKKTIKNTLDIHKSITINNPKESTVSDTNDHAKNNDTT

SEQ ID NO: 14552 - RNA, 1725 nt, Artificial Sequence
  HRSV-A/RSVA/Homo sapiens/USA/84I-215A-01/1984__AHY21375.1 fusion glycoprotein CDS gc (F0)
auggagcugcccauccucaagaccaacgccaucaccacgauccuggccgcggugacccugugcuucgccagcucccagaacaucaccgaggaguucuaccagagcacgugcuccgccgucagcaagggcuaccucuccgcccugcgcaccgggugguacaccagcgugaucaccaucgagcuguccaacaucaaggagaacaagugcaacggcaccgacgccaaggugaagcucaucaagcaggagcuggacaaguacaagaacgcggucacggagcugcagcuccugaugcagagcaccccggccgccaacaaccgggcccgccgggagcugccccgcuucaugaacuacacccucaacaacaccaagaacacgaacgugacccuguccaagaagcggaagcgccgguuccugggguuccuccugggcguggggagcgcgaucgccuccggcaucgccgucagcaaggugcugcaccucgagggcgaggugaacaagaucaaguccgcccugcugagcaccaacaaggccgucgugucccucagcaacgggguguccguccugaccagcaaggugcuggaccucaagaacuacaucgacaagcagcugcugcccaucgugaacaagcaguccugcagcaucagcaacaucgagacggucaucgaguuccagcagaagaacaaccgccuccuggagaucacccgggaguucuccgugaacgcgggcgugaccacccccgucagcacguacaugcugaccaacuccgagcuccugagccugaucaacgacaugccgaucaccaacgaccagaagaagcucauguccaacaacgugcagaucgugcgccagcagagcuacuccaucaugagcaucaucaaggaggagguccuggccuacguggugcagcugccccucuacggggucaucgacacccccugcuggaagcugcacacgagcccccugugcaccaccaacaccaaggagggcagcaacaucugccucacgcggaccgaccgcgggugguacugcgacaacgccggcuccgugagcuucuucccgcaggccgagaccugcaagguccaguccaaccggguguucugcgacaccaugaacagccugacgcugcccuccgaggugaaccucugcaacaucgacaucuucaaccccaaguacgacugcaagaucaugaccagcaagaccgacgucuccagcuccgugaucaccagccugggcgccaucgugagcugcuacgggaagacgaagugcaccgcguccaacaagaaccgcggcaucaucaagaccuucagcaacgggugcgacuacgucuccaacaagggcguggacaccgugagcgucggcaacacccuguacuacgugaacaagcaggaggggaagucccucuacgugaagggcgagcccaucaucaacuucuacgacccgcuggucuuccccagcgacgaguucgacgccuccaucagccaggugaacgagaagaucaaccagucccuggccuucauccggaaguccgacgagcugcuccacaacgugaacgccgggaaguccacgaccaacaucaugaucaccaccaucaucaucgucaucaucgugauccugcugagccucaucgccgugggccugcugcucuacugcaaggcgcgcuccacgcccgucacccugagcaaggaccagcuguccgggaucaacaacaucgccuucagcaacuga

SEQ ID NO: 14553 - RNA, 1725 nt, Artificial Sequence
  HRSV-A/A2__P03420.1 fusion glycoprotein CDS gc (F0)
auggagcugcucauccugaaggccaacgccaucaccaccauccugacggcggugaccuucugcuucgccagcggccagaacaucaccgaggaguucuaccaguccaccugcagcgccgucuccaagggguaccucagcgcccugcggacgggcugguacaccuccgugaucaccaucgagcugagcaacaucaaggagaacaagugcaacgggaccgacgccaaggugaagcucaucaagcaggagcuggacaaguacaagaacgcggucacggagcugcagcuccugaugcaguccaccccggcaaccaacaaccgcgcccggcgcgagcugccccgguucaugaacuacacccucaacaacgccaagaagacgaacgugacccugagcaagaagcgcaagcggcgcuuccugggcuuccuccugggggugggcuccgccaucgcgagcggcgucgccguguccaaggugcugcaccucgagggggaggucaacaagaucaagagcgcccugcuguccaccaacaaggccguggugagccucuccaacggcgucagcgugcugaccuccaaggugcuggaccucaagaacuacaucgacaagcagcugcugcccaucgucaacaagcagagcugcuccaucagcaacaucgagacggugaucgaguuccagcagaagaacaaccggcuccuggagaucacccgcgaguucagcgugaacgccggggucaccacccccguguccacguacaugcugaccaacagcgagcuccugucccugaucaacgacaugccgaucaccaacgaccagaagaagcucaugagcaacaacgugcagaucguccggcagcaguccuacagcaucauguccaucaucaaggaggaggugcuggcguacgugguccagcugccccucuacggcgugaucgacacccccugcuggaagcugcacacgagcccccugugcaccaccaacaccaaggagggguccaacaucugccucacgcgcaccgaccggggcugguacugcgacaacgccggcagcgucuccuucuucccgcaggccgagaccugcaaggugcagagcaaccgcguguucugcgacaccaugaacucccugacgcugcccagcgagguaaaccucugcaacgucgacaucuucaaccccaaguacgacugcaagaucaugaccuccaagaccgacgugagcuccagcgugaucaccucccugggggccaucgucagcugcuacggcaagacgaagugcaccgccagcaacaagaaccgggggaucaucaagaccuucuccaacggcugcgacuacgugagcaacaagggcguggacaccguguccgucgggaacacccuguacuacgugaacaagcaggagggcaagagccucuacgugaagggggagcccaucaucaacuucuacgacccgcuggucuuccccuccgacgaguucgacgcgagcaucucccaggugaacgagaagaucaaccagagccuggccuucauccgcaaguccgacgagcugcuccacaacgugaacgccggcaagagcacgaccaacaucaugaucaccaccaucaucaucgucaucaucgugauccugcugucccucaucgccguggggcugcugcucuacugcaaggcccggagcacgcccgucacccuguccaaggaccagcugagcggcaucaacaacaucgcguucuccaacuga

SEQ ID NO: 14554 - RNA, 1662 nt, Artificial Sequence
  HRSV-A/A2__P03420.1 fusion glycoprotein CDS gc (F-del)
auggagcugcucauccugaaggccaacgccaucaccaccauccugacggcggugaccuucugcuucgccagcggccagaacaucaccgaggaguucuaccaguccaccugcagcgccgucuccaagggguaccucagcgcccugcggacgggcugguacaccuccgugaucaccaucgagcugagcaacaucaaggagaacaagugcaacgggaccgacgccaaggugaagcucaucaagcaggagcuggacaaguacaagaacgcggucacggagcugcagcuccugaugcaguccaccccggcaaccaacaaccgcgcccggcgcgagcugccccgguucaugaacuacacccucaacaacgccaagaagacgaacgugacccugagcaagaagcgcaagcggcgcuuccugggcuuccuccugggggugggcuccgccaucgcgagcggcgucgccguguccaaggugcugcaccucgagggggaggucaacaagaucaagagcgcccugcuguccaccaacaaggccguggugagccucuccaacggcgucagcgugcugaccuccaaggugcuggaccucaagaacuacaucgacaagcagcugcugcccaucgucaacaagcagagcugcuccaucagcaacaucgagacggugaucgaguuccagcagaagaacaaccggcuccuggagaucacccgcgaguucagcgugaacgccggggucaccacccccguguccacguacaugcugaccaacagcgagcuccugucccugaucaacgacaugccgaucaccaacgaccagaagaagcucaugagcaacaacgugcagaucguccggcagcaguccuacagcaucauguccaucaucaaggaggaggugcuggcguacgugguccagcugccccucuacggcgugaucgacacccccugcuggaagcugcacacgagcccccugugcaccaccaacaccaaggagggguccaacaucugccucacgcgcaccgaccggggcugguacugcgacaacgccggcagcgucuccuucuucccgcaggccgagaccugcaaggugcagagcaaccgcguguucugcgacaccaugaacucccugacgcugcccagcgagguaaaccucugcaacgucgacaucuucaaccccaaguacgacugcaagaucaugaccuccaagaccgacgugagcuccagcgugaucaccucccugggggccaucgucagcugcuacggcaagacgaagugcaccgccagcaacaagaaccgggggaucaucaagaccuucuccaacggcugcgacuacgugagcaacaagggcguggacaccguguccgucgggaacacccuguacuacgugaacaagcaggagggcaagagccucuacgugaagggggagcccaucaucaacuucuacgacccgcuggucuuccccuccgacgaguucgacgcgagcaucucccaggugaacgagaagaucaaccagagccuggccuucauccgcaaguccgacgagcugcuccacaacgugaacgccggcaagagcacgaccaacaucaugaucaccaccaucaucaucgucaucaucgugauccugcugucccucaucgccguggggcugcugcucuacugcaaggcccgguga

SEQ ID NO: 14555 - RNA, 1725 nt, Artificial Sequence
  HRSV-A/A2__P03420.1 fusion glycoprotein CDS gc (F0_DSCav1)
auggagcugcucauccugaaggccaacgccaucaccaccauccugacggcggugaccuucugcuucgccagcggccagaacaucaccgaggaguucuaccaguccacgugcagcgccgucuccaagggguaccucagcgcccugcggaccggcugguacaccuccgugaucaccaucgagcugagcaacaucaaggagaacaagugcaacgggaccgacgccaaggugaagcucaucaagcaggagcuggacaaguacaagaacgcggucacggagcugcagcuccugaugcaguccaccccggcaaccaacaaccgcgcccggcgcgagcugccccgguucaugaacuacacccucaacaacgccaagaagacgaacgugacccugagcaagaagcgcaagcggcgcuuccugggcuuccuccugggggugggcuccgccaucgcgagcggcgucgccgugugcaaggugcugcaccucgagggggaggucaacaagaucaagagcgcccugcuguccaccaacaaggccguggugagccucuccaacggcgucagcgugcugaccuucaaggugcuggaccucaagaacuacaucgacaagcagcugcugcccauccugaacaagcagagcugcuccaucagcaacaucgagacggugaucgaguuccagcagaagaacaaccggcuccuggagaucacccgcgaguucagcgugaacgccggggucaccacccccguguccacguacaugcugaccaacagcgagcuccugucccugaucaacgacaugccgaucaccaacgaccagaagaagcucaugagcaacaacgugcagaucguccggcagcaguccuacagcaucaugugcaucaucaaggaggaggugcuggcguacgugguccagcugccccucuacggcgugaucgacacccccugcuggaagcugcacacgagcccccugugcaccaccaacaccaaggagggguccaacaucugccucacgcgcaccgaccggggcugguacugcgacaacgccggcagcgucuccuucuucccgcaggccgagaccugcaaggugcagagcaaccgcguguucugcgacaccaugaacucccugacgcugcccagcgagguaaaccucugcaacgucgacaucuucaaccccaaguacgacugcaagaucaugaccuccaagaccgacgugagcuccagcgugaucaccucccugggggccaucgucagcugcuacggcaagacgaagugcaccgccagcaacaagaaccgggggaucaucaagaccuucuccaacggcugcgacuacgugagcaacaagggcguggacaccguguccgucgggaacacccuguacuacgugaacaagcaggagggcaagagccucuacgugaagggggagcccaucaucaacuucuacgacccgcuggucuuccccuccgacgaguucgacgcgagcaucucccaggugaacgagaagaucaaccagagccuggccuucauccgcaaguccgacgagcugcuccacaacgugaacgccggcaagagcacgaccaacaucaugaucaccaccaucaucaucgucaucaucgugauccugcugucccucaucgccguggggcugcugcucuacugcaaggcccggagcacgcccgucacccuguccaaggaccagcugagcggcaucaacaacaucgcguucuccaacuga

SEQ ID NO: 14556 - RNA, 1662 nt, Artificial Sequence
  HRSV-A/A2__P03420.1 fusion glycoprotein CDS gc (F-del_DSCav1)
auggagcugcucauccugaaggccaacgccaucaccaccauccugacggcggugaccuucugcuucgccagcggccagaacaucaccgaggaguucuaccaguccacgugcagcgccgucuccaagggguaccucagcgcccugcggaccggcugguacaccuccgugaucaccaucgagcugagcaacaucaaggagaacaagugcaacgggaccgacgccaaggugaagcucaucaagcaggagcuggacaaguacaagaacgcggucacggagcugcagcuccugaugcaguccaccccggcaaccaacaaccgcgcccggcgcgagcugccccgguucaugaacuacacccucaacaacgccaagaagacgaacgugacccugagcaagaagcgcaagcggcgcuuccugggcuuccuccugggggugggcuccgccaucgcgagcggcgucgccgugugcaaggugcugcaccucgagggggaggucaacaagaucaagagcgcccugcuguccaccaacaaggccguggugagccucuccaacggcgucagcgugcugaccuucaaggugcuggaccucaagaacuacaucgacaagcagcugcugcccauccugaacaagcagagcugcuccaucagcaacaucgagacggugaucgaguuccagcagaagaacaaccggcuccuggagaucacccgcgaguucagcgugaacgccggggucaccacccccguguccacguacaugcugaccaacagcgagcuccugucccugaucaacgacaugccgaucaccaacgaccagaagaagcucaugagcaacaacgugcagaucguccggcagcaguccuacagcaucaugugcaucaucaaggaggaggugcuggcguacgugguccagcugccccucuacggcgugaucgacacccccugcuggaagcugcacacgagcccccugugcaccaccaacaccaaggagggguccaacaucugccucacgcgcaccgaccggggcugguacugcgacaacgccggcagcgucuccuucuucccgcaggccgagaccugcaaggugcagagcaaccgcguguucugcgacaccaugaacucccugacgcugcccagcgagguaaaccucugcaacgucgacaucuucaaccccaaguacgacugcaagaucaugaccuccaagaccgacgugagcuccagcgugaucaccucccugggggccaucgucagcugcuacggcaagacgaagugcaccgccagcaacaagaaccgggggaucaucaagaccuucuccaacggcugcgacuacgugagcaacaagggcguggacaccguguccgucgggaacacccuguacuacgugaacaagcaggagggcaagagccucuacgugaagggggagcccaucaucaacuucuacgacccgcuggucuuccccuccgacgaguucgacgcgagcaucucccaggugaacgagaagaucaaccagagccuggccuucauccgcaaguccgacgagcugcuccacaacgugaacgccggcaagagcacgaccaacaucaugaucaccaccaucaucaucgucaucaucgugauccugcugucccucaucgccguggggcugcugcucuacugcaaggcccgguga

SEQ ID NO: 14557 - RNA, 1608 nt, Artificial Sequence
  HRSV-A/A2__P03420.1 fusion glycoprotein CDS gc (F_DSCav1_mut4)
auggagcugcucauccugaaggccaacgccaucaccaccauccugacggcggugaccuucugcuucgccagcggccagaacaucaccgaggaguucuaccaguccacgugcagcgccgucuccaagggguaccucagcgcccugcggaccggcugguacaccuccgugaucaccaucgagcugagcaacaucaaggagaacaagugcaacgggaccgacgccaaggugaagcucaucaagcaggagcuggacaaguacaagaacgcggucacggagcugcagcuccugaugcaguccaccccggcaaccggcuccggcuccgccaucugcagcggcgucgccgugugcaaggugcugcaccucgagggggaggucaacaagaucaagagcgcccugcuguccaccaacaaggccguggugagccucuccaacggcgucagcgugcugaccuucaaggugcuggaccucaagaacuacaucgacaagcagcugcugcccauccugaacaagcagagcugcuccaucagcaacaucgagacggugaucgaguuccagcagaagaacaaccggcuccuggagaucacccgcgaguucagcgugaacgccggggucaccacccccguguccacguacaugcugaccaacagcgagcuccugucccugaucaacgacaugccgaucaccaacgaccagaagaagcucaugagcaacaacgugcagaucguccggcagcaguccuacagcaucaugugcaucaucaaggaggaggugcuggcguacgugguccagcugccccucuacggcgugaucgacacccccugcuggaagcugcacacgagcccccugugcaccaccaacaccaaggagggguccaacaucugccucacgcgcaccgaccggggcugguacugcgacaacgccggcagcgucuccuucuucccgcaggccgagaccugcaaggugcagagcaaccgcguguucugcgacaccaugaacucccggacgcugcccagcgagguaaaccucugcaacgucgacaucuucaaccccaaguacgacugcaagaucaugaccuccaagaccgacgugagcuccagcgugaucaccucccugggggccaucgucagcugcuacggcaagacgaagugcaccgccagcaacaagaaccgggggaucaucaagaccuucuccaacggcugcgacuacgugagcaacaagggcguggacaccguguccgucgggaacacccuguacugcgugaacaagcaggagggcaagagccucuacgugaagggggagcccaucaucaacuucuacgacccgcuggucuuccccuccgacgaguucgacgcgagcaucucccaggugaacgagaagaucaaccagagccuggccuucauccgcaaguccgacgagcugcuccacaacgugaacgccggcaagagcacgaccaacaucaugaucaccaccaucaucaucgucaucaucgugauccugcugucccucaucgccguggggcugcugcucuacugcaaggcccggagcacgcccgucacccuguccaaggaccagcugagcggcaucaacaacaucgcguucuccaacuga

SEQ ID NO: 14558 - RNA, 1545 nt, Artificial Sequence
  HRSV-A/A2__P03420.1 fusion glycoprotein CDS gc (F-del_DSCav1_mut4)
auggagcugcucauccugaaggccaacgccaucaccaccauccugacggcggugaccuucugcuucgccagcggccagaacaucaccgaggaguucuaccaguccacgugcagcgccgucuccaagggguaccucagcgcccugcggaccggcugguacaccuccgugaucaccaucgagcugagcaacaucaaggagaacaagugcaacgggaccgacgccaaggugaagcucaucaagcaggagcuggacaaguacaagaacgcggucacggagcugcagcuccugaugcaguccaccccggcaaccggcuccggcuccgccaucugcagcggcgucgccgugugcaaggugcugcaccucgagggggaggucaacaagaucaagagcgcccugcuguccaccaacaaggccguggugagccucuccaacggcgucagcgugcugaccuucaaggugcuggaccucaagaacuacaucgacaagcagcugcugcccauccugaacaagcagagcugcuccaucagcaacaucgagacggugaucgaguuccagcagaagaacaaccggcuccuggagaucacccgcgaguucagcgugaacgccggggucaccacccccguguccacguacaugcugaccaacagcgagcuccugucccugaucaacgacaugccgaucaccaacgaccagaagaagcucaugagcaacaacgugcagaucguccggcagcaguccuacagcaucaugugcaucaucaaggaggaggugcuggcguacgugguccagcugccccucuacggcgugaucgacacccccugcuggaagcugcacacgagcccccugugcaccaccaacaccaaggagggguccaacaucugccucacgcgcaccgaccggggcugguacugcgacaacgccggcagcgucuccuucuucccgcaggccgagaccugcaaggugcagagcaaccgcguguucugcgacaccaugaacucccggacgcugcccagcgagguaaaccucugcaacgucgacaucuucaaccccaaguacgacugcaagaucaugaccuccaagaccgacgugagcuccagcgugaucaccucccugggggccaucgucagcugcuacggcaagacgaagugcaccgccagcaacaagaaccgggggaucaucaagaccuucuccaacggcugcgacuacgugagcaacaagggcguggacaccguguccgucgggaacacccuguacugcgugaacaagcaggagggcaagagccucuacgugaagggggagcccaucaucaacuucuacgacccgcuggucuuccccuccgacgaguucgacgcgagcaucucccaggugaacgagaagaucaaccagagccuggccuucauccgcaaguccgacgagcugcuccacaacgugaacgccggcaagagcacgaccaacaucaugaucaccaccaucaucaucgucaucaucgugauccugcugucccucaucgccguggggcugcugcucuacugcaaggcccgguga

SEQ ID NO: 14559 - RNA, 1611 nt, Artificial Sequence
  HRSV-A/A2__P03420.1 fusion glycoprotein CDS gc (F_DSCav1_mut5)
auggagcugcucauccugaaggccaacgccaucaccaccauccugacggcggugaccuucugcuucgccagcggccagaacaucaccgaggaguucuaccaguccacgugcagcgccgucuccaagggguaccucagcgcccugcggaccggcugguacaccuccgugaucaccaucgagcugagcaacaucaaggagaacaagugcaacgggaccgacgccaaggugaagcucaucaagcaggagcuggacaaguacaagaacgcggucacggagcugcagcuccugaugcaguccaccccggcaaccggcuccggcuccgccaucgcgagcggcgucgccgugugcaaggugcugcaccucgagggggaggucaacaagaucaagagcgcccugcuguccaccaacaaggccguggugagccucuccggcugcggcgucagcgugcugaccuucaaggugcuggaccucaagaacuacaucgacaagcagcugcugcccauccugaacaagcagagcugcuccaucagcaacaucgagacggugaucgaguuccagcagaagaacaaccggcuccuggagaucacccgcgaguucagcgugaacgccggggucaccacccccguguccacguacaugcugaccaacagcgagcuccugucccugaucaacgacaugccgaucaccaacgaccagaagaagcucaugagcaacaacgugcagaucguccggcagcaguccuacagcaucaugugcaucaucaaggaggaggugcuggcguacgugguccagcugccccucuacggcgugaucgacacccccugcuggaagcugcacacgagcccccugugcaccaccaacaccaaggagggguccaacaucugccucacgcgcaccgaccggggcugguacugcgacaacgccggcagcgucuccuucuucccgcaggccgagaccugcaaggugcagagcaaccgcguguucugcgacaccaugaacucccggacgcugcccagcgagguaaaccucugcaacgucgacaucuucaaccccaaguacgacugcaagaucaugaccuccaagaccgacgugagcuccagcgugaucaccucccugggggccaucgucagcugcuacggcaagacgaagugcaccgccagcaacaagugccgggggaucaucaagaccuucuccaacggcugcgacuacgugagcaacaagggcguggacaccguguccgucgggaacacccuguacuacgugaacaagcaggagggcaagagccucuacgugaagggggagcccaucaucaacuucuacgacccgcuggucuuccccuccgacgaguucgacgcgagcaucucccaggugaacgagaagaucaaccagagccuggccuucauccgcaaguccgacgagcugcuccacaacgugaacgccggcaagagcacgaccaacaucaugaucaccaccaucaucaucgucaucaucgugauccugcugucccucaucgccguggggcugcugcucuacugcaaggcccggagcacgcccgucacccuguccaaggaccagcugagcggcaucaacaacaucgcguucuccaacuga

SEQ ID NO: 14560 - RNA, 1548 nt, Artificial Sequence
  HRSV-A/A2__P03420.1 fusion glycoprotein CDS gc (F-del_DSCav1_mut5)
auggagcugcucauccugaaggccaacgccaucaccaccauccugacggcggugaccuucugcuucgccagcggccagaacaucaccgaggaguucuaccaguccacgugcagcgccgucuccaagggguaccucagcgcccugcggaccggcugguacaccuccgugaucaccaucgagcugagcaacaucaaggagaacaagugcaacgggaccgacgccaaggugaagcucaucaagcaggagcuggacaaguacaagaacgcggucacggagcugcagcuccugaugcaguccaccccggcaaccggcuccggcuccgccaucgcgagcggcgucgccgugugcaaggugcugcaccucgagggggaggucaacaagaucaagagcgcccugcuguccaccaacaaggccguggugagccucuccggcugcggcgucagcgugcugaccuucaaggugcuggaccucaagaacuacaucgacaagcagcugcugcccauccugaacaagcagagcugcuccaucagcaacaucgagacggugaucgaguuccagcagaagaacaaccggcuccuggagaucacccgcgaguucagcgugaacgccggggucaccacccccguguccacguacaugcugaccaacagcgagcuccugucccugaucaacgacaugccgaucaccaacgaccagaagaagcucaugagcaacaacgugcagaucguccggcagcaguccuacagcaucaugugcaucaucaaggaggaggugcuggcguacgugguccagcugccccucuacggcgugaucgacacccccugcuggaagcugcacacgagcccccugugcaccaccaacaccaaggagggguccaacaucugccucacgcgcaccgaccggggcugguacugcgacaacgccggcagcgucuccuucuucccgcaggccgagaccugcaaggugcagagcaaccgcguguucugcgacaccaugaacucccggacgcugcccagcgagguaaaccucugcaacgucgacaucuucaaccccaaguacgacugcaagaucaugaccuccaagaccgacgugagcuccagcgugaucaccucccugggggccaucgucagcugcuacggcaagacgaagugcaccgccagcaacaagugccgggggaucaucaagaccuucuccaacggcugcgacuacgugagcaacaagggcguggacaccguguccgucgggaacacccuguacuacgugaacaagcaggagggcaagagccucuacgugaagggggagcccaucaucaacuucuacgacccgcuggucuuccccuccgacgaguucgacgcgagcaucucccaggugaacgagaagaucaaccagagccuggccuucauccgcaaguccgacgagcugcuccacaacgugaacgccggcaagagcacgaccaacaucaugaucaccaccaucaucaucgucaucaucgugauccugcugucccucaucgccguggggcugcugcucuacugcaaggcccgguga

SEQ ID NO: 14561 - RNA, 585 nt, Artificial Sequence
  HRSV-A/A2__AAB86665.1 matrix protein CDS gc (M2-1)
augagccgccggaaccccugcaaguucgagauccgcggccacugccugaacgggaagcggugccacuucucccacaacuacuucgaguggccgccccacgcccuccuggugcgccagaacuucaugcugaaccggauccucaagagcauggacaaguccaucgacacccugagcgagaucuccggcgccgcggagcuggaccgcaccgaggaguacgcccucggggucgugggcgugcuggagagcuacaucggguccaucaacaacaucacgaagcagagcgccugcgucgccauguccaagcugcucaccgagcugaacagcgacgacaucaagaagcugcgggacaacgaggagcucaacucccccaagauccgcguguacaacaccgugaucagcuacaucgaguccaaccggaagaacaacaagcagaccauccaccuccugaagcgccugcccgccgacguccugaagaagacgaucaagaacacccuggacauccacaagagcaucaccaucaacaacccgaaggaguccaccgugagcgacacgaacgaccacgcgaagaacaacgacaccaccuga

SEQ ID NO: 14562 - RNA, 1725 nt, Artificial Sequence
  HRSV-A/RSVA/Homo sapiens/USA/84I-215A-01/1984__AHY21375.1 fusion glycoprotein CDS human (F0)
auggagcugcccauccucaagaccaacgccauuacaacuauacuugcugcagugacgcugugcuucgccagcucccagaauaucaccgaagaguuuuaccaaucuacauguucagcggucaguaaaggcuauuugagcgcuuuaagaacugggugguacaccuccguuauuacaaucgaacugucuaacauuaaggagaauaaaugcaacggaaccgacgccaaggugaaacuaaucaagcaggaacucgauaaguauaaaaaugcaguaacugagcugcagcuucugaugcagucgaccccugccgcuaacaauagggcacggcgcgaguugccacgauucaugaacuacacacucaauaacacgaagaauacuaacgugacccugagcaaaaagcguaaaagaagguuucuggguuuccucuuaggcgucgggucagccauagcuaguggaaucgccguguccaagguucugcaccuugaaggcgaggugaauaagauuaaaucugcguugcugagcacaaacaaggcagucgugucccuaucaaaugguguaaguguucucacuagcaaagugcuggaccuuaagaacuauaucgauaaacaacuguugccgauugucaacaagcagucuuguuccaucucaaauauagaaaccgugauugaguuucagcagaaaaacaaucggcuccuggagaucacacgcgaguucagcgugaacgccggggucaccacgcccguuaguacuuacauguuaacaaauucugaacugcucucccuuauuaacgacaugccuaucaccaaugaucaaaagaagcugaugagcaacaaugugcagaucguaagacagcagucguauucuauuauguccauaaucaaagaagagguguuggcuuacgucgugcaacuaccacuguacggaguuauugacacucccugcuggaagcuccauacaucaccucuguguaccacgaacaccaaagaaggcaguaauaucugccuuacaaggacugaucggggcugguauugugacaacgccgggagcguguccuuuuucccacaggcagagaccugcaagguccagucuaaucgcguguuuugugauacaaugaacagccugacuuugcccucagagguaaaucucugcaacauagacauuuucaacccuaaauacgauuguaagaucaugaccaguaagacagacguuuccagcucugugaucaccucacugggagcuauugucaguugcuaugguaaaacuaagugcacggccagcaauaaaaaccgaggcaucauuaagacauuuuccaaugggugugauuacgugucuaacaaaggagucgacaccgugucgguuggcaauacuuuauauuacgugaacaagcaagaagguaagagccuguauguaaaaggggagccaauaaucaauuucuacgacccgcuagucuuucccuccgaugaguucgacgcgucaauuagucaggugaacgaaaagaucaaucagucucucgccuucaucagaaaaagcgaugaacugcuucacaacguuaaugcaggaaaguccaccacaaacauuaugauaaccacuaucauuaucgugauuaucgucauauugcugucacucaucgcugugggccugcuucuguacugcaaagccaggagcacaccuguaacguugucuaaggaccagcucuccggcauuaauaacaucgcuuuuaguaauuga

SEQ ID NO: 14563 - RNA, 1725 nt, Artificial Sequence
  HRSV-A/A2__P03420.1 fusion glycoprotein CDS human (F0)
auggagcugcucauccuuaaggccaacgcuauuaccacaauacugacugcagugacguucugcuuugccagcggccagaauaucaccgaagaguucuaccaauccacauguucugcggucucaaaaggguauuugagugcuuuaagaacuggaugguacaccagcguuauuacaaucgaacuguccaacauuaaggagaauaaaugcaacgguaccgacgccaaggugaaacuaaucaagcaggaacucgauaaguauaaaaaugcaguaacugagcugcagcuucugaugcagucuacacccgccaccaacaauagggcucggcgcgaguugccucgauuuaugaacuacacgcucaauaacgcaaagaaaacuaaugugacccugucgaagaaacguaagagaagguuccugggcuuucucuuaggggucggaucagccauagcuagcggcguggccguuaguaaggugcugcaccuugaaggugaggucaacaaaaucaaguccgcguugcugucuacaaauaaagcagugguaagccuauccaacgggguuucagugcucacuucuaagguccuggaccuuaaaaauuauauugauaagcaacuguugccaaucgugaacaaacagagcuguucuauuuccaacaucgaaaccgugauagaguuccagcagaagaauaaccggcuccuggagauuacacgcgaauuuucagucaaugccggaguuaccacgccggugagcacuuacauguuaacaaacagugagcugcucucucuuaucaaugacaugcccauuaccaacgaucaaaagaaacugauguccaauaacguacagaucgugagacagcagagcuauucgaucaugucuauuauaaaggaagaggucuuggcuuacgugguucaacuaccucuguacggcgugaucgacacuccaugcuggaaacuccauacauccccacuguguaccacgaauaccaaggaaggcucaaacauuugccuuacaaggacugaucgggggugguauugugacaaugccggaagugucagcuucuuuccucaggcagagaccugcaaagugcaguccaaccgcguauucugugauacaaugaauagucugacuuugccaagcgagguuaaccucugcaauguggacaucuuuaaccccaaguacgauuguaagauaaugaccucaaaaacagacgucaguuccagcgugauuaccucucugggugcuaucgucucaugcuauggcaagacuaaaugcacggccaguaacaagaaucgagggaucauuaaaacauucagcaacggaugugauuacguguccaauaagggcguugacaccgugucuguagguaacacuuuauauuacgucaauaagcaagaagggaaaucgcuguaugugaagggagagccuaucauuaacuuuuacgacccccuaguuuucccgagcgaugaauuugacgcguccauaucacaggugaaugagaaaaucaaccagagucucgccuucauuagaaagucugaugaacugcuucacaaugucaacgcaggcaaaagcaccacaaauaucaugaucaccacuauuauaaucgugauuaucguaauuuugcugucccucaucgcugugggccugcuucuguacugcaaggccaggucaacacccguuacguugagcaaggaccagcucucugggauaaacaauaucgcuuucuccaacuga

SEQ ID NO: 14564 - RNA, 1662 nt, Artificial Sequence
  HRSV-A/A2__P03420.1 fusion glycoprotein CDS human (F-del)
auggagcugcucauccuuaaggccaacgcuauuaccacaauacugacugcagugacguucugcuuugccagcggccagaauaucaccgaagaguucuaccaauccacauguucugcggucucaaaaggguauuugagugcuuuaagaacuggaugguacaccagcguuauuacaaucgaacuguccaacauuaaggagaauaaaugcaacgguaccgacgccaaggugaaacuaaucaagcaggaacucgauaaguauaaaaaugcaguaacugagcugcagcuucugaugcagucuacacccgccaccaacaauagggcucggcgcgaguugccucgauuuaugaacuacacgcucaauaacgcaaagaaaacuaaugugacccugucgaagaaacguaagagaagguuccugggcuuucucuuaggggucggaucagccauagcuagcggcguggccguuaguaaggugcugcaccuugaaggugaggucaacaaaaucaaguccgcguugcugucuacaaauaaagcagugguaagccuauccaacgggguuucagugcucacuucuaagguccuggaccuuaaaaauuauauugauaagcaacuguugccaaucgugaacaaacagagcuguucuauuuccaacaucgaaaccgugauagaguuccagcagaagaauaaccggcuccuggagauuacacgcgaauuuucagucaaugccggaguuaccacgccggugagcacuuacauguuaacaaacagugagcugcucucucuuaucaaugacaugcccauuaccaacgaucaaaagaaacugauguccaauaacguacagaucgugagacagcagagcuauucgaucaugucuauuauaaaggaagaggucuuggcuuacgugguucaacuaccucuguacggcgugaucgacacuccaugcuggaaacuccauacauccccacuguguaccacgaauaccaaggaaggcucaaacauuugccuuacaaggacugaucgggggugguauugugacaaugccggaagugucagcuucuuuccucaggcagagaccugcaaagugcaguccaaccgcguauucugugauacaaugaauagucugacuuugccaagcgagguuaaccucugcaauguggacaucuuuaaccccaaguacgauuguaagauaaugaccucaaaaacagacgucaguuccagcgugauuaccucucugggugcuaucgucucaugcuauggcaagacuaaaugcacggccaguaacaagaaucgagggaucauuaaaacauucagcaacggaugugauuacguguccaauaagggcguugacaccgugucuguagguaacacuuuauauuacgucaauaagcaagaagggaaaucgcuguaugugaagggagagccuaucauuaacuuuuacgacccccuaguuuucccgagcgaugaauuugacgcguccauaucacaggugaaugagaaaaucaaccagagucucgccuucauuagaaagucugaugaacugcuucacaaugucaacgcaggcaaaagcaccacaaauaucaugaucaccacuauuauaaucgugauuaucguaauuuugcugucccucaucgcugugggccugcuucuguacugcaaggccagguga

SEQ ID NO: 14565 - RNA, 1725 nt, Artificial Sequence
  HRSV-A/A2__P03420.1 fusion glycoprotein CDS human (F0_DSCav1)
auggagcugcucauccuuaaggccaacgcuauuaccacaauacugacugcagugacguucugcuuugccagcggccagaauaucaccgaagaguucuaccaauccacauguucugcggucucaaaaggguauuugagugcuuuaagaacuggaugguacaccagcguuauuacaaucgaacuguccaacauuaaggagaauaaaugcaacgguaccgacgccaaggugaaacuaaucaagcaggaacucgauaaguauaaaaaugcaguaacugagcugcagcuucugaugcagucuacacccgccaccaacaauagggcucggcgcgaguugccucgauuuaugaacuacacgcucaauaacgcaaagaaaacuaaugugacccugucgaagaaacguaagagaagguuccugggcuuucucuuaggggucggaucagccauagcuagcggcguggccguuuguaaggugcugcaccuugaaggugaggucaacaaaaucaagagugcguugcuguccacaaauaaagcagugguaucucuaagcaacgggguuuccgugcucacuuucaagguccuggaccuuaaaaauuauauugauaagcaacuguugccaauccucaacaaacagucaugcaguauuagcaacaucgaaaccgugauagaguuucagcagaagaauaaccggcuguuagagauuacacgcgaguucucugugaaugccggagucaccacgccgguuuccacuuacaugcugacaaacucagaacuccuuagccugaucaaugacaugcccauuaccaacgaucaaaagaaauugaugaguaauaacgugcagaucguaagacagcagucuuauuccaucauguguauuauaaaggaagaggugcuagcuuacgucgugcaacugccucucuacggcguuaucgacacuccaugcuggaaacugcauacaagcccccuuuguaccacgaauaccaaggaaggcucgaacauuugccugacaaggacugaucgggggugguauugugacaaugccggaucuguguccuuuuucccucaggcagagaccugcaaaguccagucaaaccgcguguuuugugauacaaugaauaguuugacucucccaagcgagguaaaccugugcaauguugacaucuucaaccccaaguacgauugcaagauaaugaccuccaaaacagacgugucuagcucagucauuaccaguuuaggugcuaucguguccuguuauggcaagacuaaaugcacggccagcaacaagaaucgagggaucauuaaaacauuuucuaacggaugugauuacgucucaaauaagggcguggacaccguuaguguggguaacacucuguauuacguaaauaagcaagaagggaaaagccuauaugucaagggagagccuaucauuaacuucuacgacccacucguguucccguccgaugaauuugacgcgucuauaucgcagguuaaugagaaaaucaaccagagccuggccuucauuagaaaguccgaugaacuuuugcacaaugugaacgcaggcaaaucaaccacaaauaucaugaucaccacuauuauaaucgucauuaucgugauucugcucagucugaucgcuguaggccuucuguuguacugcaaggccaggucuacacccgugacgcucagcaaggaccagcuguccgggauaaacaauaucgcuuuuucaaacuga

SEQ ID NO: 14566 - RNA, 1662 nt, Artificial Sequence
  HRSV-A/A2__P03420.1 fusion glycoprotein CDS human (F-del_DSCav1)
auggagcugcucauccuuaaggccaacgcuauuaccacaauacugacugcagugacguucugcuuugccagcggccagaauaucaccgaagaguucuaccaauccacauguucugcggucucaaaaggguauuugagugcuuuaagaacuggaugguacaccagcguuauuacaaucgaacuguccaacauuaaggagaauaaaugcaacgguaccgacgccaaggugaaacuaaucaagcaggaacucgauaaguauaaaaaugcaguaacugagcugcagcuucugaugcagucuacacccgccaccaacaauagggcucggcgcgaguugccucgauuuaugaacuacacgcucaauaacgcaaagaaaacuaaugugacccugucgaagaaacguaagagaagguuccugggcuuucucuuaggggucggaucagccauagcuagcggcguggccguuuguaaggugcugcaccuugaaggugaggucaacaaaaucaagagugcguugcuguccacaaauaaagcagugguaucucuaagcaacgggguuuccgugcucacuuucaagguccuggaccuuaaaaauuauauugauaagcaacuguugccaauccucaacaaacagucaugcaguauuagcaacaucgaaaccgugauagaguuucagcagaagaauaaccggcuguuagagauuacacgcgaguucucugugaaugccggagucaccacgccgguuuccacuuacaugcugacaaacucagaacuccuuagccugaucaaugacaugcccauuaccaacgaucaaaagaaauugaugaguaauaacgugcagaucguaagacagcagucuuauuccaucauguguauuauaaaggaagaggugcuagcuuacgucgugcaacugccucucuacggcguuaucgacacuccaugcuggaaacugcauacaagcccccuuuguaccacgaauaccaaggaaggcucgaacauuugccugacaaggacugaucgggggugguauugugacaaugccggaucuguguccuuuuucccucaggcagagaccugcaaaguccagucaaaccgcguguuuugugauacaaugaauaguuugacucucccaagcgagguaaaccugugcaauguugacaucuucaaccccaaguacgauugcaagauaaugaccuccaaaacagacgugucuagcucagucauuaccaguuuaggugcuaucguguccuguuauggcaagacuaaaugcacggccagcaacaagaaucgagggaucauuaaaacauuuucuaacggaugugauuacgucucaaauaagggcguggacaccguuaguguggguaacacucuguauuacguaaauaagcaagaagggaaaagccuauaugucaagggagagccuaucauuaacuucuacgacccacucguguucccguccgaugaauuugacgcgucuauaucgcagguuaaugagaaaaucaaccagagccuggccuucauuagaaaguccgaugaacuuuugcacaaugugaacgcaggcaaaucaaccacaaauaucaugaucaccacuauuauaaucgucauuaucgugauucugcucagucugaucgcuguaggccuucuguuguacugcaaggccagguga

SEQ ID NO: 14567 - RNA, 1608 nt, Artificial Sequence
  HRSV-A/A2__P03420.1 fusion glycoprotein CDS human (F_DSCav1_mut4)
auggagcugcucauccuuaaggccaacgcuauuaccacaauacugacugcagugacguucugcuuugccagcggccagaauaucaccgaagaguucuaccaauccacauguucugcggucucaaaaggguauuugagugcuuuaagaacuggaugguacaccagcguuauuacaaucgaacuguccaacauuaaggagaauaaaugcaacgguaccgacgccaaggugaaacuaaucaagcaggaacucgauaaguauaaaaaugcaguaacugagcugcagcuucugaugcagucuacacccgccaccggcucggggucagcuauauguagcggaguggcagucugcaagguguugcaccucgagggcgaaguuaacaaaaucaagagugcccugcuguccacgaauaaagcuguggucucucucagcaacgguguguccguauuaacuuuuaagguucuggaccuuaagaauuacauugauaaacaauugcugccuauccuaaacaagcagucauguaguauuagcaauaucgagaccgugauagaguuccagcagaaaaacaauaggcuccuggaaauuacacgggaguuuucugucaacgccggggugacuaccccaguguccacauauaugcuuaccaauucagaacuguugagccucaucaacgacaugccgauuacgaacgaucaaaagaaacugaugaguaauaacguccagaucguucgccagcagucuuacuccaucaugugcauuauaaaggaggaaguguuagcguauguagugcaacugccccucuacggagucaucgacacuccuuguuggaaacuucauacaagcccacugugcaccacuaauacaaaggagggcucgaacauuuguuugacccgaacggaucguggcugguacugcgacaaugcagggucuguguccuucuuuccccaggccgaaaccuguaagguucagucaaacagaguguucugcgauacaaugaauaguaggacucuaccuagcgaggucaaccugugcaauguggacaucuuuaacccaaaauaugauuguaagauaaugaccuccaaaacagacguaucuagcucaguuauuaccagucucggagcuaucguguccugcuacgguaagacuaaauguacagccagcaauaagaaccggggcaucauuaagaccuucucuaaugggugcgauuaugucucaaacaaaggaguggacacugucagugugggcaauacgcuguacuguguuaacaagcaagaggguaaaagccuuuaugugaagggggaacccaucauuaacuuuuacgacccucugguauucccauccgaugaguuugacgcaucuauaucgcaggucaaugagaaaaucaaccagagcuuggcuuucauucgcaaguccgaugaacuccugcacaaugugaacgccggaaagucaacaaccaauaucaugaucacuaccauuauaaucguuauuaucgugauuuuacugagucuaaucgcggucggccuccugcuuuauugcaaagccagaucuacaccggugaccuugagcaaggaccagcuguccggcauaaacaauaucgcauucucaaacuga

SEQ ID NO: 14568 - RNA, 1545 nt, Artificial Sequence
  HRSV-A/A2__P03420.1 fusion glycoprotein CDS human (F-del_DSCav1_mut4)
auggagcugcucauccuuaaggccaacgcuauuaccacaauacugacugcagugacguucugcuuugccagcggccagaauaucaccgaagaguucuaccaauccacauguucugcggucucaaaaggguauuugagugcuuuaagaacuggaugguacaccagcguuauuacaaucgaacuguccaacauuaaggagaauaaaugcaacgguaccgacgccaaggugaaacuaaucaagcaggaacucgauaaguauaaaaaugcaguaacugagcugcagcuucugaugcagucuacacccgccaccggcucggggucagcuauauguagcggaguggcagucugcaagguguugcaccucgagggcgaaguuaacaaaaucaagagugcccugcuguccacgaauaaagcuguggucucucucagcaacgguguguccguauuaacuuuuaagguucuggaccuuaagaauuacauugauaaacaauugcugccuauccuaaacaagcagucauguaguauuagcaauaucgagaccgugauagaguuccagcagaaaaacaauaggcuccuggaaauuacacgggaguuuucugucaacgccggggugacuaccccaguguccacauauaugcuuaccaauucagaacuguugagccucaucaacgacaugccgauuacgaacgaucaaaagaaacugaugaguaauaacguccagaucguucgccagcagucuuacuccaucaugugcauuauaaaggaggaaguguuagcguauguagugcaacugccccucuacggagucaucgacacuccuuguuggaaacuucauacaagcccacugugcaccacuaauacaaaggagggcucgaacauuuguuugacccgaacggaucguggcugguacugcgacaaugcagggucuguguccuucuuuccccaggccgaaaccuguaagguucagucaaacagaguguucugcgauacaaugaauaguaggacucuaccuagcgaggucaaccugugcaauguggacaucuuuaacccaaaauaugauuguaagauaaugaccuccaaaacagacguaucuagcucaguuauuaccagucucggagcuaucguguccugcuacgguaagacuaaauguacagccagcaauaagaaccggggcaucauuaagaccuucucuaaugggugcgauuaugucucaaacaaaggaguggacacugucagugugggcaauacgcuguacuguguuaacaagcaagaggguaaaagccuuuaugugaagggggaacccaucauuaacuuuuacgacccucugguauucccauccgaugaguuugacgcaucuauaucgcaggucaaugagaaaaucaaccagagcuuggcuuucauucgcaaguccgaugaacuccugcacaaugugaacgccggaaagucaacaaccaauaucaugaucacuaccauuauaaucguuauuaucgugauuuuacugagucuaaucgcggucggccuccugcuuuauugcaaagccagauga

SEQ ID NO: 14569 - RNA, 1611 nt, Artificial Sequence
  HRSV-A/A2__P03420.1 fusion glycoprotein CDS human (F_DSCav1_mut5)
auggagcugcucauccuuaaggccaacgcuauuaccacaauacugacugcagugacguucugcuuugccagcggccagaauaucaccgaagaguucuaccaauccacauguucugcggucucaaaaggguauuugagugcuuuaagaacuggaugguacaccagcguuauuacaaucgaacuguccaacauuaaggagaauaaaugcaacgguaccgacgccaaggugaaacuaaucaagcaggaacucgauaaguauaaaaaugcaguaacugagcugcagcuucugaugcagucuacacccgccaccggcucggggucagcuauagcaagcggaguggccgucuguaagguguugcaccucgagggcgaaguuaacaaaaucaagagugcucugcuguccacgaauaaagccguggucucucucagcgguugcgggguguccguauuaacuuuuaagguucuggaccuuaagaacuacauugauaaacaauugcugccuauccuaaauaagcagucauguaguauuagcaacaucgagaccgugauagaguuccagcagaaaaauaacaggcuccuggaaauuacacgggaguuuucugucaaugcgggagugacuaccccaguguccacauauaugcuuaccaacucagaacuguugagccucaucaaugacaugccgauuacgaacgaucaaaagaaacugaugaguaacaauguccagaucguucgccagcagucuuacuccaucaugugcauuauaaaggaggaaguguuagcauauguagugcaacugccccucuacggcgucaucgacacuccuuguuggaaacuucauacaagcccacugugcaccacuaacacaaaggagggcucgaauauuuguuugacccgaacggaucgugggugguacugcgacaacgccggaucuguguccuucuuuccccaggcugaaaccuguaagguucagucaaauagaguguucugcgauacaaugaacaguaggacucuaccuagcgaggucaaucugugcaacguggacaucuuuaauccaaaauaugauuguaagauaaugaccuccaaaacagacguaucuagcucaguuauuaccagucucggugccaucguguccugcuacggcaagacuaaauguacagcaagcaacaagugccgggggaucauuaagaccuucucuaauggaugugauuaugucucaaacaaaggcguggacacugucaguguggguaauacgcuguacuauguuaacaagcaagaggggaaaagccuuuacgugaagggagaacccaucauuaauuuuuaugacccucugguauucccauccgaugaguuugacgcuucuauaucgcaggucaacgagaaaaucaaccagagcuuggccuucauucgcaaguccgaugaacuccugcacaaugugaacgcgggcaagucaacaaccaauaucaugaucacuaccauuauaaucguuauuaucgugauuuuacugagucuaaucgccgucggccuccugcuuuacugcaaagcaagaucuacaccggugaccuugagcaaggaccagcuguccgggauaaacaauaucgcuuucucaaacuga

SEQ ID NO: 14570 - RNA, 1548 nt, Artificial Sequence
  HRSV-A/A2__P03420.1 fusion glycoprotein CDS human (F-del_DSCav1_mut5)
auggagcugcucauccuuaaggccaacgcuauuaccacaauacugacugcagugacguucugcuuugccagcggccagaauaucaccgaagaguucuaccaauccacauguucugcggucucaaaaggguauuugagugcuuuaagaacuggaugguacaccagcguuauuacaaucgaacuguccaacauuaaggagaauaaaugcaacgguaccgacgccaaggugaaacuaaucaagcaggaacucgauaaguauaaaaaugcaguaacugagcugcagcuucugaugcagucuacacccgccaccggcucggggucagcuauagcaagcggaguggccgucuguaagguguugcaccucgagggcgaaguuaacaaaaucaagagugcucugcuguccacgaauaaagccguggucucucucagcgguugcgggguguccguauuaacuuuuaagguucuggaccuuaagaacuacauugauaaacaauugcugccuauccuaaauaagcagucauguaguauuagcaacaucgagaccgugauagaguuccagcagaaaaauaacaggcuccuggaaauuacacgggaguuuucugucaaugcgggagugacuaccccaguguccacauauaugcuuaccaacucagaacuguugagccucaucaaugacaugccgauuacgaacgaucaaaagaaacugaugaguaacaauguccagaucguucgccagcagucuuacuccaucaugugcauuauaaaggaggaaguguuagcauauguagugcaacugccccucuacggcgucaucgacacuccuuguuggaaacuucauacaagcccacugugcaccacuaacacaaaggagggcucgaauauuuguuugacccgaacggaucgugggugguacugcgacaacgccggaucuguguccuucuuuccccaggcugaaaccuguaagguucagucaaauagaguguucugcgauacaaugaacaguaggacucuaccuagcgaggucaaucugugcaacguggacaucuuuaauccaaaauaugauuguaagauaaugaccuccaaaacagacguaucuagcucaguuauuaccagucucggugccaucguguccugcuacggcaagacuaaauguacagcaagcaacaagugccgggggaucauuaagaccuucucuaauggaugugauuaugucucaaacaaaggcguggacacugucaguguggguaauacgcuguacuauguuaacaagcaagaggggaaaagccuuuacgugaagggagaacccaucauuaauuuuuaugacccucugguauucccauccgaugaguuugacgcuucuauaucgcaggucaacgagaaaaucaaccagagcuuggccuucauucgcaaguccgaugaacuccugcacaaugugaacgcgggcaagucaacaaccaauaucaugaucacuaccauuauaaucguuauuaucgugauuuuacugagucuaaucgccgucggccuccugcuuuacugcaaagcaagauga

SEQ ID NO: 14571 - RNA, 585 nt, Artificial Sequence
  HRSV-A/A2__AAB86665.1 matrix protein CDS human (M2-1)
augagcagaaggaaccccugcaaguucgagauccggggccacugucugaaugggaaacgcugccauuuuucccacaacuacuucgaauggccuccacaugcacuccuugugcgacagaauuuuaugcugaaccguauuuugaagucuauggacaaaucaauagauaccuuaagugagaucagcggagcugcagaacuggacagaacagaggaauaugcccuaggugucguuggcgugcucgaguccuacauugggucuaucaauaacauuacuaagcaaucggcguguguagcuaugucaaaacugcuuacggagcugaauagcgaugacaucaagaaguugagggauaacgaagaguuaaauaguccgaaaauacggguguauaacaccgucaucuccuacauugaaucuaaucgcaagaacaauaaacagacaauccaucugcugaagagacuccccgccgacgugcucaaaaagacuauuaagaacacccuggauauccacaaaagcauaacaauuaauaacccuaaggaguccaccguuucagacacuaacgaucacgccaaaaauaacgacacaaccuga

SEQ ID NO: 14572 - RNA, 1997 nt, Artificial Sequence
  HRSV-A/RSVA/Homo sapiens/USA/84I-215A-01/1984__AHY21375.1 fusion glycoprotein mRNA gc (F0)
aggagagucccgcagucggcguccagcggcucugcuuguucgugugugugucguugcaggccuuauucaagcuuaccauggagcugcccauccucaagaccaacgccaucaccacgauccuggccgcggugacccugugcuucgccagcucccagaacaucaccgaggaguucuaccagagcacgugcuccgccgucagcaagggcuaccucuccgcccugcgcaccgggugguacaccagcgugaucaccaucgagcuguccaacaucaaggagaacaagugcaacggcaccgacgccaaggugaagcucaucaagcaggagcuggacaaguacaagaacgcggucacggagcugcagcuccugaugcagagcaccccggccgccaacaaccgggcccgccgggagcugccccgcuucaugaacuacacccucaacaacaccaagaacacgaacgugacccuguccaagaagcggaagcgccgguuccugggguuccuccugggcguggggagcgcgaucgccuccggcaucgccgucagcaaggugcugcaccucgagggcgaggugaacaagaucaaguccgcccugcugagcaccaacaaggccgucgugucccucagcaacgggguguccguccugaccagcaaggugcuggaccucaagaacuacaucgacaagcagcugcugcccaucgugaacaagcaguccugcagcaucagcaacaucgagacggucaucgaguuccagcagaagaacaaccgccuccuggagaucacccgggaguucuccgugaacgcgggcgugaccacccccgucagcacguacaugcugaccaacuccgagcuccugagccugaucaacgacaugccgaucaccaacgaccagaagaagcucauguccaacaacgugcagaucgugcgccagcagagcuacuccaucaugagcaucaucaaggaggagguccuggccuacguggugcagcugccccucuacggggucaucgacacccccugcuggaagcugcacacgagcccccugugcaccaccaacaccaaggagggcagcaacaucugccucacgcggaccgaccgcgggugguacugcgacaacgccggcuccgugagcuucuucccgcaggccgagaccugcaagguccaguccaaccggguguucugcgacaccaugaacagccugacgcugcccuccgaggugaaccucugcaacaucgacaucuucaaccccaaguacgacugcaagaucaugaccagcaagaccgacgucuccagcuccgugaucaccagccugggcgccaucgugagcugcuacgggaagacgaagugcaccgcguccaacaagaaccgcggcaucaucaagaccuucagcaacgggugcgacuacgucuccaacaagggcguggacaccgugagcgucggcaacacccuguacuacgugaacaagcaggaggggaagucccucuacgugaagggcgagcccaucaucaacuucuacgacccgcuggucuuccccagcgacgaguucgacgccuccaucagccaggugaacgagaagaucaaccagucccuggccuucauccggaaguccgacgagcugcuccacaacgugaacgccgggaaguccacgaccaacaucaugaucaccaccaucaucaucgucaucaucgugauccugcugagccucaucgccgugggccugcugcucuacugcaaggcgcgcuccacgcccgucacccugagcaaggaccagcuguccgggaucaacaacaucgccuucagcaacugaggacuagucccuguucccagagcccacuuuuuuuucuuuuuuugaaauaaaauagccugucuuucagaucucaaaggcucuuuucagagccaccaaaaaaaaaaaaaaaaaaaaaaaaaaaaaaaaaaaaaaaaaaaaaaaaaaaaaaaaaaaaaaaaaaaaaaaaaaaaaaaaaaaaaaaaaaaaaaaaaaaaa

SEQ ID NO: 14573 - RNA, 1997 nt, Artificial Sequence
  HRSV-A/A2__P03420.1 fusion glycoprotein mRNA gc (F0)
aggagagucccgcagucggcguccagcggcucugcuuguucgugugugugucguugcaggccuuauucaagcuuaccauggagcugcucauccugaaggccaacgccaucaccaccauccugacggcggugaccuucugcuucgccagcggccagaacaucaccgaggaguucuaccaguccaccugcagcgccgucuccaagggguaccucagcgcccugcggacgggcugguacaccuccgugaucaccaucgagcugagcaacaucaaggagaacaagugcaacgggaccgacgccaaggugaagcucaucaagcaggagcuggacaaguacaagaacgcggucacggagcugcagcuccugaugcaguccaccccggcaaccaacaaccgcgcccggcgcgagcugccccgguucaugaacuacacccucaacaacgccaagaagacgaacgugacccugagcaagaagcgcaagcggcgcuuccugggcuuccuccugggggugggcuccgccaucgcgagcggcgucgccguguccaaggugcugcaccucgagggggaggucaacaagaucaagagcgcccugcuguccaccaacaaggccguggugagccucuccaacggcgucagcgugcugaccuccaaggugcuggaccucaagaacuacaucgacaagcagcugcugcccaucgucaacaagcagagcugcuccaucagcaacaucgagacggugaucgaguuccagcagaagaacaaccggcuccuggagaucacccgcgaguucagcgugaacgccggggucaccacccccguguccacguacaugcugaccaacagcgagcuccugucccugaucaacgacaugccgaucaccaacgaccagaagaagcucaugagcaacaacgugcagaucguccggcagcaguccuacagcaucauguccaucaucaaggaggaggugcuggcguacgugguccagcugccccucuacggcgugaucgacacccccugcuggaagcugcacacgagcccccugugcaccaccaacaccaaggagggguccaacaucugccucacgcgcaccgaccggggcugguacugcgacaacgccggcagcgucuccuucuucccgcaggccgagaccugcaaggugcagagcaaccgcguguucugcgacaccaugaacucccugacgcugcccagcgagguaaaccucugcaacgucgacaucuucaaccccaaguacgacugcaagaucaugaccuccaagaccgacgugagcuccagcgugaucaccucccugggggccaucgucagcugcuacggcaagacgaagugcaccgccagcaacaagaaccgggggaucaucaagaccuucuccaacggcugcgacuacgugagcaacaagggcguggacaccguguccgucgggaacacccuguacuacgugaacaagcaggagggcaagagccucuacgugaagggggagcccaucaucaacuucuacgacccgcuggucuuccccuccgacgaguucgacgcgagcaucucccaggugaacgagaagaucaaccagagccuggccuucauccgcaaguccgacgagcugcuccacaacgugaacgccggcaagagcacgaccaacaucaugaucaccaccaucaucaucgucaucaucgugauccugcugucccucaucgccguggggcugcugcucuacugcaaggcccggagcacgcccgucacccuguccaaggaccagcugagcggcaucaacaacaucgcguucuccaacugaggacuagucccuguucccagagcccacuuuuuuuucuuuuuuugaaauaaaauagccugucuuucagaucucaaaggcucuuuucagagccaccaaaaaaaaaaaaaaaaaaaaaaaaaaaaaaaaaaaaaaaaaaaaaaaaaaaaaaaaaaaaaaaaaaaaaaaaaaaaaaaaaaaaaaaaaaaaaaaaaaaaa

SEQ ID NO: 14574 - RNA, 1934 nt, Artificial Sequence
  HRSV-A/A2__P03420.1 fusion glycoprotein mRNA gc (F-del)
aggagagucccgcagucggcguccagcggcucugcuuguucgugugugugucguugcaggccuuauucaagcuuaccauggagcugcucauccugaaggccaacgccaucaccaccauccugacggcggugaccuucugcuucgccagcggccagaacaucaccgaggaguucuaccaguccaccugcagcgccgucuccaagggguaccucagcgcccugcggacgggcugguacaccuccgugaucaccaucgagcugagcaacaucaaggagaacaagugcaacgggaccgacgccaaggugaagcucaucaagcaggagcuggacaaguacaagaacgcggucacggagcugcagcuccugaugcaguccaccccggcaaccaacaaccgcgcccggcgcgagcugccccgguucaugaacuacacccucaacaacgccaagaagacgaacgugacccugagcaagaagcgcaagcggcgcuuccugggcuuccuccugggggugggcuccgccaucgcgagcggcgucgccguguccaaggugcugcaccucgagggggaggucaacaagaucaagagcgcccugcuguccaccaacaaggccguggugagccucuccaacggcgucagcgugcugaccuccaaggugcuggaccucaagaacuacaucgacaagcagcugcugcccaucgucaacaagcagagcugcuccaucagcaacaucgagacggugaucgaguuccagcagaagaacaaccggcuccuggagaucacccgcgaguucagcgugaacgccggggucaccacccccguguccacguacaugcugaccaacagcgagcuccugucccugaucaacgacaugccgaucaccaacgaccagaagaagcucaugagcaacaacgugcagaucguccggcagcaguccuacagcaucauguccaucaucaaggaggaggugcuggcguacgugguccagcugccccucuacggcgugaucgacacccccugcuggaagcugcacacgagcccccugugcaccaccaacaccaaggagggguccaacaucugccucacgcgcaccgaccggggcugguacugcgacaacgccggcagcgucuccuucuucccgcaggccgagaccugcaaggugcagagcaaccgcguguucugcgacaccaugaacucccugacgcugcccagcgagguaaaccucugcaacgucgacaucuucaaccccaaguacgacugcaagaucaugaccuccaagaccgacgugagcuccagcgugaucaccucccugggggccaucgucagcugcuacggcaagacgaagugcaccgccagcaacaagaaccgggggaucaucaagaccuucuccaacggcugcgacuacgugagcaacaagggcguggacaccguguccgucgggaacacccuguacuacgugaacaagcaggagggcaagagccucuacgugaagggggagcccaucaucaacuucuacgacccgcuggucuuccccuccgacgaguucgacgcgagcaucucccaggugaacgagaagaucaaccagagccuggccuucauccgcaaguccgacgagcugcuccacaacgugaacgccggcaagagcacgaccaacaucaugaucaccaccaucaucaucgucaucaucgugauccugcugucccucaucgccguggggcugcugcucuacugcaaggcccggugaggacuagucccuguucccagagcccacuuuuuuuucuuuuuuugaaauaaaauagccugucuuucagaucucaaaggcucuuuucagagccaccaaaaaaaaaaaaaaaaaaaaaaaaaaaaaaaaaaaaaaaaaaaaaaaaaaaaaaaaaaaaaaaaaaaaaaaaaaaaaaaaaaaaaaaaaaaaaaaaaaaaa

SEQ ID NO: 14575 - RNA, 1997 nt, Artificial Sequence
  HRSV-A/A2__P03420.1 fusion glycoprotein mRNA gc (F0_DSCav1)
aggagagucccgcagucggcguccagcggcucugcuuguucgugugugugucguugcaggccuuauucaagcuuaccauggagcugcucauccugaaggccaacgccaucaccaccauccugacggcggugaccuucugcuucgccagcggccagaacaucaccgaggaguucuaccaguccacgugcagcgccgucuccaagggguaccucagcgcccugcggaccggcugguacaccuccgugaucaccaucgagcugagcaacaucaaggagaacaagugcaacgggaccgacgccaaggugaagcucaucaagcaggagcuggacaaguacaagaacgcggucacggagcugcagcuccugaugcaguccaccccggcaaccaacaaccgcgcccggcgcgagcugccccgguucaugaacuacacccucaacaacgccaagaagacgaacgugacccugagcaagaagcgcaagcggcgcuuccugggcuuccuccugggggugggcuccgccaucgcgagcggcgucgccgugugcaaggugcugcaccucgagggggaggucaacaagaucaagagcgcccugcuguccaccaacaaggccguggugagccucuccaacggcgucagcgugcugaccuucaaggugcuggaccucaagaacuacaucgacaagcagcugcugcccauccugaacaagcagagcugcuccaucagcaacaucgagacggugaucgaguuccagcagaagaacaaccggcuccuggagaucacccgcgaguucagcgugaacgccggggucaccacccccguguccacguacaugcugaccaacagcgagcuccugucccugaucaacgacaugccgaucaccaacgaccagaagaagcucaugagcaacaacgugcagaucguccggcagcaguccuacagcaucaugugcaucaucaaggaggaggugcuggcguacgugguccagcugccccucuacggcgugaucgacacccccugcuggaagcugcacacgagcccccugugcaccaccaacaccaaggagggguccaacaucugccucacgcgcaccgaccggggcugguacugcgacaacgccggcagcgucuccuucuucccgcaggccgagaccugcaaggugcagagcaaccgcguguucugcgacaccaugaacucccugacgcugcccagcgagguaaaccucugcaacgucgacaucuucaaccccaaguacgacugcaagaucaugaccuccaagaccgacgugagcuccagcgugaucaccucccugggggccaucgucagcugcuacggcaagacgaagugcaccgccagcaacaagaaccgggggaucaucaagaccuucuccaacggcugcgacuacgugagcaacaagggcguggacaccguguccgucgggaacacccuguacuacgugaacaagcaggagggcaagagccucuacgugaagggggagcccaucaucaacuucuacgacccgcuggucuuccccuccgacgaguucgacgcgagcaucucccaggugaacgagaagaucaaccagagccuggccuucauccgcaaguccgacgagcugcuccacaacgugaacgccggcaagagcacgaccaacaucaugaucaccaccaucaucaucgucaucaucgugauccugcugucccucaucgccguggggcugcugcucuacugcaaggcccggagcacgcccgucacccuguccaaggaccagcugagcggcaucaacaacaucgcguucuccaacugaggacuagucccuguucccagagcccacuuuuuuuucuuuuuuugaaauaaaauagccugucuuucagaucucaaaggcucuuuucagagccaccaaaaaaaaaaaaaaaaaaaaaaaaaaaaaaaaaaaaaaaaaaaaaaaaaaaaaaaaaaaaaaaaaaaaaaaaaaaaaaaaaaaaaaaaaaaaaaaaaaaaa

SEQ ID NO: 14576 - RNA, 1934 nt, Artificial Sequence
  HRSV-A/A2__P03420.1 fusion glycoprotein mRNA gc (F-del_DSCav1)
aggagagucccgcagucggcguccagcggcucugcuuguucgugugugugucguugcaggccuuauucaagcuuaccauggagcugcucauccugaaggccaacgccaucaccaccauccugacggcggugaccuucugcuucgccagcggccagaacaucaccgaggaguucuaccaguccacgugcagcgccgucuccaagggguaccucagcgcccugcggaccggcugguacaccuccgugaucaccaucgagcugagcaacaucaaggagaacaagugcaacgggaccgacgccaaggugaagcucaucaagcaggagcuggacaaguacaagaacgcggucacggagcugcagcuccugaugcaguccaccccggcaaccaacaaccgcgcccggcgcgagcugccccgguucaugaacuacacccucaacaacgccaagaagacgaacgugacccugagcaagaagcgcaagcggcgcuuccugggcuuccuccugggggugggcuccgccaucgcgagcggcgucgccgugugcaaggugcugcaccucgagggggaggucaacaagaucaagagcgcccugcuguccaccaacaaggccguggugagccucuccaacggcgucagcgugcugaccuucaaggugcuggaccucaagaacuacaucgacaagcagcugcugcccauccugaacaagcagagcugcuccaucagcaacaucgagacggugaucgaguuccagcagaagaacaaccggcuccuggagaucacccgcgaguucagcgugaacgccggggucaccacccccguguccacguacaugcugaccaacagcgagcuccugucccugaucaacgacaugccgaucaccaacgaccagaagaagcucaugagcaacaacgugcagaucguccggcagcaguccuacagcaucaugugcaucaucaaggaggaggugcuggcguacgugguccagcugccccucuacggcgugaucgacacccccugcuggaagcugcacacgagcccccugugcaccaccaacaccaaggagggguccaacaucugccucacgcgcaccgaccggggcugguacugcgacaacgccggcagcgucuccuucuucccgcaggccgagaccugcaaggugcagagcaaccgcguguucugcgacaccaugaacucccugacgcugcccagcgagguaaaccucugcaacgucgacaucuucaaccccaaguacgacugcaagaucaugaccuccaagaccgacgugagcuccagcgugaucaccucccugggggccaucgucagcugcuacggcaagacgaagugcaccgccagcaacaagaaccgggggaucaucaagaccuucuccaacggcugcgacuacgugagcaacaagggcguggacaccguguccgucgggaacacccuguacuacgugaacaagcaggagggcaagagccucuacgugaagggggagcccaucaucaacuucuacgacccgcuggucuuccccuccgacgaguucgacgcgagcaucucccaggugaacgagaagaucaaccagagccuggccuucauccgcaaguccgacgagcugcuccacaacgugaacgccggcaagagcacgaccaacaucaugaucaccaccaucaucaucgucaucaucgugauccugcugucccucaucgccguggggcugcugcucuacugcaaggcccggugaggacuagucccuguucccagagcccacuuuuuuuucuuuuuuugaaauaaaauagccugucuuucagaucucaaaggcucuuuucagagccaccaaaaaaaaaaaaaaaaaaaaaaaaaaaaaaaaaaaaaaaaaaaaaaaaaaaaaaaaaaaaaaaaaaaaaaaaaaaaaaaaaaaaaaaaaaaaaaaaaaaaa

SEQ ID NO: 14577 - RNA, 1880 nt, Artificial Sequence
  HRSV-A/A2__P03420.1 fusion glycoprotein mRNA gc (F_DSCav1_mut4)
aggagagucccgcagucggcguccagcggcucugcuuguucgugugugugucguugcaggccuuauucaagcuuaccauggagcugcucauccugaaggccaacgccaucaccaccauccugacggcggugaccuucugcuucgccagcggccagaacaucaccgaggaguucuaccaguccacgugcagcgccgucuccaagggguaccucagcgcccugcggaccggcugguacaccuccgugaucaccaucgagcugagcaacaucaaggagaacaagugcaacgggaccgacgccaaggugaagcucaucaagcaggagcuggacaaguacaagaacgcggucacggagcugcagcuccugaugcaguccaccccggcaaccggcuccggcuccgccaucugcagcggcgucgccgugugcaaggugcugcaccucgagggggaggucaacaagaucaagagcgcccugcuguccaccaacaaggccguggugagccucuccaacggcgucagcgugcugaccuucaaggugcuggaccucaagaacuacaucgacaagcagcugcugcccauccugaacaagcagagcugcuccaucagcaacaucgagacggugaucgaguuccagcagaagaacaaccggcuccuggagaucacccgcgaguucagcgugaacgccggggucaccacccccguguccacguacaugcugaccaacagcgagcuccugucccugaucaacgacaugccgaucaccaacgaccagaagaagcucaugagcaacaacgugcagaucguccggcagcaguccuacagcaucaugugcaucaucaaggaggaggugcuggcguacgugguccagcugccccucuacggcgugaucgacacccccugcuggaagcugcacacgagcccccugugcaccaccaacaccaaggagggguccaacaucugccucacgcgcaccgaccggggcugguacugcgacaacgccggcagcgucuccuucuucccgcaggccgagaccugcaaggugcagagcaaccgcguguucugcgacaccaugaacucccggacgcugcccagcgagguaaaccucugcaacgucgacaucuucaaccccaaguacgacugcaagaucaugaccuccaagaccgacgugagcuccagcgugaucaccucccugggggccaucgucagcugcuacggcaagacgaagugcaccgccagcaacaagaaccgggggaucaucaagaccuucuccaacggcugcgacuacgugagcaacaagggcguggacaccguguccgucgggaacacccuguacugcgugaacaagcaggagggcaagagccucuacgugaagggggagcccaucaucaacuucuacgacccgcuggucuuccccuccgacgaguucgacgcgagcaucucccaggugaacgagaagaucaaccagagccuggccuucauccgcaaguccgacgagcugcuccacaacgugaacgccggcaagagcacgaccaacaucaugaucaccaccaucaucaucgucaucaucgugauccugcugucccucaucgccguggggcugcugcucuacugcaaggcccggagcacgcccgucacccuguccaaggaccagcugagcggcaucaacaacaucgcguucuccaacugaggacuagucccuguucccagagcccacuuuuuuuucuuuuuuugaaauaaaauagccugucuuucagaucucaaaggcucuuuucagagccaccaaaaaaaaaaaaaaaaaaaaaaaaaaaaaaaaaaaaaaaaaaaaaaaaaaaaaaaaaaaaaaaaaaaaaaaaaaaaaaaaaaaaaaaaaaaaaaaaaaaaa

SEQ ID NO: 14578 - RNA, 1817 nt, Artificial Sequence
  HRSV-A/A2__P03420.1 fusion glycoprotein mRNA gc (F-del_DSCav1_mut4)
aggagagucccgcagucggcguccagcggcucugcuuguucgugugugugucguugcaggccuuauucaagcuuaccauggagcugcucauccugaaggccaacgccaucaccaccauccugacggcggugaccuucugcuucgccagcggccagaacaucaccgaggaguucuaccaguccacgugcagcgccgucuccaagggguaccucagcgcccugcggaccggcugguacaccuccgugaucaccaucgagcugagcaacaucaaggagaacaagugcaacgggaccgacgccaaggugaagcucaucaagcaggagcuggacaaguacaagaacgcggucacggagcugcagcuccugaugcaguccaccccggcaaccggcuccggcuccgccaucugcagcggcgucgccgugugcaaggugcugcaccucgagggggaggucaacaagaucaagagcgcccugcuguccaccaacaaggccguggugagccucuccaacggcgucagcgugcugaccuucaaggugcuggaccucaagaacuacaucgacaagcagcugcugcccauccugaacaagcagagcugcuccaucagcaacaucgagacggugaucgaguuccagcagaagaacaaccggcuccuggagaucacccgcgaguucagcgugaacgccggggucaccacccccguguccacguacaugcugaccaacagcgagcuccugucccugaucaacgacaugccgaucaccaacgaccagaagaagcucaugagcaacaacgugcagaucguccggcagcaguccuacagcaucaugugcaucaucaaggaggaggugcuggcguacgugguccagcugccccucuacggcgugaucgacacccccugcuggaagcugcacacgagcccccugugcaccaccaacaccaaggagggguccaacaucugccucacgcgcaccgaccggggcugguacugcgacaacgccggcagcgucuccuucuucccgcaggccgagaccugcaaggugcagagcaaccgcguguucugcgacaccaugaacucccggacgcugcccagcgagguaaaccucugcaacgucgacaucuucaaccccaaguacgacugcaagaucaugaccuccaagaccgacgugagcuccagcgugaucaccucccugggggccaucgucagcugcuacggcaagacgaagugcaccgccagcaacaagaaccgggggaucaucaagaccuucuccaacggcugcgacuacgugagcaacaagggcguggacaccguguccgucgggaacacccuguacugcgugaacaagcaggagggcaagagccucuacgugaagggggagcccaucaucaacuucuacgacccgcuggucuuccccuccgacgaguucgacgcgagcaucucccaggugaacgagaagaucaaccagagccuggccuucauccgcaaguccgacgagcugcuccacaacgugaacgccggcaagagcacgaccaacaucaugaucaccaccaucaucaucgucaucaucgugauccugcugucccucaucgccguggggcugcugcucuacugcaaggcccggugaggacuagucccuguucccagagcccacuuuuuuuucuuuuuuugaaauaaaauagccugucuuucagaucucaaaggcucuuuucagagccaccaaaaaaaaaaaaaaaaaaaaaaaaaaaaaaaaaaaaaaaaaaaaaaaaaaaaaaaaaaaaaaaaaaaaaaaaaaaaaaaaaaaaaaaaaaaaaaaaaaaaa

SEQ ID NO: 14579 - RNA, 1883 nt, Artificial Sequence
  HRSV-A/A2__P03420.1 fusion glycoprotein mRNA gc (F_DSCav1_mut5)
aggagagucccgcagucggcguccagcggcucugcuuguucgugugugugucguugcaggccuuauucaagcuuaccauggagcugcucauccugaaggccaacgccaucaccaccauccugacggcggugaccuucugcuucgccagcggccagaacaucaccgaggaguucuaccaguccacgugcagcgccgucuccaagggguaccucagcgcccugcggaccggcugguacaccuccgugaucaccaucgagcugagcaacaucaaggagaacaagugcaacgggaccgacgccaaggugaagcucaucaagcaggagcuggacaaguacaagaacgcggucacggagcugcagcuccugaugcaguccaccccggcaaccggcuccggcuccgccaucgcgagcggcgucgccgugugcaaggugcugcaccucgagggggaggucaacaagaucaagagcgcccugcuguccaccaacaaggccguggugagccucuccggcugcggcgucagcgugcugaccuucaaggugcuggaccucaagaacuacaucgacaagcagcugcugcccauccugaacaagcagagcugcuccaucagcaacaucgagacggugaucgaguuccagcagaagaacaaccggcuccuggagaucacccgcgaguucagcgugaacgccggggucaccacccccguguccacguacaugcugaccaacagcgagcuccugucccugaucaacgacaugccgaucaccaacgaccagaagaagcucaugagcaacaacgugcagaucguccggcagcaguccuacagcaucaugugcaucaucaaggaggaggugcuggcguacgugguccagcugccccucuacggcgugaucgacacccccugcuggaagcugcacacgagcccccugugcaccaccaacaccaaggagggguccaacaucugccucacgcgcaccgaccggggcugguacugcgacaacgccggcagcgucuccuucuucccgcaggccgagaccugcaaggugcagagcaaccgcguguucugcgacaccaugaacucccggacgcugcccagcgagguaaaccucugcaacgucgacaucuucaaccccaaguacgacugcaagaucaugaccuccaagaccgacgugagcuccagcgugaucaccucccugggggccaucgucagcugcuacggcaagacgaagugcaccgccagcaacaagugccgggggaucaucaagaccuucuccaacggcugcgacuacgugagcaacaagggcguggacaccguguccgucgggaacacccuguacuacgugaacaagcaggagggcaagagccucuacgugaagggggagcccaucaucaacuucuacgacccgcuggucuuccccuccgacgaguucgacgcgagcaucucccaggugaacgagaagaucaaccagagccuggccuucauccgcaaguccgacgagcugcuccacaacgugaacgccggcaagagcacgaccaacaucaugaucaccaccaucaucaucgucaucaucgugauccugcugucccucaucgccguggggcugcugcucuacugcaaggcccggagcacgcccgucacccuguccaaggaccagcugagcggcaucaacaacaucgcguucuccaacugaggacuagucccuguucccagagcccacuuuuuuuucuuuuuuugaaauaaaauagccugucuuucagaucucaaaggcucuuuucagagccaccaaaaaaaaaaaaaaaaaaaaaaaaaaaaaaaaaaaaaaaaaaaaaaaaaaaaaaaaaaaaaaaaaaaaaaaaaaaaaaaaaaaaaaaaaaaaaaaaaaaaa

SEQ ID NO: 14580 - RNA, 1820 nt, Artificial Sequence
  HRSV-A/A2__P03420.1 fusion glycoprotein mRNA gc (F-del_DSCav1_mut5)
aggagagucccgcagucggcguccagcggcucugcuuguucgugugugugucguugcaggccuuauucaagcuuaccauggagcugcucauccugaaggccaacgccaucaccaccauccugacggcggugaccuucugcuucgccagcggccagaacaucaccgaggaguucuaccaguccacgugcagcgccgucuccaagggguaccucagcgcccugcggaccggcugguacaccuccgugaucaccaucgagcugagcaacaucaaggagaacaagugcaacgggaccgacgccaaggugaagcucaucaagcaggagcuggacaaguacaagaacgcggucacggagcugcagcuccugaugcaguccaccccggcaaccggcuccggcuccgccaucgcgagcggcgucgccgugugcaaggugcugcaccucgagggggaggucaacaagaucaagagcgcccugcuguccaccaacaaggccguggugagccucuccggcugcggcgucagcgugcugaccuucaaggugcuggaccucaagaacuacaucgacaagcagcugcugcccauccugaacaagcagagcugcuccaucagcaacaucgagacggugaucgaguuccagcagaagaacaaccggcuccuggagaucacccgcgaguucagcgugaacgccggggucaccacccccguguccacguacaugcugaccaacagcgagcuccugucccugaucaacgacaugccgaucaccaacgaccagaagaagcucaugagcaacaacgugcagaucguccggcagcaguccuacagcaucaugugcaucaucaaggaggaggugcuggcguacgugguccagcugccccucuacggcgugaucgacacccccugcuggaagcugcacacgagcccccugugcaccaccaacaccaaggagggguccaacaucugccucacgcgcaccgaccggggcugguacugcgacaacgccggcagcgucuccuucuucccgcaggccgagaccugcaaggugcagagcaaccgcguguucugcgacaccaugaacucccggacgcugcccagcgagguaaaccucugcaacgucgacaucuucaaccccaaguacgacugcaagaucaugaccuccaagaccgacgugagcuccagcgugaucaccucccugggggccaucgucagcugcuacggcaagacgaagugcaccgccagcaacaagugccgggggaucaucaagaccuucuccaacggcugcgacuacgugagcaacaagggcguggacaccguguccgucgggaacacccuguacuacgugaacaagcaggagggcaagagccucuacgugaagggggagcccaucaucaacuucuacgacccgcuggucuuccccuccgacgaguucgacgcgagcaucucccaggugaacgagaagaucaaccagagccuggccuucauccgcaaguccgacgagcugcuccacaacgugaacgccggcaagagcacgaccaacaucaugaucaccaccaucaucaucgucaucaucgugauccugcugucccucaucgccguggggcugcugcucuacugcaaggcccggugaggacuagucccuguucccagagcccacuuuuuuuucuuuuuuugaaauaaaauagccugucuuucagaucucaaaggcucuuuucagagccaccaaaaaaaaaaaaaaaaaaaaaaaaaaaaaaaaaaaaaaaaaaaaaaaaaaaaaaaaaaaaaaaaaaaaaaaaaaaaaaaaaaaaaaaaaaaaaaaaaaaaa

SEQ ID NO: 14581 - RNA, 857 nt, Artificial Sequence
  HRSV-A/A2__AAB86665.1 matrix protein mRNA gc (M2-1)
aggagagucccgcagucggcguccagcggcucugcuuguucgugugugugucguugcaggccuuauucaagcuuaccaugagccgccggaaccccugcaaguucgagauccgcggccacugccugaacgggaagcggugccacuucucccacaacuacuucgaguggccgccccacgcccuccuggugcgccagaacuucaugcugaaccggauccucaagagcauggacaaguccaucgacacccugagcgagaucuccggcgccgcggagcuggaccgcaccgaggaguacgcccucggggucgugggcgugcuggagagcuacaucggguccaucaacaacaucacgaagcagagcgccugcgucgccauguccaagcugcucaccgagcugaacagcgacgacaucaagaagcugcgggacaacgaggagcucaacucccccaagauccgcguguacaacaccgugaucagcuacaucgaguccaaccggaagaacaacaagcagaccauccaccuccugaagcgccugcccgccgacguccugaagaagacgaucaagaacacccuggacauccacaagagcaucaccaucaacaacccgaaggaguccaccgugagcgacacgaacgaccacgcgaagaacaacgacaccaccugaggacuagucccuguucccagagcccacuuuuuuuucuuuuuuugaaauaaaauagccugucuuucagaucucaaaggcucuuuucagagccaccaaaaaaaaaaaaaaaaaaaaaaaaaaaaaaaaaaaaaaaaaaaaaaaaaaaaaaaaaaaaaaaaaaaaaaaaaaaaaaaaaaaaaaaaaaaaaaaaaaaaa

SEQ ID NO: 14582 - RNA, 1997 nt, Artificial Sequence
  HRSV-A/RSVA/Homo sapiens/USA/84I-215A-01/1984__AHY21375.1 fusion glycoprotein mRNA human (F0)
aggagagucccgcagucggcguccagcggcucugcuuguucgugugugugucguugcaggccuuauucaagcuuaccauggagcugcccauccucaagaccaacgccauuacaacuauacuugcugcagugacgcugugcuucgccagcucccagaauaucaccgaagaguuuuaccaaucuacauguucagcggucaguaaaggcuauuugagcgcuuuaagaacugggugguacaccuccguuauuacaaucgaacugucuaacauuaaggagaauaaaugcaacggaaccgacgccaaggugaaacuaaucaagcaggaacucgauaaguauaaaaaugcaguaacugagcugcagcuucugaugcagucgaccccugccgcuaacaauagggcacggcgcgaguugccacgauucaugaacuacacacucaauaacacgaagaauacuaacgugacccugagcaaaaagcguaaaagaagguuucuggguuuccucuuaggcgucgggucagccauagcuaguggaaucgccguguccaagguucugcaccuugaaggcgaggugaauaagauuaaaucugcguugcugagcacaaacaaggcagucgugucccuaucaaaugguguaaguguucucacuagcaaagugcuggaccuuaagaacuauaucgauaaacaacuguugccgauugucaacaagcagucuuguuccaucucaaauauagaaaccgugauugaguuucagcagaaaaacaaucggcuccuggagaucacacgcgaguucagcgugaacgccggggucaccacgcccguuaguacuuacauguuaacaaauucugaacugcucucccuuauuaacgacaugccuaucaccaaugaucaaaagaagcugaugagcaacaaugugcagaucguaagacagcagucguauucuauuauguccauaaucaaagaagagguguuggcuuacgucgugcaacuaccacuguacggaguuauugacacucccugcuggaagcuccauacaucaccucuguguaccacgaacaccaaagaaggcaguaauaucugccuuacaaggacugaucggggcugguauugugacaacgccgggagcguguccuuuuucccacaggcagagaccugcaagguccagucuaaucgcguguuuugugauacaaugaacagccugacuuugcccucagagguaaaucucugcaacauagacauuuucaacccuaaauacgauuguaagaucaugaccaguaagacagacguuuccagcucugugaucaccucacugggagcuauugucaguugcuaugguaaaacuaagugcacggccagcaauaaaaaccgaggcaucauuaagacauuuuccaaugggugugauuacgugucuaacaaaggagucgacaccgugucgguuggcaauacuuuauauuacgugaacaagcaagaagguaagagccuguauguaaaaggggagccaauaaucaauuucuacgacccgcuagucuuucccuccgaugaguucgacgcgucaauuagucaggugaacgaaaagaucaaucagucucucgccuucaucagaaaaagcgaugaacugcuucacaacguuaaugcaggaaaguccaccacaaacauuaugauaaccacuaucauuaucgugauuaucgucauauugcugucacucaucgcugugggccugcuucuguacugcaaagccaggagcacaccuguaacguugucuaaggaccagcucuccggcauuaauaacaucgcuuuuaguaauugaggacuagucccuguucccagagcccacuuuuuuuucuuuuuuugaaauaaaauagccugucuuucagaucucaaaggcucuuuucagagccaccaaaaaaaaaaaaaaaaaaaaaaaaaaaaaaaaaaaaaaaaaaaaaaaaaaaaaaaaaaaaaaaaaaaaaaaaaaaaaaaaaaaaaaaaaaaaaaaaaaaaa

SEQ ID NO: 14583 - RNA, 1997 nt, Artificial Sequence
  HRSV-A/A2__P03420.1 fusion glycoprotein mRNA human (F0)
aggagagucccgcagucggcguccagcggcucugcuuguucgugugugugucguugcaggccuuauucaagcuuaccauggagcugcucauccuuaaggccaacgcuauuaccacaauacugacugcagugacguucugcuuugccagcggccagaauaucaccgaagaguucuaccaauccacauguucugcggucucaaaaggguauuugagugcuuuaagaacuggaugguacaccagcguuauuacaaucgaacuguccaacauuaaggagaauaaaugcaacgguaccgacgccaaggugaaacuaaucaagcaggaacucgauaaguauaaaaaugcaguaacugagcugcagcuucugaugcagucuacacccgccaccaacaauagggcucggcgcgaguugccucgauuuaugaacuacacgcucaauaacgcaaagaaaacuaaugugacccugucgaagaaacguaagagaagguuccugggcuuucucuuaggggucggaucagccauagcuagcggcguggccguuaguaaggugcugcaccuugaaggugaggucaacaaaaucaaguccgcguugcugucuacaaauaaagcagugguaagccuauccaacgggguuucagugcucacuucuaagguccuggaccuuaaaaauuauauugauaagcaacuguugccaaucgugaacaaacagagcuguucuauuuccaacaucgaaaccgugauagaguuccagcagaagaauaaccggcuccuggagauuacacgcgaauuuucagucaaugccggaguuaccacgccggugagcacuuacauguuaacaaacagugagcugcucucucuuaucaaugacaugcccauuaccaacgaucaaaagaaacugauguccaauaacguacagaucgugagacagcagagcuauucgaucaugucuauuauaaaggaagaggucuuggcuuacgugguucaacuaccucuguacggcgugaucgacacuccaugcuggaaacuccauacauccccacuguguaccacgaauaccaaggaaggcucaaacauuugccuuacaaggacugaucgggggugguauugugacaaugccggaagugucagcuucuuuccucaggcagagaccugcaaagugcaguccaaccgcguauucugugauacaaugaauagucugacuuugccaagcgagguuaaccucugcaauguggacaucuuuaaccccaaguacgauuguaagauaaugaccucaaaaacagacgucaguuccagcgugauuaccucucugggugcuaucgucucaugcuauggcaagacuaaaugcacggccaguaacaagaaucgagggaucauuaaaacauucagcaacggaugugauuacguguccaauaagggcguugacaccgugucuguagguaacacuuuauauuacgucaauaagcaagaagggaaaucgcuguaugugaagggagagccuaucauuaacuuuuacgacccccuaguuuucccgagcgaugaauuugacgcguccauaucacaggugaaugagaaaaucaaccagagucucgccuucauuagaaagucugaugaacugcuucacaaugucaacgcaggcaaaagcaccacaaauaucaugaucaccacuauuauaaucgugauuaucguaauuuugcugucccucaucgcugugggccugcuucuguacugcaaggccaggucaacacccguuacguugagcaaggaccagcucucugggauaaacaauaucgcuuucuccaacugaggacuagucccuguucccagagcccacuuuuuuuucuuuuuuugaaauaaaauagccugucuuucagaucucaaaggcucuuuucagagccaccaaaaaaaaaaaaaaaaaaaaaaaaaaaaaaaaaaaaaaaaaaaaaaaaaaaaaaaaaaaaaaaaaaaaaaaaaaaaaaaaaaaaaaaaaaaaaaaaaaaaa

SEQ ID NO: 14584 - RNA, 1934 nt, Artificial Sequence
  HRSV-A/A2__P03420.1 fusion glycoprotein mRNA human (F-del)
aggagagucccgcagucggcguccagcggcucugcuuguucgugugugugucguugcaggccuuauucaagcuuaccauggagcugcucauccuuaaggccaacgcuauuaccacaauacugacugcagugacguucugcuuugccagcggccagaauaucaccgaagaguucuaccaauccacauguucugcggucucaaaaggguauuugagugcuuuaagaacuggaugguacaccagcguuauuacaaucgaacuguccaacauuaaggagaauaaaugcaacgguaccgacgccaaggugaaacuaaucaagcaggaacucgauaaguauaaaaaugcaguaacugagcugcagcuucugaugcagucuacacccgccaccaacaauagggcucggcgcgaguugccucgauuuaugaacuacacgcucaauaacgcaaagaaaacuaaugugacccugucgaagaaacguaagagaagguuccugggcuuucucuuaggggucggaucagccauagcuagcggcguggccguuaguaaggugcugcaccuugaaggugaggucaacaaaaucaaguccgcguugcugucuacaaauaaagcagugguaagccuauccaacgggguuucagugcucacuucuaagguccuggaccuuaaaaauuauauugauaagcaacuguugccaaucgugaacaaacagagcuguucuauuuccaacaucgaaaccgugauagaguuccagcagaagaauaaccggcuccuggagauuacacgcgaauuuucagucaaugccggaguuaccacgccggugagcacuuacauguuaacaaacagugagcugcucucucuuaucaaugacaugcccauuaccaacgaucaaaagaaacugauguccaauaacguacagaucgugagacagcagagcuauucgaucaugucuauuauaaaggaagaggucuuggcuuacgugguucaacuaccucuguacggcgugaucgacacuccaugcuggaaacuccauacauccccacuguguaccacgaauaccaaggaaggcucaaacauuugccuuacaaggacugaucgggggugguauugugacaaugccggaagugucagcuucuuuccucaggcagagaccugcaaagugcaguccaaccgcguauucugugauacaaugaauagucugacuuugccaagcgagguuaaccucugcaauguggacaucuuuaaccccaaguacgauuguaagauaaugaccucaaaaacagacgucaguuccagcgugauuaccucucugggugcuaucgucucaugcuauggcaagacuaaaugcacggccaguaacaagaaucgagggaucauuaaaacauucagcaacggaugugauuacguguccaauaagggcguugacaccgugucuguagguaacacuuuauauuacgucaauaagcaagaagggaaaucgcuguaugugaagggagagccuaucauuaacuuuuacgacccccuaguuuucccgagcgaugaauuugacgcguccauaucacaggugaaugagaaaaucaaccagagucucgccuucauuagaaagucugaugaacugcuucacaaugucaacgcaggcaaaagcaccacaaauaucaugaucaccacuauuauaaucgugauuaucguaauuuugcugucccucaucgcugugggccugcuucuguacugcaaggccaggugaggacuagucccuguucccagagcccacuuuuuuuucuuuuuuugaaauaaaauagccugucuuucagaucucaaaggcucuuuucagagccaccaaaaaaaaaaaaaaaaaaaaaaaaaaaaaaaaaaaaaaaaaaaaaaaaaaaaaaaaaaaaaaaaaaaaaaaaaaaaaaaaaaaaaaaaaaaaaaaaaaaaa

SEQ ID NO: 14585 - RNA, 1997 nt, Artificial Sequence
  HRSV-A/A2__P03420.1 fusion glycoprotein mRNA human (F0_DSCav1)
aggagagucccgcagucggcguccagcggcucugcuuguucgugugugugucguugcaggccuuauucaagcuuaccauggagcugcucauccuuaaggccaacgcuauuaccacaauacugacugcagugacguucugcuuugccagcggccagaauaucaccgaagaguucuaccaauccacauguucugcggucucaaaaggguauuugagugcuuuaagaacuggaugguacaccagcguuauuacaaucgaacuguccaacauuaaggagaauaaaugcaacgguaccgacgccaaggugaaacuaaucaagcaggaacucgauaaguauaaaaaugcaguaacugagcugcagcuucugaugcagucuacacccgccaccaacaauagggcucggcgcgaguugccucgauuuaugaacuacacgcucaauaacgcaaagaaaacuaaugugacccugucgaagaaacguaagagaagguuccugggcuuucucuuaggggucggaucagccauagcuagcggcguggccguuuguaaggugcugcaccuugaaggugaggucaacaaaaucaagagugcguugcuguccacaaauaaagcagugguaucucuaagcaacgggguuuccgugcucacuuucaagguccuggaccuuaaaaauuauauugauaagcaacuguugccaauccucaacaaacagucaugcaguauuagcaacaucgaaaccgugauagaguuucagcagaagaauaaccggcuguuagagauuacacgcgaguucucugugaaugccggagucaccacgccgguuuccacuuacaugcugacaaacucagaacuccuuagccugaucaaugacaugcccauuaccaacgaucaaaagaaauugaugaguaauaacgugcagaucguaagacagcagucuuauuccaucauguguauuauaaaggaagaggugcuagcuuacgucgugcaacugccucucuacggcguuaucgacacuccaugcuggaaacugcauacaagcccccuuuguaccacgaauaccaaggaaggcucgaacauuugccugacaaggacugaucgggggugguauugugacaaugccggaucuguguccuuuuucccucaggcagagaccugcaaaguccagucaaaccgcguguuuugugauacaaugaauaguuugacucucccaagcgagguaaaccugugcaauguugacaucuucaaccccaaguacgauugcaagauaaugaccuccaaaacagacgugucuagcucagucauuaccaguuuaggugcuaucguguccuguuauggcaagacuaaaugcacggccagcaacaagaaucgagggaucauuaaaacauuuucuaacggaugugauuacgucucaaauaagggcguggacaccguuaguguggguaacacucuguauuacguaaauaagcaagaagggaaaagccuauaugucaagggagagccuaucauuaacuucuacgacccacucguguucccguccgaugaauuugacgcgucuauaucgcagguuaaugagaaaaucaaccagagccuggccuucauuagaaaguccgaugaacuuuugcacaaugugaacgcaggcaaaucaaccacaaauaucaugaucaccacuauuauaaucgucauuaucgugauucugcucagucugaucgcuguaggccuucuguuguacugcaaggccaggucuacacccgugacgcucagcaaggaccagcuguccgggauaaacaauaucgcuuuuucaaacugaggacuagucccuguucccagagcccacuuuuuuuucuuuuuuugaaauaaaauagccugucuuucagaucucaaaggcucuuuucagagccaccaaaaaaaaaaaaaaaaaaaaaaaaaaaaaaaaaaaaaaaaaaaaaaaaaaaaaaaaaaaaaaaaaaaaaaaaaaaaaaaaaaaaaaaaaaaaaaaaaaaaa

SEQ ID NO: 14586 - RNA, 1934 nt, Artificial Sequence
  HRSV-A/A2__P03420.1 fusion glycoprotein mRNA human (F-del_DSCav1)
aggagagucccgcagucggcguccagcggcucugcuuguucgugugugugucguugcaggccuuauucaagcuuaccauggagcugcucauccuuaaggccaacgcuauuaccacaauacugacugcagugacguucugcuuugccagcggccagaauaucaccgaagaguucuaccaauccacauguucugcggucucaaaaggguauuugagugcuuuaagaacuggaugguacaccagcguuauuacaaucgaacuguccaacauuaaggagaauaaaugcaacgguaccgacgccaaggugaaacuaaucaagcaggaacucgauaaguauaaaaaugcaguaacugagcugcagcuucugaugcagucuacacccgccaccaacaauagggcucggcgcgaguugccucgauuuaugaacuacacgcucaauaacgcaaagaaaacuaaugugacccugucgaagaaacguaagagaagguuccugggcuuucucuuaggggucggaucagccauagcuagcggcguggccguuuguaaggugcugcaccuugaaggugaggucaacaaaaucaagagugcguugcuguccacaaauaaagcagugguaucucuaagcaacgggguuuccgugcucacuuucaagguccuggaccuuaaaaauuauauugauaagcaacuguugccaauccucaacaaacagucaugcaguauuagcaacaucgaaaccgugauagaguuucagcagaagaauaaccggcuguuagagauuacacgcgaguucucugugaaugccggagucaccacgccgguuuccacuuacaugcugacaaacucagaacuccuuagccugaucaaugacaugcccauuaccaacgaucaaaagaaauugaugaguaauaacgugcagaucguaagacagcagucuuauuccaucauguguauuauaaaggaagaggugcuagcuuacgucgugcaacugccucucuacggcguuaucgacacuccaugcuggaaacugcauacaagcccccuuuguaccacgaauaccaaggaaggcucgaacauuugccugacaaggacugaucgggggugguauugugacaaugccggaucuguguccuuuuucccucaggcagagaccugcaaaguccagucaaaccgcguguuuugugauacaaugaauaguuugacucucccaagcgagguaaaccugugcaauguugacaucuucaaccccaaguacgauugcaagauaaugaccuccaaaacagacgugucuagcucagucauuaccaguuuaggugcuaucguguccuguuauggcaagacuaaaugcacggccagcaacaagaaucgagggaucauuaaaacauuuucuaacggaugugauuacgucucaaauaagggcguggacaccguuaguguggguaacacucuguauuacguaaauaagcaagaagggaaaagccuauaugucaagggagagccuaucauuaacuucuacgacccacucguguucccguccgaugaauuugacgcgucuauaucgcagguuaaugagaaaaucaaccagagccuggccuucauuagaaaguccgaugaacuuuugcacaaugugaacgcaggcaaaucaaccacaaauaucaugaucaccacuauuauaaucgucauuaucgugauucugcucagucugaucgcuguaggccuucuguuguacugcaaggccaggugaggacuagucccuguucccagagcccacuuuuuuuucuuuuuuugaaauaaaauagccugucuuucagaucucaaaggcucuuuucagagccaccaaaaaaaaaaaaaaaaaaaaaaaaaaaaaaaaaaaaaaaaaaaaaaaaaaaaaaaaaaaaaaaaaaaaaaaaaaaaaaaaaaaaaaaaaaaaaaaaaaaaa

SEQ ID NO: 14587 - RNA, 1880 nt, Artificial Sequence
  HRSV-A/A2__P03420.1 fusion glycoprotein mRNA human (F_DSCav1_mut4)
aggagagucccgcagucggcguccagcggcucugcuuguucgugugugugucguugcaggccuuauucaagcuuaccauggagcugcucauccuuaaggccaacgcuauuaccacaauacugacugcagugacguucugcuuugccagcggccagaauaucaccgaagaguucuaccaauccacauguucugcggucucaaaaggguauuugagugcuuuaagaacuggaugguacaccagcguuauuacaaucgaacuguccaacauuaaggagaauaaaugcaacgguaccgacgccaaggugaaacuaaucaagcaggaacucgauaaguauaaaaaugcaguaacugagcugcagcuucugaugcagucuacacccgccaccggcucggggucagcuauauguagcggaguggcagucugcaagguguugcaccucgagggcgaaguuaacaaaaucaagagugcccugcuguccacgaauaaagcuguggucucucucagcaacgguguguccguauuaacuuuuaagguucuggaccuuaagaauuacauugauaaacaauugcugccuauccuaaacaagcagucauguaguauuagcaauaucgagaccgugauagaguuccagcagaaaaacaauaggcuccuggaaauuacacgggaguuuucugucaacgccggggugacuaccccaguguccacauauaugcuuaccaauucagaacuguugagccucaucaacgacaugccgauuacgaacgaucaaaagaaacugaugaguaauaacguccagaucguucgccagcagucuuacuccaucaugugcauuauaaaggaggaaguguuagcguauguagugcaacugccccucuacggagucaucgacacuccuuguuggaaacuucauacaagcccacugugcaccacuaauacaaaggagggcucgaacauuuguuugacccgaacggaucguggcugguacugcgacaaugcagggucuguguccuucuuuccccaggccgaaaccuguaagguucagucaaacagaguguucugcgauacaaugaauaguaggacucuaccuagcgaggucaaccugugcaauguggacaucuuuaacccaaaauaugauuguaagauaaugaccuccaaaacagacguaucuagcucaguuauuaccagucucggagcuaucguguccugcuacgguaagacuaaauguacagccagcaauaagaaccggggcaucauuaagaccuucucuaaugggugcgauuaugucucaaacaaaggaguggacacugucagugugggcaauacgcuguacuguguuaacaagcaagaggguaaaagccuuuaugugaagggggaacccaucauuaacuuuuacgacccucugguauucccauccgaugaguuugacgcaucuauaucgcaggucaaugagaaaaucaaccagagcuuggcuuucauucgcaaguccgaugaacuccugcacaaugugaacgccggaaagucaacaaccaauaucaugaucacuaccauuauaaucguuauuaucgugauuuuacugagucuaaucgcggucggccuccugcuuuauugcaaagccagaucuacaccggugaccuugagcaaggaccagcuguccggcauaaacaauaucgcauucucaaacugaggacuagucccuguucccagagcccacuuuuuuuucuuuuuuugaaauaaaauagccugucuuucagaucucaaaggcucuuuucagagccaccaaaaaaaaaaaaaaaaaaaaaaaaaaaaaaaaaaaaaaaaaaaaaaaaaaaaaaaaaaaaaaaaaaaaaaaaaaaaaaaaaaaaaaaaaaaaaaaaaaaaa

SEQ ID NO: 14588 - RNA, 1817 nt, Artificial Sequence
  HRSV-A/A2__P03420.1 fusion glycoprotein mRNA human (F-del_DSCav1_mut4)
aggagagucccgcagucggcguccagcggcucugcuuguucgugugugugucguugcaggccuuauucaagcuuaccauggagcugcucauccuuaaggccaacgcuauuaccacaauacugacugcagugacguucugcuuugccagcggccagaauaucaccgaagaguucuaccaauccacauguucugcggucucaaaaggguauuugagugcuuuaagaacuggaugguacaccagcguuauuacaaucgaacuguccaacauuaaggagaauaaaugcaacgguaccgacgccaaggugaaacuaaucaagcaggaacucgauaaguauaaaaaugcaguaacugagcugcagcuucugaugcagucuacacccgccaccggcucggggucagcuauauguagcggaguggcagucugcaagguguugcaccucgagggcgaaguuaacaaaaucaagagugcccugcuguccacgaauaaagcuguggucucucucagcaacgguguguccguauuaacuuuuaagguucuggaccuuaagaauuacauugauaaacaauugcugccuauccuaaacaagcagucauguaguauuagcaauaucgagaccgugauagaguuccagcagaaaaacaauaggcuccuggaaauuacacgggaguuuucugucaacgccggggugacuaccccaguguccacauauaugcuuaccaauucagaacuguugagccucaucaacgacaugccgauuacgaacgaucaaaagaaacugaugaguaauaacguccagaucguucgccagcagucuuacuccaucaugugcauuauaaaggaggaaguguuagcguauguagugcaacugccccucuacggagucaucgacacuccuuguuggaaacuucauacaagcccacugugcaccacuaauacaaaggagggcucgaacauuuguuugacccgaacggaucguggcugguacugcgacaaugcagggucuguguccuucuuuccccaggccgaaaccuguaagguucagucaaacagaguguucugcgauacaaugaauaguaggacucuaccuagcgaggucaaccugugcaauguggacaucuuuaacccaaaauaugauuguaagauaaugaccuccaaaacagacguaucuagcucaguuauuaccagucucggagcuaucguguccugcuacgguaagacuaaauguacagccagcaauaagaaccggggcaucauuaagaccuucucuaaugggugcgauuaugucucaaacaaaggaguggacacugucagugugggcaauacgcuguacuguguuaacaagcaagaggguaaaagccuuuaugugaagggggaacccaucauuaacuuuuacgacccucugguauucccauccgaugaguuugacgcaucuauaucgcaggucaaugagaaaaucaaccagagcuuggcuuucauucgcaaguccgaugaacuccugcacaaugugaacgccggaaagucaacaaccaauaucaugaucacuaccauuauaaucguuauuaucgugauuuuacugagucuaaucgcggucggccuccugcuuuauugcaaagccagaugaggacuagucccuguucccagagcccacuuuuuuuucuuuuuuugaaauaaaauagccugucuuucagaucucaaaggcucuuuucagagccaccaaaaaaaaaaaaaaaaaaaaaaaaaaaaaaaaaaaaaaaaaaaaaaaaaaaaaaaaaaaaaaaaaaaaaaaaaaaaaaaaaaaaaaaaaaaaaaaaaaaaa

SEQ ID NO: 14589 - RNA, 1883 nt, Artificial Sequence
  HRSV-A/A2__P03420.1 fusion glycoprotein mRNA human (F_DSCav1_mut5)
aggagagucccgcagucggcguccagcggcucugcuuguucgugugugugucguugcaggccuuauucaagcuuaccauggagcugcucauccuuaaggccaacgcuauuaccacaauacugacugcagugacguucugcuuugccagcggccagaauaucaccgaagaguucuaccaauccacauguucugcggucucaaaaggguauuugagugcuuuaagaacuggaugguacaccagcguuauuacaaucgaacuguccaacauuaaggagaauaaaugcaacgguaccgacgccaaggugaaacuaaucaagcaggaacucgauaaguauaaaaaugcaguaacugagcugcagcuucugaugcagucuacacccgccaccggcucggggucagcuauagcaagcggaguggccgucuguaagguguugcaccucgagggcgaaguuaacaaaaucaagagugcucugcuguccacgaauaaagccguggucucucucagcgguugcgggguguccguauuaacuuuuaagguucuggaccuuaagaacuacauugauaaacaauugcugccuauccuaaauaagcagucauguaguauuagcaacaucgagaccgugauagaguuccagcagaaaaauaacaggcuccuggaaauuacacgggaguuuucugucaaugcgggagugacuaccccaguguccacauauaugcuuaccaacucagaacuguugagccucaucaaugacaugccgauuacgaacgaucaaaagaaacugaugaguaacaauguccagaucguucgccagcagucuuacuccaucaugugcauuauaaaggaggaaguguuagcauauguagugcaacugccccucuacggcgucaucgacacuccuuguuggaaacuucauacaagcccacugugcaccacuaacacaaaggagggcucgaauauuuguuugacccgaacggaucgugggugguacugcgacaacgccggaucuguguccuucuuuccccaggcugaaaccuguaagguucagucaaauagaguguucugcgauacaaugaacaguaggacucuaccuagcgaggucaaucugugcaacguggacaucuuuaauccaaaauaugauuguaagauaaugaccuccaaaacagacguaucuagcucaguuauuaccagucucggugccaucguguccugcuacggcaagacuaaauguacagcaagcaacaagugccgggggaucauuaagaccuucucuaauggaugugauuaugucucaaacaaaggcguggacacugucaguguggguaauacgcuguacuauguuaacaagcaagaggggaaaagccuuuacgugaagggagaacccaucauuaauuuuuaugacccucugguauucccauccgaugaguuugacgcuucuauaucgcaggucaacgagaaaaucaaccagagcuuggccuucauucgcaaguccgaugaacuccugcacaaugugaacgcgggcaagucaacaaccaauaucaugaucacuaccauuauaaucguuauuaucgugauuuuacugagucuaaucgccgucggccuccugcuuuacugcaaagcaagaucuacaccggugaccuugagcaaggaccagcuguccgggauaaacaauaucgcuuucucaaacugaggacuagucccuguucccagagcccacuuuuuuuucuuuuuuugaaauaaaauagccugucuuucagaucucaaaggcucuuuucagagccaccaaaaaaaaaaaaaaaaaaaaaaaaaaaaaaaaaaaaaaaaaaaaaaaaaaaaaaaaaaaaaaaaaaaaaaaaaaaaaaaaaaaaaaaaaaaaaaaaaaaaa

SEQ ID NO: 14590 - RNA, 1820 nt, Artificial Sequence
  HRSV-A/A2__P03420.1 fusion glycoprotein mRNA human (F-del_DSCav1_mut5)
aggagagucccgcagucggcguccagcggcucugcuuguucgugugugugucguugcaggccuuauucaagcuuaccauggagcugcucauccuuaaggccaacgcuauuaccacaauacugacugcagugacguucugcuuugccagcggccagaauaucaccgaagaguucuaccaauccacauguucugcggucucaaaaggguauuugagugcuuuaagaacuggaugguacaccagcguuauuacaaucgaacuguccaacauuaaggagaauaaaugcaacgguaccgacgccaaggugaaacuaaucaagcaggaacucgauaaguauaaaaaugcaguaacugagcugcagcuucugaugcagucuacacccgccaccggcucggggucagcuauagcaagcggaguggccgucuguaagguguugcaccucgagggcgaaguuaacaaaaucaagagugcucugcuguccacgaauaaagccguggucucucucagcgguugcgggguguccguauuaacuuuuaagguucuggaccuuaagaacuacauugauaaacaauugcugccuauccuaaauaagcagucauguaguauuagcaacaucgagaccgugauagaguuccagcagaaaaauaacaggcuccuggaaauuacacgggaguuuucugucaaugcgggagugacuaccccaguguccacauauaugcuuaccaacucagaacuguugagccucaucaaugacaugccgauuacgaacgaucaaaagaaacugaugaguaacaauguccagaucguucgccagcagucuuacuccaucaugugcauuauaaaggaggaaguguuagcauauguagugcaacugccccucuacggcgucaucgacacuccuuguuggaaacuucauacaagcccacugugcaccacuaacacaaaggagggcucgaauauuuguuugacccgaacggaucgugggugguacugcgacaacgccggaucuguguccuucuuuccccaggcugaaaccuguaagguucagucaaauagaguguucugcgauacaaugaacaguaggacucuaccuagcgaggucaaucugugcaacguggacaucuuuaauccaaaauaugauuguaagauaaugaccuccaaaacagacguaucuagcucaguuauuaccagucucggugccaucguguccugcuacggcaagacuaaauguacagcaagcaacaagugccgggggaucauuaagaccuucucuaauggaugugauuaugucucaaacaaaggcguggacacugucaguguggguaauacgcuguacuauguuaacaagcaagaggggaaaagccuuuacgugaagggagaacccaucauuaauuuuuaugacccucugguauucccauccgaugaguuugacgcuucuauaucgcaggucaacgagaaaaucaaccagagcuuggccuucauucgcaaguccgaugaacuccugcacaaugugaacgcgggcaagucaacaaccaauaucaugaucacuaccauuauaaucguuauuaucgugauuuuacugagucuaaucgccgucggccuccugcuuuacugcaaagcaagaugaggacuagucccuguucccagagcccacuuuuuuuucuuuuuuugaaauaaaauagccugucuuucagaucucaaaggcucuuuucagagccaccaaaaaaaaaaaaaaaaaaaaaaaaaaaaaaaaaaaaaaaaaaaaaaaaaaaaaaaaaaaaaaaaaaaaaaaaaaaaaaaaaaaaaaaaaaaaaaaaaaaaa

SEQ ID NO: 14591 - RNA, 857 nt, Artificial Sequence
  HRSV-A/A2__AAB86665.1 matrix protein mRNA human (M2-1)
aggagagucccgcagucggcguccagcggcucugcuuguucgugugugugucguugcaggccuuauucaagcuuaccaugagcagaaggaaccccugcaaguucgagauccggggccacugucugaaugggaaacgcugccauuuuucccacaacuacuucgaauggccuccacaugcacuccuugugcgacagaauuuuaugcugaaccguauuuugaagucuauggacaaaucaauagauaccuuaagugagaucagcggagcugcagaacuggacagaacagaggaauaugcccuaggugucguuggcgugcucgaguccuacauugggucuaucaauaacauuacuaagcaaucggcguguguagcuaugucaaaacugcuuacggagcugaauagcgaugacaucaagaaguugagggauaacgaagaguuaaauaguccgaaaauacggguguauaacaccgucaucuccuacauugaaucuaaucgcaagaacaauaaacagacaauccaucugcugaagagacuccccgccgacgugcucaaaaagacuauuaagaacacccuggauauccacaaaagcauaacaauuaauaacccuaaggaguccaccguuucagacacuaacgaucacgccaaaaauaacgacacaaccugaggacuagucccuguucccagagcccacuuuuuuuucuuuuuuugaaauaaaauagccugucuuucagaucucaaaggcucuuuucagagccaccaaaaaaaaaaaaaaaaaaaaaaaaaaaaaaaaaaaaaaaaaaaaaaaaaaaaaaaaaaaaaaaaaaaaaaaaaaaaaaaaaaaaaaaaaaaaaaaaaaaaa

SEQ ID NO: 14592 - RNA, 1942 nt, Artificial Sequence
  HRSV-A/RSVA/Homo sapiens/USA/84I-215A-01/1984__AHY21375.1 fusion glycoprotein mRNA gc (F0)
aggagaaagcuuaccauggagcugcccauccucaagaccaacgccaucaccacgauccuggccgcggugacccugugcuucgccagcucccagaacaucaccgaggaguucuaccagagcacgugcuccgccgucagcaagggcuaccucuccgcccugcgcaccgggugguacaccagcgugaucaccaucgagcuguccaacaucaaggagaacaagugcaacggcaccgacgccaaggugaagcucaucaagcaggagcuggacaaguacaagaacgcggucacggagcugcagcuccugaugcagagcaccccggccgccaacaaccgggcccgccgggagcugccccgcuucaugaacuacacccucaacaacaccaagaacacgaacgugacccuguccaagaagcggaagcgccgguuccugggguuccuccugggcguggggagcgcgaucgccuccggcaucgccgucagcaaggugcugcaccucgagggcgaggugaacaagaucaaguccgcccugcugagcaccaacaaggccgucgugucccucagcaacgggguguccguccugaccagcaaggugcuggaccucaagaacuacaucgacaagcagcugcugcccaucgugaacaagcaguccugcagcaucagcaacaucgagacggucaucgaguuccagcagaagaacaaccgccuccuggagaucacccgggaguucuccgugaacgcgggcgugaccacccccgucagcacguacaugcugaccaacuccgagcuccugagccugaucaacgacaugccgaucaccaacgaccagaagaagcucauguccaacaacgugcagaucgugcgccagcagagcuacuccaucaugagcaucaucaaggaggagguccuggccuacguggugcagcugccccucuacggggucaucgacacccccugcuggaagcugcacacgagcccccugugcaccaccaacaccaaggagggcagcaacaucugccucacgcggaccgaccgcgggugguacugcgacaacgccggcuccgugagcuucuucccgcaggccgagaccugcaagguccaguccaaccggguguucugcgacaccaugaacagccugacgcugcccuccgaggugaaccucugcaacaucgacaucuucaaccccaaguacgacugcaagaucaugaccagcaagaccgacgucuccagcuccgugaucaccagccugggcgccaucgugagcugcuacgggaagacgaagugcaccgcguccaacaagaaccgcggcaucaucaagaccuucagcaacgggugcgacuacgucuccaacaagggcguggacaccgugagcgucggcaacacccuguacuacgugaacaagcaggaggggaagucccucuacgugaagggcgagcccaucaucaacuucuacgacccgcuggucuuccccagcgacgaguucgacgccuccaucagccaggugaacgagaagaucaaccagucccuggccuucauccggaaguccgacgagcugcuccacaacgugaacgccgggaaguccacgaccaacaucaugaucaccaccaucaucaucgucaucaucgugauccugcugagccucaucgccgugggccugcugcucuacugcaaggcgcgcuccacgcccgucacccugagcaaggaccagcuguccgggaucaacaacaucgccuucagcaacugaggacuaguuauaagacugacuagcccgaugggccucccaacgggcccuccuccccuccuugcaccgagauuaauaaaaaaaaaaaaaaaaaaaaaaaaaaaaaaaaaaaaaaaaaaaaaaaaaaaaaaaaaaaaaaaaugcaucccccccccccccccccccccccccccccccaaaggcucuuuucagagccaccagaauu

SEQ ID NO: 14593 - RNA, 1942 nt, Artificial Sequence
  HRSV-A/A2__P03420.1 fusion glycoprotein mRNA gc (F0)
aggagaaagcuuaccauggagcugcucauccugaaggccaacgccaucaccaccauccugacggcggugaccuucugcuucgccagcggccagaacaucaccgaggaguucuaccaguccaccugcagcgccgucuccaagggguaccucagcgcccugcggacgggcugguacaccuccgugaucaccaucgagcugagcaacaucaaggagaacaagugcaacgggaccgacgccaaggugaagcucaucaagcaggagcuggacaaguacaagaacgcggucacggagcugcagcuccugaugcaguccaccccggcaaccaacaaccgcgcccggcgcgagcugccccgguucaugaacuacacccucaacaacgccaagaagacgaacgugacccugagcaagaagcgcaagcggcgcuuccugggcuuccuccugggggugggcuccgccaucgcgagcggcgucgccguguccaaggugcugcaccucgagggggaggucaacaagaucaagagcgcccugcuguccaccaacaaggccguggugagccucuccaacggcgucagcgugcugaccuccaaggugcuggaccucaagaacuacaucgacaagcagcugcugcccaucgucaacaagcagagcugcuccaucagcaacaucgagacggugaucgaguuccagcagaagaacaaccggcuccuggagaucacccgcgaguucagcgugaacgccggggucaccacccccguguccacguacaugcugaccaacagcgagcuccugucccugaucaacgacaugccgaucaccaacgaccagaagaagcucaugagcaacaacgugcagaucguccggcagcaguccuacagcaucauguccaucaucaaggaggaggugcuggcguacgugguccagcugccccucuacggcgugaucgacacccccugcuggaagcugcacacgagcccccugugcaccaccaacaccaaggagggguccaacaucugccucacgcgcaccgaccggggcugguacugcgacaacgccggcagcgucuccuucuucccgcaggccgagaccugcaaggugcagagcaaccgcguguucugcgacaccaugaacucccugacgcugcccagcgagguaaaccucugcaacgucgacaucuucaaccccaaguacgacugcaagaucaugaccuccaagaccgacgugagcuccagcgugaucaccucccugggggccaucgucagcugcuacggcaagacgaagugcaccgccagcaacaagaaccgggggaucaucaagaccuucuccaacggcugcgacuacgugagcaacaagggcguggacaccguguccgucgggaacacccuguacuacgugaacaagcaggagggcaagagccucuacgugaagggggagcccaucaucaacuucuacgacccgcuggucuuccccuccgacgaguucgacgcgagcaucucccaggugaacgagaagaucaaccagagccuggccuucauccgcaaguccgacgagcugcuccacaacgugaacgccggcaagagcacgaccaacaucaugaucaccaccaucaucaucgucaucaucgugauccugcugucccucaucgccguggggcugcugcucuacugcaaggcccggagcacgcccgucacccuguccaaggaccagcugagcggcaucaacaacaucgcguucuccaacugaggacuaguuauaagacugacuagcccgaugggccucccaacgggcccuccuccccuccuugcaccgagauuaauaaaaaaaaaaaaaaaaaaaaaaaaaaaaaaaaaaaaaaaaaaaaaaaaaaaaaaaaaaaaaaaaugcaucccccccccccccccccccccccccccccccaaaggcucuuuucagagccaccagaauu

SEQ ID NO: 14594 - RNA, 1879 nt, Artificial Sequence
  HRSV-A/A2__P03420.1 fusion glycoprotein mRNA gc (F-del)
aggagaaagcuuaccauggagcugcucauccugaaggccaacgccaucaccaccauccugacggcggugaccuucugcuucgccagcggccagaacaucaccgaggaguucuaccaguccaccugcagcgccgucuccaagggguaccucagcgcccugcggacgggcugguacaccuccgugaucaccaucgagcugagcaacaucaaggagaacaagugcaacgggaccgacgccaaggugaagcucaucaagcaggagcuggacaaguacaagaacgcggucacggagcugcagcuccugaugcaguccaccccggcaaccaacaaccgcgcccggcgcgagcugccccgguucaugaacuacacccucaacaacgccaagaagacgaacgugacccugagcaagaagcgcaagcggcgcuuccugggcuuccuccugggggugggcuccgccaucgcgagcggcgucgccguguccaaggugcugcaccucgagggggaggucaacaagaucaagagcgcccugcuguccaccaacaaggccguggugagccucuccaacggcgucagcgugcugaccuccaaggugcuggaccucaagaacuacaucgacaagcagcugcugcccaucgucaacaagcagagcugcuccaucagcaacaucgagacggugaucgaguuccagcagaagaacaaccggcuccuggagaucacccgcgaguucagcgugaacgccggggucaccacccccguguccacguacaugcugaccaacagcgagcuccugucccugaucaacgacaugccgaucaccaacgaccagaagaagcucaugagcaacaacgugcagaucguccggcagcaguccuacagcaucauguccaucaucaaggaggaggugcuggcguacgugguccagcugccccucuacggcgugaucgacacccccugcuggaagcugcacacgagcccccugugcaccaccaacaccaaggagggguccaacaucugccucacgcgcaccgaccggggcugguacugcgacaacgccggcagcgucuccuucuucccgcaggccgagaccugcaaggugcagagcaaccgcguguucugcgacaccaugaacucccugacgcugcccagcgagguaaaccucugcaacgucgacaucuucaaccccaaguacgacugcaagaucaugaccuccaagaccgacgugagcuccagcgugaucaccucccugggggccaucgucagcugcuacggcaagacgaagugcaccgccagcaacaagaaccgggggaucaucaagaccuucuccaacggcugcgacuacgugagcaacaagggcguggacaccguguccgucgggaacacccuguacuacgugaacaagcaggagggcaagagccucuacgugaagggggagcccaucaucaacuucuacgacccgcuggucuuccccuccgacgaguucgacgcgagcaucucccaggugaacgagaagaucaaccagagccuggccuucauccgcaaguccgacgagcugcuccacaacgugaacgccggcaagagcacgaccaacaucaugaucaccaccaucaucaucgucaucaucgugauccugcugucccucaucgccguggggcugcugcucuacugcaaggcccggugaggacuaguuauaagacugacuagcccgaugggccucccaacgggcccuccuccccuccuugcaccgagauuaauaaaaaaaaaaaaaaaaaaaaaaaaaaaaaaaaaaaaaaaaaaaaaaaaaaaaaaaaaaaaaaaaugcaucccccccccccccccccccccccccccccccaaaggcucuuuucagagccaccagaauu

SEQ ID NO: 14595 - RNA, 1942 nt, Artificial Sequence
  HRSV-A/A2__P03420.1 fusion glycoprotein mRNA gc (F0_DSCav1)
aggagaaagcuuaccauggagcugcucauccugaaggccaacgccaucaccaccauccugacggcggugaccuucugcuucgccagcggccagaacaucaccgaggaguucuaccaguccacgugcagcgccgucuccaagggguaccucagcgcccugcggaccggcugguacaccuccgugaucaccaucgagcugagcaacaucaaggagaacaagugcaacgggaccgacgccaaggugaagcucaucaagcaggagcuggacaaguacaagaacgcggucacggagcugcagcuccugaugcaguccaccccggcaaccaacaaccgcgcccggcgcgagcugccccgguucaugaacuacacccucaacaacgccaagaagacgaacgugacccugagcaagaagcgcaagcggcgcuuccugggcuuccuccugggggugggcuccgccaucgcgagcggcgucgccgugugcaaggugcugcaccucgagggggaggucaacaagaucaagagcgcccugcuguccaccaacaaggccguggugagccucuccaacggcgucagcgugcugaccuucaaggugcuggaccucaagaacuacaucgacaagcagcugcugcccauccugaacaagcagagcugcuccaucagcaacaucgagacggugaucgaguuccagcagaagaacaaccggcuccuggagaucacccgcgaguucagcgugaacgccggggucaccacccccguguccacguacaugcugaccaacagcgagcuccugucccugaucaacgacaugccgaucaccaacgaccagaagaagcucaugagcaacaacgugcagaucguccggcagcaguccuacagcaucaugugcaucaucaaggaggaggugcuggcguacgugguccagcugccccucuacggcgugaucgacacccccugcuggaagcugcacacgagcccccugugcaccaccaacaccaaggagggguccaacaucugccucacgcgcaccgaccggggcugguacugcgacaacgccggcagcgucuccuucuucccgcaggccgagaccugcaaggugcagagcaaccgcguguucugcgacaccaugaacucccugacgcugcccagcgagguaaaccucugcaacgucgacaucuucaaccccaaguacgacugcaagaucaugaccuccaagaccgacgugagcuccagcgugaucaccucccugggggccaucgucagcugcuacggcaagacgaagugcaccgccagcaacaagaaccgggggaucaucaagaccuucuccaacggcugcgacuacgugagcaacaagggcguggacaccguguccgucgggaacacccuguacuacgugaacaagcaggagggcaagagccucuacgugaagggggagcccaucaucaacuucuacgacccgcuggucuuccccuccgacgaguucgacgcgagcaucucccaggugaacgagaagaucaaccagagccuggccuucauccgcaaguccgacgagcugcuccacaacgugaacgccggcaagagcacgaccaacaucaugaucaccaccaucaucaucgucaucaucgugauccugcugucccucaucgccguggggcugcugcucuacugcaaggcccggagcacgcccgucacccuguccaaggaccagcugagcggcaucaacaacaucgcguucuccaacugaggacuaguuauaagacugacuagcccgaugggccucccaacgggcccuccuccccuccuugcaccgagauuaauaaaaaaaaaaaaaaaaaaaaaaaaaaaaaaaaaaaaaaaaaaaaaaaaaaaaaaaaaaaaaaaaugcaucccccccccccccccccccccccccccccccaaaggcucuuuucagagccaccagaauu

SEQ ID NO: 14596 - RNA, 1879 nt, Artificial Sequence
  HRSV-A/A2__P03420.1 fusion glycoprotein mRNA gc (F-del_DSCav1)
aggagaaagcuuaccauggagcugcucauccugaaggccaacgccaucaccaccauccugacggcggugaccuucugcuucgccagcggccagaacaucaccgaggaguucuaccaguccacgugcagcgccgucuccaagggguaccucagcgcccugcggaccggcugguacaccuccgugaucaccaucgagcugagcaacaucaaggagaacaagugcaacgggaccgacgccaaggugaagcucaucaagcaggagcuggacaaguacaagaacgcggucacggagcugcagcuccugaugcaguccaccccggcaaccaacaaccgcgcccggcgcgagcugccccgguucaugaacuacacccucaacaacgccaagaagacgaacgugacccugagcaagaagcgcaagcggcgcuuccugggcuuccuccugggggugggcuccgccaucgcgagcggcgucgccgugugcaaggugcugcaccucgagggggaggucaacaagaucaagagcgcccugcuguccaccaacaaggccguggugagccucuccaacggcgucagcgugcugaccuucaaggugcuggaccucaagaacuacaucgacaagcagcugcugcccauccugaacaagcagagcugcuccaucagcaacaucgagacggugaucgaguuccagcagaagaacaaccggcuccuggagaucacccgcgaguucagcgugaacgccggggucaccacccccguguccacguacaugcugaccaacagcgagcuccugucccugaucaacgacaugccgaucaccaacgaccagaagaagcucaugagcaacaacgugcagaucguccggcagcaguccuacagcaucaugugcaucaucaaggaggaggugcuggcguacgugguccagcugccccucuacggcgugaucgacacccccugcuggaagcugcacacgagcccccugugcaccaccaacaccaaggagggguccaacaucugccucacgcgcaccgaccggggcugguacugcgacaacgccggcagcgucuccuucuucccgcaggccgagaccugcaaggugcagagcaaccgcguguucugcgacaccaugaacucccugacgcugcccagcgagguaaaccucugcaacgucgacaucuucaaccccaaguacgacugcaagaucaugaccuccaagaccgacgugagcuccagcgugaucaccucccugggggccaucgucagcugcuacggcaagacgaagugcaccgccagcaacaagaaccgggggaucaucaagaccuucuccaacggcugcgacuacgugagcaacaagggcguggacaccguguccgucgggaacacccuguacuacgugaacaagcaggagggcaagagccucuacgugaagggggagcccaucaucaacuucuacgacccgcuggucuuccccuccgacgaguucgacgcgagcaucucccaggugaacgagaagaucaaccagagccuggccuucauccgcaaguccgacgagcugcuccacaacgugaacgccggcaagagcacgaccaacaucaugaucaccaccaucaucaucgucaucaucgugauccugcugucccucaucgccguggggcugcugcucuacugcaaggcccggugaggacuaguuauaagacugacuagcccgaugggccucccaacgggcccuccuccccuccuugcaccgagauuaauaaaaaaaaaaaaaaaaaaaaaaaaaaaaaaaaaaaaaaaaaaaaaaaaaaaaaaaaaaaaaaaaugcaucccccccccccccccccccccccccccccccaaaggcucuuuucagagccaccagaauu

SEQ ID NO: 14597 - RNA, 1825 nt, Artificial Sequence
  HRSV-A/A2__P03420.1 fusion glycoprotein mRNA gc (F_DSCav1_mut4)
aggagaaagcuuaccauggagcugcucauccugaaggccaacgccaucaccaccauccugacggcggugaccuucugcuucgccagcggccagaacaucaccgaggaguucuaccaguccacgugcagcgccgucuccaagggguaccucagcgcccugcggaccggcugguacaccuccgugaucaccaucgagcugagcaacaucaaggagaacaagugcaacgggaccgacgccaaggugaagcucaucaagcaggagcuggacaaguacaagaacgcggucacggagcugcagcuccugaugcaguccaccccggcaaccggcuccggcuccgccaucugcagcggcgucgccgugugcaaggugcugcaccucgagggggaggucaacaagaucaagagcgcccugcuguccaccaacaaggccguggugagccucuccaacggcgucagcgugcugaccuucaaggugcuggaccucaagaacuacaucgacaagcagcugcugcccauccugaacaagcagagcugcuccaucagcaacaucgagacggugaucgaguuccagcagaagaacaaccggcuccuggagaucacccgcgaguucagcgugaacgccggggucaccacccccguguccacguacaugcugaccaacagcgagcuccugucccugaucaacgacaugccgaucaccaacgaccagaagaagcucaugagcaacaacgugcagaucguccggcagcaguccuacagcaucaugugcaucaucaaggaggaggugcuggcguacgugguccagcugccccucuacggcgugaucgacacccccugcuggaagcugcacacgagcccccugugcaccaccaacaccaaggagggguccaacaucugccucacgcgcaccgaccggggcugguacugcgacaacgccggcagcgucuccuucuucccgcaggccgagaccugcaaggugcagagcaaccgcguguucugcgacaccaugaacucccggacgcugcccagcgagguaaaccucugcaacgucgacaucuucaaccccaaguacgacugcaagaucaugaccuccaagaccgacgugagcuccagcgugaucaccucccugggggccaucgucagcugcuacggcaagacgaagugcaccgccagcaacaagaaccgggggaucaucaagaccuucuccaacggcugcgacuacgugagcaacaagggcguggacaccguguccgucgggaacacccuguacugcgugaacaagcaggagggcaagagccucuacgugaagggggagcccaucaucaacuucuacgacccgcuggucuuccccuccgacgaguucgacgcgagcaucucccaggugaacgagaagaucaaccagagccuggccuucauccgcaaguccgacgagcugcuccacaacgugaacgccggcaagagcacgaccaacaucaugaucaccaccaucaucaucgucaucaucgugauccugcugucccucaucgccguggggcugcugcucuacugcaaggcccggagcacgcccgucacccuguccaaggaccagcugagcggcaucaacaacaucgcguucuccaacugaggacuaguuauaagacugacuagcccgaugggccucccaacgggcccuccuccccuccuugcaccgagauuaauaaaaaaaaaaaaaaaaaaaaaaaaaaaaaaaaaaaaaaaaaaaaaaaaaaaaaaaaaaaaaaaaugcaucccccccccccccccccccccccccccccccaaaggcucuuuucagagccaccagaauu

SEQ ID NO: 14598 - RNA, 1762 nt, Artificial Sequence
  HRSV-A/A2__P03420.1 fusion glycoprotein mRNA gc (F-del_DSCav1_mut4)
aggagaaagcuuaccauggagcugcucauccugaaggccaacgccaucaccaccauccugacggcggugaccuucugcuucgccagcggccagaacaucaccgaggaguucuaccaguccacgugcagcgccgucuccaagggguaccucagcgcccugcggaccggcugguacaccuccgugaucaccaucgagcugagcaacaucaaggagaacaagugcaacgggaccgacgccaaggugaagcucaucaagcaggagcuggacaaguacaagaacgcggucacggagcugcagcuccugaugcaguccaccccggcaaccggcuccggcuccgccaucugcagcggcgucgccgugugcaaggugcugcaccucgagggggaggucaacaagaucaagagcgcccugcuguccaccaacaaggccguggugagccucuccaacggcgucagcgugcugaccuucaaggugcuggaccucaagaacuacaucgacaagcagcugcugcccauccugaacaagcagagcugcuccaucagcaacaucgagacggugaucgaguuccagcagaagaacaaccggcuccuggagaucacccgcgaguucagcgugaacgccggggucaccacccccguguccacguacaugcugaccaacagcgagcuccugucccugaucaacgacaugccgaucaccaacgaccagaagaagcucaugagcaacaacgugcagaucguccggcagcaguccuacagcaucaugugcaucaucaaggaggaggugcuggcguacgugguccagcugccccucuacggcgugaucgacacccccugcuggaagcugcacacgagcccccugugcaccaccaacaccaaggagggguccaacaucugccucacgcgcaccgaccggggcugguacugcgacaacgccggcagcgucuccuucuucccgcaggccgagaccugcaaggugcagagcaaccgcguguucugcgacaccaugaacucccggacgcugcccagcgagguaaaccucugcaacgucgacaucuucaaccccaaguacgacugcaagaucaugaccuccaagaccgacgugagcuccagcgugaucaccucccugggggccaucgucagcugcuacggcaagacgaagugcaccgccagcaacaagaaccgggggaucaucaagaccuucuccaacggcugcgacuacgugagcaacaagggcguggacaccguguccgucgggaacacccuguacugcgugaacaagcaggagggcaagagccucuacgugaagggggagcccaucaucaacuucuacgacccgcuggucuuccccuccgacgaguucgacgcgagcaucucccaggugaacgagaagaucaaccagagccuggccuucauccgcaaguccgacgagcugcuccacaacgugaacgccggcaagagcacgaccaacaucaugaucaccaccaucaucaucgucaucaucgugauccugcugucccucaucgccguggggcugcugcucuacugcaaggcccggugaggacuaguuauaagacugacuagcccgaugggccucccaacgggcccuccuccccuccuugcaccgagauuaauaaaaaaaaaaaaaaaaaaaaaaaaaaaaaaaaaaaaaaaaaaaaaaaaaaaaaaaaaaaaaaaaugcaucccccccccccccccccccccccccccccccaaaggcucuuuucagagccaccagaauu

SEQ ID NO: 14599 - RNA, 1828 nt, Artificial Sequence
  HRSV-A/A2__P03420.1 fusion glycoprotein mRNA gc (F_DSCav1_mut5)
aggagaaagcuuaccauggagcugcucauccugaaggccaacgccaucaccaccauccugacggcggugaccuucugcuucgccagcggccagaacaucaccgaggaguucuaccaguccacgugcagcgccgucuccaagggguaccucagcgcccugcggaccggcugguacaccuccgugaucaccaucgagcugagcaacaucaaggagaacaagugcaacgggaccgacgccaaggugaagcucaucaagcaggagcuggacaaguacaagaacgcggucacggagcugcagcuccugaugcaguccaccccggcaaccggcuccggcuccgccaucgcgagcggcgucgccgugugcaaggugcugcaccucgagggggaggucaacaagaucaagagcgcccugcuguccaccaacaaggccguggugagccucuccggcugcggcgucagcgugcugaccuucaaggugcuggaccucaagaacuacaucgacaagcagcugcugcccauccugaacaagcagagcugcuccaucagcaacaucgagacggugaucgaguuccagcagaagaacaaccggcuccuggagaucacccgcgaguucagcgugaacgccggggucaccacccccguguccacguacaugcugaccaacagcgagcuccugucccugaucaacgacaugccgaucaccaacgaccagaagaagcucaugagcaacaacgugcagaucguccggcagcaguccuacagcaucaugugcaucaucaaggaggaggugcuggcguacgugguccagcugccccucuacggcgugaucgacacccccugcuggaagcugcacacgagcccccugugcaccaccaacaccaaggagggguccaacaucugccucacgcgcaccgaccggggcugguacugcgacaacgccggcagcgucuccuucuucccgcaggccgagaccugcaaggugcagagcaaccgcguguucugcgacaccaugaacucccggacgcugcccagcgagguaaaccucugcaacgucgacaucuucaaccccaaguacgacugcaagaucaugaccuccaagaccgacgugagcuccagcgugaucaccucccugggggccaucgucagcugcuacggcaagacgaagugcaccgccagcaacaagugccgggggaucaucaagaccuucuccaacggcugcgacuacgugagcaacaagggcguggacaccguguccgucgggaacacccuguacuacgugaacaagcaggagggcaagagccucuacgugaagggggagcccaucaucaacuucuacgacccgcuggucuuccccuccgacgaguucgacgcgagcaucucccaggugaacgagaagaucaaccagagccuggccuucauccgcaaguccgacgagcugcuccacaacgugaacgccggcaagagcacgaccaacaucaugaucaccaccaucaucaucgucaucaucgugauccugcugucccucaucgccguggggcugcugcucuacugcaaggcccggagcacgcccgucacccuguccaaggaccagcugagcggcaucaacaacaucgcguucuccaacugaggacuaguuauaagacugacuagcccgaugggccucccaacgggcccuccuccccuccuugcaccgagauuaauaaaaaaaaaaaaaaaaaaaaaaaaaaaaaaaaaaaaaaaaaaaaaaaaaaaaaaaaaaaaaaaaugcaucccccccccccccccccccccccccccccccaaaggcucuuuucagagccaccagaauu

SEQ ID NO: 14600 - RNA, 1765 nt, Artificial Sequence
  HRSV-A/A2__P03420.1 fusion glycoprotein mRNA gc (F-del_DSCav1_mut5)
aggagaaagcuuaccauggagcugcucauccugaaggccaacgccaucaccaccauccugacggcggugaccuucugcuucgccagcggccagaacaucaccgaggaguucuaccaguccacgugcagcgccgucuccaagggguaccucagcgcccugcggaccggcugguacaccuccgugaucaccaucgagcugagcaacaucaaggagaacaagugcaacgggaccgacgccaaggugaagcucaucaagcaggagcuggacaaguacaagaacgcggucacggagcugcagcuccugaugcaguccaccccggcaaccggcuccggcuccgccaucgcgagcggcgucgccgugugcaaggugcugcaccucgagggggaggucaacaagaucaagagcgcccugcuguccaccaacaaggccguggugagccucuccggcugcggcgucagcgugcugaccuucaaggugcuggaccucaagaacuacaucgacaagcagcugcugcccauccugaacaagcagagcugcuccaucagcaacaucgagacggugaucgaguuccagcagaagaacaaccggcuccuggagaucacccgcgaguucagcgugaacgccggggucaccacccccguguccacguacaugcugaccaacagcgagcuccugucccugaucaacgacaugccgaucaccaacgaccagaagaagcucaugagcaacaacgugcagaucguccggcagcaguccuacagcaucaugugcaucaucaaggaggaggugcuggcguacgugguccagcugccccucuacggcgugaucgacacccccugcuggaagcugcacacgagcccccugugcaccaccaacaccaaggagggguccaacaucugccucacgcgcaccgaccggggcugguacugcgacaacgccggcagcgucuccuucuucccgcaggccgagaccugcaaggugcagagcaaccgcguguucugcgacaccaugaacucccggacgcugcccagcgagguaaaccucugcaacgucgacaucuucaaccccaaguacgacugcaagaucaugaccuccaagaccgacgugagcuccagcgugaucaccucccugggggccaucgucagcugcuacggcaagacgaagugcaccgccagcaacaagugccgggggaucaucaagaccuucuccaacggcugcgacuacgugagcaacaagggcguggacaccguguccgucgggaacacccuguacuacgugaacaagcaggagggcaagagccucuacgugaagggggagcccaucaucaacuucuacgacccgcuggucuuccccuccgacgaguucgacgcgagcaucucccaggugaacgagaagaucaaccagagccuggccuucauccgcaaguccgacgagcugcuccacaacgugaacgccggcaagagcacgaccaacaucaugaucaccaccaucaucaucgucaucaucgugauccugcugucccucaucgccguggggcugcugcucuacugcaaggcccggugaggacuaguuauaagacugacuagcccgaugggccucccaacgggcccuccuccccuccuugcaccgagauuaauaaaaaaaaaaaaaaaaaaaaaaaaaaaaaaaaaaaaaaaaaaaaaaaaaaaaaaaaaaaaaaaaugcaucccccccccccccccccccccccccccccccaaaggcucuuuucagagccaccagaauu

SEQ ID NO: 14601 - RNA, 802 nt, Artificial Sequence
  HRSV-A/A2__AAB86665.1 matrix protein mRNA gc (M2-1)
aggagaaagcuuaccaugagccgccggaaccccugcaaguucgagauccgcggccacugccugaacgggaagcggugccacuucucccacaacuacuucgaguggccgccccacgcccuccuggugcgccagaacuucaugcugaaccggauccucaagagcauggacaaguccaucgacacccugagcgagaucuccggcgccgcggagcuggaccgcaccgaggaguacgcccucggggucgugggcgugcuggagagcuacaucggguccaucaacaacaucacgaagcagagcgccugcgucgccauguccaagcugcucaccgagcugaacagcgacgacaucaagaagcugcgggacaacgaggagcucaacucccccaagauccgcguguacaacaccgugaucagcuacaucgaguccaaccggaagaacaacaagcagaccauccaccuccugaagcgccugcccgccgacguccugaagaagacgaucaagaacacccuggacauccacaagagcaucaccaucaacaacccgaaggaguccaccgugagcgacacgaacgaccacgcgaagaacaacgacaccaccugaggacuaguuauaagacugacuagcccgaugggccucccaacgggcccuccuccccuccuugcaccgagauuaauaaaaaaaaaaaaaaaaaaaaaaaaaaaaaaaaaaaaaaaaaaaaaaaaaaaaaaaaaaaaaaaaugcaucccccccccccccccccccccccccccccccaaaggcucuuuucagagccaccagaauu

SEQ ID NO: 14602 - RNA, 1942 nt, Artificial Sequence
  HRSV-A/RSVA/Homo sapiens/USA/84I-215A-01/1984__AHY21375.1 fusion glycoprotein mRNA human (F0)
aggagaaagcuuaccauggagcugcccauccucaagaccaacgccauuacaacuauacuugcugcagugacgcugugcuucgccagcucccagaauaucaccgaagaguuuuaccaaucuacauguucagcggucaguaaaggcuauuugagcgcuuuaagaacugggugguacaccuccguuauuacaaucgaacugucuaacauuaaggagaauaaaugcaacggaaccgacgccaaggugaaacuaaucaagcaggaacucgauaaguauaaaaaugcaguaacugagcugcagcuucugaugcagucgaccccugccgcuaacaauagggcacggcgcgaguugccacgauucaugaacuacacacucaauaacacgaagaauacuaacgugacccugagcaaaaagcguaaaagaagguuucuggguuuccucuuaggcgucgggucagccauagcuaguggaaucgccguguccaagguucugcaccuugaaggcgaggugaauaagauuaaaucugcguugcugagcacaaacaaggcagucgugucccuaucaaaugguguaaguguucucacuagcaaagugcuggaccuuaagaacuauaucgauaaacaacuguugccgauugucaacaagcagucuuguuccaucucaaauauagaaaccgugauugaguuucagcagaaaaacaaucggcuccuggagaucacacgcgaguucagcgugaacgccggggucaccacgcccguuaguacuuacauguuaacaaauucugaacugcucucccuuauuaacgacaugccuaucaccaaugaucaaaagaagcugaugagcaacaaugugcagaucguaagacagcagucguauucuauuauguccauaaucaaagaagagguguuggcuuacgucgugcaacuaccacuguacggaguuauugacacucccugcuggaagcuccauacaucaccucuguguaccacgaacaccaaagaaggcaguaauaucugccuuacaaggacugaucggggcugguauugugacaacgccgggagcguguccuuuuucccacaggcagagaccugcaagguccagucuaaucgcguguuuugugauacaaugaacagccugacuuugcccucagagguaaaucucugcaacauagacauuuucaacccuaaauacgauuguaagaucaugaccaguaagacagacguuuccagcucugugaucaccucacugggagcuauugucaguugcuaugguaaaacuaagugcacggccagcaauaaaaaccgaggcaucauuaagacauuuuccaaugggugugauuacgugucuaacaaaggagucgacaccgugucgguuggcaauacuuuauauuacgugaacaagcaagaagguaagagccuguauguaaaaggggagccaauaaucaauuucuacgacccgcuagucuuucccuccgaugaguucgacgcgucaauuagucaggugaacgaaaagaucaaucagucucucgccuucaucagaaaaagcgaugaacugcuucacaacguuaaugcaggaaaguccaccacaaacauuaugauaaccacuaucauuaucgugauuaucgucauauugcugucacucaucgcugugggccugcuucuguacugcaaagccaggagcacaccuguaacguugucuaaggaccagcucuccggcauuaauaacaucgcuuuuaguaauugaggacuaguuauaagacugacuagcccgaugggccucccaacgggcccuccuccccuccuugcaccgagauuaauaaaaaaaaaaaaaaaaaaaaaaaaaaaaaaaaaaaaaaaaaaaaaaaaaaaaaaaaaaaaaaaaugcaucccccccccccccccccccccccccccccccaaaggcucuuuucagagccaccagaauu

SEQ ID NO: 14603 - RNA, 1942 nt, Artificial Sequence
  HRSV-A/A2__P03420.1 fusion glycoprotein mRNA human (F0)
aggagaaagcuuaccauggagcugcucauccuuaaggccaacgcuauuaccacaauacugacugcagugacguucugcuuugccagcggccagaauaucaccgaagaguucuaccaauccacauguucugcggucucaaaaggguauuugagugcuuuaagaacuggaugguacaccagcguuauuacaaucgaacuguccaacauuaaggagaauaaaugcaacgguaccgacgccaaggugaaacuaaucaagcaggaacucgauaaguauaaaaaugcaguaacugagcugcagcuucugaugcagucuacacccgccaccaacaauagggcucggcgcgaguugccucgauuuaugaacuacacgcucaauaacgcaaagaaaacuaaugugacccugucgaagaaacguaagagaagguuccugggcuuucucuuaggggucggaucagccauagcuagcggcguggccguuaguaaggugcugcaccuugaaggugaggucaacaaaaucaaguccgcguugcugucuacaaauaaagcagugguaagccuauccaacgggguuucagugcucacuucuaagguccuggaccuuaaaaauuauauugauaagcaacuguugccaaucgugaacaaacagagcuguucuauuuccaacaucgaaaccgugauagaguuccagcagaagaauaaccggcuccuggagauuacacgcgaauuuucagucaaugccggaguuaccacgccggugagcacuuacauguuaacaaacagugagcugcucucucuuaucaaugacaugcccauuaccaacgaucaaaagaaacugauguccaauaacguacagaucgugagacagcagagcuauucgaucaugucuauuauaaaggaagaggucuuggcuuacgugguucaacuaccucuguacggcgugaucgacacuccaugcuggaaacuccauacauccccacuguguaccacgaauaccaaggaaggcucaaacauuugccuuacaaggacugaucgggggugguauugugacaaugccggaagugucagcuucuuuccucaggcagagaccugcaaagugcaguccaaccgcguauucugugauacaaugaauagucugacuuugccaagcgagguuaaccucugcaauguggacaucuuuaaccccaaguacgauuguaagauaaugaccucaaaaacagacgucaguuccagcgugauuaccucucugggugcuaucgucucaugcuauggcaagacuaaaugcacggccaguaacaagaaucgagggaucauuaaaacauucagcaacggaugugauuacguguccaauaagggcguugacaccgugucuguagguaacacuuuauauuacgucaauaagcaagaagggaaaucgcuguaugugaagggagagccuaucauuaacuuuuacgacccccuaguuuucccgagcgaugaauuugacgcguccauaucacaggugaaugagaaaaucaaccagagucucgccuucauuagaaagucugaugaacugcuucacaaugucaacgcaggcaaaagcaccacaaauaucaugaucaccacuauuauaaucgugauuaucguaauuuugcugucccucaucgcugugggccugcuucuguacugcaaggccaggucaacacccguuacguugagcaaggaccagcucucugggauaaacaauaucgcuuucuccaacugaggacuaguuauaagacugacuagcccgaugggccucccaacgggcccuccuccccuccuugcaccgagauuaauaaaaaaaaaaaaaaaaaaaaaaaaaaaaaaaaaaaaaaaaaaaaaaaaaaaaaaaaaaaaaaaaugcaucccccccccccccccccccccccccccccccaaaggcucuuuucagagccaccagaauu

SEQ ID NO: 14604 - RNA, 1879 nt, Artificial Sequence
  HRSV-A/A2__P03420.1 fusion glycoprotein mRNA human (F-del)
aggagaaagcuuaccauggagcugcucauccuuaaggccaacgcuauuaccacaauacugacugcagugacguucugcuuugccagcggccagaauaucaccgaagaguucuaccaauccacauguucugcggucucaaaaggguauuugagugcuuuaagaacuggaugguacaccagcguuauuacaaucgaacuguccaacauuaaggagaauaaaugcaacgguaccgacgccaaggugaaacuaaucaagcaggaacucgauaaguauaaaaaugcaguaacugagcugcagcuucugaugcagucuacacccgccaccaacaauagggcucggcgcgaguugccucgauuuaugaacuacacgcucaauaacgcaaagaaaacuaaugugacccugucgaagaaacguaagagaagguuccugggcuuucucuuaggggucggaucagccauagcuagcggcguggccguuaguaaggugcugcaccuugaaggugaggucaacaaaaucaaguccgcguugcugucuacaaauaaagcagugguaagccuauccaacgggguuucagugcucacuucuaagguccuggaccuuaaaaauuauauugauaagcaacuguugccaaucgugaacaaacagagcuguucuauuuccaacaucgaaaccgugauagaguuccagcagaagaauaaccggcuccuggagauuacacgcgaauuuucagucaaugccggaguuaccacgccggugagcacuuacauguuaacaaacagugagcugcucucucuuaucaaugacaugcccauuaccaacgaucaaaagaaacugauguccaauaacguacagaucgugagacagcagagcuauucgaucaugucuauuauaaaggaagaggucuuggcuuacgugguucaacuaccucuguacggcgugaucgacacuccaugcuggaaacuccauacauccccacuguguaccacgaauaccaaggaaggcucaaacauuugccuuacaaggacugaucgggggugguauugugacaaugccggaagugucagcuucuuuccucaggcagagaccugcaaagugcaguccaaccgcguauucugugauacaaugaauagucugacuuugccaagcgagguuaaccucugcaauguggacaucuuuaaccccaaguacgauuguaagauaaugaccucaaaaacagacgucaguuccagcgugauuaccucucugggugcuaucgucucaugcuauggcaagacuaaaugcacggccaguaacaagaaucgagggaucauuaaaacauucagcaacggaugugauuacguguccaauaagggcguugacaccgugucuguagguaacacuuuauauuacgucaauaagcaagaagggaaaucgcuguaugugaagggagagccuaucauuaacuuuuacgacccccuaguuuucccgagcgaugaauuugacgcguccauaucacaggugaaugagaaaaucaaccagagucucgccuucauuagaaagucugaugaacugcuucacaaugucaacgcaggcaaaagcaccacaaauaucaugaucaccacuauuauaaucgugauuaucguaauuuugcugucccucaucgcugugggccugcuucuguacugcaaggccaggugaggacuaguuauaagacugacuagcccgaugggccucccaacgggcccuccuccccuccuugcaccgagauuaauaaaaaaaaaaaaaaaaaaaaaaaaaaaaaaaaaaaaaaaaaaaaaaaaaaaaaaaaaaaaaaaaugcaucccccccccccccccccccccccccccccccaaaggcucuuuucagagccaccagaauu

SEQ ID NO: 14605 - RNA, 1942 nt, Artificial Sequence
  HRSV-A/A2__P03420.1 fusion glycoprotein mRNA human (F0_DSCav1)
aggagaaagcuuaccauggagcugcucauccuuaaggccaacgcuauuaccacaauacugacugcagugacguucugcuuugccagcggccagaauaucaccgaagaguucuaccaauccacauguucugcggucucaaaaggguauuugagugcuuuaagaacuggaugguacaccagcguuauuacaaucgaacuguccaacauuaaggagaauaaaugcaacgguaccgacgccaaggugaaacuaaucaagcaggaacucgauaaguauaaaaaugcaguaacugagcugcagcuucugaugcagucuacacccgccaccaacaauagggcucggcgcgaguugccucgauuuaugaacuacacgcucaauaacgcaaagaaaacuaaugugacccugucgaagaaacguaagagaagguuccugggcuuucucuuaggggucggaucagccauagcuagcggcguggccguuuguaaggugcugcaccuugaaggugaggucaacaaaaucaagagugcguugcuguccacaaauaaagcagugguaucucuaagcaacgggguuuccgugcucacuuucaagguccuggaccuuaaaaauuauauugauaagcaacuguugccaauccucaacaaacagucaugcaguauuagcaacaucgaaaccgugauagaguuucagcagaagaauaaccggcuguuagagauuacacgcgaguucucugugaaugccggagucaccacgccgguuuccacuuacaugcugacaaacucagaacuccuuagccugaucaaugacaugcccauuaccaacgaucaaaagaaauugaugaguaauaacgugcagaucguaagacagcagucuuauuccaucauguguauuauaaaggaagaggugcuagcuuacgucgugcaacugccucucuacggcguuaucgacacuccaugcuggaaacugcauacaagcccccuuuguaccacgaauaccaaggaaggcucgaacauuugccugacaaggacugaucgggggugguauugugacaaugccggaucuguguccuuuuucccucaggcagagaccugcaaaguccagucaaaccgcguguuuugugauacaaugaauaguuugacucucccaagcgagguaaaccugugcaauguugacaucuucaaccccaaguacgauugcaagauaaugaccuccaaaacagacgugucuagcucagucauuaccaguuuaggugcuaucguguccuguuauggcaagacuaaaugcacggccagcaacaagaaucgagggaucauuaaaacauuuucuaacggaugugauuacgucucaaauaagggcguggacaccguuaguguggguaacacucuguauuacguaaauaagcaagaagggaaaagccuauaugucaagggagagccuaucauuaacuucuacgacccacucguguucccguccgaugaauuugacgcgucuauaucgcagguuaaugagaaaaucaaccagagccuggccuucauuagaaaguccgaugaacuuuugcacaaugugaacgcaggcaaaucaaccacaaauaucaugaucaccacuauuauaaucgucauuaucgugauucugcucagucugaucgcuguaggccuucuguuguacugcaaggccaggucuacacccgugacgcucagcaaggaccagcuguccgggauaaacaauaucgcuuuuucaaacugaggacuaguuauaagacugacuagcccgaugggccucccaacgggcccuccuccccuccuugcaccgagauuaauaaaaaaaaaaaaaaaaaaaaaaaaaaaaaaaaaaaaaaaaaaaaaaaaaaaaaaaaaaaaaaaaugcaucccccccccccccccccccccccccccccccaaaggcucuuuucagagccaccagaauu

SEQ ID NO: 14606 - RNA, 1879 nt, Artificial Sequence
  HRSV-A/A2__P03420.1 fusion glycoprotein mRNA human (F-del_DSCav1)
aggagaaagcuuaccauggagcugcucauccuuaaggccaacgcuauuaccacaauacugacugcagugacguucugcuuugccagcggccagaauaucaccgaagaguucuaccaauccacauguucugcggucucaaaaggguauuugagugcuuuaagaacuggaugguacaccagcguuauuacaaucgaacuguccaacauuaaggagaauaaaugcaacgguaccgacgccaaggugaaacuaaucaagcaggaacucgauaaguauaaaaaugcaguaacugagcugcagcuucugaugcagucuacacccgccaccaacaauagggcucggcgcgaguugccucgauuuaugaacuacacgcucaauaacgcaaagaaaacuaaugugacccugucgaagaaacguaagagaagguuccugggcuuucucuuaggggucggaucagccauagcuagcggcguggccguuuguaaggugcugcaccuugaaggugaggucaacaaaaucaagagugcguugcuguccacaaauaaagcagugguaucucuaagcaacgggguuuccgugcucacuuucaagguccuggaccuuaaaaauuauauugauaagcaacuguugccaauccucaacaaacagucaugcaguauuagcaacaucgaaaccgugauagaguuucagcagaagaauaaccggcuguuagagauuacacgcgaguucucugugaaugccggagucaccacgccgguuuccacuuacaugcugacaaacucagaacuccuuagccugaucaaugacaugcccauuaccaacgaucaaaagaaauugaugaguaauaacgugcagaucguaagacagcagucuuauuccaucauguguauuauaaaggaagaggugcuagcuuacgucgugcaacugccucucuacggcguuaucgacacuccaugcuggaaacugcauacaagcccccuuuguaccacgaauaccaaggaaggcucgaacauuugccugacaaggacugaucgggggugguauugugacaaugccggaucuguguccuuuuucccucaggcagagaccugcaaaguccagucaaaccgcguguuuugugauacaaugaauaguuugacucucccaagcgagguaaaccugugcaauguugacaucuucaaccccaaguacgauugcaagauaaugaccuccaaaacagacgugucuagcucagucauuaccaguuuaggugcuaucguguccuguuauggcaagacuaaaugcacggccagcaacaagaaucgagggaucauuaaaacauuuucuaacggaugugauuacgucucaaauaagggcguggacaccguuaguguggguaacacucuguauuacguaaauaagcaagaagggaaaagccuauaugucaagggagagccuaucauuaacuucuacgacccacucguguucccguccgaugaauuugacgcgucuauaucgcagguuaaugagaaaaucaaccagagccuggccuucauuagaaaguccgaugaacuuuugcacaaugugaacgcaggcaaaucaaccacaaauaucaugaucaccacuauuauaaucgucauuaucgugauucugcucagucugaucgcuguaggccuucuguuguacugcaaggccaggugaggacuaguuauaagacugacuagcccgaugggccucccaacgggcccuccuccccuccuugcaccgagauuaauaaaaaaaaaaaaaaaaaaaaaaaaaaaaaaaaaaaaaaaaaaaaaaaaaaaaaaaaaaaaaaaaugcaucccccccccccccccccccccccccccccccaaaggcucuuuucagagccaccagaauu

SEQ ID NO: 14607 - RNA, 1825 nt, Artificial Sequence
  HRSV-A/A2__P03420.1 fusion glycoprotein mRNA human (F_DSCav1_mut4)
aggagaaagcuuaccauggagcugcucauccuuaaggccaacgcuauuaccacaauacugacugcagugacguucugcuuugccagcggccagaauaucaccgaagaguucuaccaauccacauguucugcggucucaaaaggguauuugagugcuuuaagaacuggaugguacaccagcguuauuacaaucgaacuguccaacauuaaggagaauaaaugcaacgguaccgacgccaaggugaaacuaaucaagcaggaacucgauaaguauaaaaaugcaguaacugagcugcagcuucugaugcagucuacacccgccaccggcucggggucagcuauauguagcggaguggcagucugcaagguguugcaccucgagggcgaaguuaacaaaaucaagagugcccugcuguccacgaauaaagcuguggucucucucagcaacgguguguccguauuaacuuuuaagguucuggaccuuaagaauuacauugauaaacaauugcugccuauccuaaacaagcagucauguaguauuagcaauaucgagaccgugauagaguuccagcagaaaaacaauaggcuccuggaaauuacacgggaguuuucugucaacgccggggugacuaccccaguguccacauauaugcuuaccaauucagaacuguugagccucaucaacgacaugccgauuacgaacgaucaaaagaaacugaugaguaauaacguccagaucguucgccagcagucuuacuccaucaugugcauuauaaaggaggaaguguuagcguauguagugcaacugccccucuacggagucaucgacacuccuuguuggaaacuucauacaagcccacugugcaccacuaauacaaaggagggcucgaacauuuguuugacccgaacggaucguggcugguacugcgacaaugcagggucuguguccuucuuuccccaggccgaaaccuguaagguucagucaaacagaguguucugcgauacaaugaauaguaggacucuaccuagcgaggucaaccugugcaauguggacaucuuuaacccaaaauaugauuguaagauaaugaccuccaaaacagacguaucuagcucaguuauuaccagucucggagcuaucguguccugcuacgguaagacuaaauguacagccagcaauaagaaccggggcaucauuaagaccuucucuaaugggugcgauuaugucucaaacaaaggaguggacacugucagugugggcaauacgcuguacuguguuaacaagcaagaggguaaaagccuuuaugugaagggggaacccaucauuaacuuuuacgacccucugguauucccauccgaugaguuugacgcaucuauaucgcaggucaaugagaaaaucaaccagagcuuggcuuucauucgcaaguccgaugaacuccugcacaaugugaacgccggaaagucaacaaccaauaucaugaucacuaccauuauaaucguuauuaucgugauuuuacugagucuaaucgcggucggccuccugcuuuauugcaaagccagaucuacaccggugaccuugagcaaggaccagcuguccggcauaaacaauaucgcauucucaaacugaggacuaguuauaagacugacuagcccgaugggccucccaacgggcccuccuccccuccuugcaccgagauuaauaaaaaaaaaaaaaaaaaaaaaaaaaaaaaaaaaaaaaaaaaaaaaaaaaaaaaaaaaaaaaaaaugcaucccccccccccccccccccccccccccccccaaaggcucuuuucagagccaccagaauu

SEQ ID NO: 14608 - RNA, 1762 nt, Artificial Sequence
  HRSV-A/A2__P03420.1 fusion glycoprotein mRNA human (F-del_DSCav1_mut4)
aggagaaagcuuaccauggagcugcucauccuuaaggccaacgcuauuaccacaauacugacugcagugacguucugcuuugccagcggccagaauaucaccgaagaguucuaccaauccacauguucugcggucucaaaaggguauuugagugcuuuaagaacuggaugguacaccagcguuauuacaaucgaacuguccaacauuaaggagaauaaaugcaacgguaccgacgccaaggugaaacuaaucaagcaggaacucgauaaguauaaaaaugcaguaacugagcugcagcuucugaugcagucuacacccgccaccggcucggggucagcuauauguagcggaguggcagucugcaagguguugcaccucgagggcgaaguuaacaaaaucaagagugcccugcuguccacgaauaaagcuguggucucucucagcaacgguguguccguauuaacuuuuaagguucuggaccuuaagaauuacauugauaaacaauugcugccuauccuaaacaagcagucauguaguauuagcaauaucgagaccgugauagaguuccagcagaaaaacaauaggcuccuggaaauuacacgggaguuuucugucaacgccggggugacuaccccaguguccacauauaugcuuaccaauucagaacuguugagccucaucaacgacaugccgauuacgaacgaucaaaagaaacugaugaguaauaacguccagaucguucgccagcagucuuacuccaucaugugcauuauaaaggaggaaguguuagcguauguagugcaacugccccucuacggagucaucgacacuccuuguuggaaacuucauacaagcccacugugcaccacuaauacaaaggagggcucgaacauuuguuugacccgaacggaucguggcugguacugcgacaaugcagggucuguguccuucuuuccccaggccgaaaccuguaagguucagucaaacagaguguucugcgauacaaugaauaguaggacucuaccuagcgaggucaaccugugcaauguggacaucuuuaacccaaaauaugauuguaagauaaugaccuccaaaacagacguaucuagcucaguuauuaccagucucggagcuaucguguccugcuacgguaagacuaaauguacagccagcaauaagaaccggggcaucauuaagaccuucucuaaugggugcgauuaugucucaaacaaaggaguggacacugucagugugggcaauacgcuguacuguguuaacaagcaagaggguaaaagccuuuaugugaagggggaacccaucauuaacuuuuacgacccucugguauucccauccgaugaguuugacgcaucuauaucgcaggucaaugagaaaaucaaccagagcuuggcuuucauucgcaaguccgaugaacuccugcacaaugugaacgccggaaagucaacaaccaauaucaugaucacuaccauuauaaucguuauuaucgugauuuuacugagucuaaucgcggucggccuccugcuuuauugcaaagccagaugaggacuaguuauaagacugacuagcccgaugggccucccaacgggcccuccuccccuccuugcaccgagauuaauaaaaaaaaaaaaaaaaaaaaaaaaaaaaaaaaaaaaaaaaaaaaaaaaaaaaaaaaaaaaaaaaugcaucccccccccccccccccccccccccccccccaaaggcucuuuucagagccaccagaauu

SEQ ID NO: 14609 - RNA, 1828 nt, Artificial Sequence
  HRSV-A/A2__P03420.1 fusion glycoprotein mRNA human (F_DSCav1_mut5)
aggagaaagcuuaccauggagcugcucauccuuaaggccaacgcuauuaccacaauacugacugcagugacguucugcuuugccagcggccagaauaucaccgaagaguucuaccaauccacauguucugcggucucaaaaggguauuugagugcuuuaagaacuggaugguacaccagcguuauuacaaucgaacuguccaacauuaaggagaauaaaugcaacgguaccgacgccaaggugaaacuaaucaagcaggaacucgauaaguauaaaaaugcaguaacugagcugcagcuucugaugcagucuacacccgccaccggcucggggucagcuauagcaagcggaguggccgucuguaagguguugcaccucgagggcgaaguuaacaaaaucaagagugcucugcuguccacgaauaaagccguggucucucucagcgguugcgggguguccguauuaacuuuuaagguucuggaccuuaagaacuacauugauaaacaauugcugccuauccuaaauaagcagucauguaguauuagcaacaucgagaccgugauagaguuccagcagaaaaauaacaggcuccuggaaauuacacgggaguuuucugucaaugcgggagugacuaccccaguguccacauauaugcuuaccaacucagaacuguugagccucaucaaugacaugccgauuacgaacgaucaaaagaaacugaugaguaacaauguccagaucguucgccagcagucuuacuccaucaugugcauuauaaaggaggaaguguuagcauauguagugcaacugccccucuacggcgucaucgacacuccuuguuggaaacuucauacaagcccacugugcaccacuaacacaaaggagggcucgaauauuuguuugacccgaacggaucgugggugguacugcgacaacgccggaucuguguccuucuuuccccaggcugaaaccuguaagguucagucaaauagaguguucugcgauacaaugaacaguaggacucuaccuagcgaggucaaucugugcaacguggacaucuuuaauccaaaauaugauuguaagauaaugaccuccaaaacagacguaucuagcucaguuauuaccagucucggugccaucguguccugcuacggcaagacuaaauguacagcaagcaacaagugccgggggaucauuaagaccuucucuaauggaugugauuaugucucaaacaaaggcguggacacugucaguguggguaauacgcuguacuauguuaacaagcaagaggggaaaagccuuuacgugaagggagaacccaucauuaauuuuuaugacccucugguauucccauccgaugaguuugacgcuucuauaucgcaggucaacgagaaaaucaaccagagcuuggccuucauucgcaaguccgaugaacuccugcacaaugugaacgcgggcaagucaacaaccaauaucaugaucacuaccauuauaaucguuauuaucgugauuuuacugagucuaaucgccgucggccuccugcuuuacugcaaagcaagaucuacaccggugaccuugagcaaggaccagcuguccgggauaaacaauaucgcuuucucaaacugaggacuaguuauaagacugacuagcccgaugggccucccaacgggcccuccuccccuccuugcaccgagauuaauaaaaaaaaaaaaaaaaaaaaaaaaaaaaaaaaaaaaaaaaaaaaaaaaaaaaaaaaaaaaaaaaugcaucccccccccccccccccccccccccccccccaaaggcucuuuucagagccaccagaauu

SEQ ID NO: 14610 - RNA, 1765 nt, Artificial Sequence
  HRSV-A/A2__P03420.1 fusion glycoprotein mRNA human (F-del_DSCav1_mut5)
aggagaaagcuuaccauggagcugcucauccuuaaggccaacgcuauuaccacaauacugacugcagugacguucugcuuugccagcggccagaauaucaccgaagaguucuaccaauccacauguucugcggucucaaaaggguauuugagugcuuuaagaacuggaugguacaccagcguuauuacaaucgaacuguccaacauuaaggagaauaaaugcaacgguaccgacgccaaggugaaacuaaucaagcaggaacucgauaaguauaaaaaugcaguaacugagcugcagcuucugaugcagucuacacccgccaccggcucggggucagcuauagcaagcggaguggccgucuguaagguguugcaccucgagggcgaaguuaacaaaaucaagagugcucugcuguccacgaauaaagccguggucucucucagcgguugcgggguguccguauuaacuuuuaagguucuggaccuuaagaacuacauugauaaacaauugcugccuauccuaaauaagcagucauguaguauuagcaacaucgagaccgugauagaguuccagcagaaaaauaacaggcuccuggaaauuacacgggaguuuucugucaaugcgggagugacuaccccaguguccacauauaugcuuaccaacucagaacuguugagccucaucaaugacaugccgauuacgaacgaucaaaagaaacugaugaguaacaauguccagaucguucgccagcagucuuacuccaucaugugcauuauaaaggaggaaguguuagcauauguagugcaacugccccucuacggcgucaucgacacuccuuguuggaaacuucauacaagcccacugugcaccacuaacacaaaggagggcucgaauauuuguuugacccgaacggaucgugggugguacugcgacaacgccggaucuguguccuucuuuccccaggcugaaaccuguaagguucagucaaauagaguguucugcgauacaaugaacaguaggacucuaccuagcgaggucaaucugugcaacguggacaucuuuaauccaaaauaugauuguaagauaaugaccuccaaaacagacguaucuagcucaguuauuaccagucucggugccaucguguccugcuacggcaagacuaaauguacagcaagcaacaagugccgggggaucauuaagaccuucucuaauggaugugauuaugucucaaacaaaggcguggacacugucaguguggguaauacgcuguacuauguuaacaagcaagaggggaaaagccuuuacgugaagggagaacccaucauuaauuuuuaugacccucugguauucccauccgaugaguuugacgcuucuauaucgcaggucaacgagaaaaucaaccagagcuuggccuucauucgcaaguccgaugaacuccugcacaaugugaacgcgggcaagucaacaaccaauaucaugaucacuaccauuauaaucguuauuaucgugauuuuacugagucuaaucgccgucggccuccugcuuuacugcaaagcaagaugaggacuaguuauaagacugacuagcccgaugggccucccaacgggcccuccuccccuccuugcaccgagauuaauaaaaaaaaaaaaaaaaaaaaaaaaaaaaaaaaaaaaaaaaaaaaaaaaaaaaaaaaaaaaaaaaugcaucccccccccccccccccccccccccccccccaaaggcucuuuucagagccaccagaauu

SEQ ID NO: 14611 - RNA, 802 nt, Artificial Sequence
  HRSV-A/A2__AAB86665.1 matrix protein mRNA human (M2-1)
aggagaaagcuuaccaugagcagaaggaaccccugcaaguucgagauccggggccacugucugaaugggaaacgcugccauuuuucccacaacuacuucgaauggccuccacaugcacuccuugugcgacagaauuuuaugcugaaccguauuuugaagucuauggacaaaucaauagauaccuuaagugagaucagcggagcugcagaacuggacagaacagaggaauaugcccuaggugucguuggcgugcucgaguccuacauugggucuaucaauaacauuacuaagcaaucggcguguguagcuaugucaaaacugcuuacggagcugaauagcgaugacaucaagaaguugagggauaacgaagaguuaaauaguccgaaaauacggguguauaacaccgucaucuccuacauugaaucuaaucgcaagaacaauaaacagacaauccaucugcugaagagacuccccgccgacgugcucaaaaagacuauuaagaacacccuggauauccacaaaagcauaacaauuaauaacccuaaggaguccaccguuucagacacuaacgaucacgccaaaaauaacgacacaaccugaggacuaguuauaagacugacuagcccgaugggccucccaacgggcccuccuccccuccuugcaccgagauuaauaaaaaaaaaaaaaaaaaaaaaaaaaaaaaaaaaaaaaaaaaaaaaaaaaaaaaaaaaaaaaaaaugcaucccccccccccccccccccccccccccccccaaaggcucuuuucagagccaccagaauu

SEQ ID NO: 14612 - protein, 539 aa, Artificial Sequence
  HPIV3/Homo sapiens/PER/FLA4571/2008__AHX22069.1 fusion glycoprotein (F0)
MPISILLIITTMIMASHCQIDITKLQHVGVLVNSPKGMKISQNFETRYLILSLIPKIEDSNSCGDQQIKQYKRLLDRLIIPLYDGLRLQKDVIVTNQESNENTDPRTERFFGGVIGTIALGVATSAQITAAVALVEAKQARSDIEKLKEAIRDTNKAVQSVQSSVGNLIVAIKSVQDYVNKEIVPSIARLGCEAAGLQLGIALTQHYSELTNIFGDNIGSLQEKGIKLQGIASLYRTNITEIFTTSTVDKYDIYDLLFTESIKVRVIDVDLNDYSITLQVRLPLLTRLLNTQIYKVDSISYNIQNREWYIPLPSHIMTKGAFLGGADVKECIEAFSSYICPSDPGFVLNHEMESCLSGNISQCPRTTVTSDIVPRYAFVNGGVVANCITTTCTCNGIGNRINQPPDQGVKIITHKECNTIGINGMLFNTNKEGTLAFYTPDDITLNNSVALDPIDISIELNKAKSDLEESKEWIRRSNQKLDSIGSWHQSSTTIIVILIMMIILFIINITIITIAIKYYRIQKRNRVDQNDKPYVLTNK

SEQ ID NO: 14613 - protein, 572 aa, Artificial Sequence
  HPIV3/BJ/001/08__ADX01268.1 hemagglutinin-neuraminidase (HN)
MEYWKHTNHGKDAGNELETSTATHGNKLTNKITYILWTITLVLLSIVFIIVLTNSIKSEKARESLLQDINNEFMEVTEKIQVASDNTNDLIQSGVNTRLLTIQSHVQNYIPISLTQQISDLRKFISEITIRNDNQEVPPQRITHDVGIKPLNPDDFWRCTSGLPSLMKTPKIRLMPGPGLLAMPTTVDGCVRTPSLVINDLIYAYTSNLITRGCQDIGKSYQVLQIGIITVNSDLVPDLNPRISHTFNINDNRKSCSLALLNTDVYQLCSTPKVDERSDYASSGIEDIVLDIVNYDGSISTTRFKNNNISFDQPYAALYPSVGPGIYYKGKIIFLGYGGLEHPINENAICNTTGCPGKTQRDCNQASHSPWFSDRRMVNSIIVVDKGLNSVPKLKVWTISMRQNYWGSEGRLLLLGNKIYIYTRSTSWHSKLQLGIIDITDYSDIRIKWTWHNVLSRPGNNECPWGHSCPDGCITGVYTDAYPLNPTGSIVSSVILDSQKSRVNPVITYSTATERVNELAIRNKTLSAGYTTTSCITHYNKGYCFHIVEINHKSLNTFQPMLFKTEIPKSCS

SEQ ID NO: 14614 - RNA, 1620 nt, Artificial Sequence
  HPIV3/Homo sapiens/PER/FLA4571/2008__AHX22069.1 fusion glycoprotein CDS gc (F0)
augcccaucagcauccugcucaucaucaccaccaugaucauggccucccacugccagaucgacaucacgaagcugcagcacgugggcguccuggugaacagcccgaaggggaugaagaucucccagaacuucgagacccgcuaccucauccugagccugauccccaagaucgaggacuccaacagcugcggcgaccagcagaucaagcaguacaagcggcuccuggaccgccugaucaucccccucuacgacgggcugcggcugcagaaggacgugaucgucaccaaccaggaguccaacgagaacaccgacccccgcacggagcgguucuucggcggggugaucggcaccaucgcccucggcguggcgaccagcgcccagaucaccgccgccgucgcccugguggaggcgaagcaggcccgcuccgacaucgagaagcugaaggaggccauccgggacacgaacaaggccgugcagagcguccaguccagcguggggaaccucaucguggcgaucaaguccguccaggacuacgugaacaaggagaucgugccgagcaucgcccgccugggcugcgaggccgccgggcugcagcucggcaucgcccugacccagcacuacuccgagcugaccaacaucuucggggacaacaucggcagccuccaggagaagggcaucaagcugcaggggaucgcgucccuguaccggaccaacaucacggagaucuucaccaccagcaccgucgacaaguacgacaucuacgaccuccuguucacggaguccaucaaggugcgcgugaucgacgucgaccugaacgacuacagcaucacccuccaggugcggcugccccugcucacccgccugcugaacacccagaucuacaagguggacagcaucuccuacaacauccagaaccgggagugguacaucccccuccccagccacaucaugacgaagggcgccuuccucgggggcgccgacgucaaggagugcaucgaggccuucuccagcuacaucugcccguccgaccccggcuucgugcugaaccacgagauggagagcugccuguccgggaacaucagccagugcccccgcaccaccgugaccuccgacaucgucccccgguacgccuucgugaacggcggggucguggcgaacugcaucacgacgaccugcacgugcaacggcaucgggaaccgcaucaaccagccgcccgaccagggcgugaagaucaucacccacaaggagugcaacaccaucggcaucaacgggaugcuguucaacaccaacaaggagggcacccuggccuucuacacccccgacgacaucacccucaacaacagcgucgcccuggaccccaucgacaucuccaucgagcugaacaaggccaagagcgaccucgaggaguccaaggaguggauccggcgcagcaaccagaagcuggacuccaucgggagcuggcaccaguccagcaccaccaucaucgugauccugaucaugaugaucauccucuucaucaucaacaucacgaucaucaccaucgccaucaaguacuaccggauccagaagcgcaaccggguggaccagaacgacaagccguacguccugaccaacaaguga

SEQ ID NO: 14615 - RNA, 1719 nt, Artificial Sequence
  HPIV3/BJ/001/08__ADX01268.1 hemagglutinin-neuraminidase (HN)
auggaguacuggaagcacaccaaccacggcaaggacgccgggaacgagcuggagaccagcacggccacccacggcaacaagcucaccaacaagaucaccuacauccuguggacgaucacccuggugcuccuguccaucgucuucaucaucgugcugaccaacagcaucaaguccgagaaggcgcgcgagagccuccugcaggacaucaacaacgaguucauggaggugaccgagaagauccaggucgccuccgacaacacgaacgaccugauccagagcggggugaacacccggcuccugaccauccagucccacgugcagaacuacauccccaucagccugacccagcagaucuccgaccuccgcaaguucaucagcgagaucacgauccggaacgacaaccaggaggucccgccccagcgcaucacccacgacgugggcaucaagccccugaaccccgacgacuucuggcggugcaccuccgggcugccgagccucaugaagacccccaagauccgccugaugcccggccccggccugcucgccaugccgacgaccguggacgggugcguccggacccccucccuggugaucaacgaccugaucuacgccuacaccagcaaccucaucacgcgcggcugccaggacaucgggaaguccuaccaggugcugcagaucggcaucaucaccgucaacagcgaccuggugcccgaccucaacccccggaucucccacaccuucaacaucaacgacaaccgcaagagcugcucccuggcccugcucaacaccgacguguaccagcugugcagcacgccgaaggucgacgagcggagcgacuacgcguccagcgggaucgaggacaucgugcuggacaucgugaacuacgacggcuccaucagcaccacccgcuucaagaacaacaacaucuccuucgaccagcccuacgccgcccucuaccccagcgucggccccgggaucuacuacaagggcaagaucaucuuccugggguacggcggccuggagcacccgaucaacgagaacgccaucugcaacaccacggggugccccggcaagacccagcgggacugcaaccaggcgucccacagccccugguucuccgaccgccggauggugaacagcaucaucguggucgacaaggggcucaacuccgugcccaagcugaagguguggaccaucagcaugcgccagaacuacuggggcuccgaggggcggcugcuccugcugggcaacaagaucuacaucuacacccgcagcacguccuggcacagcaagcuccagcugggcaucaucgacaucaccgacuacuccgacauccggaucaaguggaccuggcacaacguccugagccgcccggggaacaacgagugccccuggggccacuccugccccgacgggugcaucaccggcguguacacggacgccuacccccucaacccgaccgggagcaucgucagcuccgugauccuggacagccagaagucccgggugaaccccgucaucaccuacagcaccgccaccgagcgcgugaacgagcuggccauccgcaacaagacgcucuccgccggcuacaccaccaccagcugcaucacgcacuacaacaagggcuacugcuuccacaucguggagaucaaccacaagucccugaacaccuuccagcccaugcuguucaagaccgagauccccaagagcugcuccuga

SEQ ID NO: 14616 - RNA, 1620 nt, Artificial Sequence
  HPIV3/Homo sapiens/PER/FLA4571/2008__AHX22069.1 fusion glycoprotein CDS human (F0)
augcccaucagcauucugcucauaaucaccacaaugauuauggccucccacugccagaucgacauuacuaaguugcaacaugugggcguccugguuaacucuccuaaagggaugaagaucucacagaauuucgagacgagauacuugauauuaagucugaucccaaaaauugaagauagcaacuccuguggagaccagcagaucaagcaauauaaaaggcuacucgaucggcugauuaucccgcuuuacgacggucugcgcuugcagaaggaugugauaguaaccaaucaggagucuaacgaaaauacagacccccgaacugagcguuucuucggcggggugauuggaaccaucgcucucggcgucgcaacaucggcccagauuaccgcggcuguggcccugguugaagcaaagcaagccagaucagauaucgagaaacugaaggaggcuaucagggacacuaacaaagcagugcagagcguccagaguuccguggguaaucucauuguagccauaaagucuguucaggauuaugugaacaaagaaaucgucccuagcauugcucgguuagggugcgaggccgcgggacugcaacuuggcaucgcauugacacagcacuacuccgaacugaccaauauauuuggcgacaacauugggucacuacaggagaagggaaucaagcuccaagguaucgccagucuguaucgcacgaauauuacugagaucuucaccacaagcacuguggauaaauacgacauuuaugaucuucuguuuaccgaaucuauaaaggugagagucaucgacguugacuugaacgauuacuccauuacacuccaggugaggcugccauuacugacccggcuccuuaauacgcagaucuacaaaguagacucaaucagcuauaacauucagaaucgcgagugguacauaccccugccuagucauaucaugacuaagggcgcuuuccuugggggagccgaugugaaagaauguauugaggcauuuucuuccuauaucugcccaagcgaccccggcuucguccuaaaccacgaaauggagucgugucugucugguaacauuucccaaugcccucgaacaaccgugacuucagauaucguuccaagauacgcuuuugugaaugggggagucguggccaacuguauaacaaccacgugcaccuguaauggcaucggcaacaggauuaaucagccgcccgaccaggggguaaagaucauuacacauaaagagugcaacacuaucggaauaaaugguaugcucuuuaacaccaauaaggaaggcacacuggcguuuuauacuccugaugacauuacccuuaacaauaguguugcccuggauccaaucgacauuagcaucgaguugaacaaggcaaaauccgaucucgaagagucuaaggaauggauacggcguagcaaucagaaacuggacucaaucgggaguuggcaccaauccagcacaaccauuaucgugauuuuaaucaugaugauaauucuguucaucaucaacauuacuaucauuacgauagcuaucaaguacuaucgcauucagaaaagaaauagggucgaccagaacgauaagcccuacgugcuaacaaacaaguga

SEQ ID NO: 14617 - RNA, 1719 nt, Artificial Sequence
  HPIV3/BJ/001/08__ADX01268.1 hemagglutinin-neuraminidase (HN)
auggaguacuggaagcacaccaaccauggcaaagacgccgggaaugaacuggagacaagcacugcuacgcacggaaacaagcucaccaauaaaaucacauauauucuuuggacuauaacccugguguuguuauccaucgucuucauuaucguucugacaaacucuauuaagucagaaaaagcaagagagagucuacuccaggauaucaauaacgaauuuauggaggugaccgagaagauacaaguagccagcgacaauacuaacgaucugauccaguccggugugaauacaaggcuucugaccauucagucucauguccagaacuacauccccauuucguugacgcaacagaucucagaccuccggaaguucauaagcgaaauuacuauccgcaaugauaaccaggaggugccuccacagcgaauuacccacgacguuggcaucaaaccgcugaaucccgaugacuuuuggcguugcacaagugggcugccuucccucaugaagacuccaaaaaucagauuaaugcccggaccuggccugcuugcgaugccaaccacaguggaugguugugucaggacccccucuuuggugauuaacgaccugauauaugcuuacacgagcaaucuaaucacucgggggugccaagauauuggaaaguccuaucagguacuccagaucggcauaauuacaguuaacucagaccuggugccugaucuuaacccacgcaucagucauaccuucaauaucaacgacaauagaaaaagcuguucucuggccuugcucaacacugacgucuaccagcugugcuccacaccgaagguggaugaaaggucagacuaugcaagcaguggcauugaggauaucguguuagacauugucaauuacgaugggucuauauccaccacgcgguuuaagaacaauaacaucagcuucgaccaacccuacgccgcucuguauccuucgguuggaccagguauuuacuauaaaggcaagaucaucuuucucggguacggaggccuugagcaccccauuaaugaaaacgcaauauguaauaccacagguugcccugggaaaacucagcgcgauuguaaccaggccucucacuccccaugguucucagaccgaagaauggugaauaguaucauuguaguggauaagggacugaacagcguccccaaauugaagguguggaccaucuccaugaggcaaaauuauuggggcucugagggccggcuacugcuccuggggaacaaaauuuacaucuauacacguagcacuucauggcauaguaaacuucagcugggaauaaucgacauuaccgauuacuccgacauccgcauuaaguggacauggcacaacguuuugagcagaccggguaauaacgaaugcccuuggggccauucuugucccgacgggugcaucaccggaguguacacugaugcuuauccacucaauccuacgggcucaauagucaguagcgugauucuggacucccagaagucuaggguaaaccccguuaucacauacucgaccgccacugagcgggugaaugaauuagcgauucgaaacaagacccugagcgcagguuauacaaccacuuccuguaucacacacuacaauaaaggguauugcuuucacauagucgagaucaaccauaagucacuaaauacguuccagccaaugcucuuuaaaaccgagauucccaagaguugcucuuga

SEQ ID NO: 14618 - RNA, 1892 nt, Artificial Sequence
  HPIV3/Homo sapiens/PER/FLA4571/2008__AHX22069.1 fusion glycoprotein mRNA gc (F0)
aggagagucccgcagucggcguccagcggcucugcuuguucgugugugugucguugcaggccuuauucaagcuuaccaugcccaucagcauccugcucaucaucaccaccaugaucauggccucccacugccagaucgacaucacgaagcugcagcacgugggcguccuggugaacagcccgaaggggaugaagaucucccagaacuucgagacccgcuaccucauccugagccugauccccaagaucgaggacuccaacagcugcggcgaccagcagaucaagcaguacaagcggcuccuggaccgccugaucaucccccucuacgacgggcugcggcugcagaaggacgugaucgucaccaaccaggaguccaacgagaacaccgacccccgcacggagcgguucuucggcggggugaucggcaccaucgcccucggcguggcgaccagcgcccagaucaccgccgccgucgcccugguggaggcgaagcaggcccgcuccgacaucgagaagcugaaggaggccauccgggacacgaacaaggccgugcagagcguccaguccagcguggggaaccucaucguggcgaucaaguccguccaggacuacgugaacaaggagaucgugccgagcaucgcccgccugggcugcgaggccgccgggcugcagcucggcaucgcccugacccagcacuacuccgagcugaccaacaucuucggggacaacaucggcagccuccaggagaagggcaucaagcugcaggggaucgcgucccuguaccggaccaacaucacggagaucuucaccaccagcaccgucgacaaguacgacaucuacgaccuccuguucacggaguccaucaaggugcgcgugaucgacgucgaccugaacgacuacagcaucacccuccaggugcggcugccccugcucacccgccugcugaacacccagaucuacaagguggacagcaucuccuacaacauccagaaccgggagugguacaucccccuccccagccacaucaugacgaagggcgccuuccucgggggcgccgacgucaaggagugcaucgaggccuucuccagcuacaucugcccguccgaccccggcuucgugcugaaccacgagauggagagcugccuguccgggaacaucagccagugcccccgcaccaccgugaccuccgacaucgucccccgguacgccuucgugaacggcggggucguggcgaacugcaucacgacgaccugcacgugcaacggcaucgggaaccgcaucaaccagccgcccgaccagggcgugaagaucaucacccacaaggagugcaacaccaucggcaucaacgggaugcuguucaacaccaacaaggagggcacccuggccuucuacacccccgacgacaucacccucaacaacagcgucgcccuggaccccaucgacaucuccaucgagcugaacaaggccaagagcgaccucgaggaguccaaggaguggauccggcgcagcaaccagaagcuggacuccaucgggagcuggcaccaguccagcaccaccaucaucgugauccugaucaugaugaucauccucuucaucaucaacaucacgaucaucaccaucgccaucaaguacuaccggauccagaagcgcaaccggguggaccagaacgacaagccguacguccugaccaacaagugaggacuagucccuguucccagagcccacuuuuuuuucuuuuuuugaaauaaaauagccugucuuucagaucucaaaggcucuuuucagagccaccaaaaaaaaaaaaaaaaaaaaaaaaaaaaaaaaaaaaaaaaaaaaaaaaaaaaaaaaaaaaaaaaaaaaaaaaaaaaaaaaaaaaaaaaaaaaaaaaaaaaa

SEQ ID NO: 14619 - RNA, 1991 nt, Artificial Sequence
  HPIV3/BJ/001/08__ADX01268.1 hemagglutinin-neuraminidase (HN)
aggagagucccgcagucggcguccagcggcucugcuuguucgugugugugucguugcaggccuuauucaagcuuaccauggaguacuggaagcacaccaaccacggcaaggacgccgggaacgagcuggagaccagcacggccacccacggcaacaagcucaccaacaagaucaccuacauccuguggacgaucacccuggugcuccuguccaucgucuucaucaucgugcugaccaacagcaucaaguccgagaaggcgcgcgagagccuccugcaggacaucaacaacgaguucauggaggugaccgagaagauccaggucgccuccgacaacacgaacgaccugauccagagcggggugaacacccggcuccugaccauccagucccacgugcagaacuacauccccaucagccugacccagcagaucuccgaccuccgcaaguucaucagcgagaucacgauccggaacgacaaccaggaggucccgccccagcgcaucacccacgacgugggcaucaagccccugaaccccgacgacuucuggcggugcaccuccgggcugccgagccucaugaagacccccaagauccgccugaugcccggccccggccugcucgccaugccgacgaccguggacgggugcguccggacccccucccuggugaucaacgaccugaucuacgccuacaccagcaaccucaucacgcgcggcugccaggacaucgggaaguccuaccaggugcugcagaucggcaucaucaccgucaacagcgaccuggugcccgaccucaacccccggaucucccacaccuucaacaucaacgacaaccgcaagagcugcucccuggcccugcucaacaccgacguguaccagcugugcagcacgccgaaggucgacgagcggagcgacuacgcguccagcgggaucgaggacaucgugcuggacaucgugaacuacgacggcuccaucagcaccacccgcuucaagaacaacaacaucuccuucgaccagcccuacgccgcccucuaccccagcgucggccccgggaucuacuacaagggcaagaucaucuuccugggguacggcggccuggagcacccgaucaacgagaacgccaucugcaacaccacggggugccccggcaagacccagcgggacugcaaccaggcgucccacagccccugguucuccgaccgccggauggugaacagcaucaucguggucgacaaggggcucaacuccgugcccaagcugaagguguggaccaucagcaugcgccagaacuacuggggcuccgaggggcggcugcuccugcugggcaacaagaucuacaucuacacccgcagcacguccuggcacagcaagcuccagcugggcaucaucgacaucaccgacuacuccgacauccggaucaaguggaccuggcacaacguccugagccgcccggggaacaacgagugccccuggggccacuccugccccgacgggugcaucaccggcguguacacggacgccuacccccucaacccgaccgggagcaucgucagcuccgugauccuggacagccagaagucccgggugaaccccgucaucaccuacagcaccgccaccgagcgcgugaacgagcuggccauccgcaacaagacgcucuccgccggcuacaccaccaccagcugcaucacgcacuacaacaagggcuacugcuuccacaucguggagaucaaccacaagucccugaacaccuuccagcccaugcuguucaagaccgagauccccaagagcugcuccugaggacuagucccuguucccagagcccacuuuuuuuucuuuuuuugaaauaaaauagccugucuuucagaucucaaaggcucuuuucagagccaccaaaaaaaaaaaaaaaaaaaaaaaaaaaaaaaaaaaaaaaaaaaaaaaaaaaaaaaaaaaaaaaaaaaaaaaaaaaaaaaaaaaaaaaaaaaaaaaaaaaaa

SEQ ID NO: 14620 - RNA, 1892 nt, Artificial Sequence
  HPIV3/Homo sapiens/PER/FLA4571/2008__AHX22069.1 fusion glycoprotein mRNA human (F0)
aggagagucccgcagucggcguccagcggcucugcuuguucgugugugugucguugcaggccuuauucaagcuuaccaugcccaucagcauucugcucauaaucaccacaaugauuauggccucccacugccagaucgacauuacuaaguugcaacaugugggcguccugguuaacucuccuaaagggaugaagaucucacagaauuucgagacgagauacuugauauuaagucugaucccaaaaauugaagauagcaacuccuguggagaccagcagaucaagcaauauaaaaggcuacucgaucggcugauuaucccgcuuuacgacggucugcgcuugcagaaggaugugauaguaaccaaucaggagucuaacgaaaauacagacccccgaacugagcguuucuucggcggggugauuggaaccaucgcucucggcgucgcaacaucggcccagauuaccgcggcuguggcccugguugaagcaaagcaagccagaucagauaucgagaaacugaaggaggcuaucagggacacuaacaaagcagugcagagcguccagaguuccguggguaaucucauuguagccauaaagucuguucaggauuaugugaacaaagaaaucgucccuagcauugcucgguuagggugcgaggccgcgggacugcaacuuggcaucgcauugacacagcacuacuccgaacugaccaauauauuuggcgacaacauugggucacuacaggagaagggaaucaagcuccaagguaucgccagucuguaucgcacgaauauuacugagaucuucaccacaagcacuguggauaaauacgacauuuaugaucuucuguuuaccgaaucuauaaaggugagagucaucgacguugacuugaacgauuacuccauuacacuccaggugaggcugccauuacugacccggcuccuuaauacgcagaucuacaaaguagacucaaucagcuauaacauucagaaucgcgagugguacauaccccugccuagucauaucaugacuaagggcgcuuuccuugggggagccgaugugaaagaauguauugaggcauuuucuuccuauaucugcccaagcgaccccggcuucguccuaaaccacgaaauggagucgugucugucugguaacauuucccaaugcccucgaacaaccgugacuucagauaucguuccaagauacgcuuuugugaaugggggagucguggccaacuguauaacaaccacgugcaccuguaauggcaucggcaacaggauuaaucagccgcccgaccaggggguaaagaucauuacacauaaagagugcaacacuaucggaauaaaugguaugcucuuuaacaccaauaaggaaggcacacuggcguuuuauacuccugaugacauuacccuuaacaauaguguugcccuggauccaaucgacauuagcaucgaguugaacaaggcaaaauccgaucucgaagagucuaaggaauggauacggcguagcaaucagaaacuggacucaaucgggaguuggcaccaauccagcacaaccauuaucgugauuuuaaucaugaugauaauucuguucaucaucaacauuacuaucauuacgauagcuaucaaguacuaucgcauucagaaaagaaauagggucgaccagaacgauaagcccuacgugcuaacaaacaagugaggacuagucccuguucccagagcccacuuuuuuuucuuuuuuugaaauaaaauagccugucuuucagaucucaaaggcucuuuucagagccaccaaaaaaaaaaaaaaaaaaaaaaaaaaaaaaaaaaaaaaaaaaaaaaaaaaaaaaaaaaaaaaaaaaaaaaaaaaaaaaaaaaaaaaaaaaaaaaaaaaaaa

SEQ ID NO: 14621 - RNA, 1991 nt, Artificial Sequence
  HPIV3/BJ/001/08__ADX01268.1 hemagglutinin-neuraminidase (HN)
aggagagucccgcagucggcguccagcggcucugcuuguucgugugugugucguugcaggccuuauucaagcuuaccauggaguacuggaagcacaccaaccauggcaaagacgccgggaaugaacuggagacaagcacugcuacgcacggaaacaagcucaccaauaaaaucacauauauucuuuggacuauaacccugguguuguuauccaucgucuucauuaucguucugacaaacucuauuaagucagaaaaagcaagagagagucuacuccaggauaucaauaacgaauuuauggaggugaccgagaagauacaaguagccagcgacaauacuaacgaucugauccaguccggugugaauacaaggcuucugaccauucagucucauguccagaacuacauccccauuucguugacgcaacagaucucagaccuccggaaguucauaagcgaaauuacuauccgcaaugauaaccaggaggugccuccacagcgaauuacccacgacguuggcaucaaaccgcugaaucccgaugacuuuuggcguugcacaagugggcugccuucccucaugaagacuccaaaaaucagauuaaugcccggaccuggccugcuugcgaugccaaccacaguggaugguugugucaggacccccucuuuggugauuaacgaccugauauaugcuuacacgagcaaucuaaucacucgggggugccaagauauuggaaaguccuaucagguacuccagaucggcauaauuacaguuaacucagaccuggugccugaucuuaacccacgcaucagucauaccuucaauaucaacgacaauagaaaaagcuguucucuggccuugcucaacacugacgucuaccagcugugcuccacaccgaagguggaugaaaggucagacuaugcaagcaguggcauugaggauaucguguuagacauugucaauuacgaugggucuauauccaccacgcgguuuaagaacaauaacaucagcuucgaccaacccuacgccgcucuguauccuucgguuggaccagguauuuacuauaaaggcaagaucaucuuucucggguacggaggccuugagcaccccauuaaugaaaacgcaauauguaauaccacagguugcccugggaaaacucagcgcgauuguaaccaggccucucacuccccaugguucucagaccgaagaauggugaauaguaucauuguaguggauaagggacugaacagcguccccaaauugaagguguggaccaucuccaugaggcaaaauuauuggggcucugagggccggcuacugcuccuggggaacaaaauuuacaucuauacacguagcacuucauggcauaguaaacuucagcugggaauaaucgacauuaccgauuacuccgacauccgcauuaaguggacauggcacaacguuuugagcagaccggguaauaacgaaugcccuuggggccauucuugucccgacgggugcaucaccggaguguacacugaugcuuauccacucaauccuacgggcucaauagucaguagcgugauucuggacucccagaagucuaggguaaaccccguuaucacauacucgaccgccacugagcgggugaaugaauuagcgauucgaaacaagacccugagcgcagguuauacaaccacuuccuguaucacacacuacaauaaaggguauugcuuucacauagucgagaucaaccauaagucacuaaauacguuccagccaaugcucuuuaaaaccgagauucccaagaguugcucuugaggacuagucccuguucccagagcccacuuuuuuuucuuuuuuugaaauaaaauagccugucuuucagaucucaaaggcucuuuucagagccaccaaaaaaaaaaaaaaaaaaaaaaaaaaaaaaaaaaaaaaaaaaaaaaaaaaaaaaaaaaaaaaaaaaaaaaaaaaaaaaaaaaaaaaaaaaaaaaaaaaaaa

SEQ ID NO: 14622 - RNA, 1837 nt, Artificial Sequence
  HPIV3/Homo sapiens/PER/FLA4571/2008__AHX22069.1 fusion glycoprotein mRNA gc (F0)
aggagaaagcuuaccaugcccaucagcauccugcucaucaucaccaccaugaucauggccucccacugccagaucgacaucacgaagcugcagcacgugggcguccuggugaacagcccgaaggggaugaagaucucccagaacuucgagacccgcuaccucauccugagccugauccccaagaucgaggacuccaacagcugcggcgaccagcagaucaagcaguacaagcggcuccuggaccgccugaucaucccccucuacgacgggcugcggcugcagaaggacgugaucgucaccaaccaggaguccaacgagaacaccgacccccgcacggagcgguucuucggcggggugaucggcaccaucgcccucggcguggcgaccagcgcccagaucaccgccgccgucgcccugguggaggcgaagcaggcccgcuccgacaucgagaagcugaaggaggccauccgggacacgaacaaggccgugcagagcguccaguccagcguggggaaccucaucguggcgaucaaguccguccaggacuacgugaacaaggagaucgugccgagcaucgcccgccugggcugcgaggccgccgggcugcagcucggcaucgcccugacccagcacuacuccgagcugaccaacaucuucggggacaacaucggcagccuccaggagaagggcaucaagcugcaggggaucgcgucccuguaccggaccaacaucacggagaucuucaccaccagcaccgucgacaaguacgacaucuacgaccuccuguucacggaguccaucaaggugcgcgugaucgacgucgaccugaacgacuacagcaucacccuccaggugcggcugccccugcucacccgccugcugaacacccagaucuacaagguggacagcaucuccuacaacauccagaaccgggagugguacaucccccuccccagccacaucaugacgaagggcgccuuccucgggggcgccgacgucaaggagugcaucgaggccuucuccagcuacaucugcccguccgaccccggcuucgugcugaaccacgagauggagagcugccuguccgggaacaucagccagugcccccgcaccaccgugaccuccgacaucgucccccgguacgccuucgugaacggcggggucguggcgaacugcaucacgacgaccugcacgugcaacggcaucgggaaccgcaucaaccagccgcccgaccagggcgugaagaucaucacccacaaggagugcaacaccaucggcaucaacgggaugcuguucaacaccaacaaggagggcacccuggccuucuacacccccgacgacaucacccucaacaacagcgucgcccuggaccccaucgacaucuccaucgagcugaacaaggccaagagcgaccucgaggaguccaaggaguggauccggcgcagcaaccagaagcuggacuccaucgggagcuggcaccaguccagcaccaccaucaucgugauccugaucaugaugaucauccucuucaucaucaacaucacgaucaucaccaucgccaucaaguacuaccggauccagaagcgcaaccggguggaccagaacgacaagccguacguccugaccaacaagugaggacuaguuauaagacugacuagcccgaugggccucccaacgggcccuccuccccuccuugcaccgagauuaauaaaaaaaaaaaaaaaaaaaaaaaaaaaaaaaaaaaaaaaaaaaaaaaaaaaaaaaaaaaaaaaaugcaucccccccccccccccccccccccccccccccaaaggcucuuuucagagccaccagaauu

SEQ ID NO: 14623 - RNA, 1936 nt, Artificial Sequence
  HPIV3/BJ/001/08__ADX01268.1 hemagglutinin-neuraminidase (HN)
aggagaaagcuuaccauggaguacuggaagcacaccaaccacggcaaggacgccgggaacgagcuggagaccagcacggccacccacggcaacaagcucaccaacaagaucaccuacauccuguggacgaucacccuggugcuccuguccaucgucuucaucaucgugcugaccaacagcaucaaguccgagaaggcgcgcgagagccuccugcaggacaucaacaacgaguucauggaggugaccgagaagauccaggucgccuccgacaacacgaacgaccugauccagagcggggugaacacccggcuccugaccauccagucccacgugcagaacuacauccccaucagccugacccagcagaucuccgaccuccgcaaguucaucagcgagaucacgauccggaacgacaaccaggaggucccgccccagcgcaucacccacgacgugggcaucaagccccugaaccccgacgacuucuggcggugcaccuccgggcugccgagccucaugaagacccccaagauccgccugaugcccggccccggccugcucgccaugccgacgaccguggacgggugcguccggacccccucccuggugaucaacgaccugaucuacgccuacaccagcaaccucaucacgcgcggcugccaggacaucgggaaguccuaccaggugcugcagaucggcaucaucaccgucaacagcgaccuggugcccgaccucaacccccggaucucccacaccuucaacaucaacgacaaccgcaagagcugcucccuggcccugcucaacaccgacguguaccagcugugcagcacgccgaaggucgacgagcggagcgacuacgcguccagcgggaucgaggacaucgugcuggacaucgugaacuacgacggcuccaucagcaccacccgcuucaagaacaacaacaucuccuucgaccagcccuacgccgcccucuaccccagcgucggccccgggaucuacuacaagggcaagaucaucuuccugggguacggcggccuggagcacccgaucaacgagaacgccaucugcaacaccacggggugccccggcaagacccagcgggacugcaaccaggcgucccacagccccugguucuccgaccgccggauggugaacagcaucaucguggucgacaaggggcucaacuccgugcccaagcugaagguguggaccaucagcaugcgccagaacuacuggggcuccgaggggcggcugcuccugcugggcaacaagaucuacaucuacacccgcagcacguccuggcacagcaagcuccagcugggcaucaucgacaucaccgacuacuccgacauccggaucaaguggaccuggcacaacguccugagccgcccggggaacaacgagugccccuggggccacuccugccccgacgggugcaucaccggcguguacacggacgccuacccccucaacccgaccgggagcaucgucagcuccgugauccuggacagccagaagucccgggugaaccccgucaucaccuacagcaccgccaccgagcgcgugaacgagcuggccauccgcaacaagacgcucuccgccggcuacaccaccaccagcugcaucacgcacuacaacaagggcuacugcuuccacaucguggagaucaaccacaagucccugaacaccuuccagcccaugcuguucaagaccgagauccccaagagcugcuccugaggacuaguuauaagacugacuagcccgaugggccucccaacgggcccuccuccccuccuugcaccgagauuaauaaaaaaaaaaaaaaaaaaaaaaaaaaaaaaaaaaaaaaaaaaaaaaaaaaaaaaaaaaaaaaaaugcaucccccccccccccccccccccccccccccccaaaggcucuuuucagagccaccagaauu

SEQ ID NO: 14624 - RNA, 1837 nt, Artificial Sequence
  HPIV3/Homo sapiens/PER/FLA4571/2008__AHX22069.1 fusion glycoprotein mRNA human (F0)
aggagaaagcuuaccaugcccaucagcauucugcucauaaucaccacaaugauuauggccucccacugccagaucgacauuacuaaguugcaacaugugggcguccugguuaacucuccuaaagggaugaagaucucacagaauuucgagacgagauacuugauauuaagucugaucccaaaaauugaagauagcaacuccuguggagaccagcagaucaagcaauauaaaaggcuacucgaucggcugauuaucccgcuuuacgacggucugcgcuugcagaaggaugugauaguaaccaaucaggagucuaacgaaaauacagacccccgaacugagcguuucuucggcggggugauuggaaccaucgcucucggcgucgcaacaucggcccagauuaccgcggcuguggcccugguugaagcaaagcaagccagaucagauaucgagaaacugaaggaggcuaucagggacacuaacaaagcagugcagagcguccagaguuccguggguaaucucauuguagccauaaagucuguucaggauuaugugaacaaagaaaucgucccuagcauugcucgguuagggugcgaggccgcgggacugcaacuuggcaucgcauugacacagcacuacuccgaacugaccaauauauuuggcgacaacauugggucacuacaggagaagggaaucaagcuccaagguaucgccagucuguaucgcacgaauauuacugagaucuucaccacaagcacuguggauaaauacgacauuuaugaucuucuguuuaccgaaucuauaaaggugagagucaucgacguugacuugaacgauuacuccauuacacuccaggugaggcugccauuacugacccggcuccuuaauacgcagaucuacaaaguagacucaaucagcuauaacauucagaaucgcgagugguacauaccccugccuagucauaucaugacuaagggcgcuuuccuugggggagccgaugugaaagaauguauugaggcauuuucuuccuauaucugcccaagcgaccccggcuucguccuaaaccacgaaauggagucgugucugucugguaacauuucccaaugcccucgaacaaccgugacuucagauaucguuccaagauacgcuuuugugaaugggggagucguggccaacuguauaacaaccacgugcaccuguaauggcaucggcaacaggauuaaucagccgcccgaccaggggguaaagaucauuacacauaaagagugcaacacuaucggaauaaaugguaugcucuuuaacaccaauaaggaaggcacacuggcguuuuauacuccugaugacauuacccuuaacaauaguguugcccuggauccaaucgacauuagcaucgaguugaacaaggcaaaauccgaucucgaagagucuaaggaauggauacggcguagcaaucagaaacuggacucaaucgggaguuggcaccaauccagcacaaccauuaucgugauuuuaaucaugaugauaauucuguucaucaucaacauuacuaucauuacgauagcuaucaaguacuaucgcauucagaaaagaaauagggucgaccagaacgauaagcccuacgugcuaacaaacaagugaggacuaguuauaagacugacuagcccgaugggccucccaacgggcccuccuccccuccuugcaccgagauuaauaaaaaaaaaaaaaaaaaaaaaaaaaaaaaaaaaaaaaaaaaaaaaaaaaaaaaaaaaaaaaaaaugcaucccccccccccccccccccccccccccccccaaaggcucuuuucagagccaccagaauu

SEQ ID NO: 14625 - RNA, 1936 nt, Artificial Sequence
  HPIV3/BJ/001/08__ADX01268.1 hemagglutinin-neuraminidase (HN)
aggagaaagcuuaccauggaguacuggaagcacaccaaccauggcaaagacgccgggaaugaacuggagacaagcacugcuacgcacggaaacaagcucaccaauaaaaucacauauauucuuuggacuauaacccugguguuguuauccaucgucuucauuaucguucugacaaacucuauuaagucagaaaaagcaagagagagucuacuccaggauaucaauaacgaauuuauggaggugaccgagaagauacaaguagccagcgacaauacuaacgaucugauccaguccggugugaauacaaggcuucugaccauucagucucauguccagaacuacauccccauuucguugacgcaacagaucucagaccuccggaaguucauaagcgaaauuacuauccgcaaugauaaccaggaggugccuccacagcgaauuacccacgacguuggcaucaaaccgcugaaucccgaugacuuuuggcguugcacaagugggcugccuucccucaugaagacuccaaaaaucagauuaaugcccggaccuggccugcuugcgaugccaaccacaguggaugguugugucaggacccccucuuuggugauuaacgaccugauauaugcuuacacgagcaaucuaaucacucgggggugccaagauauuggaaaguccuaucagguacuccagaucggcauaauuacaguuaacucagaccuggugccugaucuuaacccacgcaucagucauaccuucaauaucaacgacaauagaaaaagcuguucucuggccuugcucaacacugacgucuaccagcugugcuccacaccgaagguggaugaaaggucagacuaugcaagcaguggcauugaggauaucguguuagacauugucaauuacgaugggucuauauccaccacgcgguuuaagaacaauaacaucagcuucgaccaacccuacgccgcucuguauccuucgguuggaccagguauuuacuauaaaggcaagaucaucuuucucggguacggaggccuugagcaccccauuaaugaaaacgcaauauguaauaccacagguugcccugggaaaacucagcgcgauuguaaccaggccucucacuccccaugguucucagaccgaagaauggugaauaguaucauuguaguggauaagggacugaacagcguccccaaauugaagguguggaccaucuccaugaggcaaaauuauuggggcucugagggccggcuacugcuccuggggaacaaaauuuacaucuauacacguagcacuucauggcauaguaaacuucagcugggaauaaucgacauuaccgauuacuccgacauccgcauuaaguggacauggcacaacguuuugagcagaccggguaauaacgaaugcccuuggggccauucuugucccgacgggugcaucaccggaguguacacugaugcuuauccacucaauccuacgggcucaauagucaguagcgugauucuggacucccagaagucuaggguaaaccccguuaucacauacucgaccgccacugagcgggugaaugaauuagcgauucgaaacaagacccugagcgcagguuauacaaccacuuccuguaucacacacuacaauaaaggguauugcuuucacauagucgagaucaaccauaagucacuaaauacguuccagccaaugcucuuuaaaaccgagauucccaagaguugcucuugaggacuaguuauaagacugacuagcccgaugggccucccaacgggcccuccuccccuccuugcaccgagauuaauaaaaaaaaaaaaaaaaaaaaaaaaaaaaaaaaaaaaaaaaaaaaaaaaaaaaaaaaaaaaaaaaugcaucccccccccccccccccccccccccccccccaaaggcucuuuucagagccaccagaauu

SEQ ID NO: 14626 - protein, 539 aa, Artificial Sequence
  HMPV/TN/92-4__ABM67072.1 fusion glycoprotein (F0)
MSWKVVIIFSLLITPQHGLKESYLEESCSTITEGYLSVLRTGWYTNVFTLEVGDVENLTCSDGPSLIKTELDLTKSALRELKTVSADQLAREEQIENPRQSRFVLGAIALGVAAAAAVTAGVAIAKTIRLESEVTAINNALKKTNEAVSTLGNGVRVLATAVRELKDFVSKNLTRAINKNKCDIDDLKMAVSFSQFNRRFLNVVRQFSDNAGITPAISLDLMTDAELARAVPNMPTSAGQIKLMLENRAMVRRKGFGILIGVYGSSVIYMVQLPIFGVIDTPCWIVKAAPSCSEKKGNYACLLREDQGWYCQNAGSTVYYPNEKDCETRGDHVFCDTAAGINVAEQSKECNINISTTNYPCKVSTGRHPISMVALSPLGALVACYKGVSCSIGSNRVGIIKQLNKGCSYITNQDADTVTIDNTVYQLSKVEGEQHVIKGRPVSSSFDPIKFPEDQFNVALDQVFENIENSQALVDQSNRILSSAEKGNTGFIIVIILIAVLGSSMILVSIFIIIKKTKKPTGAPPELSGVTNNGFIPHN

SEQ ID NO: 14627 - protein, 539 aa, Artificial Sequence
  HMPV/TN/92-4__ABM67072.1 fusion glycoprotein (variant)
MSWKVVIIFSLLITPQHGLKESYLEESCSTITEGYLSVLRTGWYTNVFTLEVGDVENLTCSDGPSLIKTELDLTKSALRELKTVSADQLAREEQIENPGSGSFVLGAIALGVAAAAAVTAGVAICKTIRLESEVTAINNALKKTNEAVSTLGNGVRVLAFAVRELKDFVSKNLTRALNKNKCDIDDLKMAVSFSQFNRRFLNVVRQFSDNAGITPAISLDLMTDAELARAVPNMPTSAGQIKLMLENRAMVRRKGFGILCGVYGSSVIYMVQLPIFGVIDTPCWIVKAAPSCSEKKGNYACLLREDQGWYCQNAGSTVYYPNEKDCETRGDHVFCDTAAGINVAEQSKECNINISTTNYPCKVSTGRHPISMVALSPLGALVACYKGVSCSIGSNRVGIIKQLNKGCSYITNQDADTVTIDNTVYQLSKVEGEQHVIKGRPVSSSFDPIKFPEDQFNVALDQVFENIENSQALVDQSNRILSSAEKGNTGFIIVIILIAVLGSSMILVSIFIIIKKTKKPTGAPPELSGVTNNGFIPHN

SEQ ID NO: 14628 - protein, 539 aa, Artificial Sequence
  HMPV/TN/92-4__ABM67072.1 fusion glycoprotein (variant)
MSWKVVIIFSLLITPQHGLKESYLEESCSTITEGYLSVLRTGWYTNVFTLEVGDVENLTCSDGPSLIKTELDLTKSALRELKTVSADQLAREEQIENPGSGSFVLGAIALGVAAAAAVTAGVAICKTIRLESEVTAINNALKKTNEAVSTLGNGVRVLATAVRELKDFVSKNLTRAINKNKCDIDDLKMAVSFSQFNRRFLNVVRQFSDNAGITPAISLDLMTDAELARAVPNMPTSAGQIKLMLENRAMVRRKGFGILCGVYGSSVIYMVQLPIFGVIDTPCWIVKAAPSCSEKKGNYACLLREDQGWYCQNAGSTVYYPNEKDCETRGDHVFCDTAAGINVAEQSKECNINISTTNYPCKVSTGRHPISMVALSPLGALVACYKGVSCSIGSNRVGIIKQLNKGCSYITNQDADTVTIDNTVYQLSKVEGEQHVIKGRPVSSSFDPIKFPEHQWHVALDQVFENIENSQALVDQSNRILSSAEKGNTGFIIVIILIAVLGSSMILVSIFIIIKKTKKPTGAPPELSGVTNNGFIPHN

SEQ ID NO: 14629 - protein, 539 aa, Artificial Sequence
  HMPV/TN/92-4__ABM67072.1 fusion glycoprotein (variant)
MSWKVVIIFSLLITPQHGLKESYLEESCSTITEGYLSVLRTGWYTNVFTLEVGDVENLTCSDGPSLIKTELDLLKSALRELKTVSADQLAREEQIENPGSGSFVLGAIALGVAAAAAVTAGVAIAKTIRLESEVTAINNALKKTNEAVSTLGNGVRVLATAVRELKDFVSKNLTRAINKNKCDIPDLKMAVSFSQFNRRFLNVVRQFSDNAGITPAISLDLMTDAELARAVPNMPTSAGQIKLMLENRAMVRRKGFGILIGVYGSSVIYMVQLPIFGVIDTPCWIVKAAPSCSEKKGNYACLLREDQGWYCQNAGSTVYYPNEKDCETRGDHVFCDTAAGINVAEQSKECNINISTTNYPCKVSTGRHPISMVALSPLGALVACYKGVSCSIGSNRVGIIKQLNKGCSYITNQDADTVTIDNTVYQLSKVEGEQHVIKGRPVSSSFDPIKFPEDQFQVALDQVFENIENSQALVDQSNRILSSAEKGNTGFIIVIILIAVLGSSMILVSIFIIIKKTKKPTGAPPELSGVTNNGFIPHN

SEQ ID NO: 14630 - protein, 539 aa, Artificial Sequence
  HMPV/TN/92-4__ABM67072.1 fusion glycoprotein (variant)
MSWKVVIIFSLLITPQHGLKESYLEESCSTITEGYLSVLRTGWYTNVFTLEVGDVENLTCSDGPSLIKTELDLLKSALRELKTVSADQLAREEQIENPGSGSFVLGAIALGVAAAAAVTAGVAIAKTIRLESEVTAINNALKKTNEAVSTLGNGVRVLATAVRELKDFVSKNLTRAINKNKCDIPDLKMAVSFSQFNRRFLNVVRQFSDNAGITPAISLDLMTDAELARAVPNMPTSAGQIKLMLENRAMVRRKGFGILIGVYGSSVIYMVQLPIFGVIDTPCWIVKAAPSCSEKKGNYACLLREDQGWYCQNAGSTVYYPNEKDCETRGDHVFCDTAAGINVAEQSKECNINISTTNYPCKVSTGRHPISMVALSPLGALVACYKGVSCSIGSNRVGIIKQLNKGCSYITNQDADTVTIDNTVYQLSKVEGEQHVIKGRPVSSSFDPIKFPENQFQVALDQVFENIENSQALVDQSNRILSSAEKGNTGFIIVIILIAVLGSSMILVSIFIIIKKTKKPTGAPPELSGVTNNGFIPHN

SEQ ID NO: 14631 - protein, 539 aa, Artificial Sequence
  HMPV/TN/92-4__ABM67072.1 fusion glycoprotein (variant)
MSWKVVIIFSLLITPQHGLKESYLEESCSTITEGYLSVLRTGWYTNVFTLEVGDVENLTCSDGPSLIKTELDLLKSALRELKTVSADQLAREEQIENPGSGSFVLGAIALGVAAAAAVTAGVAIAKTIRLESEVTAINNALKKTNEAVSTLGNGVRVLATAVRELKDFVLKNLTRAINKNKCDIPDLKMAVSFSQFNRRFLNVVRQFSDNAGITPAISLDLMTDAELARAVPNMPTSAGQIKLMLENRAMVRRKGFGILIGVYGSSVIYMVQLPIFGVIDTPCWIVKAAPSCSEKKGNYACLLREDQGWYCQNAGSTVYYPNEKDCETRGDHVFCDTAAGINVAEQSKECNINISTTNYPCKVSTGRHPISMVALSPLGALVACYKGVSCSIGSNRVGIIKQLNKGCSYITNQDADTVTIDNTVYQLSKVEGEQHVIKGRPVSSSFDPIKFPEDQFQVALDQVFENIENSQALVDQSNRILSSAEKGNTGFIIVIILIAVLGSSMILVSIFIIIKKTKKPTGAPPELSGVTNNGFIPHN

SEQ ID NO: 14632 - protein, 539 aa, Artificial Sequence
  HMPV/TN/92-4__ABM67072.1 fusion glycoprotein (variant)
MSWKVVIIFSLLITPQHGLKESYLEESCSTITEGYLSVLRTGWYTNVFTLEVGDVENLTCSDGPSLIKTELDLLKSALRELKTVSADQLAREEQIENPGSGSFVLGAIALGVAAAAAVTAGVAIAKTIRLESEVTAINNALKKTNEAVSTLGNGVRVLATAVRELKDFVLKNLTRAINKNKCDIPDLKMAVSFSQFNRRFLNVVRQFSDNAGITPAISLDLMTDAELARAVPNMPTSAGQIKLMLENRAMVRRKGFGILIGVYGSSVIYMVQLPIFGVIDTPCWIVKAAPSCSEKKGNYACLLREDQGWYCQNAGSTVYYPNEKDCETRGDHVFCDTAAGINVAEQSKECNINISTTNYPCKVSTGRHPISMVALSPLGALVACYKGVSCSIGSNRVGIIKQLNKGCSYITNQDADTVTIDNTVYQLSKVEGEQHVIKGRPVSSSFDPIKFPENQFQVALDQVFENIENSQALVDQSNRILSSAEKGNTGFIIVIILIAVLGSSMILVSIFIIIKKTKKPTGAPPELSGVTNNGFIPHN

SEQ ID NO: 14633 - protein, 539 aa, Artificial Sequence
  HMPV/TN/92-4__ABM67072.1 fusion glycoprotein (variant)
MSWKVVIIFSLLITPQHGLKESYLEESCSTITEGYLSVLRTGWYTNVFTLPVGDVENLTCSDGPSLIKTELDLLKSALRELKTVSADQLAREEQIENPGSGSFVLGAIALGVAAAAAVTAGVAIAKTIRLESEVTAINNALKKTNEAVSTLGNGVRVLATAVRELKDFVSKNLTRAINKNKCDIDDLKMAVSFSQFNRRFLNVVRQFSDNAGITPAISLDLMTDAELARAVPNMPTSAGQIKLMLENRAMVRRKGFGILIGVYGSSVIYMVQLPIFGVIDTPCWIVKAAPSCSEKKGNYACLLREDQGWYCQNAGSTVYYPNEKDCETRGDHVFCDTAAGINVAEQSKECNINISTTNYPCKVSTGRHPISMVALSPLGALVACYKGVSCSIGSNRVGIIKQLNKGCSYITNQDADTVTIDNTVYQLSKVEGEQHVIKGRPVSSSFDPIKFPEDQFQVALDQVFENIENSQALVDQSNRILSSAEKGNTGFIIVIILIAVLGSSMILVSIFIIIKKTKKPTGAPPELSGVTNNGFIPHN

SEQ ID NO: 14634 - protein, 539 aa, Artificial Sequence
  HMPV/TN/92-4__ABM67072.1 fusion glycoprotein (variant)
MSWKVVIIFSLLITPQHGLKESYLEESCSTITEGYLSVLRTGWYTNVFTLPVGDVENLTCSDGPSLIKTELDLLKSALRELKTVSADQLAREEQIENPGSGSFVLGAIALGVAAAAAVTAGVAIAKTIRLESEVTAINNALKKTNEAVSTLGNGVRVLATAVRELKDFVSKNLTRAINKNKCDIDDLKMAVSFSQFNRRFLNVVRQFSDNAGITPAISLDLMTDAELARAVPNMPTSAGQIKLMLENRAMVRRKGFGILIGVYGSSVIYMVQLPIFGVIDTPCWIVKAAPSCSEKKGNYACLLREDQGWYCQNAGSTVYYPNEKDCETRGDHVFCDTAAGINVAEQSKECNINISTTNYPCKVSTGRHPISMVALSPLGALVACYKGVSCSIGSNRVGIIKQLNKGCSYITNQDADTVTIDNTVYQLSKVEGEQHVIKGRPVSSSFDPIKFPENQFQVALDQVFENIENSQALVDQSNRILSSAEKGNTGFIIVIILIAVLGSSMILVSIFIIIKKTKKPTGAPPELSGVTNNGFIPHN

SEQ ID NO: 14635 - protein, 539 aa, Artificial Sequence
  HMPV/TN/92-4__ABM67072.1 fusion glycoprotein (variant)
MSWKVVIIFSLLITPQHGLKESYLEESCSTITEGYLSVLRTGWYTNVFTLEVGDVENLTCSDGPSLIKTELDLLKSALRELKTVSADQLAREEQIENPGSGSFVLGAIALGVAAAAAVTAGVAIAKTIRLESEVTAINNALKKTNEAVSTLGNGVRVLATAVRELKDFVSKNLTRAINKNKCDIDDLKMAVSFSQFNRRFLNVVRQFSDNAGITPAISLDLMTDAELARAVPNMPTSAGQIKLMLENRAMVRRKGFGILIGVYGSSVIYMVQLPIFGVIDTPCWIVKAAPSCSEKKGNYACLLREDQGWYCQNAGSTVYYPNEKDCETRGDHVFCDTAAGINVAEQSKECNINISTTNYPCKVSTGRHPISMVALSPLGALVACYKGVSCSIGSNRVGIIKQLNKGCSYITNQDADTVTIDNTVYQLSKVEGEQHVIKGRPVSSSFDPIKFPEDQFQVALDQVFENIENSQALVDQSNRILSSAEKGNTGFIIVIILIAVLGSSMILVSIFIIIKKTKKPTGAPPELSGVTNNGFIPHN

SEQ ID NO: 14636 - protein, 539 aa, Artificial Sequence
  HMPV/TN/92-4__ABM67072.1 fusion glycoprotein (variant)
MSWKVVIIFSLLITPQHGLKESYLEESCSTITEGYLSVLRTGWYTNVFTLEVGDLENLTCSDGPSLIKTELDLTKSALRELKTVSADQLAREEQIENPGSGSFVLGAIALGVAAAAAVTAGVAIAKTIRLESEVTAINNALKKTNEAVSTLGNGVRVLATAVRELKDFVSKNLTRAINKNKCDIDDLKMAVSFSQFNRRFLNVVRQFSDNAGITPAISLDLMTDAELARAVPNMPTSAGQIKLMLENRAMVRRKGFGILIGVYGSSVIYMVQLPIFGVIDTPCWIVKAAPSCSEKKGNYACLLREDQGWYCQNAGSTVYYPNEKDCETRGDHVFCDTAAGINVAEQSKECNINISTTNYPCKVSTGRHPISMVALSPLGALVACYKGVSCSIGSNRVGIIKQLNKGCSYITNQDADTVTIDNTVYQLSKVEGEQHVIKGRPVSSSFDPIKFPEDQFQVALDQVFENIENSQALVDQSNRILSSAEKGNTGFIIVIILIAVLGSSMILVSIFIIIKKTKKPTGAPPELSGVTNNGFIPHN

SEQ ID NO: 14637 - protein, 539 aa, Artificial Sequence
  HMPV/TN/92-4__ABM67072.1 fusion glycoprotein (variant)
MSWKVVIIFSLLITPQHGLKESYLEESCSTITEGYLSVLRTGWYTNVFTLEVGDVENLTCSDGPSLIKTELDLTKSALRELKTVSADQLAREEQIENPGSGSFVLGAIALGVAAAAAVTAGVAIAKTIRLESEVTAINNALKKTNEAVSTLGNGVRVLATAVRELKDFVLKNLTRAINKNKCDIDDLKMAVSFSQFNRRFLNVVRQFSDNAGITPAISLDLMTDAELARAVPNMPTSAGQIKLMLENRAMVRRKGFGILIGVYGSSVIYMVQLPIFGVIDTPCWIVKAAPSCSEKKGNYACLLREDQGWYCQNAGSTVYYPNEKDCETRGDHVFCDTAAGINVAEQSKECNINISTTNYPCKVSTGRHPISMVALSPLGALVACYKGVSCSIGSNRVGIIKQLNKGCSYITNQDADTVTIDNTVYQLSKVEGEQHVIKGRPVSSSFDPIKFPEDQFQVALDQVFENIENSQALVDQSNRILSSAEKGNTGFIIVIILIAVLGSSMILVSIFIIIKKTKKPTGAPPELSGVTNNGFIPHN

SEQ ID NO: 14638 - protein, 539 aa, Artificial Sequence
  HMPV/TN/92-4__ABM67072.1 fusion glycoprotein (variant)
MSWKVVIIFSLLITPQHGLKESYLEESCSTITEGYLSVLRTGWYTNVFTLEVGDVENLTCSDGPSLIKTELDLTKSALRELKTVSADQLAREEQIENPGSGSFVLGAIALGVAAAAAVTAGVAIAKTIRLESEVTAINNALKKTNEAVSTLGNGVRVLATAVRELKDFVSKNLWRAINKNKCDIDDLKMAVSFSQFNRRFLNVVRQFSDNAGITPAISLDLMTDAELARAVPNMPTSAGQIKLMLENRAMVRRKGFGILIGVYGSSVIYMVQLPIFGVIDTPCWIVKAAPSCSEKKGNYACLLREDQGWYCQNAGSTVYYPNEKDCETRGDHVFCDTAAGINVAEQSKECNINISTTNYPCKVSTGRHPISMVALSPLGALVACYKGVSCSIGSNRVGIIKQLNKGCSYITNQDADTVTIDNTVYQLSKVEGEQHVIKGRPVSSSFDPIKFPEDQFQVALDQVFENIENSQALVDQSNRILSSAEKGNTGFIIVIILIAVLGSSMILVSIFIIIKKTKKPTGAPPELSGVTNNGFIPHN

SEQ ID NO: 14639 - protein, 539 aa, Artificial Sequence
  HMPV/TN/92-4__ABM67072.1 fusion glycoprotein (variant)
MSWKVVIIFSLLITPQHGLKESYLEESCSTITEGYLSVLRTGWYTNVFTLEVGDLENLTCSDGPSLIKTELDLLKSALRELKTVSADQLAREEQIENPGSGSFVLGAIALGVAAAAAVTAGVAIAKTIRLESEVTAINNALKKTNEAVSTLGNGVRVLATAVRELKDFVLKNLWRAINKNKCDIDDLKMAVSFSQFNRRFLNVVRQFSDNAGITPAISLDLMTDAELARAVPNMPTSAGQIKLMLENRAMVRRKGFGILIGVYGSSVIYMVQLPIFGVIDTPCWIVKAAPSCSEKKGNYACLLREDQGWYCQNAGSTVYYPNEKDCETRGDHVFCDTAAGINVAEQSKECNINISTTNYPCKVSTGRHPISMVALSPLGALVACYKGVSCSIGSNRVGIIKQLNKGCSYITNQDADTVTIDNTVYQLSKVEGEQHVIKGRPVSSSFDPIKFPEDQFQVALDQVFENIENSQALVDQSNRILSSAEKGNTGFIIVIILIAVLGSSMILVSIFIIIKKTKKPTGAPPELSGVTNNGFIPHN

SEQ ID NO: 14640 - protein, 539 aa, Artificial Sequence
  HMPV/TN/92-4__ABM67072.1 fusion glycoprotein (variant)
MSWKVVIIFSLLITPQHGLKESYLEESCSTITEGYLSVLRTGWYTNVFTLPVGDVENLTCSDGPSLIKTELDLTKSALRELKTVSADQLAREEQIENPGSGSFVLGAIALGVAAAAAVTAGVAIAKTIRLESEVTAINNALKKTNEAVSTLGNGVRVLATAVRELKDFVSKNLTRAINKNKCDIDDLKMAVSFSQFNRRFLNVVRQFSDNAGITPAISLDLMTDAELARAVPNMPTSAGQIKLMLENRAMVRRKGFGILIGVYGSSVIYMVQLPIFGVIDTPCWIVKAAPSCSEKKGNYACLLREDQGWYCQNAGSTVYYPNEKDCETRGDHVFCDTAAGINVAEQSKECNINISTTNYPCKVSTGRHPISMVALSPLGALVACYKGVSCSIGSNRVGIIKQLNKGCSYITNQDADTVTIDNTVYQLSKVEGEQHVIKGRPVSSSFDPIKFPEDQFQVALDQVFENIENSQALVDQSNRILSSAEKGNTGFIIVIILIAVLGSSMILVSIFIIIKKTKKPTGAPPELSGVTNNGFIPHN

SEQ ID NO: 14641 - protein, 539 aa, Artificial Sequence
  HMPV/TN/92-4__ABM67072.1 fusion glycoprotein (variant)
MSWKVVIIFSLLITPQHGLKESYLEESCSTITEGYLSVLRTGWYTNVFTLEVGDVENLTCSDGPSLIKTELDLTKSALRELKTVSADQLAREEQIENPGSGSFVLGAIALGVAAAAAVTAGVAIAKTIRLESEVTAINNALKKTNEAVSTLGNGVRVLATAVRELKDFVSKNLTRAINKNKCDIPDLKMAVSFSQFNRRFLNVVRQFSDNAGITPAISLDLMTDAELARAVPNMPTSAGQIKLMLENRAMVRRKGFGILIGVYGSSVIYMVQLPIFGVIDTPCWIVKAAPSCSEKKGNYACLLREDQGWYCQNAGSTVYYPNEKDCETRGDHVFCDTAAGINVAEQSKECNINISTTNYPCKVSTGRHPISMVALSPLGALVACYKGVSCSIGSNRVGIIKQLNKGCSYITNQDADTVTIDNTVYQLSKVEGEQHVIKGRPVSSSFDPIKFPEDQFQVALDQVFENIENSQALVDQSNRILSSAEKGNTGFIIVIILIAVLGSSMILVSIFIIIKKTKKPTGAPPELSGVTNNGFIPHN

SEQ ID NO: 14642 - protein, 539 aa, Artificial Sequence
  HMPV/TN/92-4__ABM67072.1 fusion glycoprotein (variant)
MSWKVVIIFSLLITPQHGLKESYLEESCSTITEGYLSVLRTGWYTNVFTLEVGDVENLTCSDGPSLIKTELDLTKSALRELKTVSADQLAREEQIENPGSGSFVLGAIALGVAAAAAVTAGVAIAKTIRLESEVTAINNALKKTNEAVSTLGNGVRVLATAVRELKDFVSKNLTRAINKNKCPIDDLKMAVSFSQFNRRFLNVVRQFSDNAGITPAISLDLMTDAELARAVPNMPTSAGQIKLMLENRAMVRRKGFGILIGVYGSSVIYMVQLPIFGVIDTPCWIVKAAPSCSEKKGNYACLLREDQGWYCQNAGSTVYYPNEKDCETRGDHVFCDTAAGINVAEQSKECNINISTTNYPCKVSTGRHPISMVALSPLGALVACYKGVSCSIGSNRVGIIKQLNKGCSYITNQDADTVTIDNTVYQLSKVEGEQHVIKGRPVSSSFDPIKFPEDQFQVALDQVFENIENSQALVDQSNRILSSAEKGNTGFIIVIILIAVLGSSMILVSIFIIIKKTKKPTGAPPELSGVTNNGFIPHN

SEQ ID NO: 14643 - protein, 539 aa, Artificial Sequence
  HMPV/TN/92-4__ABM67072.1 fusion glycoprotein (variant)
MSWKVVIIFSLLITPQHGLKESYLEESCSTITEGYLSVLRTGWYTNVFTLEVGDVENLTCSDGPSLIKTELDLTKSALRELKTVSADQLAREEQIENPGSGSFVLGAIALGVAAAAAVTAGVAIAKTIRLPSEVTAINNALKKTNEAVSTLGNGVRVLATAVRELKDFVSKNLTRAINKNKCDIDDLKMAVSFSQFNRRFLNVVRQFSDNAGITPAISLDLMTDAELARAVPNMPTSAGQIKLMLENRAMVRRKGFGILIGVYGSSVIYMVQLPIFGVIDTPCWIVKAAPSCSEKKGNYACLLREDQGWYCQNAGSTVYYPNEKDCETRGDHVFCDTAAGINVAEQSKECNINISTTNYPCKVSTGRHPISMVALSPLGALVACYKGVSCSIGSNRVGIIKQLNKGCSYITNQDADTVTIDNTVYQLSKVEGEQHVIKGRPVSSSFDPIKFPEDQFQVALDQVFENIENSQALVDQSNRILSSAEKGNTGFIIVIILIAVLGSSMILVSIFIIIKKTKKPTGAPPELSGVTNNGFIPHN

SEQ ID NO: 14644 - protein, 539 aa, Artificial Sequence
  HMPV/TN/92-4__ABM67072.1 fusion glycoprotein (variant)
MSWKVVIIFSLLITPQHGLKESYLEESCSTITEGYLSVLRTGWYTNVFTLEVGDVENLTCSDGPSLIKTELDLTKSALRELKTVSADQLAREEQIENPGSGSFVLGAIALGVAAAAAVTAGVAIAKTIRLESEVTAINNALKKTNEAVSTLGNGVRVLATAVRELKDFVSKNLTRAINKNKCDIDDLKMAVSFSQFNRRFLNVVRQFSDNAGITPAISLDLMTDAELARAVPNMPTSAGQIKLMLENRAMVRRKGFGILIGVYGSSVIYMVQLPIFGVIDTPCWIVKAAPSCSEKKGNYACLLREDQGWYCQNAGSTVYYPNEKDCETRGDHVFCDTAAGINVAEQSKECNINISTTNYPCKVSTGRHPISMVALSPLGALVACYKGVSCSIGSNRVGIIKQLNKGCSYITNQDADTVTIDNTVYQLSKVEGEQHVIKGRPVSSSFPPIKFPEDQFQVALDQVFENIENSQALVDQSNRILSSAEKGNTGFIIVIILIAVLGSSMILVSIFIIIKKTKKPTGAPPELSGVTNNGFIPHN

SEQ ID NO: 14645 - protein, 539 aa, Artificial Sequence
  HMPV/TN/92-4__ABM67072.1 fusion glycoprotein (variant)
MSWKVVIIFSLLITPQHGLKESYLEESCSTITEGYLSVLRTGWYTNVFTLEVGDVENLTCSDGPSLIKTELDLTKSALRELKTVSADQLAREEQIENPGSGSFVLGAIALGVAAAAAVTAGVAIAKTIRLESEVTAINNALKKTNEAVSTLGNGVRVLATAVRELKDFVSKNLTRAINKNKCDIDDLKMAVSFSQFNRRFLNVVRQFSDNAGITPAISLDLMTDAELARAVPNMPTSAGQIKLMLENRAMVRRKGFGILIGVYGSSVIYMVQLPIFGVIDTPCWIVKAAPSCSEKKGNYACLLREDQGWYCQNAGSTVYYPNEKDCETRGDHVFCDTAAGINVAEQSKECNINISTTNYPCKVSTGRHPISMVALSPLGALVACYKGVSCSIGSNRVGIIKQLNKGCSYITNQDADTVTIDNTVYQLSKVEGEQHVIKGRPVSSSFDPIKFPENQFQVALDQVFENIENSQALVDQSNRILSSAEKGNTGFIIVIILIAVLGSSMILVSIFIIIKKTKKPTGAPPELSGVTNNGFIPHN

SEQ ID NO: 14646 - protein, 539 aa, Artificial Sequence
  HMPV/TN/92-4__ABM67072.1 fusion glycoprotein (variant)
MSWKVVIIFSLLITPQHGLKESYLEESCSTITEGYLSVLRTGWYTNVFTLEVGDVENLTCSDGPSLIKTELDLTKSALRELKTVSADQLAREEQIENPGSGSFVLGAIALGVAAAAAVTAGVAIAKTIRLESEVTAINNALKKTNEAVSTLGNGVRVLATAVRELKDFVSKNLTRAINKNKCDIDDLKMAVSFSQFNRRFLNVVRQFSDNAGITPAISLDLMTDAELARAVPNMPTSAGQIKLMLENRAMVRRKGFGILIGVYGSSVIYMVQLPIFGVIDTPCWIVKAAPSCSEKKGNYACLLREDQGWYCQNAGSTVYYPNEKDCETRGDHVFCDTAAGINVAEQSKECNINISTTNYPCKVSTGRHPISMVALSPLGALVACYKGVSCSIGSNRVGIIKQLNKGCSYITNQDADTVTIDNTVYQLSKVEGEQHVIKGRPVSSSFDPIKFPQDQFQVALDQVFENIENSQALVDQSNRILSSAEKGNTGFIIVIILIAVLGSSMILVSIFIIIKKTKKPTGAPPELSGVTNNGFIPHN

SEQ ID NO: 14647 - protein, 539 aa, Artificial Sequence
  HMPV/TN/92-4__ABM67072.1 fusion glycoprotein (variant)
MSWKVVIIFSLLITPQHGLKESYLEESCSTITEGYLSVLRTGWYTNVFTLEVGDVENLTCSDGPSLIKTELDLTKSALRELKTVSADQLAREEQIENPGSGSFVLGAIALGVAAAAAVTAGVAIAKTIRLESEVTAINNALKKTNEAVSTLGNGVRVLATAVRELKDFVSKNLTRAINKNKCDIDDLKMAVSFSQWNRRFLNVVRQFSDNAGITPAISLDLMTDAELARAVPNMPTSAGQIKLMLENRAMVRRKGFGILIGVYGSSVIYMVQLPIFGVIDTPCWIVKAAPSCSEKKGNYACLLREDQGWYCQNAGSTVYYPNEKDCETRGDHVFCDTAAGINVAEQSKECNINISTTNYPCKVSTGRHPISMVALSPLGALVACYKGVSCSIGSNRVGIIKQLNKGCSYITNQDADTVTIDNTVYQLSKVEGEQHVIKGRPVSSSFDPIKFPEDQFQVALDQVFENIENSQALVDQSNRILSSAEKGNTGFIIVIILIAVLGSSMILVSIFIIIKKTKKPTGAPPELSGVTNNGFIPHN

SEQ ID NO: 14648 - protein, 539 aa, Artificial Sequence
  HMPV/NL/1/99__AAQ90145.1 fusion glycoprotein (F0)
MSWKVMIIISLLITPQHGLKESYLEESCSTITEGYLSVLRTGWYTNVFTLEVGDVENLTCTDGPSLIKTELDLTKSALRELKTVSADQLAREEQIENPRQSRFVLGAIALGVATAAAVTAGIAIAKTIRLESEVNAIKGALKQTNEAVSTLGNGVRVLATAVRELKEFVSKNLTSAINRNKCDIADLKMAVSFSQFNRRFLNVVRQFSDNAGITPAISLDLMTDAELARAVSYMPTSAGQIKLMLENRAMVRRKGFGILIGVYGSSVIYMVQLPIFGVIDTPCWIIKAAPSCSEKNGNYACLLREDQGWYCKNAGSTVYYPNEKDCETRGDHVFCDTAAGINVAEQSRECNINISTTNYPCKVSTGRHPISMVALSPLGALVACYKGVSCSIGSNWVGIIKQLPKGCSYITNQDADTVTIDNTVYQLSKVEGEQHVIKGRPVSSSFDPIKFPEDQFNVALDQVFESIENSQALVDQSNKILNSAEKGNTGFIIVVILVAVLGLTMISVSIIIIIKKTRKPTGAPPELNGVTNGGFIPHS

SEQ ID NO: 14649 - protein, 539 aa, Artificial Sequence
  HMPV/Sabana__AEA02280.1 fusion glycoprotein (F0)
MSWKVMIIISLLITPQHGLKESYLEESCSTITEGYLSVLRTGWYTNVFTLEVGDVENLTCTDGPSLIKTELDLTKSALRELKTVSADQLAREEQIENPRQSRFVLGAIALGVATAAAVTAGIAIAKTIRLESEVNAIKGALKTTNEAVSTLGNGVRVLATAVRELKEFVSKNLTSAINKNKCDIADLKMAVSFSQFNRRFLNVVRQFSDNAGITPAISLDLMNDAELARAVSYMPTSAGQIKLMLENRAMVRRKGFGILIGVYGSSVIYMVQLPIFGVINTPCWIIKAAPSCSEKDGNYACLLREDQGWYCKNAGSTVYYPNEKDCETRGDHVFCDTAAGINVAEQSRECNINISTTNYPCKVSTGRHPISMVALSPLGALVACYKGVSCSTGSNQVGIIKQLPKGCSYITNQDADTVTIDNTVYQLSKVEGEQHVIKGRPVSSSFDPIRFPEDQFNVALDQVFESIENSQALVDQSNKILNSAEKGNTGFIIVIILIAVLGLTMISVSIIIIIKKTRKPTGAPPELNGVTNGGFIPHS

SEQ ID NO: 14650 - RNA, 1620 nt, Artificial Sequence
  HMPV/TN/92-4__ABM67072.1 fusion glycoprotein CDS gc (F0)
augagcuggaagguggucaucaucuucucccugcucaucacgccccagcacggccugaaggagagcuaccuggaggaguccugcagcaccaucaccgagggguaccucuccgugcugcgcaccggcugguacaccaacguguucacccuggaggucggggacguggagaaccucacgugcagcgacggcccgucccugaucaagaccgagcuggaccucaccaagagcgcccugcgggagcugaagaccguguccgccgaccagcucgcgcgcgaggagcagaucgagaacccccggcagagccgcuucguccugggggccaucgcccugggcguggccgccgcggccgccgugacggccggcgucgcgaucgccaagaccauccggcucgaguccgaggugaccgccaucaacaacgcccugaagaagaccaacgaggccgugagcacgcuggggaacggcguccgcgugcucgcgaccgccgugcgggagcugaaggacuucgucuccaagaaccugacccgcgccaucaacaagaacaagugcgacaucgacgaccucaagauggccgugagcuucucccaguucaaccggcgcuuccugaacgugguccggcaguucagcgacaacgccgggaucacccccgcgaucucccuggaccucaugacggacgccgagcuggcccgcgccgugcccaacaugccgaccagcgccggccagaucaagcugaugcucgagaaccgggcgauggugcgccggaagggguucggcauccugaucggcgucuacggguccagcgugaucuacauggugcagcugcccaucuucggcgucaucgacacccccugcuggaucgugaaggccgcccccagcugcuccgagaagaaggggaacuacgccugccuccugcgcgaggaccagggcugguacugccagaacgccggcagcaccgucuacuacccgaacgagaaggacugcgagacgcgcggggaccacguguucugcgacaccgcggccggcaucaacguggccgagcaguccaaggagugcaacaucaacaucagcaccaccaacuaccccugcaaggucuccacggggcggcaccccaucagcaugguggcccugagcccccucggcgcgcugguggccugcuacaagggggucuccugcuccaucggcagcaaccgggugggcaucaucaagcagcugaacaaggggugcuccuacaucaccaaccaggacgccgacaccgugaccaucgacaacacggucuaccagcucagcaagguggagggcgagcagcacgugaucaaggggcgcccggucuccagcuccuucgaccccaucaaguuccccgaggaccaguucaacguggcccuggaccagguguucgagaacaucgagaacagccaggcccuggucgaccaguccaaccggauccucagcuccgcggagaagggcaacaccggguucaucaucgugaucauccugaucgccgugcugggcagcagcaugauccucgucuccaucuucaucaucaucaagaagaccaagaagcccaccggcgccccgcccgagcugagcggggugacgaacaacggcuucaucccccacaacuga

SEQ ID NO: 14651 - RNA, 1620 nt, Artificial Sequence
  HMPV/TN/92-4__ABM67072.1 fusion glycoprotein CDS gc (variant)
augagcuggaagguggucaucaucuucucccugcucaucacgccccagcacggccugaaggagagcuaccuggaggaguccugcagcaccaucaccgagggguaccucuccgugcugcgcaccggcugguacaccaacguguucacccuggaggucggggacguggagaaccucacgugcagcgacggcccgucccugaucaagaccgagcuggaccucaccaagagcgcccugcgggagcugaagaccguguccgccgaccagcucgcgcgcgaggagcagaucgagaaccccgggagcggcuccuucguccugggcgccaucgcccuggggguggccgccgcggccgccgugacggccggcgucgcgaucugcaagaccauccggcucgagagcgaggugaccgccaucaacaacgcccugaagaagaccaacgaggccguguccacgcuggggaacggcguccgcgugcucgccuucgcggugcgggagcugaaggacuucgucagcaagaaccugacccgcgcccucaacaagaacaagugcgacaucgacgaccugaagauggccguguccuucagccaguucaaccggcgcuuccugaacgugguccggcaguucuccgacaacgccgggaucacccccgccaucagccucgaccugaugaccgacgcggagcuggcccgcgccgugcccaacaugccgacguccgccggccagaucaagcucaugcuggagaaccgggccauggugcgccggaagggcuucgggauccugugcggcgucuacgggagcagcgugaucuacauggugcagcuccccaucuucggcgucaucgacacccccugcuggaucgugaaggcggcccccuccugcagcgagaagaagggcaacuacgccugccugcugcgcgaggaccaggggugguacugccagaacgccggcuccaccgucuacuacccgaacgagaaggacugcgagacccgcggggaccacguguucugcgacacggccgcgggcaucaacguggccgagcagagcaaggagugcaacaucaacaucuccaccaccaacuaccccugcaaggucagcaccgggcggcaccccaucuccaugguggcccucagcccccugggcgcccugguggcgugcuacaagggcgucuccugcagcaucggguccaaccgggugggcaucaucaagcagcucaacaaggggugcagcuacaucacgaaccaggacgccgacaccgugaccaucgacaacaccgucuaccagcuguccaagguggagggcgagcagcacgugaucaaggggcgcccggucagcuccagcuucgaccccaucaaguuccccgaggaccaguucaacguggcccuggaccagguguucgagaacaucgagaacucccaggcccucgucgaccagagcaaccggauccuguccagcgccgagaagggcaacacgggcuucaucaucgugaucauccugaucgcggugcucgggagcuccaugauccuggucagcaucuucaucaucaucaagaagaccaagaagcccaccggcgccccgcccgagcuguccggggugaccaacaacggcuucaucccccacaacuga

SEQ ID NO: 14652 - RNA, 1620 nt, Artificial Sequence
  HMPV/TN/92-4__ABM67072.1 fusion glycoprotein CDS gc (variant)
augagcuggaagguggucaucaucuucucccugcucaucacgccccagcacggccugaaggagagcuaccuggaggaguccugcagcaccaucaccgagggguaccucuccgugcugcgcaccggcugguacaccaacguguucacccuggaggucggggacguggagaaccucacgugcagcgacggcccgucccugaucaagaccgagcuggaccucaccaagagcgcccugcgggagcugaagaccguguccgccgaccagcucgcgcgcgaggagcagaucgagaaccccgggagcggcuccuucguccugggcgccaucgcccuggggguggccgccgcggccgccgugacggccggcgucgcgaucugcaagaccauccggcucgagagcgaggugaccgccaucaacaacgcccugaagaagaccaacgaggccguguccacgcuggggaacggcguccgcgugcucgccaccgcggugcgggagcugaaggacuucgucagcaagaaccugacccgcgccaucaacaagaacaagugcgacaucgacgaccucaagauggccguguccuucagccaguucaaccggcgcuuccugaacgugguccggcaguucuccgacaacgccgggaucacccccgccaucagccuggaccucaugacggacgcggagcuggcccgcgccgugcccaacaugccgaccuccgccggccagaucaagcugaugcucgagaaccgggccauggugcgccggaagggcuucgggauccugugcggcgucuacgggagcagcgugaucuacauggugcagcugcccaucuucggcgucaucgacacccccugcuggaucgugaaggcggcccccuccugcagcgagaagaagggcaacuacgccugccuccugcgcgaggaccaggggugguacugccagaacgccggcuccaccgucuacuacccgaacgagaaggacugcgagacgcgcggggaccacguguucugcgacaccgccgcgggcaucaacguggccgagcagagcaaggagugcaacaucaacaucuccaccaccaacuaccccugcaaggucagcacggggcggcaccccaucuccaugguggcccugagcccccucggcgcccugguggcgugcuacaagggcgucuccugcagcaucggguccaaccgggugggcaucaucaagcagcugaacaaggggugcagcuacaucaccaaccaggacgccgacaccgugaccaucgacaacacggucuaccagcucuccaagguggagggcgagcagcacgugaucaaggggcgcccggucagcuccagcuucgaccccaucaaguuccccgagcaccaguggcacguggcccuggaccagguguucgagaacaucgagaacucccaggcccuggucgaccagagcaaccggauccucuccagcgccgagaagggcaacaccggcuucaucaucgugaucauccugaucgcggugcuggggagcuccaugauccucgucagcaucuucaucaucaucaagaagaccaagaagcccaccggcgccccgcccgagcuguccggggugacgaacaacggcuucaucccccacaacuga

SEQ ID NO: 14653 - RNA, 1620 nt, Artificial Sequence
  HMPV/TN/92-4__ABM67072.1 fusion glycoprotein CDS gc (variant)
augagcuggaagguggucaucaucuucucccugcucaucacgccccagcacggccugaaggagagcuaccuggaggaguccugcagcaccaucaccgagggguaccucuccgugcugcgcaccggcugguacaccaacguguucacccuggaggucggggacguggagaaccucacgugcagcgacggccccucccugaucaagaccgagcuggaccuccucaagagcgcccugcgggagcugaagaccguguccgccgaccagcuggcgcgcgaggagcagaucgagaaccccgggagcggcuccuucguccugggcgccaucgcccucgggguggccgccgcggccgccgugaccgccggcgucgcgaucgccaagacgauccggcuggagagcgaggugaccgccaucaacaacgcccugaagaagaccaacgaggccguguccacccucgggaacggcguccgcgugcuggcgacggccgugcgggagcugaaggacuucgucagcaagaaccucacccgcgccaucaacaagaacaagugcgacauccccgaccugaagauggccguguccuucagccaguucaaccggcgcuuccugaacgugguccggcaguucuccgacaacgccgggaucacccccgcgaucagccucgaccugaugaccgacgccgagcuggcccgcgccgugccgaacaugcccacguccgccggccagaucaagcucaugcuggagaaccgggcgauggugcgccggaagggcuucgggauccugaucggcgucuacgggagcagcgugaucuacauggugcagcuccccaucuucggcgucaucgacacccccugcuggaucgugaaggccgccccguccugcagcgagaagaagggcaacuacgccugccugcugcgcgaggaccaggggugguacugccagaacgccggcuccaccgucuacuaccccaacgagaaggacugcgagacccgcggggaccacguguucugcgacacggcggccggcaucaacguggccgagcagagcaaggagugcaacaucaacaucuccaccaccaacuaccccugcaaggucagcaccgggcggcaccccaucuccaugguggcccucagcccgcugggcgcgcugguggccugcuacaagggcgucuccugcagcaucggguccaaccgggugggcaucaucaagcagcucaacaaggggugcagcuacaucacgaaccaggacgccgacaccgugaccaucgacaacaccgucuaccagcuguccaagguggagggcgagcagcacgugaucaaggggcgccccgucagcuccagcuucgaccccaucaaguuccccgaggaccaguuccagguggcccuggaccagguguucgagaacaucgagaacucccaggcccucgucgaccagagcaaccggauccuguccagcgcggagaagggcaacacgggcuucaucaucgugaucauccugaucgccgugcucgggagcuccaugauccuggucagcaucuucaucaucaucaagaagaccaagaagccgaccggcgccccgcccgagcuguccggggugaccaacaacggcuucaucccccacaacuga

SEQ ID NO: 14654 - RNA, 1620 nt, Artificial Sequence
  HMPV/TN/92-4__ABM67072.1 fusion glycoprotein CDS gc (variant)
augagcuggaagguggucaucaucuucucccugcucaucacgccccagcacggccugaaggagagcuaccuggaggaguccugcagcaccaucaccgagggguaccucuccgugcugcgcaccggcugguacaccaacguguucacccuggaggucggggacguggagaaccucacgugcagcgacggccccucccugaucaagaccgagcuggaccuccucaagagcgcccugcgggagcugaagaccguguccgccgaccagcuggcgcgcgaggagcagaucgagaaccccgggagcggcuccuucguccugggcgccaucgcccucgggguggccgccgcggccgccgugaccgccggcgucgcgaucgccaagacgauccggcuggagagcgaggugaccgccaucaacaacgcccugaagaagaccaacgaggccguguccacccucgggaacggcguccgcgugcuggcgacggccgugcgggagcugaaggacuucgucagcaagaaccucacccgcgccaucaacaagaacaagugcgacauccccgaccugaagauggccguguccuucagccaguucaaccggcgcuuccugaacgugguccggcaguucuccgacaacgccgggaucacccccgcgaucagccucgaccugaugaccgacgccgagcuggcccgcgccgugccgaacaugcccacguccgccggccagaucaagcucaugcuggagaaccgggcgauggugcgccggaagggcuucgggauccugaucggcgucuacgggagcagcgugaucuacauggugcagcuccccaucuucggcgucaucgacacccccugcuggaucgugaaggccgccccguccugcagcgagaagaagggcaacuacgccugccugcugcgcgaggaccaggggugguacugccagaacgccggcuccaccgucuacuaccccaacgagaaggacugcgagacccgcggggaccacguguucugcgacacggcggccggcaucaacguggccgagcagagcaaggagugcaacaucaacaucuccaccaccaacuaccccugcaaggucagcaccgggcggcaccccaucuccaugguggcccucagcccgcugggcgcgcugguggccugcuacaagggcgucuccugcagcaucggguccaaccgggugggcaucaucaagcagcucaacaaggggugcagcuacaucacgaaccaggacgccgacaccgugaccaucgacaacaccgucuaccagcuguccaagguggagggcgagcagcacgugaucaaggggcgccccgucagcuccagcuucgaccccaucaaguuccccgagaaccaguuccagguggcccuggaccagguguucgagaacaucgagaacucccaggcccucgucgaccagagcaaccggauccuguccagcgcggagaagggcaacacgggcuucaucaucgugaucauccugaucgccgugcucgggagcuccaugauccuggucagcaucuucaucaucaucaagaagaccaagaagccgaccggcgccccgcccgagcuguccggggugaccaacaacggcuucaucccccacaacuga

SEQ ID NO: 14655 - RNA, 1620 nt, Artificial Sequence
  HMPV/TN/92-4__ABM67072.1 fusion glycoprotein CDS gc (variant)
augagcuggaagguggucaucaucuucucccugcucaucacgccccagcacggccugaaggagagcuaccuggaggaguccugcagcaccaucaccgagggguaccucuccgugcugcgcaccggcugguacaccaacguguucacccuggaggucggggacguggagaaccucacgugcagcgacggccccucccugaucaagaccgagcuggaccuccucaagagcgcccugcgggagcugaagaccguguccgccgaccagcuggcgcgcgaggagcagaucgagaaccccgggagcggcuccuucguccugggcgccaucgcccucgggguggccgccgcggccgccgugaccgccggcgucgcgaucgccaagacgauccggcuggagagcgaggugaccgccaucaacaacgcccugaagaagaccaacgaggccguguccacccucgggaacggcguccgcgugcuggcgacggccgugcgggagcugaaggacuucguccucaagaaccugacccgcgccaucaacaagaacaagugcgacauccccgaccugaagauggccgugagcuucucccaguucaaccggcgcuuccucaacgugguccggcaguucagcgacaacgccgggaucacccccgcgaucucccuggaccugaugaccgacgccgagcucgcccgcgccgugccgaacaugcccacgagcgccggccagaucaagcugaugcuggagaaccgggcgauggugcgccggaagggcuucgggauccucaucggcgucuacggguccagcgugaucuacauggugcagcugcccaucuucggcgucaucgacacccccugcuggaucgugaaggccgccccgagcugcuccgagaagaagggcaacuacgccugccugcuccgcgaggaccaggggugguacugccagaacgccggcagcaccgucuacuaccccaacgagaaggacugcgagacccgcggggaccacguguucugcgacacggcggccggcaucaacguggccgagcaguccaaggagugcaacaucaacaucagcaccaccaacuaccccugcaaggucuccaccgggcggcaccccaucagcaugguggcccuguccccgcugggcgcgcucguggccugcuacaagggcgucagcugcuccaucgggagcaaccgggugggcaucaucaagcagcugaacaaggggugcuccuacaucacgaaccaggacgccgacaccgugaccaucgacaacaccgucuaccagcugagcaagguggagggcgagcagcacgugaucaaggggcgccccgucuccagcuccuucgaccccaucaaguuccccgaggaccaguuccagguggcccucgaccagguguucgagaacaucgagaacagccaggcccuggucgaccaguccaaccggauccugagcuccgcggagaagggcaacacgggcuucaucaucgugaucauccucaucgccgugcuggggagcagcaugauccuggucuccaucuucaucaucaucaagaagaccaagaagccgaccggcgccccgcccgagcucagcggggugaccaacaacggcuucaucccccacaacuga

SEQ ID NO: 14656 - RNA, 1620 nt, Artificial Sequence
  HMPV/TN/92-4__ABM67072.1 fusion glycoprotein CDS gc (variant)
augagcuggaagguggucaucaucuucucccugcucaucacgccccagcacggccugaaggagagcuaccuggaggaguccugcagcaccaucaccgagggguaccucuccgugcugcgcaccggcugguacaccaacguguucacccuggaggucggggacguggagaaccucacgugcagcgacggccccucccugaucaagaccgagcuggaccuccucaagagcgcccugcgggagcugaagaccguguccgccgaccagcuggcgcgcgaggagcagaucgagaaccccgggagcggcuccuucguccugggcgccaucgcccucgggguggccgccgcggccgccgugaccgccggcgucgcgaucgccaagacgauccggcuggagagcgaggugaccgccaucaacaacgcccugaagaagaccaacgaggccguguccacccucgggaacggcguccgcgugcuggcgacggccgugcgggagcugaaggacuucguccucaagaaccugacccgcgccaucaacaagaacaagugcgacauccccgaccugaagauggccgugagcuucucccaguucaaccggcgcuuccucaacgugguccggcaguucagcgacaacgccgggaucacccccgcgaucucccuggaccugaugaccgacgccgagcucgcccgcgccgugccgaacaugcccacgagcgccggccagaucaagcugaugcuggagaaccgggcgauggugcgccggaagggcuucgggauccucaucggcgucuacggguccagcgugaucuacauggugcagcugcccaucuucggcgucaucgacacccccugcuggaucgugaaggccgccccgagcugcuccgagaagaagggcaacuacgccugccugcuccgcgaggaccaggggugguacugccagaacgccggcagcaccgucuacuaccccaacgagaaggacugcgagacccgcggggaccacguguucugcgacacggcggccggcaucaacguggccgagcaguccaaggagugcaacaucaacaucagcaccaccaacuaccccugcaaggucuccaccgggcggcaccccaucagcaugguggcccuguccccgcugggcgcgcucguggccugcuacaagggcgucagcugcuccaucgggagcaaccgggugggcaucaucaagcagcugaacaaggggugcuccuacaucacgaaccaggacgccgacaccgugaccaucgacaacaccgucuaccagcugagcaagguggagggcgagcagcacgugaucaaggggcgccccgucuccagcuccuucgaccccaucaaguuccccgagaaccaguuccagguggcccucgaccagguguucgagaacaucgagaacagccaggcccuggucgaccaguccaaccggauccugagcuccgcggagaagggcaacacgggcuucaucaucgugaucauccucaucgccgugcuggggagcagcaugauccuggucuccaucuucaucaucaucaagaagaccaagaagccgaccggcgccccgcccgagcucagcggggugaccaacaacggcuucaucccccacaacuga

SEQ ID NO: 14657 - RNA, 1620 nt, Artificial Sequence
  HMPV/TN/92-4__ABM67072.1 fusion glycoprotein CDS gc (variant)
augagcuggaagguggucaucaucuucucccugcucaucacgccccagcacggccugaaggagagcuaccuggaggaguccugcagcaccaucaccgagggguaccucuccgugcugcgcaccggcugguacaccaacguguucacccugcccgucggggacguggagaaccucacgugcagcgacggccccucccugaucaagaccgagcuggaccuccucaagagcgcccugcgggagcugaagaccguguccgccgaccagcuggcgcgcgaggagcagaucgagaaccccgggagcggcuccuucguccugggcgccaucgcccucgggguggccgccgcggccgccgugaccgccggcgucgcgaucgccaagacgauccggcuggagagcgaggugaccgccaucaacaacgcccugaagaagaccaacgaggccguguccacccucgggaacggcguccgcgugcuggcgacggccgugcgggagcugaaggacuucgucagcaagaaccucacccgcgccaucaacaagaacaagugcgacaucgacgaccugaagauggccguguccuucagccaguucaaccggcgcuuccugaacgugguccggcaguucuccgacaacgccgggaucacccccgcgaucagccucgaccugaugaccgacgccgagcuggcccgcgccgugccgaacaugcccacguccgccggccagaucaagcucaugcuggagaaccgggcgauggugcgccggaagggcuucgggauccugaucggcgucuacgggagcagcgugaucuacauggugcagcuccccaucuucggcgucaucgacacccccugcuggaucgugaaggccgccccguccugcagcgagaagaagggcaacuacgccugccugcugcgcgaggaccaggggugguacugccagaacgccggcuccaccgucuacuaccccaacgagaaggacugcgagacccgcggggaccacguguucugcgacacggcggccggcaucaacguggccgagcagagcaaggagugcaacaucaacaucuccaccaccaacuaccccugcaaggucagcaccgggcggcaccccaucuccaugguggcccucagcccgcugggcgcgcugguggccugcuacaagggcgucuccugcagcaucggguccaaccgggugggcaucaucaagcagcucaacaaggggugcagcuacaucacgaaccaggacgccgacaccgugaccaucgacaacaccgucuaccagcuguccaagguggagggcgagcagcacgugaucaaggggcgccccgucagcuccagcuucgaccccaucaaguuccccgaggaccaguuccagguggcccuggaccagguguucgagaacaucgagaacucccaggcccucgucgaccagagcaaccggauccuguccagcgcggagaagggcaacacgggcuucaucaucgugaucauccugaucgccgugcucgggagcuccaugauccuggucagcaucuucaucaucaucaagaagaccaagaagccgaccggcgccccgcccgagcuguccggggugaccaacaacggcuucaucccccacaacuga

SEQ ID NO: 14658 - RNA, 1620 nt, Artificial Sequence
  HMPV/TN/92-4__ABM67072.1 fusion glycoprotein CDS gc (variant)
augagcuggaagguggucaucaucuucucccugcucaucacgccccagcacggccugaaggagagcuaccuggaggaguccugcagcaccaucaccgagggguaccucuccgugcugcgcaccggcugguacaccaacguguucacccugcccgucggggacguggagaaccucacgugcagcgacggccccucccugaucaagaccgagcuggaccuccucaagagcgcccugcgggagcugaagaccguguccgccgaccagcuggcgcgcgaggagcagaucgagaaccccgggagcggcuccuucguccugggcgccaucgcccucgggguggccgccgcggccgccgugaccgccggcgucgcgaucgccaagacgauccggcuggagagcgaggugaccgccaucaacaacgcccugaagaagaccaacgaggccguguccacccucgggaacggcguccgcgugcuggcgacggccgugcgggagcugaaggacuucgucagcaagaaccucacccgcgccaucaacaagaacaagugcgacaucgacgaccugaagauggccguguccuucagccaguucaaccggcgcuuccugaacgugguccggcaguucuccgacaacgccgggaucacccccgcgaucagccucgaccugaugaccgacgccgagcuggcccgcgccgugccgaacaugcccacguccgccggccagaucaagcucaugcuggagaaccgggcgauggugcgccggaagggcuucgggauccugaucggcgucuacgggagcagcgugaucuacauggugcagcuccccaucuucggcgucaucgacacccccugcuggaucgugaaggccgccccguccugcagcgagaagaagggcaacuacgccugccugcugcgcgaggaccaggggugguacugccagaacgccggcuccaccgucuacuaccccaacgagaaggacugcgagacccgcggggaccacguguucugcgacacggcggccggcaucaacguggccgagcagagcaaggagugcaacaucaacaucuccaccaccaacuaccccugcaaggucagcaccgggcggcaccccaucuccaugguggcccucagcccgcugggcgcgcugguggccugcuacaagggcgucuccugcagcaucggguccaaccgggugggcaucaucaagcagcucaacaaggggugcagcuacaucacgaaccaggacgccgacaccgugaccaucgacaacaccgucuaccagcuguccaagguggagggcgagcagcacgugaucaaggggcgccccgucagcuccagcuucgaccccaucaaguuccccgagaaccaguuccagguggcccuggaccagguguucgagaacaucgagaacucccaggcccucgucgaccagagcaaccggauccuguccagcgcggagaagggcaacacgggcuucaucaucgugaucauccugaucgccgugcucgggagcuccaugauccuggucagcaucuucaucaucaucaagaagaccaagaagccgaccggcgccccgcccgagcuguccggggugaccaacaacggcuucaucccccacaacuga

SEQ ID NO: 14659 - RNA, 1620 nt, Artificial Sequence
  HMPV/TN/92-4__ABM67072.1 fusion glycoprotein CDS gc (variant)
augagcuggaagguggucaucaucuucucccugcucaucacgccccagcacggccugaaggagagcuaccuggaggaguccugcagcaccaucaccgagggguaccucuccgugcugcgcaccggcugguacaccaacguguucacccuggaggucggggacguggagaaccucacgugcagcgacggcccgucccugaucaagaccgagcuggaccuccucaagagcgcccugcgggagcugaagaccguguccgccgaccagcuggcgcgcgaggagcagaucgagaaccccgggagcggcuccuucguccugggcgccaucgcccucgggguggccgccgcggccgccgugaccgccggcgucgcgaucgccaagacgauccggcuggagagcgaggugaccgccaucaacaacgcccugaagaagaccaacgaggccguguccacccucgggaacggcguccgcgugcuggcgacggccgugcgggagcugaaggacuucgucagcaagaaccucacccgcgccaucaacaagaacaagugcgacaucgacgaccugaagauggccguguccuucagccaguucaaccggcgcuuccugaacgugguccggcaguucuccgacaacgccgggaucacccccgcgaucagccucgaccugaugaccgacgccgagcuggcccgcgccgugcccaacaugccgacguccgccggccagaucaagcucaugcuggagaaccgggcgauggugcgccggaagggcuucgggauccugaucggcgucuacgggagcagcgugaucuacauggugcagcuccccaucuucggcgucaucgacacccccugcuggaucgugaaggccgcccccuccugcagcgagaagaagggcaacuacgccugccugcugcgcgaggaccaggggugguacugccagaacgccggcuccaccgucuacuacccgaacgagaaggacugcgagacccgcggggaccacguguucugcgacacggcggccggcaucaacguggccgagcagagcaaggagugcaacaucaacaucuccaccaccaacuaccccugcaaggucagcaccgggcggcaccccaucuccaugguggcccucagcccccugggcgcgcugguggccugcuacaagggcgucuccugcagcaucggguccaaccgggugggcaucaucaagcagcucaacaaggggugcagcuacaucacgaaccaggacgccgacaccgugaccaucgacaacaccgucuaccagcuguccaagguggagggcgagcagcacgugaucaaggggcgcccggucagcuccagcuucgaccccaucaaguuccccgaggaccaguuccagguggcccuggaccagguguucgagaacaucgagaacucccaggcccucgucgaccagagcaaccggauccuguccagcgcggagaagggcaacacgggcuucaucaucgugaucauccugaucgccgugcucgggagcuccaugauccuggucagcaucuucaucaucaucaagaagaccaagaagcccaccggcgccccgcccgagcuguccggggugaccaacaacggcuucaucccccacaacuga

SEQ ID NO: 14660 - RNA, 1620 nt, Artificial Sequence
  HMPV/TN/92-4__ABM67072.1 fusion glycoprotein CDS gc (variant)
augagcuggaagguggucaucaucuucucccugcucaucacgccccagcacggccugaaggagagcuaccuggaggaguccugcagcaccaucaccgagggguaccucuccgugcugcgcaccggcugguacaccaacguguucacccuggaggucggggaccucgagaaccugacgugcagcgacggcccgucccugaucaagaccgagcucgaccugaccaagagcgcccugcgggagcucaagaccguguccgccgaccagcuggcgcgcgaggagcagaucgagaaccccgggagcggcuccuucgugcugggcgccaucgcccucggggucgccgccgcggccgccgugacggccggcguggcgaucgccaagaccauccggcuggagagcgaggucaccgccaucaacaacgcccugaagaagaccaacgaggccguguccacgcucgggaacggcgugcgcguccuggcgaccgccgugcgggagcugaaggacuucgugagcaagaaccucacccgcgccaucaacaagaacaagugcgacaucgacgaccugaagauggccgucuccuucagccaguucaaccggcgcuuccugaacguggugcggcaguucuccgacaacgccgggaucacccccgcgaucagccucgaccugaugacggacgccgagcuggcccgcgccguccccaacaugccgaccuccgccggccagaucaagcucaugcuggagaaccgggcgauggugcgccggaagggcuucgggauccugaucggcguguacgggagcagcgucaucuacauggugcagcuccccaucuucggcgugaucgacacccccugcuggaucgucaaggccgcccccuccugcagcgagaagaagggcaacuacgccugccugcugcgcgaggaccaggggugguacugccagaacgccggcuccaccguguacuacccgaacgagaaggacugcgagacgcgcggggaccacgucuucugcgacaccgcggccggcaucaacguggccgagcagagcaaggagugcaacaucaacaucuccaccaccaacuaccccugcaaggugagcacggggcggcaccccaucuccauggucgcccucagcccccugggcgcgcugguggccugcuacaagggcguguccugcagcaucggguccaaccgggucggcaucaucaagcagcucaacaaggggugcagcuacaucaccaaccaggacgccgacaccgugaccaucgacaacacgguguaccagcuguccaaggucgagggcgagcagcacgugaucaaggggcgcccggugagcuccagcuucgaccccaucaaguuccccgaggaccaguuccaggucgcccuggaccagguguucgagaacaucgagaacucccaggcccucguggaccagagcaaccggauccuguccagcgcggagaagggcaacaccggcuucaucaucgucaucauccugaucgccgugcucgggagcuccaugauccuggugagcaucuucaucaucaucaagaagaccaagaagcccaccggcgccccgcccgagcuguccggggucacgaacaacggcuucaucccccacaacuga

SEQ ID NO: 14661 - RNA, 1620 nt, Artificial Sequence
  HMPV/TN/92-4__ABM67072.1 fusion glycoprotein CDS gc (variant)
augagcuggaagguggucaucaucuucucccugcucaucacgccccagcacggccugaaggagagcuaccuggaggaguccugcagcaccaucaccgagggguaccucuccgugcugcgcaccggcugguacaccaacguguucacccuggaggucggggacguggagaaccucacgugcagcgacggcccgucccugaucaagaccgagcuggaccucaccaagagcgcccugcgggagcugaagaccguguccgccgaccagcucgcgcgcgaggagcagaucgagaaccccgggagcggcuccuucguccugggcgccaucgcccuggggguggccgccgcggccgccgugacggccggcgucgcgaucgccaagaccauccggcucgagagcgaggugaccgccaucaacaacgcccugaagaagaccaacgaggccguguccacgcuggggaacggcguccgcgugcucgcgaccgccgugcgggagcugaaggacuucguccugaagaaccucacccgcgccaucaacaagaacaagugcgacaucgacgaccugaagauggccgugagcuucucccaguucaaccggcgcuuccugaacgugguccggcaguucagcgacaacgccgggaucacccccgcgaucucccucgaccugaugacggacgccgagcuggcccgcgccgugcccaacaugccgaccagcgccggccagaucaagcucaugcuggagaaccgggcgauggugcgccggaagggcuucgggauccugaucggcgucuacggguccagcgugaucuacauggugcagcuccccaucuucggcgucaucgacacccccugcuggaucgugaaggccgcccccagcugcuccgagaagaagggcaacuacgccugccugcugcgcgaggaccaggggugguacugccagaacgccggcagcaccgucuacuacccgaacgagaaggacugcgagacgcgcggggaccacguguucugcgacaccgcggccggcaucaacguggccgagcaguccaaggagugcaacaucaacaucagcaccaccaacuaccccugcaaggucuccacggggcggcaccccaucagcaugguggcccucagcccccugggcgcgcugguggccugcuacaagggcgucuccugcuccaucgggagcaaccgggugggcaucaucaagcagcucaacaaggggugcuccuacaucaccaaccaggacgccgacaccgugaccaucgacaacacggucuaccagcugagcaagguggagggcgagcagcacgugaucaaggggcgcccggucuccagcuccuucgaccccaucaaguuccccgaggaccaguuccagguggcccuggaccagguguucgagaacaucgagaacagccaggcccucgucgaccaguccaaccggauccugagcuccgcggagaagggcaacaccggcuucaucaucgugaucauccugaucgccgugcucgggagcagcaugauccuggucuccaucuucaucaucaucaagaagaccaagaagcccaccggcgccccgcccgagcugagcggggugacgaacaacggcuucaucccccacaacuga

SEQ ID NO: 14662 - RNA, 1620 nt, Artificial Sequence
  HMPV/TN/92-4__ABM67072.1 fusion glycoprotein CDS gc (variant)
augagcuggaagguggucaucaucuucucccugcucaucacgccccagcacggccugaaggagagcuaccuggaggaguccugcagcaccaucaccgagggguaccucuccgugcugcgcaccggcugguacaccaacguguucacccuggaggucggggacguggagaaccucacgugcagcgacggcccgucccugaucaagaccgagcuggaccucaccaagagcgcccugcgggagcugaagaccguguccgccgaccagcucgcgcgcgaggagcagaucgagaaccccgggagcggcuccuucguccugggcgccaucgcccuggggguggccgccgcggccgccgugacggccggcgucgcgaucgccaagaccauccggcucgagagcgaggugaccgccaucaacaacgcccugaagaagaccaacgaggccguguccacgcuggggaacggcguccgcgugcucgcgaccgccgugcgggagcugaaggacuucgucagcaagaaccuguggcgcgccaucaacaagaacaagugcgacaucgacgaccucaagauggccguguccuucagccaguucaaccggcgcuuccugaacgugguccggcaguucuccgacaacgccgggaucacccccgcgaucagccuggaccucaugaccgacgccgagcuggcccgcgccgugcccaacaugccgacguccgccggccagaucaagcugaugcucgagaaccgggcgauggugcgccggaagggcuucgggauccugaucggcgucuacgggagcagcgugaucuacauggugcagcugcccaucuucggcgucaucgacacccccugcuggaucgugaaggccgcccccuccugcagcgagaagaagggcaacuacgccugccuccugcgcgaggaccaggggugguacugccagaacgccggcuccaccgucuacuacccgaacgagaaggacugcgagacccgcggggaccacguguucugcgacacggcggccggcaucaacguggccgagcagagcaaggagugcaacaucaacaucuccaccaccaacuaccccugcaaggucagcaccgggcggcaccccaucuccaugguggcccugagcccccucggcgcgcugguggccugcuacaagggcgucuccugcagcaucggguccaaccgggugggcaucaucaagcagcugaacaaggggugcagcuacaucacgaaccaggacgccgacaccgugaccaucgacaacaccgucuaccagcucuccaagguggagggcgagcagcacgugaucaaggggcgcccggucagcuccagcuucgaccccaucaaguuccccgaggaccaguuccagguggcccuggaccagguguucgagaacaucgagaacucccaggcccuggucgaccagagcaaccggauccucuccagcgcggagaagggcaacacgggcuucaucaucgugaucauccugaucgccgugcuggggagcuccaugauccucgucagcaucuucaucaucaucaagaagaccaagaagcccaccggcgccccgcccgagcuguccggggugaccaacaacggcuucaucccccacaacuga

SEQ ID NO: 14663 - RNA, 1620 nt, Artificial Sequence
  HMPV/TN/92-4__ABM67072.1 fusion glycoprotein CDS gc (variant)
augagcuggaagguggucaucaucuucucccugcucaucacgccccagcacggccugaaggagagcuaccuggaggaguccugcagcaccaucaccgagggguaccucuccgugcugcgcaccggcugguacaccaacguguucacccuggaggucggggaccucgagaaccugacgugcagcgacggcccgucccugaucaagaccgagcucgaccugcugaaguccgcccuccgggagcugaagaccguguccgccgaccagcuggcgcgcgaggagcagaucgagaaccccgggagcggcuccuucgugcucggcgccaucgcccugggggucgccgccgcggccgccgugaccgccggcguggcgaucgccaagacgauccggcuggagagcgaggucaccgccaucaacaacgcccucaagaagaccaacgaggccguguccacccuggggaacggcgugcgcguccuggcgacggccgugcgggagcucaaggacuucgugcugaagaaccuguggcgcgccaucaacaagaacaagugcgacaucgacgaccucaagauggccgucagcuucucccaguucaaccggcgcuuccugaacguggugcggcaguucagcgacaacgccgggaucacccccgcgaucucccuggaccucaugaccgacgccgagcuggcccgcgccguccccaacaugccgaccagcgccggccagaucaagcugaugcucgagaaccgggcgauggugcgccggaagggcuucgggauccugaucggcguguacggguccagcgucaucuacauggugcagcugcccaucuucggcgugaucgacacgcccugcuggaucgucaaggccgcccccagcugcuccgagaagaagggcaacuacgccugccuccugcgcgaggaccaggggugguacugccagaacgccggcagcaccguguacuacccgaacgagaaggacugcgagacccgcggggaccacgucuucugcgacaccgcggccggcaucaacguggccgagcaguccaaggagugcaacaucaacaucagcacgaccaacuaccccugcaagguguccaccgggcggcaccccaucagcauggucgcccugagcccccucggcgcgcugguggccugcuacaagggcgugagcugcuccaucgggagcaaccgggucggcaucaucaagcagcugaacaaggggugcuccuacaucaccaaccaggacgccgacacggugaccaucgacaacaccguguaccagcucagcaaggucgagggcgagcagcacgugaucaaggggcgcccgguguccagcuccuucgaccccaucaaguuccccgaggaccaguuccaggucgcccuggaccagguguucgagaacaucgagaacagccaggcccugguggaccaguccaaccggauccucagcuccgcggagaagggcaacaccggcuucaucaucgucaucauccugaucgccgugcuggggagcagcaugauccucguguccaucuucaucaucaucaagaagacgaagaagcccaccggcgccccgcccgagcugagcggggucaccaacaacggcuucaucccccacaacuga

SEQ ID NO: 14664 - RNA, 1620 nt, Artificial Sequence
  HMPV/TN/92-4__ABM67072.1 fusion glycoprotein CDS gc (variant)
augagcuggaagguggucaucaucuucucccugcucaucacgccccagcacggccugaaggagagcuaccuggaggaguccugcagcaccaucaccgagggguaccucuccgugcugcgcaccggcugguacaccaacguguucacccugcccgucggggacguggagaaccucacgugcagcgacggccccucccugaucaagaccgagcuggaccucaccaagagcgcccugcgggagcugaagaccguguccgccgaccagcucgcgcgcgaggagcagaucgagaaccccgggagcggcuccuucguccugggcgccaucgcccuggggguggccgccgcggccgccgugacggccggcgucgcgaucgccaagaccauccggcucgagagcgaggugaccgccaucaacaacgcccugaagaagaccaacgaggccguguccacgcuggggaacggcguccgcgugcucgcgaccgccgugcgggagcugaaggacuucgucagcaagaaccugacccgcgccaucaacaagaacaagugcgacaucgacgaccucaagauggccguguccuucagccaguucaaccggcgcuuccugaacgugguccggcaguucuccgacaacgccgggaucacccccgcgaucagccuggaccucaugacggacgccgagcuggcccgcgccgugccgaacaugcccaccuccgccggccagaucaagcugaugcucgagaaccgggcgauggugcgccggaagggcuucgggauccugaucggcgucuacgggagcagcgugaucuacauggugcagcugcccaucuucggcgucaucgacacccccugcuggaucgugaaggccgccccguccugcagcgagaagaagggcaacuacgccugccuccugcgcgaggaccaggggugguacugccagaacgccggcuccaccgucuacuaccccaacgagaaggacugcgagacgcgcggggaccacguguucugcgacaccgcggccggcaucaacguggccgagcagagcaaggagugcaacaucaacaucuccaccaccaacuaccccugcaaggucagcacggggcggcaccccaucuccaugguggcccugagcccgcucggcgcgcugguggccugcuacaagggcgucuccugcagcaucggguccaaccgggugggcaucaucaagcagcugaacaaggggugcagcuacaucaccaaccaggacgccgacaccgugaccaucgacaacacggucuaccagcucuccaagguggagggcgagcagcacgugaucaaggggcgccccgucagcuccagcuucgaccccaucaaguuccccgaggaccaguuccagguggcccuggaccagguguucgagaacaucgagaacucccaggcccuggucgaccagagcaaccggauccucuccagcgcggagaagggcaacaccggcuucaucaucgugaucauccugaucgccgugcuggggagcuccaugauccucgucagcaucuucaucaucaucaagaagaccaagaagccgaccggcgccccgcccgagcuguccggggugacgaacaacggcuucaucccccacaacuga

SEQ ID NO: 14665 - RNA, 1620 nt, Artificial Sequence
  HMPV/TN/92-4__ABM67072.1 fusion glycoprotein CDS gc (variant)
augagcuggaagguggucaucaucuucucccugcucaucacgccccagcacggccugaaggagagcuaccuggaggaguccugcagcaccaucaccgagggguaccucuccgugcugcgcaccggcugguacaccaacguguucacccuggaggucggggacguggagaaccucacgugcagcgacggccccucccugaucaagaccgagcuggaccucaccaagagcgcccugcgggagcugaagaccguguccgccgaccagcucgcgcgcgaggagcagaucgagaaccccgggagcggcuccuucguccugggcgccaucgcccuggggguggccgccgcggccgccgugacggccggcgucgcgaucgccaagaccauccggcucgagagcgaggugaccgccaucaacaacgcccugaagaagaccaacgaggccguguccacgcuggggaacggcguccgcgugcucgcgaccgccgugcgggagcugaaggacuucgucagcaagaaccugacccgcgccaucaacaagaacaagugcgacauccccgaccucaagauggccguguccuucagccaguucaaccggcgcuuccugaacgugguccggcaguucuccgacaacgccgggaucacccccgcgaucagccuggaccucaugacggacgccgagcuggcccgcgccgugccgaacaugcccaccuccgccggccagaucaagcugaugcucgagaaccgggcgauggugcgccggaagggcuucgggauccugaucggcgucuacgggagcagcgugaucuacauggugcagcugcccaucuucggcgucaucgacacccccugcuggaucgugaaggccgccccguccugcagcgagaagaagggcaacuacgccugccuccugcgcgaggaccaggggugguacugccagaacgccggcuccaccgucuacuaccccaacgagaaggacugcgagacgcgcggggaccacguguucugcgacaccgcggccggcaucaacguggccgagcagagcaaggagugcaacaucaacaucuccaccaccaacuaccccugcaaggucagcacggggcggcaccccaucuccaugguggcccugagcccgcucggcgcgcugguggccugcuacaagggcgucuccugcagcaucggguccaaccgggugggcaucaucaagcagcugaacaaggggugcagcuacaucaccaaccaggacgccgacaccgugaccaucgacaacacggucuaccagcucuccaagguggagggcgagcagcacgugaucaaggggcgccccgucagcuccagcuucgaccccaucaaguuccccgaggaccaguuccagguggcccuggaccagguguucgagaacaucgagaacucccaggcccuggucgaccagagcaaccggauccucuccagcgcggagaagggcaacaccggcuucaucaucgugaucauccugaucgccgugcuggggagcuccaugauccucgucagcaucuucaucaucaucaagaagaccaagaagccgaccggcgccccgcccgagcuguccggggugacgaacaacggcuucaucccccacaacuga

SEQ ID NO: 14666 - RNA, 1620 nt, Artificial Sequence
  HMPV/TN/92-4__ABM67072.1 fusion glycoprotein CDS gc (variant)
augagcuggaagguggucaucaucuucucccugcucaucacgccccagcacggccugaaggagagcuaccuggaggaguccugcagcaccaucaccgagggguaccucuccgugcugcgcaccggcugguacaccaacguguucacccuggaggucggggacguggagaaccucacgugcagcgacggccccucccugaucaagaccgagcuggaccucaccaagagcgcccugcgggagcugaagaccguguccgccgaccagcucgcgcgcgaggagcagaucgagaaccccgggagcggcuccuucguccugggcgccaucgcccuggggguggccgccgcggccgccgugacggccggcgucgcgaucgccaagaccauccggcucgagagcgaggugaccgccaucaacaacgcccugaagaagaccaacgaggccguguccacgcuggggaacggcguccgcgugcucgcgaccgccgugcgggagcugaaggacuucgucagcaagaaccugacccgcgccaucaacaagaacaagugccccaucgacgaccucaagauggccguguccuucagccaguucaaccggcgcuuccugaacgugguccggcaguucuccgacaacgccgggaucacccccgcgaucagccuggaccucaugacggacgccgagcuggcccgcgccgugccgaacaugcccaccuccgccggccagaucaagcugaugcucgagaaccgggcgauggugcgccggaagggcuucgggauccugaucggcgucuacgggagcagcgugaucuacauggugcagcugcccaucuucggcgucaucgacacccccugcuggaucgugaaggccgccccguccugcagcgagaagaagggcaacuacgccugccuccugcgcgaggaccaggggugguacugccagaacgccggcuccaccgucuacuaccccaacgagaaggacugcgagacgcgcggggaccacguguucugcgacaccgcggccggcaucaacguggccgagcagagcaaggagugcaacaucaacaucuccaccaccaacuaccccugcaaggucagcacggggcggcaccccaucuccaugguggcccugagcccgcucggcgcgcugguggccugcuacaagggcgucuccugcagcaucggguccaaccgggugggcaucaucaagcagcugaacaaggggugcagcuacaucaccaaccaggacgccgacaccgugaccaucgacaacacggucuaccagcucuccaagguggagggcgagcagcacgugaucaaggggcgccccgucagcuccagcuucgaccccaucaaguuccccgaggaccaguuccagguggcccuggaccagguguucgagaacaucgagaacucccaggcccuggucgaccagagcaaccggauccucuccagcgcggagaagggcaacaccggcuucaucaucgugaucauccugaucgccgugcuggggagcuccaugauccucgucagcaucuucaucaucaucaagaagaccaagaagccgaccggcgccccgcccgagcuguccggggugacgaacaacggcuucaucccccacaacuga

SEQ ID NO: 14667 - RNA, 1620 nt, Artificial Sequence
  HMPV/TN/92-4__ABM67072.1 fusion glycoprotein CDS gc (variant)
augagcuggaagguggucaucaucuucucccugcucaucacgccccagcacggccugaaggagagcuaccuggaggaguccugcagcaccaucaccgagggguaccucuccgugcugcgcaccggcugguacaccaacguguucacccuggaggucggggacguggagaaccucacgugcagcgacggccccucccugaucaagaccgagcuggaccucaccaagagcgcccugcgggagcugaagaccguguccgccgaccagcucgcgcgcgaggagcagaucgagaaccccgggagcggcuccuucguccugggcgccaucgcccuggggguggccgccgcggccgccgugacggccggcgucgcgaucgccaagaccauccggcuccccagcgaggugaccgccaucaacaacgcccugaagaagaccaacgaggccguguccacgcuggggaacggcguccgcgugcucgcgaccgccgugcgggagcugaaggacuucgucagcaagaaccugacccgcgccaucaacaagaacaagugcgacaucgacgaccucaagauggccguguccuucagccaguucaaccggcgcuuccugaacgugguccggcaguucuccgacaacgccgggaucacccccgcgaucagccuggaccucaugacggacgccgagcuggcccgcgccgugccgaacaugcccaccuccgccggccagaucaagcugaugcucgagaaccgggcgauggugcgccggaagggcuucgggauccugaucggcgucuacgggagcagcgugaucuacauggugcagcugcccaucuucggcgucaucgacacccccugcuggaucgugaaggccgccccguccugcagcgagaagaagggcaacuacgccugccuccugcgcgaggaccaggggugguacugccagaacgccggcuccaccgucuacuaccccaacgagaaggacugcgagacgcgcggggaccacguguucugcgacaccgcggccggcaucaacguggccgagcagagcaaggagugcaacaucaacaucuccaccaccaacuaccccugcaaggucagcacggggcggcaccccaucuccaugguggcccugagcccgcucggcgcgcugguggccugcuacaagggcgucuccugcagcaucggguccaaccgggugggcaucaucaagcagcugaacaaggggugcagcuacaucaccaaccaggacgccgacaccgugaccaucgacaacacggucuaccagcucuccaagguggagggcgagcagcacgugaucaaggggcgccccgucagcuccagcuucgaccccaucaaguuccccgaggaccaguuccagguggcccuggaccagguguucgagaacaucgagaacucccaggcccuggucgaccagagcaaccggauccucuccagcgcggagaagggcaacaccggcuucaucaucgugaucauccugaucgccgugcuggggagcuccaugauccucgucagcaucuucaucaucaucaagaagaccaagaagccgaccggcgccccgcccgagcuguccggggugacgaacaacggcuucaucccccacaacuga

SEQ ID NO: 14668 - RNA, 1620 nt, Artificial Sequence
  HMPV/TN/92-4__ABM67072.1 fusion glycoprotein CDS gc (variant)
augagcuggaagguggucaucaucuucucccugcucaucacgccccagcacggccugaaggagagcuaccuggaggaguccugcagcaccaucaccgagggguaccucuccgugcugcgcaccggcugguacaccaacguguucacccuggaggucggggacguggagaaccucacgugcagcgacggccccucccugaucaagaccgagcuggaccucaccaagagcgcccugcgggagcugaagaccguguccgccgaccagcucgcgcgcgaggagcagaucgagaaccccgggagcggcuccuucguccugggcgccaucgcccuggggguggccgccgcggccgccgugacggccggcgucgcgaucgccaagaccauccggcucgagagcgaggugaccgccaucaacaacgcccugaagaagaccaacgaggccguguccacgcuggggaacggcguccgcgugcucgcgaccgccgugcgggagcugaaggacuucgucagcaagaaccugacccgcgccaucaacaagaacaagugcgacaucgacgaccucaagauggccguguccuucagccaguucaaccggcgcuuccugaacgugguccggcaguucuccgacaacgccgggaucacccccgcgaucagccuggaccucaugacggacgccgagcuggcccgcgccgugcccaacaugccgaccuccgccggccagaucaagcugaugcucgagaaccgggcgauggugcgccggaagggcuucgggauccugaucggcgucuacgggagcagcgugaucuacauggugcagcugcccaucuucggcgucaucgacacccccugcuggaucgugaaggccgcccccuccugcagcgagaagaagggcaacuacgccugccuccugcgcgaggaccaggggugguacugccagaacgccggcuccaccgucuacuacccgaacgagaaggacugcgagacgcgcggggaccacguguucugcgacaccgcggccggcaucaacguggccgagcagagcaaggagugcaacaucaacaucuccaccaccaacuaccccugcaaggucagcacggggcggcaccccaucuccaugguggcccugagcccccucggcgcgcugguggccugcuacaagggcgucuccugcagcaucggguccaaccgggugggcaucaucaagcagcugaacaaggggugcagcuacaucaccaaccaggacgccgacaccgugaccaucgacaacacggucuaccagcucuccaagguggagggcgagcagcacgugaucaaggggcgcccggucagcuccagcuucccgcccaucaaguuccccgaggaccaguuccagguggcccuggaccagguguucgagaacaucgagaacucccaggcccuggucgaccagagcaaccggauccucuccagcgcggagaagggcaacaccggcuucaucaucgugaucauccugaucgccgugcuggggagcuccaugauccucgucagcaucuucaucaucaucaagaagaccaagaagcccaccggcgccccgcccgagcuguccggggugacgaacaacggcuucaucccccacaacuga

SEQ ID NO: 14669 - RNA, 1620 nt, Artificial Sequence
  HMPV/TN/92-4__ABM67072.1 fusion glycoprotein CDS gc (variant)
augagcuggaagguggucaucaucuucucccugcucaucacgccccagcacggccugaaggagagcuaccuggaggaguccugcagcaccaucaccgagggguaccucuccgugcugcgcaccggcugguacaccaacguguucacccuggaggucggggacguggagaaccucacgugcagcgacggcccgucccugaucaagaccgagcuggaccucaccaagagcgcccugcgggagcugaagaccguguccgccgaccagcucgcgcgcgaggagcagaucgagaaccccgggagcggcuccuucguccugggcgccaucgcccuggggguggccgccgcggccgccgugacggccggcgucgcgaucgccaagaccauccggcucgagagcgaggugaccgccaucaacaacgcccugaagaagaccaacgaggccguguccacgcuggggaacggcguccgcgugcucgcgaccgccgugcgggagcugaaggacuucgucagcaagaaccugacccgcgccaucaacaagaacaagugcgacaucgacgaccucaagauggccguguccuucagccaguucaaccggcgcuuccugaacgugguccggcaguucuccgacaacgccgggaucacccccgcgaucagccuggaccucaugacggacgccgagcuggcccgcgccgugcccaacaugccgaccuccgccggccagaucaagcugaugcucgagaaccgggcgauggugcgccggaagggcuucgggauccugaucggcgucuacgggagcagcgugaucuacauggugcagcugcccaucuucggcgucaucgacacccccugcuggaucgugaaggccgcccccuccugcagcgagaagaagggcaacuacgccugccuccugcgcgaggaccaggggugguacugccagaacgccggcuccaccgucuacuacccgaacgagaaggacugcgagacgcgcggggaccacguguucugcgacaccgcggccggcaucaacguggccgagcagagcaaggagugcaacaucaacaucuccaccaccaacuaccccugcaaggucagcacggggcggcaccccaucuccaugguggcccugagcccccucggcgcgcugguggccugcuacaagggcgucuccugcagcaucggguccaaccgggugggcaucaucaagcagcugaacaaggggugcagcuacaucaccaaccaggacgccgacaccgugaccaucgacaacacggucuaccagcucuccaagguggagggcgagcagcacgugaucaaggggcgcccggucagcuccagcuucgaccccaucaaguuccccgagaaccaguuccagguggcccuggaccagguguucgagaacaucgagaacucccaggcccuggucgaccagagcaaccggauccucuccagcgcggagaagggcaacaccggcuucaucaucgugaucauccugaucgccgugcuggggagcuccaugauccucgucagcaucuucaucaucaucaagaagaccaagaagcccaccggcgccccgcccgagcuguccggggugacgaacaacggcuucaucccccacaacuga

SEQ ID NO: 14670 - RNA, 1620 nt, Artificial Sequence
  HMPV/TN/92-4__ABM67072.1 fusion glycoprotein CDS gc (variant)
augagcuggaagguggucaucaucuucucccugcucaucacgccccagcacggccugaaggagagcuaccuggaggaguccugcagcaccaucaccgagggguaccucuccgugcugcgcaccggcugguacaccaacguguucacccuggaggucggggacguggagaaccucacgugcagcgacggcccgucccugaucaagaccgagcuggaccucaccaagagcgcccugcgggagcugaagaccguguccgccgaccagcucgcgcgcgaggagcagaucgagaaccccgggagcggcuccuucguccugggcgccaucgcccuggggguggccgccgcggccgccgugacggccggcgucgcgaucgccaagaccauccggcucgagagcgaggugaccgccaucaacaacgcccugaagaagaccaacgaggccguguccacgcuggggaacggcguccgcgugcucgcgaccgccgugcgggagcugaaggacuucgucagcaagaaccugacccgcgccaucaacaagaacaagugcgacaucgacgaccucaagauggccguguccuucagccaguucaaccggcgcuuccugaacgugguccggcaguucuccgacaacgccgggaucacccccgcgaucagccuggaccucaugacggacgccgagcuggcccgcgccgugcccaacaugccgaccuccgccggccagaucaagcugaugcucgagaaccgggcgauggugcgccggaagggcuucgggauccugaucggcgucuacgggagcagcgugaucuacauggugcagcugcccaucuucggcgucaucgacacccccugcuggaucgugaaggccgcccccuccugcagcgagaagaagggcaacuacgccugccuccugcgcgaggaccaggggugguacugccagaacgccggcuccaccgucuacuacccgaacgagaaggacugcgagacgcgcggggaccacguguucugcgacaccgcggccggcaucaacguggccgagcagagcaaggagugcaacaucaacaucuccaccaccaacuaccccugcaaggucagcacggggcggcaccccaucuccaugguggcccugagcccccucggcgcgcugguggccugcuacaagggcgucuccugcagcaucggguccaaccgggugggcaucaucaagcagcugaacaaggggugcagcuacaucaccaaccaggacgccgacaccgugaccaucgacaacacggucuaccagcucuccaagguggagggcgagcagcacgugaucaaggggcgcccggucagcuccagcuucgaccccaucaaguucccccaggaccaguuccagguggcccuggaccagguguucgagaacaucgagaacucccaggcccuggucgaccagagcaaccggauccucuccagcgcggagaagggcaacaccggcuucaucaucgugaucauccugaucgccgugcuggggagcuccaugauccucgucagcaucuucaucaucaucaagaagaccaagaagcccaccggcgccccgcccgagcuguccggggugacgaacaacggcuucaucccccacaacuga

SEQ ID NO: 14671 - RNA, 1620 nt, Artificial Sequence
  HMPV/TN/92-4__ABM67072.1 fusion glycoprotein CDS gc (variant)
augagcuggaagguggucaucaucuucucccugcucaucacgccccagcacggccugaaggagagcuaccuggaggaguccugcagcaccaucaccgagggguaccucuccgugcugcgcaccggcugguacaccaacguguucacccuggaggucggggacguggagaaccucacgugcagcgacggcccgucccugaucaagaccgagcuggaccucaccaagagcgcccugcgggagcugaagaccguguccgccgaccagcucgcgcgcgaggagcagaucgagaaccccgggagcggcuccuucguccugggcgccaucgcccuggggguggccgccgcggccgccgugacggccggcgucgcgaucgccaagaccauccggcucgagagcgaggugaccgccaucaacaacgcccugaagaagaccaacgaggccguguccacgcuggggaacggcguccgcgugcucgcgaccgccgugcgggagcugaaggacuucgucagcaagaaccugacccgcgccaucaacaagaacaagugcgacaucgacgaccucaagauggccguguccuucagccaguggaaccggcgcuuccugaacgugguccggcaguucuccgacaacgccgggaucacccccgcgaucagccuggaccucaugacggacgccgagcuggcccgcgccgugcccaacaugccgaccuccgccggccagaucaagcugaugcucgagaaccgggcgauggugcgccggaagggcuucgggauccugaucggcgucuacgggagcagcgugaucuacauggugcagcugcccaucuucggcgucaucgacacccccugcuggaucgugaaggccgcccccuccugcagcgagaagaagggcaacuacgccugccuccugcgcgaggaccaggggugguacugccagaacgccggcuccaccgucuacuacccgaacgagaaggacugcgagacgcgcggggaccacguguucugcgacaccgcggccggcaucaacguggccgagcagagcaaggagugcaacaucaacaucuccaccaccaacuaccccugcaaggucagcacggggcggcaccccaucuccaugguggcccugagcccccucggcgcgcugguggccugcuacaagggcgucuccugcagcaucggguccaaccgggugggcaucaucaagcagcugaacaaggggugcagcuacaucaccaaccaggacgccgacaccgugaccaucgacaacacggucuaccagcucuccaagguggagggcgagcagcacgugaucaaggggcgcccggucagcuccagcuucgaccccaucaaguuccccgaggaccaguuccagguggcccuggaccagguguucgagaacaucgagaacucccaggcccuggucgaccagagcaaccggauccucuccagcgcggagaagggcaacaccggcuucaucaucgugaucauccugaucgccgugcuggggagcuccaugauccucgucagcaucuucaucaucaucaagaagaccaagaagcccaccggcgccccgcccgagcuguccggggugacgaacaacggcuucaucccccacaacuga

SEQ ID NO: 14672 - RNA, 1620 nt, Artificial Sequence
  HMPV/NL/1/99__AAQ90145.1 fusion glycoprotein CDS gc (F0)
augagcuggaaggugaugaucaucaucucccugcucaucacgccccagcacggccugaaggagagcuaccuggaggaguccugcagcaccaucaccgagggguaccucuccguccugcgcaccggcugguacaccaacguguucacccuggaggugggggacgucgagaaccucacgugcaccgacggcccgagccugaucaagaccgagcuggaccucaccaaguccgcccugcgggagcugaagacggugagcgccgaccagcucgcgcgcgaggagcagaucgagaacccccggcagucccgcuucgugcugggggccaucgcccugggcgucgccaccgccgcggccgugaccgccggcaucgccaucgcgaagaccauccggcucgagagcgaggugaacgccaucaagggggcccugaagcagacgaacgaggccgucuccacccugggcaacggggugcgcgugcucgccaccgcgguccgggagcugaaggaguucgugagcaagaaccugaccuccgccaucaaccgcaacaagugcgacaucgccgaccucaagauggccgugagcuucucccaguucaaccggcgcuuccugaacgucgugcggcaguucagcgacaacgccggcaucacgcccgcgaucucccuggaccucaugaccgacgccgagcuggcccgcgccgugagcuacaugcccaccuccgccgggcagaucaagcugaugcucgagaaccgggcgaugguccgccggaagggcuucggcauccugaucgggguguacggcagcagcgugaucuacaugguccagcugccgaucuucggggugaucgacacccccugcuggaucaucaaggccgcccccuccugcagcgagaagaacggcaacuacgccugccuccugcgcgaggaccagggcugguacugcaagaacgccggguccacgguguacuaccccaacgagaaggacugcgagacccggggcgaccacgucuucugcgacaccgcggccgggaucaacguggccgagcagagccgcgagugcaacaucaacaucuccaccacgaacuacccgugcaaggucagcaccggccggcaccccaucuccaugguggcccugagcccccucggggcgcugguggccugcuacaagggcgucuccugcagcaucggcuccaacuggguggggaucaucaagcagcugcccaagggcugcagcuacaucaccaaccaggacgccgacaccgugacgaucgacaacaccgucuaccagcucuccaagguggagggggagcagcacgugaucaagggccgcccggucagcuccagcuucgaccccaucaaguuccccgaggaccaguucaacguggcccuggaccagguguucgaguccaucgagaacagccaggcccuggucgaccaguccaacaagauccucaacagcgcggagaaggggaacaccggcuucaucaucguggugauccuggucgccgugcugggccucaccaugaucagcguguccaucaucaucaucaucaagaagacgcggaagcccaccggggccccgcccgagcugaacggcgucaccaacgggggcuucaucccccacagcuga

SEQ ID NO: 14673 - RNA, 1620 nt, Artificial Sequence
  HMPV/Sabana__AEA02280.1 fusion glycoprotein CDS gc (F0)
augagcuggaaggugaugaucaucaucucccugcucaucacgccccagcacggccugaaggagagcuaccuggaggaguccugcagcaccaucaccgagggguaccucuccguccugcgcaccggcugguacaccaacguguucacccuggaggugggggacgucgagaaccucacgugcaccgacggcccgagccugaucaagaccgagcuggaccucaccaaguccgcccugcgggagcugaagacggugagcgccgaccagcucgcgcgcgaggagcagaucgagaacccccggcagucccgcuucgugcugggggccaucgcccugggcgucgccaccgccgcggccgugaccgccggcaucgccaucgcgaagaccauccggcucgagagcgaggugaacgccaucaagggggcccugaagacgaccaacgaggccgucuccacccugggcaacggggugcgcgugcucgccaccgcgguccgggagcugaaggaguucgugagcaagaaccugacguccgccaucaacaagaacaagugcgacaucgccgaccucaagauggccgugagcuucucccaguucaaccgccgguuccugaacgucgugcgccaguucagcgacaacgccggcaucacccccgcgaucucccuggaccucaugaacgacgccgagcuggcccgggccgugagcuacaugcccaccuccgccgggcagaucaagcugaugcucgagaaccgcgcgaugguccggcgcaagggcuucggcauccugaucgggguguacggcagcagcgugaucuacaugguccagcugccgaucuucggggugaucaacacccccugcuggaucaucaaggccgcccccuccugcagcgagaaggacggcaacuacgccugccuccugcgggaggaccagggcugguacugcaagaacgccggguccacgguguacuaccccaacgagaaggacugcgagacccgcggcgaccacgucuucugcgacaccgcggccgggaucaacguggccgagcagagccgggagugcaacaucaacaucuccaccacgaacuacccgugcaaggucagcaccggccgccaccccaucuccaugguggcccugagcccccucggggcgcugguggccugcuacaagggcgucuccugcagcaccggcuccaaccagguggggaucaucaagcagcugcccaagggcugcagcuacaucaccaaccaggacgccgacacggugaccaucgacaacaccgucuaccagcucuccaagguggagggggagcagcacgugaucaagggccggccggucagcuccagcuucgaccccauccgcuuccccgaggaccaguucaacguggcccuggaccagguguucgaguccaucgagaacagccaggcccuggucgaccaguccaacaagauccucaacagcgcggagaaggggaacaccggcuucaucaucgugaucauccugaucgccgugcugggccucacgaugaucagcgucuccaucaucaucaucaucaagaagacccggaagcccaccggggccccgcccgagcugaacggcgugaccaacgggggcuucaucccccacagcuga

SEQ ID NO: 14674 - RNA, 1620 nt, Artificial Sequence
  HMPV/TN/92-4__ABM67072.1 fusion glycoprotein CDS human (F0)
augagcuggaagguggucaucauuuucucccugcucauaacaccccagcacggccuuaaagagucuuaccuggaagagucaugcaguaccaucacugaaggguauuugagcguuuuaagaacgggaugguacaccaacguguuuacacuggagguaggugacguggaaaaucuaacuuguuccgauggcccuucucucauuaagaccgagcuggaccuuacaaaaucggcccugagggaguugaagaccgucucagcugaucaacucgcacgggaggaacagaucgaaaacccacgccagagccgauucgugcugggggccauugcgcugggaguugcugccgcagccgcugugacugcaggcgucgccaucgcuaaaacaauacgucucgagagugaggugaccgccaucaauaacgcguuaaagaagacgaaugaagcaguauccacucuggguaacgggguuagagugcuugccaccgcugucagggaguugaaagacuuugugucuaagaaucugacacgggccauuaacaaaaauaagugcgauaucgacgaucuaaaaauggcagugagcuucucccaguuuaaccgcagauuccucaaugucguuaggcaauuuucagacaacgcuggaauuacuccggccaucagucuggaucuuaugaccgacgcggaacuggcccgggcagugcccaauaugccuacaagcgcuggccagauaaaguugaugcucgagaaccgcgccaugguacgaagaaagggcuucgggauucugaucggaguguaugguucuuccgucauuuacauggugcaguuaccaaucuuuggcguuaucgauacccccuguuggauugugaaagcugccccuucaugcagcgaaaagaaagggaauuaugcaugucugcucagggaggaccagggaugguacugccaaaacgccggcaguacggucuauuacccaaacgagaaggauugugaaacucggggugaccauguguucugcgacacagcugcggggauaaauguagcagagcagucuaaagaauguaacaucaauauuuccaccacuaacuaccccugcaagguuagcacaggacgucacccuaucucgaugguggcccuuucuccacugggcgcuuuggucgccuguuauaaaggcguguccugcucaauagggaguaaucgcgucggaauuaucaagcagcuaaacaaggguugcagcuacaucaccaaucaggaugcagacacggugaccauugauaacacaguuuaucaacuguccaaaguggagggcgaacagcauguaaucaaggggagaccggucucuagcucauuugaccccauuaaauucccugaggaucaguuuaauguggcccucgaccaaguuuucgagaacauagaaaauagucaggcucugguggaucaguccaacaggauccuuagcucugccgagaagggaaauacuggcuucauuaucgucaucauucugauagcaguguuggguucaaguaugauccucguaagcauuuuuaucauuaucaaaaagaccaagaaaccaacaggggcgcccccugaacuguccggcgugacuaacaauggauucauaccacacaacuga

SEQ ID NO: 14675 - RNA, 1620 nt, Artificial Sequence
  HMPV/TN/92-4__ABM67072.1 fusion glycoprotein CDS human (variant)
augagcuggaagguggucaucauuuucucccugcucauaacaccccagcacggccuuaaagagucuuaccuggaagagucaugcaguaccaucacugaaggguauuugagcguuuuaagaacgggaugguacaccaacguguuuacacuggagguaggugacguggaaaaucuaacuuguuccgauggcccuucucucauuaagaccgagcuggaccuuacaaaaucggcccugagggaguugaagaccgucucagcugaucaacucgcacgggaggaacagaucgaaaacccagggagcggaaguuucgugcugggcgccauugcgcuggguguugcugccgcagccgcugugacugcaggggucgccaucugcaaaacaauacgccucgaguccgaggugaccgcuaucaauaacgccuuaaagaagacgaaugaagcgguaucuacucugggaaacggcguucgagugcuugcauuugccguccgugaguugaaagacuucgugagcaagaaucugaccagagcucuaaacaaaaauaagugugauauugacgaucucaaaauggccguguccuuuucacaguucaacaggcgguuucugaaugucguucgccaguucagugacaacgcaggcaucacaccggcuauuagccuugaucugaugacugacgccgaauuggcgagagccgugcccaauaugccuaccucugcagggcaaaucaagcucaugcuggagaacagggcuaugguacggcgcaagggauuugguauauuaugcggcguguauggguccucagucauuuacauggugcagcugccaaucuucggaguuauugauacacccuguuggaucgugaaagccgcuccuagcugcagugaaaagaaaggcaauuaugccugucuccuucgagaggaccaggguugguacugccagaacgcagggucuaccgucuauuacccaaacgagaaggauugugaaacgagaggagaccauguguuuugcgacacugccgcuggcaucaauguagcggagcaauccaaagaauguaacauuaauauaagcacaaccaacuaccccugcaagguuucgacuggcaggcacccuaucucuaugguggcacuguccccauugggggcccuagucgcuugcuauaaaggagugucauguaguauugguagcaaucgggucggcaucauaaagcagcugaacaaggggugcuccuacauuacaaaucaggaugccgacaccgugacgaucgauaacaccguuuaucagcucucuaaaguggagggagaacaacauguaaucaagggccguccggucagcucaaguuucgaccccauuaaauuuccugaggaucaguucaauguggcacuggaccagguuuucgagaacaucgaaaauucccaagcccuuguggaucagagcaaccgcauucugucuucagcugagaaggguaauacaggguuuauaaucgucauuaucuugaucgccgugcucggcaguagcaugauucugguauccauauucaucauuaucaaaaagacuaagaaaccaaccggagcacccccugaauuaucuggcgugacaaacaauggguuuauuccacacaacuga

SEQ ID NO: 14676 - RNA, 1620 nt, Artificial Sequence
  HMPV/TN/92-4__ABM67072.1 fusion glycoprotein CDS human (variant)
augagcuggaagguggucaucauuuucucccugcucauaacaccccagcacggccuuaaagagucuuaccuggaagagucaugcaguaccaucacugaaggguauuugagcguuuuaagaacgggaugguacaccaacguguuuacacuggagguaggugacguggaaaaucuaacuuguuccgauggcccuucucucauuaagaccgagcuggaccuuacaaaaucggcccugagggaguugaagaccgucucagcugaucaacucgcacgggaggaacagaucgaaaacccagggagcggaaguuucgugcugggcgccauugcgcuggguguugcugccgcagccgcugugacugcaggggucgccaucugcaaaacaauacgccucgaguccgaggugaccgcuaucaauaacgccuuaaagaagacgaaugaagcgguaucuacucugggaaacggcguucgagugcuugcaaccgccguccgugaguugaaagacuuugugagcaagaaucugacaagagcuauuaacaaaaauaagugugauaucgacgaucuaaaaauggccguguccuucucacaguuuaacaggcgguuccucaaugucguucgccaguuuagugacaacgcaggcauuacuccggcuaucagccuggaucuuaugaccgacgccgaacuggcgagagccgugcccaauaugccuacaucugcagggcaaauaaaguugaugcucgagaacagggcuaugguacggcgcaagggauucgguauucugugcggcguguauggguccucagucaucuacauggugcaguuaccaauuuuuggaguuaucgauacccccuguuggaucgugaaagccgcuccuagcugcagugaaaagaaaggcaauuaugccugucugcuccgagaggaccaggguugguacugccagaacgcagggucuacggucuauuacccaaacgagaaggauugugaaacuagaggagaccauguguucugcgacacagccgcuggcauuaauguagcggagcaauccaaagaauguaacauaaauaucagcaccacuaacuaccccugcaagguuucgacaggcaggcacccuauuucuaugguggcacuuuccccacugggggccuuggucgcuugcuauaaaggagugucauguaguaucgguagcaaucgggucggcauaauuaagcagcuaaacaaggggugcuccuacaucaccaaucaggaugccgacacggugaccaucgauaacacaguuuaucagcugucuaaaguggagggagaacaacauguaauuaagggccguccggucagcucaaguuuugaccccaucaaauucccugagcaccaguggcauguggcacucgaucagguuuuugagaauauugaaaacucccaagcccugguggaccagagcaaucgcauacuuucuucagcugagaaggguaacacuggguucaucauugucaucauccugauugccguguugggcaguagcaugauacucguauccaucuucauuaucauuaaaaagaccaagaaaccaacaggagcacccccugaacugucuggcgugacuaauaacggguuuaucccacacaauuga

SEQ ID NO: 14677 - RNA, 1620 nt, Artificial Sequence
  HMPV/TN/92-4__ABM67072.1 fusion glycoprotein CDS human (variant)
augagcuggaagguggucaucauuuucucccugcucauaacaccccagcacggccuuaaagagucuuaccuggaagagucaugcaguaccaucacugaaggguauuugagcguuuuaagaacgggaugguacaccaacguguuuacacuggagguaggugacguggaaaaucuaacuuguuccgauggcccuucucucauuaagaccgagcuggaccuucugaaaucggccuugagggagcucaagacagucucagcugaucaacuggcacgggaggaacagaucgaaaacccagggagcggaaguuucgugcugggcgccauugcgcucgguguugcugccgcagccgcugugaccgcaggggucgccaucgcuaaaacuauacgcuuagaguccgaggugacagccaucaauaacgcgcugaagaagaccaaugaagcaguaucuacgcuuggaaacggcguucgaguguuggccacugcuguccgugagcugaaagacuuugugagcaagaaucuaaccagagccauuaacaaaaauaagugcgauaucccggaccucaaaauggcaguguccuucucacaguuuaacaggcgguuccugaaugucguucgccaguuuagugauaacgcuggcauuacacccgccaucagccuugaccugaugacugaugcggaauuggccagagcagugccuaauaugccaaccucugcugggcaaauaaagcucaugcuggagaacagggccaugguacggcgcaagggauucgguauuuuaaucggcguguauggguccucagucauuuacauggugcagcugcccaucuuuggaguuaucgacacaccuuguuggauugugaaagcugccccaagcugcagugaaaagaaaggcaauuaugcaugucuccuucgagaggaucaggguugguacugccagaacgccgggucuaccgucuauuaccccaacgagaaggacugugaaacgagaggagaucauguguucugcgacacugcugcgggcauaaauguagcagagcaauccaaagaauguaacaucaauauuagcacaaccaacuacccuugcaagguuucgacuggcaggcacccaaucucuaugguggcccuguccccguugggggcucuagucgccuguuauaaaggagugucaugcaguauagguagcaaucgggucggcauuaucaagcagcugaacaaggggugcuccuacaucacaaaucaggacgcagauaccgugacgauugacaacaccguuuaucagcucucuaaaguggagggagaacaacauguaaucaagggccgucccgucagcucaaguuuugauccuauuaaauucccagaggaccaguuucagguggcccuggaucaaguuuucgagaauauagaaaacucccaggcucuuguggaccagagcaaucgcauccugucuucagccgagaaggguaacacaggguucauuaucgucaucauuuugauagcagugcucggcaguagcaugauccugguauccauuuuuaucauuaucaaaaagacuaagaaacccaccggagcgccuccagaauuaucuggcgugacaaauaacggguucauaccccacaauuga

SEQ ID NO: 14678 - RNA, 1620 nt, Artificial Sequence
  HMPV/TN/92-4__ABM67072.1 fusion glycoprotein CDS human (variant)
augagcuggaagguggucaucauuuucucccugcucauaacaccccagcacggccuuaaagagucuuaccuggaagagucaugcaguaccaucacugaaggguauuugagcguuuuaagaacgggaugguacaccaacguguuuacacuggagguaggugacguggaaaaucuaacuuguuccgauggcccuucucucauuaagaccgagcuggaccuucugaaaucggccuugagggagcucaagacagucucagcugaucaacuggcacgggaggaacagaucgaaaacccagggagcggaaguuucgugcugggcgccauugcgcucgguguugcugccgcagccgcugugaccgcaggggucgccaucgcuaaaacuauacgcuuagaguccgaggugacagccaucaauaacgcgcugaagaagaccaaugaagcaguaucuacgcuuggaaacggcguucgaguguuggccacugcuguccgugagcugaaagacuuugugagcaagaaucuaaccagagccauuaacaaaaauaagugcgauaucccggaccucaaaauggcaguguccuucucacaguuuaacaggcgguuccugaaugucguucgccaguuuagugauaacgcuggcauuacacccgccaucagccuugaccugaugacugaugcggaauuggccagagcagugccuaauaugccaaccucugcugggcaaauaaagcucaugcuggagaacagggccaugguacggcgcaagggauucgguauuuuaaucggcguguauggguccucagucauuuacauggugcagcugcccaucuuuggaguuaucgacacaccuuguuggauugugaaagcugccccaagcugcagugaaaagaaaggcaauuaugcaugucuccuucgagaggaucaggguugguacugccagaacgccgggucuaccgucuauuaccccaacgagaaggacugugaaacgagaggagaucauguguucugcgacacugcugcgggcauaaauguagcagagcaauccaaagaauguaacaucaauauuagcacaaccaacuacccuugcaagguuucgacuggcaggcacccaaucucuaugguggcccuguccccguugggggcucuagucgccuguuauaaaggagugucaugcaguauagguagcaaucgggucggcauuaucaagcagcugaacaaggggugcuccuacaucacaaaucaggacgcagauaccgugacgauugacaacaccguuuaucagcucucuaaaguggagggagaacaacauguaaucaagggccgucccgucagcucaaguuuugauccuauuaaauucccagagaaucaguuucagguggcccuggaccaaguuuucgagaacauagaaaauucccaggcucuuguggaucagagcaaccgcauccugucuucagccgagaaggguaauacaggguucauuaucgucaucauuuugauagcagugcucggcaguagcaugauccugguauccauuuuuaucauuaucaaaaagacuaagaaacccaccggagcgccuccagaauuaucuggcgugacaaacaauggguucauaccccacaacuga

SEQ ID NO: 14679 - RNA, 1620 nt, Artificial Sequence
  HMPV/TN/92-4__ABM67072.1 fusion glycoprotein CDS human (variant)
augagcuggaagguggucaucauuuucucccugcucauaacaccccagcacggccuuaaagagucuuaccuggaagagucaugcaguaccaucacugaaggguauuugagcguuuuaagaacgggaugguacaccaacguguuuacacuggagguaggugacguggaaaaucuaacuuguuccgauggcccuucucucauuaagaccgagcuggaccuucugaaaucggccuugagggagcucaagacagucucagcugaucaacuggcacgggaggaacagaucgaaaacccagggagcggaaguuucgugcugggcgccauugcgcucgguguugcugccgcagccgcugugaccgcaggggucgccaucgcuaaaacuauacgcuuagaguccgaggugacagccaucaauaacgcgcugaagaagaccaaugaagcaguaucuacgcuuggaaacggcguucgaguguuggccacugcuguccgugagcugaaagacuuugugcuaaagaaucucaccagagccauuaacaaaaauaagugcgauaucccggaccugaaaauggcagugagcuucucccaguuuaacaggcgguuccuuaaugucguucgccaguuuucagauaacgcuggcauuacacccgccaucagucuggacuugaugacugaugcggaacucgccagagcagugccuaauaugccaaccagcgcugggcaaauaaagcugauguuagagaacagggccaugguacggcgcaagggauucgguauucugaucggcguguaugggucuuccgucauuuacauggugcagcuccccaucuuuggaguuaucgacacaccuuguuggauugugaaagcugccccaucaugcagcgaaaagaaaggcaauuaugcaugucuucugcgagaggaucaggguugguacugccagaacgccgggaguaccgucuauuaccccaacgagaaggacugugaaacgagaggagaucauguguucugcgacacugcugcgggcauaaauguagcagagcaaucuaaagaauguaacaucaauauuuccacaaccaacuacccuugcaagguuagcacuggcaggcacccaaucucgaugguggccuugucuccgcuaggggcucuggucgccuguuauaaaggaguguccugcucaauagguaguaaucgggucggcauuaucaagcagcucaacaaggggugcagcuacaucacaaaucaggacgcagauaccgugacgauugacaacaccguuuaucagcuguccaaaguggagggagaacaacauguaaucaagggccgucccgucucuagcucauuugauccuauuaaauucccagaggaccaguuucagguggcccuugaucaaguuuucgagaauauagaaaacagucaggcucugguggaccaguccaaucgcaucuugagcucugccgagaaggguaacacaggguucauuaucgucaucauucucauagcagugcugggcucaaguaugaucuuaguaagcauuuuuaucauuaucaaaaagacuaagaaacccaccggagcgccuccagaacuguccggcgugacaaauaacggguucauaccccacaauuga

SEQ ID NO: 14680 - RNA, 1620 nt, Artificial Sequence
  HMPV/TN/92-4__ABM67072.1 fusion glycoprotein CDS human (variant)
augagcuggaagguggucaucauuuucucccugcucauaacaccccagcacggccuuaaagagucuuaccuggaagagucaugcaguaccaucacugaaggguauuugagcguuuuaagaacgggaugguacaccaacguguuuacacuggagguaggugacguggaaaaucuaacuuguuccgauggcccuucucucauuaagaccgagcuggaccuucugaaaucggccuugagggagcucaagacagucucagcugaucaacuggcacgggaggaacagaucgaaaacccagggagcggaaguuucgugcugggcgccauugcgcucgguguugcugccgcagccgcugugaccgcaggggucgccaucgcuaaaacuauacgcuuagaguccgaggugacagccaucaauaacgcgcugaagaagaccaaugaagcaguaucuacgcuuggaaacggcguucgaguguuggccacugcuguccgugagcugaaagacuuugugcuaaagaaucucaccagagccauuaacaaaaauaagugcgauaucccggaccugaaaauggcagugagcuucucccaguuuaacaggcgguuccuuaaugucguucgccaguuuucagauaacgcuggcauuacacccgccaucagucuggacuugaugacugaugcggaacucgccagagcagugccuaauaugccaaccagcgcugggcaaauaaagcugauguuagagaacagggccaugguacggcgcaagggauucgguauucugaucggcguguaugggucuuccgucauuuacauggugcagcuccccaucuuuggaguuaucgacacaccuuguuggauugugaaagcugccccaucaugcagcgaaaagaaaggcaauuaugcaugucuucugcgagaggaucaggguugguacugccagaacgccgggaguaccgucuauuaccccaacgagaaggacugugaaacgagaggagaucauguguucugcgacacugcugcgggcauaaauguagcagagcaaucuaaagaauguaacaucaauauuuccacaaccaacuacccuugcaagguuagcacuggcaggcacccaaucucgaugguggccuugucuccgcuaggggcucuggucgccuguuauaaaggaguguccugcucaauagguaguaaucgggucggcauuaucaagcagcucaacaaggggugcagcuacaucacaaaucaggacgcagauaccgugacgauugacaacaccguuuaucagcuguccaaaguggagggagaacaacauguaaucaagggccgucccgucucuagcucauuugauccuauuaaauucccagagaaucaguuucagguggcccuugaccaaguuuucgagaacauagaaaauagucaggcucugguggaucaguccaaccgcaucuugagcucugccgagaaggguaauacaggguucauuaucgucaucauucucauagcagugcugggcucaaguaugaucuuaguaagcauuuuuaucauuaucaaaaagacuaagaaacccaccggagcgccuccagaacuguccggcgugacaaacaauggguucauaccccacaacuga

SEQ ID NO: 14681 - RNA, 1620 nt, Artificial Sequence
  HMPV/TN/92-4__ABM67072.1 fusion glycoprotein CDS human (variant)
augagcuggaagguggucaucauuuucucccugcucauaacaccccagcacggccuuaaagagucuuaccuggaagagucaugcaguaccaucacugaaggguauuugagcguuuuaagaacgggaugguacaccaacguguuuacacugccuguaggugacguggagaaucuaacuuguuccgauggcccaucucucauuaagaccgaacuggaccuucugaaaucggccuugagggagcucaagacagucucagcugaucaacuggcacgggaggaacagaucgagaacccggggagcggaaguuucgugcugggcgccauugcgcucgguguugcugccgcagccgcugugaccgcaggggucgccaucgcuaaaacuauacgcuuagaauccgaggugacagccaucaauaacgcgcugaagaagaccaaugaggcaguaucuacgcuuggaaacggcguucgaguguuggccacugcuguccgugaacugaaagacuuugugagcaagaaucuaaccagagccauuaacaaaaauaagugcgauaucgacgaucucaaaauggcaguguccuucucacaguuuaacaggcgguuccugaaugucguucgccaguuuagugacaacgcuggcauuacacccgccaucagccuugaucugaugacugacgcggaguuggccagagcagugccuaauaugccaaccucugcugggcaaauaaagcucaugcuggaaaacagggccaugguacggcgcaagggauucgguauuuuaaucggcguguauggguccucagucauuuacauggugcagcugcccaucuuuggaguuaucgauacaccuuguuggauugugaaagcugccccaagcugcagugagaagaaaggcaauuaugcaugucuccuucgagaagaccaggguugguacugccagaacgccgggucuaccgucuauuaccccaacgagaaggauugugagacgagaggagaccauguguucugcgacacugcugcgggcauaaauguagcagaacaauccaaagaguguaacaucaauauuagcacaaccaacuacccuugcaagguuucgacuggcaggcacccaaucucuaugguggcccuguccccguugggggcucuagucgccuguuauaaaggagugucaugcaguauagguagcaaucgggucggcauuaucaagcagcugaacaaggggugcuccuacaucacaaaucaggaugcagacaccgugacgauugauaacaccguuuaucagcucucuaaaguggaaggagagcaacauguaaucaagggccgucccgucagcucaaguuuugacccuauuaaauucccagaagaucaguuucagguggcccuggaccaaguuuucgagaauauagagaacucccaggcucuuguggaucagagcaaucgcauccugucuucagccgaaaaggguaacacaggguucauuaucgucaucauuuugauagcagugcucggcaguagcaugauccugguauccauuuuuaucauuaucaaaaagacuaagaaacccaccggagcgccuccagaguuaucuggcgugacaaauaacggguucauaccccacaauuga

SEQ ID NO: 14682 - RNA, 1620 nt, Artificial Sequence
  HMPV/TN/92-4__ABM67072.1 fusion glycoprotein CDS human (variant)
augagcuggaagguggucaucauuuucucccugcucauaacaccccagcacggccuuaaagagucuuaccuggaagagucaugcaguaccaucacugaaggguauuugagcguuuuaagaacgggaugguacaccaacguguuuacacugccuguaggugacguggagaaucuaacuuguuccgauggcccaucucucauuaagaccgaacuggaccuucugaaaucggccuugagggagcucaagacagucucagcugaucaacuggcacgggaggaacagaucgagaacccggggagcggaaguuucgugcugggcgccauugcgcucgguguugcugccgcagccgcugugaccgcaggggucgccaucgcuaaaacuauacgcuuagaauccgaggugacagccaucaauaacgcgcugaagaagaccaaugaggcaguaucuacgcuuggaaacggcguucgaguguuggccacugcuguccgugaacugaaagacuuugugagcaagaaucuaaccagagccauuaacaaaaauaagugcgauaucgacgaucucaaaauggcaguguccuucucacaguuuaacaggcgguuccugaaugucguucgccaguuuagugacaacgcuggcauuacacccgccaucagccuugaucugaugacugacgcggaguuggccagagcagugccuaauaugccaaccucugcugggcaaauaaagcucaugcuggaaaacagggccaugguacggcgcaagggauucgguauuuuaaucggcguguauggguccucagucauuuacauggugcagcugcccaucuuuggaguuaucgauacaccuuguuggauugugaaagcugccccaagcugcagugagaagaaaggcaauuaugcaugucuccuucgagaagaccaggguugguacugccagaacgccgggucuaccgucuauuaccccaacgagaaggauugugagacgagaggagaccauguguucugcgacacugcugcgggcauaaauguagcagaacaauccaaagaguguaacaucaauauuagcacaaccaacuacccuugcaagguuucgacuggcaggcacccaaucucuaugguggcccuguccccguugggggcucuagucgccuguuauaaaggagugucaugcaguauagguagcaaucgggucggcauuaucaagcagcugaacaaggggugcuccuacaucacaaaucaggaugcagacaccgugacgauugauaacaccguuuaucagcucucuaaaguggaaggagagcaacauguaaucaagggccgucccgucagcucaaguuuugacccuauuaaauucccagaaaaucaguuucagguggcccuggaucaaguuuucgagaacauagaaaauucccaggcucuuguggaccagagcaaccgcauccugucuucagccgagaaggguaauacaggguucauuaucgucaucauuuugauagcagugcucggcaguagcaugauccugguauccauuuuuaucauuaucaaaaagacuaagaaacccaccggagcgccuccagaguuaucuggcgugacaaacaauggguucauaccccacaacuga

SEQ ID NO: 14683 - RNA, 1620 nt, Artificial Sequence
  HMPV/TN/92-4__ABM67072.1 fusion glycoprotein CDS human (variant)
augagcuggaagguggucaucauuuucucccugcucauaacaccccagcacggccuuaaagagucuuaccuggaagagucaugcaguaccaucacugaaggguauuugagcguuuuaagaacgggaugguacaccaacguguuuacacuggagguaggugacguggaaaaucuaacuuguuccgauggcccuucucucauuaagaccgagcuggaccuucugaaaucggccuugagggagcucaagacagucucagcugaucaacuggcacgggaggaacagaucgaaaacccagggagcggaaguuucgugcugggcgccauugcgcucgguguugcugccgcagccgcugugaccgcaggggucgccaucgcuaaaacuauacgcuuagaguccgaggugacagccaucaauaacgcgcugaagaagaccaaugaagcaguaucuacgcuuggaaacggcguucgaguguuggccacugcuguccgugagcugaaagacuuugugagcaagaaucuaaccagagccauuaacaaaaauaagugcgauaucgacgaucucaaaauggcaguguccuucucacaguuuaacaggcgguuccugaaugucguucgccaguuuagugacaacgcuggcauuacaccggccaucagccuugaucugaugacugacgcggaauuggccagagcagugcccaauaugccuaccucugcugggcaaauaaagcucaugcuggagaacagggccaugguacggcgcaagggauucgguauuuuaaucggcguguauggguccucagucauuuacauggugcagcugccaaucuuuggaguuaucgauacacccuguuggauugugaaagcugccccuagcugcagugaaaagaaaggcaauuaugcaugucuccuucgagaggaccaggguugguacugccagaacgccgggucuaccgucuauuacccaaacgagaaggauugugaaacgagaggagaccauguguucugcgacacugcugcgggcauaaauguagcagagcaauccaaagaauguaacaucaauauuagcacaaccaacuaccccugcaagguuucgacuggcaggcacccuaucucuaugguggcccuguccccauugggggcucuagucgccuguuauaaaggagugucaugcaguauagguagcaaucgggucggcauuaucaagcagcugaacaaggggugcuccuacaucacaaaucaggaugcagacaccgugacgauugauaacaccguuuaucagcucucuaaaguggagggagaacaacauguaaucaagggccguccggucagcucaaguuuugaccccauuaaauucccugaggaucaguuucagguggcccuggaccaaguuuucgagaauauagaaaacucccaggcucuuguggaucagagcaaucgcauccugucuucagccgagaaggguaacacaggguucauuaucgucaucauuuugauagcagugcucggcaguagcaugauccugguauccauuuuuaucauuaucaaaaagacuaagaaaccaaccggagcgcccccugaauuaucuggcgugacaaauaacggguucauaccacacaauuga

SEQ ID NO: 14684 - RNA, 1620 nt, Artificial Sequence
  HMPV/TN/92-4__ABM67072.1 fusion glycoprotein CDS human (variant)
augagcuggaagguggucaucauuuucucccugcucauaacaccccagcacggccuuaaagagucuuaccuggaagagucaugcaguaccaucacugaaggguauuugagcguuuuaagaacgggaugguacaccaacguguuuacacuggagguaggugaccuagaaaaucucacuuguuccgauggcccuucucugauuaagaccgagcuugaccugacaaaaucggccuugagggagcucaagaccgugucagcugaucaacuggcacgggaggaacagaucgaaaacccagggagcggaaguuucguccugggcgccauugcgcucgguguggcugccgcagccgcuguuacugcagggguggccaucgcuaaaacaauacgcuuagaguccgaggucaccgccaucaauaacgcgcugaagaagacgaaugaagcagugucuacucuuggaaacggcguacgaguuuuggccaccgcugugcgugagcugaaagacuuugucagcaagaaucuaacaagagccauuaacaaaaauaagugcgauaucgacgaucucaaaauggcaguguccuucucacaguuuaacaggcgguuccugaaugugguccgccaguuuagugacaacgcuggcauuacuccggccaucagccuugaucugaugaccgacgcggaauuggccagagcaguucccaauaugccuacaucugcugggcaaauaaagcucaugcuggagaacagggccauggugcggcgcaagggauucgguauuuuaaucggcguauauggguccucagugauuuacaugguccagcugccaaucuuuggagugaucgauacccccuguuggauuguuaaagcugccccuagcugcagugaaaagaaaggcaauuaugcaugucuccuucgagaggaccaggguugguacugccagaacgccgggucuacgguguauuacccaaacgagaaggauugugaaacuagaggagaccaugucuucugcgacacagcugcgggcauaaauguggcagagcaauccaaagaauguaacaucaauauuagcaccacuaacuaccccugcaagguaucgacaggcaggcacccuaucucuaugguugcccuguccccauugggggcucuaguggccuguuauaaaggagucucaugcaguauagguagcaaucgggugggcauuaucaagcagcugaacaaggggugcuccuacaucaccaaucaggaugcagacacggucaccauugauaacacaguguaucagcucucuaaaguugagggagaacaacaugugaucaagggccguccgguaagcucaaguuuugaccccauuaaauucccugaggaucaguuucaggucgcccuggaccaaguguucgagaauauagaaaacucccaggcucuuguugaucagagcaaucgcauccugucuucagccgagaaggguaacacuggguucauuaucgugaucauuuugauagcaguccucggcaguagcaugauccugguguccauuuuuaucauuaucaaaaagaccaagaaaccaacaggagcgcccccugaauuaucuggcguaacuaauaacggguucauaccacacaauuga

SEQ ID NO: 14685 - RNA, 1620 nt, Artificial Sequence
  HMPV/TN/92-4__ABM67072.1 fusion glycoprotein CDS human (variant)
augagcuggaagguggucaucauuuucucccugcucauaacaccccagcacggccuuaaagagucuuaccuggaagagucaugcaguaccaucacugaaggguauuugagcguuuuaagaacgggaugguacaccaacguguuuacacuggagguaggugacguggaaaaucuaacuuguuccgauggcccuucucucauuaagaccgagcuggaccuuacaaaaucggcccugagggaguugaagaccgucucagcugaucaacucgcacgggaggaacagaucgaaaacccagggagcggaaguuucgugcugggcgccauugcgcuggguguugcugccgcagccgcugugacugcaggggucgccaucgcuaaaacaauacgccucgaguccgaggugaccgccaucaauaacgcguuaaagaagacgaaugaagcaguaucuacucugggaaacggcguucgagugcuugccaccgcuguccgugaguugaaagacuuugugcugaagaaucuaacaagagccauuaacaaaaauaagugcgauaucgacgaucucaaaauggcagugagcuucucccaguuuaacaggcgguuccugaaugucguucgccaguuuucagacaacgcuggcauuacuccggccaucagucuugaucugaugaccgacgcggaauuggccagagcagugcccaauaugccuacaagcgcugggcaaauaaagcucaugcuggagaacagggccaugguacggcgcaagggauucgguauuuuaaucggcguguaugggucuuccgucauuuacauggugcagcugccaaucuuuggaguuaucgauacccccuguuggauugugaaagcugccccuucaugcagcgaaaagaaaggcaauuaugcaugucuccuucgagaggaccaggguugguacugccagaacgccgggaguacggucuauuacccaaacgagaaggauugugaaacuagaggagaccauguguucugcgacacagcugcgggcauaaauguagcagagcaaucuaaagaauguaacaucaauauuuccaccacuaacuaccccugcaagguuagcacaggcaggcacccuaucucgaugguggcccugucuccauugggggcucuagucgccuguuauaaaggaguguccugcucaauagguaguaaucgggucggcauuaucaagcagcugaacaaggggugcagcuacaucaccaaucaggaugcagacacggugaccauugauaacacaguuuaucagcucuccaaaguggagggagaacaacauguaaucaagggccguccggucucuagcucauuugaccccauuaaauucccugaggaucaguuucagguggcccuggaccaaguuuucgagaauauagaaaacagucaggcucuuguggaucaguccaaucgcauccugagcucugccgagaaggguaacacuggguucauuaucgucaucauuuugauagcagugcucggcucaaguaugauccugguaagcauuuuuaucauuaucaaaaagaccaagaaaccaacaggagcgcccccugaauuauccggcgugacuaauaacggguucauaccacacaauuga

SEQ ID NO: 14686 - RNA, 1620 nt, Artificial Sequence
  HMPV/TN/92-4__ABM67072.1 fusion glycoprotein CDS human (variant)
augagcuggaagguggucaucauuuucucccugcucauaacaccccagcacggccuuaaagagucuuaccuggaagagucaugcaguaccaucacugaaggguauuugagcguuuuaagaacgggaugguacaccaacguguuuacacuggagguaggugacguggaaaaucuaacuuguuccgauggcccuucucucauuaagaccgagcuggaccuuacaaaaucggcccugagggaguugaagaccgucucagcugaucaacucgcacgggaggaacagaucgaaaacccagggagcggaaguuucgugcugggcgccauugcgcuggguguugcugccgcagccgcugugacugcaggggucgccaucgcuaaaacaauacgccucgaguccgaggugaccgccaucaauaacgcguuaaagaagacgaaugaagcaguaucuacucugggaaacggcguucgagugcuugccaccgcuguccgugaguugaaagacuuugugagcaagaaucuguggagagccauuaacaaaaauaagugcgauaucgacgaucuaaaaauggcaguguccuucucacaguuuaacaggcgguuccucaaugucguucgccaguuuagugacaacgcuggcauuacaccggccaucagccuggaucuuaugacugacgcggaacuggccagagcagugcccaauaugccuaccucugcugggcaaauaaaguugaugcucgagaacagggccaugguacggcgcaagggauucgguauucugaucggcguguauggguccucagucauuuacauggugcaguuaccaaucuuuggaguuaucgauacacccuguuggauugugaaagcugccccuagcugcagugaaaagaaaggcaauuaugcaugucugcuccgagaggaccaggguugguacugccagaacgccgggucuaccgucuauuacccaaacgagaaggauugugaaacgagaggagaccauguguucugcgacacugcugcgggcauaaauguagcagagcaauccaaagaauguaacaucaauauuagcacaaccaacuaccccugcaagguuucgacuggcaggcacccuaucucuaugguggcccuuuccccacugggggcuuuggucgccuguuauaaaggagugucaugcaguauagguagcaaucgggucggcauuaucaagcagcuaaacaaggggugcuccuacaucacaaaucaggaugcagacaccgugacgauugauaacaccguuuaucagcugucuaaaguggagggagaacaacauguaaucaagggccguccggucagcucaaguuuugaccccauuaaauucccugaggaucaguuucagguggcccucgaccaaguuuucgagaauauagaaaacucccaggcucugguggaucagagcaaucgcauccuuucuucagccgagaaggguaacacaggguucauuaucgucaucauucugauagcaguguugggcaguagcaugauccucguauccauuuuuaucauuaucaaaaagacuaagaaaccaaccggagcgcccccugaacugucuggcgugacaaauaacggguucauaccacacaauuga

SEQ ID NO: 14687 - RNA, 1620 nt, Artificial Sequence
  HMPV/TN/92-4__ABM67072.1 fusion glycoprotein CDS human (variant)
augagcuggaagguggucaucauuuucucccugcucauaacaccccagcacggccuuaaagagucuuaccuggaagagucaugcaguaccaucacugaaggguauuugagcguuuuaagaacgggaugguacaccaacguguuuacacuggagguaggugaccuagaaaaucucacuuguuccgauggcccuucucugauuaagaccgagcuugaccuguugaaaucggcccucagggagcugaagacagugucagcugaucaacuggcacgggaggaacagaucgaaaacccagggagcggaaguuucguccucggcgccauugcguuagguguggcugccgcagccgcuguuaccgcagggguggccaucgcuaaaacuauacgccuggaguccgaggucacagccaucaauaacgcgcuuaagaagaccaaugaagcagugucuacguugggaaacggcguacgaguucuggccacugcugugcgugagcuaaaagacuuuguccucaagaaucuguggagagccauuaacaaaaauaagugcgauaucgacgaucuuaaaauggcagugagcuucucccaguuuaacaggcgguuccugaaugugguccgccaguuuucagacaacgcuggcauuaccccggccaucaguuuggaucucaugacagacgcggaacuggccagagcaguucccaauaugccuacuagcgcugggcaaauaaaguuaaugcuggagaacagggccauggugcggcgcaagggauucgguauucucaucggcguauaugggucuuccgugauuuacaugguccagcuuccaaucuuuggagugaucgauacccccuguuggauuguuaaagcugccccuucaugcagcgaaaagaaaggcaauuaugcaugucuguugcgagaggaccaggguugguacugccagaacgccgggaguacaguguauuacccaaacgagaaggauugugaaaccagaggagaccaugucuucugcgacacggcugcgggcauaaauguggcagagcaaucuaaagaauguaacaucaauauuuccacuacaaacuaccccugcaagguaagcaccggcaggcacccuaucucgaugguugcccuaucuccacugggggcucucguggccuguuauaaaggagucuccugcucaauagguaguaaucgggugggcauuaucaagcagcugaacaaggggugcagcuacaucacuaaucaggaugcagacacagucaccauugauaacacgguguaucagcuuuccaaaguugagggagaacaacaugugaucaagggccguccgguaucuagcucauuugaccccauuaaauucccugaggaucaguuucaggucgcccuggaccaaguguucgagaauauagaaaacagucaggcuuugguugaucaguccaaucgcauccucagcucugccgagaaggguaacaccggguucauuaucgugaucauucugauagcagucuuaggcucaaguaugauccuggugagcauuuuuaucauuaucaaaaagacaaagaaaccaacuggagcgcccccugaacuauccggcguaaccaauaacggguucauaccacacaauuga

SEQ ID NO: 14688 - RNA, 1620 nt, Artificial Sequence
  HMPV/TN/92-4__ABM67072.1 fusion glycoprotein CDS human (variant)
augagcuggaagguggucaucauuuucucccugcucauaacaccccagcacggccuuaaagagucuuaccuggaagagucaugcaguaccaucacugaaggguauuugagcguuuuaagaacgggaugguacaccaacguguuuacacugccuguaggugacguggagaaucuaacuuguuccgauggcccaucucucauuaagaccgaacuggaccuuacaaaaucggcccugagggaguugaagaccgucucagcugaucaacucgcacgggaggaacagaucgagaacccggggagcggaaguuucgugcugggcgccauugcgcuggguguugcugccgcagccgcugugacugcaggggucgccaucgcuaaaacaauacgccucgaauccgaggugaccgccaucaauaacgcguuaaagaagacgaaugaggcaguaucuacucugggaaacggcguucgagugcuugccaccgcuguccgugaauugaaagacuuugugagcaagaaucugacaagagccauuaacaaaaauaagugcgauaucgacgaucuaaaaauggcaguguccuucucacaguuuaacaggcgguuccucaaugucguucgccaguuuagugacaacgcuggcauuacucccgccaucagccuggaucuuaugaccgacgcggagcuggccagagcagugccuaauaugccaacaucugcugggcaaauaaaguugaugcucgaaaacagggccaugguacggcgcaagggauucgguauucugaucggcguguauggguccucagucauuuacauggugcaguuacccaucuuuggaguuaucgauaccccuuguuggauugugaaagcugccccaagcugcagugagaagaaaggcaauuaugcaugucugcuccgagaagaccaggguugguacugccagaacgccgggucuacggucuauuaccccaacgagaaggauugugagacuagaggagaccauguguucugcgacacagcugcgggcauaaauguagcagaacaauccaaagaguguaacaucaauauuagcaccacuaacuacccuugcaagguuucgacaggcaggcacccaaucucuaugguggcccuuuccccgcugggggcuuuggucgccuguuauaaaggagugucaugcaguauagguagcaaucgggucggcauuaucaagcagcuaaacaaggggugcuccuacaucaccaaucaggaugcagacacggugaccauugauaacacaguuuaucagcugucuaaaguggaaggagagcaacauguaaucaagggccgucccgucagcucaaguuuugacccuauuaaauucccagaagaucaguuucagguggcccucgaccaaguuuucgagaauauagagaacucccaggcucugguggaucagagcaaucgcauccuuucuucagccgaaaaggguaacacuggguucauuaucgucaucauucugauagcaguguugggcaguagcaugauccucguauccauuuuuaucauuaucaaaaagaccaagaaacccacaggagcgccuccagagcugucuggcgugacuaauaacggguucauaccccacaauuga

SEQ ID NO: 14689 - RNA, 1620 nt, Artificial Sequence
  HMPV/TN/92-4__ABM67072.1 fusion glycoprotein CDS human (variant)
augagcuggaagguggucaucauuuucucccugcucauaacaccccagcacggccuuaaagagucuuaccuggaagagucaugcaguaccaucacugaaggguauuugagcguuuuaagaacgggaugguacaccaacguguuuacacuggagguaggugacguggaaaaucuaacuuguuccgauggcccuucucucauuaagaccgagcuggaccuuacaaaaucggcccugagggaguugaagaccgucucagcugaucaacucgcacgggaggaacagaucgaaaacccagggagcggaaguuucgugcugggcgccauugcgcuggguguugcugccgcagccgcugugacugcaggggucgccaucgcuaaaacaauacgccucgaguccgaggugaccgccaucaauaacgcguuaaagaagacgaaugaagcaguaucuacucugggaaacggcguucgagugcuugccaccgcuguccgugaguugaaagacuuugugagcaagaaucugacaagagccauuaacaaaaauaagugcgauaucccggaccuaaaaauggcaguguccuucucacaguuuaacaggcgguuccucaaugucguucgccaguuuagugauaacgcuggcauuacucccgccaucagccuggaccuuaugaccgaugcggaacuggccagagcagugccuaauaugccaacaucugcugggcaaauaaaguugaugcucgagaacagggccaugguacggcgcaagggauucgguauucugaucggcguguauggguccucagucauuuacauggugcaguuacccaucuuuggaguuaucgacaccccuuguuggauugugaaagcugccccaagcugcagugaaaagaaaggcaauuaugcaugucugcuccgagaggaucaggguugguacugccagaacgccgggucuacggucuauuaccccaacgagaaggacugugaaacuagaggagaucauguguucugcgacacagcugcgggcauaaauguagcagagcaauccaaagaauguaacaucaauauuagcaccacuaacuacccuugcaagguuucgacaggcaggcacccaaucucuaugguggcccuuuccccgcugggggcuuuggucgccuguuauaaaggagugucaugcaguauagguagcaaucgggucggcauuaucaagcagcuaaacaaggggugcuccuacaucaccaaucaggacgcagauacggugaccauugacaacacaguuuaucagcugucuaaaguggagggagaacaacauguaaucaagggccgucccgucagcucaaguuuugauccuauuaaauucccagaggaccaguuucagguggcccucgaucaaguuuucgagaauauagaaaacucccaggcucugguggaccagagcaaucgcauccuuucuucagccgagaaggguaacacuggguucauuaucgucaucauucugauagcaguguugggcaguagcaugauccucguauccauuuuuaucauuaucaaaaagaccaagaaacccacaggagcgccuccagaacugucuggcgugacuaauaacggguucauaccccacaauuga

SEQ ID NO: 14690 - RNA, 1620 nt, Artificial Sequence
  HMPV/TN/92-4__ABM67072.1 fusion glycoprotein CDS human (variant)
augagcuggaagguggucaucauuuucucccugcucauaacaccccagcacggccuuaaagagucuuaccuggaagagucaugcaguaccaucacugaaggguauuugagcguuuuaagaacgggaugguacaccaacguguuuacacuggagguaggugacguggaaaaucuaacuuguuccgauggcccuucucucauuaagaccgagcuggaccuuacaaaaucggcccugagggaguugaagaccgucucagcugaucaacucgcacgggaggaacagaucgaaaacccagggagcggaaguuucgugcugggcgccauugcgcuggguguugcugccgcagccgcugugacugcaggggucgccaucgcuaaaacaauacgccucgaguccgaggugaccgccaucaauaacgcguuaaagaagacgaaugaagcaguaucuacucugggaaacggcguucgagugcuugccaccgcuguccgugaguugaaagacuuugugagcaagaaucugacaagagccauuaacaaaaauaagugcccgaucgaugaccuaaaaauggcaguguccuucucacaguuuaacaggcgguuccucaaugucguucgccaguuuagugauaacgcuggcauuacucccgccaucagccuggaccuuaugaccgaugcggaacuggccagagcagugccuaauaugccaacaucugcugggcaaauaaaguugaugcucgagaacagggccaugguacggcgcaagggauucgguauucugaucggcguguauggguccucagucauuuacauggugcaguuacccaucuuuggaguuaucgacaccccuuguuggauugugaaagcugccccaagcugcagugaaaagaaaggcaauuaugcaugucugcuccgagaggaucaggguugguacugccagaacgccgggucuacggucuauuaccccaacgagaaggacugugaaacuagaggagaucauguguucugcgacacagcugcgggcauaaauguagcagagcaauccaaagaauguaacaucaauauuagcaccacuaacuacccuugcaagguuucgacaggcaggcacccaaucucuaugguggcccuuuccccgcugggggcuuuggucgccuguuauaaaggagugucaugcaguauagguagcaaucgggucggcauuaucaagcagcuaaacaaggggugcuccuacaucaccaaucaggacgcagauacggugaccauugacaacacaguuuaucagcugucuaaaguggagggagaacaacauguaaucaagggccgucccgucagcucaaguuuugauccuauuaaauucccagaggaccaguuucagguggcccucgaucaaguuuucgagaauauagaaaacucccaggcucugguggaccagagcaaucgcauccuuucuucagccgagaaggguaacacuggguucauuaucgucaucauucugauagcaguguugggcaguagcaugauccucguauccauuuuuaucauuaucaaaaagaccaagaaacccacaggagcgccuccagaacugucuggcgugacuaauaacggguucauaccccacaauuga

SEQ ID NO: 14691 - RNA, 1620 nt, Artificial Sequence
  HMPV/TN/92-4__ABM67072.1 fusion glycoprotein CDS human (variant)
augagcuggaagguggucaucauuuucucccugcucauaacaccccagcacggccuuaaagagucuuaccuggaagagucaugcaguaccaucacugaaggguauuugagcguuuuaagaacgggaugguacaccaacguguuuacacuggagguaggugacguggaaaaucuaacuuguuccgauggcccuucucucauuaagaccgagcuggaccuuacaaaaucggcccugagggaguugaagaccgucucagcugaucaacucgcacgggaggaacagaucgaaaacccagggagcggaaguuucgugcugggcgccauugcgcuggguguugcugccgcagccgcugugacugcaggggucgccaucgcuaaaacaauacgccucccguccgaggugaccgccaucaauaacgcguuaaagaagacgaaugaggcaguaucuacucugggaaacggcguucgagugcuugccaccgcuguccgugaauugaaagacuuugugagcaagaaucugacaagagccauuaacaaaaauaagugcgauaucgacgaucuaaaaauggcaguguccuucucacaguuuaacaggcgguuccucaaugucguucgccaguuuagugacaacgcuggcauuacucccgccaucagccuggaucuuaugaccgacgcggagcuggccagagcagugccuaauaugccaacaucugcugggcaaauaaaguugaugcucgaaaacagggccaugguacggcgcaagggauucgguauucugaucggcguguauggguccucagucauuuacauggugcaguuacccaucuuuggaguuaucgauaccccuuguuggauugugaaagcugccccaagcugcagugagaagaaaggcaauuaugcaugucugcuccgagaagaccaggguugguacugccagaacgccgggucuacggucuauuaccccaacgagaaggauugugagacuagaggagaccauguguucugcgacacagcugcgggcauaaauguagcagaacaauccaaagaguguaacaucaauauuagcaccacuaacuacccuugcaagguuucgacaggcaggcacccaaucucuaugguggcccuuuccccgcugggggcuuuggucgccuguuauaaaggagugucaugcaguauagguagcaaucgggucggcauuaucaagcagcuaaacaaggggugcuccuacaucaccaaucaggaugcagacacggugaccauugauaacacaguuuaucagcugucuaaaguggaaggagagcaacauguaaucaagggccgucccgucagcucaaguuuugacccuauuaaauucccagaagaucaguuucagguggcccucgaccaaguuuucgagaauauagagaacucccaggcucugguggaucagagcaaucgcauccuuucuucagccgaaaaggguaacacuggguucauuaucgucaucauucugauagcaguguugggcaguagcaugauccucguauccauuuuuaucauuaucaaaaagaccaagaaacccacaggagcgccuccagagcugucuggcgugacuaauaacggguucauaccccacaauuga

SEQ ID NO: 14692 - RNA, 1620 nt, Artificial Sequence
  HMPV/TN/92-4__ABM67072.1 fusion glycoprotein CDS human (variant)
augagcuggaagguggucaucauuuucucccugcucauaacaccccagcacggccuuaaagagucuuaccuggaagagucaugcaguaccaucacugaaggguauuugagcguuuuaagaacgggaugguacaccaacguguuuacacuggagguaggugacguggaaaaucuaacuuguuccgauggcccuucucucauuaagaccgagcuggaccuuacaaaaucggcccugagggaguugaagaccgucucagcugaucaacucgcacgggaggaacagaucgaaaacccagggagcggaaguuucgugcugggcgccauugcgcuggguguugcugccgcagccgcugugacugcaggggucgccaucgcuaaaacaauacgccucgaguccgaggugaccgccaucaauaacgcguuaaagaagacgaaugaagcaguaucuacucugggaaacggcguucgagugcuugccaccgcuguccgugaguugaaagacuuugugagcaagaaucugacaagagccauuaacaaaaauaagugcgauaucgacgaucuaaaaauggcaguguccuucucacaguuuaacaggcgguuccucaaugucguucgccaguuuagugacaacgcuggcauuacuccggccaucagccuggaucuuaugaccgacgcggaacuggccagagcagugcccaauaugccuacaucugcugggcaaauaaaguugaugcucgagaacagggccaugguacggcgcaagggauucgguauucugaucggcguguauggguccucagucauuuacauggugcaguuaccaaucuuuggaguuaucgauacccccuguuggauugugaaagcugccccuagcugcagugaaaagaaaggcaauuaugcaugucugcuccgagaggaccaggguugguacugccagaacgccgggucuacggucuauuacccaaacgagaaggauugugaaacuagaggagaccauguguucugcgacacagcugcgggcauaaauguagcagagcaauccaaagaauguaacaucaauauuagcaccacuaacuaccccugcaagguuucgacaggcaggcacccuaucucuaugguggcccuuuccccacugggggcuuuggucgccuguuauaaaggagugucaugcaguauagguagcaaucgggucggcauuaucaagcagcuaaacaaggggugcuccuacaucaccaaucaggaugcagacacggugaccauugauaacacaguuuaucagcugucuaaaguggagggagaacaacauguaaucaagggccguccggucagcucaaguuuucccccuauuaaauucccagaggaccaguuucagguggcccucgaucaaguuuucgagaauauagaaaacucccaggcucugguggaccagagcaaucgcauccuuucuucagccgagaaggguaacacuggguucauuaucgucaucauucugauagcaguguugggcaguagcaugauccucguauccauuuuuaucauuaucaaaaagaccaagaaacccacaggagcgccuccagaacugucuggcgugacuaauaacggguucauaccccacaauuga

SEQ ID NO: 14693 - RNA, 1620 nt, Artificial Sequence
  HMPV/TN/92-4__ABM67072.1 fusion glycoprotein CDS human (variant)
augagcuggaagguggucaucauuuucucccugcucauaacaccccagcacggccuuaaagagucuuaccuggaagagucaugcaguaccaucacugaaggguauuugagcguuuuaagaacgggaugguacaccaacguguuuacacuggagguaggugacguggaaaaucuaacuuguuccgauggcccuucucucauuaagaccgagcuggaccuuacaaaaucggcccugagggaguugaagaccgucucagcugaucaacucgcacgggaggaacagaucgaaaacccagggagcggaaguuucgugcugggcgccauugcgcuggguguugcugccgcagccgcugugacugcaggggucgccaucgcuaaaacaauacgccucgaguccgaggugaccgccaucaauaacgcguuaaagaagacgaaugaagcaguaucuacucugggaaacggcguucgagugcuugccaccgcuguccgugaguugaaagacuuugugagcaagaaucugacaagagccauuaacaaaaauaagugcgauaucgacgaucuaaaaauggcaguguccuucucacaguuuaacaggcgguuccucaaugucguucgccaguuuagugacaacgcuggcauuacuccggccaucagccuggaucuuaugaccgacgcggaacuggccagagcagugcccaauaugccuacaucugcugggcaaauaaaguugaugcucgagaacagggccaugguacggcgcaagggauucgguauucugaucggcguguauggguccucagucauuuacauggugcaguuaccaaucuuuggaguuaucgauacccccuguuggauugugaaagcugccccuagcugcagugaaaagaaaggcaauuaugcaugucugcuccgagaggaccaggguugguacugccagaacgccgggucuacggucuauuacccaaacgagaaggauugugaaacuagaggagaccauguguucugcgacacagcugcgggcauaaauguagcagagcaauccaaagaauguaacaucaauauuagcaccacuaacuaccccugcaagguuucgacaggcaggcacccuaucucuaugguggcccuuuccccacugggggcuuuggucgccuguuauaaaggagugucaugcaguauagguagcaaucgggucggcauuaucaagcagcuaaacaaggggugcuccuacaucaccaaucaggaugcagacacggugaccauugauaacacaguuuaucagcugucuaaaguggagggagaacaacauguaaucaagggccguccggucagcucaaguuuugaccccauuaaauucccugagaaucaguuucagguggcccucgaucaaguuuucgagaacauagaaaauucccaggcucugguggaccagagcaaccgcauccuuucuucagccgagaaggguaauacuggguucauuaucgucaucauucugauagcaguguugggcaguagcaugauccucguauccauuuuuaucauuaucaaaaagaccaagaaaccaacaggagcgcccccugaacugucuggcgugacuaacaauggguucauaccacacaacuga

SEQ ID NO: 14694 - RNA, 1620 nt, Artificial Sequence
  HMPV/TN/92-4__ABM67072.1 fusion glycoprotein CDS human (variant)
augagcuggaagguggucaucauuuucucccugcucauaacaccccagcacggccuuaaagagucuuaccuggaagagucaugcaguaccaucacugaaggguauuugagcguuuuaagaacgggaugguacaccaacguguuuacacuggagguaggugacguggaaaaucuaacuuguuccgauggcccuucucucauuaagaccgagcuggaccuuacaaaaucggcccugagggaguugaagaccgucucagcugaucaacucgcacgggaggaacagaucgaaaacccagggagcggaaguuucgugcugggcgccauugcgcuggguguugcugccgcagccgcugugacugcaggggucgccaucgcuaaaacaauacgccucgaguccgaggugaccgccaucaauaacgcguuaaagaagacgaaugaagcaguaucuacucugggaaacggcguucgagugcuugccaccgcuguccgugaguugaaagacuuugugagcaagaaucugacaagagccauuaacaaaaauaagugcgauaucgacgaucuaaaaauggcaguguccuucucacaguuuaacaggcgguuccucaaugucguucgccaguuuagugacaacgcuggcauuacuccggccaucagccuggaucuuaugaccgacgcggaacuggccagagcagugcccaauaugccuacaucugcugggcaaauaaaguugaugcucgagaacagggccaugguacggcgcaagggauucgguauucugaucggcguguauggguccucagucauuuacauggugcaguuaccaaucuuuggaguuaucgauacccccuguuggauugugaaagcugccccuagcugcagugaaaagaaaggcaauuaugcaugucugcuccgagaggaccaggguugguacugccagaacgccgggucuacggucuauuacccaaacgagaaggauugugaaacuagaggagaccauguguucugcgacacagcugcgggcauaaauguagcagagcaauccaaagaauguaacaucaauauuagcaccacuaacuaccccugcaagguuucgacaggcaggcacccuaucucuaugguggcccuuuccccacugggggcuuuggucgccuguuauaaaggagugucaugcaguauagguagcaaucgggucggcauuaucaagcagcuaaacaaggggugcuccuacaucaccaaucaggaugcagacacggugaccauugauaacacaguuuaucagcugucuaaaguggagggagaacaacauguaaucaagggccguccggucagcucaaguuuugaccccauuaaauucccucaggaucaguuucaaguggcccucgaccagguuuucgagaauauagagaacucccaggcucugguggaucagagcaaucgcauccuuucuucagccgaaaaggguaacacuggguucauuaucgucaucauucugauagcaguguugggcaguagcaugauccucguauccauuuuuaucauuaucaaaaagaccaagaaaccaacaggagcgcccccugagcugucuggcgugacuaauaacggguucauaccacacaauuga

SEQ ID NO: 14695 - RNA, 1620 nt, Artificial Sequence
  HMPV/TN/92-4__ABM67072.1 fusion glycoprotein CDS human (variant)
augagcuggaagguggucaucauuuucucccugcucauaacaccccagcacggccuuaaagagucuuaccuggaagagucaugcaguaccaucacugaaggguauuugagcguuuuaagaacgggaugguacaccaacguguuuacacuggagguaggugacguggaaaaucuaacuuguuccgauggcccuucucucauuaagaccgagcuggaccuuacaaaaucggcccugagggaguugaagaccgucucagcugaucaacucgcacgggaggaacagaucgaaaacccagggagcggaaguuucgugcugggcgccauugcgcuggguguugcugccgcagccgcugugacugcaggggucgccaucgcuaaaacaauacgccucgaguccgaggugaccgccaucaauaacgcguuaaagaagacgaaugaagcaguaucuacucugggaaacggcguucgagugcuugccaccgcuguccgugaguugaaagacuuugugagcaagaaucugacaagagccauuaacaaaaauaagugcgauaucgacgaucuaaaaauggcaguguccuucucacaguggaacaggcgguuucucaaugucguucgccaguucagugacaacgcuggcauuacuccggccaucagccuggaucuuaugaccgacgcggaacuggccagagcagugcccaauaugccuacaucugcugggcaaauaaaguugaugcucgagaacagggccaugguacggcgcaagggauuugguauucugaucggcguguauggguccucagucauuuacauggugcaguuaccaaucuucggaguuaucgauacccccuguuggauugugaaagcugccccuagcugcagugaaaagaaaggcaauuaugcaugucugcuccgagaggaccaggguugguacugccagaacgccgggucuacggucuauuacccaaacgagaaggauugugaaacuagaggagaccauguguuuugcgacacagcugcgggcauaaauguagcagagcaauccaaagaauguaacaucaauauuagcaccacuaacuaccccugcaagguuucgacaggcaggcacccuaucucuaugguggcccuuuccccacugggggcuuuggucgccuguuauaaaggagugucaugcaguauagguagcaaucgggucggcauuaucaagcagcuaaacaaggggugcuccuacaucaccaaucaggaugcagacacggugaccauugauaacacaguuuaucagcugucuaaaguggagggagaacaacauguaaucaagggccguccggucagcucaaguuucgaccccauuaaauuuccugaggaucaguuccagguggcccucgaccaaguuuuugagaauauagaaaacucccaggcucugguggaucagagcaaucgcauccuuucuucagccgagaaggguaacacuggguucauuaucgucaucauucugauagcaguguugggcaguagcaugauccucguauccauuuucaucauuaucaaaaagaccaagaaaccaacaggagcgcccccugaacugucuggcgugacuaauaacggguuuauaccacacaauuga

SEQ ID NO: 14696 - RNA, 1620 nt, Artificial Sequence
  HMPV/NL/1/99__AAQ90145.1 fusion glycoprotein CDS human (F0)
augagcuggaaggugaugaucauuauaucccugcucaucacaccccagcacggccuuaaagagucuuaccuggaagagucaugcaguaccauuacugaaggguauuugagcgucuuaagaacgggaugguacaccaacguuuucacacuggaggugggugacguagaaaaucuaacuuguaccgauggcccuucccucaucaagacagagcuggaccuuaccaaaucugcccugagggaguugaagacugugucggcugaucaacucgcacgggaggaacagauugaaaacccacgccagucacgauuuguccugggggccaucgcgcugggaguggcuacagccgcagccguuaccgcuggcauagcaaucgccaaaacgauucgucucgagagcgaggugaaugcuaucaagggugccuuaaagcagacuaacgaagcggucaguacccuggggaauggagugagaguacuugcaacagccguuagggaguugaaagaauuuguguccaagaaccugacuucugcuauuaaucggaacaaaugcgacaucgccgaucuaaagauggcagucagcuuuucccaauucaaucgcagauuucucaacguggugaggcaguucucagacaaugcuggcauaaccccggccauuagucuggaucuuaugacagacgcggagcuggcccgggcagucagcuauaugcccaccucugcuggccagaucaaauugaugcucgaaaaccgcgccaugguucgaagaaagggguuugggauucugaucgguguguacggcuccucaguaaucuauauggugcaguuaccuauuuucggggucauagauacgccauguuggaucauuaaggcugcccccagcugcagugagaaaaauggaaacuacgcaugucugcucagggaggaccaaggcugguauugcaagaaugccgguucuacuguguacuacccuaacgaaaaagauugugagacacggggagaccauguuuucugcgauaccgcugcgggaaucaacguggcagaacagucccgugaguguaauauaaacauuagcacuacaaauuauccaugcaaggucucgaccggccgccaccccaucucuaugguggcccuuuccccucugggcgcuuugguagccuguuacaaagggguuucaugcaguaucggaagcaacuggguggguauuaucaagcagcuaccaaaaggcugcuccuauauuacgaaucaggacgcagacaccgucacaauagauaacacuguguaccaacugucuaaggucgaaggggagcagcaugugaucaagggaagaccgguuagcucaaguuucgaccccauuaaauuuccugaggaucaguucaauguggcccucgaccaaguauuugaauccaucgagaacagccaggcucuggucgaucagucuaauaagauccuuaacucagccgaaaaaggcaauaccgguuucauuauagugguuauccugguggcagucuuggggcucacaaugauuagugugagcaucauuaucauaaucaagaaaacuaggaagccaaccggcgcgcccccugagcugaacggaguaacaaauggcggguucauuccacacuccuga

SEQ ID NO: 14697 - RNA, 1620 nt, Artificial Sequence
  HMPV/Sabana__AEA02280.1 fusion glycoprotein CDS human (F0)
augagcuggaaggugaugaucauuauaucccugcucaucacaccccagcacggccuuaaagagucuuaccuggaagagucaugcaguaccauuacugaaggguauuugagcgucuuaagaacgggaugguacaccaacguuuucacacuggaggugggugacguagaaaaucuaacuuguaccgauggcccuucccucaucaagacagagcuggaccuuaccaaaucugcccugagggaguugaagacugugucggcugaucaacucgcacgggaggaacagauugaaaacccacgccagucacgauuuguccugggggccaucgcgcugggaguggcuacagccgcagccguuaccgcuggcauagcaaucgccaaaacgauucgucucgagagcgaggugaaugcuaucaagggugccuuaaagacuaccaacgaagcggucaguacacuggggaauggagugagaguacuugcaacugccguuagggaguugaaagaauuuguguccaagaaccugaccucugcuauuaauaaaaacaagugcgacaucgccgaucuaaaaauggcagucagcuuuucccaguucaaucggcgcuuucucaacguggugagacaauucucagacaaugcuggcauaacaccggccauuagucuggaucuuaugaacgacgcggagcuggccagggcagucagcuauaugcccaccucugcuggccagaucaaguugaugcucgaaaaucgggccaugguucgccgaaagggguuugggauucugaucgguguguacggcuccucaguaaucuauauggugcaguuaccuauuuucggggucauaaacacgccauguuggaucauuaaagcugcccccagcugcagugagaaggauggaaauuacgcaugucugcucagagaggaccagggcugguauugcaaaaacgccgguucuacuguguacuacccuaacgaaaaggauugugagacaaggggagaccauguuuucugcgauaccgcugcgggaaucaauguggcagaacaaucccgggaguguaacauaaauauuagcacuacaaacuauccaugcaaagucucgaccggccgucaccccaucucuaugguggcccuuuccccucugggcgcuuugguagccuguuacaaggggguuucaugcaguacgggaagcaaucagguggguaucauuaaacagcuaccaaagggcugcuccuauaucaccaaccaggacgcagacacagucacuauugauaauaccguguaccaacugucuaaggucgaaggggagcagcaugugauaaaaggacgcccgguuagcucaaguuucgaccccaucagauuuccugaggaucaguucaacguggcccucgaccaaguauuugaauccauugagaauagccaggcucuggucgaucagucuaacaagauccuuaauucagccgaaaaaggcaacacagguuucaucauugugauaauccugauugcaguuuuggggcucacuaugaucagugugagcauuaucauaaucauuaagaaaaccaggaagccaacaggcgcgcccccugagcugaauggagucaccaacggcggguucaucccacacuccuga

SEQ ID NO: 14698 - RNA, 1892 nt, Artificial Sequence
  HMPV/TN/92-4__ABM67072.1 fusion glycoprotein mRNA gc (F0)
aggagagucccgcagucggcguccagcggcucugcuuguucgugugugugucguugcaggccuuauucaagcuuaccaugagcuggaagguggucaucaucuucucccugcucaucacgccccagcacggccugaaggagagcuaccuggaggaguccugcagcaccaucaccgagggguaccucuccgugcugcgcaccggcugguacaccaacguguucacccuggaggucggggacguggagaaccucacgugcagcgacggcccgucccugaucaagaccgagcuggaccucaccaagagcgcccugcgggagcugaagaccguguccgccgaccagcucgcgcgcgaggagcagaucgagaacccccggcagagccgcuucguccugggggccaucgcccugggcguggccgccgcggccgccgugacggccggcgucgcgaucgccaagaccauccggcucgaguccgaggugaccgccaucaacaacgcccugaagaagaccaacgaggccgugagcacgcuggggaacggcguccgcgugcucgcgaccgccgugcgggagcugaaggacuucgucuccaagaaccugacccgcgccaucaacaagaacaagugcgacaucgacgaccucaagauggccgugagcuucucccaguucaaccggcgcuuccugaacgugguccggcaguucagcgacaacgccgggaucacccccgcgaucucccuggaccucaugacggacgccgagcuggcccgcgccgugcccaacaugccgaccagcgccggccagaucaagcugaugcucgagaaccgggcgauggugcgccggaagggguucggcauccugaucggcgucuacggguccagcgugaucuacauggugcagcugcccaucuucggcgucaucgacacccccugcuggaucgugaaggccgcccccagcugcuccgagaagaaggggaacuacgccugccuccugcgcgaggaccagggcugguacugccagaacgccggcagcaccgucuacuacccgaacgagaaggacugcgagacgcgcggggaccacguguucugcgacaccgcggccggcaucaacguggccgagcaguccaaggagugcaacaucaacaucagcaccaccaacuaccccugcaaggucuccacggggcggcaccccaucagcaugguggcccugagcccccucggcgcgcugguggccugcuacaagggggucuccugcuccaucggcagcaaccgggugggcaucaucaagcagcugaacaaggggugcuccuacaucaccaaccaggacgccgacaccgugaccaucgacaacacggucuaccagcucagcaagguggagggcgagcagcacgugaucaaggggcgcccggucuccagcuccuucgaccccaucaaguuccccgaggaccaguucaacguggcccuggaccagguguucgagaacaucgagaacagccaggcccuggucgaccaguccaaccggauccucagcuccgcggagaagggcaacaccggguucaucaucgugaucauccugaucgccgugcugggcagcagcaugauccucgucuccaucuucaucaucaucaagaagaccaagaagcccaccggcgccccgcccgagcugagcggggugacgaacaacggcuucaucccccacaacugaggacuagucccuguucccagagcccacuuuuuuuucuuuuuuugaaauaaaauagccugucuuucagaucucaaaggcucuuuucagagccaccaaaaaaaaaaaaaaaaaaaaaaaaaaaaaaaaaaaaaaaaaaaaaaaaaaaaaaaaaaaaaaaaaaaaaaaaaaaaaaaaaaaaaaaaaaaaaaaaaaaaa

SEQ ID NO: 14699 - RNA, 1892 nt, Artificial Sequence
  HMPV/TN/92-4__ABM67072.1 fusion glycoprotein mRNA gc (variant)
aggagagucccgcagucggcguccagcggcucugcuuguucgugugugugucguugcaggccuuauucaagcuuaccaugagcuggaagguggucaucaucuucucccugcucaucacgccccagcacggccugaaggagagcuaccuggaggaguccugcagcaccaucaccgagggguaccucuccgugcugcgcaccggcugguacaccaacguguucacccuggaggucggggacguggagaaccucacgugcagcgacggcccgucccugaucaagaccgagcuggaccucaccaagagcgcccugcgggagcugaagaccguguccgccgaccagcucgcgcgcgaggagcagaucgagaaccccgggagcggcuccuucguccugggcgccaucgcccuggggguggccgccgcggccgccgugacggccggcgucgcgaucugcaagaccauccggcucgagagcgaggugaccgccaucaacaacgcccugaagaagaccaacgaggccguguccacgcuggggaacggcguccgcgugcucgccuucgcggugcgggagcugaaggacuucgucagcaagaaccugacccgcgcccucaacaagaacaagugcgacaucgacgaccugaagauggccguguccuucagccaguucaaccggcgcuuccugaacgugguccggcaguucuccgacaacgccgggaucacccccgccaucagccucgaccugaugaccgacgcggagcuggcccgcgccgugcccaacaugccgacguccgccggccagaucaagcucaugcuggagaaccgggccauggugcgccggaagggcuucgggauccugugcggcgucuacgggagcagcgugaucuacauggugcagcuccccaucuucggcgucaucgacacccccugcuggaucgugaaggcggcccccuccugcagcgagaagaagggcaacuacgccugccugcugcgcgaggaccaggggugguacugccagaacgccggcuccaccgucuacuacccgaacgagaaggacugcgagacccgcggggaccacguguucugcgacacggccgcgggcaucaacguggccgagcagagcaaggagugcaacaucaacaucuccaccaccaacuaccccugcaaggucagcaccgggcggcaccccaucuccaugguggcccucagcccccugggcgcccugguggcgugcuacaagggcgucuccugcagcaucggguccaaccgggugggcaucaucaagcagcucaacaaggggugcagcuacaucacgaaccaggacgccgacaccgugaccaucgacaacaccgucuaccagcuguccaagguggagggcgagcagcacgugaucaaggggcgcccggucagcuccagcuucgaccccaucaaguuccccgaggaccaguucaacguggcccuggaccagguguucgagaacaucgagaacucccaggcccucgucgaccagagcaaccggauccuguccagcgccgagaagggcaacacgggcuucaucaucgugaucauccugaucgcggugcucgggagcuccaugauccuggucagcaucuucaucaucaucaagaagaccaagaagcccaccggcgccccgcccgagcuguccggggugaccaacaacggcuucaucccccacaacugaggacuagucccuguucccagagcccacuuuuuuuucuuuuuuugaaauaaaauagccugucuuucagaucucaaaggcucuuuucagagccaccaaaaaaaaaaaaaaaaaaaaaaaaaaaaaaaaaaaaaaaaaaaaaaaaaaaaaaaaaaaaaaaaaaaaaaaaaaaaaaaaaaaaaaaaaaaaaaaaaaaaa

SEQ ID NO: 14700 - RNA, 1892 nt, Artificial Sequence
  HMPV/TN/92-4__ABM67072.1 fusion glycoprotein mRNA gc (variant)
aggagagucccgcagucggcguccagcggcucugcuuguucgugugugugucguugcaggccuuauucaagcuuaccaugagcuggaagguggucaucaucuucucccugcucaucacgccccagcacggccugaaggagagcuaccuggaggaguccugcagcaccaucaccgagggguaccucuccgugcugcgcaccggcugguacaccaacguguucacccuggaggucggggacguggagaaccucacgugcagcgacggcccgucccugaucaagaccgagcuggaccucaccaagagcgcccugcgggagcugaagaccguguccgccgaccagcucgcgcgcgaggagcagaucgagaaccccgggagcggcuccuucguccugggcgccaucgcccuggggguggccgccgcggccgccgugacggccggcgucgcgaucugcaagaccauccggcucgagagcgaggugaccgccaucaacaacgcccugaagaagaccaacgaggccguguccacgcuggggaacggcguccgcgugcucgccaccgcggugcgggagcugaaggacuucgucagcaagaaccugacccgcgccaucaacaagaacaagugcgacaucgacgaccucaagauggccguguccuucagccaguucaaccggcgcuuccugaacgugguccggcaguucuccgacaacgccgggaucacccccgccaucagccuggaccucaugacggacgcggagcuggcccgcgccgugcccaacaugccgaccuccgccggccagaucaagcugaugcucgagaaccgggccauggugcgccggaagggcuucgggauccugugcggcgucuacgggagcagcgugaucuacauggugcagcugcccaucuucggcgucaucgacacccccugcuggaucgugaaggcggcccccuccugcagcgagaagaagggcaacuacgccugccuccugcgcgaggaccaggggugguacugccagaacgccggcuccaccgucuacuacccgaacgagaaggacugcgagacgcgcggggaccacguguucugcgacaccgccgcgggcaucaacguggccgagcagagcaaggagugcaacaucaacaucuccaccaccaacuaccccugcaaggucagcacggggcggcaccccaucuccaugguggcccugagcccccucggcgcccugguggcgugcuacaagggcgucuccugcagcaucggguccaaccgggugggcaucaucaagcagcugaacaaggggugcagcuacaucaccaaccaggacgccgacaccgugaccaucgacaacacggucuaccagcucuccaagguggagggcgagcagcacgugaucaaggggcgcccggucagcuccagcuucgaccccaucaaguuccccgagcaccaguggcacguggcccuggaccagguguucgagaacaucgagaacucccaggcccuggucgaccagagcaaccggauccucuccagcgccgagaagggcaacaccggcuucaucaucgugaucauccugaucgcggugcuggggagcuccaugauccucgucagcaucuucaucaucaucaagaagaccaagaagcccaccggcgccccgcccgagcuguccggggugacgaacaacggcuucaucccccacaacugaggacuagucccuguucccagagcccacuuuuuuuucuuuuuuugaaauaaaauagccugucuuucagaucucaaaggcucuuuucagagccaccaaaaaaaaaaaaaaaaaaaaaaaaaaaaaaaaaaaaaaaaaaaaaaaaaaaaaaaaaaaaaaaaaaaaaaaaaaaaaaaaaaaaaaaaaaaaaaaaaaaaa

SEQ ID NO: 14701 - RNA, 1892 nt, Artificial Sequence
  HMPV/TN/92-4__ABM67072.1 fusion glycoprotein mRNA gc (variant)
aggagagucccgcagucggcguccagcggcucugcuuguucgugugugugucguugcaggccuuauucaagcuuaccaugagcuggaagguggucaucaucuucucccugcucaucacgccccagcacggccugaaggagagcuaccuggaggaguccugcagcaccaucaccgagggguaccucuccgugcugcgcaccggcugguacaccaacguguucacccuggaggucggggacguggagaaccucacgugcagcgacggccccucccugaucaagaccgagcuggaccuccucaagagcgcccugcgggagcugaagaccguguccgccgaccagcuggcgcgcgaggagcagaucgagaaccccgggagcggcuccuucguccugggcgccaucgcccucgggguggccgccgcggccgccgugaccgccggcgucgcgaucgccaagacgauccggcuggagagcgaggugaccgccaucaacaacgcccugaagaagaccaacgaggccguguccacccucgggaacggcguccgcgugcuggcgacggccgugcgggagcugaaggacuucgucagcaagaaccucacccgcgccaucaacaagaacaagugcgacauccccgaccugaagauggccguguccuucagccaguucaaccggcgcuuccugaacgugguccggcaguucuccgacaacgccgggaucacccccgcgaucagccucgaccugaugaccgacgccgagcuggcccgcgccgugccgaacaugcccacguccgccggccagaucaagcucaugcuggagaaccgggcgauggugcgccggaagggcuucgggauccugaucggcgucuacgggagcagcgugaucuacauggugcagcuccccaucuucggcgucaucgacacccccugcuggaucgugaaggccgccccguccugcagcgagaagaagggcaacuacgccugccugcugcgcgaggaccaggggugguacugccagaacgccggcuccaccgucuacuaccccaacgagaaggacugcgagacccgcggggaccacguguucugcgacacggcggccggcaucaacguggccgagcagagcaaggagugcaacaucaacaucuccaccaccaacuaccccugcaaggucagcaccgggcggcaccccaucuccaugguggcccucagcccgcugggcgcgcugguggccugcuacaagggcgucuccugcagcaucggguccaaccgggugggcaucaucaagcagcucaacaaggggugcagcuacaucacgaaccaggacgccgacaccgugaccaucgacaacaccgucuaccagcuguccaagguggagggcgagcagcacgugaucaaggggcgccccgucagcuccagcuucgaccccaucaaguuccccgaggaccaguuccagguggcccuggaccagguguucgagaacaucgagaacucccaggcccucgucgaccagagcaaccggauccuguccagcgcggagaagggcaacacgggcuucaucaucgugaucauccugaucgccgugcucgggagcuccaugauccuggucagcaucuucaucaucaucaagaagaccaagaagccgaccggcgccccgcccgagcuguccggggugaccaacaacggcuucaucccccacaacugaggacuagucccuguucccagagcccacuuuuuuuucuuuuuuugaaauaaaauagccugucuuucagaucucaaaggcucuuuucagagccaccaaaaaaaaaaaaaaaaaaaaaaaaaaaaaaaaaaaaaaaaaaaaaaaaaaaaaaaaaaaaaaaaaaaaaaaaaaaaaaaaaaaaaaaaaaaaaaaaaaaaa

SEQ ID NO: 14702 - RNA, 1892 nt, Artificial Sequence
  HMPV/TN/92-4__ABM67072.1 fusion glycoprotein mRNA gc (variant)
aggagagucccgcagucggcguccagcggcucugcuuguucgugugugugucguugcaggccuuauucaagcuuaccaugagcuggaagguggucaucaucuucucccugcucaucacgccccagcacggccugaaggagagcuaccuggaggaguccugcagcaccaucaccgagggguaccucuccgugcugcgcaccggcugguacaccaacguguucacccuggaggucggggacguggagaaccucacgugcagcgacggccccucccugaucaagaccgagcuggaccuccucaagagcgcccugcgggagcugaagaccguguccgccgaccagcuggcgcgcgaggagcagaucgagaaccccgggagcggcuccuucguccugggcgccaucgcccucgggguggccgccgcggccgccgugaccgccggcgucgcgaucgccaagacgauccggcuggagagcgaggugaccgccaucaacaacgcccugaagaagaccaacgaggccguguccacccucgggaacggcguccgcgugcuggcgacggccgugcgggagcugaaggacuucgucagcaagaaccucacccgcgccaucaacaagaacaagugcgacauccccgaccugaagauggccguguccuucagccaguucaaccggcgcuuccugaacgugguccggcaguucuccgacaacgccgggaucacccccgcgaucagccucgaccugaugaccgacgccgagcuggcccgcgccgugccgaacaugcccacguccgccggccagaucaagcucaugcuggagaaccgggcgauggugcgccggaagggcuucgggauccugaucggcgucuacgggagcagcgugaucuacauggugcagcuccccaucuucggcgucaucgacacccccugcuggaucgugaaggccgccccguccugcagcgagaagaagggcaacuacgccugccugcugcgcgaggaccaggggugguacugccagaacgccggcuccaccgucuacuaccccaacgagaaggacugcgagacccgcggggaccacguguucugcgacacggcggccggcaucaacguggccgagcagagcaaggagugcaacaucaacaucuccaccaccaacuaccccugcaaggucagcaccgggcggcaccccaucuccaugguggcccucagcccgcugggcgcgcugguggccugcuacaagggcgucuccugcagcaucggguccaaccgggugggcaucaucaagcagcucaacaaggggugcagcuacaucacgaaccaggacgccgacaccgugaccaucgacaacaccgucuaccagcuguccaagguggagggcgagcagcacgugaucaaggggcgccccgucagcuccagcuucgaccccaucaaguuccccgagaaccaguuccagguggcccuggaccagguguucgagaacaucgagaacucccaggcccucgucgaccagagcaaccggauccuguccagcgcggagaagggcaacacgggcuucaucaucgugaucauccugaucgccgugcucgggagcuccaugauccuggucagcaucuucaucaucaucaagaagaccaagaagccgaccggcgccccgcccgagcuguccggggugaccaacaacggcuucaucccccacaacugaggacuagucccuguucccagagcccacuuuuuuuucuuuuuuugaaauaaaauagccugucuuucagaucucaaaggcucuuuucagagccaccaaaaaaaaaaaaaaaaaaaaaaaaaaaaaaaaaaaaaaaaaaaaaaaaaaaaaaaaaaaaaaaaaaaaaaaaaaaaaaaaaaaaaaaaaaaaaaaaaaaaa

SEQ ID NO: 14703 - RNA, 1892 nt, Artificial Sequence
  HMPV/TN/92-4__ABM67072.1 fusion glycoprotein mRNA gc (variant)
aggagagucccgcagucggcguccagcggcucugcuuguucgugugugugucguugcaggccuuauucaagcuuaccaugagcuggaagguggucaucaucuucucccugcucaucacgccccagcacggccugaaggagagcuaccuggaggaguccugcagcaccaucaccgagggguaccucuccgugcugcgcaccggcugguacaccaacguguucacccuggaggucggggacguggagaaccucacgugcagcgacggccccucccugaucaagaccgagcuggaccuccucaagagcgcccugcgggagcugaagaccguguccgccgaccagcuggcgcgcgaggagcagaucgagaaccccgggagcggcuccuucguccugggcgccaucgcccucgggguggccgccgcggccgccgugaccgccggcgucgcgaucgccaagacgauccggcuggagagcgaggugaccgccaucaacaacgcccugaagaagaccaacgaggccguguccacccucgggaacggcguccgcgugcuggcgacggccgugcgggagcugaaggacuucguccucaagaaccugacccgcgccaucaacaagaacaagugcgacauccccgaccugaagauggccgugagcuucucccaguucaaccggcgcuuccucaacgugguccggcaguucagcgacaacgccgggaucacccccgcgaucucccuggaccugaugaccgacgccgagcucgcccgcgccgugccgaacaugcccacgagcgccggccagaucaagcugaugcuggagaaccgggcgauggugcgccggaagggcuucgggauccucaucggcgucuacggguccagcgugaucuacauggugcagcugcccaucuucggcgucaucgacacccccugcuggaucgugaaggccgccccgagcugcuccgagaagaagggcaacuacgccugccugcuccgcgaggaccaggggugguacugccagaacgccggcagcaccgucuacuaccccaacgagaaggacugcgagacccgcggggaccacguguucugcgacacggcggccggcaucaacguggccgagcaguccaaggagugcaacaucaacaucagcaccaccaacuaccccugcaaggucuccaccgggcggcaccccaucagcaugguggcccuguccccgcugggcgcgcucguggccugcuacaagggcgucagcugcuccaucgggagcaaccgggugggcaucaucaagcagcugaacaaggggugcuccuacaucacgaaccaggacgccgacaccgugaccaucgacaacaccgucuaccagcugagcaagguggagggcgagcagcacgugaucaaggggcgccccgucuccagcuccuucgaccccaucaaguuccccgaggaccaguuccagguggcccucgaccagguguucgagaacaucgagaacagccaggcccuggucgaccaguccaaccggauccugagcuccgcggagaagggcaacacgggcuucaucaucgugaucauccucaucgccgugcuggggagcagcaugauccuggucuccaucuucaucaucaucaagaagaccaagaagccgaccggcgccccgcccgagcucagcggggugaccaacaacggcuucaucccccacaacugaggacuagucccuguucccagagcccacuuuuuuuucuuuuuuugaaauaaaauagccugucuuucagaucucaaaggcucuuuucagagccaccaaaaaaaaaaaaaaaaaaaaaaaaaaaaaaaaaaaaaaaaaaaaaaaaaaaaaaaaaaaaaaaaaaaaaaaaaaaaaaaaaaaaaaaaaaaaaaaaaaaaa

SEQ ID NO: 14704 - RNA, 1892 nt, Artificial Sequence
  HMPV/TN/92-4__ABM67072.1 fusion glycoprotein mRNA gc (variant)
aggagagucccgcagucggcguccagcggcucugcuuguucgugugugugucguugcaggccuuauucaagcuuaccaugagcuggaagguggucaucaucuucucccugcucaucacgccccagcacggccugaaggagagcuaccuggaggaguccugcagcaccaucaccgagggguaccucuccgugcugcgcaccggcugguacaccaacguguucacccuggaggucggggacguggagaaccucacgugcagcgacggccccucccugaucaagaccgagcuggaccuccucaagagcgcccugcgggagcugaagaccguguccgccgaccagcuggcgcgcgaggagcagaucgagaaccccgggagcggcuccuucguccugggcgccaucgcccucgggguggccgccgcggccgccgugaccgccggcgucgcgaucgccaagacgauccggcuggagagcgaggugaccgccaucaacaacgcccugaagaagaccaacgaggccguguccacccucgggaacggcguccgcgugcuggcgacggccgugcgggagcugaaggacuucguccucaagaaccugacccgcgccaucaacaagaacaagugcgacauccccgaccugaagauggccgugagcuucucccaguucaaccggcgcuuccucaacgugguccggcaguucagcgacaacgccgggaucacccccgcgaucucccuggaccugaugaccgacgccgagcucgcccgcgccgugccgaacaugcccacgagcgccggccagaucaagcugaugcuggagaaccgggcgauggugcgccggaagggcuucgggauccucaucggcgucuacggguccagcgugaucuacauggugcagcugcccaucuucggcgucaucgacacccccugcuggaucgugaaggccgccccgagcugcuccgagaagaagggcaacuacgccugccugcuccgcgaggaccaggggugguacugccagaacgccggcagcaccgucuacuaccccaacgagaaggacugcgagacccgcggggaccacguguucugcgacacggcggccggcaucaacguggccgagcaguccaaggagugcaacaucaacaucagcaccaccaacuaccccugcaaggucuccaccgggcggcaccccaucagcaugguggcccuguccccgcugggcgcgcucguggccugcuacaagggcgucagcugcuccaucgggagcaaccgggugggcaucaucaagcagcugaacaaggggugcuccuacaucacgaaccaggacgccgacaccgugaccaucgacaacaccgucuaccagcugagcaagguggagggcgagcagcacgugaucaaggggcgccccgucuccagcuccuucgaccccaucaaguuccccgagaaccaguuccagguggcccucgaccagguguucgagaacaucgagaacagccaggcccuggucgaccaguccaaccggauccugagcuccgcggagaagggcaacacgggcuucaucaucgugaucauccucaucgccgugcuggggagcagcaugauccuggucuccaucuucaucaucaucaagaagaccaagaagccgaccggcgccccgcccgagcucagcggggugaccaacaacggcuucaucccccacaacugaggacuagucccuguucccagagcccacuuuuuuuucuuuuuuugaaauaaaauagccugucuuucagaucucaaaggcucuuuucagagccaccaaaaaaaaaaaaaaaaaaaaaaaaaaaaaaaaaaaaaaaaaaaaaaaaaaaaaaaaaaaaaaaaaaaaaaaaaaaaaaaaaaaaaaaaaaaaaaaaaaaaa

SEQ ID NO: 14705 - RNA, 1892 nt, Artificial Sequence
  HMPV/TN/92-4__ABM67072.1 fusion glycoprotein mRNA gc (variant)
aggagagucccgcagucggcguccagcggcucugcuuguucgugugugugucguugcaggccuuauucaagcuuaccaugagcuggaagguggucaucaucuucucccugcucaucacgccccagcacggccugaaggagagcuaccuggaggaguccugcagcaccaucaccgagggguaccucuccgugcugcgcaccggcugguacaccaacguguucacccugcccgucggggacguggagaaccucacgugcagcgacggccccucccugaucaagaccgagcuggaccuccucaagagcgcccugcgggagcugaagaccguguccgccgaccagcuggcgcgcgaggagcagaucgagaaccccgggagcggcuccuucguccugggcgccaucgcccucgggguggccgccgcggccgccgugaccgccggcgucgcgaucgccaagacgauccggcuggagagcgaggugaccgccaucaacaacgcccugaagaagaccaacgaggccguguccacccucgggaacggcguccgcgugcuggcgacggccgugcgggagcugaaggacuucgucagcaagaaccucacccgcgccaucaacaagaacaagugcgacaucgacgaccugaagauggccguguccuucagccaguucaaccggcgcuuccugaacgugguccggcaguucuccgacaacgccgggaucacccccgcgaucagccucgaccugaugaccgacgccgagcuggcccgcgccgugccgaacaugcccacguccgccggccagaucaagcucaugcuggagaaccgggcgauggugcgccggaagggcuucgggauccugaucggcgucuacgggagcagcgugaucuacauggugcagcuccccaucuucggcgucaucgacacccccugcuggaucgugaaggccgccccguccugcagcgagaagaagggcaacuacgccugccugcugcgcgaggaccaggggugguacugccagaacgccggcuccaccgucuacuaccccaacgagaaggacugcgagacccgcggggaccacguguucugcgacacggcggccggcaucaacguggccgagcagagcaaggagugcaacaucaacaucuccaccaccaacuaccccugcaaggucagcaccgggcggcaccccaucuccaugguggcccucagcccgcugggcgcgcugguggccugcuacaagggcgucuccugcagcaucggguccaaccgggugggcaucaucaagcagcucaacaaggggugcagcuacaucacgaaccaggacgccgacaccgugaccaucgacaacaccgucuaccagcuguccaagguggagggcgagcagcacgugaucaaggggcgccccgucagcuccagcuucgaccccaucaaguuccccgaggaccaguuccagguggcccuggaccagguguucgagaacaucgagaacucccaggcccucgucgaccagagcaaccggauccuguccagcgcggagaagggcaacacgggcuucaucaucgugaucauccugaucgccgugcucgggagcuccaugauccuggucagcaucuucaucaucaucaagaagaccaagaagccgaccggcgccccgcccgagcuguccggggugaccaacaacggcuucaucccccacaacugaggacuagucccuguucccagagcccacuuuuuuuucuuuuuuugaaauaaaauagccugucuuucagaucucaaaggcucuuuucagagccaccaaaaaaaaaaaaaaaaaaaaaaaaaaaaaaaaaaaaaaaaaaaaaaaaaaaaaaaaaaaaaaaaaaaaaaaaaaaaaaaaaaaaaaaaaaaaaaaaaaaaa

SEQ ID NO: 14706 - RNA, 1892 nt, Artificial Sequence
  HMPV/TN/92-4__ABM67072.1 fusion glycoprotein mRNA gc (variant)
aggagagucccgcagucggcguccagcggcucugcuuguucgugugugugucguugcaggccuuauucaagcuuaccaugagcuggaagguggucaucaucuucucccugcucaucacgccccagcacggccugaaggagagcuaccuggaggaguccugcagcaccaucaccgagggguaccucuccgugcugcgcaccggcugguacaccaacguguucacccugcccgucggggacguggagaaccucacgugcagcgacggccccucccugaucaagaccgagcuggaccuccucaagagcgcccugcgggagcugaagaccguguccgccgaccagcuggcgcgcgaggagcagaucgagaaccccgggagcggcuccuucguccugggcgccaucgcccucgggguggccgccgcggccgccgugaccgccggcgucgcgaucgccaagacgauccggcuggagagcgaggugaccgccaucaacaacgcccugaagaagaccaacgaggccguguccacccucgggaacggcguccgcgugcuggcgacggccgugcgggagcugaaggacuucgucagcaagaaccucacccgcgccaucaacaagaacaagugcgacaucgacgaccugaagauggccguguccuucagccaguucaaccggcgcuuccugaacgugguccggcaguucuccgacaacgccgggaucacccccgcgaucagccucgaccugaugaccgacgccgagcuggcccgcgccgugccgaacaugcccacguccgccggccagaucaagcucaugcuggagaaccgggcgauggugcgccggaagggcuucgggauccugaucggcgucuacgggagcagcgugaucuacauggugcagcuccccaucuucggcgucaucgacacccccugcuggaucgugaaggccgccccguccugcagcgagaagaagggcaacuacgccugccugcugcgcgaggaccaggggugguacugccagaacgccggcuccaccgucuacuaccccaacgagaaggacugcgagacccgcggggaccacguguucugcgacacggcggccggcaucaacguggccgagcagagcaaggagugcaacaucaacaucuccaccaccaacuaccccugcaaggucagcaccgggcggcaccccaucuccaugguggcccucagcccgcugggcgcgcugguggccugcuacaagggcgucuccugcagcaucggguccaaccgggugggcaucaucaagcagcucaacaaggggugcagcuacaucacgaaccaggacgccgacaccgugaccaucgacaacaccgucuaccagcuguccaagguggagggcgagcagcacgugaucaaggggcgccccgucagcuccagcuucgaccccaucaaguuccccgagaaccaguuccagguggcccuggaccagguguucgagaacaucgagaacucccaggcccucgucgaccagagcaaccggauccuguccagcgcggagaagggcaacacgggcuucaucaucgugaucauccugaucgccgugcucgggagcuccaugauccuggucagcaucuucaucaucaucaagaagaccaagaagccgaccggcgccccgcccgagcuguccggggugaccaacaacggcuucaucccccacaacugaggacuagucccuguucccagagcccacuuuuuuuucuuuuuuugaaauaaaauagccugucuuucagaucucaaaggcucuuuucagagccaccaaaaaaaaaaaaaaaaaaaaaaaaaaaaaaaaaaaaaaaaaaaaaaaaaaaaaaaaaaaaaaaaaaaaaaaaaaaaaaaaaaaaaaaaaaaaaaaaaaaaa

SEQ ID NO: 14707 - RNA, 1892 nt, Artificial Sequence
  HMPV/TN/92-4__ABM67072.1 fusion glycoprotein mRNA gc (variant)
aggagagucccgcagucggcguccagcggcucugcuuguucgugugugugucguugcaggccuuauucaagcuuaccaugagcuggaagguggucaucaucuucucccugcucaucacgccccagcacggccugaaggagagcuaccuggaggaguccugcagcaccaucaccgagggguaccucuccgugcugcgcaccggcugguacaccaacguguucacccuggaggucggggacguggagaaccucacgugcagcgacggcccgucccugaucaagaccgagcuggaccuccucaagagcgcccugcgggagcugaagaccguguccgccgaccagcuggcgcgcgaggagcagaucgagaaccccgggagcggcuccuucguccugggcgccaucgcccucgggguggccgccgcggccgccgugaccgccggcgucgcgaucgccaagacgauccggcuggagagcgaggugaccgccaucaacaacgcccugaagaagaccaacgaggccguguccacccucgggaacggcguccgcgugcuggcgacggccgugcgggagcugaaggacuucgucagcaagaaccucacccgcgccaucaacaagaacaagugcgacaucgacgaccugaagauggccguguccuucagccaguucaaccggcgcuuccugaacgugguccggcaguucuccgacaacgccgggaucacccccgcgaucagccucgaccugaugaccgacgccgagcuggcccgcgccgugcccaacaugccgacguccgccggccagaucaagcucaugcuggagaaccgggcgauggugcgccggaagggcuucgggauccugaucggcgucuacgggagcagcgugaucuacauggugcagcuccccaucuucggcgucaucgacacccccugcuggaucgugaaggccgcccccuccugcagcgagaagaagggcaacuacgccugccugcugcgcgaggaccaggggugguacugccagaacgccggcuccaccgucuacuacccgaacgagaaggacugcgagacccgcggggaccacguguucugcgacacggcggccggcaucaacguggccgagcagagcaaggagugcaacaucaacaucuccaccaccaacuaccccugcaaggucagcaccgggcggcaccccaucuccaugguggcccucagcccccugggcgcgcugguggccugcuacaagggcgucuccugcagcaucggguccaaccgggugggcaucaucaagcagcucaacaaggggugcagcuacaucacgaaccaggacgccgacaccgugaccaucgacaacaccgucuaccagcuguccaagguggagggcgagcagcacgugaucaaggggcgcccggucagcuccagcuucgaccccaucaaguuccccgaggaccaguuccagguggcccuggaccagguguucgagaacaucgagaacucccaggcccucgucgaccagagcaaccggauccuguccagcgcggagaagggcaacacgggcuucaucaucgugaucauccugaucgccgugcucgggagcuccaugauccuggucagcaucuucaucaucaucaagaagaccaagaagcccaccggcgccccgcccgagcuguccggggugaccaacaacggcuucaucccccacaacugaggacuagucccuguucccagagcccacuuuuuuuucuuuuuuugaaauaaaauagccugucuuucagaucucaaaggcucuuuucagagccaccaaaaaaaaaaaaaaaaaaaaaaaaaaaaaaaaaaaaaaaaaaaaaaaaaaaaaaaaaaaaaaaaaaaaaaaaaaaaaaaaaaaaaaaaaaaaaaaaaaaaa

SEQ ID NO: 14708 - RNA, 1892 nt, Artificial Sequence
  HMPV/TN/92-4__ABM67072.1 fusion glycoprotein mRNA gc (variant)
aggagagucccgcagucggcguccagcggcucugcuuguucgugugugugucguugcaggccuuauucaagcuuaccaugagcuggaagguggucaucaucuucucccugcucaucacgccccagcacggccugaaggagagcuaccuggaggaguccugcagcaccaucaccgagggguaccucuccgugcugcgcaccggcugguacaccaacguguucacccuggaggucggggaccucgagaaccugacgugcagcgacggcccgucccugaucaagaccgagcucgaccugaccaagagcgcccugcgggagcucaagaccguguccgccgaccagcuggcgcgcgaggagcagaucgagaaccccgggagcggcuccuucgugcugggcgccaucgcccucggggucgccgccgcggccgccgugacggccggcguggcgaucgccaagaccauccggcuggagagcgaggucaccgccaucaacaacgcccugaagaagaccaacgaggccguguccacgcucgggaacggcgugcgcguccuggcgaccgccgugcgggagcugaaggacuucgugagcaagaaccucacccgcgccaucaacaagaacaagugcgacaucgacgaccugaagauggccgucuccuucagccaguucaaccggcgcuuccugaacguggugcggcaguucuccgacaacgccgggaucacccccgcgaucagccucgaccugaugacggacgccgagcuggcccgcgccguccccaacaugccgaccuccgccggccagaucaagcucaugcuggagaaccgggcgauggugcgccggaagggcuucgggauccugaucggcguguacgggagcagcgucaucuacauggugcagcuccccaucuucggcgugaucgacacccccugcuggaucgucaaggccgcccccuccugcagcgagaagaagggcaacuacgccugccugcugcgcgaggaccaggggugguacugccagaacgccggcuccaccguguacuacccgaacgagaaggacugcgagacgcgcggggaccacgucuucugcgacaccgcggccggcaucaacguggccgagcagagcaaggagugcaacaucaacaucuccaccaccaacuaccccugcaaggugagcacggggcggcaccccaucuccauggucgcccucagcccccugggcgcgcugguggccugcuacaagggcguguccugcagcaucggguccaaccgggucggcaucaucaagcagcucaacaaggggugcagcuacaucaccaaccaggacgccgacaccgugaccaucgacaacacgguguaccagcuguccaaggucgagggcgagcagcacgugaucaaggggcgcccggugagcuccagcuucgaccccaucaaguuccccgaggaccaguuccaggucgcccuggaccagguguucgagaacaucgagaacucccaggcccucguggaccagagcaaccggauccuguccagcgcggagaagggcaacaccggcuucaucaucgucaucauccugaucgccgugcucgggagcuccaugauccuggugagcaucuucaucaucaucaagaagaccaagaagcccaccggcgccccgcccgagcuguccggggucacgaacaacggcuucaucccccacaacugaggacuagucccuguucccagagcccacuuuuuuuucuuuuuuugaaauaaaauagccugucuuucagaucucaaaggcucuuuucagagccaccaaaaaaaaaaaaaaaaaaaaaaaaaaaaaaaaaaaaaaaaaaaaaaaaaaaaaaaaaaaaaaaaaaaaaaaaaaaaaaaaaaaaaaaaaaaaaaaaaaaaa

SEQ ID NO: 14709 - RNA, 1892 nt, Artificial Sequence
  HMPV/TN/92-4__ABM67072.1 fusion glycoprotein mRNA gc (variant)
aggagagucccgcagucggcguccagcggcucugcuuguucgugugugugucguugcaggccuuauucaagcuuaccaugagcuggaagguggucaucaucuucucccugcucaucacgccccagcacggccugaaggagagcuaccuggaggaguccugcagcaccaucaccgagggguaccucuccgugcugcgcaccggcugguacaccaacguguucacccuggaggucggggacguggagaaccucacgugcagcgacggcccgucccugaucaagaccgagcuggaccucaccaagagcgcccugcgggagcugaagaccguguccgccgaccagcucgcgcgcgaggagcagaucgagaaccccgggagcggcuccuucguccugggcgccaucgcccuggggguggccgccgcggccgccgugacggccggcgucgcgaucgccaagaccauccggcucgagagcgaggugaccgccaucaacaacgcccugaagaagaccaacgaggccguguccacgcuggggaacggcguccgcgugcucgcgaccgccgugcgggagcugaaggacuucguccugaagaaccucacccgcgccaucaacaagaacaagugcgacaucgacgaccugaagauggccgugagcuucucccaguucaaccggcgcuuccugaacgugguccggcaguucagcgacaacgccgggaucacccccgcgaucucccucgaccugaugacggacgccgagcuggcccgcgccgugcccaacaugccgaccagcgccggccagaucaagcucaugcuggagaaccgggcgauggugcgccggaagggcuucgggauccugaucggcgucuacggguccagcgugaucuacauggugcagcuccccaucuucggcgucaucgacacccccugcuggaucgugaaggccgcccccagcugcuccgagaagaagggcaacuacgccugccugcugcgcgaggaccaggggugguacugccagaacgccggcagcaccgucuacuacccgaacgagaaggacugcgagacgcgcggggaccacguguucugcgacaccgcggccggcaucaacguggccgagcaguccaaggagugcaacaucaacaucagcaccaccaacuaccccugcaaggucuccacggggcggcaccccaucagcaugguggcccucagcccccugggcgcgcugguggccugcuacaagggcgucuccugcuccaucgggagcaaccgggugggcaucaucaagcagcucaacaaggggugcuccuacaucaccaaccaggacgccgacaccgugaccaucgacaacacggucuaccagcugagcaagguggagggcgagcagcacgugaucaaggggcgcccggucuccagcuccuucgaccccaucaaguuccccgaggaccaguuccagguggcccuggaccagguguucgagaacaucgagaacagccaggcccucgucgaccaguccaaccggauccugagcuccgcggagaagggcaacaccggcuucaucaucgugaucauccugaucgccgugcucgggagcagcaugauccuggucuccaucuucaucaucaucaagaagaccaagaagcccaccggcgccccgcccgagcugagcggggugacgaacaacggcuucaucccccacaacugaggacuagucccuguucccagagcccacuuuuuuuucuuuuuuugaaauaaaauagccugucuuucagaucucaaaggcucuuuucagagccaccaaaaaaaaaaaaaaaaaaaaaaaaaaaaaaaaaaaaaaaaaaaaaaaaaaaaaaaaaaaaaaaaaaaaaaaaaaaaaaaaaaaaaaaaaaaaaaaaaaaaa

SEQ ID NO: 14710 - RNA, 1892 nt, Artificial Sequence
  HMPV/TN/92-4__ABM67072.1 fusion glycoprotein mRNA gc (variant)
aggagagucccgcagucggcguccagcggcucugcuuguucgugugugugucguugcaggccuuauucaagcuuaccaugagcuggaagguggucaucaucuucucccugcucaucacgccccagcacggccugaaggagagcuaccuggaggaguccugcagcaccaucaccgagggguaccucuccgugcugcgcaccggcugguacaccaacguguucacccuggaggucggggacguggagaaccucacgugcagcgacggcccgucccugaucaagaccgagcuggaccucaccaagagcgcccugcgggagcugaagaccguguccgccgaccagcucgcgcgcgaggagcagaucgagaaccccgggagcggcuccuucguccugggcgccaucgcccuggggguggccgccgcggccgccgugacggccggcgucgcgaucgccaagaccauccggcucgagagcgaggugaccgccaucaacaacgcccugaagaagaccaacgaggccguguccacgcuggggaacggcguccgcgugcucgcgaccgccgugcgggagcugaaggacuucgucagcaagaaccuguggcgcgccaucaacaagaacaagugcgacaucgacgaccucaagauggccguguccuucagccaguucaaccggcgcuuccugaacgugguccggcaguucuccgacaacgccgggaucacccccgcgaucagccuggaccucaugaccgacgccgagcuggcccgcgccgugcccaacaugccgacguccgccggccagaucaagcugaugcucgagaaccgggcgauggugcgccggaagggcuucgggauccugaucggcgucuacgggagcagcgugaucuacauggugcagcugcccaucuucggcgucaucgacacccccugcuggaucgugaaggccgcccccuccugcagcgagaagaagggcaacuacgccugccuccugcgcgaggaccaggggugguacugccagaacgccggcuccaccgucuacuacccgaacgagaaggacugcgagacccgcggggaccacguguucugcgacacggcggccggcaucaacguggccgagcagagcaaggagugcaacaucaacaucuccaccaccaacuaccccugcaaggucagcaccgggcggcaccccaucuccaugguggcccugagcccccucggcgcgcugguggccugcuacaagggcgucuccugcagcaucggguccaaccgggugggcaucaucaagcagcugaacaaggggugcagcuacaucacgaaccaggacgccgacaccgugaccaucgacaacaccgucuaccagcucuccaagguggagggcgagcagcacgugaucaaggggcgcccggucagcuccagcuucgaccccaucaaguuccccgaggaccaguuccagguggcccuggaccagguguucgagaacaucgagaacucccaggcccuggucgaccagagcaaccggauccucuccagcgcggagaagggcaacacgggcuucaucaucgugaucauccugaucgccgugcuggggagcuccaugauccucgucagcaucuucaucaucaucaagaagaccaagaagcccaccggcgccccgcccgagcuguccggggugaccaacaacggcuucaucccccacaacugaggacuagucccuguucccagagcccacuuuuuuuucuuuuuuugaaauaaaauagccugucuuucagaucucaaaggcucuuuucagagccaccaaaaaaaaaaaaaaaaaaaaaaaaaaaaaaaaaaaaaaaaaaaaaaaaaaaaaaaaaaaaaaaaaaaaaaaaaaaaaaaaaaaaaaaaaaaaaaaaaaaaa

SEQ ID NO: 14711 - RNA, 1892 nt, Artificial Sequence
  HMPV/TN/92-4__ABM67072.1 fusion glycoprotein mRNA gc (variant)
aggagagucccgcagucggcguccagcggcucugcuuguucgugugugugucguugcaggccuuauucaagcuuaccaugagcuggaagguggucaucaucuucucccugcucaucacgccccagcacggccugaaggagagcuaccuggaggaguccugcagcaccaucaccgagggguaccucuccgugcugcgcaccggcugguacaccaacguguucacccuggaggucggggaccucgagaaccugacgugcagcgacggcccgucccugaucaagaccgagcucgaccugcugaaguccgcccuccgggagcugaagaccguguccgccgaccagcuggcgcgcgaggagcagaucgagaaccccgggagcggcuccuucgugcucggcgccaucgcccugggggucgccgccgcggccgccgugaccgccggcguggcgaucgccaagacgauccggcuggagagcgaggucaccgccaucaacaacgcccucaagaagaccaacgaggccguguccacccuggggaacggcgugcgcguccuggcgacggccgugcgggagcucaaggacuucgugcugaagaaccuguggcgcgccaucaacaagaacaagugcgacaucgacgaccucaagauggccgucagcuucucccaguucaaccggcgcuuccugaacguggugcggcaguucagcgacaacgccgggaucacccccgcgaucucccuggaccucaugaccgacgccgagcuggcccgcgccguccccaacaugccgaccagcgccggccagaucaagcugaugcucgagaaccgggcgauggugcgccggaagggcuucgggauccugaucggcguguacggguccagcgucaucuacauggugcagcugcccaucuucggcgugaucgacacgcccugcuggaucgucaaggccgcccccagcugcuccgagaagaagggcaacuacgccugccuccugcgcgaggaccaggggugguacugccagaacgccggcagcaccguguacuacccgaacgagaaggacugcgagacccgcggggaccacgucuucugcgacaccgcggccggcaucaacguggccgagcaguccaaggagugcaacaucaacaucagcacgaccaacuaccccugcaagguguccaccgggcggcaccccaucagcauggucgcccugagcccccucggcgcgcugguggccugcuacaagggcgugagcugcuccaucgggagcaaccgggucggcaucaucaagcagcugaacaaggggugcuccuacaucaccaaccaggacgccgacacggugaccaucgacaacaccguguaccagcucagcaaggucgagggcgagcagcacgugaucaaggggcgcccgguguccagcuccuucgaccccaucaaguuccccgaggaccaguuccaggucgcccuggaccagguguucgagaacaucgagaacagccaggcccugguggaccaguccaaccggauccucagcuccgcggagaagggcaacaccggcuucaucaucgucaucauccugaucgccgugcuggggagcagcaugauccucguguccaucuucaucaucaucaagaagacgaagaagcccaccggcgccccgcccgagcugagcggggucaccaacaacggcuucaucccccacaacugaggacuagucccuguucccagagcccacuuuuuuuucuuuuuuugaaauaaaauagccugucuuucagaucucaaaggcucuuuucagagccaccaaaaaaaaaaaaaaaaaaaaaaaaaaaaaaaaaaaaaaaaaaaaaaaaaaaaaaaaaaaaaaaaaaaaaaaaaaaaaaaaaaaaaaaaaaaaaaaaaaaaa

SEQ ID NO: 14712 - RNA, 1892 nt, Artificial Sequence
  HMPV/TN/92-4__ABM67072.1 fusion glycoprotein mRNA gc (variant)
aggagagucccgcagucggcguccagcggcucugcuuguucgugugugugucguugcaggccuuauucaagcuuaccaugagcuggaagguggucaucaucuucucccugcucaucacgccccagcacggccugaaggagagcuaccuggaggaguccugcagcaccaucaccgagggguaccucuccgugcugcgcaccggcugguacaccaacguguucacccugcccgucggggacguggagaaccucacgugcagcgacggccccucccugaucaagaccgagcuggaccucaccaagagcgcccugcgggagcugaagaccguguccgccgaccagcucgcgcgcgaggagcagaucgagaaccccgggagcggcuccuucguccugggcgccaucgcccuggggguggccgccgcggccgccgugacggccggcgucgcgaucgccaagaccauccggcucgagagcgaggugaccgccaucaacaacgcccugaagaagaccaacgaggccguguccacgcuggggaacggcguccgcgugcucgcgaccgccgugcgggagcugaaggacuucgucagcaagaaccugacccgcgccaucaacaagaacaagugcgacaucgacgaccucaagauggccguguccuucagccaguucaaccggcgcuuccugaacgugguccggcaguucuccgacaacgccgggaucacccccgcgaucagccuggaccucaugacggacgccgagcuggcccgcgccgugccgaacaugcccaccuccgccggccagaucaagcugaugcucgagaaccgggcgauggugcgccggaagggcuucgggauccugaucggcgucuacgggagcagcgugaucuacauggugcagcugcccaucuucggcgucaucgacacccccugcuggaucgugaaggccgccccguccugcagcgagaagaagggcaacuacgccugccuccugcgcgaggaccaggggugguacugccagaacgccggcuccaccgucuacuaccccaacgagaaggacugcgagacgcgcggggaccacguguucugcgacaccgcggccggcaucaacguggccgagcagagcaaggagugcaacaucaacaucuccaccaccaacuaccccugcaaggucagcacggggcggcaccccaucuccaugguggcccugagcccgcucggcgcgcugguggccugcuacaagggcgucuccugcagcaucggguccaaccgggugggcaucaucaagcagcugaacaaggggugcagcuacaucaccaaccaggacgccgacaccgugaccaucgacaacacggucuaccagcucuccaagguggagggcgagcagcacgugaucaaggggcgccccgucagcuccagcuucgaccccaucaaguuccccgaggaccaguuccagguggcccuggaccagguguucgagaacaucgagaacucccaggcccuggucgaccagagcaaccggauccucuccagcgcggagaagggcaacaccggcuucaucaucgugaucauccugaucgccgugcuggggagcuccaugauccucgucagcaucuucaucaucaucaagaagaccaagaagccgaccggcgccccgcccgagcuguccggggugacgaacaacggcuucaucccccacaacugaggacuagucccuguucccagagcccacuuuuuuuucuuuuuuugaaauaaaauagccugucuuucagaucucaaaggcucuuuucagagccaccaaaaaaaaaaaaaaaaaaaaaaaaaaaaaaaaaaaaaaaaaaaaaaaaaaaaaaaaaaaaaaaaaaaaaaaaaaaaaaaaaaaaaaaaaaaaaaaaaaaaa

SEQ ID NO: 14713 - RNA, 1892 nt, Artificial Sequence
  HMPV/TN/92-4__ABM67072.1 fusion glycoprotein mRNA gc (variant)
aggagagucccgcagucggcguccagcggcucugcuuguucgugugugugucguugcaggccuuauucaagcuuaccaugagcuggaagguggucaucaucuucucccugcucaucacgccccagcacggccugaaggagagcuaccuggaggaguccugcagcaccaucaccgagggguaccucuccgugcugcgcaccggcugguacaccaacguguucacccuggaggucggggacguggagaaccucacgugcagcgacggccccucccugaucaagaccgagcuggaccucaccaagagcgcccugcgggagcugaagaccguguccgccgaccagcucgcgcgcgaggagcagaucgagaaccccgggagcggcuccuucguccugggcgccaucgcccuggggguggccgccgcggccgccgugacggccggcgucgcgaucgccaagaccauccggcucgagagcgaggugaccgccaucaacaacgcccugaagaagaccaacgaggccguguccacgcuggggaacggcguccgcgugcucgcgaccgccgugcgggagcugaaggacuucgucagcaagaaccugacccgcgccaucaacaagaacaagugcgacauccccgaccucaagauggccguguccuucagccaguucaaccggcgcuuccugaacgugguccggcaguucuccgacaacgccgggaucacccccgcgaucagccuggaccucaugacggacgccgagcuggcccgcgccgugccgaacaugcccaccuccgccggccagaucaagcugaugcucgagaaccgggcgauggugcgccggaagggcuucgggauccugaucggcgucuacgggagcagcgugaucuacauggugcagcugcccaucuucggcgucaucgacacccccugcuggaucgugaaggccgccccguccugcagcgagaagaagggcaacuacgccugccuccugcgcgaggaccaggggugguacugccagaacgccggcuccaccgucuacuaccccaacgagaaggacugcgagacgcgcggggaccacguguucugcgacaccgcggccggcaucaacguggccgagcagagcaaggagugcaacaucaacaucuccaccaccaacuaccccugcaaggucagcacggggcggcaccccaucuccaugguggcccugagcccgcucggcgcgcugguggccugcuacaagggcgucuccugcagcaucggguccaaccgggugggcaucaucaagcagcugaacaaggggugcagcuacaucaccaaccaggacgccgacaccgugaccaucgacaacacggucuaccagcucuccaagguggagggcgagcagcacgugaucaaggggcgccccgucagcuccagcuucgaccccaucaaguuccccgaggaccaguuccagguggcccuggaccagguguucgagaacaucgagaacucccaggcccuggucgaccagagcaaccggauccucuccagcgcggagaagggcaacaccggcuucaucaucgugaucauccugaucgccgugcuggggagcuccaugauccucgucagcaucuucaucaucaucaagaagaccaagaagccgaccggcgccccgcccgagcuguccggggugacgaacaacggcuucaucccccacaacugaggacuagucccuguucccagagcccacuuuuuuuucuuuuuuugaaauaaaauagccugucuuucagaucucaaaggcucuuuucagagccaccaaaaaaaaaaaaaaaaaaaaaaaaaaaaaaaaaaaaaaaaaaaaaaaaaaaaaaaaaaaaaaaaaaaaaaaaaaaaaaaaaaaaaaaaaaaaaaaaaaaaa

SEQ ID NO: 14714 - RNA, 1892 nt, Artificial Sequence
  HMPV/TN/92-4__ABM67072.1 fusion glycoprotein mRNA gc (variant)
aggagagucccgcagucggcguccagcggcucugcuuguucgugugugugucguugcaggccuuauucaagcuuaccaugagcuggaagguggucaucaucuucucccugcucaucacgccccagcacggccugaaggagagcuaccuggaggaguccugcagcaccaucaccgagggguaccucuccgugcugcgcaccggcugguacaccaacguguucacccuggaggucggggacguggagaaccucacgugcagcgacggccccucccugaucaagaccgagcuggaccucaccaagagcgcccugcgggagcugaagaccguguccgccgaccagcucgcgcgcgaggagcagaucgagaaccccgggagcggcuccuucguccugggcgccaucgcccuggggguggccgccgcggccgccgugacggccggcgucgcgaucgccaagaccauccggcucgagagcgaggugaccgccaucaacaacgcccugaagaagaccaacgaggccguguccacgcuggggaacggcguccgcgugcucgcgaccgccgugcgggagcugaaggacuucgucagcaagaaccugacccgcgccaucaacaagaacaagugccccaucgacgaccucaagauggccguguccuucagccaguucaaccggcgcuuccugaacgugguccggcaguucuccgacaacgccgggaucacccccgcgaucagccuggaccucaugacggacgccgagcuggcccgcgccgugccgaacaugcccaccuccgccggccagaucaagcugaugcucgagaaccgggcgauggugcgccggaagggcuucgggauccugaucggcgucuacgggagcagcgugaucuacauggugcagcugcccaucuucggcgucaucgacacccccugcuggaucgugaaggccgccccguccugcagcgagaagaagggcaacuacgccugccuccugcgcgaggaccaggggugguacugccagaacgccggcuccaccgucuacuaccccaacgagaaggacugcgagacgcgcggggaccacguguucugcgacaccgcggccggcaucaacguggccgagcagagcaaggagugcaacaucaacaucuccaccaccaacuaccccugcaaggucagcacggggcggcaccccaucuccaugguggcccugagcccgcucggcgcgcugguggccugcuacaagggcgucuccugcagcaucggguccaaccgggugggcaucaucaagcagcugaacaaggggugcagcuacaucaccaaccaggacgccgacaccgugaccaucgacaacacggucuaccagcucuccaagguggagggcgagcagcacgugaucaaggggcgccccgucagcuccagcuucgaccccaucaaguuccccgaggaccaguuccagguggcccuggaccagguguucgagaacaucgagaacucccaggcccuggucgaccagagcaaccggauccucuccagcgcggagaagggcaacaccggcuucaucaucgugaucauccugaucgccgugcuggggagcuccaugauccucgucagcaucuucaucaucaucaagaagaccaagaagccgaccggcgccccgcccgagcuguccggggugacgaacaacggcuucaucccccacaacugaggacuagucccuguucccagagcccacuuuuuuuucuuuuuuugaaauaaaauagccugucuuucagaucucaaaggcucuuuucagagccaccaaaaaaaaaaaaaaaaaaaaaaaaaaaaaaaaaaaaaaaaaaaaaaaaaaaaaaaaaaaaaaaaaaaaaaaaaaaaaaaaaaaaaaaaaaaaaaaaaaaaa

SEQ ID NO: 14715 - RNA, 1892 nt, Artificial Sequence
  HMPV/TN/92-4__ABM67072.1 fusion glycoprotein mRNA gc (variant)
aggagagucccgcagucggcguccagcggcucugcuuguucgugugugugucguugcaggccuuauucaagcuuaccaugagcuggaagguggucaucaucuucucccugcucaucacgccccagcacggccugaaggagagcuaccuggaggaguccugcagcaccaucaccgagggguaccucuccgugcugcgcaccggcugguacaccaacguguucacccuggaggucggggacguggagaaccucacgugcagcgacggccccucccugaucaagaccgagcuggaccucaccaagagcgcccugcgggagcugaagaccguguccgccgaccagcucgcgcgcgaggagcagaucgagaaccccgggagcggcuccuucguccugggcgccaucgcccuggggguggccgccgcggccgccgugacggccggcgucgcgaucgccaagaccauccggcuccccagcgaggugaccgccaucaacaacgcccugaagaagaccaacgaggccguguccacgcuggggaacggcguccgcgugcucgcgaccgccgugcgggagcugaaggacuucgucagcaagaaccugacccgcgccaucaacaagaacaagugcgacaucgacgaccucaagauggccguguccuucagccaguucaaccggcgcuuccugaacgugguccggcaguucuccgacaacgccgggaucacccccgcgaucagccuggaccucaugacggacgccgagcuggcccgcgccgugccgaacaugcccaccuccgccggccagaucaagcugaugcucgagaaccgggcgauggugcgccggaagggcuucgggauccugaucggcgucuacgggagcagcgugaucuacauggugcagcugcccaucuucggcgucaucgacacccccugcuggaucgugaaggccgccccguccugcagcgagaagaagggcaacuacgccugccuccugcgcgaggaccaggggugguacugccagaacgccggcuccaccgucuacuaccccaacgagaaggacugcgagacgcgcggggaccacguguucugcgacaccgcggccggcaucaacguggccgagcagagcaaggagugcaacaucaacaucuccaccaccaacuaccccugcaaggucagcacggggcggcaccccaucuccaugguggcccugagcccgcucggcgcgcugguggccugcuacaagggcgucuccugcagcaucggguccaaccgggugggcaucaucaagcagcugaacaaggggugcagcuacaucaccaaccaggacgccgacaccgugaccaucgacaacacggucuaccagcucuccaagguggagggcgagcagcacgugaucaaggggcgccccgucagcuccagcuucgaccccaucaaguuccccgaggaccaguuccagguggcccuggaccagguguucgagaacaucgagaacucccaggcccuggucgaccagagcaaccggauccucuccagcgcggagaagggcaacaccggcuucaucaucgugaucauccugaucgccgugcuggggagcuccaugauccucgucagcaucuucaucaucaucaagaagaccaagaagccgaccggcgccccgcccgagcuguccggggugacgaacaacggcuucaucccccacaacugaggacuagucccuguucccagagcccacuuuuuuuucuuuuuuugaaauaaaauagccugucuuucagaucucaaaggcucuuuucagagccaccaaaaaaaaaaaaaaaaaaaaaaaaaaaaaaaaaaaaaaaaaaaaaaaaaaaaaaaaaaaaaaaaaaaaaaaaaaaaaaaaaaaaaaaaaaaaaaaaaaaaa

SEQ ID NO: 14716 - RNA, 1892 nt, Artificial Sequence
  HMPV/TN/92-4__ABM67072.1 fusion glycoprotein mRNA gc (variant)
aggagagucccgcagucggcguccagcggcucugcuuguucgugugugugucguugcaggccuuauucaagcuuaccaugagcuggaagguggucaucaucuucucccugcucaucacgccccagcacggccugaaggagagcuaccuggaggaguccugcagcaccaucaccgagggguaccucuccgugcugcgcaccggcugguacaccaacguguucacccuggaggucggggacguggagaaccucacgugcagcgacggccccucccugaucaagaccgagcuggaccucaccaagagcgcccugcgggagcugaagaccguguccgccgaccagcucgcgcgcgaggagcagaucgagaaccccgggagcggcuccuucguccugggcgccaucgcccuggggguggccgccgcggccgccgugacggccggcgucgcgaucgccaagaccauccggcucgagagcgaggugaccgccaucaacaacgcccugaagaagaccaacgaggccguguccacgcuggggaacggcguccgcgugcucgcgaccgccgugcgggagcugaaggacuucgucagcaagaaccugacccgcgccaucaacaagaacaagugcgacaucgacgaccucaagauggccguguccuucagccaguucaaccggcgcuuccugaacgugguccggcaguucuccgacaacgccgggaucacccccgcgaucagccuggaccucaugacggacgccgagcuggcccgcgccgugcccaacaugccgaccuccgccggccagaucaagcugaugcucgagaaccgggcgauggugcgccggaagggcuucgggauccugaucggcgucuacgggagcagcgugaucuacauggugcagcugcccaucuucggcgucaucgacacccccugcuggaucgugaaggccgcccccuccugcagcgagaagaagggcaacuacgccugccuccugcgcgaggaccaggggugguacugccagaacgccggcuccaccgucuacuacccgaacgagaaggacugcgagacgcgcggggaccacguguucugcgacaccgcggccggcaucaacguggccgagcagagcaaggagugcaacaucaacaucuccaccaccaacuaccccugcaaggucagcacggggcggcaccccaucuccaugguggcccugagcccccucggcgcgcugguggccugcuacaagggcgucuccugcagcaucggguccaaccgggugggcaucaucaagcagcugaacaaggggugcagcuacaucaccaaccaggacgccgacaccgugaccaucgacaacacggucuaccagcucuccaagguggagggcgagcagcacgugaucaaggggcgcccggucagcuccagcuucccgcccaucaaguuccccgaggaccaguuccagguggcccuggaccagguguucgagaacaucgagaacucccaggcccuggucgaccagagcaaccggauccucuccagcgcggagaagggcaacaccggcuucaucaucgugaucauccugaucgccgugcuggggagcuccaugauccucgucagcaucuucaucaucaucaagaagaccaagaagcccaccggcgccccgcccgagcuguccggggugacgaacaacggcuucaucccccacaacugaggacuagucccuguucccagagcccacuuuuuuuucuuuuuuugaaauaaaauagccugucuuucagaucucaaaggcucuuuucagagccaccaaaaaaaaaaaaaaaaaaaaaaaaaaaaaaaaaaaaaaaaaaaaaaaaaaaaaaaaaaaaaaaaaaaaaaaaaaaaaaaaaaaaaaaaaaaaaaaaaaaaa

SEQ ID NO: 14717 - RNA, 1892 nt, Artificial Sequence
  HMPV/TN/92-4__ABM67072.1 fusion glycoprotein mRNA gc (variant)
aggagagucccgcagucggcguccagcggcucugcuuguucgugugugugucguugcaggccuuauucaagcuuaccaugagcuggaagguggucaucaucuucucccugcucaucacgccccagcacggccugaaggagagcuaccuggaggaguccugcagcaccaucaccgagggguaccucuccgugcugcgcaccggcugguacaccaacguguucacccuggaggucggggacguggagaaccucacgugcagcgacggcccgucccugaucaagaccgagcuggaccucaccaagagcgcccugcgggagcugaagaccguguccgccgaccagcucgcgcgcgaggagcagaucgagaaccccgggagcggcuccuucguccugggcgccaucgcccuggggguggccgccgcggccgccgugacggccggcgucgcgaucgccaagaccauccggcucgagagcgaggugaccgccaucaacaacgcccugaagaagaccaacgaggccguguccacgcuggggaacggcguccgcgugcucgcgaccgccgugcgggagcugaaggacuucgucagcaagaaccugacccgcgccaucaacaagaacaagugcgacaucgacgaccucaagauggccguguccuucagccaguucaaccggcgcuuccugaacgugguccggcaguucuccgacaacgccgggaucacccccgcgaucagccuggaccucaugacggacgccgagcuggcccgcgccgugcccaacaugccgaccuccgccggccagaucaagcugaugcucgagaaccgggcgauggugcgccggaagggcuucgggauccugaucggcgucuacgggagcagcgugaucuacauggugcagcugcccaucuucggcgucaucgacacccccugcuggaucgugaaggccgcccccuccugcagcgagaagaagggcaacuacgccugccuccugcgcgaggaccaggggugguacugccagaacgccggcuccaccgucuacuacccgaacgagaaggacugcgagacgcgcggggaccacguguucugcgacaccgcggccggcaucaacguggccgagcagagcaaggagugcaacaucaacaucuccaccaccaacuaccccugcaaggucagcacggggcggcaccccaucuccaugguggcccugagcccccucggcgcgcugguggccugcuacaagggcgucuccugcagcaucggguccaaccgggugggcaucaucaagcagcugaacaaggggugcagcuacaucaccaaccaggacgccgacaccgugaccaucgacaacacggucuaccagcucuccaagguggagggcgagcagcacgugaucaaggggcgcccggucagcuccagcuucgaccccaucaaguuccccgagaaccaguuccagguggcccuggaccagguguucgagaacaucgagaacucccaggcccuggucgaccagagcaaccggauccucuccagcgcggagaagggcaacaccggcuucaucaucgugaucauccugaucgccgugcuggggagcuccaugauccucgucagcaucuucaucaucaucaagaagaccaagaagcccaccggcgccccgcccgagcuguccggggugacgaacaacggcuucaucccccacaacugaggacuagucccuguucccagagcccacuuuuuuuucuuuuuuugaaauaaaauagccugucuuucagaucucaaaggcucuuuucagagccaccaaaaaaaaaaaaaaaaaaaaaaaaaaaaaaaaaaaaaaaaaaaaaaaaaaaaaaaaaaaaaaaaaaaaaaaaaaaaaaaaaaaaaaaaaaaaaaaaaaaaa

SEQ ID NO: 14718 - RNA, 1892 nt, Artificial Sequence
  HMPV/TN/92-4__ABM67072.1 fusion glycoprotein mRNA gc (variant)
aggagagucccgcagucggcguccagcggcucugcuuguucgugugugugucguugcaggccuuauucaagcuuaccaugagcuggaagguggucaucaucuucucccugcucaucacgccccagcacggccugaaggagagcuaccuggaggaguccugcagcaccaucaccgagggguaccucuccgugcugcgcaccggcugguacaccaacguguucacccuggaggucggggacguggagaaccucacgugcagcgacggcccgucccugaucaagaccgagcuggaccucaccaagagcgcccugcgggagcugaagaccguguccgccgaccagcucgcgcgcgaggagcagaucgagaaccccgggagcggcuccuucguccugggcgccaucgcccuggggguggccgccgcggccgccgugacggccggcgucgcgaucgccaagaccauccggcucgagagcgaggugaccgccaucaacaacgcccugaagaagaccaacgaggccguguccacgcuggggaacggcguccgcgugcucgcgaccgccgugcgggagcugaaggacuucgucagcaagaaccugacccgcgccaucaacaagaacaagugcgacaucgacgaccucaagauggccguguccuucagccaguucaaccggcgcuuccugaacgugguccggcaguucuccgacaacgccgggaucacccccgcgaucagccuggaccucaugacggacgccgagcuggcccgcgccgugcccaacaugccgaccuccgccggccagaucaagcugaugcucgagaaccgggcgauggugcgccggaagggcuucgggauccugaucggcgucuacgggagcagcgugaucuacauggugcagcugcccaucuucggcgucaucgacacccccugcuggaucgugaaggccgcccccuccugcagcgagaagaagggcaacuacgccugccuccugcgcgaggaccaggggugguacugccagaacgccggcuccaccgucuacuacccgaacgagaaggacugcgagacgcgcggggaccacguguucugcgacaccgcggccggcaucaacguggccgagcagagcaaggagugcaacaucaacaucuccaccaccaacuaccccugcaaggucagcacggggcggcaccccaucuccaugguggcccugagcccccucggcgcgcugguggccugcuacaagggcgucuccugcagcaucggguccaaccgggugggcaucaucaagcagcugaacaaggggugcagcuacaucaccaaccaggacgccgacaccgugaccaucgacaacacggucuaccagcucuccaagguggagggcgagcagcacgugaucaaggggcgcccggucagcuccagcuucgaccccaucaaguucccccaggaccaguuccagguggcccuggaccagguguucgagaacaucgagaacucccaggcccuggucgaccagagcaaccggauccucuccagcgcggagaagggcaacaccggcuucaucaucgugaucauccugaucgccgugcuggggagcuccaugauccucgucagcaucuucaucaucaucaagaagaccaagaagcccaccggcgccccgcccgagcuguccggggugacgaacaacggcuucaucccccacaacugaggacuagucccuguucccagagcccacuuuuuuuucuuuuuuugaaauaaaauagccugucuuucagaucucaaaggcucuuuucagagccaccaaaaaaaaaaaaaaaaaaaaaaaaaaaaaaaaaaaaaaaaaaaaaaaaaaaaaaaaaaaaaaaaaaaaaaaaaaaaaaaaaaaaaaaaaaaaaaaaaaaaa

SEQ ID NO: 14719 - RNA, 1892 nt, Artificial Sequence
  HMPV/TN/92-4__ABM67072.1 fusion glycoprotein mRNA gc (variant)
aggagagucccgcagucggcguccagcggcucugcuuguucgugugugugucguugcaggccuuauucaagcuuaccaugagcuggaagguggucaucaucuucucccugcucaucacgccccagcacggccugaaggagagcuaccuggaggaguccugcagcaccaucaccgagggguaccucuccgugcugcgcaccggcugguacaccaacguguucacccuggaggucggggacguggagaaccucacgugcagcgacggcccgucccugaucaagaccgagcuggaccucaccaagagcgcccugcgggagcugaagaccguguccgccgaccagcucgcgcgcgaggagcagaucgagaaccccgggagcggcuccuucguccugggcgccaucgcccuggggguggccgccgcggccgccgugacggccggcgucgcgaucgccaagaccauccggcucgagagcgaggugaccgccaucaacaacgcccugaagaagaccaacgaggccguguccacgcuggggaacggcguccgcgugcucgcgaccgccgugcgggagcugaaggacuucgucagcaagaaccugacccgcgccaucaacaagaacaagugcgacaucgacgaccucaagauggccguguccuucagccaguggaaccggcgcuuccugaacgugguccggcaguucuccgacaacgccgggaucacccccgcgaucagccuggaccucaugacggacgccgagcuggcccgcgccgugcccaacaugccgaccuccgccggccagaucaagcugaugcucgagaaccgggcgauggugcgccggaagggcuucgggauccugaucggcgucuacgggagcagcgugaucuacauggugcagcugcccaucuucggcgucaucgacacccccugcuggaucgugaaggccgcccccuccugcagcgagaagaagggcaacuacgccugccuccugcgcgaggaccaggggugguacugccagaacgccggcuccaccgucuacuacccgaacgagaaggacugcgagacgcgcggggaccacguguucugcgacaccgcggccggcaucaacguggccgagcagagcaaggagugcaacaucaacaucuccaccaccaacuaccccugcaaggucagcacggggcggcaccccaucuccaugguggcccugagcccccucggcgcgcugguggccugcuacaagggcgucuccugcagcaucggguccaaccgggugggcaucaucaagcagcugaacaaggggugcagcuacaucaccaaccaggacgccgacaccgugaccaucgacaacacggucuaccagcucuccaagguggagggcgagcagcacgugaucaaggggcgcccggucagcuccagcuucgaccccaucaaguuccccgaggaccaguuccagguggcccuggaccagguguucgagaacaucgagaacucccaggcccuggucgaccagagcaaccggauccucuccagcgcggagaagggcaacaccggcuucaucaucgugaucauccugaucgccgugcuggggagcuccaugauccucgucagcaucuucaucaucaucaagaagaccaagaagcccaccggcgccccgcccgagcuguccggggugacgaacaacggcuucaucccccacaacugaggacuagucccuguucccagagcccacuuuuuuuucuuuuuuugaaauaaaauagccugucuuucagaucucaaaggcucuuuucagagccaccaaaaaaaaaaaaaaaaaaaaaaaaaaaaaaaaaaaaaaaaaaaaaaaaaaaaaaaaaaaaaaaaaaaaaaaaaaaaaaaaaaaaaaaaaaaaaaaaaaaaa

SEQ ID NO: 14720 - RNA, 1892 nt, Artificial Sequence
  HMPV/NL/1/99__AAQ90145.1 fusion glycoprotein mRNA gc (F0)
aggagagucccgcagucggcguccagcggcucugcuuguucgugugugugucguugcaggccuuauucaagcuuaccaugagcuggaaggugaugaucaucaucucccugcucaucacgccccagcacggccugaaggagagcuaccuggaggaguccugcagcaccaucaccgagggguaccucuccguccugcgcaccggcugguacaccaacguguucacccuggaggugggggacgucgagaaccucacgugcaccgacggcccgagccugaucaagaccgagcuggaccucaccaaguccgcccugcgggagcugaagacggugagcgccgaccagcucgcgcgcgaggagcagaucgagaacccccggcagucccgcuucgugcugggggccaucgcccugggcgucgccaccgccgcggccgugaccgccggcaucgccaucgcgaagaccauccggcucgagagcgaggugaacgccaucaagggggcccugaagcagacgaacgaggccgucuccacccugggcaacggggugcgcgugcucgccaccgcgguccgggagcugaaggaguucgugagcaagaaccugaccuccgccaucaaccgcaacaagugcgacaucgccgaccucaagauggccgugagcuucucccaguucaaccggcgcuuccugaacgucgugcggcaguucagcgacaacgccggcaucacgcccgcgaucucccuggaccucaugaccgacgccgagcuggcccgcgccgugagcuacaugcccaccuccgccgggcagaucaagcugaugcucgagaaccgggcgaugguccgccggaagggcuucggcauccugaucgggguguacggcagcagcgugaucuacaugguccagcugccgaucuucggggugaucgacacccccugcuggaucaucaaggccgcccccuccugcagcgagaagaacggcaacuacgccugccuccugcgcgaggaccagggcugguacugcaagaacgccggguccacgguguacuaccccaacgagaaggacugcgagacccggggcgaccacgucuucugcgacaccgcggccgggaucaacguggccgagcagagccgcgagugcaacaucaacaucuccaccacgaacuacccgugcaaggucagcaccggccggcaccccaucuccaugguggcccugagcccccucggggcgcugguggccugcuacaagggcgucuccugcagcaucggcuccaacuggguggggaucaucaagcagcugcccaagggcugcagcuacaucaccaaccaggacgccgacaccgugacgaucgacaacaccgucuaccagcucuccaagguggagggggagcagcacgugaucaagggccgcccggucagcuccagcuucgaccccaucaaguuccccgaggaccaguucaacguggcccuggaccagguguucgaguccaucgagaacagccaggcccuggucgaccaguccaacaagauccucaacagcgcggagaaggggaacaccggcuucaucaucguggugauccuggucgccgugcugggccucaccaugaucagcguguccaucaucaucaucaucaagaagacgcggaagcccaccggggccccgcccgagcugaacggcgucaccaacgggggcuucaucccccacagcugaggacuagucccuguucccagagcccacuuuuuuuucuuuuuuugaaauaaaauagccugucuuucagaucucaaaggcucuuuucagagccaccaaaaaaaaaaaaaaaaaaaaaaaaaaaaaaaaaaaaaaaaaaaaaaaaaaaaaaaaaaaaaaaaaaaaaaaaaaaaaaaaaaaaaaaaaaaaaaaaaaaaa

SEQ ID NO: 14721 - RNA, 1892 nt, Artificial Sequence
  HMPV/Sabana__AEA02280.1 fusion glycoprotein mRNA gc (F0)
aggagagucccgcagucggcguccagcggcucugcuuguucgugugugugucguugcaggccuuauucaagcuuaccaugagcuggaaggugaugaucaucaucucccugcucaucacgccccagcacggccugaaggagagcuaccuggaggaguccugcagcaccaucaccgagggguaccucuccguccugcgcaccggcugguacaccaacguguucacccuggaggugggggacgucgagaaccucacgugcaccgacggcccgagccugaucaagaccgagcuggaccucaccaaguccgcccugcgggagcugaagacggugagcgccgaccagcucgcgcgcgaggagcagaucgagaacccccggcagucccgcuucgugcugggggccaucgcccugggcgucgccaccgccgcggccgugaccgccggcaucgccaucgcgaagaccauccggcucgagagcgaggugaacgccaucaagggggcccugaagacgaccaacgaggccgucuccacccugggcaacggggugcgcgugcucgccaccgcgguccgggagcugaaggaguucgugagcaagaaccugacguccgccaucaacaagaacaagugcgacaucgccgaccucaagauggccgugagcuucucccaguucaaccgccgguuccugaacgucgugcgccaguucagcgacaacgccggcaucacccccgcgaucucccuggaccucaugaacgacgccgagcuggcccgggccgugagcuacaugcccaccuccgccgggcagaucaagcugaugcucgagaaccgcgcgaugguccggcgcaagggcuucggcauccugaucgggguguacggcagcagcgugaucuacaugguccagcugccgaucuucggggugaucaacacccccugcuggaucaucaaggccgcccccuccugcagcgagaaggacggcaacuacgccugccuccugcgggaggaccagggcugguacugcaagaacgccggguccacgguguacuaccccaacgagaaggacugcgagacccgcggcgaccacgucuucugcgacaccgcggccgggaucaacguggccgagcagagccgggagugcaacaucaacaucuccaccacgaacuacccgugcaaggucagcaccggccgccaccccaucuccaugguggcccugagcccccucggggcgcugguggccugcuacaagggcgucuccugcagcaccggcuccaaccagguggggaucaucaagcagcugcccaagggcugcagcuacaucaccaaccaggacgccgacacggugaccaucgacaacaccgucuaccagcucuccaagguggagggggagcagcacgugaucaagggccggccggucagcuccagcuucgaccccauccgcuuccccgaggaccaguucaacguggcccuggaccagguguucgaguccaucgagaacagccaggcccuggucgaccaguccaacaagauccucaacagcgcggagaaggggaacaccggcuucaucaucgugaucauccugaucgccgugcugggccucacgaugaucagcgucuccaucaucaucaucaucaagaagacccggaagcccaccggggccccgcccgagcugaacggcgugaccaacgggggcuucaucccccacagcugaggacuagucccuguucccagagcccacuuuuuuuucuuuuuuugaaauaaaauagccugucuuucagaucucaaaggcucuuuucagagccaccaaaaaaaaaaaaaaaaaaaaaaaaaaaaaaaaaaaaaaaaaaaaaaaaaaaaaaaaaaaaaaaaaaaaaaaaaaaaaaaaaaaaaaaaaaaaaaaaaaaaa

SEQ ID NO: 14722 - RNA, 1892 nt, Artificial Sequence
  HMPV/TN/92-4__ABM67072.1 fusion glycoprotein mRNA human (F0)
aggagagucccgcagucggcguccagcggcucugcuuguucgugugugugucguugcaggccuuauucaagcuuaccaugagcuggaagguggucaucauuuucucccugcucauaacaccccagcacggccuuaaagagucuuaccuggaagagucaugcaguaccaucacugaaggguauuugagcguuuuaagaacgggaugguacaccaacguguuuacacuggagguaggugacguggaaaaucuaacuuguuccgauggcccuucucucauuaagaccgagcuggaccuuacaaaaucggcccugagggaguugaagaccgucucagcugaucaacucgcacgggaggaacagaucgaaaacccacgccagagccgauucgugcugggggccauugcgcugggaguugcugccgcagccgcugugacugcaggcgucgccaucgcuaaaacaauacgucucgagagugaggugaccgccaucaauaacgcguuaaagaagacgaaugaagcaguauccacucuggguaacgggguuagagugcuugccaccgcugucagggaguugaaagacuuugugucuaagaaucugacacgggccauuaacaaaaauaagugcgauaucgacgaucuaaaaauggcagugagcuucucccaguuuaaccgcagauuccucaaugucguuaggcaauuuucagacaacgcuggaauuacuccggccaucagucuggaucuuaugaccgacgcggaacuggcccgggcagugcccaauaugccuacaagcgcuggccagauaaaguugaugcucgagaaccgcgccaugguacgaagaaagggcuucgggauucugaucggaguguaugguucuuccgucauuuacauggugcaguuaccaaucuuuggcguuaucgauacccccuguuggauugugaaagcugccccuucaugcagcgaaaagaaagggaauuaugcaugucugcucagggaggaccagggaugguacugccaaaacgccggcaguacggucuauuacccaaacgagaaggauugugaaacucggggugaccauguguucugcgacacagcugcggggauaaauguagcagagcagucuaaagaauguaacaucaauauuuccaccacuaacuaccccugcaagguuagcacaggacgucacccuaucucgaugguggcccuuucuccacugggcgcuuuggucgccuguuauaaaggcguguccugcucaauagggaguaaucgcgucggaauuaucaagcagcuaaacaaggguugcagcuacaucaccaaucaggaugcagacacggugaccauugauaacacaguuuaucaacuguccaaaguggagggcgaacagcauguaaucaaggggagaccggucucuagcucauuugaccccauuaaauucccugaggaucaguuuaauguggcccucgaccaaguuuucgagaacauagaaaauagucaggcucugguggaucaguccaacaggauccuuagcucugccgagaagggaaauacuggcuucauuaucgucaucauucugauagcaguguuggguucaaguaugauccucguaagcauuuuuaucauuaucaaaaagaccaagaaaccaacaggggcgcccccugaacuguccggcgugacuaacaauggauucauaccacacaacugaggacuagucccuguucccagagcccacuuuuuuuucuuuuuuugaaauaaaauagccugucuuucagaucucaaaggcucuuuucagagccaccaaaaaaaaaaaaaaaaaaaaaaaaaaaaaaaaaaaaaaaaaaaaaaaaaaaaaaaaaaaaaaaaaaaaaaaaaaaaaaaaaaaaaaaaaaaaaaaaaaaaa

SEQ ID NO: 14723 - RNA, 1892 nt, Artificial Sequence
  HMPV/TN/92-4__ABM67072.1 fusion glycoprotein mRNA human (variant)
aggagagucccgcagucggcguccagcggcucugcuuguucgugugugugucguugcaggccuuauucaagcuuaccaugagcuggaagguggucaucauuuucucccugcucauaacaccccagcacggccuuaaagagucuuaccuggaagagucaugcaguaccaucacugaaggguauuugagcguuuuaagaacgggaugguacaccaacguguuuacacuggagguaggugacguggaaaaucuaacuuguuccgauggcccuucucucauuaagaccgagcuggaccuuacaaaaucggcccugagggaguugaagaccgucucagcugaucaacucgcacgggaggaacagaucgaaaacccagggagcggaaguuucgugcugggcgccauugcgcuggguguugcugccgcagccgcugugacugcaggggucgccaucugcaaaacaauacgccucgaguccgaggugaccgcuaucaauaacgccuuaaagaagacgaaugaagcgguaucuacucugggaaacggcguucgagugcuugcauuugccguccgugaguugaaagacuucgugagcaagaaucugaccagagcucuaaacaaaaauaagugugauauugacgaucucaaaauggccguguccuuuucacaguucaacaggcgguuucugaaugucguucgccaguucagugacaacgcaggcaucacaccggcuauuagccuugaucugaugacugacgccgaauuggcgagagccgugcccaauaugccuaccucugcagggcaaaucaagcucaugcuggagaacagggcuaugguacggcgcaagggauuugguauauuaugcggcguguauggguccucagucauuuacauggugcagcugccaaucuucggaguuauugauacacccuguuggaucgugaaagccgcuccuagcugcagugaaaagaaaggcaauuaugccugucuccuucgagaggaccaggguugguacugccagaacgcagggucuaccgucuauuacccaaacgagaaggauugugaaacgagaggagaccauguguuuugcgacacugccgcuggcaucaauguagcggagcaauccaaagaauguaacauuaauauaagcacaaccaacuaccccugcaagguuucgacuggcaggcacccuaucucuaugguggcacuguccccauugggggcccuagucgcuugcuauaaaggagugucauguaguauugguagcaaucgggucggcaucauaaagcagcugaacaaggggugcuccuacauuacaaaucaggaugccgacaccgugacgaucgauaacaccguuuaucagcucucuaaaguggagggagaacaacauguaaucaagggccguccggucagcucaaguuucgaccccauuaaauuuccugaggaucaguucaauguggcacuggaccagguuuucgagaacaucgaaaauucccaagcccuuguggaucagagcaaccgcauucugucuucagcugagaaggguaauacaggguuuauaaucgucauuaucuugaucgccgugcucggcaguagcaugauucugguauccauauucaucauuaucaaaaagacuaagaaaccaaccggagcacccccugaauuaucuggcgugacaaacaauggguuuauuccacacaacugaggacuagucccuguucccagagcccacuuuuuuuucuuuuuuugaaauaaaauagccugucuuucagaucucaaaggcucuuuucagagccaccaaaaaaaaaaaaaaaaaaaaaaaaaaaaaaaaaaaaaaaaaaaaaaaaaaaaaaaaaaaaaaaaaaaaaaaaaaaaaaaaaaaaaaaaaaaaaaaaaaaaa

SEQ ID NO: 14724 - RNA, 1892 nt, Artificial Sequence
  HMPV/TN/92-4__ABM67072.1 fusion glycoprotein mRNA human (variant)
aggagagucccgcagucggcguccagcggcucugcuuguucgugugugugucguugcaggccuuauucaagcuuaccaugagcuggaagguggucaucauuuucucccugcucauaacaccccagcacggccuuaaagagucuuaccuggaagagucaugcaguaccaucacugaaggguauuugagcguuuuaagaacgggaugguacaccaacguguuuacacuggagguaggugacguggaaaaucuaacuuguuccgauggcccuucucucauuaagaccgagcuggaccuuacaaaaucggcccugagggaguugaagaccgucucagcugaucaacucgcacgggaggaacagaucgaaaacccagggagcggaaguuucgugcugggcgccauugcgcuggguguugcugccgcagccgcugugacugcaggggucgccaucugcaaaacaauacgccucgaguccgaggugaccgcuaucaauaacgccuuaaagaagacgaaugaagcgguaucuacucugggaaacggcguucgagugcuugcaaccgccguccgugaguugaaagacuuugugagcaagaaucugacaagagcuauuaacaaaaauaagugugauaucgacgaucuaaaaauggccguguccuucucacaguuuaacaggcgguuccucaaugucguucgccaguuuagugacaacgcaggcauuacuccggcuaucagccuggaucuuaugaccgacgccgaacuggcgagagccgugcccaauaugccuacaucugcagggcaaauaaaguugaugcucgagaacagggcuaugguacggcgcaagggauucgguauucugugcggcguguauggguccucagucaucuacauggugcaguuaccaauuuuuggaguuaucgauacccccuguuggaucgugaaagccgcuccuagcugcagugaaaagaaaggcaauuaugccugucugcuccgagaggaccaggguugguacugccagaacgcagggucuacggucuauuacccaaacgagaaggauugugaaacuagaggagaccauguguucugcgacacagccgcuggcauuaauguagcggagcaauccaaagaauguaacauaaauaucagcaccacuaacuaccccugcaagguuucgacaggcaggcacccuauuucuaugguggcacuuuccccacugggggccuuggucgcuugcuauaaaggagugucauguaguaucgguagcaaucgggucggcauaauuaagcagcuaaacaaggggugcuccuacaucaccaaucaggaugccgacacggugaccaucgauaacacaguuuaucagcugucuaaaguggagggagaacaacauguaauuaagggccguccggucagcucaaguuuugaccccaucaaauucccugagcaccaguggcauguggcacucgaucagguuuuugagaauauugaaaacucccaagcccugguggaccagagcaaucgcauacuuucuucagcugagaaggguaacacuggguucaucauugucaucauccugauugccguguugggcaguagcaugauacucguauccaucuucauuaucauuaaaaagaccaagaaaccaacaggagcacccccugaacugucuggcgugacuaauaacggguuuaucccacacaauugaggacuagucccuguucccagagcccacuuuuuuuucuuuuuuugaaauaaaauagccugucuuucagaucucaaaggcucuuuucagagccaccaaaaaaaaaaaaaaaaaaaaaaaaaaaaaaaaaaaaaaaaaaaaaaaaaaaaaaaaaaaaaaaaaaaaaaaaaaaaaaaaaaaaaaaaaaaaaaaaaaaaa

SEQ ID NO: 14725 - RNA, 1892 nt, Artificial Sequence
  HMPV/TN/92-4__ABM67072.1 fusion glycoprotein mRNA human (variant)
aggagagucccgcagucggcguccagcggcucugcuuguucgugugugugucguugcaggccuuauucaagcuuaccaugagcuggaagguggucaucauuuucucccugcucauaacaccccagcacggccuuaaagagucuuaccuggaagagucaugcaguaccaucacugaaggguauuugagcguuuuaagaacgggaugguacaccaacguguuuacacuggagguaggugacguggaaaaucuaacuuguuccgauggcccuucucucauuaagaccgagcuggaccuucugaaaucggccuugagggagcucaagacagucucagcugaucaacuggcacgggaggaacagaucgaaaacccagggagcggaaguuucgugcugggcgccauugcgcucgguguugcugccgcagccgcugugaccgcaggggucgccaucgcuaaaacuauacgcuuagaguccgaggugacagccaucaauaacgcgcugaagaagaccaaugaagcaguaucuacgcuuggaaacggcguucgaguguuggccacugcuguccgugagcugaaagacuuugugagcaagaaucuaaccagagccauuaacaaaaauaagugcgauaucccggaccucaaaauggcaguguccuucucacaguuuaacaggcgguuccugaaugucguucgccaguuuagugauaacgcuggcauuacacccgccaucagccuugaccugaugacugaugcggaauuggccagagcagugccuaauaugccaaccucugcugggcaaauaaagcucaugcuggagaacagggccaugguacggcgcaagggauucgguauuuuaaucggcguguauggguccucagucauuuacauggugcagcugcccaucuuuggaguuaucgacacaccuuguuggauugugaaagcugccccaagcugcagugaaaagaaaggcaauuaugcaugucuccuucgagaggaucaggguugguacugccagaacgccgggucuaccgucuauuaccccaacgagaaggacugugaaacgagaggagaucauguguucugcgacacugcugcgggcauaaauguagcagagcaauccaaagaauguaacaucaauauuagcacaaccaacuacccuugcaagguuucgacuggcaggcacccaaucucuaugguggcccuguccccguugggggcucuagucgccuguuauaaaggagugucaugcaguauagguagcaaucgggucggcauuaucaagcagcugaacaaggggugcuccuacaucacaaaucaggacgcagauaccgugacgauugacaacaccguuuaucagcucucuaaaguggagggagaacaacauguaaucaagggccgucccgucagcucaaguuuugauccuauuaaauucccagaggaccaguuucagguggcccuggaucaaguuuucgagaauauagaaaacucccaggcucuuguggaccagagcaaucgcauccugucuucagccgagaaggguaacacaggguucauuaucgucaucauuuugauagcagugcucggcaguagcaugauccugguauccauuuuuaucauuaucaaaaagacuaagaaacccaccggagcgccuccagaauuaucuggcgugacaaauaacggguucauaccccacaauugaggacuagucccuguucccagagcccacuuuuuuuucuuuuuuugaaauaaaauagccugucuuucagaucucaaaggcucuuuucagagccaccaaaaaaaaaaaaaaaaaaaaaaaaaaaaaaaaaaaaaaaaaaaaaaaaaaaaaaaaaaaaaaaaaaaaaaaaaaaaaaaaaaaaaaaaaaaaaaaaaaaaa

SEQ ID NO: 14726 - RNA, 1892 nt, Artificial Sequence
  HMPV/TN/92-4__ABM67072.1 fusion glycoprotein mRNA human (variant)
aggagagucccgcagucggcguccagcggcucugcuuguucgugugugugucguugcaggccuuauucaagcuuaccaugagcuggaagguggucaucauuuucucccugcucauaacaccccagcacggccuuaaagagucuuaccuggaagagucaugcaguaccaucacugaaggguauuugagcguuuuaagaacgggaugguacaccaacguguuuacacuggagguaggugacguggaaaaucuaacuuguuccgauggcccuucucucauuaagaccgagcuggaccuucugaaaucggccuugagggagcucaagacagucucagcugaucaacuggcacgggaggaacagaucgaaaacccagggagcggaaguuucgugcugggcgccauugcgcucgguguugcugccgcagccgcugugaccgcaggggucgccaucgcuaaaacuauacgcuuagaguccgaggugacagccaucaauaacgcgcugaagaagaccaaugaagcaguaucuacgcuuggaaacggcguucgaguguuggccacugcuguccgugagcugaaagacuuugugagcaagaaucuaaccagagccauuaacaaaaauaagugcgauaucccggaccucaaaauggcaguguccuucucacaguuuaacaggcgguuccugaaugucguucgccaguuuagugauaacgcuggcauuacacccgccaucagccuugaccugaugacugaugcggaauuggccagagcagugccuaauaugccaaccucugcugggcaaauaaagcucaugcuggagaacagggccaugguacggcgcaagggauucgguauuuuaaucggcguguauggguccucagucauuuacauggugcagcugcccaucuuuggaguuaucgacacaccuuguuggauugugaaagcugccccaagcugcagugaaaagaaaggcaauuaugcaugucuccuucgagaggaucaggguugguacugccagaacgccgggucuaccgucuauuaccccaacgagaaggacugugaaacgagaggagaucauguguucugcgacacugcugcgggcauaaauguagcagagcaauccaaagaauguaacaucaauauuagcacaaccaacuacccuugcaagguuucgacuggcaggcacccaaucucuaugguggcccuguccccguugggggcucuagucgccuguuauaaaggagugucaugcaguauagguagcaaucgggucggcauuaucaagcagcugaacaaggggugcuccuacaucacaaaucaggacgcagauaccgugacgauugacaacaccguuuaucagcucucuaaaguggagggagaacaacauguaaucaagggccgucccgucagcucaaguuuugauccuauuaaauucccagagaaucaguuucagguggcccuggaccaaguuuucgagaacauagaaaauucccaggcucuuguggaucagagcaaccgcauccugucuucagccgagaaggguaauacaggguucauuaucgucaucauuuugauagcagugcucggcaguagcaugauccugguauccauuuuuaucauuaucaaaaagacuaagaaacccaccggagcgccuccagaauuaucuggcgugacaaacaauggguucauaccccacaacugaggacuagucccuguucccagagcccacuuuuuuuucuuuuuuugaaauaaaauagccugucuuucagaucucaaaggcucuuuucagagccaccaaaaaaaaaaaaaaaaaaaaaaaaaaaaaaaaaaaaaaaaaaaaaaaaaaaaaaaaaaaaaaaaaaaaaaaaaaaaaaaaaaaaaaaaaaaaaaaaaaaaa

SEQ ID NO: 14727 - RNA, 1892 nt, Artificial Sequence
  HMPV/TN/92-4__ABM67072.1 fusion glycoprotein mRNA human (variant)
aggagagucccgcagucggcguccagcggcucugcuuguucgugugugugucguugcaggccuuauucaagcuuaccaugagcuggaagguggucaucauuuucucccugcucauaacaccccagcacggccuuaaagagucuuaccuggaagagucaugcaguaccaucacugaaggguauuugagcguuuuaagaacgggaugguacaccaacguguuuacacuggagguaggugacguggaaaaucuaacuuguuccgauggcccuucucucauuaagaccgagcuggaccuucugaaaucggccuugagggagcucaagacagucucagcugaucaacuggcacgggaggaacagaucgaaaacccagggagcggaaguuucgugcugggcgccauugcgcucgguguugcugccgcagccgcugugaccgcaggggucgccaucgcuaaaacuauacgcuuagaguccgaggugacagccaucaauaacgcgcugaagaagaccaaugaagcaguaucuacgcuuggaaacggcguucgaguguuggccacugcuguccgugagcugaaagacuuugugcuaaagaaucucaccagagccauuaacaaaaauaagugcgauaucccggaccugaaaauggcagugagcuucucccaguuuaacaggcgguuccuuaaugucguucgccaguuuucagauaacgcuggcauuacacccgccaucagucuggacuugaugacugaugcggaacucgccagagcagugccuaauaugccaaccagcgcugggcaaauaaagcugauguuagagaacagggccaugguacggcgcaagggauucgguauucugaucggcguguaugggucuuccgucauuuacauggugcagcuccccaucuuuggaguuaucgacacaccuuguuggauugugaaagcugccccaucaugcagcgaaaagaaaggcaauuaugcaugucuucugcgagaggaucaggguugguacugccagaacgccgggaguaccgucuauuaccccaacgagaaggacugugaaacgagaggagaucauguguucugcgacacugcugcgggcauaaauguagcagagcaaucuaaagaauguaacaucaauauuuccacaaccaacuacccuugcaagguuagcacuggcaggcacccaaucucgaugguggccuugucuccgcuaggggcucuggucgccuguuauaaaggaguguccugcucaauagguaguaaucgggucggcauuaucaagcagcucaacaaggggugcagcuacaucacaaaucaggacgcagauaccgugacgauugacaacaccguuuaucagcuguccaaaguggagggagaacaacauguaaucaagggccgucccgucucuagcucauuugauccuauuaaauucccagaggaccaguuucagguggcccuugaucaaguuuucgagaauauagaaaacagucaggcucugguggaccaguccaaucgcaucuugagcucugccgagaaggguaacacaggguucauuaucgucaucauucucauagcagugcugggcucaaguaugaucuuaguaagcauuuuuaucauuaucaaaaagacuaagaaacccaccggagcgccuccagaacuguccggcgugacaaauaacggguucauaccccacaauugaggacuagucccuguucccagagcccacuuuuuuuucuuuuuuugaaauaaaauagccugucuuucagaucucaaaggcucuuuucagagccaccaaaaaaaaaaaaaaaaaaaaaaaaaaaaaaaaaaaaaaaaaaaaaaaaaaaaaaaaaaaaaaaaaaaaaaaaaaaaaaaaaaaaaaaaaaaaaaaaaaaaa

SEQ ID NO: 14728 - RNA, 1892 nt, Artificial Sequence
  HMPV/TN/92-4__ABM67072.1 fusion glycoprotein mRNA human (variant)
aggagagucccgcagucggcguccagcggcucugcuuguucgugugugugucguugcaggccuuauucaagcuuaccaugagcuggaagguggucaucauuuucucccugcucauaacaccccagcacggccuuaaagagucuuaccuggaagagucaugcaguaccaucacugaaggguauuugagcguuuuaagaacgggaugguacaccaacguguuuacacuggagguaggugacguggaaaaucuaacuuguuccgauggcccuucucucauuaagaccgagcuggaccuucugaaaucggccuugagggagcucaagacagucucagcugaucaacuggcacgggaggaacagaucgaaaacccagggagcggaaguuucgugcugggcgccauugcgcucgguguugcugccgcagccgcugugaccgcaggggucgccaucgcuaaaacuauacgcuuagaguccgaggugacagccaucaauaacgcgcugaagaagaccaaugaagcaguaucuacgcuuggaaacggcguucgaguguuggccacugcuguccgugagcugaaagacuuugugcuaaagaaucucaccagagccauuaacaaaaauaagugcgauaucccggaccugaaaauggcagugagcuucucccaguuuaacaggcgguuccuuaaugucguucgccaguuuucagauaacgcuggcauuacacccgccaucagucuggacuugaugacugaugcggaacucgccagagcagugccuaauaugccaaccagcgcugggcaaauaaagcugauguuagagaacagggccaugguacggcgcaagggauucgguauucugaucggcguguaugggucuuccgucauuuacauggugcagcuccccaucuuuggaguuaucgacacaccuuguuggauugugaaagcugccccaucaugcagcgaaaagaaaggcaauuaugcaugucuucugcgagaggaucaggguugguacugccagaacgccgggaguaccgucuauuaccccaacgagaaggacugugaaacgagaggagaucauguguucugcgacacugcugcgggcauaaauguagcagagcaaucuaaagaauguaacaucaauauuuccacaaccaacuacccuugcaagguuagcacuggcaggcacccaaucucgaugguggccuugucuccgcuaggggcucuggucgccuguuauaaaggaguguccugcucaauagguaguaaucgggucggcauuaucaagcagcucaacaaggggugcagcuacaucacaaaucaggacgcagauaccgugacgauugacaacaccguuuaucagcuguccaaaguggagggagaacaacauguaaucaagggccgucccgucucuagcucauuugauccuauuaaauucccagagaaucaguuucagguggcccuugaccaaguuuucgagaacauagaaaauagucaggcucugguggaucaguccaaccgcaucuugagcucugccgagaaggguaauacaggguucauuaucgucaucauucucauagcagugcugggcucaaguaugaucuuaguaagcauuuuuaucauuaucaaaaagacuaagaaacccaccggagcgccuccagaacuguccggcgugacaaacaauggguucauaccccacaacugaggacuagucccuguucccagagcccacuuuuuuuucuuuuuuugaaauaaaauagccugucuuucagaucucaaaggcucuuuucagagccaccaaaaaaaaaaaaaaaaaaaaaaaaaaaaaaaaaaaaaaaaaaaaaaaaaaaaaaaaaaaaaaaaaaaaaaaaaaaaaaaaaaaaaaaaaaaaaaaaaaaaa

SEQ ID NO: 14729 - RNA, 1892 nt, Artificial Sequence
  HMPV/TN/92-4__ABM67072.1 fusion glycoprotein mRNA human (variant)
aggagagucccgcagucggcguccagcggcucugcuuguucgugugugugucguugcaggccuuauucaagcuuaccaugagcuggaagguggucaucauuuucucccugcucauaacaccccagcacggccuuaaagagucuuaccuggaagagucaugcaguaccaucacugaaggguauuugagcguuuuaagaacgggaugguacaccaacguguuuacacugccuguaggugacguggagaaucuaacuuguuccgauggcccaucucucauuaagaccgaacuggaccuucugaaaucggccuugagggagcucaagacagucucagcugaucaacuggcacgggaggaacagaucgagaacccggggagcggaaguuucgugcugggcgccauugcgcucgguguugcugccgcagccgcugugaccgcaggggucgccaucgcuaaaacuauacgcuuagaauccgaggugacagccaucaauaacgcgcugaagaagaccaaugaggcaguaucuacgcuuggaaacggcguucgaguguuggccacugcuguccgugaacugaaagacuuugugagcaagaaucuaaccagagccauuaacaaaaauaagugcgauaucgacgaucucaaaauggcaguguccuucucacaguuuaacaggcgguuccugaaugucguucgccaguuuagugacaacgcuggcauuacacccgccaucagccuugaucugaugacugacgcggaguuggccagagcagugccuaauaugccaaccucugcugggcaaauaaagcucaugcuggaaaacagggccaugguacggcgcaagggauucgguauuuuaaucggcguguauggguccucagucauuuacauggugcagcugcccaucuuuggaguuaucgauacaccuuguuggauugugaaagcugccccaagcugcagugagaagaaaggcaauuaugcaugucuccuucgagaagaccaggguugguacugccagaacgccgggucuaccgucuauuaccccaacgagaaggauugugagacgagaggagaccauguguucugcgacacugcugcgggcauaaauguagcagaacaauccaaagaguguaacaucaauauuagcacaaccaacuacccuugcaagguuucgacuggcaggcacccaaucucuaugguggcccuguccccguugggggcucuagucgccuguuauaaaggagugucaugcaguauagguagcaaucgggucggcauuaucaagcagcugaacaaggggugcuccuacaucacaaaucaggaugcagacaccgugacgauugauaacaccguuuaucagcucucuaaaguggaaggagagcaacauguaaucaagggccgucccgucagcucaaguuuugacccuauuaaauucccagaagaucaguuucagguggcccuggaccaaguuuucgagaauauagagaacucccaggcucuuguggaucagagcaaucgcauccugucuucagccgaaaaggguaacacaggguucauuaucgucaucauuuugauagcagugcucggcaguagcaugauccugguauccauuuuuaucauuaucaaaaagacuaagaaacccaccggagcgccuccagaguuaucuggcgugacaaauaacggguucauaccccacaauugaggacuagucccuguucccagagcccacuuuuuuuucuuuuuuugaaauaaaauagccugucuuucagaucucaaaggcucuuuucagagccaccaaaaaaaaaaaaaaaaaaaaaaaaaaaaaaaaaaaaaaaaaaaaaaaaaaaaaaaaaaaaaaaaaaaaaaaaaaaaaaaaaaaaaaaaaaaaaaaaaaaaa

SEQ ID NO: 14730 - RNA, 1892 nt, Artificial Sequence
  HMPV/TN/92-4__ABM67072.1 fusion glycoprotein mRNA human (variant)
aggagagucccgcagucggcguccagcggcucugcuuguucgugugugugucguugcaggccuuauucaagcuuaccaugagcuggaagguggucaucauuuucucccugcucauaacaccccagcacggccuuaaagagucuuaccuggaagagucaugcaguaccaucacugaaggguauuugagcguuuuaagaacgggaugguacaccaacguguuuacacugccuguaggugacguggagaaucuaacuuguuccgauggcccaucucucauuaagaccgaacuggaccuucugaaaucggccuugagggagcucaagacagucucagcugaucaacuggcacgggaggaacagaucgagaacccggggagcggaaguuucgugcugggcgccauugcgcucgguguugcugccgcagccgcugugaccgcaggggucgccaucgcuaaaacuauacgcuuagaauccgaggugacagccaucaauaacgcgcugaagaagaccaaugaggcaguaucuacgcuuggaaacggcguucgaguguuggccacugcuguccgugaacugaaagacuuugugagcaagaaucuaaccagagccauuaacaaaaauaagugcgauaucgacgaucucaaaauggcaguguccuucucacaguuuaacaggcgguuccugaaugucguucgccaguuuagugacaacgcuggcauuacacccgccaucagccuugaucugaugacugacgcggaguuggccagagcagugccuaauaugccaaccucugcugggcaaauaaagcucaugcuggaaaacagggccaugguacggcgcaagggauucgguauuuuaaucggcguguauggguccucagucauuuacauggugcagcugcccaucuuuggaguuaucgauacaccuuguuggauugugaaagcugccccaagcugcagugagaagaaaggcaauuaugcaugucuccuucgagaagaccaggguugguacugccagaacgccgggucuaccgucuauuaccccaacgagaaggauugugagacgagaggagaccauguguucugcgacacugcugcgggcauaaauguagcagaacaauccaaagaguguaacaucaauauuagcacaaccaacuacccuugcaagguuucgacuggcaggcacccaaucucuaugguggcccuguccccguugggggcucuagucgccuguuauaaaggagugucaugcaguauagguagcaaucgggucggcauuaucaagcagcugaacaaggggugcuccuacaucacaaaucaggaugcagacaccgugacgauugauaacaccguuuaucagcucucuaaaguggaaggagagcaacauguaaucaagggccgucccgucagcucaaguuuugacccuauuaaauucccagaaaaucaguuucagguggcccuggaucaaguuuucgagaacauagaaaauucccaggcucuuguggaccagagcaaccgcauccugucuucagccgagaaggguaauacaggguucauuaucgucaucauuuugauagcagugcucggcaguagcaugauccugguauccauuuuuaucauuaucaaaaagacuaagaaacccaccggagcgccuccagaguuaucuggcgugacaaacaauggguucauaccccacaacugaggacuagucccuguucccagagcccacuuuuuuuucuuuuuuugaaauaaaauagccugucuuucagaucucaaaggcucuuuucagagccaccaaaaaaaaaaaaaaaaaaaaaaaaaaaaaaaaaaaaaaaaaaaaaaaaaaaaaaaaaaaaaaaaaaaaaaaaaaaaaaaaaaaaaaaaaaaaaaaaaaaaa

SEQ ID NO: 14731 - RNA, 1892 nt, Artificial Sequence
  HMPV/TN/92-4__ABM67072.1 fusion glycoprotein mRNA human (variant)
aggagagucccgcagucggcguccagcggcucugcuuguucgugugugugucguugcaggccuuauucaagcuuaccaugagcuggaagguggucaucauuuucucccugcucauaacaccccagcacggccuuaaagagucuuaccuggaagagucaugcaguaccaucacugaaggguauuugagcguuuuaagaacgggaugguacaccaacguguuuacacuggagguaggugacguggaaaaucuaacuuguuccgauggcccuucucucauuaagaccgagcuggaccuucugaaaucggccuugagggagcucaagacagucucagcugaucaacuggcacgggaggaacagaucgaaaacccagggagcggaaguuucgugcugggcgccauugcgcucgguguugcugccgcagccgcugugaccgcaggggucgccaucgcuaaaacuauacgcuuagaguccgaggugacagccaucaauaacgcgcugaagaagaccaaugaagcaguaucuacgcuuggaaacggcguucgaguguuggccacugcuguccgugagcugaaagacuuugugagcaagaaucuaaccagagccauuaacaaaaauaagugcgauaucgacgaucucaaaauggcaguguccuucucacaguuuaacaggcgguuccugaaugucguucgccaguuuagugacaacgcuggcauuacaccggccaucagccuugaucugaugacugacgcggaauuggccagagcagugcccaauaugccuaccucugcugggcaaauaaagcucaugcuggagaacagggccaugguacggcgcaagggauucgguauuuuaaucggcguguauggguccucagucauuuacauggugcagcugccaaucuuuggaguuaucgauacacccuguuggauugugaaagcugccccuagcugcagugaaaagaaaggcaauuaugcaugucuccuucgagaggaccaggguugguacugccagaacgccgggucuaccgucuauuacccaaacgagaaggauugugaaacgagaggagaccauguguucugcgacacugcugcgggcauaaauguagcagagcaauccaaagaauguaacaucaauauuagcacaaccaacuaccccugcaagguuucgacuggcaggcacccuaucucuaugguggcccuguccccauugggggcucuagucgccuguuauaaaggagugucaugcaguauagguagcaaucgggucggcauuaucaagcagcugaacaaggggugcuccuacaucacaaaucaggaugcagacaccgugacgauugauaacaccguuuaucagcucucuaaaguggagggagaacaacauguaaucaagggccguccggucagcucaaguuuugaccccauuaaauucccugaggaucaguuucagguggcccuggaccaaguuuucgagaauauagaaaacucccaggcucuuguggaucagagcaaucgcauccugucuucagccgagaaggguaacacaggguucauuaucgucaucauuuugauagcagugcucggcaguagcaugauccugguauccauuuuuaucauuaucaaaaagacuaagaaaccaaccggagcgcccccugaauuaucuggcgugacaaauaacggguucauaccacacaauugaggacuagucccuguucccagagcccacuuuuuuuucuuuuuuugaaauaaaauagccugucuuucagaucucaaaggcucuuuucagagccaccaaaaaaaaaaaaaaaaaaaaaaaaaaaaaaaaaaaaaaaaaaaaaaaaaaaaaaaaaaaaaaaaaaaaaaaaaaaaaaaaaaaaaaaaaaaaaaaaaaaaa

SEQ ID NO: 14732 - RNA, 1892 nt, Artificial Sequence
  HMPV/TN/92-4__ABM67072.1 fusion glycoprotein mRNA human (variant)
aggagagucccgcagucggcguccagcggcucugcuuguucgugugugugucguugcaggccuuauucaagcuuaccaugagcuggaagguggucaucauuuucucccugcucauaacaccccagcacggccuuaaagagucuuaccuggaagagucaugcaguaccaucacugaaggguauuugagcguuuuaagaacgggaugguacaccaacguguuuacacuggagguaggugaccuagaaaaucucacuuguuccgauggcccuucucugauuaagaccgagcuugaccugacaaaaucggccuugagggagcucaagaccgugucagcugaucaacuggcacgggaggaacagaucgaaaacccagggagcggaaguuucguccugggcgccauugcgcucgguguggcugccgcagccgcuguuacugcagggguggccaucgcuaaaacaauacgcuuagaguccgaggucaccgccaucaauaacgcgcugaagaagacgaaugaagcagugucuacucuuggaaacggcguacgaguuuuggccaccgcugugcgugagcugaaagacuuugucagcaagaaucuaacaagagccauuaacaaaaauaagugcgauaucgacgaucucaaaauggcaguguccuucucacaguuuaacaggcgguuccugaaugugguccgccaguuuagugacaacgcuggcauuacuccggccaucagccuugaucugaugaccgacgcggaauuggccagagcaguucccaauaugccuacaucugcugggcaaauaaagcucaugcuggagaacagggccauggugcggcgcaagggauucgguauuuuaaucggcguauauggguccucagugauuuacaugguccagcugccaaucuuuggagugaucgauacccccuguuggauuguuaaagcugccccuagcugcagugaaaagaaaggcaauuaugcaugucuccuucgagaggaccaggguugguacugccagaacgccgggucuacgguguauuacccaaacgagaaggauugugaaacuagaggagaccaugucuucugcgacacagcugcgggcauaaauguggcagagcaauccaaagaauguaacaucaauauuagcaccacuaacuaccccugcaagguaucgacaggcaggcacccuaucucuaugguugcccuguccccauugggggcucuaguggccuguuauaaaggagucucaugcaguauagguagcaaucgggugggcauuaucaagcagcugaacaaggggugcuccuacaucaccaaucaggaugcagacacggucaccauugauaacacaguguaucagcucucuaaaguugagggagaacaacaugugaucaagggccguccgguaagcucaaguuuugaccccauuaaauucccugaggaucaguuucaggucgcccuggaccaaguguucgagaauauagaaaacucccaggcucuuguugaucagagcaaucgcauccugucuucagccgagaaggguaacacuggguucauuaucgugaucauuuugauagcaguccucggcaguagcaugauccugguguccauuuuuaucauuaucaaaaagaccaagaaaccaacaggagcgcccccugaauuaucuggcguaacuaauaacggguucauaccacacaauugaggacuagucccuguucccagagcccacuuuuuuuucuuuuuuugaaauaaaauagccugucuuucagaucucaaaggcucuuuucagagccaccaaaaaaaaaaaaaaaaaaaaaaaaaaaaaaaaaaaaaaaaaaaaaaaaaaaaaaaaaaaaaaaaaaaaaaaaaaaaaaaaaaaaaaaaaaaaaaaaaaaaa

SEQ ID NO: 14733 - RNA, 1892 nt, Artificial Sequence
  HMPV/TN/92-4__ABM67072.1 fusion glycoprotein mRNA human (variant)
aggagagucccgcagucggcguccagcggcucugcuuguucgugugugugucguugcaggccuuauucaagcuuaccaugagcuggaagguggucaucauuuucucccugcucauaacaccccagcacggccuuaaagagucuuaccuggaagagucaugcaguaccaucacugaaggguauuugagcguuuuaagaacgggaugguacaccaacguguuuacacuggagguaggugacguggaaaaucuaacuuguuccgauggcccuucucucauuaagaccgagcuggaccuuacaaaaucggcccugagggaguugaagaccgucucagcugaucaacucgcacgggaggaacagaucgaaaacccagggagcggaaguuucgugcugggcgccauugcgcuggguguugcugccgcagccgcugugacugcaggggucgccaucgcuaaaacaauacgccucgaguccgaggugaccgccaucaauaacgcguuaaagaagacgaaugaagcaguaucuacucugggaaacggcguucgagugcuugccaccgcuguccgugaguugaaagacuuugugcugaagaaucuaacaagagccauuaacaaaaauaagugcgauaucgacgaucucaaaauggcagugagcuucucccaguuuaacaggcgguuccugaaugucguucgccaguuuucagacaacgcuggcauuacuccggccaucagucuugaucugaugaccgacgcggaauuggccagagcagugcccaauaugccuacaagcgcugggcaaauaaagcucaugcuggagaacagggccaugguacggcgcaagggauucgguauuuuaaucggcguguaugggucuuccgucauuuacauggugcagcugccaaucuuuggaguuaucgauacccccuguuggauugugaaagcugccccuucaugcagcgaaaagaaaggcaauuaugcaugucuccuucgagaggaccaggguugguacugccagaacgccgggaguacggucuauuacccaaacgagaaggauugugaaacuagaggagaccauguguucugcgacacagcugcgggcauaaauguagcagagcaaucuaaagaauguaacaucaauauuuccaccacuaacuaccccugcaagguuagcacaggcaggcacccuaucucgaugguggcccugucuccauugggggcucuagucgccuguuauaaaggaguguccugcucaauagguaguaaucgggucggcauuaucaagcagcugaacaaggggugcagcuacaucaccaaucaggaugcagacacggugaccauugauaacacaguuuaucagcucuccaaaguggagggagaacaacauguaaucaagggccguccggucucuagcucauuugaccccauuaaauucccugaggaucaguuucagguggcccuggaccaaguuuucgagaauauagaaaacagucaggcucuuguggaucaguccaaucgcauccugagcucugccgagaaggguaacacuggguucauuaucgucaucauuuugauagcagugcucggcucaaguaugauccugguaagcauuuuuaucauuaucaaaaagaccaagaaaccaacaggagcgcccccugaauuauccggcgugacuaauaacggguucauaccacacaauugaggacuagucccuguucccagagcccacuuuuuuuucuuuuuuugaaauaaaauagccugucuuucagaucucaaaggcucuuuucagagccaccaaaaaaaaaaaaaaaaaaaaaaaaaaaaaaaaaaaaaaaaaaaaaaaaaaaaaaaaaaaaaaaaaaaaaaaaaaaaaaaaaaaaaaaaaaaaaaaaaaaaa

SEQ ID NO: 14734 - RNA, 1892 nt, Artificial Sequence
  HMPV/TN/92-4__ABM67072.1 fusion glycoprotein mRNA human (variant)
aggagagucccgcagucggcguccagcggcucugcuuguucgugugugugucguugcaggccuuauucaagcuuaccaugagcuggaagguggucaucauuuucucccugcucauaacaccccagcacggccuuaaagagucuuaccuggaagagucaugcaguaccaucacugaaggguauuugagcguuuuaagaacgggaugguacaccaacguguuuacacuggagguaggugacguggaaaaucuaacuuguuccgauggcccuucucucauuaagaccgagcuggaccuuacaaaaucggcccugagggaguugaagaccgucucagcugaucaacucgcacgggaggaacagaucgaaaacccagggagcggaaguuucgugcugggcgccauugcgcuggguguugcugccgcagccgcugugacugcaggggucgccaucgcuaaaacaauacgccucgaguccgaggugaccgccaucaauaacgcguuaaagaagacgaaugaagcaguaucuacucugggaaacggcguucgagugcuugccaccgcuguccgugaguugaaagacuuugugagcaagaaucuguggagagccauuaacaaaaauaagugcgauaucgacgaucuaaaaauggcaguguccuucucacaguuuaacaggcgguuccucaaugucguucgccaguuuagugacaacgcuggcauuacaccggccaucagccuggaucuuaugacugacgcggaacuggccagagcagugcccaauaugccuaccucugcugggcaaauaaaguugaugcucgagaacagggccaugguacggcgcaagggauucgguauucugaucggcguguauggguccucagucauuuacauggugcaguuaccaaucuuuggaguuaucgauacacccuguuggauugugaaagcugccccuagcugcagugaaaagaaaggcaauuaugcaugucugcuccgagaggaccaggguugguacugccagaacgccgggucuaccgucuauuacccaaacgagaaggauugugaaacgagaggagaccauguguucugcgacacugcugcgggcauaaauguagcagagcaauccaaagaauguaacaucaauauuagcacaaccaacuaccccugcaagguuucgacuggcaggcacccuaucucuaugguggcccuuuccccacugggggcuuuggucgccuguuauaaaggagugucaugcaguauagguagcaaucgggucggcauuaucaagcagcuaaacaaggggugcuccuacaucacaaaucaggaugcagacaccgugacgauugauaacaccguuuaucagcugucuaaaguggagggagaacaacauguaaucaagggccguccggucagcucaaguuuugaccccauuaaauucccugaggaucaguuucagguggcccucgaccaaguuuucgagaauauagaaaacucccaggcucugguggaucagagcaaucgcauccuuucuucagccgagaaggguaacacaggguucauuaucgucaucauucugauagcaguguugggcaguagcaugauccucguauccauuuuuaucauuaucaaaaagacuaagaaaccaaccggagcgcccccugaacugucuggcgugacaaauaacggguucauaccacacaauugaggacuagucccuguucccagagcccacuuuuuuuucuuuuuuugaaauaaaauagccugucuuucagaucucaaaggcucuuuucagagccaccaaaaaaaaaaaaaaaaaaaaaaaaaaaaaaaaaaaaaaaaaaaaaaaaaaaaaaaaaaaaaaaaaaaaaaaaaaaaaaaaaaaaaaaaaaaaaaaaaaaaa

SEQ ID NO: 14735 - RNA, 1892 nt, Artificial Sequence
  HMPV/TN/92-4__ABM67072.1 fusion glycoprotein mRNA human (variant)
aggagagucccgcagucggcguccagcggcucugcuuguucgugugugugucguugcaggccuuauucaagcuuaccaugagcuggaagguggucaucauuuucucccugcucauaacaccccagcacggccuuaaagagucuuaccuggaagagucaugcaguaccaucacugaaggguauuugagcguuuuaagaacgggaugguacaccaacguguuuacacuggagguaggugaccuagaaaaucucacuuguuccgauggcccuucucugauuaagaccgagcuugaccuguugaaaucggcccucagggagcugaagacagugucagcugaucaacuggcacgggaggaacagaucgaaaacccagggagcggaaguuucguccucggcgccauugcguuagguguggcugccgcagccgcuguuaccgcagggguggccaucgcuaaaacuauacgccuggaguccgaggucacagccaucaauaacgcgcuuaagaagaccaaugaagcagugucuacguugggaaacggcguacgaguucuggccacugcugugcgugagcuaaaagacuuuguccucaagaaucuguggagagccauuaacaaaaauaagugcgauaucgacgaucuuaaaauggcagugagcuucucccaguuuaacaggcgguuccugaaugugguccgccaguuuucagacaacgcuggcauuaccccggccaucaguuuggaucucaugacagacgcggaacuggccagagcaguucccaauaugccuacuagcgcugggcaaauaaaguuaaugcuggagaacagggccauggugcggcgcaagggauucgguauucucaucggcguauaugggucuuccgugauuuacaugguccagcuuccaaucuuuggagugaucgauacccccuguuggauuguuaaagcugccccuucaugcagcgaaaagaaaggcaauuaugcaugucuguugcgagaggaccaggguugguacugccagaacgccgggaguacaguguauuacccaaacgagaaggauugugaaaccagaggagaccaugucuucugcgacacggcugcgggcauaaauguggcagagcaaucuaaagaauguaacaucaauauuuccacuacaaacuaccccugcaagguaagcaccggcaggcacccuaucucgaugguugcccuaucuccacugggggcucucguggccuguuauaaaggagucuccugcucaauagguaguaaucgggugggcauuaucaagcagcugaacaaggggugcagcuacaucacuaaucaggaugcagacacagucaccauugauaacacgguguaucagcuuuccaaaguugagggagaacaacaugugaucaagggccguccgguaucuagcucauuugaccccauuaaauucccugaggaucaguuucaggucgcccuggaccaaguguucgagaauauagaaaacagucaggcuuugguugaucaguccaaucgcauccucagcucugccgagaaggguaacaccggguucauuaucgugaucauucugauagcagucuuaggcucaaguaugauccuggugagcauuuuuaucauuaucaaaaagacaaagaaaccaacuggagcgcccccugaacuauccggcguaaccaauaacggguucauaccacacaauugaggacuagucccuguucccagagcccacuuuuuuuucuuuuuuugaaauaaaauagccugucuuucagaucucaaaggcucuuuucagagccaccaaaaaaaaaaaaaaaaaaaaaaaaaaaaaaaaaaaaaaaaaaaaaaaaaaaaaaaaaaaaaaaaaaaaaaaaaaaaaaaaaaaaaaaaaaaaaaaaaaaaa

SEQ ID NO: 14736 - RNA, 1892 nt, Artificial Sequence
  HMPV/TN/92-4__ABM67072.1 fusion glycoprotein mRNA human (variant)
aggagagucccgcagucggcguccagcggcucugcuuguucgugugugugucguugcaggccuuauucaagcuuaccaugagcuggaagguggucaucauuuucucccugcucauaacaccccagcacggccuuaaagagucuuaccuggaagagucaugcaguaccaucacugaaggguauuugagcguuuuaagaacgggaugguacaccaacguguuuacacugccuguaggugacguggagaaucuaacuuguuccgauggcccaucucucauuaagaccgaacuggaccuuacaaaaucggcccugagggaguugaagaccgucucagcugaucaacucgcacgggaggaacagaucgagaacccggggagcggaaguuucgugcugggcgccauugcgcuggguguugcugccgcagccgcugugacugcaggggucgccaucgcuaaaacaauacgccucgaauccgaggugaccgccaucaauaacgcguuaaagaagacgaaugaggcaguaucuacucugggaaacggcguucgagugcuugccaccgcuguccgugaauugaaagacuuugugagcaagaaucugacaagagccauuaacaaaaauaagugcgauaucgacgaucuaaaaauggcaguguccuucucacaguuuaacaggcgguuccucaaugucguucgccaguuuagugacaacgcuggcauuacucccgccaucagccuggaucuuaugaccgacgcggagcuggccagagcagugccuaauaugccaacaucugcugggcaaauaaaguugaugcucgaaaacagggccaugguacggcgcaagggauucgguauucugaucggcguguauggguccucagucauuuacauggugcaguuacccaucuuuggaguuaucgauaccccuuguuggauugugaaagcugccccaagcugcagugagaagaaaggcaauuaugcaugucugcuccgagaagaccaggguugguacugccagaacgccgggucuacggucuauuaccccaacgagaaggauugugagacuagaggagaccauguguucugcgacacagcugcgggcauaaauguagcagaacaauccaaagaguguaacaucaauauuagcaccacuaacuacccuugcaagguuucgacaggcaggcacccaaucucuaugguggcccuuuccccgcugggggcuuuggucgccuguuauaaaggagugucaugcaguauagguagcaaucgggucggcauuaucaagcagcuaaacaaggggugcuccuacaucaccaaucaggaugcagacacggugaccauugauaacacaguuuaucagcugucuaaaguggaaggagagcaacauguaaucaagggccgucccgucagcucaaguuuugacccuauuaaauucccagaagaucaguuucagguggcccucgaccaaguuuucgagaauauagagaacucccaggcucugguggaucagagcaaucgcauccuuucuucagccgaaaaggguaacacuggguucauuaucgucaucauucugauagcaguguugggcaguagcaugauccucguauccauuuuuaucauuaucaaaaagaccaagaaacccacaggagcgccuccagagcugucuggcgugacuaauaacggguucauaccccacaauugaggacuagucccuguucccagagcccacuuuuuuuucuuuuuuugaaauaaaauagccugucuuucagaucucaaaggcucuuuucagagccaccaaaaaaaaaaaaaaaaaaaaaaaaaaaaaaaaaaaaaaaaaaaaaaaaaaaaaaaaaaaaaaaaaaaaaaaaaaaaaaaaaaaaaaaaaaaaaaaaaaaaa

SEQ ID NO: 14737 - RNA, 1892 nt, Artificial Sequence
  HMPV/TN/92-4__ABM67072.1 fusion glycoprotein mRNA human (variant)
aggagagucccgcagucggcguccagcggcucugcuuguucgugugugugucguugcaggccuuauucaagcuuaccaugagcuggaagguggucaucauuuucucccugcucauaacaccccagcacggccuuaaagagucuuaccuggaagagucaugcaguaccaucacugaaggguauuugagcguuuuaagaacgggaugguacaccaacguguuuacacuggagguaggugacguggaaaaucuaacuuguuccgauggcccuucucucauuaagaccgagcuggaccuuacaaaaucggcccugagggaguugaagaccgucucagcugaucaacucgcacgggaggaacagaucgaaaacccagggagcggaaguuucgugcugggcgccauugcgcuggguguugcugccgcagccgcugugacugcaggggucgccaucgcuaaaacaauacgccucgaguccgaggugaccgccaucaauaacgcguuaaagaagacgaaugaagcaguaucuacucugggaaacggcguucgagugcuugccaccgcuguccgugaguugaaagacuuugugagcaagaaucugacaagagccauuaacaaaaauaagugcgauaucccggaccuaaaaauggcaguguccuucucacaguuuaacaggcgguuccucaaugucguucgccaguuuagugauaacgcuggcauuacucccgccaucagccuggaccuuaugaccgaugcggaacuggccagagcagugccuaauaugccaacaucugcugggcaaauaaaguugaugcucgagaacagggccaugguacggcgcaagggauucgguauucugaucggcguguauggguccucagucauuuacauggugcaguuacccaucuuuggaguuaucgacaccccuuguuggauugugaaagcugccccaagcugcagugaaaagaaaggcaauuaugcaugucugcuccgagaggaucaggguugguacugccagaacgccgggucuacggucuauuaccccaacgagaaggacugugaaacuagaggagaucauguguucugcgacacagcugcgggcauaaauguagcagagcaauccaaagaauguaacaucaauauuagcaccacuaacuacccuugcaagguuucgacaggcaggcacccaaucucuaugguggcccuuuccccgcugggggcuuuggucgccuguuauaaaggagugucaugcaguauagguagcaaucgggucggcauuaucaagcagcuaaacaaggggugcuccuacaucaccaaucaggacgcagauacggugaccauugacaacacaguuuaucagcugucuaaaguggagggagaacaacauguaaucaagggccgucccgucagcucaaguuuugauccuauuaaauucccagaggaccaguuucagguggcccucgaucaaguuuucgagaauauagaaaacucccaggcucugguggaccagagcaaucgcauccuuucuucagccgagaaggguaacacuggguucauuaucgucaucauucugauagcaguguugggcaguagcaugauccucguauccauuuuuaucauuaucaaaaagaccaagaaacccacaggagcgccuccagaacugucuggcgugacuaauaacggguucauaccccacaauugaggacuagucccuguucccagagcccacuuuuuuuucuuuuuuugaaauaaaauagccugucuuucagaucucaaaggcucuuuucagagccaccaaaaaaaaaaaaaaaaaaaaaaaaaaaaaaaaaaaaaaaaaaaaaaaaaaaaaaaaaaaaaaaaaaaaaaaaaaaaaaaaaaaaaaaaaaaaaaaaaaaaa

SEQ ID NO: 14738 - RNA, 1892 nt, Artificial Sequence
  HMPV/TN/92-4__ABM67072.1 fusion glycoprotein mRNA human (variant)
aggagagucccgcagucggcguccagcggcucugcuuguucgugugugugucguugcaggccuuauucaagcuuaccaugagcuggaagguggucaucauuuucucccugcucauaacaccccagcacggccuuaaagagucuuaccuggaagagucaugcaguaccaucacugaaggguauuugagcguuuuaagaacgggaugguacaccaacguguuuacacuggagguaggugacguggaaaaucuaacuuguuccgauggcccuucucucauuaagaccgagcuggaccuuacaaaaucggcccugagggaguugaagaccgucucagcugaucaacucgcacgggaggaacagaucgaaaacccagggagcggaaguuucgugcugggcgccauugcgcuggguguugcugccgcagccgcugugacugcaggggucgccaucgcuaaaacaauacgccucgaguccgaggugaccgccaucaauaacgcguuaaagaagacgaaugaagcaguaucuacucugggaaacggcguucgagugcuugccaccgcuguccgugaguugaaagacuuugugagcaagaaucugacaagagccauuaacaaaaauaagugcccgaucgaugaccuaaaaauggcaguguccuucucacaguuuaacaggcgguuccucaaugucguucgccaguuuagugauaacgcuggcauuacucccgccaucagccuggaccuuaugaccgaugcggaacuggccagagcagugccuaauaugccaacaucugcugggcaaauaaaguugaugcucgagaacagggccaugguacggcgcaagggauucgguauucugaucggcguguauggguccucagucauuuacauggugcaguuacccaucuuuggaguuaucgacaccccuuguuggauugugaaagcugccccaagcugcagugaaaagaaaggcaauuaugcaugucugcuccgagaggaucaggguugguacugccagaacgccgggucuacggucuauuaccccaacgagaaggacugugaaacuagaggagaucauguguucugcgacacagcugcgggcauaaauguagcagagcaauccaaagaauguaacaucaauauuagcaccacuaacuacccuugcaagguuucgacaggcaggcacccaaucucuaugguggcccuuuccccgcugggggcuuuggucgccuguuauaaaggagugucaugcaguauagguagcaaucgggucggcauuaucaagcagcuaaacaaggggugcuccuacaucaccaaucaggacgcagauacggugaccauugacaacacaguuuaucagcugucuaaaguggagggagaacaacauguaaucaagggccgucccgucagcucaaguuuugauccuauuaaauucccagaggaccaguuucagguggcccucgaucaaguuuucgagaauauagaaaacucccaggcucugguggaccagagcaaucgcauccuuucuucagccgagaaggguaacacuggguucauuaucgucaucauucugauagcaguguugggcaguagcaugauccucguauccauuuuuaucauuaucaaaaagaccaagaaacccacaggagcgccuccagaacugucuggcgugacuaauaacggguucauaccccacaauugaggacuagucccuguucccagagcccacuuuuuuuucuuuuuuugaaauaaaauagccugucuuucagaucucaaaggcucuuuucagagccaccaaaaaaaaaaaaaaaaaaaaaaaaaaaaaaaaaaaaaaaaaaaaaaaaaaaaaaaaaaaaaaaaaaaaaaaaaaaaaaaaaaaaaaaaaaaaaaaaaaaaa

SEQ ID NO: 14739 - RNA, 1892 nt, Artificial Sequence
  HMPV/TN/92-4__ABM67072.1 fusion glycoprotein mRNA human (variant)
aggagagucccgcagucggcguccagcggcucugcuuguucgugugugugucguugcaggccuuauucaagcuuaccaugagcuggaagguggucaucauuuucucccugcucauaacaccccagcacggccuuaaagagucuuaccuggaagagucaugcaguaccaucacugaaggguauuugagcguuuuaagaacgggaugguacaccaacguguuuacacuggagguaggugacguggaaaaucuaacuuguuccgauggcccuucucucauuaagaccgagcuggaccuuacaaaaucggcccugagggaguugaagaccgucucagcugaucaacucgcacgggaggaacagaucgaaaacccagggagcggaaguuucgugcugggcgccauugcgcuggguguugcugccgcagccgcugugacugcaggggucgccaucgcuaaaacaauacgccucccguccgaggugaccgccaucaauaacgcguuaaagaagacgaaugaggcaguaucuacucugggaaacggcguucgagugcuugccaccgcuguccgugaauugaaagacuuugugagcaagaaucugacaagagccauuaacaaaaauaagugcgauaucgacgaucuaaaaauggcaguguccuucucacaguuuaacaggcgguuccucaaugucguucgccaguuuagugacaacgcuggcauuacucccgccaucagccuggaucuuaugaccgacgcggagcuggccagagcagugccuaauaugccaacaucugcugggcaaauaaaguugaugcucgaaaacagggccaugguacggcgcaagggauucgguauucugaucggcguguauggguccucagucauuuacauggugcaguuacccaucuuuggaguuaucgauaccccuuguuggauugugaaagcugccccaagcugcagugagaagaaaggcaauuaugcaugucugcuccgagaagaccaggguugguacugccagaacgccgggucuacggucuauuaccccaacgagaaggauugugagacuagaggagaccauguguucugcgacacagcugcgggcauaaauguagcagaacaauccaaagaguguaacaucaauauuagcaccacuaacuacccuugcaagguuucgacaggcaggcacccaaucucuaugguggcccuuuccccgcugggggcuuuggucgccuguuauaaaggagugucaugcaguauagguagcaaucgggucggcauuaucaagcagcuaaacaaggggugcuccuacaucaccaaucaggaugcagacacggugaccauugauaacacaguuuaucagcugucuaaaguggaaggagagcaacauguaaucaagggccgucccgucagcucaaguuuugacccuauuaaauucccagaagaucaguuucagguggcccucgaccaaguuuucgagaauauagagaacucccaggcucugguggaucagagcaaucgcauccuuucuucagccgaaaaggguaacacuggguucauuaucgucaucauucugauagcaguguugggcaguagcaugauccucguauccauuuuuaucauuaucaaaaagaccaagaaacccacaggagcgccuccagagcugucuggcgugacuaauaacggguucauaccccacaauugaggacuagucccuguucccagagcccacuuuuuuuucuuuuuuugaaauaaaauagccugucuuucagaucucaaaggcucuuuucagagccaccaaaaaaaaaaaaaaaaaaaaaaaaaaaaaaaaaaaaaaaaaaaaaaaaaaaaaaaaaaaaaaaaaaaaaaaaaaaaaaaaaaaaaaaaaaaaaaaaaaaaa

SEQ ID NO: 14740 - RNA, 1892 nt, Artificial Sequence
  HMPV/TN/92-4__ABM67072.1 fusion glycoprotein mRNA human (variant)
aggagagucccgcagucggcguccagcggcucugcuuguucgugugugugucguugcaggccuuauucaagcuuaccaugagcuggaagguggucaucauuuucucccugcucauaacaccccagcacggccuuaaagagucuuaccuggaagagucaugcaguaccaucacugaaggguauuugagcguuuuaagaacgggaugguacaccaacguguuuacacuggagguaggugacguggaaaaucuaacuuguuccgauggcccuucucucauuaagaccgagcuggaccuuacaaaaucggcccugagggaguugaagaccgucucagcugaucaacucgcacgggaggaacagaucgaaaacccagggagcggaaguuucgugcugggcgccauugcgcuggguguugcugccgcagccgcugugacugcaggggucgccaucgcuaaaacaauacgccucgaguccgaggugaccgccaucaauaacgcguuaaagaagacgaaugaagcaguaucuacucugggaaacggcguucgagugcuugccaccgcuguccgugaguugaaagacuuugugagcaagaaucugacaagagccauuaacaaaaauaagugcgauaucgacgaucuaaaaauggcaguguccuucucacaguuuaacaggcgguuccucaaugucguucgccaguuuagugacaacgcuggcauuacuccggccaucagccuggaucuuaugaccgacgcggaacuggccagagcagugcccaauaugccuacaucugcugggcaaauaaaguugaugcucgagaacagggccaugguacggcgcaagggauucgguauucugaucggcguguauggguccucagucauuuacauggugcaguuaccaaucuuuggaguuaucgauacccccuguuggauugugaaagcugccccuagcugcagugaaaagaaaggcaauuaugcaugucugcuccgagaggaccaggguugguacugccagaacgccgggucuacggucuauuacccaaacgagaaggauugugaaacuagaggagaccauguguucugcgacacagcugcgggcauaaauguagcagagcaauccaaagaauguaacaucaauauuagcaccacuaacuaccccugcaagguuucgacaggcaggcacccuaucucuaugguggcccuuuccccacugggggcuuuggucgccuguuauaaaggagugucaugcaguauagguagcaaucgggucggcauuaucaagcagcuaaacaaggggugcuccuacaucaccaaucaggaugcagacacggugaccauugauaacacaguuuaucagcugucuaaaguggagggagaacaacauguaaucaagggccguccggucagcucaaguuuucccccuauuaaauucccagaggaccaguuucagguggcccucgaucaaguuuucgagaauauagaaaacucccaggcucugguggaccagagcaaucgcauccuuucuucagccgagaaggguaacacuggguucauuaucgucaucauucugauagcaguguugggcaguagcaugauccucguauccauuuuuaucauuaucaaaaagaccaagaaacccacaggagcgccuccagaacugucuggcgugacuaauaacggguucauaccccacaauugaggacuagucccuguucccagagcccacuuuuuuuucuuuuuuugaaauaaaauagccugucuuucagaucucaaaggcucuuuucagagccaccaaaaaaaaaaaaaaaaaaaaaaaaaaaaaaaaaaaaaaaaaaaaaaaaaaaaaaaaaaaaaaaaaaaaaaaaaaaaaaaaaaaaaaaaaaaaaaaaaaaaa

SEQ ID NO: 14741 - RNA, 1892 nt, Artificial Sequence
  HMPV/TN/92-4__ABM67072.1 fusion glycoprotein mRNA human (variant)
aggagagucccgcagucggcguccagcggcucugcuuguucgugugugugucguugcaggccuuauucaagcuuaccaugagcuggaagguggucaucauuuucucccugcucauaacaccccagcacggccuuaaagagucuuaccuggaagagucaugcaguaccaucacugaaggguauuugagcguuuuaagaacgggaugguacaccaacguguuuacacuggagguaggugacguggaaaaucuaacuuguuccgauggcccuucucucauuaagaccgagcuggaccuuacaaaaucggcccugagggaguugaagaccgucucagcugaucaacucgcacgggaggaacagaucgaaaacccagggagcggaaguuucgugcugggcgccauugcgcuggguguugcugccgcagccgcugugacugcaggggucgccaucgcuaaaacaauacgccucgaguccgaggugaccgccaucaauaacgcguuaaagaagacgaaugaagcaguaucuacucugggaaacggcguucgagugcuugccaccgcuguccgugaguugaaagacuuugugagcaagaaucugacaagagccauuaacaaaaauaagugcgauaucgacgaucuaaaaauggcaguguccuucucacaguuuaacaggcgguuccucaaugucguucgccaguuuagugacaacgcuggcauuacuccggccaucagccuggaucuuaugaccgacgcggaacuggccagagcagugcccaauaugccuacaucugcugggcaaauaaaguugaugcucgagaacagggccaugguacggcgcaagggauucgguauucugaucggcguguauggguccucagucauuuacauggugcaguuaccaaucuuuggaguuaucgauacccccuguuggauugugaaagcugccccuagcugcagugaaaagaaaggcaauuaugcaugucugcuccgagaggaccaggguugguacugccagaacgccgggucuacggucuauuacccaaacgagaaggauugugaaacuagaggagaccauguguucugcgacacagcugcgggcauaaauguagcagagcaauccaaagaauguaacaucaauauuagcaccacuaacuaccccugcaagguuucgacaggcaggcacccuaucucuaugguggcccuuuccccacugggggcuuuggucgccuguuauaaaggagugucaugcaguauagguagcaaucgggucggcauuaucaagcagcuaaacaaggggugcuccuacaucaccaaucaggaugcagacacggugaccauugauaacacaguuuaucagcugucuaaaguggagggagaacaacauguaaucaagggccguccggucagcucaaguuuugaccccauuaaauucccugagaaucaguuucagguggcccucgaucaaguuuucgagaacauagaaaauucccaggcucugguggaccagagcaaccgcauccuuucuucagccgagaaggguaauacuggguucauuaucgucaucauucugauagcaguguugggcaguagcaugauccucguauccauuuuuaucauuaucaaaaagaccaagaaaccaacaggagcgcccccugaacugucuggcgugacuaacaauggguucauaccacacaacugaggacuagucccuguucccagagcccacuuuuuuuucuuuuuuugaaauaaaauagccugucuuucagaucucaaaggcucuuuucagagccaccaaaaaaaaaaaaaaaaaaaaaaaaaaaaaaaaaaaaaaaaaaaaaaaaaaaaaaaaaaaaaaaaaaaaaaaaaaaaaaaaaaaaaaaaaaaaaaaaaaaaa

SEQ ID NO: 14742 - RNA, 1892 nt, Artificial Sequence
  HMPV/TN/92-4__ABM67072.1 fusion glycoprotein mRNA human (variant)
aggagagucccgcagucggcguccagcggcucugcuuguucgugugugugucguugcaggccuuauucaagcuuaccaugagcuggaagguggucaucauuuucucccugcucauaacaccccagcacggccuuaaagagucuuaccuggaagagucaugcaguaccaucacugaaggguauuugagcguuuuaagaacgggaugguacaccaacguguuuacacuggagguaggugacguggaaaaucuaacuuguuccgauggcccuucucucauuaagaccgagcuggaccuuacaaaaucggcccugagggaguugaagaccgucucagcugaucaacucgcacgggaggaacagaucgaaaacccagggagcggaaguuucgugcugggcgccauugcgcuggguguugcugccgcagccgcugugacugcaggggucgccaucgcuaaaacaauacgccucgaguccgaggugaccgccaucaauaacgcguuaaagaagacgaaugaagcaguaucuacucugggaaacggcguucgagugcuugccaccgcuguccgugaguugaaagacuuugugagcaagaaucugacaagagccauuaacaaaaauaagugcgauaucgacgaucuaaaaauggcaguguccuucucacaguuuaacaggcgguuccucaaugucguucgccaguuuagugacaacgcuggcauuacuccggccaucagccuggaucuuaugaccgacgcggaacuggccagagcagugcccaauaugccuacaucugcugggcaaauaaaguugaugcucgagaacagggccaugguacggcgcaagggauucgguauucugaucggcguguauggguccucagucauuuacauggugcaguuaccaaucuuuggaguuaucgauacccccuguuggauugugaaagcugccccuagcugcagugaaaagaaaggcaauuaugcaugucugcuccgagaggaccaggguugguacugccagaacgccgggucuacggucuauuacccaaacgagaaggauugugaaacuagaggagaccauguguucugcgacacagcugcgggcauaaauguagcagagcaauccaaagaauguaacaucaauauuagcaccacuaacuaccccugcaagguuucgacaggcaggcacccuaucucuaugguggcccuuuccccacugggggcuuuggucgccuguuauaaaggagugucaugcaguauagguagcaaucgggucggcauuaucaagcagcuaaacaaggggugcuccuacaucaccaaucaggaugcagacacggugaccauugauaacacaguuuaucagcugucuaaaguggagggagaacaacauguaaucaagggccguccggucagcucaaguuuugaccccauuaaauucccucaggaucaguuucaaguggcccucgaccagguuuucgagaauauagagaacucccaggcucugguggaucagagcaaucgcauccuuucuucagccgaaaaggguaacacuggguucauuaucgucaucauucugauagcaguguugggcaguagcaugauccucguauccauuuuuaucauuaucaaaaagaccaagaaaccaacaggagcgcccccugagcugucuggcgugacuaauaacggguucauaccacacaauugaggacuagucccuguucccagagcccacuuuuuuuucuuuuuuugaaauaaaauagccugucuuucagaucucaaaggcucuuuucagagccaccaaaaaaaaaaaaaaaaaaaaaaaaaaaaaaaaaaaaaaaaaaaaaaaaaaaaaaaaaaaaaaaaaaaaaaaaaaaaaaaaaaaaaaaaaaaaaaaaaaaaa

SEQ ID NO: 14743 - RNA, 1892 nt, Artificial Sequence
  HMPV/TN/92-4__ABM67072.1 fusion glycoprotein mRNA human (variant)
aggagagucccgcagucggcguccagcggcucugcuuguucgugugugugucguugcaggccuuauucaagcuuaccaugagcuggaagguggucaucauuuucucccugcucauaacaccccagcacggccuuaaagagucuuaccuggaagagucaugcaguaccaucacugaaggguauuugagcguuuuaagaacgggaugguacaccaacguguuuacacuggagguaggugacguggaaaaucuaacuuguuccgauggcccuucucucauuaagaccgagcuggaccuuacaaaaucggcccugagggaguugaagaccgucucagcugaucaacucgcacgggaggaacagaucgaaaacccagggagcggaaguuucgugcugggcgccauugcgcuggguguugcugccgcagccgcugugacugcaggggucgccaucgcuaaaacaauacgccucgaguccgaggugaccgccaucaauaacgcguuaaagaagacgaaugaagcaguaucuacucugggaaacggcguucgagugcuugccaccgcuguccgugaguugaaagacuuugugagcaagaaucugacaagagccauuaacaaaaauaagugcgauaucgacgaucuaaaaauggcaguguccuucucacaguggaacaggcgguuucucaaugucguucgccaguucagugacaacgcuggcauuacuccggccaucagccuggaucuuaugaccgacgcggaacuggccagagcagugcccaauaugccuacaucugcugggcaaauaaaguugaugcucgagaacagggccaugguacggcgcaagggauuugguauucugaucggcguguauggguccucagucauuuacauggugcaguuaccaaucuucggaguuaucgauacccccuguuggauugugaaagcugccccuagcugcagugaaaagaaaggcaauuaugcaugucugcuccgagaggaccaggguugguacugccagaacgccgggucuacggucuauuacccaaacgagaaggauugugaaacuagaggagaccauguguuuugcgacacagcugcgggcauaaauguagcagagcaauccaaagaauguaacaucaauauuagcaccacuaacuaccccugcaagguuucgacaggcaggcacccuaucucuaugguggcccuuuccccacugggggcuuuggucgccuguuauaaaggagugucaugcaguauagguagcaaucgggucggcauuaucaagcagcuaaacaaggggugcuccuacaucaccaaucaggaugcagacacggugaccauugauaacacaguuuaucagcugucuaaaguggagggagaacaacauguaaucaagggccguccggucagcucaaguuucgaccccauuaaauuuccugaggaucaguuccagguggcccucgaccaaguuuuugagaauauagaaaacucccaggcucugguggaucagagcaaucgcauccuuucuucagccgagaaggguaacacuggguucauuaucgucaucauucugauagcaguguugggcaguagcaugauccucguauccauuuucaucauuaucaaaaagaccaagaaaccaacaggagcgcccccugaacugucuggcgugacuaauaacggguuuauaccacacaauugaggacuagucccuguucccagagcccacuuuuuuuucuuuuuuugaaauaaaauagccugucuuucagaucucaaaggcucuuuucagagccaccaaaaaaaaaaaaaaaaaaaaaaaaaaaaaaaaaaaaaaaaaaaaaaaaaaaaaaaaaaaaaaaaaaaaaaaaaaaaaaaaaaaaaaaaaaaaaaaaaaaaa

SEQ ID NO: 14744 - RNA, 1892 nt, Artificial Sequence
  HMPV/NL/1/99__AAQ90145.1 fusion glycoprotein mRNA human (F0)
aggagagucccgcagucggcguccagcggcucugcuuguucgugugugugucguugcaggccuuauucaagcuuaccaugagcuggaaggugaugaucauuauaucccugcucaucacaccccagcacggccuuaaagagucuuaccuggaagagucaugcaguaccauuacugaaggguauuugagcgucuuaagaacgggaugguacaccaacguuuucacacuggaggugggugacguagaaaaucuaacuuguaccgauggcccuucccucaucaagacagagcuggaccuuaccaaaucugcccugagggaguugaagacugugucggcugaucaacucgcacgggaggaacagauugaaaacccacgccagucacgauuuguccugggggccaucgcgcugggaguggcuacagccgcagccguuaccgcuggcauagcaaucgccaaaacgauucgucucgagagcgaggugaaugcuaucaagggugccuuaaagcagacuaacgaagcggucaguacccuggggaauggagugagaguacuugcaacagccguuagggaguugaaagaauuuguguccaagaaccugacuucugcuauuaaucggaacaaaugcgacaucgccgaucuaaagauggcagucagcuuuucccaauucaaucgcagauuucucaacguggugaggcaguucucagacaaugcuggcauaaccccggccauuagucuggaucuuaugacagacgcggagcuggcccgggcagucagcuauaugcccaccucugcuggccagaucaaauugaugcucgaaaaccgcgccaugguucgaagaaagggguuugggauucugaucgguguguacggcuccucaguaaucuauauggugcaguuaccuauuuucggggucauagauacgccauguuggaucauuaaggcugcccccagcugcagugagaaaaauggaaacuacgcaugucugcucagggaggaccaaggcugguauugcaagaaugccgguucuacuguguacuacccuaacgaaaaagauugugagacacggggagaccauguuuucugcgauaccgcugcgggaaucaacguggcagaacagucccgugaguguaauauaaacauuagcacuacaaauuauccaugcaaggucucgaccggccgccaccccaucucuaugguggcccuuuccccucugggcgcuuugguagccuguuacaaagggguuucaugcaguaucggaagcaacuggguggguauuaucaagcagcuaccaaaaggcugcuccuauauuacgaaucaggacgcagacaccgucacaauagauaacacuguguaccaacugucuaaggucgaaggggagcagcaugugaucaagggaagaccgguuagcucaaguuucgaccccauuaaauuuccugaggaucaguucaauguggcccucgaccaaguauuugaauccaucgagaacagccaggcucuggucgaucagucuaauaagauccuuaacucagccgaaaaaggcaauaccgguuucauuauagugguuauccugguggcagucuuggggcucacaaugauuagugugagcaucauuaucauaaucaagaaaacuaggaagccaaccggcgcgcccccugagcugaacggaguaacaaauggcggguucauuccacacuccugaggacuagucccuguucccagagcccacuuuuuuuucuuuuuuugaaauaaaauagccugucuuucagaucucaaaggcucuuuucagagccaccaaaaaaaaaaaaaaaaaaaaaaaaaaaaaaaaaaaaaaaaaaaaaaaaaaaaaaaaaaaaaaaaaaaaaaaaaaaaaaaaaaaaaaaaaaaaaaaaaaaaa

SEQ ID NO: 14745 - RNA, 1892 nt, Artificial Sequence
  HMPV/Sabana__AEA02280.1 fusion glycoprotein mRNA human (F0)
aggagagucccgcagucggcguccagcggcucugcuuguucgugugugugucguugcaggccuuauucaagcuuaccaugagcuggaaggugaugaucauuauaucccugcucaucacaccccagcacggccuuaaagagucuuaccuggaagagucaugcaguaccauuacugaaggguauuugagcgucuuaagaacgggaugguacaccaacguuuucacacuggaggugggugacguagaaaaucuaacuuguaccgauggcccuucccucaucaagacagagcuggaccuuaccaaaucugcccugagggaguugaagacugugucggcugaucaacucgcacgggaggaacagauugaaaacccacgccagucacgauuuguccugggggccaucgcgcugggaguggcuacagccgcagccguuaccgcuggcauagcaaucgccaaaacgauucgucucgagagcgaggugaaugcuaucaagggugccuuaaagacuaccaacgaagcggucaguacacuggggaauggagugagaguacuugcaacugccguuagggaguugaaagaauuuguguccaagaaccugaccucugcuauuaauaaaaacaagugcgacaucgccgaucuaaaaauggcagucagcuuuucccaguucaaucggcgcuuucucaacguggugagacaauucucagacaaugcuggcauaacaccggccauuagucuggaucuuaugaacgacgcggagcuggccagggcagucagcuauaugcccaccucugcuggccagaucaaguugaugcucgaaaaucgggccaugguucgccgaaagggguuugggauucugaucgguguguacggcuccucaguaaucuauauggugcaguuaccuauuuucggggucauaaacacgccauguuggaucauuaaagcugcccccagcugcagugagaaggauggaaauuacgcaugucugcucagagaggaccagggcugguauugcaaaaacgccgguucuacuguguacuacccuaacgaaaaggauugugagacaaggggagaccauguuuucugcgauaccgcugcgggaaucaauguggcagaacaaucccgggaguguaacauaaauauuagcacuacaaacuauccaugcaaagucucgaccggccgucaccccaucucuaugguggcccuuuccccucugggcgcuuugguagccuguuacaaggggguuucaugcaguacgggaagcaaucagguggguaucauuaaacagcuaccaaagggcugcuccuauaucaccaaccaggacgcagacacagucacuauugauaauaccguguaccaacugucuaaggucgaaggggagcagcaugugauaaaaggacgcccgguuagcucaaguuucgaccccaucagauuuccugaggaucaguucaacguggcccucgaccaaguauuugaauccauugagaauagccaggcucuggucgaucagucuaacaagauccuuaauucagccgaaaaaggcaacacagguuucaucauugugauaauccugauugcaguuuuggggcucacuaugaucagugugagcauuaucauaaucauuaagaaaaccaggaagccaacaggcgcgcccccugagcugaauggagucaccaacggcggguucaucccacacuccugaggacuagucccuguucccagagcccacuuuuuuuucuuuuuuugaaauaaaauagccugucuuucagaucucaaaggcucuuuucagagccaccaaaaaaaaaaaaaaaaaaaaaaaaaaaaaaaaaaaaaaaaaaaaaaaaaaaaaaaaaaaaaaaaaaaaaaaaaaaaaaaaaaaaaaaaaaaaaaaaaaaaa

SEQ ID NO: 14746 - RNA, 1837 nt, Artificial Sequence
  HMPV/TN/92-4__ABM67072.1 fusion glycoprotein mRNA gc (F0)
aggagaaagcuuaccaugagcuggaagguggucaucaucuucucccugcucaucacgccccagcacggccugaaggagagcuaccuggaggaguccugcagcaccaucaccgagggguaccucuccgugcugcgcaccggcugguacaccaacguguucacccuggaggucggggacguggagaaccucacgugcagcgacggcccgucccugaucaagaccgagcuggaccucaccaagagcgcccugcgggagcugaagaccguguccgccgaccagcucgcgcgcgaggagcagaucgagaacccccggcagagccgcuucguccugggggccaucgcccugggcguggccgccgcggccgccgugacggccggcgucgcgaucgccaagaccauccggcucgaguccgaggugaccgccaucaacaacgcccugaagaagaccaacgaggccgugagcacgcuggggaacggcguccgcgugcucgcgaccgccgugcgggagcugaaggacuucgucuccaagaaccugacccgcgccaucaacaagaacaagugcgacaucgacgaccucaagauggccgugagcuucucccaguucaaccggcgcuuccugaacgugguccggcaguucagcgacaacgccgggaucacccccgcgaucucccuggaccucaugacggacgccgagcuggcccgcgccgugcccaacaugccgaccagcgccggccagaucaagcugaugcucgagaaccgggcgauggugcgccggaagggguucggcauccugaucggcgucuacggguccagcgugaucuacauggugcagcugcccaucuucggcgucaucgacacccccugcuggaucgugaaggccgcccccagcugcuccgagaagaaggggaacuacgccugccuccugcgcgaggaccagggcugguacugccagaacgccggcagcaccgucuacuacccgaacgagaaggacugcgagacgcgcggggaccacguguucugcgacaccgcggccggcaucaacguggccgagcaguccaaggagugcaacaucaacaucagcaccaccaacuaccccugcaaggucuccacggggcggcaccccaucagcaugguggcccugagcccccucggcgcgcugguggccugcuacaagggggucuccugcuccaucggcagcaaccgggugggcaucaucaagcagcugaacaaggggugcuccuacaucaccaaccaggacgccgacaccgugaccaucgacaacacggucuaccagcucagcaagguggagggcgagcagcacgugaucaaggggcgcccggucuccagcuccuucgaccccaucaaguuccccgaggaccaguucaacguggcccuggaccagguguucgagaacaucgagaacagccaggcccuggucgaccaguccaaccggauccucagcuccgcggagaagggcaacaccggguucaucaucgugaucauccugaucgccgugcugggcagcagcaugauccucgucuccaucuucaucaucaucaagaagaccaagaagcccaccggcgccccgcccgagcugagcggggugacgaacaacggcuucaucccccacaacugaggacuaguuauaagacugacuagcccgaugggccucccaacgggcccuccuccccuccuugcaccgagauuaauaaaaaaaaaaaaaaaaaaaaaaaaaaaaaaaaaaaaaaaaaaaaaaaaaaaaaaaaaaaaaaaaugcaucccccccccccccccccccccccccccccccaaaggcucuuuucagagccaccagaauu

SEQ ID NO: 14747 - RNA, 1837 nt, Artificial Sequence
  HMPV/TN/92-4__ABM67072.1 fusion glycoprotein mRNA gc (variant)
aggagaaagcuuaccaugagcuggaagguggucaucaucuucucccugcucaucacgccccagcacggccugaaggagagcuaccuggaggaguccugcagcaccaucaccgagggguaccucuccgugcugcgcaccggcugguacaccaacguguucacccuggaggucggggacguggagaaccucacgugcagcgacggcccgucccugaucaagaccgagcuggaccucaccaagagcgcccugcgggagcugaagaccguguccgccgaccagcucgcgcgcgaggagcagaucgagaaccccgggagcggcuccuucguccugggcgccaucgcccuggggguggccgccgcggccgccgugacggccggcgucgcgaucugcaagaccauccggcucgagagcgaggugaccgccaucaacaacgcccugaagaagaccaacgaggccguguccacgcuggggaacggcguccgcgugcucgccuucgcggugcgggagcugaaggacuucgucagcaagaaccugacccgcgcccucaacaagaacaagugcgacaucgacgaccugaagauggccguguccuucagccaguucaaccggcgcuuccugaacgugguccggcaguucuccgacaacgccgggaucacccccgccaucagccucgaccugaugaccgacgcggagcuggcccgcgccgugcccaacaugccgacguccgccggccagaucaagcucaugcuggagaaccgggccauggugcgccggaagggcuucgggauccugugcggcgucuacgggagcagcgugaucuacauggugcagcuccccaucuucggcgucaucgacacccccugcuggaucgugaaggcggcccccuccugcagcgagaagaagggcaacuacgccugccugcugcgcgaggaccaggggugguacugccagaacgccggcuccaccgucuacuacccgaacgagaaggacugcgagacccgcggggaccacguguucugcgacacggccgcgggcaucaacguggccgagcagagcaaggagugcaacaucaacaucuccaccaccaacuaccccugcaaggucagcaccgggcggcaccccaucuccaugguggcccucagcccccugggcgcccugguggcgugcuacaagggcgucuccugcagcaucggguccaaccgggugggcaucaucaagcagcucaacaaggggugcagcuacaucacgaaccaggacgccgacaccgugaccaucgacaacaccgucuaccagcuguccaagguggagggcgagcagcacgugaucaaggggcgcccggucagcuccagcuucgaccccaucaaguuccccgaggaccaguucaacguggcccuggaccagguguucgagaacaucgagaacucccaggcccucgucgaccagagcaaccggauccuguccagcgccgagaagggcaacacgggcuucaucaucgugaucauccugaucgcggugcucgggagcuccaugauccuggucagcaucuucaucaucaucaagaagaccaagaagcccaccggcgccccgcccgagcuguccggggugaccaacaacggcuucaucccccacaacugaggacuaguuauaagacugacuagcccgaugggccucccaacgggcccuccuccccuccuugcaccgagauuaauaaaaaaaaaaaaaaaaaaaaaaaaaaaaaaaaaaaaaaaaaaaaaaaaaaaaaaaaaaaaaaaaugcaucccccccccccccccccccccccccccccccaaaggcucuuuucagagccaccagaauu

SEQ ID NO: 14748 - RNA, 1837 nt, Artificial Sequence
  HMPV/TN/92-4__ABM67072.1 fusion glycoprotein mRNA gc (variant)
aggagaaagcuuaccaugagcuggaagguggucaucaucuucucccugcucaucacgccccagcacggccugaaggagagcuaccuggaggaguccugcagcaccaucaccgagggguaccucuccgugcugcgcaccggcugguacaccaacguguucacccuggaggucggggacguggagaaccucacgugcagcgacggcccgucccugaucaagaccgagcuggaccucaccaagagcgcccugcgggagcugaagaccguguccgccgaccagcucgcgcgcgaggagcagaucgagaaccccgggagcggcuccuucguccugggcgccaucgcccuggggguggccgccgcggccgccgugacggccggcgucgcgaucugcaagaccauccggcucgagagcgaggugaccgccaucaacaacgcccugaagaagaccaacgaggccguguccacgcuggggaacggcguccgcgugcucgccaccgcggugcgggagcugaaggacuucgucagcaagaaccugacccgcgccaucaacaagaacaagugcgacaucgacgaccucaagauggccguguccuucagccaguucaaccggcgcuuccugaacgugguccggcaguucuccgacaacgccgggaucacccccgccaucagccuggaccucaugacggacgcggagcuggcccgcgccgugcccaacaugccgaccuccgccggccagaucaagcugaugcucgagaaccgggccauggugcgccggaagggcuucgggauccugugcggcgucuacgggagcagcgugaucuacauggugcagcugcccaucuucggcgucaucgacacccccugcuggaucgugaaggcggcccccuccugcagcgagaagaagggcaacuacgccugccuccugcgcgaggaccaggggugguacugccagaacgccggcuccaccgucuacuacccgaacgagaaggacugcgagacgcgcggggaccacguguucugcgacaccgccgcgggcaucaacguggccgagcagagcaaggagugcaacaucaacaucuccaccaccaacuaccccugcaaggucagcacggggcggcaccccaucuccaugguggcccugagcccccucggcgcccugguggcgugcuacaagggcgucuccugcagcaucggguccaaccgggugggcaucaucaagcagcugaacaaggggugcagcuacaucaccaaccaggacgccgacaccgugaccaucgacaacacggucuaccagcucuccaagguggagggcgagcagcacgugaucaaggggcgcccggucagcuccagcuucgaccccaucaaguuccccgagcaccaguggcacguggcccuggaccagguguucgagaacaucgagaacucccaggcccuggucgaccagagcaaccggauccucuccagcgccgagaagggcaacaccggcuucaucaucgugaucauccugaucgcggugcuggggagcuccaugauccucgucagcaucuucaucaucaucaagaagaccaagaagcccaccggcgccccgcccgagcuguccggggugacgaacaacggcuucaucccccacaacugaggacuaguuauaagacugacuagcccgaugggccucccaacgggcccuccuccccuccuugcaccgagauuaauaaaaaaaaaaaaaaaaaaaaaaaaaaaaaaaaaaaaaaaaaaaaaaaaaaaaaaaaaaaaaaaaugcaucccccccccccccccccccccccccccccccaaaggcucuuuucagagccaccagaauu

SEQ ID NO: 14749 - RNA, 1837 nt, Artificial Sequence
  HMPV/TN/92-4__ABM67072.1 fusion glycoprotein mRNA gc (variant)
aggagaaagcuuaccaugagcuggaagguggucaucaucuucucccugcucaucacgccccagcacggccugaaggagagcuaccuggaggaguccugcagcaccaucaccgagggguaccucuccgugcugcgcaccggcugguacaccaacguguucacccuggaggucggggacguggagaaccucacgugcagcgacggccccucccugaucaagaccgagcuggaccuccucaagagcgcccugcgggagcugaagaccguguccgccgaccagcuggcgcgcgaggagcagaucgagaaccccgggagcggcuccuucguccugggcgccaucgcccucgggguggccgccgcggccgccgugaccgccggcgucgcgaucgccaagacgauccggcuggagagcgaggugaccgccaucaacaacgcccugaagaagaccaacgaggccguguccacccucgggaacggcguccgcgugcuggcgacggccgugcgggagcugaaggacuucgucagcaagaaccucacccgcgccaucaacaagaacaagugcgacauccccgaccugaagauggccguguccuucagccaguucaaccggcgcuuccugaacgugguccggcaguucuccgacaacgccgggaucacccccgcgaucagccucgaccugaugaccgacgccgagcuggcccgcgccgugccgaacaugcccacguccgccggccagaucaagcucaugcuggagaaccgggcgauggugcgccggaagggcuucgggauccugaucggcgucuacgggagcagcgugaucuacauggugcagcuccccaucuucggcgucaucgacacccccugcuggaucgugaaggccgccccguccugcagcgagaagaagggcaacuacgccugccugcugcgcgaggaccaggggugguacugccagaacgccggcuccaccgucuacuaccccaacgagaaggacugcgagacccgcggggaccacguguucugcgacacggcggccggcaucaacguggccgagcagagcaaggagugcaacaucaacaucuccaccaccaacuaccccugcaaggucagcaccgggcggcaccccaucuccaugguggcccucagcccgcugggcgcgcugguggccugcuacaagggcgucuccugcagcaucggguccaaccgggugggcaucaucaagcagcucaacaaggggugcagcuacaucacgaaccaggacgccgacaccgugaccaucgacaacaccgucuaccagcuguccaagguggagggcgagcagcacgugaucaaggggcgccccgucagcuccagcuucgaccccaucaaguuccccgaggaccaguuccagguggcccuggaccagguguucgagaacaucgagaacucccaggcccucgucgaccagagcaaccggauccuguccagcgcggagaagggcaacacgggcuucaucaucgugaucauccugaucgccgugcucgggagcuccaugauccuggucagcaucuucaucaucaucaagaagaccaagaagccgaccggcgccccgcccgagcuguccggggugaccaacaacggcuucaucccccacaacugaggacuaguuauaagacugacuagcccgaugggccucccaacgggcccuccuccccuccuugcaccgagauuaauaaaaaaaaaaaaaaaaaaaaaaaaaaaaaaaaaaaaaaaaaaaaaaaaaaaaaaaaaaaaaaaaugcaucccccccccccccccccccccccccccccccaaaggcucuuuucagagccaccagaauu

SEQ ID NO: 14750 - RNA, 1837 nt, Artificial Sequence
  HMPV/TN/92-4__ABM67072.1 fusion glycoprotein mRNA gc (variant)
aggagaaagcuuaccaugagcuggaagguggucaucaucuucucccugcucaucacgccccagcacggccugaaggagagcuaccuggaggaguccugcagcaccaucaccgagggguaccucuccgugcugcgcaccggcugguacaccaacguguucacccuggaggucggggacguggagaaccucacgugcagcgacggccccucccugaucaagaccgagcuggaccuccucaagagcgcccugcgggagcugaagaccguguccgccgaccagcuggcgcgcgaggagcagaucgagaaccccgggagcggcuccuucguccugggcgccaucgcccucgggguggccgccgcggccgccgugaccgccggcgucgcgaucgccaagacgauccggcuggagagcgaggugaccgccaucaacaacgcccugaagaagaccaacgaggccguguccacccucgggaacggcguccgcgugcuggcgacggccgugcgggagcugaaggacuucgucagcaagaaccucacccgcgccaucaacaagaacaagugcgacauccccgaccugaagauggccguguccuucagccaguucaaccggcgcuuccugaacgugguccggcaguucuccgacaacgccgggaucacccccgcgaucagccucgaccugaugaccgacgccgagcuggcccgcgccgugccgaacaugcccacguccgccggccagaucaagcucaugcuggagaaccgggcgauggugcgccggaagggcuucgggauccugaucggcgucuacgggagcagcgugaucuacauggugcagcuccccaucuucggcgucaucgacacccccugcuggaucgugaaggccgccccguccugcagcgagaagaagggcaacuacgccugccugcugcgcgaggaccaggggugguacugccagaacgccggcuccaccgucuacuaccccaacgagaaggacugcgagacccgcggggaccacguguucugcgacacggcggccggcaucaacguggccgagcagagcaaggagugcaacaucaacaucuccaccaccaacuaccccugcaaggucagcaccgggcggcaccccaucuccaugguggcccucagcccgcugggcgcgcugguggccugcuacaagggcgucuccugcagcaucggguccaaccgggugggcaucaucaagcagcucaacaaggggugcagcuacaucacgaaccaggacgccgacaccgugaccaucgacaacaccgucuaccagcuguccaagguggagggcgagcagcacgugaucaaggggcgccccgucagcuccagcuucgaccccaucaaguuccccgagaaccaguuccagguggcccuggaccagguguucgagaacaucgagaacucccaggcccucgucgaccagagcaaccggauccuguccagcgcggagaagggcaacacgggcuucaucaucgugaucauccugaucgccgugcucgggagcuccaugauccuggucagcaucuucaucaucaucaagaagaccaagaagccgaccggcgccccgcccgagcuguccggggugaccaacaacggcuucaucccccacaacugaggacuaguuauaagacugacuagcccgaugggccucccaacgggcccuccuccccuccuugcaccgagauuaauaaaaaaaaaaaaaaaaaaaaaaaaaaaaaaaaaaaaaaaaaaaaaaaaaaaaaaaaaaaaaaaaugcaucccccccccccccccccccccccccccccccaaaggcucuuuucagagccaccagaauu

SEQ ID NO: 14751 - RNA, 1837 nt, Artificial Sequence
  HMPV/TN/92-4__ABM67072.1 fusion glycoprotein mRNA gc (variant)
aggagaaagcuuaccaugagcuggaagguggucaucaucuucucccugcucaucacgccccagcacggccugaaggagagcuaccuggaggaguccugcagcaccaucaccgagggguaccucuccgugcugcgcaccggcugguacaccaacguguucacccuggaggucggggacguggagaaccucacgugcagcgacggccccucccugaucaagaccgagcuggaccuccucaagagcgcccugcgggagcugaagaccguguccgccgaccagcuggcgcgcgaggagcagaucgagaaccccgggagcggcuccuucguccugggcgccaucgcccucgggguggccgccgcggccgccgugaccgccggcgucgcgaucgccaagacgauccggcuggagagcgaggugaccgccaucaacaacgcccugaagaagaccaacgaggccguguccacccucgggaacggcguccgcgugcuggcgacggccgugcgggagcugaaggacuucguccucaagaaccugacccgcgccaucaacaagaacaagugcgacauccccgaccugaagauggccgugagcuucucccaguucaaccggcgcuuccucaacgugguccggcaguucagcgacaacgccgggaucacccccgcgaucucccuggaccugaugaccgacgccgagcucgcccgcgccgugccgaacaugcccacgagcgccggccagaucaagcugaugcuggagaaccgggcgauggugcgccggaagggcuucgggauccucaucggcgucuacggguccagcgugaucuacauggugcagcugcccaucuucggcgucaucgacacccccugcuggaucgugaaggccgccccgagcugcuccgagaagaagggcaacuacgccugccugcuccgcgaggaccaggggugguacugccagaacgccggcagcaccgucuacuaccccaacgagaaggacugcgagacccgcggggaccacguguucugcgacacggcggccggcaucaacguggccgagcaguccaaggagugcaacaucaacaucagcaccaccaacuaccccugcaaggucuccaccgggcggcaccccaucagcaugguggcccuguccccgcugggcgcgcucguggccugcuacaagggcgucagcugcuccaucgggagcaaccgggugggcaucaucaagcagcugaacaaggggugcuccuacaucacgaaccaggacgccgacaccgugaccaucgacaacaccgucuaccagcugagcaagguggagggcgagcagcacgugaucaaggggcgccccgucuccagcuccuucgaccccaucaaguuccccgaggaccaguuccagguggcccucgaccagguguucgagaacaucgagaacagccaggcccuggucgaccaguccaaccggauccugagcuccgcggagaagggcaacacgggcuucaucaucgugaucauccucaucgccgugcuggggagcagcaugauccuggucuccaucuucaucaucaucaagaagaccaagaagccgaccggcgccccgcccgagcucagcggggugaccaacaacggcuucaucccccacaacugaggacuaguuauaagacugacuagcccgaugggccucccaacgggcccuccuccccuccuugcaccgagauuaauaaaaaaaaaaaaaaaaaaaaaaaaaaaaaaaaaaaaaaaaaaaaaaaaaaaaaaaaaaaaaaaaugcaucccccccccccccccccccccccccccccccaaaggcucuuuucagagccaccagaauu

SEQ ID NO: 14752 - RNA, 1837 nt, Artificial Sequence
  HMPV/TN/92-4__ABM67072.1 fusion glycoprotein mRNA gc (variant)
aggagaaagcuuaccaugagcuggaagguggucaucaucuucucccugcucaucacgccccagcacggccugaaggagagcuaccuggaggaguccugcagcaccaucaccgagggguaccucuccgugcugcgcaccggcugguacaccaacguguucacccuggaggucggggacguggagaaccucacgugcagcgacggccccucccugaucaagaccgagcuggaccuccucaagagcgcccugcgggagcugaagaccguguccgccgaccagcuggcgcgcgaggagcagaucgagaaccccgggagcggcuccuucguccugggcgccaucgcccucgggguggccgccgcggccgccgugaccgccggcgucgcgaucgccaagacgauccggcuggagagcgaggugaccgccaucaacaacgcccugaagaagaccaacgaggccguguccacccucgggaacggcguccgcgugcuggcgacggccgugcgggagcugaaggacuucguccucaagaaccugacccgcgccaucaacaagaacaagugcgacauccccgaccugaagauggccgugagcuucucccaguucaaccggcgcuuccucaacgugguccggcaguucagcgacaacgccgggaucacccccgcgaucucccuggaccugaugaccgacgccgagcucgcccgcgccgugccgaacaugcccacgagcgccggccagaucaagcugaugcuggagaaccgggcgauggugcgccggaagggcuucgggauccucaucggcgucuacggguccagcgugaucuacauggugcagcugcccaucuucggcgucaucgacacccccugcuggaucgugaaggccgccccgagcugcuccgagaagaagggcaacuacgccugccugcuccgcgaggaccaggggugguacugccagaacgccggcagcaccgucuacuaccccaacgagaaggacugcgagacccgcggggaccacguguucugcgacacggcggccggcaucaacguggccgagcaguccaaggagugcaacaucaacaucagcaccaccaacuaccccugcaaggucuccaccgggcggcaccccaucagcaugguggcccuguccccgcugggcgcgcucguggccugcuacaagggcgucagcugcuccaucgggagcaaccgggugggcaucaucaagcagcugaacaaggggugcuccuacaucacgaaccaggacgccgacaccgugaccaucgacaacaccgucuaccagcugagcaagguggagggcgagcagcacgugaucaaggggcgccccgucuccagcuccuucgaccccaucaaguuccccgagaaccaguuccagguggcccucgaccagguguucgagaacaucgagaacagccaggcccuggucgaccaguccaaccggauccugagcuccgcggagaagggcaacacgggcuucaucaucgugaucauccucaucgccgugcuggggagcagcaugauccuggucuccaucuucaucaucaucaagaagaccaagaagccgaccggcgccccgcccgagcucagcggggugaccaacaacggcuucaucccccacaacugaggacuaguuauaagacugacuagcccgaugggccucccaacgggcccuccuccccuccuugcaccgagauuaauaaaaaaaaaaaaaaaaaaaaaaaaaaaaaaaaaaaaaaaaaaaaaaaaaaaaaaaaaaaaaaaaugcaucccccccccccccccccccccccccccccccaaaggcucuuuucagagccaccagaauu

SEQ ID NO: 14753 - RNA, 1837 nt, Artificial Sequence
  HMPV/TN/92-4__ABM67072.1 fusion glycoprotein mRNA gc (variant)
aggagaaagcuuaccaugagcuggaagguggucaucaucuucucccugcucaucacgccccagcacggccugaaggagagcuaccuggaggaguccugcagcaccaucaccgagggguaccucuccgugcugcgcaccggcugguacaccaacguguucacccugcccgucggggacguggagaaccucacgugcagcgacggccccucccugaucaagaccgagcuggaccuccucaagagcgcccugcgggagcugaagaccguguccgccgaccagcuggcgcgcgaggagcagaucgagaaccccgggagcggcuccuucguccugggcgccaucgcccucgggguggccgccgcggccgccgugaccgccggcgucgcgaucgccaagacgauccggcuggagagcgaggugaccgccaucaacaacgcccugaagaagaccaacgaggccguguccacccucgggaacggcguccgcgugcuggcgacggccgugcgggagcugaaggacuucgucagcaagaaccucacccgcgccaucaacaagaacaagugcgacaucgacgaccugaagauggccguguccuucagccaguucaaccggcgcuuccugaacgugguccggcaguucuccgacaacgccgggaucacccccgcgaucagccucgaccugaugaccgacgccgagcuggcccgcgccgugccgaacaugcccacguccgccggccagaucaagcucaugcuggagaaccgggcgauggugcgccggaagggcuucgggauccugaucggcgucuacgggagcagcgugaucuacauggugcagcuccccaucuucggcgucaucgacacccccugcuggaucgugaaggccgccccguccugcagcgagaagaagggcaacuacgccugccugcugcgcgaggaccaggggugguacugccagaacgccggcuccaccgucuacuaccccaacgagaaggacugcgagacccgcggggaccacguguucugcgacacggcggccggcaucaacguggccgagcagagcaaggagugcaacaucaacaucuccaccaccaacuaccccugcaaggucagcaccgggcggcaccccaucuccaugguggcccucagcccgcugggcgcgcugguggccugcuacaagggcgucuccugcagcaucggguccaaccgggugggcaucaucaagcagcucaacaaggggugcagcuacaucacgaaccaggacgccgacaccgugaccaucgacaacaccgucuaccagcuguccaagguggagggcgagcagcacgugaucaaggggcgccccgucagcuccagcuucgaccccaucaaguuccccgaggaccaguuccagguggcccuggaccagguguucgagaacaucgagaacucccaggcccucgucgaccagagcaaccggauccuguccagcgcggagaagggcaacacgggcuucaucaucgugaucauccugaucgccgugcucgggagcuccaugauccuggucagcaucuucaucaucaucaagaagaccaagaagccgaccggcgccccgcccgagcuguccggggugaccaacaacggcuucaucccccacaacugaggacuaguuauaagacugacuagcccgaugggccucccaacgggcccuccuccccuccuugcaccgagauuaauaaaaaaaaaaaaaaaaaaaaaaaaaaaaaaaaaaaaaaaaaaaaaaaaaaaaaaaaaaaaaaaaugcaucccccccccccccccccccccccccccccccaaaggcucuuuucagagccaccagaauu

SEQ ID NO: 14754 - RNA, 1837 nt, Artificial Sequence
  HMPV/TN/92-4__ABM67072.1 fusion glycoprotein mRNA gc (variant)
aggagaaagcuuaccaugagcuggaagguggucaucaucuucucccugcucaucacgccccagcacggccugaaggagagcuaccuggaggaguccugcagcaccaucaccgagggguaccucuccgugcugcgcaccggcugguacaccaacguguucacccugcccgucggggacguggagaaccucacgugcagcgacggccccucccugaucaagaccgagcuggaccuccucaagagcgcccugcgggagcugaagaccguguccgccgaccagcuggcgcgcgaggagcagaucgagaaccccgggagcggcuccuucguccugggcgccaucgcccucgggguggccgccgcggccgccgugaccgccggcgucgcgaucgccaagacgauccggcuggagagcgaggugaccgccaucaacaacgcccugaagaagaccaacgaggccguguccacccucgggaacggcguccgcgugcuggcgacggccgugcgggagcugaaggacuucgucagcaagaaccucacccgcgccaucaacaagaacaagugcgacaucgacgaccugaagauggccguguccuucagccaguucaaccggcgcuuccugaacgugguccggcaguucuccgacaacgccgggaucacccccgcgaucagccucgaccugaugaccgacgccgagcuggcccgcgccgugccgaacaugcccacguccgccggccagaucaagcucaugcuggagaaccgggcgauggugcgccggaagggcuucgggauccugaucggcgucuacgggagcagcgugaucuacauggugcagcuccccaucuucggcgucaucgacacccccugcuggaucgugaaggccgccccguccugcagcgagaagaagggcaacuacgccugccugcugcgcgaggaccaggggugguacugccagaacgccggcuccaccgucuacuaccccaacgagaaggacugcgagacccgcggggaccacguguucugcgacacggcggccggcaucaacguggccgagcagagcaaggagugcaacaucaacaucuccaccaccaacuaccccugcaaggucagcaccgggcggcaccccaucuccaugguggcccucagcccgcugggcgcgcugguggccugcuacaagggcgucuccugcagcaucggguccaaccgggugggcaucaucaagcagcucaacaaggggugcagcuacaucacgaaccaggacgccgacaccgugaccaucgacaacaccgucuaccagcuguccaagguggagggcgagcagcacgugaucaaggggcgccccgucagcuccagcuucgaccccaucaaguuccccgagaaccaguuccagguggcccuggaccagguguucgagaacaucgagaacucccaggcccucgucgaccagagcaaccggauccuguccagcgcggagaagggcaacacgggcuucaucaucgugaucauccugaucgccgugcucgggagcuccaugauccuggucagcaucuucaucaucaucaagaagaccaagaagccgaccggcgccccgcccgagcuguccggggugaccaacaacggcuucaucccccacaacugaggacuaguuauaagacugacuagcccgaugggccucccaacgggcccuccuccccuccuugcaccgagauuaauaaaaaaaaaaaaaaaaaaaaaaaaaaaaaaaaaaaaaaaaaaaaaaaaaaaaaaaaaaaaaaaaugcaucccccccccccccccccccccccccccccccaaaggcucuuuucagagccaccagaauu

SEQ ID NO: 14755 - RNA, 1837 nt, Artificial Sequence
  HMPV/TN/92-4__ABM67072.1 fusion glycoprotein mRNA gc (variant)
aggagaaagcuuaccaugagcuggaagguggucaucaucuucucccugcucaucacgccccagcacggccugaaggagagcuaccuggaggaguccugcagcaccaucaccgagggguaccucuccgugcugcgcaccggcugguacaccaacguguucacccuggaggucggggacguggagaaccucacgugcagcgacggcccgucccugaucaagaccgagcuggaccuccucaagagcgcccugcgggagcugaagaccguguccgccgaccagcuggcgcgcgaggagcagaucgagaaccccgggagcggcuccuucguccugggcgccaucgcccucgggguggccgccgcggccgccgugaccgccggcgucgcgaucgccaagacgauccggcuggagagcgaggugaccgccaucaacaacgcccugaagaagaccaacgaggccguguccacccucgggaacggcguccgcgugcuggcgacggccgugcgggagcugaaggacuucgucagcaagaaccucacccgcgccaucaacaagaacaagugcgacaucgacgaccugaagauggccguguccuucagccaguucaaccggcgcuuccugaacgugguccggcaguucuccgacaacgccgggaucacccccgcgaucagccucgaccugaugaccgacgccgagcuggcccgcgccgugcccaacaugccgacguccgccggccagaucaagcucaugcuggagaaccgggcgauggugcgccggaagggcuucgggauccugaucggcgucuacgggagcagcgugaucuacauggugcagcuccccaucuucggcgucaucgacacccccugcuggaucgugaaggccgcccccuccugcagcgagaagaagggcaacuacgccugccugcugcgcgaggaccaggggugguacugccagaacgccggcuccaccgucuacuacccgaacgagaaggacugcgagacccgcggggaccacguguucugcgacacggcggccggcaucaacguggccgagcagagcaaggagugcaacaucaacaucuccaccaccaacuaccccugcaaggucagcaccgggcggcaccccaucuccaugguggcccucagcccccugggcgcgcugguggccugcuacaagggcgucuccugcagcaucggguccaaccgggugggcaucaucaagcagcucaacaaggggugcagcuacaucacgaaccaggacgccgacaccgugaccaucgacaacaccgucuaccagcuguccaagguggagggcgagcagcacgugaucaaggggcgcccggucagcuccagcuucgaccccaucaaguuccccgaggaccaguuccagguggcccuggaccagguguucgagaacaucgagaacucccaggcccucgucgaccagagcaaccggauccuguccagcgcggagaagggcaacacgggcuucaucaucgugaucauccugaucgccgugcucgggagcuccaugauccuggucagcaucuucaucaucaucaagaagaccaagaagcccaccggcgccccgcccgagcuguccggggugaccaacaacggcuucaucccccacaacugaggacuaguuauaagacugacuagcccgaugggccucccaacgggcccuccuccccuccuugcaccgagauuaauaaaaaaaaaaaaaaaaaaaaaaaaaaaaaaaaaaaaaaaaaaaaaaaaaaaaaaaaaaaaaaaaugcaucccccccccccccccccccccccccccccccaaaggcucuuuucagagccaccagaauu

SEQ ID NO: 14756 - RNA, 1837 nt, Artificial Sequence
  HMPV/TN/92-4__ABM67072.1 fusion glycoprotein mRNA gc (variant)
aggagaaagcuuaccaugagcuggaagguggucaucaucuucucccugcucaucacgccccagcacggccugaaggagagcuaccuggaggaguccugcagcaccaucaccgagggguaccucuccgugcugcgcaccggcugguacaccaacguguucacccuggaggucggggaccucgagaaccugacgugcagcgacggcccgucccugaucaagaccgagcucgaccugaccaagagcgcccugcgggagcucaagaccguguccgccgaccagcuggcgcgcgaggagcagaucgagaaccccgggagcggcuccuucgugcugggcgccaucgcccucggggucgccgccgcggccgccgugacggccggcguggcgaucgccaagaccauccggcuggagagcgaggucaccgccaucaacaacgcccugaagaagaccaacgaggccguguccacgcucgggaacggcgugcgcguccuggcgaccgccgugcgggagcugaaggacuucgugagcaagaaccucacccgcgccaucaacaagaacaagugcgacaucgacgaccugaagauggccgucuccuucagccaguucaaccggcgcuuccugaacguggugcggcaguucuccgacaacgccgggaucacccccgcgaucagccucgaccugaugacggacgccgagcuggcccgcgccguccccaacaugccgaccuccgccggccagaucaagcucaugcuggagaaccgggcgauggugcgccggaagggcuucgggauccugaucggcguguacgggagcagcgucaucuacauggugcagcuccccaucuucggcgugaucgacacccccugcuggaucgucaaggccgcccccuccugcagcgagaagaagggcaacuacgccugccugcugcgcgaggaccaggggugguacugccagaacgccggcuccaccguguacuacccgaacgagaaggacugcgagacgcgcggggaccacgucuucugcgacaccgcggccggcaucaacguggccgagcagagcaaggagugcaacaucaacaucuccaccaccaacuaccccugcaaggugagcacggggcggcaccccaucuccauggucgcccucagcccccugggcgcgcugguggccugcuacaagggcguguccugcagcaucggguccaaccgggucggcaucaucaagcagcucaacaaggggugcagcuacaucaccaaccaggacgccgacaccgugaccaucgacaacacgguguaccagcuguccaaggucgagggcgagcagcacgugaucaaggggcgcccggugagcuccagcuucgaccccaucaaguuccccgaggaccaguuccaggucgcccuggaccagguguucgagaacaucgagaacucccaggcccucguggaccagagcaaccggauccuguccagcgcggagaagggcaacaccggcuucaucaucgucaucauccugaucgccgugcucgggagcuccaugauccuggugagcaucuucaucaucaucaagaagaccaagaagcccaccggcgccccgcccgagcuguccggggucacgaacaacggcuucaucccccacaacugaggacuaguuauaagacugacuagcccgaugggccucccaacgggcccuccuccccuccuugcaccgagauuaauaaaaaaaaaaaaaaaaaaaaaaaaaaaaaaaaaaaaaaaaaaaaaaaaaaaaaaaaaaaaaaaaugcaucccccccccccccccccccccccccccccccaaaggcucuuuucagagccaccagaauu

SEQ ID NO: 14757 - RNA, 1837 nt, Artificial Sequence
  HMPV/TN/92-4__ABM67072.1 fusion glycoprotein mRNA gc (variant)
aggagaaagcuuaccaugagcuggaagguggucaucaucuucucccugcucaucacgccccagcacggccugaaggagagcuaccuggaggaguccugcagcaccaucaccgagggguaccucuccgugcugcgcaccggcugguacaccaacguguucacccuggaggucggggacguggagaaccucacgugcagcgacggcccgucccugaucaagaccgagcuggaccucaccaagagcgcccugcgggagcugaagaccguguccgccgaccagcucgcgcgcgaggagcagaucgagaaccccgggagcggcuccuucguccugggcgccaucgcccuggggguggccgccgcggccgccgugacggccggcgucgcgaucgccaagaccauccggcucgagagcgaggugaccgccaucaacaacgcccugaagaagaccaacgaggccguguccacgcuggggaacggcguccgcgugcucgcgaccgccgugcgggagcugaaggacuucguccugaagaaccucacccgcgccaucaacaagaacaagugcgacaucgacgaccugaagauggccgugagcuucucccaguucaaccggcgcuuccugaacgugguccggcaguucagcgacaacgccgggaucacccccgcgaucucccucgaccugaugacggacgccgagcuggcccgcgccgugcccaacaugccgaccagcgccggccagaucaagcucaugcuggagaaccgggcgauggugcgccggaagggcuucgggauccugaucggcgucuacggguccagcgugaucuacauggugcagcuccccaucuucggcgucaucgacacccccugcuggaucgugaaggccgcccccagcugcuccgagaagaagggcaacuacgccugccugcugcgcgaggaccaggggugguacugccagaacgccggcagcaccgucuacuacccgaacgagaaggacugcgagacgcgcggggaccacguguucugcgacaccgcggccggcaucaacguggccgagcaguccaaggagugcaacaucaacaucagcaccaccaacuaccccugcaaggucuccacggggcggcaccccaucagcaugguggcccucagcccccugggcgcgcugguggccugcuacaagggcgucuccugcuccaucgggagcaaccgggugggcaucaucaagcagcucaacaaggggugcuccuacaucaccaaccaggacgccgacaccgugaccaucgacaacacggucuaccagcugagcaagguggagggcgagcagcacgugaucaaggggcgcccggucuccagcuccuucgaccccaucaaguuccccgaggaccaguuccagguggcccuggaccagguguucgagaacaucgagaacagccaggcccucgucgaccaguccaaccggauccugagcuccgcggagaagggcaacaccggcuucaucaucgugaucauccugaucgccgugcucgggagcagcaugauccuggucuccaucuucaucaucaucaagaagaccaagaagcccaccggcgccccgcccgagcugagcggggugacgaacaacggcuucaucccccacaacugaggacuaguuauaagacugacuagcccgaugggccucccaacgggcccuccuccccuccuugcaccgagauuaauaaaaaaaaaaaaaaaaaaaaaaaaaaaaaaaaaaaaaaaaaaaaaaaaaaaaaaaaaaaaaaaaugcaucccccccccccccccccccccccccccccccaaaggcucuuuucagagccaccagaauu

SEQ ID NO: 14758 - RNA, 1837 nt, Artificial Sequence
  HMPV/TN/92-4__ABM67072.1 fusion glycoprotein mRNA gc (variant)
aggagaaagcuuaccaugagcuggaagguggucaucaucuucucccugcucaucacgccccagcacggccugaaggagagcuaccuggaggaguccugcagcaccaucaccgagggguaccucuccgugcugcgcaccggcugguacaccaacguguucacccuggaggucggggacguggagaaccucacgugcagcgacggcccgucccugaucaagaccgagcuggaccucaccaagagcgcccugcgggagcugaagaccguguccgccgaccagcucgcgcgcgaggagcagaucgagaaccccgggagcggcuccuucguccugggcgccaucgcccuggggguggccgccgcggccgccgugacggccggcgucgcgaucgccaagaccauccggcucgagagcgaggugaccgccaucaacaacgcccugaagaagaccaacgaggccguguccacgcuggggaacggcguccgcgugcucgcgaccgccgugcgggagcugaaggacuucgucagcaagaaccuguggcgcgccaucaacaagaacaagugcgacaucgacgaccucaagauggccguguccuucagccaguucaaccggcgcuuccugaacgugguccggcaguucuccgacaacgccgggaucacccccgcgaucagccuggaccucaugaccgacgccgagcuggcccgcgccgugcccaacaugccgacguccgccggccagaucaagcugaugcucgagaaccgggcgauggugcgccggaagggcuucgggauccugaucggcgucuacgggagcagcgugaucuacauggugcagcugcccaucuucggcgucaucgacacccccugcuggaucgugaaggccgcccccuccugcagcgagaagaagggcaacuacgccugccuccugcgcgaggaccaggggugguacugccagaacgccggcuccaccgucuacuacccgaacgagaaggacugcgagacccgcggggaccacguguucugcgacacggcggccggcaucaacguggccgagcagagcaaggagugcaacaucaacaucuccaccaccaacuaccccugcaaggucagcaccgggcggcaccccaucuccaugguggcccugagcccccucggcgcgcugguggccugcuacaagggcgucuccugcagcaucggguccaaccgggugggcaucaucaagcagcugaacaaggggugcagcuacaucacgaaccaggacgccgacaccgugaccaucgacaacaccgucuaccagcucuccaagguggagggcgagcagcacgugaucaaggggcgcccggucagcuccagcuucgaccccaucaaguuccccgaggaccaguuccagguggcccuggaccagguguucgagaacaucgagaacucccaggcccuggucgaccagagcaaccggauccucuccagcgcggagaagggcaacacgggcuucaucaucgugaucauccugaucgccgugcuggggagcuccaugauccucgucagcaucuucaucaucaucaagaagaccaagaagcccaccggcgccccgcccgagcuguccggggugaccaacaacggcuucaucccccacaacugaggacuaguuauaagacugacuagcccgaugggccucccaacgggcccuccuccccuccuugcaccgagauuaauaaaaaaaaaaaaaaaaaaaaaaaaaaaaaaaaaaaaaaaaaaaaaaaaaaaaaaaaaaaaaaaaugcaucccccccccccccccccccccccccccccccaaaggcucuuuucagagccaccagaauu

SEQ ID NO: 14759 - RNA, 1837 nt, Artificial Sequence
  HMPV/TN/92-4__ABM67072.1 fusion glycoprotein mRNA gc (variant)
aggagaaagcuuaccaugagcuggaagguggucaucaucuucucccugcucaucacgccccagcacggccugaaggagagcuaccuggaggaguccugcagcaccaucaccgagggguaccucuccgugcugcgcaccggcugguacaccaacguguucacccuggaggucggggaccucgagaaccugacgugcagcgacggcccgucccugaucaagaccgagcucgaccugcugaaguccgcccuccgggagcugaagaccguguccgccgaccagcuggcgcgcgaggagcagaucgagaaccccgggagcggcuccuucgugcucggcgccaucgcccugggggucgccgccgcggccgccgugaccgccggcguggcgaucgccaagacgauccggcuggagagcgaggucaccgccaucaacaacgcccucaagaagaccaacgaggccguguccacccuggggaacggcgugcgcguccuggcgacggccgugcgggagcucaaggacuucgugcugaagaaccuguggcgcgccaucaacaagaacaagugcgacaucgacgaccucaagauggccgucagcuucucccaguucaaccggcgcuuccugaacguggugcggcaguucagcgacaacgccgggaucacccccgcgaucucccuggaccucaugaccgacgccgagcuggcccgcgccguccccaacaugccgaccagcgccggccagaucaagcugaugcucgagaaccgggcgauggugcgccggaagggcuucgggauccugaucggcguguacggguccagcgucaucuacauggugcagcugcccaucuucggcgugaucgacacgcccugcuggaucgucaaggccgcccccagcugcuccgagaagaagggcaacuacgccugccuccugcgcgaggaccaggggugguacugccagaacgccggcagcaccguguacuacccgaacgagaaggacugcgagacccgcggggaccacgucuucugcgacaccgcggccggcaucaacguggccgagcaguccaaggagugcaacaucaacaucagcacgaccaacuaccccugcaagguguccaccgggcggcaccccaucagcauggucgcccugagcccccucggcgcgcugguggccugcuacaagggcgugagcugcuccaucgggagcaaccgggucggcaucaucaagcagcugaacaaggggugcuccuacaucaccaaccaggacgccgacacggugaccaucgacaacaccguguaccagcucagcaaggucgagggcgagcagcacgugaucaaggggcgcccgguguccagcuccuucgaccccaucaaguuccccgaggaccaguuccaggucgcccuggaccagguguucgagaacaucgagaacagccaggcccugguggaccaguccaaccggauccucagcuccgcggagaagggcaacaccggcuucaucaucgucaucauccugaucgccgugcuggggagcagcaugauccucguguccaucuucaucaucaucaagaagacgaagaagcccaccggcgccccgcccgagcugagcggggucaccaacaacggcuucaucccccacaacugaggacuaguuauaagacugacuagcccgaugggccucccaacgggcccuccuccccuccuugcaccgagauuaauaaaaaaaaaaaaaaaaaaaaaaaaaaaaaaaaaaaaaaaaaaaaaaaaaaaaaaaaaaaaaaaaugcaucccccccccccccccccccccccccccccccaaaggcucuuuucagagccaccagaauu

SEQ ID NO: 14760 - RNA, 1837 nt, Artificial Sequence
  HMPV/TN/92-4__ABM67072.1 fusion glycoprotein mRNA gc (variant)
aggagaaagcuuaccaugagcuggaagguggucaucaucuucucccugcucaucacgccccagcacggccugaaggagagcuaccuggaggaguccugcagcaccaucaccgagggguaccucuccgugcugcgcaccggcugguacaccaacguguucacccugcccgucggggacguggagaaccucacgugcagcgacggccccucccugaucaagaccgagcuggaccucaccaagagcgcccugcgggagcugaagaccguguccgccgaccagcucgcgcgcgaggagcagaucgagaaccccgggagcggcuccuucguccugggcgccaucgcccuggggguggccgccgcggccgccgugacggccggcgucgcgaucgccaagaccauccggcucgagagcgaggugaccgccaucaacaacgcccugaagaagaccaacgaggccguguccacgcuggggaacggcguccgcgugcucgcgaccgccgugcgggagcugaaggacuucgucagcaagaaccugacccgcgccaucaacaagaacaagugcgacaucgacgaccucaagauggccguguccuucagccaguucaaccggcgcuuccugaacgugguccggcaguucuccgacaacgccgggaucacccccgcgaucagccuggaccucaugacggacgccgagcuggcccgcgccgugccgaacaugcccaccuccgccggccagaucaagcugaugcucgagaaccgggcgauggugcgccggaagggcuucgggauccugaucggcgucuacgggagcagcgugaucuacauggugcagcugcccaucuucggcgucaucgacacccccugcuggaucgugaaggccgccccguccugcagcgagaagaagggcaacuacgccugccuccugcgcgaggaccaggggugguacugccagaacgccggcuccaccgucuacuaccccaacgagaaggacugcgagacgcgcggggaccacguguucugcgacaccgcggccggcaucaacguggccgagcagagcaaggagugcaacaucaacaucuccaccaccaacuaccccugcaaggucagcacggggcggcaccccaucuccaugguggcccugagcccgcucggcgcgcugguggccugcuacaagggcgucuccugcagcaucggguccaaccgggugggcaucaucaagcagcugaacaaggggugcagcuacaucaccaaccaggacgccgacaccgugaccaucgacaacacggucuaccagcucuccaagguggagggcgagcagcacgugaucaaggggcgccccgucagcuccagcuucgaccccaucaaguuccccgaggaccaguuccagguggcccuggaccagguguucgagaacaucgagaacucccaggcccuggucgaccagagcaaccggauccucuccagcgcggagaagggcaacaccggcuucaucaucgugaucauccugaucgccgugcuggggagcuccaugauccucgucagcaucuucaucaucaucaagaagaccaagaagccgaccggcgccccgcccgagcuguccggggugacgaacaacggcuucaucccccacaacugaggacuaguuauaagacugacuagcccgaugggccucccaacgggcccuccuccccuccuugcaccgagauuaauaaaaaaaaaaaaaaaaaaaaaaaaaaaaaaaaaaaaaaaaaaaaaaaaaaaaaaaaaaaaaaaaugcaucccccccccccccccccccccccccccccccaaaggcucuuuucagagccaccagaauu

SEQ ID NO: 14761 - RNA, 1837 nt, Artificial Sequence
  HMPV/TN/92-4__ABM67072.1 fusion glycoprotein mRNA gc (variant)
aggagaaagcuuaccaugagcuggaagguggucaucaucuucucccugcucaucacgccccagcacggccugaaggagagcuaccuggaggaguccugcagcaccaucaccgagggguaccucuccgugcugcgcaccggcugguacaccaacguguucacccuggaggucggggacguggagaaccucacgugcagcgacggccccucccugaucaagaccgagcuggaccucaccaagagcgcccugcgggagcugaagaccguguccgccgaccagcucgcgcgcgaggagcagaucgagaaccccgggagcggcuccuucguccugggcgccaucgcccuggggguggccgccgcggccgccgugacggccggcgucgcgaucgccaagaccauccggcucgagagcgaggugaccgccaucaacaacgcccugaagaagaccaacgaggccguguccacgcuggggaacggcguccgcgugcucgcgaccgccgugcgggagcugaaggacuucgucagcaagaaccugacccgcgccaucaacaagaacaagugcgacauccccgaccucaagauggccguguccuucagccaguucaaccggcgcuuccugaacgugguccggcaguucuccgacaacgccgggaucacccccgcgaucagccuggaccucaugacggacgccgagcuggcccgcgccgugccgaacaugcccaccuccgccggccagaucaagcugaugcucgagaaccgggcgauggugcgccggaagggcuucgggauccugaucggcgucuacgggagcagcgugaucuacauggugcagcugcccaucuucggcgucaucgacacccccugcuggaucgugaaggccgccccguccugcagcgagaagaagggcaacuacgccugccuccugcgcgaggaccaggggugguacugccagaacgccggcuccaccgucuacuaccccaacgagaaggacugcgagacgcgcggggaccacguguucugcgacaccgcggccggcaucaacguggccgagcagagcaaggagugcaacaucaacaucuccaccaccaacuaccccugcaaggucagcacggggcggcaccccaucuccaugguggcccugagcccgcucggcgcgcugguggccugcuacaagggcgucuccugcagcaucggguccaaccgggugggcaucaucaagcagcugaacaaggggugcagcuacaucaccaaccaggacgccgacaccgugaccaucgacaacacggucuaccagcucuccaagguggagggcgagcagcacgugaucaaggggcgccccgucagcuccagcuucgaccccaucaaguuccccgaggaccaguuccagguggcccuggaccagguguucgagaacaucgagaacucccaggcccuggucgaccagagcaaccggauccucuccagcgcggagaagggcaacaccggcuucaucaucgugaucauccugaucgccgugcuggggagcuccaugauccucgucagcaucuucaucaucaucaagaagaccaagaagccgaccggcgccccgcccgagcuguccggggugacgaacaacggcuucaucccccacaacugaggacuaguuauaagacugacuagcccgaugggccucccaacgggcccuccuccccuccuugcaccgagauuaauaaaaaaaaaaaaaaaaaaaaaaaaaaaaaaaaaaaaaaaaaaaaaaaaaaaaaaaaaaaaaaaaugcaucccccccccccccccccccccccccccccccaaaggcucuuuucagagccaccagaauu

SEQ ID NO: 14762 - RNA, 1837 nt, Artificial Sequence
  HMPV/TN/92-4__ABM67072.1 fusion glycoprotein mRNA gc (variant)
aggagaaagcuuaccaugagcuggaagguggucaucaucuucucccugcucaucacgccccagcacggccugaaggagagcuaccuggaggaguccugcagcaccaucaccgagggguaccucuccgugcugcgcaccggcugguacaccaacguguucacccuggaggucggggacguggagaaccucacgugcagcgacggccccucccugaucaagaccgagcuggaccucaccaagagcgcccugcgggagcugaagaccguguccgccgaccagcucgcgcgcgaggagcagaucgagaaccccgggagcggcuccuucguccugggcgccaucgcccuggggguggccgccgcggccgccgugacggccggcgucgcgaucgccaagaccauccggcucgagagcgaggugaccgccaucaacaacgcccugaagaagaccaacgaggccguguccacgcuggggaacggcguccgcgugcucgcgaccgccgugcgggagcugaaggacuucgucagcaagaaccugacccgcgccaucaacaagaacaagugccccaucgacgaccucaagauggccguguccuucagccaguucaaccggcgcuuccugaacgugguccggcaguucuccgacaacgccgggaucacccccgcgaucagccuggaccucaugacggacgccgagcuggcccgcgccgugccgaacaugcccaccuccgccggccagaucaagcugaugcucgagaaccgggcgauggugcgccggaagggcuucgggauccugaucggcgucuacgggagcagcgugaucuacauggugcagcugcccaucuucggcgucaucgacacccccugcuggaucgugaaggccgccccguccugcagcgagaagaagggcaacuacgccugccuccugcgcgaggaccaggggugguacugccagaacgccggcuccaccgucuacuaccccaacgagaaggacugcgagacgcgcggggaccacguguucugcgacaccgcggccggcaucaacguggccgagcagagcaaggagugcaacaucaacaucuccaccaccaacuaccccugcaaggucagcacggggcggcaccccaucuccaugguggcccugagcccgcucggcgcgcugguggccugcuacaagggcgucuccugcagcaucggguccaaccgggugggcaucaucaagcagcugaacaaggggugcagcuacaucaccaaccaggacgccgacaccgugaccaucgacaacacggucuaccagcucuccaagguggagggcgagcagcacgugaucaaggggcgccccgucagcuccagcuucgaccccaucaaguuccccgaggaccaguuccagguggcccuggaccagguguucgagaacaucgagaacucccaggcccuggucgaccagagcaaccggauccucuccagcgcggagaagggcaacaccggcuucaucaucgugaucauccugaucgccgugcuggggagcuccaugauccucgucagcaucuucaucaucaucaagaagaccaagaagccgaccggcgccccgcccgagcuguccggggugacgaacaacggcuucaucccccacaacugaggacuaguuauaagacugacuagcccgaugggccucccaacgggcccuccuccccuccuugcaccgagauuaauaaaaaaaaaaaaaaaaaaaaaaaaaaaaaaaaaaaaaaaaaaaaaaaaaaaaaaaaaaaaaaaaugcaucccccccccccccccccccccccccccccccaaaggcucuuuucagagccaccagaauu

SEQ ID NO: 14763 - RNA, 1837 nt, Artificial Sequence
  HMPV/TN/92-4__ABM67072.1 fusion glycoprotein mRNA gc (variant)
aggagaaagcuuaccaugagcuggaagguggucaucaucuucucccugcucaucacgccccagcacggccugaaggagagcuaccuggaggaguccugcagcaccaucaccgagggguaccucuccgugcugcgcaccggcugguacaccaacguguucacccuggaggucggggacguggagaaccucacgugcagcgacggccccucccugaucaagaccgagcuggaccucaccaagagcgcccugcgggagcugaagaccguguccgccgaccagcucgcgcgcgaggagcagaucgagaaccccgggagcggcuccuucguccugggcgccaucgcccuggggguggccgccgcggccgccgugacggccggcgucgcgaucgccaagaccauccggcuccccagcgaggugaccgccaucaacaacgcccugaagaagaccaacgaggccguguccacgcuggggaacggcguccgcgugcucgcgaccgccgugcgggagcugaaggacuucgucagcaagaaccugacccgcgccaucaacaagaacaagugcgacaucgacgaccucaagauggccguguccuucagccaguucaaccggcgcuuccugaacgugguccggcaguucuccgacaacgccgggaucacccccgcgaucagccuggaccucaugacggacgccgagcuggcccgcgccgugccgaacaugcccaccuccgccggccagaucaagcugaugcucgagaaccgggcgauggugcgccggaagggcuucgggauccugaucggcgucuacgggagcagcgugaucuacauggugcagcugcccaucuucggcgucaucgacacccccugcuggaucgugaaggccgccccguccugcagcgagaagaagggcaacuacgccugccuccugcgcgaggaccaggggugguacugccagaacgccggcuccaccgucuacuaccccaacgagaaggacugcgagacgcgcggggaccacguguucugcgacaccgcggccggcaucaacguggccgagcagagcaaggagugcaacaucaacaucuccaccaccaacuaccccugcaaggucagcacggggcggcaccccaucuccaugguggcccugagcccgcucggcgcgcugguggccugcuacaagggcgucuccugcagcaucggguccaaccgggugggcaucaucaagcagcugaacaaggggugcagcuacaucaccaaccaggacgccgacaccgugaccaucgacaacacggucuaccagcucuccaagguggagggcgagcagcacgugaucaaggggcgccccgucagcuccagcuucgaccccaucaaguuccccgaggaccaguuccagguggcccuggaccagguguucgagaacaucgagaacucccaggcccuggucgaccagagcaaccggauccucuccagcgcggagaagggcaacaccggcuucaucaucgugaucauccugaucgccgugcuggggagcuccaugauccucgucagcaucuucaucaucaucaagaagaccaagaagccgaccggcgccccgcccgagcuguccggggugacgaacaacggcuucaucccccacaacugaggacuaguuauaagacugacuagcccgaugggccucccaacgggcccuccuccccuccuugcaccgagauuaauaaaaaaaaaaaaaaaaaaaaaaaaaaaaaaaaaaaaaaaaaaaaaaaaaaaaaaaaaaaaaaaaugcaucccccccccccccccccccccccccccccccaaaggcucuuuucagagccaccagaauu

SEQ ID NO: 14764 - RNA, 1837 nt, Artificial Sequence
  HMPV/TN/92-4__ABM67072.1 fusion glycoprotein mRNA gc (variant)
aggagaaagcuuaccaugagcuggaagguggucaucaucuucucccugcucaucacgccccagcacggccugaaggagagcuaccuggaggaguccugcagcaccaucaccgagggguaccucuccgugcugcgcaccggcugguacaccaacguguucacccuggaggucggggacguggagaaccucacgugcagcgacggccccucccugaucaagaccgagcuggaccucaccaagagcgcccugcgggagcugaagaccguguccgccgaccagcucgcgcgcgaggagcagaucgagaaccccgggagcggcuccuucguccugggcgccaucgcccuggggguggccgccgcggccgccgugacggccggcgucgcgaucgccaagaccauccggcucgagagcgaggugaccgccaucaacaacgcccugaagaagaccaacgaggccguguccacgcuggggaacggcguccgcgugcucgcgaccgccgugcgggagcugaaggacuucgucagcaagaaccugacccgcgccaucaacaagaacaagugcgacaucgacgaccucaagauggccguguccuucagccaguucaaccggcgcuuccugaacgugguccggcaguucuccgacaacgccgggaucacccccgcgaucagccuggaccucaugacggacgccgagcuggcccgcgccgugcccaacaugccgaccuccgccggccagaucaagcugaugcucgagaaccgggcgauggugcgccggaagggcuucgggauccugaucggcgucuacgggagcagcgugaucuacauggugcagcugcccaucuucggcgucaucgacacccccugcuggaucgugaaggccgcccccuccugcagcgagaagaagggcaacuacgccugccuccugcgcgaggaccaggggugguacugccagaacgccggcuccaccgucuacuacccgaacgagaaggacugcgagacgcgcggggaccacguguucugcgacaccgcggccggcaucaacguggccgagcagagcaaggagugcaacaucaacaucuccaccaccaacuaccccugcaaggucagcacggggcggcaccccaucuccaugguggcccugagcccccucggcgcgcugguggccugcuacaagggcgucuccugcagcaucggguccaaccgggugggcaucaucaagcagcugaacaaggggugcagcuacaucaccaaccaggacgccgacaccgugaccaucgacaacacggucuaccagcucuccaagguggagggcgagcagcacgugaucaaggggcgcccggucagcuccagcuucccgcccaucaaguuccccgaggaccaguuccagguggcccuggaccagguguucgagaacaucgagaacucccaggcccuggucgaccagagcaaccggauccucuccagcgcggagaagggcaacaccggcuucaucaucgugaucauccugaucgccgugcuggggagcuccaugauccucgucagcaucuucaucaucaucaagaagaccaagaagcccaccggcgccccgcccgagcuguccggggugacgaacaacggcuucaucccccacaacugaggacuaguuauaagacugacuagcccgaugggccucccaacgggcccuccuccccuccuugcaccgagauuaauaaaaaaaaaaaaaaaaaaaaaaaaaaaaaaaaaaaaaaaaaaaaaaaaaaaaaaaaaaaaaaaaugcaucccccccccccccccccccccccccccccccaaaggcucuuuucagagccaccagaauu

SEQ ID NO: 14765 - RNA, 1837 nt, Artificial Sequence
  HMPV/TN/92-4__ABM67072.1 fusion glycoprotein mRNA gc (variant)
aggagaaagcuuaccaugagcuggaagguggucaucaucuucucccugcucaucacgccccagcacggccugaaggagagcuaccuggaggaguccugcagcaccaucaccgagggguaccucuccgugcugcgcaccggcugguacaccaacguguucacccuggaggucggggacguggagaaccucacgugcagcgacggcccgucccugaucaagaccgagcuggaccucaccaagagcgcccugcgggagcugaagaccguguccgccgaccagcucgcgcgcgaggagcagaucgagaaccccgggagcggcuccuucguccugggcgccaucgcccuggggguggccgccgcggccgccgugacggccggcgucgcgaucgccaagaccauccggcucgagagcgaggugaccgccaucaacaacgcccugaagaagaccaacgaggccguguccacgcuggggaacggcguccgcgugcucgcgaccgccgugcgggagcugaaggacuucgucagcaagaaccugacccgcgccaucaacaagaacaagugcgacaucgacgaccucaagauggccguguccuucagccaguucaaccggcgcuuccugaacgugguccggcaguucuccgacaacgccgggaucacccccgcgaucagccuggaccucaugacggacgccgagcuggcccgcgccgugcccaacaugccgaccuccgccggccagaucaagcugaugcucgagaaccgggcgauggugcgccggaagggcuucgggauccugaucggcgucuacgggagcagcgugaucuacauggugcagcugcccaucuucggcgucaucgacacccccugcuggaucgugaaggccgcccccuccugcagcgagaagaagggcaacuacgccugccuccugcgcgaggaccaggggugguacugccagaacgccggcuccaccgucuacuacccgaacgagaaggacugcgagacgcgcggggaccacguguucugcgacaccgcggccggcaucaacguggccgagcagagcaaggagugcaacaucaacaucuccaccaccaacuaccccugcaaggucagcacggggcggcaccccaucuccaugguggcccugagcccccucggcgcgcugguggccugcuacaagggcgucuccugcagcaucggguccaaccgggugggcaucaucaagcagcugaacaaggggugcagcuacaucaccaaccaggacgccgacaccgugaccaucgacaacacggucuaccagcucuccaagguggagggcgagcagcacgugaucaaggggcgcccggucagcuccagcuucgaccccaucaaguuccccgagaaccaguuccagguggcccuggaccagguguucgagaacaucgagaacucccaggcccuggucgaccagagcaaccggauccucuccagcgcggagaagggcaacaccggcuucaucaucgugaucauccugaucgccgugcuggggagcuccaugauccucgucagcaucuucaucaucaucaagaagaccaagaagcccaccggcgccccgcccgagcuguccggggugacgaacaacggcuucaucccccacaacugaggacuaguuauaagacugacuagcccgaugggccucccaacgggcccuccuccccuccuugcaccgagauuaauaaaaaaaaaaaaaaaaaaaaaaaaaaaaaaaaaaaaaaaaaaaaaaaaaaaaaaaaaaaaaaaaugcaucccccccccccccccccccccccccccccccaaaggcucuuuucagagccaccagaauu

SEQ ID NO: 14766 - RNA, 1837 nt, Artificial Sequence
  HMPV/TN/92-4__ABM67072.1 fusion glycoprotein mRNA gc (variant)
aggagaaagcuuaccaugagcuggaagguggucaucaucuucucccugcucaucacgccccagcacggccugaaggagagcuaccuggaggaguccugcagcaccaucaccgagggguaccucuccgugcugcgcaccggcugguacaccaacguguucacccuggaggucggggacguggagaaccucacgugcagcgacggcccgucccugaucaagaccgagcuggaccucaccaagagcgcccugcgggagcugaagaccguguccgccgaccagcucgcgcgcgaggagcagaucgagaaccccgggagcggcuccuucguccugggcgccaucgcccuggggguggccgccgcggccgccgugacggccggcgucgcgaucgccaagaccauccggcucgagagcgaggugaccgccaucaacaacgcccugaagaagaccaacgaggccguguccacgcuggggaacggcguccgcgugcucgcgaccgccgugcgggagcugaaggacuucgucagcaagaaccugacccgcgccaucaacaagaacaagugcgacaucgacgaccucaagauggccguguccuucagccaguucaaccggcgcuuccugaacgugguccggcaguucuccgacaacgccgggaucacccccgcgaucagccuggaccucaugacggacgccgagcuggcccgcgccgugcccaacaugccgaccuccgccggccagaucaagcugaugcucgagaaccgggcgauggugcgccggaagggcuucgggauccugaucggcgucuacgggagcagcgugaucuacauggugcagcugcccaucuucggcgucaucgacacccccugcuggaucgugaaggccgcccccuccugcagcgagaagaagggcaacuacgccugccuccugcgcgaggaccaggggugguacugccagaacgccggcuccaccgucuacuacccgaacgagaaggacugcgagacgcgcggggaccacguguucugcgacaccgcggccggcaucaacguggccgagcagagcaaggagugcaacaucaacaucuccaccaccaacuaccccugcaaggucagcacggggcggcaccccaucuccaugguggcccugagcccccucggcgcgcugguggccugcuacaagggcgucuccugcagcaucggguccaaccgggugggcaucaucaagcagcugaacaaggggugcagcuacaucaccaaccaggacgccgacaccgugaccaucgacaacacggucuaccagcucuccaagguggagggcgagcagcacgugaucaaggggcgcccggucagcuccagcuucgaccccaucaaguucccccaggaccaguuccagguggcccuggaccagguguucgagaacaucgagaacucccaggcccuggucgaccagagcaaccggauccucuccagcgcggagaagggcaacaccggcuucaucaucgugaucauccugaucgccgugcuggggagcuccaugauccucgucagcaucuucaucaucaucaagaagaccaagaagcccaccggcgccccgcccgagcuguccggggugacgaacaacggcuucaucccccacaacugaggacuaguuauaagacugacuagcccgaugggccucccaacgggcccuccuccccuccuugcaccgagauuaauaaaaaaaaaaaaaaaaaaaaaaaaaaaaaaaaaaaaaaaaaaaaaaaaaaaaaaaaaaaaaaaaugcaucccccccccccccccccccccccccccccccaaaggcucuuuucagagccaccagaauu

SEQ ID NO: 14767 - RNA, 1837 nt, Artificial Sequence
  HMPV/TN/92-4__ABM67072.1 fusion glycoprotein mRNA gc (variant)
aggagaaagcuuaccaugagcuggaagguggucaucaucuucucccugcucaucacgccccagcacggccugaaggagagcuaccuggaggaguccugcagcaccaucaccgagggguaccucuccgugcugcgcaccggcugguacaccaacguguucacccuggaggucggggacguggagaaccucacgugcagcgacggcccgucccugaucaagaccgagcuggaccucaccaagagcgcccugcgggagcugaagaccguguccgccgaccagcucgcgcgcgaggagcagaucgagaaccccgggagcggcuccuucguccugggcgccaucgcccuggggguggccgccgcggccgccgugacggccggcgucgcgaucgccaagaccauccggcucgagagcgaggugaccgccaucaacaacgcccugaagaagaccaacgaggccguguccacgcuggggaacggcguccgcgugcucgcgaccgccgugcgggagcugaaggacuucgucagcaagaaccugacccgcgccaucaacaagaacaagugcgacaucgacgaccucaagauggccguguccuucagccaguggaaccggcgcuuccugaacgugguccggcaguucuccgacaacgccgggaucacccccgcgaucagccuggaccucaugacggacgccgagcuggcccgcgccgugcccaacaugccgaccuccgccggccagaucaagcugaugcucgagaaccgggcgauggugcgccggaagggcuucgggauccugaucggcgucuacgggagcagcgugaucuacauggugcagcugcccaucuucggcgucaucgacacccccugcuggaucgugaaggccgcccccuccugcagcgagaagaagggcaacuacgccugccuccugcgcgaggaccaggggugguacugccagaacgccggcuccaccgucuacuacccgaacgagaaggacugcgagacgcgcggggaccacguguucugcgacaccgcggccggcaucaacguggccgagcagagcaaggagugcaacaucaacaucuccaccaccaacuaccccugcaaggucagcacggggcggcaccccaucuccaugguggcccugagcccccucggcgcgcugguggccugcuacaagggcgucuccugcagcaucggguccaaccgggugggcaucaucaagcagcugaacaaggggugcagcuacaucaccaaccaggacgccgacaccgugaccaucgacaacacggucuaccagcucuccaagguggagggcgagcagcacgugaucaaggggcgcccggucagcuccagcuucgaccccaucaaguuccccgaggaccaguuccagguggcccuggaccagguguucgagaacaucgagaacucccaggcccuggucgaccagagcaaccggauccucuccagcgcggagaagggcaacaccggcuucaucaucgugaucauccugaucgccgugcuggggagcuccaugauccucgucagcaucuucaucaucaucaagaagaccaagaagcccaccggcgccccgcccgagcuguccggggugacgaacaacggcuucaucccccacaacugaggacuaguuauaagacugacuagcccgaugggccucccaacgggcccuccuccccuccuugcaccgagauuaauaaaaaaaaaaaaaaaaaaaaaaaaaaaaaaaaaaaaaaaaaaaaaaaaaaaaaaaaaaaaaaaaugcaucccccccccccccccccccccccccccccccaaaggcucuuuucagagccaccagaauu

SEQ ID NO: 14768 - RNA, 1837 nt, Artificial Sequence
  HMPV/NL/1/99__AAQ90145.1 fusion glycoprotein mRNA gc (F0)
aggagaaagcuuaccaugagcuggaaggugaugaucaucaucucccugcucaucacgccccagcacggccugaaggagagcuaccuggaggaguccugcagcaccaucaccgagggguaccucuccguccugcgcaccggcugguacaccaacguguucacccuggaggugggggacgucgagaaccucacgugcaccgacggcccgagccugaucaagaccgagcuggaccucaccaaguccgcccugcgggagcugaagacggugagcgccgaccagcucgcgcgcgaggagcagaucgagaacccccggcagucccgcuucgugcugggggccaucgcccugggcgucgccaccgccgcggccgugaccgccggcaucgccaucgcgaagaccauccggcucgagagcgaggugaacgccaucaagggggcccugaagcagacgaacgaggccgucuccacccugggcaacggggugcgcgugcucgccaccgcgguccgggagcugaaggaguucgugagcaagaaccugaccuccgccaucaaccgcaacaagugcgacaucgccgaccucaagauggccgugagcuucucccaguucaaccggcgcuuccugaacgucgugcggcaguucagcgacaacgccggcaucacgcccgcgaucucccuggaccucaugaccgacgccgagcuggcccgcgccgugagcuacaugcccaccuccgccgggcagaucaagcugaugcucgagaaccgggcgaugguccgccggaagggcuucggcauccugaucgggguguacggcagcagcgugaucuacaugguccagcugccgaucuucggggugaucgacacccccugcuggaucaucaaggccgcccccuccugcagcgagaagaacggcaacuacgccugccuccugcgcgaggaccagggcugguacugcaagaacgccggguccacgguguacuaccccaacgagaaggacugcgagacccggggcgaccacgucuucugcgacaccgcggccgggaucaacguggccgagcagagccgcgagugcaacaucaacaucuccaccacgaacuacccgugcaaggucagcaccggccggcaccccaucuccaugguggcccugagcccccucggggcgcugguggccugcuacaagggcgucuccugcagcaucggcuccaacuggguggggaucaucaagcagcugcccaagggcugcagcuacaucaccaaccaggacgccgacaccgugacgaucgacaacaccgucuaccagcucuccaagguggagggggagcagcacgugaucaagggccgcccggucagcuccagcuucgaccccaucaaguuccccgaggaccaguucaacguggcccuggaccagguguucgaguccaucgagaacagccaggcccuggucgaccaguccaacaagauccucaacagcgcggagaaggggaacaccggcuucaucaucguggugauccuggucgccgugcugggccucaccaugaucagcguguccaucaucaucaucaucaagaagacgcggaagcccaccggggccccgcccgagcugaacggcgucaccaacgggggcuucaucccccacagcugaggacuaguuauaagacugacuagcccgaugggccucccaacgggcccuccuccccuccuugcaccgagauuaauaaaaaaaaaaaaaaaaaaaaaaaaaaaaaaaaaaaaaaaaaaaaaaaaaaaaaaaaaaaaaaaaugcaucccccccccccccccccccccccccccccccaaaggcucuuuucagagccaccagaauu

SEQ ID NO: 14769 - RNA, 1837 nt, Artificial Sequence
  HMPV/Sabana__AEA02280.1 fusion glycoprotein mRNA gc (F0)
aggagaaagcuuaccaugagcuggaaggugaugaucaucaucucccugcucaucacgccccagcacggccugaaggagagcuaccuggaggaguccugcagcaccaucaccgagggguaccucuccguccugcgcaccggcugguacaccaacguguucacccuggaggugggggacgucgagaaccucacgugcaccgacggcccgagccugaucaagaccgagcuggaccucaccaaguccgcccugcgggagcugaagacggugagcgccgaccagcucgcgcgcgaggagcagaucgagaacccccggcagucccgcuucgugcugggggccaucgcccugggcgucgccaccgccgcggccgugaccgccggcaucgccaucgcgaagaccauccggcucgagagcgaggugaacgccaucaagggggcccugaagacgaccaacgaggccgucuccacccugggcaacggggugcgcgugcucgccaccgcgguccgggagcugaaggaguucgugagcaagaaccugacguccgccaucaacaagaacaagugcgacaucgccgaccucaagauggccgugagcuucucccaguucaaccgccgguuccugaacgucgugcgccaguucagcgacaacgccggcaucacccccgcgaucucccuggaccucaugaacgacgccgagcuggcccgggccgugagcuacaugcccaccuccgccgggcagaucaagcugaugcucgagaaccgcgcgaugguccggcgcaagggcuucggcauccugaucgggguguacggcagcagcgugaucuacaugguccagcugccgaucuucggggugaucaacacccccugcuggaucaucaaggccgcccccuccugcagcgagaaggacggcaacuacgccugccuccugcgggaggaccagggcugguacugcaagaacgccggguccacgguguacuaccccaacgagaaggacugcgagacccgcggcgaccacgucuucugcgacaccgcggccgggaucaacguggccgagcagagccgggagugcaacaucaacaucuccaccacgaacuacccgugcaaggucagcaccggccgccaccccaucuccaugguggcccugagcccccucggggcgcugguggccugcuacaagggcgucuccugcagcaccggcuccaaccagguggggaucaucaagcagcugcccaagggcugcagcuacaucaccaaccaggacgccgacacggugaccaucgacaacaccgucuaccagcucuccaagguggagggggagcagcacgugaucaagggccggccggucagcuccagcuucgaccccauccgcuuccccgaggaccaguucaacguggcccuggaccagguguucgaguccaucgagaacagccaggcccuggucgaccaguccaacaagauccucaacagcgcggagaaggggaacaccggcuucaucaucgugaucauccugaucgccgugcugggccucacgaugaucagcgucuccaucaucaucaucaucaagaagacccggaagcccaccggggccccgcccgagcugaacggcgugaccaacgggggcuucaucccccacagcugaggacuaguuauaagacugacuagcccgaugggccucccaacgggcccuccuccccuccuugcaccgagauuaauaaaaaaaaaaaaaaaaaaaaaaaaaaaaaaaaaaaaaaaaaaaaaaaaaaaaaaaaaaaaaaaaugcaucccccccccccccccccccccccccccccccaaaggcucuuuucagagccaccagaauu

SEQ ID NO: 14770 - RNA, 1837 nt, Artificial Sequence
  HMPV/TN/92-4__ABM67072.1 fusion glycoprotein mRNA human (F0)
aggagaaagcuuaccaugagcuggaagguggucaucauuuucucccugcucauaacaccccagcacggccuuaaagagucuuaccuggaagagucaugcaguaccaucacugaaggguauuugagcguuuuaagaacgggaugguacaccaacguguuuacacuggagguaggugacguggaaaaucuaacuuguuccgauggcccuucucucauuaagaccgagcuggaccuuacaaaaucggcccugagggaguugaagaccgucucagcugaucaacucgcacgggaggaacagaucgaaaacccacgccagagccgauucgugcugggggccauugcgcugggaguugcugccgcagccgcugugacugcaggcgucgccaucgcuaaaacaauacgucucgagagugaggugaccgccaucaauaacgcguuaaagaagacgaaugaagcaguauccacucuggguaacgggguuagagugcuugccaccgcugucagggaguugaaagacuuugugucuaagaaucugacacgggccauuaacaaaaauaagugcgauaucgacgaucuaaaaauggcagugagcuucucccaguuuaaccgcagauuccucaaugucguuaggcaauuuucagacaacgcuggaauuacuccggccaucagucuggaucuuaugaccgacgcggaacuggcccgggcagugcccaauaugccuacaagcgcuggccagauaaaguugaugcucgagaaccgcgccaugguacgaagaaagggcuucgggauucugaucggaguguaugguucuuccgucauuuacauggugcaguuaccaaucuuuggcguuaucgauacccccuguuggauugugaaagcugccccuucaugcagcgaaaagaaagggaauuaugcaugucugcucagggaggaccagggaugguacugccaaaacgccggcaguacggucuauuacccaaacgagaaggauugugaaacucggggugaccauguguucugcgacacagcugcggggauaaauguagcagagcagucuaaagaauguaacaucaauauuuccaccacuaacuaccccugcaagguuagcacaggacgucacccuaucucgaugguggcccuuucuccacugggcgcuuuggucgccuguuauaaaggcguguccugcucaauagggaguaaucgcgucggaauuaucaagcagcuaaacaaggguugcagcuacaucaccaaucaggaugcagacacggugaccauugauaacacaguuuaucaacuguccaaaguggagggcgaacagcauguaaucaaggggagaccggucucuagcucauuugaccccauuaaauucccugaggaucaguuuaauguggcccucgaccaaguuuucgagaacauagaaaauagucaggcucugguggaucaguccaacaggauccuuagcucugccgagaagggaaauacuggcuucauuaucgucaucauucugauagcaguguuggguucaaguaugauccucguaagcauuuuuaucauuaucaaaaagaccaagaaaccaacaggggcgcccccugaacuguccggcgugacuaacaauggauucauaccacacaacugaggacuaguuauaagacugacuagcccgaugggccucccaacgggcccuccuccccuccuugcaccgagauuaauaaaaaaaaaaaaaaaaaaaaaaaaaaaaaaaaaaaaaaaaaaaaaaaaaaaaaaaaaaaaaaaaugcaucccccccccccccccccccccccccccccccaaaggcucuuuucagagccaccagaauu

SEQ ID NO: 14771 - RNA, 1837 nt, Artificial Sequence
  HMPV/TN/92-4__ABM67072.1 fusion glycoprotein mRNA human (variant)
aggagaaagcuuaccaugagcuggaagguggucaucauuuucucccugcucauaacaccccagcacggccuuaaagagucuuaccuggaagagucaugcaguaccaucacugaaggguauuugagcguuuuaagaacgggaugguacaccaacguguuuacacuggagguaggugacguggaaaaucuaacuuguuccgauggcccuucucucauuaagaccgagcuggaccuuacaaaaucggcccugagggaguugaagaccgucucagcugaucaacucgcacgggaggaacagaucgaaaacccagggagcggaaguuucgugcugggcgccauugcgcuggguguugcugccgcagccgcugugacugcaggggucgccaucugcaaaacaauacgccucgaguccgaggugaccgcuaucaauaacgccuuaaagaagacgaaugaagcgguaucuacucugggaaacggcguucgagugcuugcauuugccguccgugaguugaaagacuucgugagcaagaaucugaccagagcucuaaacaaaaauaagugugauauugacgaucucaaaauggccguguccuuuucacaguucaacaggcgguuucugaaugucguucgccaguucagugacaacgcaggcaucacaccggcuauuagccuugaucugaugacugacgccgaauuggcgagagccgugcccaauaugccuaccucugcagggcaaaucaagcucaugcuggagaacagggcuaugguacggcgcaagggauuugguauauuaugcggcguguauggguccucagucauuuacauggugcagcugccaaucuucggaguuauugauacacccuguuggaucgugaaagccgcuccuagcugcagugaaaagaaaggcaauuaugccugucuccuucgagaggaccaggguugguacugccagaacgcagggucuaccgucuauuacccaaacgagaaggauugugaaacgagaggagaccauguguuuugcgacacugccgcuggcaucaauguagcggagcaauccaaagaauguaacauuaauauaagcacaaccaacuaccccugcaagguuucgacuggcaggcacccuaucucuaugguggcacuguccccauugggggcccuagucgcuugcuauaaaggagugucauguaguauugguagcaaucgggucggcaucauaaagcagcugaacaaggggugcuccuacauuacaaaucaggaugccgacaccgugacgaucgauaacaccguuuaucagcucucuaaaguggagggagaacaacauguaaucaagggccguccggucagcucaaguuucgaccccauuaaauuuccugaggaucaguucaauguggcacuggaccagguuuucgagaacaucgaaaauucccaagcccuuguggaucagagcaaccgcauucugucuucagcugagaaggguaauacaggguuuauaaucgucauuaucuugaucgccgugcucggcaguagcaugauucugguauccauauucaucauuaucaaaaagacuaagaaaccaaccggagcacccccugaauuaucuggcgugacaaacaauggguuuauuccacacaacugaggacuaguuauaagacugacuagcccgaugggccucccaacgggcccuccuccccuccuugcaccgagauuaauaaaaaaaaaaaaaaaaaaaaaaaaaaaaaaaaaaaaaaaaaaaaaaaaaaaaaaaaaaaaaaaaugcaucccccccccccccccccccccccccccccccaaaggcucuuuucagagccaccagaauu

SEQ ID NO: 14772 - RNA, 1837 nt, Artificial Sequence
  HMPV/TN/92-4__ABM67072.1 fusion glycoprotein mRNA human (variant)
aggagaaagcuuaccaugagcuggaagguggucaucauuuucucccugcucauaacaccccagcacggccuuaaagagucuuaccuggaagagucaugcaguaccaucacugaaggguauuugagcguuuuaagaacgggaugguacaccaacguguuuacacuggagguaggugacguggaaaaucuaacuuguuccgauggcccuucucucauuaagaccgagcuggaccuuacaaaaucggcccugagggaguugaagaccgucucagcugaucaacucgcacgggaggaacagaucgaaaacccagggagcggaaguuucgugcugggcgccauugcgcuggguguugcugccgcagccgcugugacugcaggggucgccaucugcaaaacaauacgccucgaguccgaggugaccgcuaucaauaacgccuuaaagaagacgaaugaagcgguaucuacucugggaaacggcguucgagugcuugcaaccgccguccgugaguugaaagacuuugugagcaagaaucugacaagagcuauuaacaaaaauaagugugauaucgacgaucuaaaaauggccguguccuucucacaguuuaacaggcgguuccucaaugucguucgccaguuuagugacaacgcaggcauuacuccggcuaucagccuggaucuuaugaccgacgccgaacuggcgagagccgugcccaauaugccuacaucugcagggcaaauaaaguugaugcucgagaacagggcuaugguacggcgcaagggauucgguauucugugcggcguguauggguccucagucaucuacauggugcaguuaccaauuuuuggaguuaucgauacccccuguuggaucgugaaagccgcuccuagcugcagugaaaagaaaggcaauuaugccugucugcuccgagaggaccaggguugguacugccagaacgcagggucuacggucuauuacccaaacgagaaggauugugaaacuagaggagaccauguguucugcgacacagccgcuggcauuaauguagcggagcaauccaaagaauguaacauaaauaucagcaccacuaacuaccccugcaagguuucgacaggcaggcacccuauuucuaugguggcacuuuccccacugggggccuuggucgcuugcuauaaaggagugucauguaguaucgguagcaaucgggucggcauaauuaagcagcuaaacaaggggugcuccuacaucaccaaucaggaugccgacacggugaccaucgauaacacaguuuaucagcugucuaaaguggagggagaacaacauguaauuaagggccguccggucagcucaaguuuugaccccaucaaauucccugagcaccaguggcauguggcacucgaucagguuuuugagaauauugaaaacucccaagcccugguggaccagagcaaucgcauacuuucuucagcugagaaggguaacacuggguucaucauugucaucauccugauugccguguugggcaguagcaugauacucguauccaucuucauuaucauuaaaaagaccaagaaaccaacaggagcacccccugaacugucuggcgugacuaauaacggguuuaucccacacaauugaggacuaguuauaagacugacuagcccgaugggccucccaacgggcccuccuccccuccuugcaccgagauuaauaaaaaaaaaaaaaaaaaaaaaaaaaaaaaaaaaaaaaaaaaaaaaaaaaaaaaaaaaaaaaaaaugcaucccccccccccccccccccccccccccccccaaaggcucuuuucagagccaccagaauu

SEQ ID NO: 14773 - RNA, 1837 nt, Artificial Sequence
  HMPV/TN/92-4__ABM67072.1 fusion glycoprotein mRNA human (variant)
aggagaaagcuuaccaugagcuggaagguggucaucauuuucucccugcucauaacaccccagcacggccuuaaagagucuuaccuggaagagucaugcaguaccaucacugaaggguauuugagcguuuuaagaacgggaugguacaccaacguguuuacacuggagguaggugacguggaaaaucuaacuuguuccgauggcccuucucucauuaagaccgagcuggaccuucugaaaucggccuugagggagcucaagacagucucagcugaucaacuggcacgggaggaacagaucgaaaacccagggagcggaaguuucgugcugggcgccauugcgcucgguguugcugccgcagccgcugugaccgcaggggucgccaucgcuaaaacuauacgcuuagaguccgaggugacagccaucaauaacgcgcugaagaagaccaaugaagcaguaucuacgcuuggaaacggcguucgaguguuggccacugcuguccgugagcugaaagacuuugugagcaagaaucuaaccagagccauuaacaaaaauaagugcgauaucccggaccucaaaauggcaguguccuucucacaguuuaacaggcgguuccugaaugucguucgccaguuuagugauaacgcuggcauuacacccgccaucagccuugaccugaugacugaugcggaauuggccagagcagugccuaauaugccaaccucugcugggcaaauaaagcucaugcuggagaacagggccaugguacggcgcaagggauucgguauuuuaaucggcguguauggguccucagucauuuacauggugcagcugcccaucuuuggaguuaucgacacaccuuguuggauugugaaagcugccccaagcugcagugaaaagaaaggcaauuaugcaugucuccuucgagaggaucaggguugguacugccagaacgccgggucuaccgucuauuaccccaacgagaaggacugugaaacgagaggagaucauguguucugcgacacugcugcgggcauaaauguagcagagcaauccaaagaauguaacaucaauauuagcacaaccaacuacccuugcaagguuucgacuggcaggcacccaaucucuaugguggcccuguccccguugggggcucuagucgccuguuauaaaggagugucaugcaguauagguagcaaucgggucggcauuaucaagcagcugaacaaggggugcuccuacaucacaaaucaggacgcagauaccgugacgauugacaacaccguuuaucagcucucuaaaguggagggagaacaacauguaaucaagggccgucccgucagcucaaguuuugauccuauuaaauucccagaggaccaguuucagguggcccuggaucaaguuuucgagaauauagaaaacucccaggcucuuguggaccagagcaaucgcauccugucuucagccgagaaggguaacacaggguucauuaucgucaucauuuugauagcagugcucggcaguagcaugauccugguauccauuuuuaucauuaucaaaaagacuaagaaacccaccggagcgccuccagaauuaucuggcgugacaaauaacggguucauaccccacaauugaggacuaguuauaagacugacuagcccgaugggccucccaacgggcccuccuccccuccuugcaccgagauuaauaaaaaaaaaaaaaaaaaaaaaaaaaaaaaaaaaaaaaaaaaaaaaaaaaaaaaaaaaaaaaaaaugcaucccccccccccccccccccccccccccccccaaaggcucuuuucagagccaccagaauu

SEQ ID NO: 14774 - RNA, 1837 nt, Artificial Sequence
  HMPV/TN/92-4__ABM67072.1 fusion glycoprotein mRNA human (variant)
aggagaaagcuuaccaugagcuggaagguggucaucauuuucucccugcucauaacaccccagcacggccuuaaagagucuuaccuggaagagucaugcaguaccaucacugaaggguauuugagcguuuuaagaacgggaugguacaccaacguguuuacacuggagguaggugacguggaaaaucuaacuuguuccgauggcccuucucucauuaagaccgagcuggaccuucugaaaucggccuugagggagcucaagacagucucagcugaucaacuggcacgggaggaacagaucgaaaacccagggagcggaaguuucgugcugggcgccauugcgcucgguguugcugccgcagccgcugugaccgcaggggucgccaucgcuaaaacuauacgcuuagaguccgaggugacagccaucaauaacgcgcugaagaagaccaaugaagcaguaucuacgcuuggaaacggcguucgaguguuggccacugcuguccgugagcugaaagacuuugugagcaagaaucuaaccagagccauuaacaaaaauaagugcgauaucccggaccucaaaauggcaguguccuucucacaguuuaacaggcgguuccugaaugucguucgccaguuuagugauaacgcuggcauuacacccgccaucagccuugaccugaugacugaugcggaauuggccagagcagugccuaauaugccaaccucugcugggcaaauaaagcucaugcuggagaacagggccaugguacggcgcaagggauucgguauuuuaaucggcguguauggguccucagucauuuacauggugcagcugcccaucuuuggaguuaucgacacaccuuguuggauugugaaagcugccccaagcugcagugaaaagaaaggcaauuaugcaugucuccuucgagaggaucaggguugguacugccagaacgccgggucuaccgucuauuaccccaacgagaaggacugugaaacgagaggagaucauguguucugcgacacugcugcgggcauaaauguagcagagcaauccaaagaauguaacaucaauauuagcacaaccaacuacccuugcaagguuucgacuggcaggcacccaaucucuaugguggcccuguccccguugggggcucuagucgccuguuauaaaggagugucaugcaguauagguagcaaucgggucggcauuaucaagcagcugaacaaggggugcuccuacaucacaaaucaggacgcagauaccgugacgauugacaacaccguuuaucagcucucuaaaguggagggagaacaacauguaaucaagggccgucccgucagcucaaguuuugauccuauuaaauucccagagaaucaguuucagguggcccuggaccaaguuuucgagaacauagaaaauucccaggcucuuguggaucagagcaaccgcauccugucuucagccgagaaggguaauacaggguucauuaucgucaucauuuugauagcagugcucggcaguagcaugauccugguauccauuuuuaucauuaucaaaaagacuaagaaacccaccggagcgccuccagaauuaucuggcgugacaaacaauggguucauaccccacaacugaggacuaguuauaagacugacuagcccgaugggccucccaacgggcccuccuccccuccuugcaccgagauuaauaaaaaaaaaaaaaaaaaaaaaaaaaaaaaaaaaaaaaaaaaaaaaaaaaaaaaaaaaaaaaaaaugcaucccccccccccccccccccccccccccccccaaaggcucuuuucagagccaccagaauu

SEQ ID NO: 14775 - RNA, 1837 nt, Artificial Sequence
  HMPV/TN/92-4__ABM67072.1 fusion glycoprotein mRNA human (variant)
aggagaaagcuuaccaugagcuggaagguggucaucauuuucucccugcucauaacaccccagcacggccuuaaagagucuuaccuggaagagucaugcaguaccaucacugaaggguauuugagcguuuuaagaacgggaugguacaccaacguguuuacacuggagguaggugacguggaaaaucuaacuuguuccgauggcccuucucucauuaagaccgagcuggaccuucugaaaucggccuugagggagcucaagacagucucagcugaucaacuggcacgggaggaacagaucgaaaacccagggagcggaaguuucgugcugggcgccauugcgcucgguguugcugccgcagccgcugugaccgcaggggucgccaucgcuaaaacuauacgcuuagaguccgaggugacagccaucaauaacgcgcugaagaagaccaaugaagcaguaucuacgcuuggaaacggcguucgaguguuggccacugcuguccgugagcugaaagacuuugugcuaaagaaucucaccagagccauuaacaaaaauaagugcgauaucccggaccugaaaauggcagugagcuucucccaguuuaacaggcgguuccuuaaugucguucgccaguuuucagauaacgcuggcauuacacccgccaucagucuggacuugaugacugaugcggaacucgccagagcagugccuaauaugccaaccagcgcugggcaaauaaagcugauguuagagaacagggccaugguacggcgcaagggauucgguauucugaucggcguguaugggucuuccgucauuuacauggugcagcuccccaucuuuggaguuaucgacacaccuuguuggauugugaaagcugccccaucaugcagcgaaaagaaaggcaauuaugcaugucuucugcgagaggaucaggguugguacugccagaacgccgggaguaccgucuauuaccccaacgagaaggacugugaaacgagaggagaucauguguucugcgacacugcugcgggcauaaauguagcagagcaaucuaaagaauguaacaucaauauuuccacaaccaacuacccuugcaagguuagcacuggcaggcacccaaucucgaugguggccuugucuccgcuaggggcucuggucgccuguuauaaaggaguguccugcucaauagguaguaaucgggucggcauuaucaagcagcucaacaaggggugcagcuacaucacaaaucaggacgcagauaccgugacgauugacaacaccguuuaucagcuguccaaaguggagggagaacaacauguaaucaagggccgucccgucucuagcucauuugauccuauuaaauucccagaggaccaguuucagguggcccuugaucaaguuuucgagaauauagaaaacagucaggcucugguggaccaguccaaucgcaucuugagcucugccgagaaggguaacacaggguucauuaucgucaucauucucauagcagugcugggcucaaguaugaucuuaguaagcauuuuuaucauuaucaaaaagacuaagaaacccaccggagcgccuccagaacuguccggcgugacaaauaacggguucauaccccacaauugaggacuaguuauaagacugacuagcccgaugggccucccaacgggcccuccuccccuccuugcaccgagauuaauaaaaaaaaaaaaaaaaaaaaaaaaaaaaaaaaaaaaaaaaaaaaaaaaaaaaaaaaaaaaaaaaugcaucccccccccccccccccccccccccccccccaaaggcucuuuucagagccaccagaauu

SEQ ID NO: 14776 - RNA, 1837 nt, Artificial Sequence
  HMPV/TN/92-4__ABM67072.1 fusion glycoprotein mRNA human (variant)
aggagaaagcuuaccaugagcuggaagguggucaucauuuucucccugcucauaacaccccagcacggccuuaaagagucuuaccuggaagagucaugcaguaccaucacugaaggguauuugagcguuuuaagaacgggaugguacaccaacguguuuacacuggagguaggugacguggaaaaucuaacuuguuccgauggcccuucucucauuaagaccgagcuggaccuucugaaaucggccuugagggagcucaagacagucucagcugaucaacuggcacgggaggaacagaucgaaaacccagggagcggaaguuucgugcugggcgccauugcgcucgguguugcugccgcagccgcugugaccgcaggggucgccaucgcuaaaacuauacgcuuagaguccgaggugacagccaucaauaacgcgcugaagaagaccaaugaagcaguaucuacgcuuggaaacggcguucgaguguuggccacugcuguccgugagcugaaagacuuugugcuaaagaaucucaccagagccauuaacaaaaauaagugcgauaucccggaccugaaaauggcagugagcuucucccaguuuaacaggcgguuccuuaaugucguucgccaguuuucagauaacgcuggcauuacacccgccaucagucuggacuugaugacugaugcggaacucgccagagcagugccuaauaugccaaccagcgcugggcaaauaaagcugauguuagagaacagggccaugguacggcgcaagggauucgguauucugaucggcguguaugggucuuccgucauuuacauggugcagcuccccaucuuuggaguuaucgacacaccuuguuggauugugaaagcugccccaucaugcagcgaaaagaaaggcaauuaugcaugucuucugcgagaggaucaggguugguacugccagaacgccgggaguaccgucuauuaccccaacgagaaggacugugaaacgagaggagaucauguguucugcgacacugcugcgggcauaaauguagcagagcaaucuaaagaauguaacaucaauauuuccacaaccaacuacccuugcaagguuagcacuggcaggcacccaaucucgaugguggccuugucuccgcuaggggcucuggucgccuguuauaaaggaguguccugcucaauagguaguaaucgggucggcauuaucaagcagcucaacaaggggugcagcuacaucacaaaucaggacgcagauaccgugacgauugacaacaccguuuaucagcuguccaaaguggagggagaacaacauguaaucaagggccgucccgucucuagcucauuugauccuauuaaauucccagagaaucaguuucagguggcccuugaccaaguuuucgagaacauagaaaauagucaggcucugguggaucaguccaaccgcaucuugagcucugccgagaaggguaauacaggguucauuaucgucaucauucucauagcagugcugggcucaaguaugaucuuaguaagcauuuuuaucauuaucaaaaagacuaagaaacccaccggagcgccuccagaacuguccggcgugacaaacaauggguucauaccccacaacugaggacuaguuauaagacugacuagcccgaugggccucccaacgggcccuccuccccuccuugcaccgagauuaauaaaaaaaaaaaaaaaaaaaaaaaaaaaaaaaaaaaaaaaaaaaaaaaaaaaaaaaaaaaaaaaaugcaucccccccccccccccccccccccccccccccaaaggcucuuuucagagccaccagaauu

SEQ ID NO: 14777 - RNA, 1837 nt, Artificial Sequence
  HMPV/TN/92-4__ABM67072.1 fusion glycoprotein mRNA human (variant)
aggagaaagcuuaccaugagcuggaagguggucaucauuuucucccugcucauaacaccccagcacggccuuaaagagucuuaccuggaagagucaugcaguaccaucacugaaggguauuugagcguuuuaagaacgggaugguacaccaacguguuuacacugccuguaggugacguggagaaucuaacuuguuccgauggcccaucucucauuaagaccgaacuggaccuucugaaaucggccuugagggagcucaagacagucucagcugaucaacuggcacgggaggaacagaucgagaacccggggagcggaaguuucgugcugggcgccauugcgcucgguguugcugccgcagccgcugugaccgcaggggucgccaucgcuaaaacuauacgcuuagaauccgaggugacagccaucaauaacgcgcugaagaagaccaaugaggcaguaucuacgcuuggaaacggcguucgaguguuggccacugcuguccgugaacugaaagacuuugugagcaagaaucuaaccagagccauuaacaaaaauaagugcgauaucgacgaucucaaaauggcaguguccuucucacaguuuaacaggcgguuccugaaugucguucgccaguuuagugacaacgcuggcauuacacccgccaucagccuugaucugaugacugacgcggaguuggccagagcagugccuaauaugccaaccucugcugggcaaauaaagcucaugcuggaaaacagggccaugguacggcgcaagggauucgguauuuuaaucggcguguauggguccucagucauuuacauggugcagcugcccaucuuuggaguuaucgauacaccuuguuggauugugaaagcugccccaagcugcagugagaagaaaggcaauuaugcaugucuccuucgagaagaccaggguugguacugccagaacgccgggucuaccgucuauuaccccaacgagaaggauugugagacgagaggagaccauguguucugcgacacugcugcgggcauaaauguagcagaacaauccaaagaguguaacaucaauauuagcacaaccaacuacccuugcaagguuucgacuggcaggcacccaaucucuaugguggcccuguccccguugggggcucuagucgccuguuauaaaggagugucaugcaguauagguagcaaucgggucggcauuaucaagcagcugaacaaggggugcuccuacaucacaaaucaggaugcagacaccgugacgauugauaacaccguuuaucagcucucuaaaguggaaggagagcaacauguaaucaagggccgucccgucagcucaaguuuugacccuauuaaauucccagaagaucaguuucagguggcccuggaccaaguuuucgagaauauagagaacucccaggcucuuguggaucagagcaaucgcauccugucuucagccgaaaaggguaacacaggguucauuaucgucaucauuuugauagcagugcucggcaguagcaugauccugguauccauuuuuaucauuaucaaaaagacuaagaaacccaccggagcgccuccagaguuaucuggcgugacaaauaacggguucauaccccacaauugaggacuaguuauaagacugacuagcccgaugggccucccaacgggcccuccuccccuccuugcaccgagauuaauaaaaaaaaaaaaaaaaaaaaaaaaaaaaaaaaaaaaaaaaaaaaaaaaaaaaaaaaaaaaaaaaugcaucccccccccccccccccccccccccccccccaaaggcucuuuucagagccaccagaauu

SEQ ID NO: 14778 - RNA, 1837 nt, Artificial Sequence
  HMPV/TN/92-4__ABM67072.1 fusion glycoprotein mRNA human (variant)
aggagaaagcuuaccaugagcuggaagguggucaucauuuucucccugcucauaacaccccagcacggccuuaaagagucuuaccuggaagagucaugcaguaccaucacugaaggguauuugagcguuuuaagaacgggaugguacaccaacguguuuacacugccuguaggugacguggagaaucuaacuuguuccgauggcccaucucucauuaagaccgaacuggaccuucugaaaucggccuugagggagcucaagacagucucagcugaucaacuggcacgggaggaacagaucgagaacccggggagcggaaguuucgugcugggcgccauugcgcucgguguugcugccgcagccgcugugaccgcaggggucgccaucgcuaaaacuauacgcuuagaauccgaggugacagccaucaauaacgcgcugaagaagaccaaugaggcaguaucuacgcuuggaaacggcguucgaguguuggccacugcuguccgugaacugaaagacuuugugagcaagaaucuaaccagagccauuaacaaaaauaagugcgauaucgacgaucucaaaauggcaguguccuucucacaguuuaacaggcgguuccugaaugucguucgccaguuuagugacaacgcuggcauuacacccgccaucagccuugaucugaugacugacgcggaguuggccagagcagugccuaauaugccaaccucugcugggcaaauaaagcucaugcuggaaaacagggccaugguacggcgcaagggauucgguauuuuaaucggcguguauggguccucagucauuuacauggugcagcugcccaucuuuggaguuaucgauacaccuuguuggauugugaaagcugccccaagcugcagugagaagaaaggcaauuaugcaugucuccuucgagaagaccaggguugguacugccagaacgccgggucuaccgucuauuaccccaacgagaaggauugugagacgagaggagaccauguguucugcgacacugcugcgggcauaaauguagcagaacaauccaaagaguguaacaucaauauuagcacaaccaacuacccuugcaagguuucgacuggcaggcacccaaucucuaugguggcccuguccccguugggggcucuagucgccuguuauaaaggagugucaugcaguauagguagcaaucgggucggcauuaucaagcagcugaacaaggggugcuccuacaucacaaaucaggaugcagacaccgugacgauugauaacaccguuuaucagcucucuaaaguggaaggagagcaacauguaaucaagggccgucccgucagcucaaguuuugacccuauuaaauucccagaaaaucaguuucagguggcccuggaucaaguuuucgagaacauagaaaauucccaggcucuuguggaccagagcaaccgcauccugucuucagccgagaaggguaauacaggguucauuaucgucaucauuuugauagcagugcucggcaguagcaugauccugguauccauuuuuaucauuaucaaaaagacuaagaaacccaccggagcgccuccagaguuaucuggcgugacaaacaauggguucauaccccacaacugaggacuaguuauaagacugacuagcccgaugggccucccaacgggcccuccuccccuccuugcaccgagauuaauaaaaaaaaaaaaaaaaaaaaaaaaaaaaaaaaaaaaaaaaaaaaaaaaaaaaaaaaaaaaaaaaugcaucccccccccccccccccccccccccccccccaaaggcucuuuucagagccaccagaauu

SEQ ID NO: 14779 - RNA, 1837 nt, Artificial Sequence
  HMPV/TN/92-4__ABM67072.1 fusion glycoprotein mRNA human (variant)
aggagaaagcuuaccaugagcuggaagguggucaucauuuucucccugcucauaacaccccagcacggccuuaaagagucuuaccuggaagagucaugcaguaccaucacugaaggguauuugagcguuuuaagaacgggaugguacaccaacguguuuacacuggagguaggugacguggaaaaucuaacuuguuccgauggcccuucucucauuaagaccgagcuggaccuucugaaaucggccuugagggagcucaagacagucucagcugaucaacuggcacgggaggaacagaucgaaaacccagggagcggaaguuucgugcugggcgccauugcgcucgguguugcugccgcagccgcugugaccgcaggggucgccaucgcuaaaacuauacgcuuagaguccgaggugacagccaucaauaacgcgcugaagaagaccaaugaagcaguaucuacgcuuggaaacggcguucgaguguuggccacugcuguccgugagcugaaagacuuugugagcaagaaucuaaccagagccauuaacaaaaauaagugcgauaucgacgaucucaaaauggcaguguccuucucacaguuuaacaggcgguuccugaaugucguucgccaguuuagugacaacgcuggcauuacaccggccaucagccuugaucugaugacugacgcggaauuggccagagcagugcccaauaugccuaccucugcugggcaaauaaagcucaugcuggagaacagggccaugguacggcgcaagggauucgguauuuuaaucggcguguauggguccucagucauuuacauggugcagcugccaaucuuuggaguuaucgauacacccuguuggauugugaaagcugccccuagcugcagugaaaagaaaggcaauuaugcaugucuccuucgagaggaccaggguugguacugccagaacgccgggucuaccgucuauuacccaaacgagaaggauugugaaacgagaggagaccauguguucugcgacacugcugcgggcauaaauguagcagagcaauccaaagaauguaacaucaauauuagcacaaccaacuaccccugcaagguuucgacuggcaggcacccuaucucuaugguggcccuguccccauugggggcucuagucgccuguuauaaaggagugucaugcaguauagguagcaaucgggucggcauuaucaagcagcugaacaaggggugcuccuacaucacaaaucaggaugcagacaccgugacgauugauaacaccguuuaucagcucucuaaaguggagggagaacaacauguaaucaagggccguccggucagcucaaguuuugaccccauuaaauucccugaggaucaguuucagguggcccuggaccaaguuuucgagaauauagaaaacucccaggcucuuguggaucagagcaaucgcauccugucuucagccgagaaggguaacacaggguucauuaucgucaucauuuugauagcagugcucggcaguagcaugauccugguauccauuuuuaucauuaucaaaaagacuaagaaaccaaccggagcgcccccugaauuaucuggcgugacaaauaacggguucauaccacacaauugaggacuaguuauaagacugacuagcccgaugggccucccaacgggcccuccuccccuccuugcaccgagauuaauaaaaaaaaaaaaaaaaaaaaaaaaaaaaaaaaaaaaaaaaaaaaaaaaaaaaaaaaaaaaaaaaugcaucccccccccccccccccccccccccccccccaaaggcucuuuucagagccaccagaauu

SEQ ID NO: 14780 - RNA, 1837 nt, Artificial Sequence
  HMPV/TN/92-4__ABM67072.1 fusion glycoprotein mRNA human (variant)
aggagaaagcuuaccaugagcuggaagguggucaucauuuucucccugcucauaacaccccagcacggccuuaaagagucuuaccuggaagagucaugcaguaccaucacugaaggguauuugagcguuuuaagaacgggaugguacaccaacguguuuacacuggagguaggugaccuagaaaaucucacuuguuccgauggcccuucucugauuaagaccgagcuugaccugacaaaaucggccuugagggagcucaagaccgugucagcugaucaacuggcacgggaggaacagaucgaaaacccagggagcggaaguuucguccugggcgccauugcgcucgguguggcugccgcagccgcuguuacugcagggguggccaucgcuaaaacaauacgcuuagaguccgaggucaccgccaucaauaacgcgcugaagaagacgaaugaagcagugucuacucuuggaaacggcguacgaguuuuggccaccgcugugcgugagcugaaagacuuugucagcaagaaucuaacaagagccauuaacaaaaauaagugcgauaucgacgaucucaaaauggcaguguccuucucacaguuuaacaggcgguuccugaaugugguccgccaguuuagugacaacgcuggcauuacuccggccaucagccuugaucugaugaccgacgcggaauuggccagagcaguucccaauaugccuacaucugcugggcaaauaaagcucaugcuggagaacagggccauggugcggcgcaagggauucgguauuuuaaucggcguauauggguccucagugauuuacaugguccagcugccaaucuuuggagugaucgauacccccuguuggauuguuaaagcugccccuagcugcagugaaaagaaaggcaauuaugcaugucuccuucgagaggaccaggguugguacugccagaacgccgggucuacgguguauuacccaaacgagaaggauugugaaacuagaggagaccaugucuucugcgacacagcugcgggcauaaauguggcagagcaauccaaagaauguaacaucaauauuagcaccacuaacuaccccugcaagguaucgacaggcaggcacccuaucucuaugguugcccuguccccauugggggcucuaguggccuguuauaaaggagucucaugcaguauagguagcaaucgggugggcauuaucaagcagcugaacaaggggugcuccuacaucaccaaucaggaugcagacacggucaccauugauaacacaguguaucagcucucuaaaguugagggagaacaacaugugaucaagggccguccgguaagcucaaguuuugaccccauuaaauucccugaggaucaguuucaggucgcccuggaccaaguguucgagaauauagaaaacucccaggcucuuguugaucagagcaaucgcauccugucuucagccgagaaggguaacacuggguucauuaucgugaucauuuugauagcaguccucggcaguagcaugauccugguguccauuuuuaucauuaucaaaaagaccaagaaaccaacaggagcgcccccugaauuaucuggcguaacuaauaacggguucauaccacacaauugaggacuaguuauaagacugacuagcccgaugggccucccaacgggcccuccuccccuccuugcaccgagauuaauaaaaaaaaaaaaaaaaaaaaaaaaaaaaaaaaaaaaaaaaaaaaaaaaaaaaaaaaaaaaaaaaugcaucccccccccccccccccccccccccccccccaaaggcucuuuucagagccaccagaauu

SEQ ID NO: 14781 - RNA, 1837 nt, Artificial Sequence
  HMPV/TN/92-4__ABM67072.1 fusion glycoprotein mRNA human (variant)
aggagaaagcuuaccaugagcuggaagguggucaucauuuucucccugcucauaacaccccagcacggccuuaaagagucuuaccuggaagagucaugcaguaccaucacugaaggguauuugagcguuuuaagaacgggaugguacaccaacguguuuacacuggagguaggugacguggaaaaucuaacuuguuccgauggcccuucucucauuaagaccgagcuggaccuuacaaaaucggcccugagggaguugaagaccgucucagcugaucaacucgcacgggaggaacagaucgaaaacccagggagcggaaguuucgugcugggcgccauugcgcuggguguugcugccgcagccgcugugacugcaggggucgccaucgcuaaaacaauacgccucgaguccgaggugaccgccaucaauaacgcguuaaagaagacgaaugaagcaguaucuacucugggaaacggcguucgagugcuugccaccgcuguccgugaguugaaagacuuugugcugaagaaucuaacaagagccauuaacaaaaauaagugcgauaucgacgaucucaaaauggcagugagcuucucccaguuuaacaggcgguuccugaaugucguucgccaguuuucagacaacgcuggcauuacuccggccaucagucuugaucugaugaccgacgcggaauuggccagagcagugcccaauaugccuacaagcgcugggcaaauaaagcucaugcuggagaacagggccaugguacggcgcaagggauucgguauuuuaaucggcguguaugggucuuccgucauuuacauggugcagcugccaaucuuuggaguuaucgauacccccuguuggauugugaaagcugccccuucaugcagcgaaaagaaaggcaauuaugcaugucuccuucgagaggaccaggguugguacugccagaacgccgggaguacggucuauuacccaaacgagaaggauugugaaacuagaggagaccauguguucugcgacacagcugcgggcauaaauguagcagagcaaucuaaagaauguaacaucaauauuuccaccacuaacuaccccugcaagguuagcacaggcaggcacccuaucucgaugguggcccugucuccauugggggcucuagucgccuguuauaaaggaguguccugcucaauagguaguaaucgggucggcauuaucaagcagcugaacaaggggugcagcuacaucaccaaucaggaugcagacacggugaccauugauaacacaguuuaucagcucuccaaaguggagggagaacaacauguaaucaagggccguccggucucuagcucauuugaccccauuaaauucccugaggaucaguuucagguggcccuggaccaaguuuucgagaauauagaaaacagucaggcucuuguggaucaguccaaucgcauccugagcucugccgagaaggguaacacuggguucauuaucgucaucauuuugauagcagugcucggcucaaguaugauccugguaagcauuuuuaucauuaucaaaaagaccaagaaaccaacaggagcgcccccugaauuauccggcgugacuaauaacggguucauaccacacaauugaggacuaguuauaagacugacuagcccgaugggccucccaacgggcccuccuccccuccuugcaccgagauuaauaaaaaaaaaaaaaaaaaaaaaaaaaaaaaaaaaaaaaaaaaaaaaaaaaaaaaaaaaaaaaaaaugcaucccccccccccccccccccccccccccccccaaaggcucuuuucagagccaccagaauu

SEQ ID NO: 14782 - RNA, 1837 nt, Artificial Sequence
  HMPV/TN/92-4__ABM67072.1 fusion glycoprotein mRNA human (variant)
aggagaaagcuuaccaugagcuggaagguggucaucauuuucucccugcucauaacaccccagcacggccuuaaagagucuuaccuggaagagucaugcaguaccaucacugaaggguauuugagcguuuuaagaacgggaugguacaccaacguguuuacacuggagguaggugacguggaaaaucuaacuuguuccgauggcccuucucucauuaagaccgagcuggaccuuacaaaaucggcccugagggaguugaagaccgucucagcugaucaacucgcacgggaggaacagaucgaaaacccagggagcggaaguuucgugcugggcgccauugcgcuggguguugcugccgcagccgcugugacugcaggggucgccaucgcuaaaacaauacgccucgaguccgaggugaccgccaucaauaacgcguuaaagaagacgaaugaagcaguaucuacucugggaaacggcguucgagugcuugccaccgcuguccgugaguugaaagacuuugugagcaagaaucuguggagagccauuaacaaaaauaagugcgauaucgacgaucuaaaaauggcaguguccuucucacaguuuaacaggcgguuccucaaugucguucgccaguuuagugacaacgcuggcauuacaccggccaucagccuggaucuuaugacugacgcggaacuggccagagcagugcccaauaugccuaccucugcugggcaaauaaaguugaugcucgagaacagggccaugguacggcgcaagggauucgguauucugaucggcguguauggguccucagucauuuacauggugcaguuaccaaucuuuggaguuaucgauacacccuguuggauugugaaagcugccccuagcugcagugaaaagaaaggcaauuaugcaugucugcuccgagaggaccaggguugguacugccagaacgccgggucuaccgucuauuacccaaacgagaaggauugugaaacgagaggagaccauguguucugcgacacugcugcgggcauaaauguagcagagcaauccaaagaauguaacaucaauauuagcacaaccaacuaccccugcaagguuucgacuggcaggcacccuaucucuaugguggcccuuuccccacugggggcuuuggucgccuguuauaaaggagugucaugcaguauagguagcaaucgggucggcauuaucaagcagcuaaacaaggggugcuccuacaucacaaaucaggaugcagacaccgugacgauugauaacaccguuuaucagcugucuaaaguggagggagaacaacauguaaucaagggccguccggucagcucaaguuuugaccccauuaaauucccugaggaucaguuucagguggcccucgaccaaguuuucgagaauauagaaaacucccaggcucugguggaucagagcaaucgcauccuuucuucagccgagaaggguaacacaggguucauuaucgucaucauucugauagcaguguugggcaguagcaugauccucguauccauuuuuaucauuaucaaaaagacuaagaaaccaaccggagcgcccccugaacugucuggcgugacaaauaacggguucauaccacacaauugaggacuaguuauaagacugacuagcccgaugggccucccaacgggcccuccuccccuccuugcaccgagauuaauaaaaaaaaaaaaaaaaaaaaaaaaaaaaaaaaaaaaaaaaaaaaaaaaaaaaaaaaaaaaaaaaugcaucccccccccccccccccccccccccccccccaaaggcucuuuucagagccaccagaauu

SEQ ID NO: 14783 - RNA, 1837 nt, Artificial Sequence
  HMPV/TN/92-4__ABM67072.1 fusion glycoprotein mRNA human (variant)
aggagaaagcuuaccaugagcuggaagguggucaucauuuucucccugcucauaacaccccagcacggccuuaaagagucuuaccuggaagagucaugcaguaccaucacugaaggguauuugagcguuuuaagaacgggaugguacaccaacguguuuacacuggagguaggugaccuagaaaaucucacuuguuccgauggcccuucucugauuaagaccgagcuugaccuguugaaaucggcccucagggagcugaagacagugucagcugaucaacuggcacgggaggaacagaucgaaaacccagggagcggaaguuucguccucggcgccauugcguuagguguggcugccgcagccgcuguuaccgcagggguggccaucgcuaaaacuauacgccuggaguccgaggucacagccaucaauaacgcgcuuaagaagaccaaugaagcagugucuacguugggaaacggcguacgaguucuggccacugcugugcgugagcuaaaagacuuuguccucaagaaucuguggagagccauuaacaaaaauaagugcgauaucgacgaucuuaaaauggcagugagcuucucccaguuuaacaggcgguuccugaaugugguccgccaguuuucagacaacgcuggcauuaccccggccaucaguuuggaucucaugacagacgcggaacuggccagagcaguucccaauaugccuacuagcgcugggcaaauaaaguuaaugcuggagaacagggccauggugcggcgcaagggauucgguauucucaucggcguauaugggucuuccgugauuuacaugguccagcuuccaaucuuuggagugaucgauacccccuguuggauuguuaaagcugccccuucaugcagcgaaaagaaaggcaauuaugcaugucuguugcgagaggaccaggguugguacugccagaacgccgggaguacaguguauuacccaaacgagaaggauugugaaaccagaggagaccaugucuucugcgacacggcugcgggcauaaauguggcagagcaaucuaaagaauguaacaucaauauuuccacuacaaacuaccccugcaagguaagcaccggcaggcacccuaucucgaugguugcccuaucuccacugggggcucucguggccuguuauaaaggagucuccugcucaauagguaguaaucgggugggcauuaucaagcagcugaacaaggggugcagcuacaucacuaaucaggaugcagacacagucaccauugauaacacgguguaucagcuuuccaaaguugagggagaacaacaugugaucaagggccguccgguaucuagcucauuugaccccauuaaauucccugaggaucaguuucaggucgcccuggaccaaguguucgagaauauagaaaacagucaggcuuugguugaucaguccaaucgcauccucagcucugccgagaaggguaacaccggguucauuaucgugaucauucugauagcagucuuaggcucaaguaugauccuggugagcauuuuuaucauuaucaaaaagacaaagaaaccaacuggagcgcccccugaacuauccggcguaaccaauaacggguucauaccacacaauugaggacuaguuauaagacugacuagcccgaugggccucccaacgggcccuccuccccuccuugcaccgagauuaauaaaaaaaaaaaaaaaaaaaaaaaaaaaaaaaaaaaaaaaaaaaaaaaaaaaaaaaaaaaaaaaaugcaucccccccccccccccccccccccccccccccaaaggcucuuuucagagccaccagaauu

SEQ ID NO: 14784 - RNA, 1837 nt, Artificial Sequence
  HMPV/TN/92-4__ABM67072.1 fusion glycoprotein mRNA human (variant)
aggagaaagcuuaccaugagcuggaagguggucaucauuuucucccugcucauaacaccccagcacggccuuaaagagucuuaccuggaagagucaugcaguaccaucacugaaggguauuugagcguuuuaagaacgggaugguacaccaacguguuuacacugccuguaggugacguggagaaucuaacuuguuccgauggcccaucucucauuaagaccgaacuggaccuuacaaaaucggcccugagggaguugaagaccgucucagcugaucaacucgcacgggaggaacagaucgagaacccggggagcggaaguuucgugcugggcgccauugcgcuggguguugcugccgcagccgcugugacugcaggggucgccaucgcuaaaacaauacgccucgaauccgaggugaccgccaucaauaacgcguuaaagaagacgaaugaggcaguaucuacucugggaaacggcguucgagugcuugccaccgcuguccgugaauugaaagacuuugugagcaagaaucugacaagagccauuaacaaaaauaagugcgauaucgacgaucuaaaaauggcaguguccuucucacaguuuaacaggcgguuccucaaugucguucgccaguuuagugacaacgcuggcauuacucccgccaucagccuggaucuuaugaccgacgcggagcuggccagagcagugccuaauaugccaacaucugcugggcaaauaaaguugaugcucgaaaacagggccaugguacggcgcaagggauucgguauucugaucggcguguauggguccucagucauuuacauggugcaguuacccaucuuuggaguuaucgauaccccuuguuggauugugaaagcugccccaagcugcagugagaagaaaggcaauuaugcaugucugcuccgagaagaccaggguugguacugccagaacgccgggucuacggucuauuaccccaacgagaaggauugugagacuagaggagaccauguguucugcgacacagcugcgggcauaaauguagcagaacaauccaaagaguguaacaucaauauuagcaccacuaacuacccuugcaagguuucgacaggcaggcacccaaucucuaugguggcccuuuccccgcugggggcuuuggucgccuguuauaaaggagugucaugcaguauagguagcaaucgggucggcauuaucaagcagcuaaacaaggggugcuccuacaucaccaaucaggaugcagacacggugaccauugauaacacaguuuaucagcugucuaaaguggaaggagagcaacauguaaucaagggccgucccgucagcucaaguuuugacccuauuaaauucccagaagaucaguuucagguggcccucgaccaaguuuucgagaauauagagaacucccaggcucugguggaucagagcaaucgcauccuuucuucagccgaaaaggguaacacuggguucauuaucgucaucauucugauagcaguguugggcaguagcaugauccucguauccauuuuuaucauuaucaaaaagaccaagaaacccacaggagcgccuccagagcugucuggcgugacuaauaacggguucauaccccacaauugaggacuaguuauaagacugacuagcccgaugggccucccaacgggcccuccuccccuccuugcaccgagauuaauaaaaaaaaaaaaaaaaaaaaaaaaaaaaaaaaaaaaaaaaaaaaaaaaaaaaaaaaaaaaaaaaugcaucccccccccccccccccccccccccccccccaaaggcucuuuucagagccaccagaauu

SEQ ID NO: 14785 - RNA, 1837 nt, Artificial Sequence
  HMPV/TN/92-4__ABM67072.1 fusion glycoprotein mRNA human (variant)
aggagaaagcuuaccaugagcuggaagguggucaucauuuucucccugcucauaacaccccagcacggccuuaaagagucuuaccuggaagagucaugcaguaccaucacugaaggguauuugagcguuuuaagaacgggaugguacaccaacguguuuacacuggagguaggugacguggaaaaucuaacuuguuccgauggcccuucucucauuaagaccgagcuggaccuuacaaaaucggcccugagggaguugaagaccgucucagcugaucaacucgcacgggaggaacagaucgaaaacccagggagcggaaguuucgugcugggcgccauugcgcuggguguugcugccgcagccgcugugacugcaggggucgccaucgcuaaaacaauacgccucgaguccgaggugaccgccaucaauaacgcguuaaagaagacgaaugaagcaguaucuacucugggaaacggcguucgagugcuugccaccgcuguccgugaguugaaagacuuugugagcaagaaucugacaagagccauuaacaaaaauaagugcgauaucccggaccuaaaaauggcaguguccuucucacaguuuaacaggcgguuccucaaugucguucgccaguuuagugauaacgcuggcauuacucccgccaucagccuggaccuuaugaccgaugcggaacuggccagagcagugccuaauaugccaacaucugcugggcaaauaaaguugaugcucgagaacagggccaugguacggcgcaagggauucgguauucugaucggcguguauggguccucagucauuuacauggugcaguuacccaucuuuggaguuaucgacaccccuuguuggauugugaaagcugccccaagcugcagugaaaagaaaggcaauuaugcaugucugcuccgagaggaucaggguugguacugccagaacgccgggucuacggucuauuaccccaacgagaaggacugugaaacuagaggagaucauguguucugcgacacagcugcgggcauaaauguagcagagcaauccaaagaauguaacaucaauauuagcaccacuaacuacccuugcaagguuucgacaggcaggcacccaaucucuaugguggcccuuuccccgcugggggcuuuggucgccuguuauaaaggagugucaugcaguauagguagcaaucgggucggcauuaucaagcagcuaaacaaggggugcuccuacaucaccaaucaggacgcagauacggugaccauugacaacacaguuuaucagcugucuaaaguggagggagaacaacauguaaucaagggccgucccgucagcucaaguuuugauccuauuaaauucccagaggaccaguuucagguggcccucgaucaaguuuucgagaauauagaaaacucccaggcucugguggaccagagcaaucgcauccuuucuucagccgagaaggguaacacuggguucauuaucgucaucauucugauagcaguguugggcaguagcaugauccucguauccauuuuuaucauuaucaaaaagaccaagaaacccacaggagcgccuccagaacugucuggcgugacuaauaacggguucauaccccacaauugaggacuaguuauaagacugacuagcccgaugggccucccaacgggcccuccuccccuccuugcaccgagauuaauaaaaaaaaaaaaaaaaaaaaaaaaaaaaaaaaaaaaaaaaaaaaaaaaaaaaaaaaaaaaaaaaugcaucccccccccccccccccccccccccccccccaaaggcucuuuucagagccaccagaauu

SEQ ID NO: 14786 - RNA, 1837 nt, Artificial Sequence
  HMPV/TN/92-4__ABM67072.1 fusion glycoprotein mRNA human (variant)
aggagaaagcuuaccaugagcuggaagguggucaucauuuucucccugcucauaacaccccagcacggccuuaaagagucuuaccuggaagagucaugcaguaccaucacugaaggguauuugagcguuuuaagaacgggaugguacaccaacguguuuacacuggagguaggugacguggaaaaucuaacuuguuccgauggcccuucucucauuaagaccgagcuggaccuuacaaaaucggcccugagggaguugaagaccgucucagcugaucaacucgcacgggaggaacagaucgaaaacccagggagcggaaguuucgugcugggcgccauugcgcuggguguugcugccgcagccgcugugacugcaggggucgccaucgcuaaaacaauacgccucgaguccgaggugaccgccaucaauaacgcguuaaagaagacgaaugaagcaguaucuacucugggaaacggcguucgagugcuugccaccgcuguccgugaguugaaagacuuugugagcaagaaucugacaagagccauuaacaaaaauaagugcccgaucgaugaccuaaaaauggcaguguccuucucacaguuuaacaggcgguuccucaaugucguucgccaguuuagugauaacgcuggcauuacucccgccaucagccuggaccuuaugaccgaugcggaacuggccagagcagugccuaauaugccaacaucugcugggcaaauaaaguugaugcucgagaacagggccaugguacggcgcaagggauucgguauucugaucggcguguauggguccucagucauuuacauggugcaguuacccaucuuuggaguuaucgacaccccuuguuggauugugaaagcugccccaagcugcagugaaaagaaaggcaauuaugcaugucugcuccgagaggaucaggguugguacugccagaacgccgggucuacggucuauuaccccaacgagaaggacugugaaacuagaggagaucauguguucugcgacacagcugcgggcauaaauguagcagagcaauccaaagaauguaacaucaauauuagcaccacuaacuacccuugcaagguuucgacaggcaggcacccaaucucuaugguggcccuuuccccgcugggggcuuuggucgccuguuauaaaggagugucaugcaguauagguagcaaucgggucggcauuaucaagcagcuaaacaaggggugcuccuacaucaccaaucaggacgcagauacggugaccauugacaacacaguuuaucagcugucuaaaguggagggagaacaacauguaaucaagggccgucccgucagcucaaguuuugauccuauuaaauucccagaggaccaguuucagguggcccucgaucaaguuuucgagaauauagaaaacucccaggcucugguggaccagagcaaucgcauccuuucuucagccgagaaggguaacacuggguucauuaucgucaucauucugauagcaguguugggcaguagcaugauccucguauccauuuuuaucauuaucaaaaagaccaagaaacccacaggagcgccuccagaacugucuggcgugacuaauaacggguucauaccccacaauugaggacuaguuauaagacugacuagcccgaugggccucccaacgggcccuccuccccuccuugcaccgagauuaauaaaaaaaaaaaaaaaaaaaaaaaaaaaaaaaaaaaaaaaaaaaaaaaaaaaaaaaaaaaaaaaaugcaucccccccccccccccccccccccccccccccaaaggcucuuuucagagccaccagaauu

SEQ ID NO: 14787 - RNA, 1837 nt, Artificial Sequence
  HMPV/TN/92-4__ABM67072.1 fusion glycoprotein mRNA human (variant)
aggagaaagcuuaccaugagcuggaagguggucaucauuuucucccugcucauaacaccccagcacggccuuaaagagucuuaccuggaagagucaugcaguaccaucacugaaggguauuugagcguuuuaagaacgggaugguacaccaacguguuuacacuggagguaggugacguggaaaaucuaacuuguuccgauggcccuucucucauuaagaccgagcuggaccuuacaaaaucggcccugagggaguugaagaccgucucagcugaucaacucgcacgggaggaacagaucgaaaacccagggagcggaaguuucgugcugggcgccauugcgcuggguguugcugccgcagccgcugugacugcaggggucgccaucgcuaaaacaauacgccucccguccgaggugaccgccaucaauaacgcguuaaagaagacgaaugaggcaguaucuacucugggaaacggcguucgagugcuugccaccgcuguccgugaauugaaagacuuugugagcaagaaucugacaagagccauuaacaaaaauaagugcgauaucgacgaucuaaaaauggcaguguccuucucacaguuuaacaggcgguuccucaaugucguucgccaguuuagugacaacgcuggcauuacucccgccaucagccuggaucuuaugaccgacgcggagcuggccagagcagugccuaauaugccaacaucugcugggcaaauaaaguugaugcucgaaaacagggccaugguacggcgcaagggauucgguauucugaucggcguguauggguccucagucauuuacauggugcaguuacccaucuuuggaguuaucgauaccccuuguuggauugugaaagcugccccaagcugcagugagaagaaaggcaauuaugcaugucugcuccgagaagaccaggguugguacugccagaacgccgggucuacggucuauuaccccaacgagaaggauugugagacuagaggagaccauguguucugcgacacagcugcgggcauaaauguagcagaacaauccaaagaguguaacaucaauauuagcaccacuaacuacccuugcaagguuucgacaggcaggcacccaaucucuaugguggcccuuuccccgcugggggcuuuggucgccuguuauaaaggagugucaugcaguauagguagcaaucgggucggcauuaucaagcagcuaaacaaggggugcuccuacaucaccaaucaggaugcagacacggugaccauugauaacacaguuuaucagcugucuaaaguggaaggagagcaacauguaaucaagggccgucccgucagcucaaguuuugacccuauuaaauucccagaagaucaguuucagguggcccucgaccaaguuuucgagaauauagagaacucccaggcucugguggaucagagcaaucgcauccuuucuucagccgaaaaggguaacacuggguucauuaucgucaucauucugauagcaguguugggcaguagcaugauccucguauccauuuuuaucauuaucaaaaagaccaagaaacccacaggagcgccuccagagcugucuggcgugacuaauaacggguucauaccccacaauugaggacuaguuauaagacugacuagcccgaugggccucccaacgggcccuccuccccuccuugcaccgagauuaauaaaaaaaaaaaaaaaaaaaaaaaaaaaaaaaaaaaaaaaaaaaaaaaaaaaaaaaaaaaaaaaaugcaucccccccccccccccccccccccccccccccaaaggcucuuuucagagccaccagaauu

SEQ ID NO: 14788 - RNA, 1837 nt, Artificial Sequence
  HMPV/TN/92-4__ABM67072.1 fusion glycoprotein mRNA human (variant)
aggagaaagcuuaccaugagcuggaagguggucaucauuuucucccugcucauaacaccccagcacggccuuaaagagucuuaccuggaagagucaugcaguaccaucacugaaggguauuugagcguuuuaagaacgggaugguacaccaacguguuuacacuggagguaggugacguggaaaaucuaacuuguuccgauggcccuucucucauuaagaccgagcuggaccuuacaaaaucggcccugagggaguugaagaccgucucagcugaucaacucgcacgggaggaacagaucgaaaacccagggagcggaaguuucgugcugggcgccauugcgcuggguguugcugccgcagccgcugugacugcaggggucgccaucgcuaaaacaauacgccucgaguccgaggugaccgccaucaauaacgcguuaaagaagacgaaugaagcaguaucuacucugggaaacggcguucgagugcuugccaccgcuguccgugaguugaaagacuuugugagcaagaaucugacaagagccauuaacaaaaauaagugcgauaucgacgaucuaaaaauggcaguguccuucucacaguuuaacaggcgguuccucaaugucguucgccaguuuagugacaacgcuggcauuacuccggccaucagccuggaucuuaugaccgacgcggaacuggccagagcagugcccaauaugccuacaucugcugggcaaauaaaguugaugcucgagaacagggccaugguacggcgcaagggauucgguauucugaucggcguguauggguccucagucauuuacauggugcaguuaccaaucuuuggaguuaucgauacccccuguuggauugugaaagcugccccuagcugcagugaaaagaaaggcaauuaugcaugucugcuccgagaggaccaggguugguacugccagaacgccgggucuacggucuauuacccaaacgagaaggauugugaaacuagaggagaccauguguucugcgacacagcugcgggcauaaauguagcagagcaauccaaagaauguaacaucaauauuagcaccacuaacuaccccugcaagguuucgacaggcaggcacccuaucucuaugguggcccuuuccccacugggggcuuuggucgccuguuauaaaggagugucaugcaguauagguagcaaucgggucggcauuaucaagcagcuaaacaaggggugcuccuacaucaccaaucaggaugcagacacggugaccauugauaacacaguuuaucagcugucuaaaguggagggagaacaacauguaaucaagggccguccggucagcucaaguuuucccccuauuaaauucccagaggaccaguuucagguggcccucgaucaaguuuucgagaauauagaaaacucccaggcucugguggaccagagcaaucgcauccuuucuucagccgagaaggguaacacuggguucauuaucgucaucauucugauagcaguguugggcaguagcaugauccucguauccauuuuuaucauuaucaaaaagaccaagaaacccacaggagcgccuccagaacugucuggcgugacuaauaacggguucauaccccacaauugaggacuaguuauaagacugacuagcccgaugggccucccaacgggcccuccuccccuccuugcaccgagauuaauaaaaaaaaaaaaaaaaaaaaaaaaaaaaaaaaaaaaaaaaaaaaaaaaaaaaaaaaaaaaaaaaugcaucccccccccccccccccccccccccccccccaaaggcucuuuucagagccaccagaauu

SEQ ID NO: 14789 - RNA, 1837 nt, Artificial Sequence
  HMPV/TN/92-4__ABM67072.1 fusion glycoprotein mRNA human (variant)
aggagaaagcuuaccaugagcuggaagguggucaucauuuucucccugcucauaacaccccagcacggccuuaaagagucuuaccuggaagagucaugcaguaccaucacugaaggguauuugagcguuuuaagaacgggaugguacaccaacguguuuacacuggagguaggugacguggaaaaucuaacuuguuccgauggcccuucucucauuaagaccgagcuggaccuuacaaaaucggcccugagggaguugaagaccgucucagcugaucaacucgcacgggaggaacagaucgaaaacccagggagcggaaguuucgugcugggcgccauugcgcuggguguugcugccgcagccgcugugacugcaggggucgccaucgcuaaaacaauacgccucgaguccgaggugaccgccaucaauaacgcguuaaagaagacgaaugaagcaguaucuacucugggaaacggcguucgagugcuugccaccgcuguccgugaguugaaagacuuugugagcaagaaucugacaagagccauuaacaaaaauaagugcgauaucgacgaucuaaaaauggcaguguccuucucacaguuuaacaggcgguuccucaaugucguucgccaguuuagugacaacgcuggcauuacuccggccaucagccuggaucuuaugaccgacgcggaacuggccagagcagugcccaauaugccuacaucugcugggcaaauaaaguugaugcucgagaacagggccaugguacggcgcaagggauucgguauucugaucggcguguauggguccucagucauuuacauggugcaguuaccaaucuuuggaguuaucgauacccccuguuggauugugaaagcugccccuagcugcagugaaaagaaaggcaauuaugcaugucugcuccgagaggaccaggguugguacugccagaacgccgggucuacggucuauuacccaaacgagaaggauugugaaacuagaggagaccauguguucugcgacacagcugcgggcauaaauguagcagagcaauccaaagaauguaacaucaauauuagcaccacuaacuaccccugcaagguuucgacaggcaggcacccuaucucuaugguggcccuuuccccacugggggcuuuggucgccuguuauaaaggagugucaugcaguauagguagcaaucgggucggcauuaucaagcagcuaaacaaggggugcuccuacaucaccaaucaggaugcagacacggugaccauugauaacacaguuuaucagcugucuaaaguggagggagaacaacauguaaucaagggccguccggucagcucaaguuuugaccccauuaaauucccugagaaucaguuucagguggcccucgaucaaguuuucgagaacauagaaaauucccaggcucugguggaccagagcaaccgcauccuuucuucagccgagaaggguaauacuggguucauuaucgucaucauucugauagcaguguugggcaguagcaugauccucguauccauuuuuaucauuaucaaaaagaccaagaaaccaacaggagcgcccccugaacugucuggcgugacuaacaauggguucauaccacacaacugaggacuaguuauaagacugacuagcccgaugggccucccaacgggcccuccuccccuccuugcaccgagauuaauaaaaaaaaaaaaaaaaaaaaaaaaaaaaaaaaaaaaaaaaaaaaaaaaaaaaaaaaaaaaaaaaugcaucccccccccccccccccccccccccccccccaaaggcucuuuucagagccaccagaauu

SEQ ID NO: 14790 - RNA, 1837 nt, Artificial Sequence
  HMPV/TN/92-4__ABM67072.1 fusion glycoprotein mRNA human (variant)
aggagaaagcuuaccaugagcuggaagguggucaucauuuucucccugcucauaacaccccagcacggccuuaaagagucuuaccuggaagagucaugcaguaccaucacugaaggguauuugagcguuuuaagaacgggaugguacaccaacguguuuacacuggagguaggugacguggaaaaucuaacuuguuccgauggcccuucucucauuaagaccgagcuggaccuuacaaaaucggcccugagggaguugaagaccgucucagcugaucaacucgcacgggaggaacagaucgaaaacccagggagcggaaguuucgugcugggcgccauugcgcuggguguugcugccgcagccgcugugacugcaggggucgccaucgcuaaaacaauacgccucgaguccgaggugaccgccaucaauaacgcguuaaagaagacgaaugaagcaguaucuacucugggaaacggcguucgagugcuugccaccgcuguccgugaguugaaagacuuugugagcaagaaucugacaagagccauuaacaaaaauaagugcgauaucgacgaucuaaaaauggcaguguccuucucacaguuuaacaggcgguuccucaaugucguucgccaguuuagugacaacgcuggcauuacuccggccaucagccuggaucuuaugaccgacgcggaacuggccagagcagugcccaauaugccuacaucugcugggcaaauaaaguugaugcucgagaacagggccaugguacggcgcaagggauucgguauucugaucggcguguauggguccucagucauuuacauggugcaguuaccaaucuuuggaguuaucgauacccccuguuggauugugaaagcugccccuagcugcagugaaaagaaaggcaauuaugcaugucugcuccgagaggaccaggguugguacugccagaacgccgggucuacggucuauuacccaaacgagaaggauugugaaacuagaggagaccauguguucugcgacacagcugcgggcauaaauguagcagagcaauccaaagaauguaacaucaauauuagcaccacuaacuaccccugcaagguuucgacaggcaggcacccuaucucuaugguggcccuuuccccacugggggcuuuggucgccuguuauaaaggagugucaugcaguauagguagcaaucgggucggcauuaucaagcagcuaaacaaggggugcuccuacaucaccaaucaggaugcagacacggugaccauugauaacacaguuuaucagcugucuaaaguggagggagaacaacauguaaucaagggccguccggucagcucaaguuuugaccccauuaaauucccucaggaucaguuucaaguggcccucgaccagguuuucgagaauauagagaacucccaggcucugguggaucagagcaaucgcauccuuucuucagccgaaaaggguaacacuggguucauuaucgucaucauucugauagcaguguugggcaguagcaugauccucguauccauuuuuaucauuaucaaaaagaccaagaaaccaacaggagcgcccccugagcugucuggcgugacuaauaacggguucauaccacacaauugaggacuaguuauaagacugacuagcccgaugggccucccaacgggcccuccuccccuccuugcaccgagauuaauaaaaaaaaaaaaaaaaaaaaaaaaaaaaaaaaaaaaaaaaaaaaaaaaaaaaaaaaaaaaaaaaugcaucccccccccccccccccccccccccccccccaaaggcucuuuucagagccaccagaauu

SEQ ID NO: 14791 - RNA, 1837 nt, Artificial Sequence
  HMPV/TN/92-4__ABM67072.1 fusion glycoprotein mRNA human (variant)
aggagaaagcuuaccaugagcuggaagguggucaucauuuucucccugcucauaacaccccagcacggccuuaaagagucuuaccuggaagagucaugcaguaccaucacugaaggguauuugagcguuuuaagaacgggaugguacaccaacguguuuacacuggagguaggugacguggaaaaucuaacuuguuccgauggcccuucucucauuaagaccgagcuggaccuuacaaaaucggcccugagggaguugaagaccgucucagcugaucaacucgcacgggaggaacagaucgaaaacccagggagcggaaguuucgugcugggcgccauugcgcuggguguugcugccgcagccgcugugacugcaggggucgccaucgcuaaaacaauacgccucgaguccgaggugaccgccaucaauaacgcguuaaagaagacgaaugaagcaguaucuacucugggaaacggcguucgagugcuugccaccgcuguccgugaguugaaagacuuugugagcaagaaucugacaagagccauuaacaaaaauaagugcgauaucgacgaucuaaaaauggcaguguccuucucacaguggaacaggcgguuucucaaugucguucgccaguucagugacaacgcuggcauuacuccggccaucagccuggaucuuaugaccgacgcggaacuggccagagcagugcccaauaugccuacaucugcugggcaaauaaaguugaugcucgagaacagggccaugguacggcgcaagggauuugguauucugaucggcguguauggguccucagucauuuacauggugcaguuaccaaucuucggaguuaucgauacccccuguuggauugugaaagcugccccuagcugcagugaaaagaaaggcaauuaugcaugucugcuccgagaggaccaggguugguacugccagaacgccgggucuacggucuauuacccaaacgagaaggauugugaaacuagaggagaccauguguuuugcgacacagcugcgggcauaaauguagcagagcaauccaaagaauguaacaucaauauuagcaccacuaacuaccccugcaagguuucgacaggcaggcacccuaucucuaugguggcccuuuccccacugggggcuuuggucgccuguuauaaaggagugucaugcaguauagguagcaaucgggucggcauuaucaagcagcuaaacaaggggugcuccuacaucaccaaucaggaugcagacacggugaccauugauaacacaguuuaucagcugucuaaaguggagggagaacaacauguaaucaagggccguccggucagcucaaguuucgaccccauuaaauuuccugaggaucaguuccagguggcccucgaccaaguuuuugagaauauagaaaacucccaggcucugguggaucagagcaaucgcauccuuucuucagccgagaaggguaacacuggguucauuaucgucaucauucugauagcaguguugggcaguagcaugauccucguauccauuuucaucauuaucaaaaagaccaagaaaccaacaggagcgcccccugaacugucuggcgugacuaauaacggguuuauaccacacaauugaggacuaguuauaagacugacuagcccgaugggccucccaacgggcccuccuccccuccuugcaccgagauuaauaaaaaaaaaaaaaaaaaaaaaaaaaaaaaaaaaaaaaaaaaaaaaaaaaaaaaaaaaaaaaaaaugcaucccccccccccccccccccccccccccccccaaaggcucuuuucagagccaccagaauu

SEQ ID NO: 14792 - RNA, 1837 nt, Artificial Sequence
  HMPV/NL/1/99__AAQ90145.1 fusion glycoprotein mRNA human (F0)
aggagaaagcuuaccaugagcuggaaggugaugaucauuauaucccugcucaucacaccccagcacggccuuaaagagucuuaccuggaagagucaugcaguaccauuacugaaggguauuugagcgucuuaagaacgggaugguacaccaacguuuucacacuggaggugggugacguagaaaaucuaacuuguaccgauggcccuucccucaucaagacagagcuggaccuuaccaaaucugcccugagggaguugaagacugugucggcugaucaacucgcacgggaggaacagauugaaaacccacgccagucacgauuuguccugggggccaucgcgcugggaguggcuacagccgcagccguuaccgcuggcauagcaaucgccaaaacgauucgucucgagagcgaggugaaugcuaucaagggugccuuaaagcagacuaacgaagcggucaguacccuggggaauggagugagaguacuugcaacagccguuagggaguugaaagaauuuguguccaagaaccugacuucugcuauuaaucggaacaaaugcgacaucgccgaucuaaagauggcagucagcuuuucccaauucaaucgcagauuucucaacguggugaggcaguucucagacaaugcuggcauaaccccggccauuagucuggaucuuaugacagacgcggagcuggcccgggcagucagcuauaugcccaccucugcuggccagaucaaauugaugcucgaaaaccgcgccaugguucgaagaaagggguuugggauucugaucgguguguacggcuccucaguaaucuauauggugcaguuaccuauuuucggggucauagauacgccauguuggaucauuaaggcugcccccagcugcagugagaaaaauggaaacuacgcaugucugcucagggaggaccaaggcugguauugcaagaaugccgguucuacuguguacuacccuaacgaaaaagauugugagacacggggagaccauguuuucugcgauaccgcugcgggaaucaacguggcagaacagucccgugaguguaauauaaacauuagcacuacaaauuauccaugcaaggucucgaccggccgccaccccaucucuaugguggcccuuuccccucugggcgcuuugguagccuguuacaaagggguuucaugcaguaucggaagcaacuggguggguauuaucaagcagcuaccaaaaggcugcuccuauauuacgaaucaggacgcagacaccgucacaauagauaacacuguguaccaacugucuaaggucgaaggggagcagcaugugaucaagggaagaccgguuagcucaaguuucgaccccauuaaauuuccugaggaucaguucaauguggcccucgaccaaguauuugaauccaucgagaacagccaggcucuggucgaucagucuaauaagauccuuaacucagccgaaaaaggcaauaccgguuucauuauagugguuauccugguggcagucuuggggcucacaaugauuagugugagcaucauuaucauaaucaagaaaacuaggaagccaaccggcgcgcccccugagcugaacggaguaacaaauggcggguucauuccacacuccugaggacuaguuauaagacugacuagcccgaugggccucccaacgggcccuccuccccuccuugcaccgagauuaauaaaaaaaaaaaaaaaaaaaaaaaaaaaaaaaaaaaaaaaaaaaaaaaaaaaaaaaaaaaaaaaaugcaucccccccccccccccccccccccccccccccaaaggcucuuuucagagccaccagaauu

SEQ ID NO: 14793 - RNA, 1837 nt, Artificial Sequence
  HMPV/Sabana__AEA02280.1 fusion glycoprotein mRNA human (F0)
aggagaaagcuuaccaugagcuggaaggugaugaucauuauaucccugcucaucacaccccagcacggccuuaaagagucuuaccuggaagagucaugcaguaccauuacugaaggguauuugagcgucuuaagaacgggaugguacaccaacguuuucacacuggaggugggugacguagaaaaucuaacuuguaccgauggcccuucccucaucaagacagagcuggaccuuaccaaaucugcccugagggaguugaagacugugucggcugaucaacucgcacgggaggaacagauugaaaacccacgccagucacgauuuguccugggggccaucgcgcugggaguggcuacagccgcagccguuaccgcuggcauagcaaucgccaaaacgauucgucucgagagcgaggugaaugcuaucaagggugccuuaaagacuaccaacgaagcggucaguacacuggggaauggagugagaguacuugcaacugccguuagggaguugaaagaauuuguguccaagaaccugaccucugcuauuaauaaaaacaagugcgacaucgccgaucuaaaaauggcagucagcuuuucccaguucaaucggcgcuuucucaacguggugagacaauucucagacaaugcuggcauaacaccggccauuagucuggaucuuaugaacgacgcggagcuggccagggcagucagcuauaugcccaccucugcuggccagaucaaguugaugcucgaaaaucgggccaugguucgccgaaagggguuugggauucugaucgguguguacggcuccucaguaaucuauauggugcaguuaccuauuuucggggucauaaacacgccauguuggaucauuaaagcugcccccagcugcagugagaaggauggaaauuacgcaugucugcucagagaggaccagggcugguauugcaaaaacgccgguucuacuguguacuacccuaacgaaaaggauugugagacaaggggagaccauguuuucugcgauaccgcugcgggaaucaauguggcagaacaaucccgggaguguaacauaaauauuagcacuacaaacuauccaugcaaagucucgaccggccgucaccccaucucuaugguggcccuuuccccucugggcgcuuugguagccuguuacaaggggguuucaugcaguacgggaagcaaucagguggguaucauuaaacagcuaccaaagggcugcuccuauaucaccaaccaggacgcagacacagucacuauugauaauaccguguaccaacugucuaaggucgaaggggagcagcaugugauaaaaggacgcccgguuagcucaaguuucgaccccaucagauuuccugaggaucaguucaacguggcccucgaccaaguauuugaauccauugagaauagccaggcucuggucgaucagucuaacaagauccuuaauucagccgaaaaaggcaacacagguuucaucauugugauaauccugauugcaguuuuggggcucacuaugaucagugugagcauuaucauaaucauuaagaaaaccaggaagccaacaggcgcgcccccugagcugaauggagucaccaacggcggguucaucccacacuccugaggacuaguuauaagacugacuagcccgaugggccucccaacgggcccuccuccccuccuugcaccgagauuaauaaaaaaaaaaaaaaaaaaaaaaaaaaaaaaaaaaaaaaaaaaaaaaaaaaaaaaaaaaaaaaaaugcaucccccccccccccccccccccccccccccccaaaggcucuuuucagagccaccagaauu

SEQ ID NO: 14794 - protein, 1353 aa, Artificial Sequence
  MERS-CoV/MERS-CoV-Jeddah-human-1__AHE78108.1 spike protein (1-1353)
MIHSVFLLMFLLTPTESYVDVGPDSVKSACIEVDIQQTFFDKTWPRPIDVSKADGIIYPQGRTYSNITITYQGLFPYQGDHGDMYVYSAGHATGTTPQKLFVANYSQDVKQFANGFVVRIGAAANSTGTVIISPSTSATIRKIYPAFMLGSSVGNFSDGKMGRFFNHTLVLLPDGCGTLLRAFYCILEPRSGNHCPAGNSYTSFATYHTPATDCSDGNYNRNASLNSFKEYFNLRNCTFMYTYNITEDEILEWFGITQTAQGVHLFSSRYVDLYGGNMFQFATLPVYDTIKYYSIIPHSIRSIQSDRKAWAAFYVYKLQPLTFLLDFSVDGYIRRAIDCGFNDLSQLHCSYESFDVESGVYSVSSFEAKPSGSVVEQAEGVECDFSPLLSGTPPQVYNFKRLVFTNCNYNLTKLLSLFSVNDFTCSQISPAAIASNCYSSLILDYFSYPLSMKSDLSVSSAGPISQFNYKQSFSNPTCLILATVPHNLTTITKPLKYSYINKCSRLLSDDRTEVPQLVNANQYSPCVSIVPSTVWEDGDYYRKQLSPLEGGGWLVASGSTVAMTEQLQMGFGITVQYGTDTNSVCPKLEFANDTKIASQLGNCVEYSLYGVSGRGVFQNCTAVGVRQQRFVYDAYQNLVGYYSDDGNYYCLRACVSVPVSVIYDKETKTHATLFGSVACEHISSTMSQYSRSTRSMLKRRDSTYGPLQTPVGCVLGLVNSSLFVEDCKLPLGQSLCALPDTPSTLTPRSVRSVPGEMRLASIAFNHPIQVDQLNSSYFKLSIPTNFSFGVTQEYIQTTIQKVTVDCKQYVCNGFQKCEQLLREYGQFCSKINQALHGANLRQDDSVRNLFASVKSSQSSPIIPGFGGDFNLTLLEPVSISTGSRSARSAIEDLLFDKVTIADPGYMQGYDDCMQQGPASARDLICAQYVAGYKVLPPLMDVNMEAAYTSSLLGSIAGVGWTAGLSSFAAIPFAQSIFYRLNGVGITQQVLSENQKLIANKFNQALGAMQTGFTTTNEAFHKVQDAVNNNAQALSKLASELSNTFGAISASIGDIIQRLDVLEQDAQIDRLINGRLTTLNAFVAQQLVRSESAALSAQLAKDKVNECVKAQSKRSGFCGQGTHIVSFVVNAPNGLYFMHVGYYPSNHIEVVSAYGLCDAANPTNCIAPVNGYFIKTNNTRIVDEWSYTGSSFYAPEPITSLNTKYVAPQVTYQNISTNLPPPLLGNSTGIDFQDELDEFFKNVSTSIPNFGSLTQINTTLLDLTYEMLSLQQVVKALNESYIDLKELGNYTYYNKWPWYIWLGFIAGLVALALCVFFILCCTGCGTNCMGKLKCNRCCDRYEEYDLEPHKVHVH

SEQ ID NO: 14795 - protein, 1353 aa, Artificial Sequence
  MERS-CoV/MERS-CoV-Jeddah-human-1__AHE78108.1 spike protein (1-1353)(V1060P_L1061P)
MIHSVFLLMFLLTPTESYVDVGPDSVKSACIEVDIQQTFFDKTWPRPIDVSKADGIIYPQGRTYSNITITYQGLFPYQGDHGDMYVYSAGHATGTTPQKLFVANYSQDVKQFANGFVVRIGAAANSTGTVIISPSTSATIRKIYPAFMLGSSVGNFSDGKMGRFFNHTLVLLPDGCGTLLRAFYCILEPRSGNHCPAGNSYTSFATYHTPATDCSDGNYNRNASLNSFKEYFNLRNCTFMYTYNITEDEILEWFGITQTAQGVHLFSSRYVDLYGGNMFQFATLPVYDTIKYYSIIPHSIRSIQSDRKAWAAFYVYKLQPLTFLLDFSVDGYIRRAIDCGFNDLSQLHCSYESFDVESGVYSVSSFEAKPSGSVVEQAEGVECDFSPLLSGTPPQVYNFKRLVFTNCNYNLTKLLSLFSVNDFTCSQISPAAIASNCYSSLILDYFSYPLSMKSDLSVSSAGPISQFNYKQSFSNPTCLILATVPHNLTTITKPLKYSYINKCSRLLSDDRTEVPQLVNANQYSPCVSIVPSTVWEDGDYYRKQLSPLEGGGWLVASGSTVAMTEQLQMGFGITVQYGTDTNSVCPKLEFANDTKIASQLGNCVEYSLYGVSGRGVFQNCTAVGVRQQRFVYDAYQNLVGYYSDDGNYYCLRACVSVPVSVIYDKETKTHATLFGSVACEHISSTMSQYSRSTRSMLKRRDSTYGPLQTPVGCVLGLVNSSLFVEDCKLPLGQSLCALPDTPSTLTPRSVRSVPGEMRLASIAFNHPIQVDQLNSSYFKLSIPTNFSFGVTQEYIQTTIQKVTVDCKQYVCNGFQKCEQLLREYGQFCSKINQALHGANLRQDDSVRNLFASVKSSQSSPIIPGFGGDFNLTLLEPVSISTGSRSARSAIEDLLFDKVTIADPGYMQGYDDCMQQGPASARDLICAQYVAGYKVLPPLMDVNMEAAYTSSLLGSIAGVGWTAGLSSFAAIPFAQSIFYRLNGVGITQQVLSENQKLIANKFNQALGAMQTGFTTTNEAFHKVQDAVNNNAQALSKLASELSNTFGAISASIGDIIQRLDPPEQDAQIDRLINGRLTTLNAFVAQQLVRSESAALSAQLAKDKVNECVKAQSKRSGFCGQGTHIVSFVVNAPNGLYFMHVGYYPSNHIEVVSAYGLCDAANPTNCIAPVNGYFIKTNNTRIVDEWSYTGSSFYAPEPITSLNTKYVAPQVTYQNISTNLPPPLLGNSTGIDFQDELDEFFKNVSTSIPNFGSLTQINTTLLDLTYEMLSLQQVVKALNESYIDLKELGNYTYYNKWPWYIWLGFIAGLVALALCVFFILCCTGCGTNCMGKLKCNRCCDRYEEYDLEPHKVHVH

SEQ ID NO: 14796 - protein, 1353 aa, Artificial Sequence
  MERS-CoV/Al-Hasa_4_2013__AGN70929.1 spike protein (1-1353)
MIHSVFLLMFLLTPTESYVDVGPDSVKSACIEVDIQQTFFDKTWPRPIDVSKADGIIYPQGRTYSNITITYQGLFPYQGDHGDMYVYSAGHATGTTPQKLFVANYSQDVKQFANGFVVRIGAAANSTGTVIISPSTSATIRKIYPAFMLGSSVGNFSDGKMGRFFNHTLVLLPDGCGTLLRAFYCILEPRSGNHCPAGNSYTSFATYHTPATDCSDGNYNRNASLNSFKEYFNLRNCTFMYTYNITEDEILEWFGITQTAQGVHLFSSRYVDLYGGNMFQFATLPVYDTIKYYSIIPHSIRSIQSDRKAWAAFYVYKLQPLTFLLDFSVDGYIRRAIDCGFNDLSQLHCSYESFDVESGVYSVSSFEAKPSGSVVEQAEGVECDFSPLLSGTPPQVYNFKRLVFTNCNYNLTKLLSLFSVNDFTCSQISPAAIASNCYSSLILDYFSYPLSMKSDLSVSSAGPISQFNYKQSFSNPTCLILATVPHNLTTITKPLKYSYINKCSRLLSDDRTEVPQLVNANQYSPCVSIVPSTVWEDGDYYRKQLSPLEGGGWLVASGSTVAMTEQLQMGFGITVQYGTDTNSVCPKLEFANDTKIASQLGNCVEYSLYGVSGRGVFQNCTAVGVRQQRFVYDAYQNLVGYYSDDGNYYCLRACVSVPVSVIYDKETKTHATLFGSVACEHISSTMSQYSRSTRSMLKRRDSTYGPLQTPVGCVLGLVNSSLFVEDCKLPLGQSLCALPDTPSTLTPRSVRSVPGEMRLASIAFNHPIQVDQLNSSYFKLSIPTNFSFGVTQEYIQTTIQKVTVDCKQYVCNGFQKCEQLLREYGQFCSKINQALHGANLRQDDSVRNLFASVKSSQSSPIIPGFGGDFNLTLLEPVSISTGSRSARSAIEDLLFDKVTIADPGYMQGYDDCMQQGPASARDLICAQYVAGYKVLPPLMDVNMEAAYTSSLLGSIAGVGWTAGLSSFAAIPFAQSIFYRLNGVGITQQVLSENQKLIANKFNQALGAMQTGFTTTNEAFRKVQDAVNNNAQALSKLASELSNTFGAISASIGDIIQRLDVLEQDAQIDRLINGRLTTLNAFVAQQLVRSESAALSAQLAKDKVNECVKAQSKRSGFCGQGTHIVSFVVNAPNGLYFMHVGYYPSNHIEVVSAYGLCDAANPTNCIAPVNGYFIKTNNTRIVDEWSYTGSSFYAPEPITSLNTKYVAPHVTYQNISTNLPPPLLGNSTGIDFQDELDEFFKNVSTSIPNFGSLTQINTTLLDLTYEMLSLQQVVKALNESYIDLKELGNYTYYNKWPWYIWLGFIAGLVALALCVFFILCCTGCGTNCMGKLKCNRCCDRYEEYDLEPHKVHVH

SEQ ID NO: 14797 - protein, 1353 aa, Artificial Sequence
  MERS-CoV/Al-Hasa_4_2013__AGN70929.1 spike protein (1-1353)(V1060P_L1061P)
MIHSVFLLMFLLTPTESYVDVGPDSVKSACIEVDIQQTFFDKTWPRPIDVSKADGIIYPQGRTYSNITITYQGLFPYQGDHGDMYVYSAGHATGTTPQKLFVANYSQDVKQFANGFVVRIGAAANSTGTVIISPSTSATIRKIYPAFMLGSSVGNFSDGKMGRFFNHTLVLLPDGCGTLLRAFYCILEPRSGNHCPAGNSYTSFATYHTPATDCSDGNYNRNASLNSFKEYFNLRNCTFMYTYNITEDEILEWFGITQTAQGVHLFSSRYVDLYGGNMFQFATLPVYDTIKYYSIIPHSIRSIQSDRKAWAAFYVYKLQPLTFLLDFSVDGYIRRAIDCGFNDLSQLHCSYESFDVESGVYSVSSFEAKPSGSVVEQAEGVECDFSPLLSGTPPQVYNFKRLVFTNCNYNLTKLLSLFSVNDFTCSQISPAAIASNCYSSLILDYFSYPLSMKSDLSVSSAGPISQFNYKQSFSNPTCLILATVPHNLTTITKPLKYSYINKCSRLLSDDRTEVPQLVNANQYSPCVSIVPSTVWEDGDYYRKQLSPLEGGGWLVASGSTVAMTEQLQMGFGITVQYGTDTNSVCPKLEFANDTKIASQLGNCVEYSLYGVSGRGVFQNCTAVGVRQQRFVYDAYQNLVGYYSDDGNYYCLRACVSVPVSVIYDKETKTHATLFGSVACEHISSTMSQYSRSTRSMLKRRDSTYGPLQTPVGCVLGLVNSSLFVEDCKLPLGQSLCALPDTPSTLTPRSVRSVPGEMRLASIAFNHPIQVDQLNSSYFKLSIPTNFSFGVTQEYIQTTIQKVTVDCKQYVCNGFQKCEQLLREYGQFCSKINQALHGANLRQDDSVRNLFASVKSSQSSPIIPGFGGDFNLTLLEPVSISTGSRSARSAIEDLLFDKVTIADPGYMQGYDDCMQQGPASARDLICAQYVAGYKVLPPLMDVNMEAAYTSSLLGSIAGVGWTAGLSSFAAIPFAQSIFYRLNGVGITQQVLSENQKLIANKFNQALGAMQTGFTTTNEAFRKVQDAVNNNAQALSKLASELSNTFGAISASIGDIIQRLDPPEQDAQIDRLINGRLTTLNAFVAQQLVRSESAALSAQLAKDKVNECVKAQSKRSGFCGQGTHIVSFVVNAPNGLYFMHVGYYPSNHIEVVSAYGLCDAANPTNCIAPVNGYFIKTNNTRIVDEWSYTGSSFYAPEPITSLNTKYVAPHVTYQNISTNLPPPLLGNSTGIDFQDELDEFFKNVSTSIPNFGSLTQINTTLLDLTYEMLSLQQVVKALNESYIDLKELGNYTYYNKWPWYIWLGFIAGLVALALCVFFILCCTGCGTNCMGKLKCNRCCDRYEEYDLEPHKVHVH

SEQ ID NO: 14798 - protein, 1353 aa, Artificial Sequence
  MERS-CoV/Riyadh_14_2013__AHI48572.1 spike protein (1-1353)
MIHSVFLLMFLLTPTESYVDVGPDSVKSACIEVDIQQTFFDKTWPRPIDVSKADGIIYPQGRTYSNITITYQGLFPYQGDHGDMYVYSAGHATGTTPQKLFVANYSQDVKQFANGFVVRIGAAANSTGTVIISPSTSATIRKIYPAFMLGSSVGNFSDGKMGRFFNHTLVLLPDGCGTLLRAFYCILEPRSGNHCPAGNSYTSFATYHTPATDCSDGNYNRNASLNSFKEYFNLRNCTFMYTYNITEDEILEWFGITQTAQGVHLFSSRYVDLYGGNMFQFATLPVYDTIKYYSIIPHSIRSIQSDRKAWAAFYVYKLQPLTFLLDFSVDGYIRRAIDCGFNDLSQLHCSYESFDVESGVYSVSSFEAKPSGSVVEQAEGVECDFSPLLSGTPPQVYNFKRLVFTNCNYNLTKLLSLFSVNDFTCSQISPAAIASNCYSSLILDYFSYPLSMKSDLSVSSAGPISQFNYKQSFSNPTCLILATVPHNLTTITKPLKYSYINKCSRLLSDDRTEVPQLVNANQYSPCVSIVPSTVWEDGDYYRKQLSPLEGGGWLVASGSTVAMTEQLQMGFGITVQYGTDTNSVCPKLEFANDTKIASQLGNCVEYSLYGVSGRGVFQNCTAVGVRQQRFVYDAYQNLVGYYSDDGNYYCLRACVSVPVSVIYDKETKTHATLFGSVACEHISSTMSQYSRSTRSMLKRRDSTYGPLQTPVGCVLGLVNSSLFVEDCKLPLGQSLCALPDTPSTLTPRSVRSVPGEMRLASIAFNHPIQVDQLNSSYFKLSIPTNFSFGVTQEYIQTTIQKVTVDCKQYVCNGFQKCEQLLREYGQFCSKINQALHGANLRQDDSVRNLFASVKSSQSSPIIPGFGGDFNLTLLEPVSISTGSRSARSAIEDLLFDKVTIADPGYMQGYDDCMQQGPASARDLICAQYVAGYKVLPPLMDVNMEAAYTSSLLGSIAGVGWTAGLSSFAAIPFAQSIFYRLNGVGITQQVLSENQKLIANKFNQALGAMQTGFTTTNEAFRKVQDAVNNNAQALSKLASELSNTFGAISASIGDIIQRLDVLEQDAQIDRLINGRLTTLNAFVAQQLVRSESAALSAQLAKDKVNECVKAQSKRSGFCGQGTHIVSFVVNAPNGLYFMHVGYYPSNHIEVVSAYGLCDAANPTNCIAPVNGYFIKTNNTRIVDEWSYTGSSFYAPEPITSLNTKYVAPQVTYQNISTNLPPPLLGNSTGIDFQDELDEFFKNVSTSIPNFGSLTQINTTLLDLTYEMLSLQQVVKALNESYIDLKELGNYTYYNKWPWYIWLGFIAGLVALALCVFFILCCTGCGTNCMGKLKCNRCCDRYEEYDLEPHKVHVH

SEQ ID NO: 14799 - protein, 1353 aa, Artificial Sequence
  MERS-CoV/Riyadh_14_2013__AHI48572.1 spike protein (1-1353)(V1060P_L1061P)
MIHSVFLLMFLLTPTESYVDVGPDSVKSACIEVDIQQTFFDKTWPRPIDVSKADGIIYPQGRTYSNITITYQGLFPYQGDHGDMYVYSAGHATGTTPQKLFVANYSQDVKQFANGFVVRIGAAANSTGTVIISPSTSATIRKIYPAFMLGSSVGNFSDGKMGRFFNHTLVLLPDGCGTLLRAFYCILEPRSGNHCPAGNSYTSFATYHTPATDCSDGNYNRNASLNSFKEYFNLRNCTFMYTYNITEDEILEWFGITQTAQGVHLFSSRYVDLYGGNMFQFATLPVYDTIKYYSIIPHSIRSIQSDRKAWAAFYVYKLQPLTFLLDFSVDGYIRRAIDCGFNDLSQLHCSYESFDVESGVYSVSSFEAKPSGSVVEQAEGVECDFSPLLSGTPPQVYNFKRLVFTNCNYNLTKLLSLFSVNDFTCSQISPAAIASNCYSSLILDYFSYPLSMKSDLSVSSAGPISQFNYKQSFSNPTCLILATVPHNLTTITKPLKYSYINKCSRLLSDDRTEVPQLVNANQYSPCVSIVPSTVWEDGDYYRKQLSPLEGGGWLVASGSTVAMTEQLQMGFGITVQYGTDTNSVCPKLEFANDTKIASQLGNCVEYSLYGVSGRGVFQNCTAVGVRQQRFVYDAYQNLVGYYSDDGNYYCLRACVSVPVSVIYDKETKTHATLFGSVACEHISSTMSQYSRSTRSMLKRRDSTYGPLQTPVGCVLGLVNSSLFVEDCKLPLGQSLCALPDTPSTLTPRSVRSVPGEMRLASIAFNHPIQVDQLNSSYFKLSIPTNFSFGVTQEYIQTTIQKVTVDCKQYVCNGFQKCEQLLREYGQFCSKINQALHGANLRQDDSVRNLFASVKSSQSSPIIPGFGGDFNLTLLEPVSISTGSRSARSAIEDLLFDKVTIADPGYMQGYDDCMQQGPASARDLICAQYVAGYKVLPPLMDVNMEAAYTSSLLGSIAGVGWTAGLSSFAAIPFAQSIFYRLNGVGITQQVLSENQKLIANKFNQALGAMQTGFTTTNEAFRKVQDAVNNNAQALSKLASELSNTFGAISASIGDIIQRLDPPEQDAQIDRLINGRLTTLNAFVAQQLVRSESAALSAQLAKDKVNECVKAQSKRSGFCGQGTHIVSFVVNAPNGLYFMHVGYYPSNHIEVVSAYGLCDAANPTNCIAPVNGYFIKTNNTRIVDEWSYTGSSFYAPEPITSLNTKYVAPQVTYQNISTNLPPPLLGNSTGIDFQDELDEFFKNVSTSIPNFGSLTQINTTLLDLTYEMLSLQQVVKALNESYIDLKELGNYTYYNKWPWYIWLGFIAGLVALALCVFFILCCTGCGTNCMGKLKCNRCCDRYEEYDLEPHKVHVH

SEQ ID NO: 14800 - protein, 1353 aa, Artificial Sequence
  MERS-CoV/Riyadh_14_2013__AHI48572.1 spike protein (1-1353)(R1020Q)
MIHSVFLLMFLLTPTESYVDVGPDSVKSACIEVDIQQTFFDKTWPRPIDVSKADGIIYPQGRTYSNITITYQGLFPYQGDHGDMYVYSAGHATGTTPQKLFVANYSQDVKQFANGFVVRIGAAANSTGTVIISPSTSATIRKIYPAFMLGSSVGNFSDGKMGRFFNHTLVLLPDGCGTLLRAFYCILEPRSGNHCPAGNSYTSFATYHTPATDCSDGNYNRNASLNSFKEYFNLRNCTFMYTYNITEDEILEWFGITQTAQGVHLFSSRYVDLYGGNMFQFATLPVYDTIKYYSIIPHSIRSIQSDRKAWAAFYVYKLQPLTFLLDFSVDGYIRRAIDCGFNDLSQLHCSYESFDVESGVYSVSSFEAKPSGSVVEQAEGVECDFSPLLSGTPPQVYNFKRLVFTNCNYNLTKLLSLFSVNDFTCSQISPAAIASNCYSSLILDYFSYPLSMKSDLSVSSAGPISQFNYKQSFSNPTCLILATVPHNLTTITKPLKYSYINKCSRLLSDDRTEVPQLVNANQYSPCVSIVPSTVWEDGDYYRKQLSPLEGGGWLVASGSTVAMTEQLQMGFGITVQYGTDTNSVCPKLEFANDTKIASQLGNCVEYSLYGVSGRGVFQNCTAVGVRQQRFVYDAYQNLVGYYSDDGNYYCLRACVSVPVSVIYDKETKTHATLFGSVACEHISSTMSQYSRSTRSMLKRRDSTYGPLQTPVGCVLGLVNSSLFVEDCKLPLGQSLCALPDTPSTLTPRSVRSVPGEMRLASIAFNHPIQVDQLNSSYFKLSIPTNFSFGVTQEYIQTTIQKVTVDCKQYVCNGFQKCEQLLREYGQFCSKINQALHGANLRQDDSVRNLFASVKSSQSSPIIPGFGGDFNLTLLEPVSISTGSRSARSAIEDLLFDKVTIADPGYMQGYDDCMQQGPASARDLICAQYVAGYKVLPPLMDVNMEAAYTSSLLGSIAGVGWTAGLSSFAAIPFAQSIFYRLNGVGITQQVLSENQKLIANKFNQALGAMQTGFTTTNEAFQKVQDAVNNNAQALSKLASELSNTFGAISASIGDIIQRLDVLEQDAQIDRLINGRLTTLNAFVAQQLVRSESAALSAQLAKDKVNECVKAQSKRSGFCGQGTHIVSFVVNAPNGLYFMHVGYYPSNHIEVVSAYGLCDAANPTNCIAPVNGYFIKTNNTRIVDEWSYTGSSFYAPEPITSLNTKYVAPQVTYQNISTNLPPPLLGNSTGIDFQDELDEFFKNVSTSIPNFGSLTQINTTLLDLTYEMLSLQQVVKALNESYIDLKELGNYTYYNKWPWYIWLGFIAGLVALALCVFFILCCTGCGTNCMGKLKCNRCCDRYEEYDLEPHKVHVH

SEQ ID NO: 14801 - protein, 588 aa, Artificial Sequence
  MERS-CoV/Riyadh_14_2013__AHI48572.1 spike protein (1-17_726-1296)(R1020Q)
MIHSVFLLMFLLTPTESDCKLPLGQSLCALPDTPSTLTPRSVRSVPGEMRLASIAFNHPIQVDQLNSSYFKLSIPTNFSFGVTQEYIQTTIQKVTVDCKQYVCNGFQKCEQLLREYGQFCSKINQALHGANLRQDDSVRNLFASVKSSQSSPIIPGFGGDFNLTLLEPVSISTGSRSARSAIEDLLFDKVTIADPGYMQGYDDCMQQGPASARDLICAQYVAGYKVLPPLMDVNMEAAYTSSLLGSIAGVGWTAGLSSFAAIPFAQSIFYRLNGVGITQQVLSENQKLIANKFNQALGAMQTGFTTTNEAFQKVQDAVNNNAQALSKLASELSNTFGAISASIGDIIQRLDVLEQDAQIDRLINGRLTTLNAFVAQQLVRSESAALSAQLAKDKVNECVKAQSKRSGFCGQGTHIVSFVVNAPNGLYFMHVGYYPSNHIEVVSAYGLCDAANPTNCIAPVNGYFIKTNNTRIVDEWSYTGSSFYAPEPITSLNTKYVAPQVTYQNISTNLPPPLLGNSTGIDFQDELDEFFKNVSTSIPNFGSLTQINTTLLDLTYEMLSLQQVVKALNESYIDLKELGNYTYYNKWP

SEQ ID NO: 14802 - protein, 615 aa, Artificial Sequence
  MERS-CoV/Riyadh_14_2013__AHI48572.1 spike protein (1-17_726-1296)(R1020Q)_LeucineZipper
MIHSVFLLMFLLTPTESDCKLPLGQSLCALPDTPSTLTPRSVRSVPGEMRLASIAFNHPIQVDQLNSSYFKLSIPTNFSFGVTQEYIQTTIQKVTVDCKQYVCNGFQKCEQLLREYGQFCSKINQALHGANLRQDDSVRNLFASVKSSQSSPIIPGFGGDFNLTLLEPVSISTGSRSARSAIEDLLFDKVTIADPGYMQGYDDCMQQGPASARDLICAQYVAGYKVLPPLMDVNMEAAYTSSLLGSIAGVGWTAGLSSFAAIPFAQSIFYRLNGVGITQQVLSENQKLIANKFNQALGAMQTGFTTTNEAFQKVQDAVNNNAQALSKLASELSNTFGAISASIGDIIQRLDVLEQDAQIDRLINGRLTTLNAFVAQQLVRSESAALSAQLAKDKVNECVKAQSKRSGFCGQGTHIVSFVVNAPNGLYFMHVGYYPSNHIEVVSAYGLCDAANPTNCIAPVNGYFIKTNNTRIVDEWSYTGSSFYAPEPITSLNTKYVAPQVTYQNISTNLPPPLLGNSTGIDFQDELDEFFKNVSTSIPNFGSLTQINTTLLDLTYEMLSLQQVVKALNESYIDLKELGNYTYYNKWPDKIEEILSKIYHIENEIARIKKLIGEA

SEQ ID NO: 14803 - protein, 1353 aa, Artificial Sequence
  MERS-CoV/England 1__YP_007188579.1 spike protein (1-1353)
MIHSVFLLMFLLTPTESYVDVGPDSVKSACIEVDIQQTFFDKTWPRPIDVSKADGIIYPQGRTYSNITITYQGLFPYQGDHGDMYVYSAGHATGTTPQKLFVANYSQDVKQFANGFVVRIGAAANSTGTVIISPSTSATIRKIYPAFMLGSSVGNFSDGKMGRFFNHTLVLLPDGCGTLLRAFYCILEPRSGNHCPAGNSYTSFATYHTPATDCSDGNYNRNASLNSFKEYFNLRNCTFMYTYNITEDEILEWFGITQTAQGVHLFSSRYVDLYGGNMFQFATLPVYDTIKYYSIIPHSIRSIQSDRKAWAAFYVYKLQPLTFLLDFSVDGYIRRAIDCGFNDLSQLHCSYESFDVESGVYSVSSFEAKPSGSVVEQAEGVECDFSPLLSGTPPQVYNFKRLVFTNCNYNLTKLLSLFSVNDFTCSQISPAAIASNCYSSLILDYFSYPLSMKSDLSVSSAGPISQFNYKQSFSNPTCLILATVPHNLTTITKPLKYSYINKCSRFLSDDRTEVPQLVNANQYSPCVSIVPSTVWEDGDYYRKQLSPLEGGGWLVASGSTVAMTEQLQMGFGITVQYGTDTNSVCPKLEFANDTKIASQLGNCVEYSLYGVSGRGVFQNCTAVGVRQQRFVYDAYQNLVGYYSDDGNYYCLRACVSVPVSVIYDKETKTHATLFGSVACEHISSTMSQYSRSTRSMLKRRDSTYGPLQTPVGCVLGLVNSSLFVEDCKLPLGQSLCALPDTPSTLTPRSVRSVPGEMRLASIAFNHPIQVDQLNSSYFKLSIPTNFSFGVTQEYIQTTIQKVTVDCKQYVCNGFQKCEQLLREYGQFCSKINQALHGANLRQDDSVRNLFASVKSSQSSPIIPGFGGDFNLTLLEPVSISTGSRSARSAIEDLLFDKVTIADPGYMQGYDDCMQQGPASARDLICAQYVAGYKVLPPLMDVNMEAAYTSSLLGSIAGVGWTAGLSSFAAIPFAQSIFYRLNGVGITQQVLSENQKLIANKFNQALGAMQTGFTTTNEAFHKVQDAVNNNAQALSKLASELSNTFGAISASIGDIIQRLDVLEQDAQIDRLINGRLTTLNAFVAQQLVRSESAALSAQLAKDKVNECVKAQSKRSGFCGQGTHIVSFVVNAPNGLYFMHVGYYPSNHIEVVSAYGLCDAANPTNCIAPVNGYFIKTNNTRIVDEWSYTGSSFYAPEPITSLNTKYVAPQVTYQNISTNLPPPLLGNSTGIDFQDELDEFFKNVSTSIPNFGSLTQINTTLLDLTYEMLSLQQVVKALNESYIDLKELGNYTYYNKWPWYIWLGFIAGLVALALCVFFILCCTGCGTNCMGKLKCNRCCDRYEEYDLEPHKVHVH

SEQ ID NO: 14804 - protein, 1353 aa, Artificial Sequence
  MERS-CoV/England 1__YP_007188579.1 spike protein (1-1353)(V1060P_L1061P)
MIHSVFLLMFLLTPTESYVDVGPDSVKSACIEVDIQQTFFDKTWPRPIDVSKADGIIYPQGRTYSNITITYQGLFPYQGDHGDMYVYSAGHATGTTPQKLFVANYSQDVKQFANGFVVRIGAAANSTGTVIISPSTSATIRKIYPAFMLGSSVGNFSDGKMGRFFNHTLVLLPDGCGTLLRAFYCILEPRSGNHCPAGNSYTSFATYHTPATDCSDGNYNRNASLNSFKEYFNLRNCTFMYTYNITEDEILEWFGITQTAQGVHLFSSRYVDLYGGNMFQFATLPVYDTIKYYSIIPHSIRSIQSDRKAWAAFYVYKLQPLTFLLDFSVDGYIRRAIDCGFNDLSQLHCSYESFDVESGVYSVSSFEAKPSGSVVEQAEGVECDFSPLLSGTPPQVYNFKRLVFTNCNYNLTKLLSLFSVNDFTCSQISPAAIASNCYSSLILDYFSYPLSMKSDLSVSSAGPISQFNYKQSFSNPTCLILATVPHNLTTITKPLKYSYINKCSRFLSDDRTEVPQLVNANQYSPCVSIVPSTVWEDGDYYRKQLSPLEGGGWLVASGSTVAMTEQLQMGFGITVQYGTDTNSVCPKLEFANDTKIASQLGNCVEYSLYGVSGRGVFQNCTAVGVRQQRFVYDAYQNLVGYYSDDGNYYCLRACVSVPVSVIYDKETKTHATLFGSVACEHISSTMSQYSRSTRSMLKRRDSTYGPLQTPVGCVLGLVNSSLFVEDCKLPLGQSLCALPDTPSTLTPRSVRSVPGEMRLASIAFNHPIQVDQLNSSYFKLSIPTNFSFGVTQEYIQTTIQKVTVDCKQYVCNGFQKCEQLLREYGQFCSKINQALHGANLRQDDSVRNLFASVKSSQSSPIIPGFGGDFNLTLLEPVSISTGSRSARSAIEDLLFDKVTIADPGYMQGYDDCMQQGPASARDLICAQYVAGYKVLPPLMDVNMEAAYTSSLLGSIAGVGWTAGLSSFAAIPFAQSIFYRLNGVGITQQVLSENQKLIANKFNQALGAMQTGFTTTNEAFHKVQDAVNNNAQALSKLASELSNTFGAISASIGDIIQRLDPPEQDAQIDRLINGRLTTLNAFVAQQLVRSESAALSAQLAKDKVNECVKAQSKRSGFCGQGTHIVSFVVNAPNGLYFMHVGYYPSNHIEVVSAYGLCDAANPTNCIAPVNGYFIKTNNTRIVDEWSYTGSSFYAPEPITSLNTKYVAPQVTYQNISTNLPPPLLGNSTGIDFQDELDEFFKNVSTSIPNFGSLTQINTTLLDLTYEMLSLQQVVKALNESYIDLKELGNYTYYNKWPWYIWLGFIAGLVALALCVFFILCCTGCGTNCMGKLKCNRCCDRYEEYDLEPHKVHVH

SEQ ID NO: 14805 - protein, 1291 aa, Artificial Sequence
  MERS-CoV/England 1__YP_007188579.1 spike protein (variant)
MIHSVFLLMFLLTPTESYVDVGPDSVKSACIEVDIQQTFFDKTWPRPIDVSKADGIIYPQGRTYSNITITYQGLFPYQGDHGDMYVYSAGHATGTTPQKLFVANYSQDVKQFANGFVVRIGAAANSTGTVIISPSTSATIRKIYPAFMLGSSVGNFSDGKMGRFFNHTLVLLPDGCGTLLRAFYCILEPRSGNHCPAGNSYTSFATYHTPATDCSDGNYNRNASLNSFKEYFNLRNCTFMYTYNITEDEILEWFGITQTAQGVHLFSSRYVDLYGGNMFQFATLPVYDTIKYYSIIPHSIRSIQSDRKAWAAFYVYKLQPLTFLLDFSVDGYIRRAIDCGFNDLSQLHCSYESFDVESGVYSVSSFEAKPSGSVVEQAEGVECDFSPLLSGTPPQVYNFKRLVFTNCNYNLTKLLSLFSVNDFTCSQISPAAIASNCYSSLILDYFSYPLSMKSDLSVSSAGPISQFNYKQSFSNPTCLILATVPHNLTTITKPLKYSYINKCSRFLSDDRTEVPQLVNANQYSPCVSIVPSTVWEDGDYYRKQLSPLEGGGWLVASGSTVAMTEQLQMGFGITVQYGTDTNSVCPKLEFANDTKIASQLGNCVEYSLYGVSGRGVFQNCTAVGVRQQRFVYDAYQNLVGYYSDDGNYYCLRACVSVPVSVIYDKETKTHATLFGSVACEHISSTMSQYSRSTRSMLKRRDSTYGPLQTPVGCVLGLVNSSLFVEDCKLPLGQSLCALPDTPSTLTPRSVRSVPGEMRLASIAFNHPIQVDQLNSSYFKLSIPTNFSFGVTQEYIQTTIQKVTVDCKQYVCNGFQKCEQLLREYGQFCSKINQALHGANLRQDDSVRNLFASVKSSQSSPIIPGFGGDFNLTLLEPVSISTGSRSARSAIEDLLFDKVTIADPGYMQGYDDCMQQGPASARDLICAQYVAGYKVLPPLMDVNMEAAYTSSLLGSIAGVGWTAGLSSFAAIPFAQSIFYRLNGVGITQQVLSENQKLIANKFNQALGAMQTGFTTTNEAFHKVQDAVNNNAQALSKLASELSNTFGAISASIGDIIQRLDPPEQDAQIDRLINGRLTTLNAFVAQQLVRSESAALSAQLAKDKVNECVKAQSKRSGFCGQGTHIVSFVVNAPNGLYFMHVGYYPSNHIEVVSAYGLCDAANPTNCIAPVNGYFIKTNNTRIVDEWSYTGSSFYAPEPITSLNTKYVAPQVTYQNISTNLPPPLLGNSTGIDFQDELDEFFKNVSTSIPNFGSLTQINTTLLDLTYEMLSLQQVVKALNESYIDLKELGNYTY

SEQ ID NO: 14806 - protein, 1291 aa, Artificial Sequence
  MERS-CoV/England 1__YP_007188579.1 spike protein (variant)
MIHSVFLLMFLLTPTESYVDVGPDSVKSACIEVDIQQTFFDKTWPRPIDVSKADGIIYPQGRTYSNITITYQGLFPYQGDHGDMYVYSAGHATGTTPQKLFVANYSQDVKQFANGFVVRIGAAANSTGTVIISPSTSATIRKIYPAFMLGSSVGNFSDGKMGRFFNHTLVLLPDGCGTLLRAFYCILEPRSGNHCPAGNSYTSFATYHTPATDCSDGNYNRNASLNSFKEYFNLRNCTFMYTYNITEDEILEWFGITQTAQGVHLFSSRYVDLYGGNMFQFATLPVYDTIKYYSIIPHSIRSIQSDRKAWAAFYVYKLQPLTFLLDFSVDGYIRRAIDCGFNDLSQLHCSYESFDVESGVYSVSSFEAKPSGSVVEQAEGVECDFSPLLSGTPPQVYNFKRLVFTNCNYNLTKLLSLFSVNDFTCSQISPAAIASNCYSSLILDYFSYPLSMKSDLSVSSAGPISQFNYKQSFSNPTCLILATVPHNLTTITKPLKYSYINKCSRFLSDDRTEVPQLVNANQYSPCVSIVPSTVWEDGDYYRKQLSPLEGGGWLVASGSTVAMTEQLQMGFGITVQYGTDTNSVCPKLEFANDTKIASQLGNCVEYSLYGVSGRGVFQNCTAVGVRQQRFVYDAYQNLVGYYSDDGNYYCLRACVSVPVSVIYDKETKTHATLFGSVACEHISSTMSQYSRSTRSMLKRRDSTYGPLQTPVGCVLGLVNSSLFVEDCKLPLGQSLCALPDTPSTLTPASVGSVPGEMRLASIAFNHPIQVDQLNSSYFKLSIPTNFSFGVTQEYIQTTIQKVTVDCKQYVCNGFQKCEQLLREYGQFCSKINQALHGANLRQDDSVRNLFASVKSSQSSPIIPGFGGDFNLTLLEPVSISTGSRSARSAIEDLLFDKVTIADPGYMQGYDDCMQQGPASARDLICAQYVAGYKVLPPLMDVNMEAAYTSSLLGSIAGVGWTAGLSSFAAIPFAQSIFYRLNGVGITQQVLSENQKLIANKFNQALGAMQTGFTTTNEAFHKVQDAVNNNAQALSKLASELSNTFGAISASIGDIIQRLDPPEQDAQIDRLINGRLTTLNAFVAQQLVRSESAALSAQLAKDKVNECVKAQSKRSGFCGQGTHIVSFVVNAPNGLYFMHVGYYPSNHIEVVSAYGLCDAANPTNCIAPVNGYFIKTNNTRIVDEWSYTGSSFYAPEPITSLNTKYVAPQVTYQNISTNLPPPLLGNSTGIDFQDELDEFFKNVSTSIPNFGSLTQINTTLLDLTYEMLSLQQVVKALNESYIDLKELGNYTY

SEQ ID NO: 14807 - protein, 1291 aa, Artificial Sequence
  MERS-CoV/England 1__YP_007188579.1 spike protein (variant)
MIHSVFLLMFLLTPTESYVDVGPDSVKSACIEVDIQQTFFDKTWPRPIDVSKADGIIYPQGRTYSNITITYQGLFPYQGDHGDMYVYSAGHATGTTPQKLFVANYSQDVKQFANGFVVRIGAAANSTGTVIISPSTSATIRKIYPAFMLGSSVGNFSDGKMGRFFNHTLVLLPDGCGTLLRAFYCILEPRSGNHCPAGNSYTSFATYHTPATDCSDGNYNRNASLNSFKEYFNLRNCTFMYTYNITEDEILEWFGITQTAQGVHLFSSRYVDLYGGNMFQFATLPVYDTIKYYSIIPHSIRSIQSDRKAWAAFYVYKLQPLTFLLDFSVDGYIRRAIDCGFNDLSQLHCSYESFDVESGVYSVSSFEAKPSGSVVEQAEGVECDFSPLLSGTPPQVYNFKRLVFTNCNYNLTKLLSLFSVNDFTCSQISPAAIASNCYSSLILDYFSYPLSMKSDLSVSSAGPISQFNYKQSFSNPTCLILATVPHNLTTITKPLKYSYINKCSRFLSDDRTEVPQLVNANQYSPCVSIVPSTVWEDGDYYRKQLSPLEGGGWLVASGSTVAMTEQLQMGFGITVQYGTDTNSVCPKLEFANDTKIASQLGNCVEYSLYGVSGRGVFQNCTAVGVRQQRFVYDAYQNLVGYYSDDGNYYCLRACVSVPVSVIYDKETKTHATLFGSVACEHISSTMSQYSRSTRSMLKRRDSTYGPLQTPVGCVLGLVNSSLFVEDCKLPLGQSLCALPDTPSTLTPASVGSVPGEMRLASIAFNHPIQVDQLNSSYFKLSIPTNFSFGVTQEYIQTTIQKVTVDCKQYVCNGFQKCEQLLREYGQFCSKINQALHGANLRQDDSVRNLFASVKSSQSSPIIPGFGGDFNLTLLEPVSISTGSGSAGSAIEDLLFDKVTIADPGYMQGYDDCMQQGPASARDLICAQYVAGYKVLPPLMDVNMEAAYTSSLLGSIAGVGWTAGLSSFAAIPFAQSIFYRLNGVGITQQVLSENQKLIANKFNQALGAMQTGFTTTNEAFHKVQDAVNNNAQALSKLASELSNTFGAISASIGDIIQRLDPPEQDAQIDRLINGRLTTLNAFVAQQLVRSESAALSAQLAKDKVNECVKAQSKRSGFCGQGTHIVSFVVNAPNGLYFMHVGYYPSNHIEVVSAYGLCDAANPTNCIAPVNGYFIKTNNTRIVDEWSYTGSSFYAPEPITSLNTKYVAPQVTYQNISTNLPPPLLGNSTGIDFQDELDEFFKNVSTSIPNFGSLTQINTTLLDLTYEMLSLQQVVKALNESYIDLKELGNYTY

SEQ ID NO: 14808 - protein, 1318 aa, Artificial Sequence
  MERS-CoV/England 1__YP_007188579.1 spike protein (variant)
MIHSVFLLMFLLTPTESYVDVGPDSVKSACIEVDIQQTFFDKTWPRPIDVSKADGIIYPQGRTYSNITITYQGLFPYQGDHGDMYVYSAGHATGTTPQKLFVANYSQDVKQFANGFVVRIGAAANSTGTVIISPSTSATIRKIYPAFMLGSSVGNFSDGKMGRFFNHTLVLLPDGCGTLLRAFYCILEPRSGNHCPAGNSYTSFATYHTPATDCSDGNYNRNASLNSFKEYFNLRNCTFMYTYNITEDEILEWFGITQTAQGVHLFSSRYVDLYGGNMFQFATLPVYDTIKYYSIIPHSIRSIQSDRKAWAAFYVYKLQPLTFLLDFSVDGYIRRAIDCGFNDLSQLHCSYESFDVESGVYSVSSFEAKPSGSVVEQAEGVECDFSPLLSGTPPQVYNFKRLVFTNCNYNLTKLLSLFSVNDFTCSQISPAAIASNCYSSLILDYFSYPLSMKSDLSVSSAGPISQFNYKQSFSNPTCLILATVPHNLTTITKPLKYSYINKCSRFLSDDRTEVPQLVNANQYSPCVSIVPSTVWEDGDYYRKQLSPLEGGGWLVASGSTVAMTEQLQMGFGITVQYGTDTNSVCPKLEFANDTKIASQLGNCVEYSLYGVSGRGVFQNCTAVGVRQQRFVYDAYQNLVGYYSDDGNYYCLRACVSVPVSVIYDKETKTHATLFGSVACEHISSTMSQYSRSTRSMLKRRDSTYGPLQTPVGCVLGLVNSSLFVEDCKLPLGQSLCALPDTPSTLTPASVGSVPGEMRLASIAFNHPIQVDQLNSSYFKLSIPTNFSFGVTQEYIQTTIQKVTVDCKQYVCNGFQKCEQLLREYGQFCSKINQALHGANLRQDDSVRNLFASVKSSQSSPIIPGFGGDFNLTLLEPVSISTGSRSARSAIEDLLFDKVTIADPGYMQGYDDCMQQGPASARDLICAQYVAGYKVLPPLMDVNMEAAYTSSLLGSIAGVGWTAGLSSFAAIPFAQSIFYRLNGVGITQQVLSENQKLIANKFNQALGAMQTGFTTTNEAFHKVQDAVNNNAQALSKLASELSNTFGAISASIGDIIQRLDPPEQDAQIDRLINGRLTTLNAFVAQQLVRSESAALSAQLAKDKVNECVKAQSKRSGFCGQGTHIVSFVVNAPNGLYFMHVGYYPSNHIEVVSAYGLCDAANPTNCIAPVNGYFIKTNNTRIVDEWSYTGSSFYAPEPITSLNTKYVAPQVTYQNISTNLPPPLLGNSTGIDFQDELDEFFKNVSTSIPNFGSLTQINTTLLDLTYEMLSLQQVVKALNESYIDLKELGNYTYGGYIPEAPRDGQAYVRKDGEWVLLSTF

SEQ ID NO: 14809 - protein, 1318 aa, Artificial Sequence
  MERS-CoV/England 1__YP_007188579.1 spike protein (variant)
MIHSVFLLMFLLTPTESYVDVGPDSVKSACIEVDIQQTFFDKTWPRPIDVSKADGIIYPQGRTYSNITITYQGLFPYQGDHGDMYVYSAGHATGTTPQKLFVANYSQDVKQFANGFVVRIGAAANSTGTVIISPSTSATIRKIYPAFMLGSSVGNFSDGKMGRFFNHTLVLLPDGCGTLLRAFYCILEPRSGNHCPAGNSYTSFATYHTPATDCSDGNYNRNASLNSFKEYFNLRNCTFMYTYNITEDEILEWFGITQTAQGVHLFSSRYVDLYGGNMFQFATLPVYDTIKYYSIIPHSIRSIQSDRKAWAAFYVYKLQPLTFLLDFSVDGYIRRAIDCGFNDLSQLHCSYESFDVESGVYSVSSFEAKPSGSVVEQAEGVECDFSPLLSGTPPQVYNFKRLVFTNCNYNLTKLLSLFSVNDFTCSQISPAAIASNCYSSLILDYFSYPLSMKSDLSVSSAGPISQFNYKQSFSNPTCLILATVPHNLTTITKPLKYSYINKCSRFLSDDRTEVPQLVNANQYSPCVSIVPSTVWEDGDYYRKQLSPLEGGGWLVASGSTVAMTEQLQMGFGITVQYGTDTNSVCPKLEFANDTKIASQLGNCVEYSLYGVSGRGVFQNCTAVGVRQQRFVYDAYQNLVGYYSDDGNYYCLRACVSVPVSVIYDKETKTHATLFGSVACEHISSTMSQYSRSTRSMLKRRDSTYGPLQTPVGCVLGLVNSSLFVEDCKLPLGQSLCALPDTPSTLTPASVGSVPGEMRLASIAFNHPIQVDQLNSSYFKLSIPTNFSFGVTQEYIQTTIQKVTVDCKQYVCNGFQKCEQLLREYGQFCSKINQALHGANLRQDDSVRNLFASVKSSQSSPIIPGFGGDFNLTLLEPVSISTGSGSAGSAIEDLLFDKVTIADPGYMQGYDDCMQQGPASARDLICAQYVAGYKVLPPLMDVNMEAAYTSSLLGSIAGVGWTAGLSSFAAIPFAQSIFYRLNGVGITQQVLSENQKLIANKFNQALGAMQTGFTTTNEAFHKVQDAVNNNAQALSKLASELSNTFGAISASIGDIIQRLDPPEQDAQIDRLINGRLTTLNAFVAQQLVRSESAALSAQLAKDKVNECVKAQSKRSGFCGQGTHIVSFVVNAPNGLYFMHVGYYPSNHIEVVSAYGLCDAANPTNCIAPVNGYFIKTNNTRIVDEWSYTGSSFYAPEPITSLNTKYVAPQVTYQNISTNLPPPLLGNSTGIDFQDELDEFFKNVSTSIPNFGSLTQINTTLLDLTYEMLSLQQVVKALNESYIDLKELGNYTYGGYIPEAPRDGQAYVRKDGEWVLLSTF

SEQ ID NO: 14810 - RNA, 4062 nt, Artificial Sequence
  MERS-CoV/MERS-CoV-Jeddah-human-1__AHE78108.1 spike protein CDS gc (1-1353)
augauccacagcguguuccugcucauguuccugcugacccccaccgaguccuacgucgacgugggcccggacagcgugaaguccgccugcaucgaggucgacauccagcagacguucuucgacaagaccuggccccgccccaucgacgugagcaaggccgacgggaucaucuacccccagggccggaccuacuccaacaucaccaucacguaccagggccucuucccguaccagggggaccacggggacauguacguguacagcgcgggccacgccaccggcaccacgccccagaagcuguucgucgccaacuacucccaggacgugaagcaguucgccaacggguucgugguccgcaucggcgccgcggccaacagcaccgggaccgugaucaucucccccagcaccuccgccaccauccggaagaucuaccccgccuucaugcugggcagcuccguggggaacuucagcgacggcaagaugggccgcuucuucaaccacacgcucguccugcugccggacgggugcggcacccuccugcgggcguucuacugcauccuggagccccgcuccgggaaccacugccccgccggcaacagcuacaccuccuucgccaccuaccacacgcccgccaccgacugcagcgacggcaacuacaaccggaacgccucccucaacagcuucaaggaguacuucaaccugcgcaacugcaccuucauguacaccuacaacaucacggaggacgagauccuggagugguucgggaucacccagaccgcgcagggcgugcaccucuucagcucccgguacguggaccuguacgggggcaacauguuccaguucgccacccugccggucuacgacacgaucaaguacuacagcaucaucccccacuccauccgcagcauccaguccgaccggaaggccugggccgccuucuacguguacaagcuccagccccugaccuuccugcucgacuucagcguggacggguacauccgccgggcgaucgacugcggcuucaacgaccugucccagcugcacugcagcuacgaguccuucgacgucgagagcggcguguacuccgugagcuccuucgaggccaagcccagcggguccgucguggagcaggccgagggcguggagugcgacuucagcccgcuccuguccgggaccccgccccaggucuacaacuucaagcgccugguguucaccaacugcaacuacaaccucacgaagcugcugagccucuucuccgucaacgacuucacgugcagccagaucagccccgccgccaucgcguccaacugcuacagcucccugauccuggacuacuucagcuacccccucuccaugaaguccgaccugagcgugagcuccgccggccccaucagccaguucaacuacaagcaguccuucagcaacccgaccugccugauccucgccaccgugccccacaaccugaccaccaucaccaagccccugaaguacuccuacaucaacaagugcagccggcuccuguccgacgaccgcaccgaggucccccagcuggugaacgccaaccaguacagccccugcguguccaucguccccagcacggugugggaggacggggacuacuaccggaagcagcucagcccgcuggagggcggcggguggcugguggccuccggcagcaccgucgcgaugaccgagcagcuccagaugggguucggcaucaccgugcaguacgggaccgacacgaacuccgugugccccaagcuggaguucgccaacgacaccaagaucgccagccagcugggcaacugcgucgaguacucccucuacggcgugagcgggcgcggcguguuccagaacugcaccgccgucggggugcggcagcagcgcuucguguacgacgcguaccagaaccuggucggcuacuacuccgacgacggcaacuacuacugccugcgggccugcgugagcgugcccgucuccgugaucuacgacaaggagaccaagacgcacgccacccuguucgggagcguggccugcgagcacaucuccagcaccaugucccaguacagccgcuccacccgcagcaugcucaagcggcgcgacuccacguacggcccgcugcagacccccgucgggugcgugcugggccucgugaacagcucccuguucgucgaggacugcaagcugccccucgggcagagccugugcgcccugcccgacaccccgagcacccucacgccccgguccgugcgcagcgugcccggcgagaugcggcuggcguccaucgccuucaaccaccccauccaggucgaccagcugaacagcuccuacuucaagcucagcaucccgaccaacuucuccuucggcgugacccaggaguacauccagaccacgauccagaaggugaccgucgacugcaagcaguacgugugcaacggguuccagaagugcgagcagcugcugcgcgaguacggccaguucugcagcaagaucaaccaggcccuccacggggccaaccugcggcaggacgacuccgugcgcaaccuguucgccagcgucaaguccagccaguccagccccaucauccccggcuucgggggcgacuucaaccucacccugcuggagcccguguccaucagcaccggcucccggagcgcgcgcuccgccaucgaggaccuccuguucgacaaggugacgaucgccgacccgggguacaugcagggcuacgacgacugcaugcagcaggggcccgccagcgcccgggaccugaucugcgcgcaguacgucgccggcuacaaggugcucccgccccugauggacgugaacauggaggccgccuacaccagcucccugcucgggagcaucgcgggcgucggcuggaccgccgggcuguccagcuucgccgccauccccuucgcccaguccaucuucuaccgccugaacggcguggggaucacccagcagguccucagcgagaaccagaagcugaucgcgaacaaguucaaccaggcccugggcgccaugcagacgggguucaccaccaccaacgaggccuuccacaaggugcaggacgccgugaacaacaacgcgcaggcccucuccaagcuggccagcgagcuguccaacacguucggcgccaucagcgccuccaucggcgacaucauccagcggcucgacgugcuggagcaggacgcgcagaucgaccgccugaucaacgggcggcucaccacccugaacgccuucgucgcccagcagcuggugcgcagcgaguccgccgcgcucagcgcccagcuggccaaggacaaggugaacgagugcgucaaggcccaguccaagcggagcggcuucugcgggcagggcacccacaucguguccuucgucgugaacgcccccaacggccuguacuucaugcacgugggguacuaccccagcaaccacaucgaggucguguccgcguacggccucugcgacgccgccaaccccacgaacugcaucgccccggugaacggguacuucaucaagaccaacaacacccgcaucgucgacgaguggagcuacaccggcagcuccuucuacgcccccgagcccaucacgagccugaacaccaaguacguggcgccccaggugaccuaccagaacaucuccaccaaccugccgccgccccuccuggggaacagcaccggcaucgacuuccaggacgagcuggacgaguucuucaagaacgucuccacgagcauccccaacuucggcucccucacccagaucaacaccacccugcuggaccucacguacgagaugcugagccugcagcaggucgugaaggcccucaacgaguccuacaucgaccugaaggagcuggggaacuacaccuacuacaacaaguggcccugguacaucuggcucggcuucaucgccgggcugguggcccuggcccucugcguguucuucauccugugcugcaccggcugcgggaccaacugcaugggcaagcugaagugcaaccggugcugcgaccgcuacgaggaguacgaccucgagccccacaaggugcacguccacuga

SEQ ID NO: 14811 - RNA, 4062 nt, Artificial Sequence
  MERS-CoV/MERS-CoV-Jeddah-human-1__AHE78108.1 spike protein CDS gc (1-1353)(V1060P_L1061P)
augauccacagcguguuccugcucauguuccugcugacccccaccgaguccuacgucgacgugggcccggacagcgugaaguccgccugcaucgaggucgacauccagcagacguucuucgacaagaccuggccccgccccaucgacgugagcaaggccgacgggaucaucuacccccagggccggaccuacuccaacaucaccaucacguaccagggccucuucccguaccagggggaccacggggacauguacguguacagcgcgggccacgccaccggcaccacgccccagaagcuguucgucgccaacuacucccaggacgugaagcaguucgccaacggguucgugguccgcaucggcgccgcggccaacagcaccgggaccgugaucaucucccccagcaccuccgccaccauccggaagaucuaccccgccuucaugcugggcagcuccguggggaacuucagcgacggcaagaugggccgcuucuucaaccacacgcucguccugcugccggacgggugcggcacccuccugcgggcguucuacugcauccuggagccccgcuccgggaaccacugccccgccggcaacagcuacaccuccuucgccaccuaccacacgcccgccaccgacugcagcgacggcaacuacaaccggaacgccucccucaacagcuucaaggaguacuucaaccugcgcaacugcaccuucauguacaccuacaacaucacggaggacgagauccuggagugguucgggaucacccagaccgcgcagggcgugcaccucuucagcucccgguacguggaccuguacgggggcaacauguuccaguucgccacccugccggucuacgacacgaucaaguacuacagcaucaucccccacuccauccgcagcauccaguccgaccggaaggccugggccgccuucuacguguacaagcuccagccccugaccuuccugcucgacuucagcguggacggguacauccgccgggcgaucgacugcggcuucaacgaccugucccagcugcacugcagcuacgaguccuucgacgucgagagcggcguguacuccgugagcuccuucgaggccaagcccagcggguccgucguggagcaggccgagggcguggagugcgacuucagcccgcuccuguccgggaccccgccccaggucuacaacuucaagcgccugguguucaccaacugcaacuacaaccucacgaagcugcugagccucuucuccgucaacgacuucacgugcagccagaucagccccgccgccaucgcguccaacugcuacagcucccugauccuggacuacuucagcuacccccucuccaugaaguccgaccugagcgugagcuccgccggccccaucagccaguucaacuacaagcaguccuucagcaacccgaccugccugauccucgccaccgugccccacaaccugaccaccaucaccaagccccugaaguacuccuacaucaacaagugcagccggcuccuguccgacgaccgcaccgaggucccccagcuggugaacgccaaccaguacagccccugcguguccaucguccccagcacggugugggaggacggggacuacuaccggaagcagcucagcccgcuggagggcggcggguggcugguggccuccggcagcaccgucgcgaugaccgagcagcuccagaugggguucggcaucaccgugcaguacgggaccgacacgaacuccgugugccccaagcuggaguucgccaacgacaccaagaucgccagccagcugggcaacugcgucgaguacucccucuacggcgugagcgggcgcggcguguuccagaacugcaccgccgucggggugcggcagcagcgcuucguguacgacgcguaccagaaccuggucggcuacuacuccgacgacggcaacuacuacugccugcgggccugcgugagcgugcccgucuccgugaucuacgacaaggagaccaagacgcacgccacccuguucgggagcguggccugcgagcacaucuccagcaccaugucccaguacagccgcuccacccgcagcaugcucaagcggcgcgacuccacguacggcccgcugcagacccccgucgggugcgugcugggccucgugaacagcucccuguucgucgaggacugcaagcugccccucgggcagagccugugcgcccugcccgacaccccgagcacccucacgccccgguccgugcgcagcgugcccggcgagaugcggcuggcguccaucgccuucaaccaccccauccaggucgaccagcugaacagcuccuacuucaagcucagcaucccgaccaacuucuccuucggcgugacccaggaguacauccagaccacgauccagaaggugaccgucgacugcaagcaguacgugugcaacggguuccagaagugcgagcagcugcugcgcgaguacggccaguucugcagcaagaucaaccaggcccuccacggggccaaccugcggcaggacgacuccgugcgcaaccuguucgccagcgucaaguccagccaguccagccccaucauccccggcuucgggggcgacuucaaccucacccugcuggagcccguguccaucagcaccggcucccggagcgcgcgcuccgccaucgaggaccuccuguucgacaaggugacgaucgccgacccgggguacaugcagggcuacgacgacugcaugcagcaggggcccgccagcgcccgggaccugaucugcgcgcaguacgucgccggcuacaaggugcucccgccccugauggacgugaacauggaggccgccuacaccagcucccugcucgggagcaucgcgggcgucggcuggaccgccgggcuguccagcuucgccgccauccccuucgcccaguccaucuucuaccgccugaacggcguggggaucacccagcagguccucagcgagaaccagaagcugaucgcgaacaaguucaaccaggcccugggcgccaugcagacgggguucaccaccaccaacgaggccuuccacaaggugcaggacgccgugaacaacaacgcgcaggcccucuccaagcuggccagcgagcuguccaacacguucggcgccaucagcgccuccaucggcgacaucauccagcggcucgacccgcccgagcaggacgcgcagaucgaccgccugaucaacgggcggcucaccacccugaacgccuucgucgcccagcagcuggugcgcagcgaguccgccgcgcucagcgcccagcuggccaaggacaaggugaacgagugcgucaaggcccaguccaagcggagcggcuucugcgggcagggcacccacaucguguccuucgucgugaacgcccccaacggccuguacuucaugcacgugggguacuaccccagcaaccacaucgaggucguguccgcguacggccucugcgacgccgccaaccccacgaacugcaucgccccggugaacggguacuucaucaagaccaacaacacccgcaucgucgacgaguggagcuacaccggcagcuccuucuacgcccccgagcccaucacgagccugaacaccaaguacguggcgccccaggugaccuaccagaacaucuccaccaaccugccgccgccccuccuggggaacagcaccggcaucgacuuccaggacgagcuggacgaguucuucaagaacgucuccacgagcauccccaacuucggcucccucacccagaucaacaccacccugcuggaccucacguacgagaugcugagccugcagcaggucgugaaggcccucaacgaguccuacaucgaccugaaggagcuggggaacuacaccuacuacaacaaguggcccugguacaucuggcucggcuucaucgccgggcugguggcccuggcccucugcguguucuucauccugugcugcaccggcugcgggaccaacugcaugggcaagcugaagugcaaccggugcugcgaccgcuacgaggaguacgaccucgagccccacaaggugcacguccacuga

SEQ ID NO: 14812 - RNA, 4062 nt, Artificial Sequence
  MERS-CoV/Al-Hasa_4_2013__AGN70929.1 spike protein CDS gc (1-1353)
augauccacagcguguuccugcucauguuccugcugacccccaccgaguccuacgucgacgugggcccggacagcgugaaguccgccugcaucgaggucgacauccagcagacguucuucgacaagaccuggccccgccccaucgacgugagcaaggccgacgggaucaucuacccccagggccggaccuacuccaacaucaccaucacguaccagggccucuucccguaccagggcgaccacggggacauguacguguacagcgcgggccacgccaccggcaccacgccccagaagcuguucgucgccaacuacucccaggacgugaagcaguucgccaacggguucgugguccgcaucggcgccgcggccaacagcaccgggaccgugaucaucucccccagcaccuccgccaccauccggaagaucuaccccgccuucaugcugggcagcuccguggggaacuucagcgacggcaagaugggccgcuucuucaaccacacgcucguccugcugccggacgggugcggcacccuccugcgggcguucuacugcauccuggagccccgcuccgggaaccacugccccgccggcaacagcuacaccuccuucgccaccuaccacacgcccgccaccgacugcagcgacggcaacuacaaccggaacgccucccucaacagcuucaaggaguacuucaaccugcgcaacugcaccuucauguacaccuacaacaucacggaggacgagauccuggagugguucgggaucacccagaccgcgcagggcgugcaccucuucagcucccgguacguggaccuguacgggggcaacauguuccaguucgccacccugccggucuacgacacgaucaaguacuacagcaucaucccccacuccauccgcagcauccaguccgaccggaaggccugggccgccuucuacguguacaagcuccagccccugaccuuccugcucgacuucagcguggacggguacauccgccgggcgaucgacugcggcuucaacgaccugucccagcugcacugcagcuacgaguccuucgacgucgagagcggcguguacuccgugagcuccuucgaggccaagcccagcggguccgucguggagcaggccgagggcguggagugcgacuucagcccgcuccuguccgggaccccgccccaggucuacaacuucaagcgccugguguucaccaacugcaacuacaaccucacgaagcugcugagccucuucuccgucaacgacuucacgugcagccagaucagccccgccgccaucgcguccaacugcuacagcucccugauccuggacuacuucagcuacccccucuccaugaaguccgaccugagcgugagcuccgccgggcccaucagccaguucaacuacaagcaguccuucagcaacccgaccugccugauccucgccaccgugccccacaaccugaccaccaucaccaagccccugaaguacuccuacaucaacaagugcagccggcuccuguccgacgaccgcaccgaggucccccagcuggugaacgccaaccaguacagccccugcguguccaucguccccagcacggugugggaggacggggacuacuaccggaagcagcucagcccgcuggagggcggcggguggcugguggccuccggcagcaccgucgcgaugaccgagcagcuccagaugggguucggcaucaccgugcaguacgggaccgacacgaacuccgugugccccaagcuggaguucgccaacgacaccaagaucgccagccagcugggcaacugcgucgaguacucccuguacggcgugagcgggcgcggcguguuccagaacugcaccgccgucggggugcggcagcagcgcuucguguacgacgcguaccagaaccucgucggcuacuacuccgacgacggcaacuacuacugccugcgggccugcgugagcgugcccgucuccgugaucuacgacaaggagaccaagacgcacgccacccuguucgggagcguggccugcgagcacaucuccagcaccaugucccaguacagccgcuccacccgcagcaugcucaagcggcgcgacuccacguacggcccgcugcagacccccgucgggugcgugcugggccucgugaacagcucccuguucgucgaggacugcaagcugccccucgggcagagccugugcgcccugcccgacaccccgagcacccucacgccccgguccgugcgcagcgugcccggcgagaugcggcuggcguccaucgccuucaaccaccccauccaggucgaccagcugaacagcuccuacuucaagcucagcaucccgaccaacuucuccuucggcgugacccaggaguacauccagaccacgauccagaaggugaccgucgacugcaagcaguacgugugcaacggguuccagaagugcgagcagcugcugcgcgaguacggccaguucugcagcaagaucaaccaggcccuccacggggccaaccugcggcaggacgacuccgugcgcaaccuguucgccagcgucaaguccagccaguccagccccaucauccccggcuucgggggcgacuucaaccucacccugcuggagcccguguccaucagcaccggcucccggagcgcgcgcuccgccaucgaggaccuccuguucgacaaggugacgaucgccgacccgggguacaugcagggcuacgacgacugcaugcagcaggggcccgccagcgcccgggaccugaucugcgcgcaguacgucgccggcuacaaggugcucccgccccugauggacgugaacauggaggccgccuacaccagcucccugcucgggagcaucgcgggcgucggcuggaccgccgggcuguccagcuucgccgccauccccuucgcccaguccaucuucuaccgccugaacggcguggggaucacccagcagguccucagcgagaaccagaagcugaucgcgaacaaguucaaccaggcccugggcgccaugcagacgggguucaccaccaccaacgaggccuuccggaaggugcaggacgccgugaacaacaacgcgcaggcccucuccaagcuggccagcgagcuguccaacacguucggcgccaucagcgccuccaucggcgacaucauccagcgccucgacgugcuggagcaggacgcgcagaucgaccggcugaucaacgggcgccucaccacccugaacgccuucgucgcccagcagcuggugcggagcgaguccgccgcgcucagcgcccagcuggccaaggacaaggugaacgagugcgucaaggcccaguccaagcgcagcggcuucugcgggcagggcacccacaucguguccuucgucgugaacgcccccaacggccuguacuucaugcacgugggguacuaccccagcaaccacaucgaggucguguccgcguacggccucugcgacgccgccaaccccacgaacugcaucgccccggugaacggguacuucaucaagaccaacaacacccggaucgucgacgaguggagcuacaccggcagcuccuucuacgcccccgagcccaucacgagccugaacaccaaguacguggcgccccacgugaccuaccagaacaucuccaccaaccugccgccgccccuccuggggaacagcaccggcaucgacuuccaggacgagcuggacgaguucuucaagaacgucuccacgagcauccccaacuucggcucccucacccagaucaacaccacccugcuggaccucacguacgagaugcugagccugcagcaggucgugaaggcccucaacgaguccuacaucgaccugaaggagcuggggaacuacaccuacuacaacaaguggcccugguacaucuggcucggcuucaucgccgggcugguggcccuggcccucugcguguucuucauccugugcugcaccggcugcgggaccaacugcaugggcaagcugaagugcaaccgcugcugcgaccgcuacgaggaguacgaccucgagccccacaaggugcacguccacuga

SEQ ID NO: 14813 - RNA, 4062 nt, Artificial Sequence
  MERS-CoV/Al-Hasa_4_2013__AGN70929.1 spike protein CDS gc (1-1353)(V1060P_L1061P)
augauccacagcguguuccugcucauguuccugcugacccccaccgaguccuacgucgacgugggcccggacagcgugaaguccgccugcaucgaggucgacauccagcagacguucuucgacaagaccuggccccgccccaucgacgugagcaaggccgacgggaucaucuacccccagggccggaccuacuccaacaucaccaucacguaccagggccucuucccguaccagggcgaccacggggacauguacguguacagcgcgggccacgccaccggcaccacgccccagaagcuguucgucgccaacuacucccaggacgugaagcaguucgccaacggguucgugguccgcaucggcgccgcggccaacagcaccgggaccgugaucaucucccccagcaccuccgccaccauccggaagaucuaccccgccuucaugcugggcagcuccguggggaacuucagcgacggcaagaugggccgcuucuucaaccacacgcucguccugcugccggacgggugcggcacccuccugcgggcguucuacugcauccuggagccccgcuccgggaaccacugccccgccggcaacagcuacaccuccuucgccaccuaccacacgcccgccaccgacugcagcgacggcaacuacaaccggaacgccucccucaacagcuucaaggaguacuucaaccugcgcaacugcaccuucauguacaccuacaacaucacggaggacgagauccuggagugguucgggaucacccagaccgcgcagggcgugcaccucuucagcucccgguacguggaccuguacgggggcaacauguuccaguucgccacccugccggucuacgacacgaucaaguacuacagcaucaucccccacuccauccgcagcauccaguccgaccggaaggccugggccgccuucuacguguacaagcuccagccccugaccuuccugcucgacuucagcguggacggguacauccgccgggcgaucgacugcggcuucaacgaccugucccagcugcacugcagcuacgaguccuucgacgucgagagcggcguguacuccgugagcuccuucgaggccaagcccagcggguccgucguggagcaggccgagggcguggagugcgacuucagcccgcuccuguccgggaccccgccccaggucuacaacuucaagcgccugguguucaccaacugcaacuacaaccucacgaagcugcugagccucuucuccgucaacgacuucacgugcagccagaucagccccgccgccaucgcguccaacugcuacagcucccugauccuggacuacuucagcuacccccucuccaugaaguccgaccugagcgugagcuccgccgggcccaucagccaguucaacuacaagcaguccuucagcaacccgaccugccugauccucgccaccgugccccacaaccugaccaccaucaccaagccccugaaguacuccuacaucaacaagugcagccggcuccuguccgacgaccgcaccgaggucccccagcuggugaacgccaaccaguacagccccugcguguccaucguccccagcacggugugggaggacggggacuacuaccggaagcagcucagcccgcuggagggcggcggguggcugguggccuccggcagcaccgucgcgaugaccgagcagcuccagaugggguucggcaucaccgugcaguacgggaccgacacgaacuccgugugccccaagcuggaguucgccaacgacaccaagaucgccagccagcugggcaacugcgucgaguacucccuguacggcgugagcgggcgcggcguguuccagaacugcaccgccgucggggugcggcagcagcgcuucguguacgacgcguaccagaaccucgucggcuacuacuccgacgacggcaacuacuacugccugcgggccugcgugagcgugcccgucuccgugaucuacgacaaggagaccaagacgcacgccacccuguucgggagcguggccugcgagcacaucuccagcaccaugucccaguacagccgcuccacccgcagcaugcucaagcggcgcgacuccacguacggcccgcugcagacccccgucgggugcgugcugggccucgugaacagcucccuguucgucgaggacugcaagcugccccucgggcagagccugugcgcccugcccgacaccccgagcacccucacgccccgguccgugcgcagcgugcccggcgagaugcggcuggcguccaucgccuucaaccaccccauccaggucgaccagcugaacagcuccuacuucaagcucagcaucccgaccaacuucuccuucggcgugacccaggaguacauccagaccacgauccagaaggugaccgucgacugcaagcaguacgugugcaacggguuccagaagugcgagcagcugcugcgcgaguacggccaguucugcagcaagaucaaccaggcccuccacggggccaaccugcggcaggacgacuccgugcgcaaccuguucgccagcgucaaguccagccaguccagccccaucauccccggcuucgggggcgacuucaaccucacccugcuggagcccguguccaucagcaccggcucccggagcgcgcgcuccgccaucgaggaccuccuguucgacaaggugacgaucgccgacccgggguacaugcagggcuacgacgacugcaugcagcaggggcccgccagcgcccgggaccugaucugcgcgcaguacgucgccggcuacaaggugcucccgccccugauggacgugaacauggaggccgccuacaccagcucccugcucgggagcaucgcgggcgucggcuggaccgccgggcuguccagcuucgccgccauccccuucgcccaguccaucuucuaccgccugaacggcguggggaucacccagcagguccucagcgagaaccagaagcugaucgcgaacaaguucaaccaggcccugggcgccaugcagacgggguucaccaccaccaacgaggccuuccggaaggugcaggacgccgugaacaacaacgcgcaggcccucuccaagcuggccagcgagcuguccaacacguucggcgccaucagcgccuccaucggcgacaucauccagcgccucgacccgcccgagcaggacgcgcagaucgaccggcugaucaacgggcgccugaccacccucaacgccuucguggcccagcagcugguccggagcgaguccgccgcgcugagcgcccagcucgccaaggacaaggugaacgagugcgugaaggcccaguccaagcgcagcggcuucugcgggcagggcacccacaucgucuccuucguggucaacgcccccaacggccuguacuucaugcacgugggguacuaccccagcaaccacaucgagguggucuccgcguacggccugugcgacgccgccaaccccacgaacugcaucgcccccgugaacggguacuucaucaagaccaacaacacccggaucguggacgaguggagcuacaccggcagcuccuucuacgcccccgagccgaucacgagccucaacaccaaguacgucgcgccccacgugaccuaccagaacaucuccaccaaccugcccccgccccugcucgggaacagcaccggcaucgacuuccaggacgagcuggacgaguucuucaagaacguguccacgagcauccccaacuucggcucccugacccagaucaacaccacccuccuggaccugacguacgagaugcucagccugcagcaggucgugaaggcccugaacgaguccuacaucgaccucaaggagcuggggaacuacaccuacuacaacaaguggcccugguacaucuggcugggcuucaucgccgggcucguggcccuggcccugugcgucuucuucauccucugcugcaccggcugcgggaccaacugcaugggcaagcugaagugcaaccgcugcugcgaccgcuacgaggaguacgaccuggagccgcacaaggugcacgugcacuga

SEQ ID NO: 14814 - RNA, 4062 nt, Artificial Sequence
  MERS-CoV/Riyadh_14_2013__AHI48572.1 spike protein CDS gc (1-1353)
augauccacagcguguuccugcucauguuccugcugacccccaccgaguccuacgucgacgugggcccggacagcgugaaguccgccugcaucgaggucgacauccagcagacguucuucgacaagaccuggccccgccccaucgacgugagcaaggccgacgggaucaucuacccccagggccggaccuacuccaacaucaccaucacguaccagggccucuucccguaccagggcgaccacggggacauguacguguacagcgcgggccacgccaccggcaccacgccccagaagcuguucgucgccaacuacucccaggacgugaagcaguucgccaacggguucgugguccgcaucggcgccgcggccaacagcaccgggaccgugaucaucucccccagcaccuccgccaccauccggaagaucuaccccgccuucaugcugggcagcuccguggggaacuucagcgacggcaagaugggccgcuucuucaaccacacgcucguccugcugccggacgggugcggcacccuccugcgggcguucuacugcauccuggagccccgcuccgggaaccacugccccgccggcaacagcuacaccuccuucgccaccuaccacacgcccgccaccgacugcagcgacggcaacuacaaccggaacgccucccucaacagcuucaaggaguacuucaaccugcgcaacugcaccuucauguacaccuacaacaucacggaggacgagauccuggagugguucgggaucacccagaccgcgcagggcgugcaccucuucagcucccgguacguggaccuguacgggggcaacauguuccaguucgccacccugccggucuacgacacgaucaaguacuacagcaucaucccccacuccauccgcagcauccaguccgaccggaaggccugggccgccuucuacguguacaagcuccagccccugaccuuccugcucgacuucagcguggacggguacauccgccgggcgaucgacugcggcuucaacgaccugucccagcugcacugcagcuacgaguccuucgacgucgagagcggcguguacuccgugagcuccuucgaggccaagcccagcggguccgucguggagcaggccgagggcguggagugcgacuucagcccgcuccuguccgggaccccgccccaggucuacaacuucaagcgccugguguucaccaacugcaacuacaaccucacgaagcugcugagccucuucuccgucaacgacuucacgugcagccagaucagccccgccgccaucgcguccaacugcuacagcucccugauccuggacuacuucagcuacccccucuccaugaaguccgaccugagcgugagcuccgccgggcccaucagccaguucaacuacaagcaguccuucagcaacccgaccugccugauccucgccaccgugccccacaaccugaccaccaucaccaagccccugaaguacuccuacaucaacaagugcagccggcuccuguccgacgaccgcaccgaggucccccagcuggugaacgccaaccaguacagccccugcguguccaucguccccagcacggugugggaggacggggacuacuaccggaagcagcucagcccgcuggagggcggcggguggcugguggccuccggcagcaccgucgcgaugaccgagcagcuccagaugggguucggcaucaccgugcaguacgggaccgacacgaacuccgugugccccaagcuggaguucgccaacgacaccaagaucgccagccagcugggcaacugcgucgaguacucccuguacggcgugagcgggcgcggcguguuccagaacugcaccgccgucggggugcggcagcagcgcuucguguacgacgcguaccagaaccucgucggcuacuacuccgacgacggcaacuacuacugccugcgggccugcgugagcgugcccgucuccgugaucuacgacaaggagaccaagacgcacgccacccuguucgggagcguggccugcgagcacaucuccagcaccaugucccaguacagccgcuccacccgcagcaugcucaagcggcgcgacuccacguacggcccgcugcagacccccgucgggugcgugcugggccucgugaacagcucccuguucgucgaggacugcaagcugccccucgggcagagccugugcgcccugcccgacaccccgagcacccucacgccccgguccgugcgcagcgugcccggcgagaugcggcuggcguccaucgccuucaaccaccccauccaggucgaccagcugaacagcuccuacuucaagcucagcaucccgaccaacuucuccuucggcgugacccaggaguacauccagaccacgauccagaaggugaccgucgacugcaagcaguacgugugcaacggguuccagaagugcgagcagcugcugcgcgaguacggccaguucugcagcaagaucaaccaggcccuccacggggccaaccugcggcaggacgacuccgugcgcaaccuguucgccagcgucaaguccagccaguccagccccaucauccccggcuucgggggcgacuucaaccucacccugcuggagcccguguccaucagcaccggcucccggagcgcgcgcuccgccaucgaggaccuccuguucgacaaggugacgaucgccgacccgggguacaugcagggcuacgacgacugcaugcagcaggggcccgccagcgcccgggaccugaucugcgcgcaguacgucgccggcuacaaggugcucccgccccugauggacgugaacauggaggccgccuacaccagcucccugcucgggagcaucgcgggcgucggcuggaccgccgggcuguccagcuucgccgccauccccuucgcccaguccaucuucuaccgccugaacggcguggggaucacccagcagguccucagcgagaaccagaagcugaucgcgaacaaguucaaccaggcccugggcgccaugcagacgggguucaccaccaccaacgaggccuuccggaaggugcaggacgccgugaacaacaacgcgcaggcccucuccaagcuggccagcgagcuguccaacacguucggcgccaucagcgccuccaucggcgacaucauccagcgccucgacgugcuggagcaggacgcgcagaucgaccggcugaucaacgggcgccucaccacccugaacgccuucgucgcccagcagcuggugcggagcgaguccgccgcgcucagcgcccagcuggccaaggacaaggugaacgagugcgucaaggcccaguccaagcgcagcggcuucugcgggcagggcacccacaucguguccuucgucgugaacgcccccaacggccuguacuucaugcacgugggguacuaccccagcaaccacaucgaggucguguccgcguacggccucugcgacgccgccaaccccacgaacugcaucgccccggugaacggguacuucaucaagaccaacaacacccggaucgucgacgaguggagcuacaccggcagcuccuucuacgcccccgagcccaucacgagccugaacaccaaguacguggcgccccaggugaccuaccagaacaucuccaccaaccugccgccgccccuccuggggaacagcaccggcaucgacuuccaggacgagcuggacgaguucuucaagaacgucuccacgagcauccccaacuucggcucccucacccagaucaacaccacccugcuggaccucacguacgagaugcugagccugcagcaggucgugaaggcccucaacgaguccuacaucgaccugaaggagcuggggaacuacaccuacuacaacaaguggcccugguacaucuggcucggcuucaucgccgggcugguggcccuggcccucugcguguucuucauccugugcugcaccggcugcgggaccaacugcaugggcaagcugaagugcaaccgcugcugcgaccgcuacgaggaguacgaccucgagccccacaaggugcacguccacuga

SEQ ID NO: 14815 - RNA, 4062 nt, Artificial Sequence
  MERS-CoV/Riyadh_14_2013__AHI48572.1 spike protein CDS gc (1-1353)(V1060P_L1061P)
augauccacagcguguuccugcucauguuccugcugacccccaccgaguccuacgucgacgugggcccggacagcgugaaguccgccugcaucgaggucgacauccagcagacguucuucgacaagaccuggccccgccccaucgacgugagcaaggccgacgggaucaucuacccccagggccggaccuacuccaacaucaccaucacguaccagggccucuucccguaccagggcgaccacggggacauguacguguacagcgcgggccacgccaccggcaccacgccccagaagcuguucgucgccaacuacucccaggacgugaagcaguucgccaacggguucgugguccgcaucggcgccgcggccaacagcaccgggaccgugaucaucucccccagcaccuccgccaccauccggaagaucuaccccgccuucaugcugggcagcuccguggggaacuucagcgacggcaagaugggccgcuucuucaaccacacgcucguccugcugccggacgggugcggcacccuccugcgggcguucuacugcauccuggagccccgcuccgggaaccacugccccgccggcaacagcuacaccuccuucgccaccuaccacacgcccgccaccgacugcagcgacggcaacuacaaccggaacgccucccucaacagcuucaaggaguacuucaaccugcgcaacugcaccuucauguacaccuacaacaucacggaggacgagauccuggagugguucgggaucacccagaccgcgcagggcgugcaccucuucagcucccgguacguggaccuguacgggggcaacauguuccaguucgccacccugccggucuacgacacgaucaaguacuacagcaucaucccccacuccauccgcagcauccaguccgaccggaaggccugggccgccuucuacguguacaagcuccagccccugaccuuccugcucgacuucagcguggacggguacauccgccgggcgaucgacugcggcuucaacgaccugucccagcugcacugcagcuacgaguccuucgacgucgagagcggcguguacuccgugagcuccuucgaggccaagcccagcggguccgucguggagcaggccgagggcguggagugcgacuucagcccgcuccuguccgggaccccgccccaggucuacaacuucaagcgccugguguucaccaacugcaacuacaaccucacgaagcugcugagccucuucuccgucaacgacuucacgugcagccagaucagccccgccgccaucgcguccaacugcuacagcucccugauccuggacuacuucagcuacccccucuccaugaaguccgaccugagcgugagcuccgccgggcccaucagccaguucaacuacaagcaguccuucagcaacccgaccugccugauccucgccaccgugccccacaaccugaccaccaucaccaagccccugaaguacuccuacaucaacaagugcagccggcuccuguccgacgaccgcaccgaggucccccagcuggugaacgccaaccaguacagccccugcguguccaucguccccagcacggugugggaggacggggacuacuaccggaagcagcucagcccgcuggagggcggcggguggcugguggccuccggcagcaccgucgcgaugaccgagcagcuccagaugggguucggcaucaccgugcaguacgggaccgacacgaacuccgugugccccaagcuggaguucgccaacgacaccaagaucgccagccagcugggcaacugcgucgaguacucccuguacggcgugagcgggcgcggcguguuccagaacugcaccgccgucggggugcggcagcagcgcuucguguacgacgcguaccagaaccucgucggcuacuacuccgacgacggcaacuacuacugccugcgggccugcgugagcgugcccgucuccgugaucuacgacaaggagaccaagacgcacgccacccuguucgggagcguggccugcgagcacaucuccagcaccaugucccaguacagccgcuccacccgcagcaugcucaagcggcgcgacuccacguacggcccgcugcagacccccgucgggugcgugcugggccucgugaacagcucccuguucgucgaggacugcaagcugccccucgggcagagccugugcgcccugcccgacaccccgagcacccucacgccccgguccgugcgcagcgugcccggcgagaugcggcuggcguccaucgccuucaaccaccccauccaggucgaccagcugaacagcuccuacuucaagcucagcaucccgaccaacuucuccuucggcgugacccaggaguacauccagaccacgauccagaaggugaccgucgacugcaagcaguacgugugcaacggguuccagaagugcgagcagcugcugcgcgaguacggccaguucugcagcaagaucaaccaggcccuccacggggccaaccugcggcaggacgacuccgugcgcaaccuguucgccagcgucaaguccagccaguccagccccaucauccccggcuucgggggcgacuucaaccucacccugcuggagcccguguccaucagcaccggcucccggagcgcgcgcuccgccaucgaggaccuccuguucgacaaggugacgaucgccgacccgggguacaugcagggcuacgacgacugcaugcagcaggggcccgccagcgcccgggaccugaucugcgcgcaguacgucgccggcuacaaggugcucccgccccugauggacgugaacauggaggccgccuacaccagcucccugcucgggagcaucgcgggcgucggcuggaccgccgggcuguccagcuucgccgccauccccuucgcccaguccaucuucuaccgccugaacggcguggggaucacccagcagguccucagcgagaaccagaagcugaucgcgaacaaguucaaccaggcccugggcgccaugcagacgggguucaccaccaccaacgaggccuuccggaaggugcaggacgccgugaacaacaacgcgcaggcccucuccaagcuggccagcgagcuguccaacacguucggcgccaucagcgccuccaucggcgacaucauccagcgccucgacccgcccgagcaggacgcgcagaucgaccggcugaucaacgggcgccugaccacccucaacgccuucguggcccagcagcugguccggagcgaguccgccgcgcugagcgcccagcucgccaaggacaaggugaacgagugcgugaaggcccaguccaagcgcagcggcuucugcgggcagggcacccacaucgucuccuucguggucaacgcccccaacggccuguacuucaugcacgugggguacuaccccagcaaccacaucgagguggucuccgcguacggccugugcgacgccgccaaccccacgaacugcaucgcccccgugaacggguacuucaucaagaccaacaacacccggaucguggacgaguggagcuacaccggcagcuccuucuacgcccccgagccgaucacgagccucaacaccaaguacgucgcgccccaggugaccuaccagaacaucuccaccaaccugcccccgccccugcucgggaacagcaccggcaucgacuuccaggacgagcuggacgaguucuucaagaacguguccacgagcauccccaacuucggcucccugacccagaucaacaccacccuccuggaccugacguacgagaugcucagccugcagcaggucgugaaggcccugaacgaguccuacaucgaccucaaggagcuggggaacuacaccuacuacaacaaguggcccugguacaucuggcugggcuucaucgccgggcucguggcccuggcccugugcgucuucuucauccucugcugcaccggcugcgggaccaacugcaugggcaagcugaagugcaaccgcugcugcgaccgcuacgaggaguacgaccuggagccgcacaaggugcacgugcacuga

SEQ ID NO: 14816 - RNA, 4062 nt, Artificial Sequence
  MERS-CoV/Riyadh_14_2013__AHI48572.1 spike protein CDS gc (1-1353)(R1020Q)
augauccacagcguguuccugcucauguuccugcugacccccaccgaguccuacgucgacgugggcccggacagcgugaaguccgccugcaucgaggucgacauccagcagacguucuucgacaagaccuggccccgccccaucgacgugagcaaggccgacgggaucaucuacccccagggccggaccuacuccaacaucaccaucacguaccagggccucuucccguaccagggcgaccacggggacauguacguguacagcgcgggccacgccaccggcaccacgccccagaagcuguucgucgccaacuacucccaggacgugaagcaguucgccaacggguucgugguccgcaucggcgccgcggccaacagcaccgggaccgugaucaucucccccagcaccuccgccaccauccggaagaucuaccccgccuucaugcugggcagcuccguggggaacuucagcgacggcaagaugggccgcuucuucaaccacacgcucguccugcugccggacgggugcggcacccuccugcgggcguucuacugcauccuggagccccgcuccgggaaccacugccccgccggcaacagcuacaccuccuucgccaccuaccacacgcccgccaccgacugcagcgacggcaacuacaaccggaacgccucccucaacagcuucaaggaguacuucaaccugcgcaacugcaccuucauguacaccuacaacaucacggaggacgagauccuggagugguucgggaucacccagaccgcgcagggcgugcaccucuucagcucccgguacguggaccuguacgggggcaacauguuccaguucgccacccugccggucuacgacacgaucaaguacuacagcaucaucccccacuccauccgcagcauccaguccgaccggaaggccugggccgccuucuacguguacaagcuccagccccugaccuuccugcucgacuucagcguggacggguacauccgccgggcgaucgacugcggcuucaacgaccugucccagcugcacugcagcuacgaguccuucgacgucgagagcggcguguacuccgugagcuccuucgaggccaagcccagcggguccgucguggagcaggccgagggcguggagugcgacuucagcccgcuccuguccgggaccccgccccaggucuacaacuucaagcgccugguguucaccaacugcaacuacaaccucacgaagcugcugagccucuucuccgucaacgacuucacgugcagccagaucagccccgccgccaucgcguccaacugcuacagcucccugauccuggacuacuucagcuacccccucuccaugaaguccgaccugagcgugagcuccgccgggcccaucagccaguucaacuacaagcaguccuucagcaacccgaccugccugauccucgccaccgugccccacaaccugaccaccaucaccaagccccugaaguacuccuacaucaacaagugcagccggcuccuguccgacgaccgcaccgaggucccccagcuggugaacgccaaccaguacagccccugcguguccaucguccccagcacggugugggaggacggggacuacuaccggaagcagcucagcccgcuggagggcggcggguggcugguggccuccggcagcaccgucgcgaugaccgagcagcuccagaugggguucggcaucaccgugcaguacgggaccgacacgaacuccgugugccccaagcuggaguucgccaacgacaccaagaucgccagccagcugggcaacugcgucgaguacucccuguacggcgugagcgggcgcggcguguuccagaacugcaccgccgucggggugcggcagcagcgcuucguguacgacgcguaccagaaccucgucggcuacuacuccgacgacggcaacuacuacugccugcgggccugcgugagcgugcccgucuccgugaucuacgacaaggagaccaagacgcacgccacccuguucgggagcguggccugcgagcacaucuccagcaccaugucccaguacagccgcuccacccgcagcaugcucaagcggcgcgacuccacguacggcccgcugcagacccccgucgggugcgugcugggccucgugaacagcucccuguucgucgaggacugcaagcugccccucgggcagagccugugcgcccugcccgacaccccgagcacccucacgccccgguccgugcgcagcgugcccggcgagaugcggcuggcguccaucgccuucaaccaccccauccaggucgaccagcugaacagcuccuacuucaagcucagcaucccgaccaacuucuccuucggcgugacccaggaguacauccagaccacgauccagaaggugaccgucgacugcaagcaguacgugugcaacggguuccagaagugcgagcagcugcugcgcgaguacggccaguucugcagcaagaucaaccaggcccuccacggggccaaccugcggcaggacgacuccgugcgcaaccuguucgccagcgucaaguccagccaguccagccccaucauccccggcuucgggggcgacuucaaccucacccugcuggagcccguguccaucagcaccggcucccggagcgcgcgcuccgccaucgaggaccuccuguucgacaaggugacgaucgccgacccgggguacaugcagggcuacgacgacugcaugcagcaggggcccgccagcgcccgggaccugaucugcgcgcaguacgucgccggcuacaaggugcucccgccccugauggacgugaacauggaggccgccuacaccagcucccugcucgggagcaucgcgggcgucggcuggaccgccgggcuguccagcuucgccgccauccccuucgcccaguccaucuucuaccgccugaacggcguggggaucacccagcagguccucagcgagaaccagaagcugaucgcgaacaaguucaaccaggcccugggcgccaugcagacgggguucaccaccaccaacgaggccuuccagaaggugcaggacgccgugaacaacaacgcgcaggcccucuccaagcuggccagcgagcuguccaacacguucggcgccaucagcgccuccaucggcgacaucauccagcggcucgacgugcuggagcaggacgcgcagaucgaccgccugaucaacgggcggcucaccacccugaacgccuucgucgcccagcagcuggugcgcagcgaguccgccgcgcucagcgcccagcuggccaaggacaaggugaacgagugcgucaaggcccaguccaagcggagcggcuucugcgggcagggcacccacaucguguccuucgucgugaacgcccccaacggccuguacuucaugcacgugggguacuaccccagcaaccacaucgaggucguguccgcguacggccucugcgacgccgccaaccccacgaacugcaucgccccggugaacggguacuucaucaagaccaacaacacccgcaucgucgacgaguggagcuacaccggcagcuccuucuacgcccccgagcccaucacgagccugaacaccaaguacguggcgccccaggugaccuaccagaacaucuccaccaaccugccgccgccccuccuggggaacagcaccggcaucgacuuccaggacgagcuggacgaguucuucaagaacgucuccacgagcauccccaacuucggcucccucacccagaucaacaccacccugcuggaccucacguacgagaugcugagccugcagcaggucgugaaggcccucaacgaguccuacaucgaccugaaggagcuggggaacuacaccuacuacaacaaguggcccugguacaucuggcucggcuucaucgccgggcugguggcccuggcccucugcguguucuucauccugugcugcaccggcugcgggaccaacugcaugggcaagcugaagugcaaccggugcugcgaccgcuacgaggaguacgaccucgagccccacaaggugcacguccacuga

SEQ ID NO: 14817 - RNA, 1767 nt, Artificial Sequence
  MERS-CoV/Riyadh_14_2013__AHI48572.1 spike protein CDS gc (1-17_726-1296)(R1020Q)
augauccacagcguguuccugcucauguuccugcugacccccaccgaguccgacugcaagcucccccugggccagagccugugcgcccuccccgacacgcccuccacccugacgccccgcagcguccgguccgugccgggggagaugcgccuggccagcaucgcguucaaccaccccauccagguggaccagcucaacuccagcuacuucaagcuguccauccccaccaacuucagcuucggcgucacccaggaguacauccagaccaccauccagaaggugaccguggacugcaagcaguacgucugcaacggguuccagaagugcgagcagcugcuccgggaguacggccaguucugcuccaagaucaaccaggcccugcacggggccaaccugcgccaggacgacagcgugcggaaccucuucgccuccgucaagagcucccagagcucccccaucaucccgggcuucggcggggacuucaaccugacgcugcucgagcccgugagcaucuccaccggcagccgcagcgcccgguccgcgaucgaggaccugcuguucgacaaggugaccaucgccgaccccggguacaugcagggcuacgacgacugcaugcagcaggggcccgccagcgcccgcgaccucaucugcgcgcaguacguggccggcuacaagguccugccgccccugauggacgugaacauggaggccgccuacaccuccagccuccugggcuccaucgccggggugggcuggacggcggggcugagcuccuucgccgccauccccuucgcccagagcaucuucuaccggcucaacggcgucggcaucacccagcagguccuguccgagaaccagaagcugaucgccaacaaguucaaccaggcgcucggggccaugcagaccggcuucaccacgaccaacgaggccuuccagaaggugcaggacgccgugaacaacaacgcccaggcgcugagcaagcuggccuccgagcucagcaacaccuucggggccaucuccgccagcaucggcgacaucauccagcgccuggacgugcuggagcaggacgcccagaucgaccggcucaucaacgggcgccugaccacgcugaacgcguucguggcccagcagcucguccgguccgagagcgccgcccuguccgcgcagcuggccaaggacaaggugaacgagugcgugaaggcccagagcaagcgcuccggcuucugcggccaggggacccacaucgucagcuucguggucaacgcccccaacggccucuacuucaugcacgugggguacuacccgagcaaccacaucgagguggucuccgccuacggccugugcgacgcggccaaccccaccaacugcaucgcccccgugaacggguacuucaucaagaccaacaacacgcggaucguggacgaguggagcuacaccggcuccagcuucuacgcccccgagccgaucaccucccugaacaccaaguacgucgcgccccaggugacguaccagaacaucagcaccaaccucccgccgccccugcugggcaacuccaccgggaucgacuuccaggacgagcuggacgaguucuucaagaacgugagcaccuccauccccaacuucggcagccucacgcagaucaacaccacccugcuggaccucaccuacgagaugcugucccugcagcaggucgugaaggcccucaacgagagcuacaucgaccugaaggagcuggggaacuacacguacuacaacaaguggcccuga

SEQ ID NO: 14818 - RNA, 1848 nt, Artificial Sequence
  MERS-CoV/Riyadh_14_2013__AHI48572.1 spike protein CDS gc (1-17_726-1296)(R1020Q)_LeucineZipper
augauccacagcguguuccugcucauguuccugcugacccccaccgaguccgacugcaagcucccccugggccagagccugugcgcccuccccgacacgcccuccacccugacgccccgcagcguccgguccgugccgggggagaugcgccuggccagcaucgcguucaaccaccccauccagguggaccagcucaacuccagcuacuucaagcuguccauccccaccaacuucagcuucggcgucacccaggaguacauccagaccaccauccagaaggugaccguggacugcaagcaguacgucugcaacggguuccagaagugcgagcagcugcuccgggaguacggccaguucugcuccaagaucaaccaggcccugcacggggccaaccugcgccaggacgacagcgugcggaaccucuucgccuccgucaagagcucccagagcucccccaucaucccgggcuucggcggggacuucaaccugacgcugcucgagcccgugagcaucuccaccggcagccgcagcgcccgguccgcgaucgaggaccugcuguucgacaaggugaccaucgccgaccccggguacaugcagggcuacgacgacugcaugcagcaggggcccgccagcgcccgcgaccucaucugcgcgcaguacguggccggcuacaagguccugccgccccugauggacgugaacauggaggccgccuacaccuccagccuccugggcuccaucgccggggugggcuggacggcggggcugagcuccuucgccgccauccccuucgcccagagcaucuucuaccggcucaacggcgucggcaucacccagcagguccuguccgagaaccagaagcugaucgccaacaaguucaaccaggcgcucggggccaugcagaccggcuucaccacgaccaacgaggccuuccagaaggugcaggacgccgugaacaacaacgcccaggcgcugagcaagcuggccuccgagcucagcaacaccuucggggccaucuccgccagcaucggcgacaucauccagcgccuggacgugcuggagcaggacgcccagaucgaccggcucaucaacgggcgccugaccacgcugaacgcguucguggcccagcagcucguccgguccgagagcgccgcccuguccgcgcagcuggccaaggacaaggugaacgagugcgugaaggcccagagcaagcgcuccggcuucugcggccaggggacccacaucgucagcuucguggucaacgcccccaacggccucuacuucaugcacgugggguacuacccgagcaaccacaucgagguggucuccgccuacggccugugcgacgcggccaaccccaccaacugcaucgcccccgugaacggguacuucaucaagaccaacaacacgcggaucguggacgaguggagcuacaccggcuccagcuucuacgcccccgagccgaucaccucccugaacaccaaguacgucgcgccccaggugacguaccagaacaucagcaccaaccucccgccgccccugcugggcaacuccaccgggaucgacuuccaggacgagcuggacgaguucuucaagaacgugagcaccuccauccccaacuucggcagccucacgcagaucaacaccacccugcuggaccucaccuacgagaugcugucccugcagcaggucgugaaggcccucaacgagagcuacaucgaccugaaggagcuggggaacuacacguacuacaacaaguggcccgacaagaucgaggagauccucuccaagaucuaccacaucgagaacgagaucgcccgcaucaagaagcugaucggcgaggccuga

SEQ ID NO: 14819 - RNA, 4062 nt, Artificial Sequence
  MERS-CoV/England 1__YP_007188579.1 spike protein CDS gc (1-1353)
augauccacagcguguuccugcucauguuccugcugacccccaccgaguccuacgucgacgugggcccggacagcgugaaguccgccugcaucgaggucgacauccagcagacguucuucgacaagaccuggccccgccccaucgacgugagcaaggccgacgggaucaucuacccccagggccggaccuacuccaacaucaccaucacguaccagggccucuucccguaccagggcgaccacggggacauguacguguacagcgcgggccacgccaccggcaccacgccccagaagcuguucgucgccaacuacucccaggacgugaagcaguucgccaacggguucgugguccgcaucggcgccgcggccaacagcaccgggaccgugaucaucucccccagcaccuccgccaccauccggaagaucuaccccgccuucaugcugggcagcuccguggggaacuucagcgacggcaagaugggccgcuucuucaaccacacgcucguccugcugccggacgggugcggcacccuccugcgggcguucuacugcauccuggagccccgcuccgggaaccacugccccgccggcaacagcuacaccuccuucgccaccuaccacacgcccgccaccgacugcagcgacggcaacuacaaccggaacgccucccucaacagcuucaaggaguacuucaaccugcgcaacugcaccuucauguacaccuacaacaucacggaggacgagauccuggagugguucgggaucacccagaccgcgcagggcgugcaccucuucagcucccgguacguggaccuguacgggggcaacauguuccaguucgccacccugccggucuacgacacgaucaaguacuacagcaucaucccccacuccauccgcagcauccaguccgaccggaaggccugggccgccuucuacguguacaagcuccagccccugaccuuccugcucgacuucagcguggacggguacauccgccgggcgaucgacugcggcuucaacgaccugucccagcugcacugcagcuacgaguccuucgacgucgagagcggcguguacuccgugagcuccuucgaggccaagcccagcggguccgucguggagcaggccgagggcguggagugcgacuucagcccgcuccuguccgggaccccgccccaggucuacaacuucaagcgccugguguucaccaacugcaacuacaaccucacgaagcugcugagccucuucuccgucaacgacuucacgugcagccagaucagccccgccgccaucgcguccaacugcuacagcucccugauccuggacuacuucagcuacccccucuccaugaaguccgaccugagcgugagcuccgccgggcccaucagccaguucaacuacaagcaguccuucagcaacccgaccugccugauccucgccaccgugccccacaaccugaccaccaucaccaagccccugaaguacuccuacaucaacaagugcagccgguuccucuccgacgaccgcaccgaggucccccagcuggugaacgccaaccaguacagccccugcguguccaucguccccagcacggugugggaggacggggacuacuaccggaagcagcugagcccgcucgagggcggcggguggcugguggccuccggcagcaccgucgcgaugaccgagcagcugcagaugggguucggcaucaccgugcaguacgggaccgacacgaacuccgugugccccaagcucgaguucgccaacgacaccaagaucgccagccagcugggcaacugcgucgaguacucccuguacggcgugagcgggcgcggcguguuccagaacugcaccgccgucggggugcggcagcagcgcuucguguacgacgcguaccagaaccuggucggcuacuacuccgacgacggcaacuacuacugccuccgggccugcgugagcgugcccgucuccgugaucuacgacaaggagaccaagacgcacgccacccuguucgggagcguggccugcgagcacaucuccagcaccaugucccaguacagccgcuccacccgcagcaugcugaagcggcgcgacuccacguacggcccgcuccagacccccgucgggugcgugcugggccuggugaacagcucccucuucgucgaggacugcaagcugccccuggggcagagccucugcgcccugcccgacaccccgagcacccugacgccccgguccgugcgcagcgugcccggcgagaugcggcucgcguccaucgccuucaaccaccccauccaggucgaccagcugaacagcuccuacuucaagcugagcaucccgaccaacuucuccuucggcgugacccaggaguacauccagaccacgauccagaaggugaccgucgacugcaagcaguacgugugcaacggguuccagaagugcgagcagcuccugcgcgaguacggccaguucugcagcaagaucaaccaggcccugcacggggccaaccuccggcaggacgacuccgugcgcaaccuguucgccagcgucaaguccagccaguccagccccaucauccccggcuucgggggcgacuucaaccugacccuccuggagcccguguccaucagcaccggcucccggagcgcgcgcuccgccaucgaggaccuccuguucgacaaggugacgaucgccgacccgggguacaugcagggcuacgacgacugcaugcagcaggggcccgccagcgcccgggaccugaucugcgcgcaguacgucgccggcuacaaggugcugccgccccucauggacgugaacauggaggccgccuacaccagcucccugcuggggagcaucgcgggcgucggcuggaccgccgggcucuccagcuucgccgccauccccuucgcccaguccaucuucuaccgccugaacggcguggggaucacccagcagguccugagcgagaaccagaagcucaucgcgaacaaguucaaccaggcccugggcgccaugcagacgggguucaccaccaccaacgaggccuuccacaaggugcaggacgccgugaacaacaacgcgcaggcccuguccaagcucgccagcgagcuguccaacacguucggcgccaucagcgccuccaucggcgacaucauccagcggcuggacgugcucgagcaggacgcgcagaucgaccgccugaucaacgggcggcugaccacccucaacgccuucgucgcccagcagcuggugcgcagcgaguccgccgcgcugagcgcccagcucgccaaggacaaggugaacgagugcgucaaggcccaguccaagcggagcggcuucugcgggcagggcacccacaucguguccuucgucgugaacgcccccaacggccuguacuucaugcacgugggguacuaccccagcaaccacaucgaggucguguccgcguacggccugugcgacgccgccaaccccacgaacugcaucgccccggugaacggguacuucaucaagaccaacaacacccgcaucgucgacgaguggagcuacaccggcagcuccuucuacgcccccgagcccaucacgagccucaacaccaaguacguggcgccccaggugaccuaccagaacaucuccaccaaccugccgccgccccugcucgggaacagcaccggcaucgacuuccaggacgagcuggacgaguucuucaagaacgucuccacgagcauccccaacuucggcucccugacccagaucaacaccacccuccuggaccugacguacgagaugcucagccugcagcaggucgugaaggcccugaacgaguccuacaucgaccucaaggagcuggggaacuacaccuacuacaacaaguggcccugguacaucuggcugggcuucaucgccgggcucguggcccuggcccugugcguguucuucauccucugcugcaccggcugcgggaccaacugcaugggcaagcugaagugcaaccggugcugcgaccgcuacgaggaguacgaccuggagccccacaaggugcacguccacuga

SEQ ID NO: 14820 - RNA, 4062 nt, Artificial Sequence
  MERS-CoV/England 1__YP_007188579.1 spike protein CDS gc (1-1353)(V1060P_L1061P)
augauccacagcguguuccugcucauguuccugcugacccccaccgaguccuacgucgacgugggcccggacagcgugaaguccgccugcaucgaggucgacauccagcagacguucuucgacaagaccuggccccgccccaucgacgugagcaaggccgacgggaucaucuacccccagggccggaccuacuccaacaucaccaucacguaccagggccucuucccguaccagggcgaccacggggacauguacguguacagcgcgggccacgccaccggcaccacgccccagaagcuguucgucgccaacuacucccaggacgugaagcaguucgccaacggguucgugguccgcaucggcgccgcggccaacagcaccgggaccgugaucaucucccccagcaccuccgccaccauccggaagaucuaccccgccuucaugcugggcagcuccguggggaacuucagcgacggcaagaugggccgcuucuucaaccacacgcucguccugcugccggacgggugcggcacccuccugcgggcguucuacugcauccuggagccccgcuccgggaaccacugccccgccggcaacagcuacaccuccuucgccaccuaccacacgcccgccaccgacugcagcgacggcaacuacaaccggaacgccucccucaacagcuucaaggaguacuucaaccugcgcaacugcaccuucauguacaccuacaacaucacggaggacgagauccuggagugguucgggaucacccagaccgcgcagggcgugcaccucuucagcucccgguacguggaccuguacgggggcaacauguuccaguucgccacccugccggucuacgacacgaucaaguacuacagcaucaucccccacuccauccgcagcauccaguccgaccggaaggccugggccgccuucuacguguacaagcuccagccccugaccuuccugcucgacuucagcguggacggguacauccgccgggcgaucgacugcggcuucaacgaccugucccagcugcacugcagcuacgaguccuucgacgucgagagcggcguguacuccgugagcuccuucgaggccaagcccagcggguccgucguggagcaggccgagggcguggagugcgacuucagcccgcuccuguccgggaccccgccccaggucuacaacuucaagcgccugguguucaccaacugcaacuacaaccucacgaagcugcugagccucuucuccgucaacgacuucacgugcagccagaucagccccgccgccaucgcguccaacugcuacagcucccugauccuggacuacuucagcuacccccucuccaugaaguccgaccugagcgugagcuccgccgggcccaucagccaguucaacuacaagcaguccuucagcaacccgaccugccugauccucgccaccgugccccacaaccugaccaccaucaccaagccccugaaguacuccuacaucaacaagugcagccgguuccucuccgacgaccgcaccgaggucccccagcuggugaacgccaaccaguacagccccugcguguccaucguccccagcacggugugggaggacggggacuacuaccggaagcagcugagcccgcucgagggcggcggguggcugguggccuccggcagcaccgucgcgaugaccgagcagcugcagaugggguucggcaucaccgugcaguacgggaccgacacgaacuccgugugccccaagcucgaguucgccaacgacaccaagaucgccagccagcugggcaacugcgucgaguacucccuguacggcgugagcgggcgcggcguguuccagaacugcaccgccgucggggugcggcagcagcgcuucguguacgacgcguaccagaaccuggucggcuacuacuccgacgacggcaacuacuacugccuccgggccugcgugagcgugcccgucuccgugaucuacgacaaggagaccaagacgcacgccacccuguucgggagcguggccugcgagcacaucuccagcaccaugucccaguacagccgcuccacccgcagcaugcugaagcggcgcgacuccacguacggcccgcuccagacccccgucgggugcgugcugggccuggugaacagcucccucuucgucgaggacugcaagcugccccuggggcagagccucugcgcccugcccgacaccccgagcacccugacgccccgguccgugcgcagcgugcccggcgagaugcggcucgcguccaucgccuucaaccaccccauccaggucgaccagcugaacagcuccuacuucaagcugagcaucccgaccaacuucuccuucggcgugacccaggaguacauccagaccacgauccagaaggugaccgucgacugcaagcaguacgugugcaacggguuccagaagugcgagcagcuccugcgcgaguacggccaguucugcagcaagaucaaccaggcccugcacggggccaaccuccggcaggacgacuccgugcgcaaccuguucgccagcgucaaguccagccaguccagccccaucauccccggcuucgggggcgacuucaaccugacccuccuggagcccguguccaucagcaccggcucccggagcgcgcgcuccgccaucgaggaccuccuguucgacaaggugacgaucgccgacccgggguacaugcagggcuacgacgacugcaugcagcaggggcccgccagcgcccgggaccugaucugcgcgcaguacgucgccggcuacaaggugcugccgccccucauggacgugaacauggaggccgccuacaccagcucccugcuggggagcaucgcgggcgucggcuggaccgccgggcucuccagcuucgccgccauccccuucgcccaguccaucuucuaccgccugaacggcguggggaucacccagcagguccugagcgagaaccagaagcucaucgcgaacaaguucaaccaggcccugggcgccaugcagacgggguucaccaccaccaacgaggccuuccacaaggugcaggacgccgugaacaacaacgcgcaggcccuguccaagcucgccagcgagcuguccaacacguucggcgccaucagcgccuccaucggcgacaucauccagcggcuggacccgcccgagcaggacgcgcagaucgaccgccucaucaacgggcggcugaccacccugaacgccuucguggcccagcagcucguccgcagcgaguccgccgcgcugagcgcccagcuggccaaggacaaggugaacgagugcgugaaggcccaguccaagcggagcggcuucugcgggcagggcacccacaucgucuccuucguggucaacgcccccaacggccucuacuucaugcacgugggguacuaccccagcaaccacaucgagguggucuccgcguacggccugugcgacgccgccaaccccacgaacugcaucgcccccgugaacggguacuucaucaagaccaacaacacccgcaucguggacgaguggagcuacaccggcagcuccuucuacgcccccgagccgaucacgagccugaacaccaaguacgucgcgccccaggugaccuaccagaacaucuccaccaaccugcccccgccccuccuggggaacagcaccggcaucgacuuccaggacgagcucgacgaguucuucaagaacguguccacgagcauccccaacuucggcucccugacccagaucaacaccacccugcucgaccugacguacgagaugcugagccuccagcaggucgugaaggcccugaacgaguccuacaucgaccugaaggagcucgggaacuacaccuacuacaacaaguggcccugguacaucuggcugggcuucaucgccgggcugguggcccucgcccugugcgucuucuucauccugugcugcaccggcugcgggaccaacugcaugggcaagcucaagugcaaccggugcugcgaccgcuacgaggaguacgaccuggagccgcacaaggugcacgugcacuga

SEQ ID NO: 14821 - RNA, 3876 nt, Artificial Sequence
  MERS-CoV/England 1__YP_007188579.1 spike protein CDS gc (variant)
augauccacagcguguuccugcucauguuccugcugacccccaccgaguccuacgucgacgugggcccggacagcgugaaguccgccugcaucgaggucgacauccagcagacguucuucgacaagaccuggccccgccccaucgacgugagcaaggccgacgggaucaucuacccccagggccggaccuacuccaacaucaccaucacguaccagggccucuucccguaccagggcgaccacggggacauguacguguacagcgcgggccacgccaccggcaccacgccccagaagcuguucgucgccaacuacucccaggacgugaagcaguucgccaacggguucgugguccgcaucggcgccgcggccaacagcaccgggaccgugaucaucucccccagcaccuccgccaccauccggaagaucuaccccgccuucaugcugggcagcuccguggggaacuucagcgacggcaagaugggccgcuucuucaaccacacgcucguccugcugccggacgggugcggcacccuccugcgggcguucuacugcauccuggagccccgcuccgggaaccacugccccgccggcaacagcuacaccuccuucgccaccuaccacacgcccgccaccgacugcagcgacggcaacuacaaccggaacgccucccucaacagcuucaaggaguacuucaaccugcgcaacugcaccuucauguacaccuacaacaucacggaggacgagauccuggagugguucgggaucacccagaccgcgcagggcgugcaccucuucagcucccgguacguggaccuguacgggggcaacauguuccaguucgccacccugccggucuacgacacgaucaaguacuacagcaucaucccccacuccauccgcagcauccaguccgaccggaaggccugggccgccuucuacguguacaagcuccagccccugaccuuccugcucgacuucagcguggacggguacauccgccgggcgaucgacugcggcuucaacgaccugucccagcugcacugcagcuacgaguccuucgacgucgagagcggcguguacuccgugagcuccuucgaggccaagcccagcggguccgucguggagcaggccgagggcguggagugcgacuucagcccgcuccuguccgggaccccgccccaggucuacaacuucaagcgccugguguucaccaacugcaacuacaaccucacgaagcugcugagccucuucuccgucaacgacuucacgugcagccagaucagccccgccgccaucgcguccaacugcuacagcucccugauccuggacuacuucagcuacccccucuccaugaaguccgaccugagcgugagcuccgccgggcccaucagccaguucaacuacaagcaguccuucagcaacccgaccugccugauccucgccaccgugccccacaaccugaccaccaucaccaagccccugaaguacuccuacaucaacaagugcagccgguuccucuccgacgaccgcaccgaggucccccagcuggugaacgccaaccaguacagccccugcguguccaucguccccagcacggugugggaggacggggacuacuaccggaagcagcugagcccgcucgagggcggcggguggcugguggccuccggcagcaccgucgcgaugaccgagcagcugcagaugggguucggcaucaccgugcaguacgggaccgacacgaacuccgugugccccaagcucgaguucgccaacgacaccaagaucgccagccagcugggcaacugcgucgaguacucccuguacggcgugagcgggcgcggcguguuccagaacugcaccgccgucggggugcggcagcagcgcuucguguacgacgcguaccagaaccuggucggcuacuacuccgacgacggcaacuacuacugccuccgggccugcgugagcgugcccgucuccgugaucuacgacaaggagaccaagacgcacgccacccuguucgggagcguggccugcgagcacaucuccagcaccaugucccaguacagccgcuccacccgcagcaugcugaagcggcgcgacuccacguacggcccgcuccagacccccgucgggugcgugcugggccuggugaacagcucccucuucgucgaggacugcaagcugccccuggggcagagccucugcgcccugcccgacaccccgagcacccugacgccccgguccgugcgcagcgugcccggcgagaugcggcucgcguccaucgccuucaaccaccccauccaggucgaccagcugaacagcuccuacuucaagcugagcaucccgaccaacuucuccuucggcgugacccaggaguacauccagaccacgauccagaaggugaccgucgacugcaagcaguacgugugcaacggguuccagaagugcgagcagcuccugcgcgaguacggccaguucugcagcaagaucaaccaggcccugcacggggccaaccuccggcaggacgacuccgugcgcaaccuguucgccagcgucaaguccagccaguccagccccaucauccccggcuucgggggcgacuucaaccugacccuccuggagcccguguccaucagcaccggcucccggagcgcgcgcuccgccaucgaggaccuccuguucgacaaggugacgaucgccgacccgggguacaugcagggcuacgacgacugcaugcagcaggggcccgccagcgcccgggaccugaucugcgcgcaguacgucgccggcuacaaggugcugccgccccucauggacgugaacauggaggccgccuacaccagcucccugcuggggagcaucgcgggcgucggcuggaccgccgggcucuccagcuucgccgccauccccuucgcccaguccaucuucuaccgccugaacggcguggggaucacccagcagguccugagcgagaaccagaagcucaucgcgaacaaguucaaccaggcccugggcgccaugcagacgggguucaccaccaccaacgaggccuuccacaaggugcaggacgccgugaacaacaacgcgcaggcccuguccaagcucgccagcgagcuguccaacacguucggcgccaucagcgccuccaucggcgacaucauccagcggcuggacccgcccgagcaggacgcgcagaucgaccgccucaucaacgggcggcugaccacccugaacgccuucguggcccagcagcucguccgcagcgaguccgccgcgcugagcgcccagcuggccaaggacaaggugaacgagugcgugaaggcccaguccaagcggagcggcuucugcgggcagggcacccacaucgucuccuucguggucaacgcccccaacggccucuacuucaugcacgugggguacuaccccagcaaccacaucgagguggucuccgcguacggccugugcgacgccgccaaccccacgaacugcaucgcccccgugaacggguacuucaucaagaccaacaacacccgcaucguggacgaguggagcuacaccggcagcuccuucuacgcccccgagccgaucacgagccugaacaccaaguacgucgcgccccaggugaccuaccagaacaucuccaccaaccugcccccgccccuccuggggaacagcaccggcaucgacuuccaggacgagcucgacgaguucuucaagaacguguccacgagcauccccaacuucggcucccugacccagaucaacaccacccugcucgaccugacguacgagaugcugagccuccagcaggucgugaaggcccugaacgaguccuacaucgaccugaaggagcucgggaacuacaccuacuga

SEQ ID NO: 14822 - RNA, 3876 nt, Artificial Sequence
  MERS-CoV/England 1__YP_007188579.1 spike protein CDS gc (variant)
augauccacagcguguuccugcucauguuccugcugacccccaccgaguccuacgucgacgugggcccggacagcgugaaguccgccugcaucgaggucgacauccagcagacguucuucgacaagaccuggccccgccccaucgacgugagcaaggccgacgggaucaucuacccccagggccggaccuacuccaacaucaccaucacguaccagggccucuucccguaccagggcgaccacggggacauguacguguacagcgccggccacgccaccggcaccacgccccagaagcuguucgucgccaacuacucccaggacgugaagcaguucgccaacggguucgugguccgcaucggcgccgcggccaacagcaccgggaccgugaucaucucccccagcaccuccgccaccauccggaagaucuaccccgccuucaugcugggcagcuccguggggaacuucagcgacggcaagaugggccgcuucuucaaccacacgcucguccugcugccggacgggugcggcacccuccugcgggcguucuacugcauccuggagccccgcuccgggaaccacugccccgccggcaacagcuacaccuccuucgccaccuaccacacgcccgccaccgacugcagcgacggcaacuacaaccggaacgccucccucaacagcuucaaggaguacuucaaccugcgcaacugcaccuucauguacaccuacaacaucacggaggacgagauccuggagugguucgggaucacccagaccgcgcagggcgugcaccucuucagcucccgguacguggaccuguacgggggcaacauguuccaguucgccacccugccggucuacgacacgaucaaguacuacagcaucaucccccacuccauccgcagcauccaguccgaccggaaggccugggccgccuucuacguguacaagcuccagccccugaccuuccugcucgacuucagcguggacggguacauccgccgggcgaucgacugcggcuucaacgaccugucccagcugcacugcagcuacgaguccuucgacgucgagagcggcguguacuccgugagcuccuucgaggccaagcccagcggguccgucguggagcaggccgagggcguggagugcgacuucagcccgcuccuguccgggaccccgccccaggucuacaacuucaagcgccugguguucaccaacugcaacuacaaccucacgaagcugcugagccucuucuccgucaacgacuucacgugcagccagaucagccccgccgccaucgcguccaacugcuacagcucccugauccuggacuacuucagcuacccccucuccaugaaguccgaccugagcgugagcuccgccgggcccaucagccaguucaacuacaagcaguccuucagcaacccgaccugccugauccucgccaccgugccccacaaccugaccaccaucaccaagccccugaaguacuccuacaucaacaagugcagccgguuccucuccgacgaccgcaccgaggucccccagcuggugaacgccaaccaguacagccccugcguguccaucguccccagcacggugugggaggacggggacuacuaccggaagcagcugagcccgcucgagggcggcggguggcugguggccuccggcagcaccgucgcgaugaccgagcagcugcagaugggguucggcaucaccgugcaguacgggaccgacacgaacuccgugugccccaagcucgaguucgccaacgacaccaagaucgccagccagcugggcaacugcgucgaguacucccuguacggcgugagcgggcgcggcguguuccagaacugcaccgccgucggggugcggcagcagcgcuucguguacgacgcguaccagaaccuggucggcuacuacuccgacgacggcaacuacuacugccuccgggccugcgugagcgugcccgucuccgugaucuacgacaaggagaccaagacgcacgccacccuguucgggagcguggccugcgagcacaucuccagcaccaugucccaguacagccgcuccacccgcagcaugcugaagcggcgcgacuccacguacggcccgcuccagacccccgucgggugcgugcugggccuggugaacagcucccucuucgucgaggacugcaagcugccccuggggcagagccucugcgcccugcccgacaccccgagcacccugacgcccgcguccgugggcagcgugcccggcgagaugcggcucgccuccaucgccuucaaccaccccauccaggucgaccagcugaacagcuccuacuucaagcugagcaucccgaccaacuucuccuucggggugacccaggaguacauccagaccacgauccagaaggugaccgucgacugcaagcaguacgugugcaacggcuuccagaagugcgagcagcuccugcgcgaguacgggcaguucugcagcaagaucaaccaggcccugcacggcgccaaccuccggcaggacgacuccgugcgcaaccuguucgcgagcgucaaguccagccaguccagccccaucauccccggguucggcggcgacuucaaccugacccuccuggagcccguguccaucagcaccgggucccggagcgcccgcuccgccaucgaggaccuccuguucgacaaggugacgaucgccgacccgggcuacaugcagggguacgacgacugcaugcagcagggccccgccagcgcgcgggaccugaucugcgcccaguacgucgccggguacaaggugcugccgccccucauggacgugaacauggaggccgcguacaccagcucccugcugggcagcaucgccggcgucggguggaccgccggccucuccagcuucgccgccauccccuucgcgcaguccaucuucuaccgccugaacggggugggcaucacccagcagguccugagcgagaaccagaagcucaucgccaacaaguucaaccaggcccugggggccaugcagacgggcuucaccaccaccaacgaggccuuccacaaggugcaggacgcggugaacaacaacgcccaggcccuguccaagcucgccagcgagcuguccaacacguucggcgccaucagcgcguccaucggggacaucauccagcggcuggacccgcccgagcaggacgcccagaucgaccgccucaucaacggccggcugaccacccugaacgccuucguggcccagcagcucguccgcagcgaguccgcggcccugagcgcccagcuggccaaggacaaggugaacgagugcgugaaggcccaguccaagcggagcggguucugcggccagggcacccacaucgucuccuucguggucaacgcgcccaacgggcucuacuucaugcacgugggcuacuaccccagcaaccacaucgagguggucuccgccuacgggcugugcgacgccgccaaccccacgaacugcaucgcccccgugaacggcuacuucaucaagaccaacaacacccgcaucguggacgaguggagcuacaccgggagcuccuucuacgcgcccgagccgaucacgagccugaacaccaaguacgucgcgccccaggugaccuaccagaacaucuccaccaaccugcccccgccccuccugggcaacagcaccggcaucgacuuccaggacgagcucgacgaguucuucaagaacguguccacgagcauccccaacuucgggucccugacccagaucaacaccacccugcucgaccugacguacgagaugcugagccuccagcaggucgugaaggcccugaacgaguccuacaucgaccugaaggagcucggcaacuacaccuacuga

SEQ ID NO: 14823 - RNA, 3876 nt, Artificial Sequence
  MERS-CoV/England 1__YP_007188579.1 spike protein CDS gc (variant)
augauccacagcguguuccugcucauguuccugcugacccccaccgaguccuacgucgacgugggcccggacagcgugaaguccgccugcaucgaggucgacauccagcagacguucuucgacaagaccuggccccgccccaucgacgugagcaaggccgacgggaucaucuacccccagggccggaccuacuccaacaucaccaucacguaccagggccucuucccguaccagggcgaccacggggacauguacguguacagcgccggccacgccaccggcaccacgccccagaagcuguucgucgccaacuacucccaggacgugaagcaguucgccaacggguucgugguccgcaucggcgccgcggccaacagcaccgggaccgugaucaucucccccagcaccuccgccaccauccggaagaucuaccccgccuucaugcugggcagcuccguggggaacuucagcgacggcaagaugggccgcuucuucaaccacacgcucguccugcugccggacgggugcggcacccuccugcgggcguucuacugcauccuggagccccgcuccgggaaccacugccccgccggcaacagcuacaccuccuucgccaccuaccacacgcccgccaccgacugcagcgacggcaacuacaaccggaacgccucccucaacagcuucaaggaguacuucaaccugcgcaacugcaccuucauguacaccuacaacaucacggaggacgagauccuggagugguucgggaucacccagaccgcgcagggcgugcaccucuucagcucccgguacguggaccuguacgggggcaacauguuccaguucgccacccugccggucuacgacacgaucaaguacuacagcaucaucccccacuccauccgcagcauccaguccgaccggaaggccugggccgccuucuacguguacaagcuccagccccugaccuuccugcucgacuucagcguggacggguacauccgccgggcgaucgacugcggcuucaacgaccugucccagcugcacugcagcuacgaguccuucgacgucgagagcggcguguacuccgugagcuccuucgaggccaagcccagcggguccgucguggagcaggccgagggcguggagugcgacuucagcccgcuccuguccgggaccccgccccaggucuacaacuucaagcgccugguguucaccaacugcaacuacaaccucacgaagcugcugagccucuucuccgucaacgacuucacgugcagccagaucagccccgccgccaucgcguccaacugcuacagcucccugauccuggacuacuucagcuacccccucuccaugaaguccgaccugagcgugagcuccgccgggcccaucagccaguucaacuacaagcaguccuucagcaacccgaccugccugauccucgccaccgugccccacaaccugaccaccaucaccaagccccugaaguacuccuacaucaacaagugcagccgguuccucuccgacgaccgcaccgaggucccccagcuggugaacgccaaccaguacagccccugcguguccaucguccccagcacggugugggaggacggggacuacuaccggaagcagcugagcccgcucgagggcggcggguggcugguggccuccggcagcaccgucgcgaugaccgagcagcugcagaugggguucggcaucaccgugcaguacgggaccgacacgaacuccgugugccccaagcucgaguucgccaacgacaccaagaucgccagccagcugggcaacugcgucgaguacucccuguacggcgugagcgggcgcggcguguuccagaacugcaccgccgucggggugcggcagcagcgcuucguguacgacgcguaccagaaccuggucggcuacuacuccgacgacggcaacuacuacugccuccgggccugcgugagcgugcccgucuccgugaucuacgacaaggagaccaagacgcacgccacccuguucgggagcguggccugcgagcacaucuccagcaccaugucccaguacagccgcuccacccgcagcaugcugaagcggcgcgacuccacguacggcccgcuccagacccccgucgggugcgugcugggccuggugaacagcucccucuucgucgaggacugcaagcugccccuggggcagagccucugcgcccugcccgacaccccgagcacccugacgcccgcguccgugggcagcgugcccggcgagaugcggcucgccuccaucgccuucaaccaccccauccaggucgaccagcugaacagcuccuacuucaagcugagcaucccgaccaacuucuccuucggggugacccaggaguacauccagaccacgauccagaaggugaccgucgacugcaagcaguacgugugcaacggcuuccagaagugcgagcagcuccugcgcgaguacgggcaguucugcagcaagaucaaccaggcccugcacggcgccaaccuccggcaggacgacuccgugcgcaaccuguucgcgagcgucaaguccagccaguccagccccaucauccccggguucggcggcgacuucaaccugacccuccuggagcccguguccaucagcaccggguccggcagcgccggguccgccaucgaggaccuccuguucgacaaggugacgaucgccgacccgggcuacaugcagggguacgacgacugcaugcagcagggccccgccagcgcgcgggaccugaucugcgcccaguacgucgccggcuacaaggugcugccgccccucauggacgugaacauggaggccgcguacaccagcucccugcuggggagcaucgccggcgucggguggaccgccggccucuccagcuucgccgccauccccuucgcgcaguccaucuucuaccgccugaacggggugggcaucacccagcagguccugagcgagaaccagaagcucaucgccaacaaguucaaccaggcccugggcgccaugcagacgggguucaccaccaccaacgaggccuuccacaaggugcaggacgcggugaacaacaacgcccaggcccuguccaagcucgccagcgagcuguccaacacguucggcgccaucagcgcguccaucggggacaucauccagcggcuggacccgcccgagcaggacgcccagaucgaccgccucaucaacggccggcugaccacccugaacgccuucguggcccagcagcucguccgcagcgaguccgcggcccugagcgcccagcuggccaaggacaaggugaacgagugcgugaaggcccaguccaagcggagcggcuucugcgggcagggcacccacaucgucuccuucguggucaacgcgcccaacgggcucuacuucaugcacgugggcuacuaccccagcaaccacaucgagguggucuccgccuacgggcugugcgacgccgccaaccccacgaacugcaucgcccccgugaacggcuacuucaucaagaccaacaacacccgcaucguggacgaguggagcuacaccggcagcuccuucuacgcgcccgagccgaucacgagccugaacaccaaguacgucgcgccccaggugaccuaccagaacaucuccaccaaccugcccccgccccuccuggggaacagcaccggcaucgacuuccaggacgagcucgacgaguucuucaagaacguguccacgagcauccccaacuucgggucccugacccagaucaacaccacccugcucgaccugacguacgagaugcugagccuccagcaggucgugaaggcccugaacgaguccuacaucgaccugaaggagcucggcaacuacaccuacuga

SEQ ID NO: 14824 - RNA, 3957 nt, Artificial Sequence
  MERS-CoV/England 1__YP_007188579.1 spike protein CDS gc (variant)
augauccacagcguguuccugcucauguuccugcugacccccaccgaguccuacgucgacgugggcccggacagcgugaaguccgccugcaucgaggucgacauccagcagacguucuucgacaagaccuggccccgccccaucgacgugagcaaggccgacgggaucaucuacccccagggccggaccuacuccaacaucaccaucacguaccagggccucuucccguaccagggcgaccacggggacauguacguguacagcgccggccacgccaccggcaccacgccccagaagcuguucgucgccaacuacucccaggacgugaagcaguucgccaacggguucgugguccgcaucggcgccgcggccaacagcaccgggaccgugaucaucucccccagcaccuccgccaccauccggaagaucuaccccgccuucaugcugggcagcuccguggggaacuucagcgacggcaagaugggccgcuucuucaaccacacgcucguccugcugccggacgggugcggcacccuccugcgggcguucuacugcauccuggagccccgcuccgggaaccacugccccgccggcaacagcuacaccuccuucgccaccuaccacacgcccgccaccgacugcagcgacggcaacuacaaccggaacgccucccucaacagcuucaaggaguacuucaaccugcgcaacugcaccuucauguacaccuacaacaucacggaggacgagauccuggagugguucgggaucacccagaccgcgcagggcgugcaccucuucagcucccgguacguggaccuguacgggggcaacauguuccaguucgccacccugccggucuacgacacgaucaaguacuacagcaucaucccccacuccauccgcagcauccaguccgaccggaaggccugggccgccuucuacguguacaagcuccagccccugaccuuccugcucgacuucagcguggacggguacauccgccgggcgaucgacugcggcuucaacgaccugucccagcugcacugcagcuacgaguccuucgacgucgagagcggcguguacuccgugagcuccuucgaggccaagcccagcggguccgucguggagcaggccgagggcguggagugcgacuucagcccgcuccuguccgggaccccgccccaggucuacaacuucaagcgccugguguucaccaacugcaacuacaaccucacgaagcugcugagccucuucuccgucaacgacuucacgugcagccagaucagccccgccgccaucgcguccaacugcuacagcucccugauccuggacuacuucagcuacccccucuccaugaaguccgaccugagcgugagcuccgccgggcccaucagccaguucaacuacaagcaguccuucagcaacccgaccugccugauccucgccaccgugccccacaaccugaccaccaucaccaagccccugaaguacuccuacaucaacaagugcagccgguuccucuccgacgaccgcaccgaggucccccagcuggugaacgccaaccaguacagccccugcguguccaucguccccagcacggugugggaggacggggacuacuaccggaagcagcugagcccgcucgagggcggcggguggcugguggccuccggcagcaccgucgcgaugaccgagcagcugcagaugggguucggcaucaccgugcaguacgggaccgacacgaacuccgugugccccaagcucgaguucgccaacgacaccaagaucgccagccagcugggcaacugcgucgaguacucccuguacggcgugagcgggcgcggcguguuccagaacugcaccgccgucggggugcggcagcagcgcuucguguacgacgcguaccagaaccuggucggcuacuacuccgacgacggcaacuacuacugccuccgggccugcgugagcgugcccgucuccgugaucuacgacaaggagaccaagacgcacgccacccuguucgggagcguggccugcgagcacaucuccagcaccaugucccaguacagccgcuccacccgcagcaugcugaagcggcgcgacuccacguacggcccgcuccagacccccgucgggugcgugcugggccuggugaacagcucccucuucgucgaggacugcaagcugccccuggggcagagccucugcgcccugcccgacaccccgagcacccugacgcccgcguccgugggcagcgugcccggcgagaugcggcucgccuccaucgccuucaaccaccccauccaggucgaccagcugaacagcuccuacuucaagcugagcaucccgaccaacuucuccuucggggugacccaggaguacauccagaccacgauccagaaggugaccgucgacugcaagcaguacgugugcaacggcuuccagaagugcgagcagcuccugcgcgaguacgggcaguucugcagcaagaucaaccaggcccugcacggcgccaaccuccggcaggacgacuccgugcgcaaccuguucgcgagcgucaaguccagccaguccagccccaucauccccggguucggcggcgacuucaaccugacccuccuggagcccguguccaucagcaccgggucccggagcgcccgcuccgccaucgaggaccuccuguucgacaaggugacgaucgccgacccgggcuacaugcagggguacgacgacugcaugcagcagggccccgccagcgcgcgggaccugaucugcgcccaguacgucgccggguacaaggugcugccgccccucauggacgugaacauggaggccgcguacaccagcucccugcugggcagcaucgccggcgucggguggaccgccggccucuccagcuucgccgccauccccuucgcgcaguccaucuucuaccgccugaacggggugggcaucacccagcagguccugagcgagaaccagaagcucaucgccaacaaguucaaccaggcccugggggccaugcagacgggcuucaccaccaccaacgaggccuuccacaaggugcaggacgcggugaacaacaacgcccaggcccuguccaagcucgccagcgagcuguccaacacguucggcgccaucagcgcguccaucggggacaucauccagcggcuggacccgcccgagcaggacgcccagaucgaccgccucaucaacggccggcugaccacccugaacgccuucguggcccagcagcucguccgcagcgaguccgcggcccugagcgcccagcuggccaaggacaaggugaacgagugcgugaaggcccaguccaagcggagcggguucugcggccagggcacccacaucgucuccuucguggucaacgcgcccaacgggcucuacuucaugcacgugggcuacuaccccagcaaccacaucgagguggucuccgccuacgggcugugcgacgccgccaaccccacgaacugcaucgcccccgugaacggcuacuucaucaagaccaacaacacccgcaucguggacgaguggagcuacaccgggagcuccuucuacgcgcccgagccgaucacgagccugaacaccaaguacgucgcgccccaggugaccuaccagaacaucuccaccaaccugcccccgccccuccugggcaacagcaccggcaucgacuuccaggacgagcucgacgaguucuucaagaacguguccacgagcauccccaacuucgggucccugacccagaucaacaccacccugcucgaccugacguacgagaugcugagccuccagcaggucgugaaggcccugaacgaguccuacaucgaccugaaggagcucggcaacuacaccuacgggggcuacauccccgaggccccgcgggacgggcaggccuacgugcgcaaggacggcgaguggguccugcugagcaccuucuga

SEQ ID NO: 14825 - RNA, 3957 nt, Artificial Sequence
  MERS-CoV/England 1__YP_007188579.1 spike protein CDS gc (variant)
augauccacagcguguuccugcucauguuccugcugacccccaccgaguccuacgucgacgugggcccggacagcgugaaguccgccugcaucgaggucgacauccagcagacguucuucgacaagaccuggccccgccccaucgacgugagcaaggccgacgggaucaucuacccccagggccggaccuacuccaacaucaccaucacguaccagggccucuucccguaccagggcgaccacggggacauguacguguacagcgccggccacgccaccggcaccacgccccagaagcuguucgucgccaacuacucccaggacgugaagcaguucgccaacggguucgugguccgcaucggcgccgcggccaacagcaccgggaccgugaucaucucccccagcaccuccgccaccauccggaagaucuaccccgccuucaugcugggcagcuccguggggaacuucagcgacggcaagaugggccgcuucuucaaccacacgcucguccugcugccggacgggugcggcacccuccugcgggcguucuacugcauccuggagccccgcuccgggaaccacugccccgccggcaacagcuacaccuccuucgccaccuaccacacgcccgccaccgacugcagcgacggcaacuacaaccggaacgccucccucaacagcuucaaggaguacuucaaccugcgcaacugcaccuucauguacaccuacaacaucacggaggacgagauccuggagugguucgggaucacccagaccgcgcagggcgugcaccucuucagcucccgguacguggaccuguacgggggcaacauguuccaguucgccacccugccggucuacgacacgaucaaguacuacagcaucaucccccacuccauccgcagcauccaguccgaccggaaggccugggccgccuucuacguguacaagcuccagccccugaccuuccugcucgacuucagcguggacggguacauccgccgggcgaucgacugcggcuucaacgaccugucccagcugcacugcagcuacgaguccuucgacgucgagagcggcguguacuccgugagcuccuucgaggccaagcccagcggguccgucguggagcaggccgagggcguggagugcgacuucagcccgcuccuguccgggaccccgccccaggucuacaacuucaagcgccugguguucaccaacugcaacuacaaccucacgaagcugcugagccucuucuccgucaacgacuucacgugcagccagaucagccccgccgccaucgcguccaacugcuacagcucccugauccuggacuacuucagcuacccccucuccaugaaguccgaccugagcgugagcuccgccgggcccaucagccaguucaacuacaagcaguccuucagcaacccgaccugccugauccucgccaccgugccccacaaccugaccaccaucaccaagccccugaaguacuccuacaucaacaagugcagccgguuccucuccgacgaccgcaccgaggucccccagcuggugaacgccaaccaguacagccccugcguguccaucguccccagcacggugugggaggacggggacuacuaccggaagcagcugagcccgcucgagggcggcggguggcugguggccuccggcagcaccgucgcgaugaccgagcagcugcagaugggguucggcaucaccgugcaguacgggaccgacacgaacuccgugugccccaagcucgaguucgccaacgacaccaagaucgccagccagcugggcaacugcgucgaguacucccuguacggcgugagcgggcgcggcguguuccagaacugcaccgccgucggggugcggcagcagcgcuucguguacgacgcguaccagaaccuggucggcuacuacuccgacgacggcaacuacuacugccuccgggccugcgugagcgugcccgucuccgugaucuacgacaaggagaccaagacgcacgccacccuguucgggagcguggccugcgagcacaucuccagcaccaugucccaguacagccgcuccacccgcagcaugcugaagcggcgcgacuccacguacggcccgcuccagacccccgucgggugcgugcugggccuggugaacagcucccucuucgucgaggacugcaagcugccccuggggcagagccucugcgcccugcccgacaccccgagcacccugacgcccgcguccgugggcagcgugcccggcgagaugcggcucgccuccaucgccuucaaccaccccauccaggucgaccagcugaacagcuccuacuucaagcugagcaucccgaccaacuucuccuucggggugacccaggaguacauccagaccacgauccagaaggugaccgucgacugcaagcaguacgugugcaacggcuuccagaagugcgagcagcuccugcgcgaguacgggcaguucugcagcaagaucaaccaggcccugcacggcgccaaccuccggcaggacgacuccgugcgcaaccuguucgcgagcgucaaguccagccaguccagccccaucauccccggguucggcggcgacuucaaccugacccuccuggagcccguguccaucagcaccggguccggcagcgccggguccgccaucgaggaccuccuguucgacaaggugacgaucgccgacccgggcuacaugcagggguacgacgacugcaugcagcagggccccgccagcgcgcgggaccugaucugcgcccaguacgucgccggcuacaaggugcugccgccccucauggacgugaacauggaggccgcguacaccagcucccugcuggggagcaucgccggcgucggguggaccgccggccucuccagcuucgccgccauccccuucgcgcaguccaucuucuaccgccugaacggggugggcaucacccagcagguccugagcgagaaccagaagcucaucgccaacaaguucaaccaggcccugggcgccaugcagacgggguucaccaccaccaacgaggccuuccacaaggugcaggacgcggugaacaacaacgcccaggcccuguccaagcucgccagcgagcuguccaacacguucggcgccaucagcgcguccaucggggacaucauccagcggcuggacccgcccgagcaggacgcccagaucgaccgccucaucaacggccggcugaccacccugaacgccuucguggcccagcagcucguccgcagcgaguccgcggcccugagcgcccagcuggccaaggacaaggugaacgagugcgugaaggcccaguccaagcggagcggcuucugcgggcagggcacccacaucgucuccuucguggucaacgcgcccaacgggcucuacuucaugcacgugggcuacuaccccagcaaccacaucgagguggucuccgccuacgggcugugcgacgccgccaaccccacgaacugcaucgcccccgugaacggcuacuucaucaagaccaacaacacccgcaucguggacgaguggagcuacaccggcagcuccuucuacgcgcccgagccgaucacgagccugaacaccaaguacgucgcgccccaggugaccuaccagaacaucuccaccaaccugcccccgccccuccuggggaacagcaccggcaucgacuuccaggacgagcucgacgaguucuucaagaacguguccacgagcauccccaacuucgggucccugacccagaucaacaccacccugcucgaccugacguacgagaugcugagccuccagcaggucgugaaggcccugaacgaguccuacaucgaccugaaggagcucggcaacuacaccuacgggggcuacauccccgaggccccgcgggacggccaggccuacgugcgcaaggacggggaguggguccugcugagcaccuucuga

SEQ ID NO: 14826 - RNA, 4062 nt, Artificial Sequence
  MERS-CoV/MERS-CoV-Jeddah-human-1__AHE78108.1 spike protein CDS human (1-1353)
augauccacagcguguuccugcucauguuucuucugacccccacagaguccuacgucgacguuggcccugauucugugaagucagccugcauugaaguagacauacagcaaacuuucuuugauaaaacguggccaagaccgaucgacgugaguaaggcugaugggauuaucuauccccagggaaggaccuacagcaacauuacaaucacuuaucaggguuuguucccuuaccagggcgaccauggggauauguaugucuacuccgcaggacacgccaccggcacaaccccacaaaaauuauuuguggcgaauuauucucaggacguuaagcaguucgcuaacgguuuugugguccggauaggggccgcagccaauucgacuggaacagugaucauuucacccagcaccagugcuacgauccgcaaaauuuacccugcauucaugcugggcuccucuguaggcaacuuuagcgaugggaagaugggacgauucuuuaaucauacucuaguucuccugccagacgguuguggcacccuucugcgugccuucuacugcaucuuggagcccagauccgggaaccacuguccugcuggaaauucauauacaaguuuugccacuuaccauaccccagcgacagauugcagcgacggcaacuauaauaggaacgcaucucucaauuccuucaaggaauacuucaaccugcggaauuguaccuuuauguauacguacaacauaacugaggaugaaauucuggagugguucgguaucacacagaccgcccaaggggugcaccucuuuucaagccgcuaugucgacuuauacggaggcaauauguuccaguuugcuacucugccgguguacgacacaauuaaauauuacaguaucaucccccacucuauuagauccauacagagcgauaggaaggccugggcagcuuucuauguguacaaacuucagccuuugaccuuucugcuagacuucucggucgauggcuauauccggcgcgccauugacugcggguuuaacgaucucucucaacugcauuguuccuacgagucauucgacguugaaaguggaguguauagcguauccucuuuugaggcgaagccaagcgguucaguggucgaacaggccgagggcguggagugcgauuucaguccccuucuguccgggacgccuccacagguuuacaacuuuaaacgauugguguucaccaauuguaacuacaaucucacaaagcuguuaagccuguucucugucaacgacuuuacuugcucacaaaucagucccgcagcuauagccagcaauuguuauuccucucucauucuugauuacuucucguauccgcugagcaugaaguccgacuugucagugaguucugcuggaccuaucagccaguuuaacuacaaacaguccuucucaaauccaaccugccuaauccuggccacaguaccccacaaccucacuaccauuacaaagccucugaaauauagcuacaucaauaagugcucuagacuucuguccgaugacaggaccgaaguuccccaguuggugaacgcaaaucaauauaguccaugugucagcauugugcccucuacugucugggaggacggcgauuacuaccggaaacagcucuccccucuggaaggugggggcugguuaguggccucaggaaguacgguugcuaugacagagcagcugcagaugggcuuugggauaaccgugcaauauggaacugacaccaacagcguaugcccaaagcuagaguucgcgaaugauacaaaaaucgcaucgcagcucgguaacugugucgaauacucccuguauggcgugucugggcguggaguuuuucagaauugcaccgccgugggcguccgccagcaaagauucguguacgacgcuuaucagaaccuuguagguuacuauagcgaugacgggaacuacuacuguuugagggccugcgugucaguuccggucagugugauuuaugauaaggagacuaagacacaugcaacgcuguuuggcuccguggccugugaacacaucucuagcaccaugucccaguacucacggagcacucgaaguaugcucaaacgcagagacucuacauauggaccccugcagaccccugucggcugcguucuugggcugguaaauuccagcuuguucguggaggauuguaagcucccacugggacaaucguuaugcgcucugcccgacacaccuucaacucuaaccccaaggucugugcggaguguccccggugaaaugcgccucgccuccaucgcauuuaaccacccgauucagguggaucagcugaauagcucuuacuucaaacuuagcauaccuacgaacuuuuccuucggcguuacccaagaguauauccagacaacuauucagaaggugaccgucgacuguaaacaguacgugugcaauggguuccaaaagugcgaacaguugcugagagaguauggacaguuuuguucaaagaucaaccaggcgcuccauggcgcuaaucugaggcaagaugacaguguucguaacuuauucgccagcgugaaaucuucccagucaaguccaauuauccccgguuuugggggcgacuucaaucugacacuuuuggagccuguaagcauauccacuggaucucggucggcacgaagcgccaucgaagaucuccuguuugacaaggucaccauugcugaucccggcuacaugcagggguacgacgauugcaugcagcaaggaccagccucagcaagagaccuaaucugugcucaguauguggccggcuacaaagugcugccuccccucauggaugucaacauggaggcggccuauacguccagucugcuugguucuauugcugggguuggauggacagcaggcuugagcuccuucgccgcuaucccauuugcccagucaauauucuacaggcugaauggugugggcauuacccaacagguauuaucugaaaaccagaagcucaucgcaaauaaauuuaaccaggcgcugggggccaugcaaacuggauucacaaccacuaaugaggcuuuucacaaggugcaggacgccgucaacaacaaugcacaggcucuuagcaagcuggccagugaauuguccaacaccuucggcgcaauuagcgccucuaucggggauauaauccagcgccucgacgugcuggagcaagaugcucagauugaccggcuaaucaauggaagacugacaacgcucaacgcguucguugcccagcagcuggugaggucagaguccgcagcucuuagugcccaauuggccaaagauaaggucaaugaaugcgugaaagcucagagcaagcgcucgggcuuuuguggucaggggacccauauuguuucuuucguggucaacgcaccgaauggacuguauuuuaugcacguaggcuacuauccuuccaaccauaucgaggugguuagcgccuacgguuuaugcgacgcggcuaaucccacuaacuguauagccccagugaauggcuacuucauuaaaacaaacaauacccgaaucgucgacgaauggucauauacagggaguucuuuuuacgcacccgagccuaucacuucccucaacaccaaguauguggccccacagguaacguaccaaaauauuagcacaaaccugcccccuccgcuucugggaaacucaaccggcaucgauuuccaggacgagcuagaugaauuuuucaagaaugugaguacuagcauuccaaacuuugggucccucacccagauaaauacaacucuguuggaccugaccuaugagauguuaucucuccaacaggucguuaaagcucugaacgaaagcuacaucgaucuuaaggagcugggaaauuauacauacuacaacaaauggcccugguauauuugguugggcuucaucgcaggucucguggcccuggcgcuaugcguguuuuucauucuguguugcacgggguguggaaccaauugcaugggcaaacuuaagugcaaccgguguugcgaccguuacgaagaguaugaucucgagccucacaagguccacgugcauuga

SEQ ID NO: 14827 - RNA, 4062 nt, Artificial Sequence
  MERS-CoV/MERS-CoV-Jeddah-human-1__AHE78108.1 spike protein CDS human (1-1353)(V1060P_L1061P)
augauccacagcguguuccugcucauguuucuucugacccccacagaguccuacgucgacguuggcccugauucugugaagucagccugcauugaaguagacauacagcaaacuuucuuugauaaaacguggccaagaccgaucgacgugaguaaggcugaugggauuaucuauccccagggaaggaccuacagcaacauuacaaucacuuaucaggguuuguucccuuaccagggcgaccauggggauauguaugucuacuccgcaggacacgccaccggcacaaccccacaaaaauuauuuguggcgaauuauucucaggacguuaagcaguucgcuaacgguuuugugguccggauaggggccgcagccaauucgacuggaacagugaucauuucacccagcaccagugcuacgauccgcaaaauuuacccugcauucaugcugggcuccucuguaggcaacuuuagcgaugggaagaugggacgauucuuuaaucauacucuaguucuccugccagacgguuguggcacccuucugcgugccuucuacugcaucuuggagcccagauccgggaaccacuguccugcuggaaauucauauacaaguuuugccacuuaccauaccccagcgacagauugcagcgacggcaacuauaauaggaacgcaucucucaauuccuucaaggaauacuucaaccugcggaauuguaccuuuauguauacguacaacauaacugaggaugaaauucuggagugguucgguaucacacagaccgcccaaggggugcaccucuuuucaagccgcuaugucgacuuauacggaggcaauauguuccaguuugcuacucugccgguguacgacacaauuaaauauuacaguaucaucccccacucuauuagauccauacagagcgauaggaaggccugggcagcuuucuauguguacaaacuucagccuuugaccuuucugcuagacuucucggucgauggcuauauccggcgcgccauugacugcggguuuaacgaucucucucaacugcauuguuccuacgagucauucgacguugaaaguggaguguauagcguauccucuuuugaggcgaagccaagcgguucaguggucgaacaggccgagggcguggagugcgauuucaguccccuucuguccgggacgccuccacagguuuacaacuuuaaacgauugguguucaccaauuguaacuacaaucucacaaagcuguuaagccuguucucugucaacgacuuuacuugcucacaaaucagucccgcagcuauagccagcaauuguuauuccucucucauucuugauuacuucucguauccgcugagcaugaaguccgacuugucagugaguucugcuggaccuaucagccaguuuaacuacaaacaguccuucucaaauccaaccugccuaauccuggccacaguaccccacaaccucacuaccauuacaaagccucugaaauauagcuacaucaauaagugcucuagacuucuguccgaugacaggaccgaaguuccccaguuggugaacgcaaaucaauauaguccaugugucagcauugugcccucuacugucugggaggacggcgauuacuaccggaaacagcucuccccucuggaaggugggggcugguuaguggccucaggaaguacgguugcuaugacagagcagcugcagaugggcuuugggauaaccgugcaauauggaacugacaccaacagcguaugcccaaagcuagaguucgcgaaugauacaaaaaucgcaucgcagcucgguaacugugucgaauacucccuguauggcgugucugggcguggaguuuuucagaauugcaccgccgugggcguccgccagcaaagauucguguacgacgcuuaucagaaccuuguagguuacuauagcgaugacgggaacuacuacuguuugagggccugcgugucaguuccggucagugugauuuaugauaaggagacuaagacacaugcaacgcuguuuggcuccguggccugugaacacaucucuagcaccaugucccaguacucacggagcacucgaaguaugcucaaacgcagagacucuacauauggaccccugcagaccccugucggcugcguucuugggcugguaaauuccagcuuguucguggaggauuguaagcucccacugggacaaucguuaugcgcucugcccgacacaccuucaacucuaaccccaaggucugugcggaguguccccggugaaaugcgccucgccuccaucgcauuuaaccacccgauucagguggaucagcugaauagcucuuacuucaaacuuagcauaccuacgaacuuuuccuucggcguuacccaagaguauauccagacaacuauucagaaggugaccgucgacuguaaacaguacgugugcaauggguuccaaaagugcgaacaguugcugagagaguauggacaguuuuguucaaagaucaaccaggcgcuccauggcgcuaaucugaggcaagaugacaguguucguaacuuauucgccagcgugaaaucuucccagucaaguccaauuauccccgguuuugggggcgacuucaaucugacacuuuuggagccuguaagcauauccacuggaucucggucggcacgaagcgccaucgaagaucuccuguuugacaaggucaccauugcugaucccggcuacaugcagggguacgacgauugcaugcagcaaggaccagccucagcaagagaccuaaucugugcucaguauguggccggcuacaaagugcugccuccccucauggaugucaacauggaggcggccuauacguccagucugcuugguucuauugcugggguuggauggacagcaggcuugagcuccuucgccgcuaucccauuugcccagucaauauucuacaggcugaauggugugggcauuacccaacagguauuaucugaaaaccagaagcucaucgcaaauaaauuuaaccaggcgcugggggccaugcaaacuggauucacaaccacuaaugaggcuuuucacaaggugcaggacgccgucaacaacaaugcacaggcucuuagcaagcuggccagugaauuguccaacaccuucggcgcaauuagcgccucuaucggggauauaauccagcgccucgacccgccugagcaagaugcucagauugaccggcugaucaauggaagacuaacaacgcugaacgcguucguggcccagcagcucguuaggucagaguccgcagcucugagugcccaacuugccaaagauaaggugaaugaaugcgucaaagcucagagcaagcgcucgggcuuuuguggucaggggacccauauugugucuuucguugugaacgcacccaauggauuguauuuuaugcacgucggcuacuauccauccaaccauaucgagguagugagcgccuacggucugugcgacgcggcuaaucccacuaacuguauagccccuguuaauggcuacuucauuaaaacaaacaauacccgaaucguggacgaauggucauauacagggaguucuuuuuacgcaccagagcccaucacuuccuuaaacaccaaguaugucgccccucaggugacguaccaaaauauuagcacaaaccucccgccaccccugcuuggaaacucaaccggcaucgauuuccaggacgagcuggaugaauuuuucaagaauguaaguacuagcauuccuaacuuugggucccuaacccagauaaauacaacucuccuggacuugaccuaugagaugcugucuuuacaacagguggucaaagcucucaacgaaagcuacaucgaucugaaggagcuuggaaauuauacauacuacaacaaauggccaugguauauuuggcugggcuucaucgcagguuugguugcccucgcgcugugcguguuuuucauucuauguugcacgggguguggaaccaauugcaugggcaagcugaaaugcaaccgguguugcgaccguuacgaagaguaugaucuugagccccacaaggugcacguccauuga

SEQ ID NO: 14828 - RNA, 4062 nt, Artificial Sequence
  MERS-CoV/Al-Hasa_4_2013__AGN70929.1 spike protein CDS human (1-1353)
augauccacagcguguuccugcucauguuucuucugacccccacagaguccuacgucgacguuggcccugauucugugaagucagccugcauugaaguagacauacagcaaacuuucuuugauaaaacguggccaagaccgaucgacgugaguaaggcugaugggauuaucuauccccagggaaggaccuacagcaacauuacaaucacuuaucaggguuuguucccuuaccagggcgaccauggggauauguaugucuacuccgcaggacacgccaccggcacaaccccacaaaaauuauuuguggcgaauuauucucaggacguuaagcaguucgcuaacgguuuugugguccggauaggggccgcagccaauucgacuggaacagugaucauuucacccagcaccagugcuacgauccgcaaaauuuacccugcauucaugcugggcuccucuguaggcaacuuuagcgaugggaagaugggacgauucuuuaaucauacucuaguucuccugccagacgguuguggcacccuucugcgugccuucuacugcaucuuggagcccagauccgggaaccacuguccugcuggaaauucauauacaaguuuugccacuuaccauaccccagcgacagauugcagcgacggcaacuauaauaggaacgcaucucucaauuccuucaaggaauacuucaaccugcggaauuguaccuuuauguauacguacaacauaacugaggaugaaauucuggagugguucgguaucacacagaccgcccaaggggugcaccucuuuucaagccgcuaugucgacuuauacggaggcaauauguuccaguuugcuacucugccgguguacgacacaauuaaauauuacaguaucaucccccacucuauuagauccauacagagcgauaggaaggccugggcagcuuucuauguguacaaacuucagccuuugaccuuucugcuagacuucucggucgauggcuauauccggcgcgccauugacugcggguuuaacgaucucucucaacugcauuguuccuacgagucauucgacguugaaaguggaguguauagcguauccucuuuugaggcgaagccaagcgguucaguggucgaacaggccgagggcguggagugcgauuucaguccccuucuguccgggacgccuccacagguuuacaacuuuaaacgauugguguucaccaauuguaacuacaaucucacaaagcuguuaagccuguucucugucaacgacuuuacuugcucacaaaucagucccgcagcuauagccagcaauuguuauuccucucucauucuugauuacuucucguauccgcugagcaugaaguccgacuugucagugaguucugcuggaccuaucagccaguuuaacuacaaacaguccuucucaaauccaaccugccuaauccuggccacaguaccccacaaccucacuaccauuacaaagccucugaaauauagcuacaucaauaagugcucuagacuucuguccgaugacaggaccgaaguuccccaguuggugaacgcaaaucaauauaguccaugugucagcauugugcccucuacugucugggaggacggcgauuacuaccggaaacagcucuccccucuggaaggugggggcugguuaguggccucaggaaguacgguugcuaugacagagcagcugcagaugggcuuugggauaaccgugcaauauggaacugacaccaacagcguaugcccaaagcuagaguucgcgaaugauacaaaaaucgcaucgcagcucgguaacugugucgaauacucccuguauggcgugucugggcguggaguuuuucagaauugcaccgccgugggcguccgccagcaaagauucguguacgacgcuuaucagaaccuuguagguuacuauagcgaugacgggaacuacuacuguuugagggccugcgugucaguuccggucagugugauuuaugauaaggagacuaagacacaugcaacgcuguuuggcuccguggccugugaacacaucucuagcaccaugucccaguacucacggagcacucgaaguaugcucaaacgcagagacucuacauauggaccccugcagaccccugucggcugcguucuugggcugguaaauuccagcuuguucguggaggauuguaagcucccacugggacaaucguuaugcgcucugcccgacacaccuucaacucuaaccccaaggucugugcggaguguccccggugaaaugcgccucgccuccaucgcauuuaaccacccgauucagguggaucagcugaauagcucuuacuucaaacuuagcauaccuacgaacuuuuccuucggcguuacccaagaguauauccagacaacuauucagaaggugaccgucgacuguaaacaguacgugugcaauggguuccaaaagugcgaacaguugcugagagaguauggacaguuuuguucaaagaucaaccaggcgcuccauggcgcuaaucugaggcaagaugacaguguucguaacuuauucgccagcgugaaaucuucccagucaaguccaauuauccccgguuuugggggcgacuucaaucugacacuuuuggagccuguaagcauauccacuggaucucggucggcacgaagcgccaucgaagaucuccuguuugacaaggucaccauugcugaucccggcuacaugcagggguacgacgauugcaugcagcaaggaccagccucagcaagagaccuaaucugugcucaguauguggccggcuacaaagugcugccuccccucauggaugucaacauggaggcggccuauacguccagucugcuugguucuauugcugggguuggauggacagcaggcuugagcuccuucgccgcuaucccauuugcccagucaauauucuacaggcugaauggugugggcauuacccaacagguauuaucugaaaaccagaagcucaucgcaaauaaauuuaaccaggcgcugggggccaugcaaacuggauucacaaccacuaaugaggcuuuucgcaaggugcaggacgccgucaacaacaaugcacaggcucuuagcaagcuggccagugaauuguccaacaccuucggcgcaauuagcgccucuaucggggauauaauccagcggcucgacgugcuggagcaagaugcucagauugacagacuaaucaauggaaggcugacaacgcucaacgcguucguugcccagcagcuggugcgcucagaguccgcagcucuuagugcccaauuggccaaagauaaggucaaugaaugcgugaaagcucagagcaagcgaucgggcuuuuguggucaggggacccacauuguuucuuucguggucaacgcaccgaauggacuguauuuuaugcauguaggcuacuauccuuccaaccacaucgaggugguuagcgccuacgguuuaugcgacgcggcuaaucccacuaacuguauagccccagugaauggcuacuucauuaaaacaaacaauacccggaucgucgacgaauggucauauacagggaguucuuuuuacgcacccgagccuaucacuucccucaacaccaaguauguggccccacauguaacguaccagaauauuagcacaaaccugcccccuccgcuucugggaaacucaaccggcaucgauuuccaagacgagcuagaugaauuuuucaagaaugugaguacuagcauuccaaacuuugggucccucacccagauaaauacaacucuguuggaccugaccuaugagauguuaucucuccagcaagucguuaaagcucugaacgaaagcuacaucgaucuuaaggagcugggaaauuauacauacuacaacaaauggcccugguauauuugguugggcuucaucgcaggucucguggcccuggcgcuaugcguguuuuucauucuguguugcacgggguguggaaccaauugcaugggcaaacuuaagugcaaccguuguugcgacagauacgaagaguaugaucucgagccucacaagguccacgugcauuga

SEQ ID NO: 14829 - RNA, 4062 nt, Artificial Sequence
  MERS-CoV/Al-Hasa_4_2013__AGN70929.1 spike protein CDS human (1-1353)(V1060P_L1061P)
augauccacagcguguuccugcucauguuucuucugacccccacagaguccuacgucgacguuggcccugauucugugaagucagccugcauugaaguagacauacagcaaacuuucuuugauaaaacguggccaagaccgaucgacgugaguaaggcugaugggauuaucuauccccagggaaggaccuacagcaacauuacaaucacuuaucaggguuuguucccuuaccagggcgaccauggggauauguaugucuacuccgcaggacacgccaccggcacaaccccacaaaaauuauuuguggcgaauuauucucaggacguuaagcaguucgcuaacgguuuugugguccggauaggggccgcagccaauucgacuggaacagugaucauuucacccagcaccagugcuacgauccgcaaaauuuacccugcauucaugcugggcuccucuguaggcaacuuuagcgaugggaagaugggacgauucuuuaaucauacucuaguucuccugccagacgguuguggcacccuucugcgugccuucuacugcaucuuggagcccagauccgggaaccacuguccugcuggaaauucauauacaaguuuugccacuuaccauaccccagcgacagauugcagcgacggcaacuauaauaggaacgcaucucucaauuccuucaaggaauacuucaaccugcggaauuguaccuuuauguauacguacaacauaacugaggaugaaauucuggagugguucgguaucacacagaccgcccaaggggugcaccucuuuucaagccgcuaugucgacuuauacggaggcaauauguuccaguuugcuacucugccgguguacgacacaauuaaauauuacaguaucaucccccacucuauuagauccauacagagcgauaggaaggccugggcagcuuucuauguguacaaacuucagccuuugaccuuucugcuagacuucucggucgauggcuauauccggcgcgccauugacugcggguuuaacgaucucucucaacugcauuguuccuacgagucauucgacguugaaaguggaguguauagcguauccucuuuugaggcgaagccaagcgguucaguggucgaacaggccgagggcguggagugcgauuucaguccccuucuguccgggacgccuccacagguuuacaacuuuaaacgauugguguucaccaauuguaacuacaaucucacaaagcuguuaagccuguucucugucaacgacuuuacuugcucacaaaucagucccgcagcuauagccagcaauuguuauuccucucucauucuugauuacuucucguauccgcugagcaugaaguccgacuugucagugaguucugcuggaccuaucagccaguuuaacuacaaacaguccuucucaaauccaaccugccuaauccuggccacaguaccccacaaccucacuaccauuacaaagccucugaaauauagcuacaucaauaagugcucuagacuucuguccgaugacaggaccgaaguuccccaguuggugaacgcaaaucaauauaguccaugugucagcauugugcccucuacugucugggaggacggcgauuacuaccggaaacagcucuccccucuggaaggugggggcugguuaguggccucaggaaguacgguugcuaugacagagcagcugcagaugggcuuugggauaaccgugcaauauggaacugacaccaacagcguaugcccaaagcuagaguucgcgaaugauacaaaaaucgcaucgcagcucgguaacugugucgaauacucccuguauggcgugucugggcguggaguuuuucagaauugcaccgccgugggcguccgccagcaaagauucguguacgacgcuuaucagaaccuuguagguuacuauagcgaugacgggaacuacuacuguuugagggccugcgugucaguuccggucagugugauuuaugauaaggagacuaagacacaugcaacgcuguuuggcuccguggccugugaacacaucucuagcaccaugucccaguacucacggagcacucgaaguaugcucaaacgcagagacucuacauauggaccccugcagaccccugucggcugcguucuugggcugguaaauuccagcuuguucguggaggauuguaagcucccacugggacaaucguuaugcgcucugcccgacacaccuucaacucuaaccccaaggucugugcggaguguccccggugaaaugcgccucgccuccaucgcauuuaaccacccgauucagguggaucagcugaauagcucuuacuucaaacuuagcauaccuacgaacuuuuccuucggcguuacccaagaguauauccagacaacuauucagaaggugaccgucgacuguaaacaguacgugugcaauggguuccaaaagugcgaacaguugcugagagaguauggacaguuuuguucaaagaucaaccaggcgcuccauggcgcuaaucugaggcaagaugacaguguucguaacuuauucgccagcgugaaaucuucccagucaaguccaauuauccccgguuuugggggcgacuucaaucugacacuuuuggagccuguaagcauauccacuggaucucggucggcacgaagcgccaucgaagaucuccuguuugacaaggucaccauugcugaucccggcuacaugcagggguacgacgauugcaugcagcaaggaccagccucagcaagagaccuaaucugugcucaguauguggccggcuacaaagugcugccuccccucauggaugucaacauggaggcggccuauacguccagucugcuugguucuauugcugggguuggauggacagcaggcuugagcuccuucgccgcuaucccauuugcccagucaauauucuacaggcugaauggugugggcauuacccaacagguauuaucugaaaaccagaagcucaucgcaaauaaauuuaaccaggcgcugggggccaugcaaacuggauucacaaccacuaaugaggcuuuucgcaaggugcaggacgccgucaacaacaaugcacaggcucuuagcaagcuggccagugaauuguccaacaccuucggcgcaauuagcgccucuaucggggauauaauccagcggcucgacccgccugagcaagaugcucagauugacagacugaucaauggaaggcuaacaacgcugaacgcguucguggcccagcagcucguucgcucagaguccgcagcucugagugcccaacuugccaaagauaaggugaaugaaugcgucaaagcucagagcaagcgaucgggcuuuuguggucaggggacccacauugugucuuucguugugaacgcacccaauggauuguauuuuaugcaugucggcuacuauccauccaaccacaucgagguagugagcgccuacggucugugcgacgcggcuaaucccacuaacuguauagccccuguuaauggcuacuucauuaaaacaaacaauacccggaucguggacgaauggucauauacagggaguucuuuuuacgcaccagagcccaucacuuccuuaaacaccaaguaugucgccccucaugugacguaccagaauauuagcacaaaccucccgccaccccugcuuggaaacucaaccggcaucgauuuccaagacgagcuggaugaauuuuucaagaauguaaguacuagcauuccuaacuuugggucccuaacccagauaaauacaacucuccuggacuugaccuaugagaugcugucuuuacagcaaguggucaaagcucucaacgaaagcuacaucgaucugaaggagcuuggaaauuauacauacuacaacaaauggccaugguauauuuggcugggcuucaucgcagguuugguugcccucgcgcugugcguguuuuucauucuauguugcacgggguguggaaccaauugcaugggcaagcugaaaugcaaccguuguugcgacagauacgaagaguaugaucuugagccccacaaggugcacguccauuga

SEQ ID NO: 14830 - RNA, 4062 nt, Artificial Sequence
  MERS-CoV/Riyadh_14_2013__AHI48572.1 spike protein CDS human (1-1353)
augauccacagcguguuccugcucauguuucuucugacccccacagaguccuacgucgacguuggcccugauucugugaagucagccugcauugaaguagacauacagcaaacuuucuuugauaaaacguggccaagaccgaucgacgugaguaaggcugaugggauuaucuauccccagggaaggaccuacagcaacauuacaaucacuuaucaggguuuguucccuuaccagggcgaccauggggauauguaugucuacuccgcaggacacgccaccggcacaaccccacaaaaauuauuuguggcgaauuauucucaggacguuaagcaguucgcuaacgguuuugugguccggauaggggccgcagccaauucgacuggaacagugaucauuucacccagcaccagugcuacgauccgcaaaauuuacccugcauucaugcugggcuccucuguaggcaacuuuagcgaugggaagaugggacgauucuuuaaucauacucuaguucuccugccagacgguuguggcacccuucugcgugccuucuacugcaucuuggagcccagauccgggaaccacuguccugcuggaaauucauauacaaguuuugccacuuaccauaccccagcgacagauugcagcgacggcaacuauaauaggaacgcaucucucaauuccuucaaggaauacuucaaccugcggaauuguaccuuuauguauacguacaacauaacugaggaugaaauucuggagugguucgguaucacacagaccgcccaaggggugcaccucuuuucaagccgcuaugucgacuuauacggaggcaauauguuccaguuugcuacucugccgguguacgacacaauuaaauauuacaguaucaucccccacucuauuagauccauacagagcgauaggaaggccugggcagcuuucuauguguacaaacuucagccuuugaccuuucugcuagacuucucggucgauggcuauauccggcgcgccauugacugcggguuuaacgaucucucucaacugcauuguuccuacgagucauucgacguugaaaguggaguguauagcguauccucuuuugaggcgaagccaagcgguucaguggucgaacaggccgagggcguggagugcgauuucaguccccuucuguccgggacgccuccacagguuuacaacuuuaaacgauugguguucaccaauuguaacuacaaucucacaaagcuguuaagccuguucucugucaacgacuuuacuugcucacaaaucagucccgcagcuauagccagcaauuguuauuccucucucauucuugauuacuucucguauccgcugagcaugaaguccgacuugucagugaguucugcuggaccuaucagccaguuuaacuacaaacaguccuucucaaauccaaccugccuaauccuggccacaguaccccacaaccucacuaccauuacaaagccucugaaauauagcuacaucaauaagugcucuagacuucuguccgaugacaggaccgaaguuccccaguuggugaacgcaaaucaauauaguccaugugucagcauugugcccucuacugucugggaggacggcgauuacuaccggaaacagcucuccccucuggaaggugggggcugguuaguggccucaggaaguacgguugcuaugacagagcagcugcagaugggcuuugggauaaccgugcaauauggaacugacaccaacagcguaugcccaaagcuagaguucgcgaaugauacaaaaaucgcaucgcagcucgguaacugugucgaauacucccuguauggcgugucugggcguggaguuuuucagaauugcaccgccgugggcguccgccagcaaagauucguguacgacgcuuaucagaaccuuguagguuacuauagcgaugacgggaacuacuacuguuugagggccugcgugucaguuccggucagugugauuuaugauaaggagacuaagacacaugcaacgcuguuuggcuccguggccugugaacacaucucuagcaccaugucccaguacucacggagcacucgaaguaugcucaaacgcagagacucuacauauggaccccugcagaccccugucggcugcguucuugggcugguaaauuccagcuuguucguggaggauuguaagcucccacugggacaaucguuaugcgcucugcccgacacaccuucaacucuaaccccaaggucugugcggaguguccccggugaaaugcgccucgccuccaucgcauuuaaccacccgauucagguggaucagcugaauagcucuuacuucaaacuuagcauaccuacgaacuuuuccuucggcguuacccaagaguauauccagacaacuauucagaaggugaccgucgacuguaaacaguacgugugcaauggguuccaaaagugcgaacaguugcugagagaguauggacaguuuuguucaaagaucaaccaggcgcuccauggcgcuaaucugaggcaagaugacaguguucguaacuuauucgccagcgugaaaucuucccagucaaguccaauuauccccgguuuugggggcgacuucaaucugacacuuuuggagccuguaagcauauccacuggaucucggucggcacgaagcgccaucgaagaucuccuguuugacaaggucaccauugcugaucccggcuacaugcagggguacgacgauugcaugcagcaaggaccagccucagcaagagaccuaaucugugcucaguauguggccggcuacaaagugcugccuccccucauggaugucaacauggaggcggccuauacguccagucugcuugguucuauugcugggguuggauggacagcaggcuugagcuccuucgccgcuaucccauuugcccagucaauauucuacaggcugaauggugugggcauuacccaacagguauuaucugaaaaccagaagcucaucgcaaauaaauuuaaccaggcgcugggggccaugcaaacuggauucacaaccacuaaugaggcuuuucgcaaggugcaggacgccgucaacaacaaugcacaggcucuuagcaagcuggccagugaauuguccaacaccuucggcgcaauuagcgccucuaucggggauauaauccagcggcucgacgugcuggagcaagaugcucagauugacagacuaaucaauggaaggcugacaacgcucaacgcguucguugcccagcagcuggugcgcucagaguccgcagcucuuagugcccaauuggccaaagauaaggucaaugaaugcgugaaagcucagagcaagcgaucgggcuuuuguggucaggggacccacauuguuucuuucguggucaacgcaccgaauggacuguauuuuaugcauguaggcuacuauccuuccaaccacaucgaggugguuagcgccuacgguuuaugcgacgcggcuaaucccacuaacuguauagccccagugaauggcuacuucauuaaaacaaacaauacccggaucgucgacgaauggucauauacagggaguucuuuuuacgcacccgagccuaucacuucccucaacaccaaguauguggccccacagguaacguaccaaaauauuagcacaaaccugcccccuccgcuucugggaaacucaaccggcaucgauuuccaggacgagcuagaugaauuuuucaagaaugugaguacuagcauuccaaacuuugggucccucacccagauaaauacaacucuguuggaccugaccuaugagauguuaucucuccaacaggucguuaaagcucugaacgaaagcuacaucgaucuuaaggagcugggaaauuauacauacuacaacaaauggcccugguauauuugguugggcuucaucgcaggucucguggcccuggcgcuaugcguguuuuucauucuguguugcacgggguguggaaccaauugcaugggcaaacuuaagugcaaccguuguugcgacagauacgaagaguaugaucucgagccucauaagguccacgugcacuga

SEQ ID NO: 14831 - RNA, 4062 nt, Artificial Sequence
  MERS-CoV/Riyadh_14_2013__AHI48572.1 spike protein CDS human (1-1353)(V1060P_L1061P)
augauccacagcguguuccugcucauguuucuucugacccccacagaguccuacgucgacguuggcccugauucugugaagucagccugcauugaaguagacauacagcaaacuuucuuugauaaaacguggccaagaccgaucgacgugaguaaggcugaugggauuaucuauccccagggaaggaccuacagcaacauuacaaucacuuaucaggguuuguucccuuaccagggcgaccauggggauauguaugucuacuccgcaggacacgccaccggcacaaccccacaaaaauuauuuguggcgaauuauucucaggacguuaagcaguucgcuaacgguuuugugguccggauaggggccgcagccaauucgacuggaacagugaucauuucacccagcaccagugcuacgauccgcaaaauuuacccugcauucaugcugggcuccucuguaggcaacuuuagcgaugggaagaugggacgauucuuuaaucauacucuaguucuccugccagacgguuguggcacccuucugcgugccuucuacugcaucuuggagcccagauccgggaaccacuguccugcuggaaauucauauacaaguuuugccacuuaccauaccccagcgacagauugcagcgacggcaacuauaauaggaacgcaucucucaauuccuucaaggaauacuucaaccugcggaauuguaccuuuauguauacguacaacauaacugaggaugaaauucuggagugguucgguaucacacagaccgcccaaggggugcaccucuuuucaagccgcuaugucgacuuauacggaggcaauauguuccaguuugcuacucugccgguguacgacacaauuaaauauuacaguaucaucccccacucuauuagauccauacagagcgauaggaaggccugggcagcuuucuauguguacaaacuucagccuuugaccuuucugcuagacuucucggucgauggcuauauccggcgcgccauugacugcggguuuaacgaucucucucaacugcauuguuccuacgagucauucgacguugaaaguggaguguauagcguauccucuuuugaggcgaagccaagcgguucaguggucgaacaggccgagggcguggagugcgauuucaguccccuucuguccgggacgccuccacagguuuacaacuuuaaacgauugguguucaccaauuguaacuacaaucucacaaagcuguuaagccuguucucugucaacgacuuuacuugcucacaaaucagucccgcagcuauagccagcaauuguuauuccucucucauucuugauuacuucucguauccgcugagcaugaaguccgacuugucagugaguucugcuggaccuaucagccaguuuaacuacaaacaguccuucucaaauccaaccugccuaauccuggccacaguaccccacaaccucacuaccauuacaaagccucugaaauauagcuacaucaauaagugcucuagacuucuguccgaugacaggaccgaaguuccccaguuggugaacgcaaaucaauauaguccaugugucagcauugugcccucuacugucugggaggacggcgauuacuaccggaaacagcucuccccucuggaaggugggggcugguuaguggccucaggaaguacgguugcuaugacagagcagcugcagaugggcuuugggauaaccgugcaauauggaacugacaccaacagcguaugcccaaagcuagaguucgcgaaugauacaaaaaucgcaucgcagcucgguaacugugucgaauacucccuguauggcgugucugggcguggaguuuuucagaauugcaccgccgugggcguccgccagcaaagauucguguacgacgcuuaucagaaccuuguagguuacuauagcgaugacgggaacuacuacuguuugagggccugcgugucaguuccggucagugugauuuaugauaaggagacuaagacacaugcaacgcuguuuggcuccguggccugugaacacaucucuagcaccaugucccaguacucacggagcacucgaaguaugcucaaacgcagagacucuacauauggaccccugcagaccccugucggcugcguucuugggcugguaaauuccagcuuguucguggaggauuguaagcucccacugggacaaucguuaugcgcucugcccgacacaccuucaacucuaaccccaaggucugugcggaguguccccggugaaaugcgccucgccuccaucgcauuuaaccacccgauucagguggaucagcugaauagcucuuacuucaaacuuagcauaccuacgaacuuuuccuucggcguuacccaagaguauauccagacaacuauucagaaggugaccgucgacuguaaacaguacgugugcaauggguuccaaaagugcgaacaguugcugagagaguauggacaguuuuguucaaagaucaaccaggcgcuccauggcgcuaaucugaggcaagaugacaguguucguaacuuauucgccagcgugaaaucuucccagucaaguccaauuauccccgguuuugggggcgacuucaaucugacacuuuuggagccuguaagcauauccacuggaucucggucggcacgaagcgccaucgaagaucuccuguuugacaaggucaccauugcugaucccggcuacaugcagggguacgacgauugcaugcagcaaggaccagccucagcaagagaccuaaucugugcucaguauguggccggcuacaaagugcugccuccccucauggaugucaacauggaggcggccuauacguccagucugcuugguucuauugcugggguuggauggacagcaggcuugagcuccuucgccgcuaucccauuugcccagucaauauucuacaggcugaauggugugggcauuacccaacagguauuaucugaaaaccagaagcucaucgcaaauaaauuuaaccaggcgcugggggccaugcaaacuggauucacaaccacuaaugaggcuuuucgcaaggugcaggacgccgucaacaacaaugcacaggcucuuagcaagcuggccagugaauuguccaacaccuucggcgcaauuagcgccucuaucggggauauaauccagcggcucgacccgccugagcaagaugcucagauugacagacugaucaauggaaggcuaacaacgcugaacgcguucguggcccagcagcucguucgcucagaguccgcagcucugagugcccaacuugccaaagauaaggugaaugaaugcgucaaagcucagagcaagcgaucgggcuuuuguggucaggggacccacauugugucuuucguugugaacgcacccaauggauuguauuuuaugcaugucggcuacuauccauccaaccacaucgagguagugagcgccuacggucugugcgacgcggcuaaucccacuaacuguauagccccuguuaauggcuacuucauuaaaacaaacaauacccggaucguggacgaauggucauauacagggaguucuuuuuacgcaccagagcccaucacuuccuuaaacaccaaguaugucgccccucaggugacguaccaaaauauuagcacaaaccucccgccaccccugcuuggaaacucaaccggcaucgauuuccaggacgagcuggaugaauuuuucaagaauguaaguacuagcauuccuaacuuugggucccuaacccagauaaauacaacucuccuggacuugaccuaugagaugcugucuuuacaacagguggucaaagcucucaacgaaagcuacaucgaucugaaggagcuuggaaauuauacauacuacaacaaauggccaugguauauuuggcugggcuucaucgcagguuugguugcccucgcgcugugcguguuuuucauucuauguugcacgggguguggaaccaauugcaugggcaagcugaaaugcaaccguuguugcgacagauacgaagaguaugaucuugagccccauaaggugcacguccacuga

SEQ ID NO: 14832 - RNA, 4062 nt, Artificial Sequence
  MERS-CoV/Riyadh_14_2013__AHI48572.1 spike protein CDS human (1-1353)(R1020Q)
augauccacagcguguuccugcucauguuucuucugacccccacagaguccuacgucgacguuggcccugauucugugaagucagccugcauugaaguagacauacagcaaacuuucuuugauaaaacguggccaagaccgaucgacgugaguaaggcugaugggauuaucuauccccagggaaggaccuacagcaacauuacaaucacuuaucaggguuuguucccuuaccagggcgaccauggggauauguaugucuacuccgcaggacacgccaccggcacaaccccacaaaaauuauuuguggcgaauuauucucaggacguuaagcaguucgcuaacgguuuugugguccggauaggggccgcagccaauucgacuggaacagugaucauuucacccagcaccagugcuacgauccgcaaaauuuacccugcauucaugcugggcuccucuguaggcaacuuuagcgaugggaagaugggacgauucuuuaaucauacucuaguucuccugccagacgguuguggcacccuucugcgugccuucuacugcaucuuggagcccagauccgggaaccacuguccugcuggaaauucauauacaaguuuugccacuuaccauaccccagcgacagauugcagcgacggcaacuauaauaggaacgcaucucucaauuccuucaaggaauacuucaaccugcggaauuguaccuuuauguauacguacaacauaacugaggaugaaauucuggagugguucgguaucacacagaccgcccaaggggugcaccucuuuucaagccgcuaugucgacuuauacggaggcaauauguuccaguuugcuacucugccgguguacgacacaauuaaauauuacaguaucaucccccacucuauuagauccauacagagcgauaggaaggccugggcagcuuucuauguguacaaacuucagccuuugaccuuucugcuagacuucucggucgauggcuauauccggcgcgccauugacugcggguuuaacgaucucucucaacugcauuguuccuacgagucauucgacguugaaaguggaguguauagcguauccucuuuugaggcgaagccaagcgguucaguggucgaacaggccgagggcguggagugcgauuucaguccccuucuguccgggacgccuccacagguuuacaacuuuaaacgauugguguucaccaauuguaacuacaaucucacaaagcuguuaagccuguucucugucaacgacuuuacuugcucacaaaucagucccgcagcuauagccagcaauuguuauuccucucucauucuugauuacuucucguauccgcugagcaugaaguccgacuugucagugaguucugcuggaccuaucagccaguuuaacuacaaacaguccuucucaaauccaaccugccuaauccuggccacaguaccccacaaccucacuaccauuacaaagccucugaaauauagcuacaucaauaagugcucuagacuucuguccgaugacaggaccgaaguuccccaguuggugaacgcaaaucaauauaguccaugugucagcauugugcccucuacugucugggaggacggcgauuacuaccggaaacagcucuccccucuggaaggugggggcugguuaguggccucaggaaguacgguugcuaugacagagcagcugcagaugggcuuugggauaaccgugcaauauggaacugacaccaacagcguaugcccaaagcuagaguucgcgaaugauacaaaaaucgcaucgcagcucgguaacugugucgaauacucccuguauggcgugucugggcguggaguuuuucagaauugcaccgccgugggcguccgccagcaaagauucguguacgacgcuuaucagaaccuuguagguuacuauagcgaugacgggaacuacuacuguuugagggccugcgugucaguuccggucagugugauuuaugauaaggagacuaagacacaugcaacgcuguuuggcuccguggccugugaacacaucucuagcaccaugucccaguacucacggagcacucgaaguaugcucaaacgcagagacucuacauauggaccccugcagaccccugucggcugcguucuugggcugguaaauuccagcuuguucguggaggauuguaagcucccacugggacaaucguuaugcgcucugcccgacacaccuucaacucuaaccccaaggucugugcggaguguccccggugaaaugcgccucgccuccaucgcauuuaaccacccgauucagguggaucagcugaauagcucuuacuucaaacuuagcauaccuacgaacuuuuccuucggcguuacccaagaguauauccagacaacuauucagaaggugaccgucgacuguaaacaguacgugugcaauggguuccaaaagugcgaacaguugcugagagaguauggacaguuuuguucaaagaucaaccaggcgcuccauggcgcuaaucugaggcaagaugacaguguucguaacuuauucgccagcgugaaaucuucccagucaaguccaauuauccccgguuuugggggcgacuucaaucugacacuuuuggagccuguaagcauauccacuggaucucggucggcacgaagcgccaucgaagaucuccuguuugacaaggucaccauugcugaucccggcuacaugcagggguacgacgauugcaugcagcaaggaccagccucagcaagagaccuaaucugugcucaguauguggccggcuacaaagugcugccuccccucauggaugucaacauggaggcggccuauacguccagucugcuugguucuauugcugggguuggauggacagcaggcuugagcuccuucgccgcuaucccauuugcccagucaauauucuacaggcugaauggugugggcauuacccaacagguauuaucugaaaaccagaagcucaucgcaaauaaauuuaaccaggcgcugggggccaugcaaacuggauucacaaccacuaaugaggcuuuucagaaggugcaggacgccgucaacaacaaugcacaggcucuuagcaagcuggccagugaauuguccaacaccuucggcgcaauuagcgccucuaucggggauauaauccaacgccucgacgugcuggagcaggaugcucagauugaccggcuaaucaauggaagacugacaacgcucaacgcguucguugcccagcaacuggugaggucagaguccgcagcucuuagugcccaguuggccaaagauaaggucaaugaaugcgugaaagcucagagcaagcgcucgggcuuuuguggucaggggacccacauuguuucuuucguggucaacgcaccgaauggacuguauuuuaugcauguaggcuacuauccuuccaaccacaucgaggugguuagcgccuacgguuuaugcgacgcggcuaaucccacuaacuguauagccccagugaauggcuacuucauuaaaacaaacaauacccgaaucgucgacgaauggucauauacagggaguucuuuuuacgcacccgagccuaucacuucccucaacaccaaguauguggccccacaaguaacguaccagaauauuagcacaaaccugcccccuccgcuucugggaaacucaaccggcaucgauuuccaggacgagcuagaugaauuuuucaagaaugugaguacuagcauuccaaacuuugggucccucacccaaauaaauacaacucuguuggaccugaccuaugagauguuaucucuccagcaggucguuaaagcucugaacgaaagcuacaucgaucuuaaggagcugggaaauuauacauacuacaacaaauggcccugguauauuugguugggcuucaucgcaggucucguggcccuggcgcuaugcguguuuuucauucuguguugcacgggguguggaaccaauugcaugggcaaacuuaagugcaaccgguguugcgaccguuacgaagaguaugaucucgagccucauaagguccacgugcacuga

SEQ ID NO: 14833 - RNA, 1767 nt, Artificial Sequence
  MERS-CoV/Riyadh_14_2013__AHI48572.1 spike protein CDS human (1-17_726-1296)(R1020Q)
augauccacagcguguuccugcucauguuucuucugacccccacagaguccgacugcaaguugccuuuaggccagucucugugugcccuaccagauacuccgucaacgcucacccccagaagugucaggagcguuccuggggaaaugcggcuggcuuccauugcauucaaccauccaauacaaguggaccagcuuaauucuucguacuuuaaacugucaauccccacaaacuucagcuuuggaguaacucaggaguauauucagaccacaauccaaaaggugaccgucgauugcaaacaguacguguguaaugguuuccagaagugcgaacaguugcuccgcgaguauggccaauuuuguaguaaaauuaaccaggcccugcacggggcgaaucugcgacaggacgauuccguucguaaccucuucgcuucugugaagucaucccagucaaguccuaucauaccaggauuuggcggugacuucaauuuaacucugcuugaacccgucagcaucucuacaggguccagaucagccaggagcgcaauugaggauuugcuguuugacaaggugaccaucgccgauccuggauacaugcaaggcuaugacgauugcaugcagcagggcccagcuagugcacgggaccuaauuugugcccaauacguagcuggguauaaaguucucccgccccugauggaugugaacauggaggccgcguacacgucuucccuucugggaagcaucgccggugucggcuggacugcaggguugucgucuuucgcugccauaccuuuugcacaguccauuuucuaccgccucaauggagugggcaucacccaacaggugcugucagaaaaccagaaguuaauugcuaauaaauucaaccaggcccugggugcgaugcagacaggguuuacuaccacaaaugaggccuuccagaagguccaagacgcaguuaacaauaacgcucaggcccucaguaaacuugcuagcgaacuguccaacaccuuuggagccaucucugcaagcaucggcgacauuauacagagauuggaugugcuagagcaggacgcccaaaucgauaggcugauuaauggccggcucacgacucugaacgcuuucguagcgcagcagcuugugcgcucagagagugcagcccuguccgcucaguuggccaaggacaaggucaaugaaugcgugaaagcacaaagcaagcgaucuggguuuuguggacaggguacacauaucguuucauucguggucaacgccccaaauggccucuauuuuaugcacgugggguacuaucccaguaaccauauagagguaguuagcgcuuacggacugugcgaugccgcaaauccuaccaacuguauugcgccagugaauggcuauuucaucaaaacuaacaauacaagaaucgucgacgaaugguccuacaccgguucuucguuuuaugcucccgagccgauuacgagcuuaaacaccaaguacguggccccucaggucacauaccaaaauaucuccacuaaccugcccccaccucuacucgggaauagcaccggcauugauuuccaggacgaacuggaugaguuuuucaaaaacgugaguacaucuauacccaacuuuggaagccuuacucagaucaauaccacauugcuggaccucaccuaugagaugcugucccuucagcaaguugugaaggcacugaacgaaucauacauugauuugaaagagcucggcaauuauacuuacuauaacaaguggccauga

SEQ ID NO: 14834 - RNA, 1848 nt, Artificial Sequence
  MERS-CoV/Riyadh_14_2013__AHI48572.1 spike protein CDS human (1-17_726-1296)(R1020Q)_LeucineZipper
augauccacagcguguuccugcucauguuucuucugacccccacagaguccgacugcaaguugccuuuaggccagucucugugugcccuaccagauacuccgucaacgcucacccccagaagugucaggagcguuccuggggaaaugcggcuggcuuccauugcauucaaccauccaauacaaguggaccagcuuaauucuucguacuuuaaacugucaauccccacaaacuucagcuuuggaguaacucaggaguauauucagaccacaauccaaaaggugaccgucgauugcaaacaguacguguguaaugguuuccagaagugcgaacaguugcuccgcgaguauggccaauuuuguaguaaaauuaaccaggcccugcacggggcgaaucugcgacaggacgauuccguucguaaccucuucgcuucugugaagucaucccagucaaguccuaucauaccaggauuuggcggugacuucaauuuaacucugcuugaacccgucagcaucucuacaggguccagaucagccaggagcgcaauugaggauuugcuguuugacaaggugaccaucgccgauccuggauacaugcaaggcuaugacgauugcaugcagcagggcccagcuagugcacgggaccuaauuugugcccaauacguagcuggguauaaaguucucccgccccugauggaugugaacauggaggccgcguacacgucuucccuucugggaagcaucgccggugucggcuggacugcaggguugucgucuuucgcugccauaccuuuugcacaguccauuuucuaccgccucaauggagugggcaucacccaacaggugcugucagaaaaccagaaguuaauugcuaauaaauucaaccaggcccugggugcgaugcagacaggguuuacuaccacaaaugaggccuuccagaagguccaagacgcaguuaacaauaacgcucaggcccucaguaaacuugcuagcgaacuguccaacaccuuuggagccaucucugcaagcaucggcgacauuauacagagauuggaugugcuagagcaggacgcccaaaucgauaggcugauuaauggccggcucacgacucugaacgcuuucguagcgcagcagcuugugcgcucagagagugcagcccuguccgcucaguuggccaaggacaaggucaaugaaugcgugaaagcacaaagcaagcgaucuggguuuuguggacaggguacacauaucguuucauucguggucaacgccccaaauggccucuauuuuaugcacgugggguacuaucccaguaaccauauagagguaguuagcgcuuacggacugugcgaugccgcaaauccuaccaacuguauugcgccagugaauggcuauuucaucaaaacuaacaauacaagaaucgucgacgaaugguccuacaccgguucuucguuuuaugcucccgagccgauuacgagcuuaaacaccaaguacguggccccucaggucacauaccaaaauaucuccacuaaccugcccccaccucuacucgggaauagcaccggcauugauuuccaggacgaacuggaugaguuuuucaaaaacgugaguacaucuauacccaacuuuggaagccuuacucagaucaauaccacauugcuggaccucaccuaugagaugcugucccuucagcaaguugugaaggcacugaacgaaucauacauugauuugaaagagcucggcaauuauacuuacuauaacaaguggccagacaagaucgaagagauccugagcaaaauuuaccacauagaaaaugagaucgccaggauuaagaaauuaaucggggaggcuuga

SEQ ID NO: 14835 - RNA, 4062 nt, Artificial Sequence
  MERS-CoV/England 1__YP_007188579.1 spike protein CDS human (1-1353)
augauccacagcguguuccugcucauguuucuucugacccccacagaguccuacgucgacguuggcccugauucugugaagucagccugcauugaaguagacauacagcaaacuuucuuugauaaaacguggccaagaccgaucgacgugaguaaggcugaugggauuaucuauccccagggaaggaccuacagcaacauuacaaucacuuaucaggguuuguucccuuaccagggcgaccauggggauauguaugucuacuccgcaggacacgccaccggcacaaccccacaaaaauuauuuguggcgaauuauucucaggacguuaagcaguucgcuaacgguuuugugguccggauaggggccgcagccaauucgacuggaacagugaucauuucacccagcaccagugcuacgauccgcaaaauuuacccugcauucaugcugggcuccucuguaggcaacuuuagcgaugggaagaugggacgauucuuuaaucauacucuaguucuccugccagacgguuguggcacccuucugcgugccuucuacugcaucuuggagcccagauccgggaaccacuguccugcuggaaauucauauacaaguuuugccacuuaccauaccccagcgacagauugcagcgacggcaacuauaauaggaacgcaucucucaauuccuucaaggaauacuucaaccugcggaauuguaccuuuauguauacguacaacauaacugaggaugaaauucuggagugguucgguaucacacagaccgcccaaggggugcaccucuuuucaagccgcuaugucgacuuauacggaggcaauauguuccaguuugcuacucugccgguguacgacacaauuaaauauuacaguaucaucccccacucuauuagauccauacagagcgauaggaaggccugggcagcuuucuauguguacaaacuucagccuuugaccuuucugcuagacuucucggucgauggcuauauccggcgcgccauugacugcggguuuaacgaucucucucaacugcauuguuccuacgagucauucgacguugaaaguggaguguauagcguauccucuuuugaggcgaagccaagcgguucaguggucgaacaggccgagggcguggagugcgauuucaguccccuucuguccgggacgccuccacagguuuacaacuuuaaacgauugguguucaccaauuguaacuacaaucucacaaagcuguuaagccuguucucugucaacgacuuuacuugcucacaaaucagucccgcagcuauagccagcaauuguuauuccucucucauucuugauuacuucucguauccgcugagcaugaaguccgacuugucagugaguucugcuggaccuaucagccaguuuaacuacaaacaguccuucucaaauccaaccugccuaauccuggccacaguaccccacaaccucacuaccauuacaaagccucugaaauauagcuacaucaauaagugcucuagauuucuuuccgaugacaggaccgaaguuccccagcuggugaacgcaaaucaauauaguccaugugucagcauugugcccucuacugucugggaggacggcgauuacuaccggaaacaguuguccccucucgaaggugggggcuggcugguggccucaggaaguacgguugcuaugacagagcaguuacagaugggcuucgggauaaccgugcaauauggaacugacaccaacagcguaugcccaaagcuggaauuugcgaaugauacaaaaaucgcaucgcagcuagguaacugugucgaguacucccucuauggcgugucugggcguggaguuuuccagaauugcaccgccgugggcguccgccagcaaagauuuguguacgacgcuuaucagaaccugguagguuacuauagcgaugacgggaacuacuacugucuuagggccugcgugucaguuccggucagugugauuuaugauaaggagacuaagacacaugcaacguuguucggcuccguggccugugaacacaucucuagcaccaugucccaguacucacggagcacucgaaguaugcugaaacgcagagacucuacauauggaccccuccagaccccugucggcugcguucuggggcuuguaaauuccagccuguuuguggaggauuguaaguugccacucggacaaucgcugugcgcuuuacccgacacaccuucaacucugaccccaaggucugugcggaguguccccggugaaaugcgccuagccuccaucgcauucaaccacccgauucagguggaucagcucaauagcucuuacuuuaaacugagcauaccuacgaacuucuccuucggcguuacccaagaguauauccagacaacuauucagaaggugaccgucgacuguaaacaguacgugugcaauggguuucaaaagugcgaacagcuuuugagagaguauggacaguucuguucaaagaucaaccaggcgcugcauggcgcuaaucucaggcaagaugacaguguucguaaccuguuugccagcgugaaaucuucccagucaaguccaauuauccccgguuucgggggcgacuuuaauuuaacacugcuugagccuguaagcauauccacuggaucucggucggcacgaagcgccaucgaagaucuccucuucgacaaggucaccauugcugaucccggcuacaugcagggguacgacgauugcaugcagcaaggaccagccucagcaagagaccugaucugugcucaguauguggccggcuacaaagugcuaccuccccugauggaugucaacauggaggcggccuauacguccagucuccuggguucuauugcugggguuggauggacagcaggccuuagcuccuuugccgcuaucccauucgcccagucaauauuuuacagguugaauggugugggcauuacccaacagguacugucugaaaaccagaaguuaaucgcaaauaaauucaaccaggcgcucggggccaugcaaacuggauuuacaaccacuaaugaggcuuuccacaaggugcaggacgccgucaacaacaaugcacaggcucugagcaaacuugccagugaacuguccaacaccuucggcgcaauuagcgccucuaucggggauauaauccagcgcuuggacgugcucgagcaagaugcucagauugaccggcugaucaauggaagacuaacaacgcugaacgcguuuguugcccagcagcucgugaggucagaguccgcagcucugagugcccaacuugccaaggauaaggucaaugaaugcgugaaagcucagagcaagcgcucgggcuucuguggucaggggacccauauuguuucuuuuguggucaacgcaccgaauggauuguauuucaugcacguaggcuacuauccuuccaaccauaucgaggugguuagcgccuacggucugugcgacgcggcuaaucccacuaacuguauagccccagugaauggcuacuuuauuaaaacaaacaauacccgaaucgucgacgaauggucauauacagggaguucuuucuacgcacccgagccuaucacuuccuuaaacaccaaguauguggccccacagguaacguaccaaaauauuagcacaaacuugcccccuccgcugcuuggaaacucaaccggcaucgauuuucaggacgagcuggaugaguucuuuaagaaugugaguacuagcauuccaaacuucgggucccuaacccagauaaauacaacucuccuggacuugaccuaugaaaugcugucuuuacaacaggucguuaaagcucucaacgaaagcuacaucgaucugaaggagcuuggaaauuauacauacuacaacaaauggcccugguauauuuggcugggcuuuaucgcagguuugguggcccucgcgcugugcguguucuuuauucuauguugcacgggguguggaaccaauugcaugggcaagcugaaaugcaaccgguguugcgaccguuacgaagaguaugaucuugagccucacaagguccacgugcauuga

SEQ ID NO: 14836 - RNA, 4062 nt, Artificial Sequence
  MERS-CoV/England 1__YP_007188579.1 spike protein CDS human (1-1353)(V1060P_L1061P)
augauccacagcguguuccugcucauguuucuucugacccccacagaguccuacgucgacguuggcccugauucugugaagucagccugcauugaaguagacauacagcaaacuuucuuugauaaaacguggccaagaccgaucgacgugaguaaggcugaugggauuaucuauccccagggaaggaccuacagcaacauuacaaucacuuaucaggguuuguucccuuaccagggcgaccauggggauauguaugucuacuccgcaggacacgccaccggcacaaccccacaaaaauuauuuguggcgaauuauucucaggacguuaagcaguucgcuaacgguuuugugguccggauaggggccgcagccaauucgacuggaacagugaucauuucacccagcaccagugcuacgauccgcaaaauuuacccugcauucaugcugggcuccucuguaggcaacuuuagcgaugggaagaugggacgauucuuuaaucauacucuaguucuccugccagacgguuguggcacccuucugcgugccuucuacugcaucuuggagcccagauccgggaaccacuguccugcuggaaauucauauacaaguuuugccacuuaccauaccccagcgacagauugcagcgacggcaacuauaauaggaacgcaucucucaauuccuucaaggaauacuucaaccugcggaauuguaccuuuauguauacguacaacauaacugaggaugaaauucuggagugguucgguaucacacagaccgcccaaggggugcaccucuuuucaagccgcuaugucgacuuauacggaggcaauauguuccaguuugcuacucugccgguguacgacacaauuaaauauuacaguaucaucccccacucuauuagauccauacagagcgauaggaaggccugggcagcuuucuauguguacaaacuucagccuuugaccuuucugcuagacuucucggucgauggcuauauccggcgcgccauugacugcggguuuaacgaucucucucaacugcauuguuccuacgagucauucgacguugaaaguggaguguauagcguauccucuuuugaggcgaagccaagcgguucaguggucgaacaggccgagggcguggagugcgauuucaguccccuucuguccgggacgccuccacagguuuacaacuuuaaacgauugguguucaccaauuguaacuacaaucucacaaagcuguuaagccuguucucugucaacgacuuuacuugcucacaaaucagucccgcagcuauagccagcaauuguuauuccucucucauucuugauuacuucucguauccgcugagcaugaaguccgacuugucagugaguucugcuggaccuaucagccaguuuaacuacaaacaguccuucucaaauccaaccugccuaauccuggccacaguaccccacaaccucacuaccauuacaaagccucugaaauauagcuacaucaauaagugcucuagauuucuuuccgaugacaggaccgaaguuccccagcuggugaacgcaaaucaauauaguccaugugucagcauugugcccucuacugucugggaggacggcgauuacuaccggaaacaguuguccccucucgaaggugggggcuggcugguggccucaggaaguacgguugcuaugacagagcaguuacagaugggcuucgggauaaccgugcaauauggaacugacaccaacagcguaugcccaaagcuggaauuugcgaaugauacaaaaaucgcaucgcagcuagguaacugugucgaguacucccucuauggcgugucugggcguggaguuuuccagaauugcaccgccgugggcguccgccagcaaagauuuguguacgacgcuuaucagaaccugguagguuacuauagcgaugacgggaacuacuacugucuuagggccugcgugucaguuccggucagugugauuuaugauaaggagacuaagacacaugcaacguuguucggcuccguggccugugaacacaucucuagcaccaugucccaguacucacggagcacucgaaguaugcugaaacgcagagacucuacauauggaccccuccagaccccugucggcugcguucuggggcuuguaaauuccagccuguuuguggaggauuguaaguugccacucggacaaucgcugugcgcuuuacccgacacaccuucaacucugaccccaaggucugugcggaguguccccggugaaaugcgccuagccuccaucgcauucaaccacccgauucagguggaucagcucaauagcucuuacuuuaaacugagcauaccuacgaacuucuccuucggcguuacccaagaguauauccagacaacuauucagaaggugaccgucgacuguaaacaguacgugugcaauggguuucaaaagugcgaacagcuuuugagagaguauggacaguucuguucaaagaucaaccaggcgcugcauggcgcuaaucucaggcaagaugacaguguucguaaccuguuugccagcgugaaaucuucccagucaaguccaauuauccccgguuucgggggcgacuuuaauuuaacacugcuugagccuguaagcauauccacuggaucucggucggcacgaagcgccaucgaagaucucuuguucgacaaggucaccauugcugaucccggcuacaugcagggguacgacgauugcaugcagcaaggaccagccucagcaagagaccugaucugugcucaguauguggccggcuacaaagugcuaccuccccugauggaugucaacauggaggcggccuauacguccagucuccuggguucuauugcugggguuggauggacagcaggccuuagcuccuuugccgcuaucccauucgcccagucaauauuuuacagguugaauggugugggcauuacccaacagguacugucugaaaaccagaaguuaaucgcaaauaaauucaaccaggcgcucggggccaugcaaacuggauuuacaaccacuaaugaggcuuuccacaaggugcaggacgccgucaacaacaaugcacaggcucugagcaaacuugccagugaacuguccaacaccuucggcgcaauuagcgccucuaucggggauauaauccagcgcuuggacccgccugagcaagaugcucagauugaccggcucaucaauggaagacugacaacgcuaaacgcguuuguggcccagcagcugguuaggucagaguccgcagcucucagugcccaacuggccaaagauaaggugaaugaaugcgucaaagcucagagcaagcgcucgggcuucuguggucaggggacccauauugugucuuuuguugugaacgcacccaauggacuuuauuucaugcacgucggcuacuauccauccaaccauaucgagguagugagcgccuacgguuugugcgacgcggcuaaucccacuaacuguauagccccuguuaauggcuacuuuauuaaaacaaacaauacccgaaucguggacgaauggucauauacagggaguucuuucuacgcaccagagcccaucacuucccugaacaccaaguaugucgccccucaggugacguaccaaaauauuagcacaaacuuaccgccaccccuccugggaaacucaaccggcaucgauuuucaggacgagcuugaugaguucuuuaagaauguaaguacuagcauuccuaacuucgggucccugacccagauaaauacaacucuacucgaccugaccuaugaaauguugucucugcaacagguggucaaggcuuuaaacgaaagcuacaucgaucucaaggagcugggaaauuauacauacuacaacaaauggccaugguauauuuggcuuggcuuuaucgcaggucugguugccuuggcgcucugcguguucuuuauucuguguugcacgggguguggaaccaauugcaugggcaagcuaaaaugcaaccgguguugcgaccguuacgaagaguaugaucuggagccccacaaggugcacguccauuga

SEQ ID NO: 14837 - RNA, 3876 nt, Artificial Sequence
  MERS-CoV/England 1__YP_007188579.1 spike protein CDS human (variant)
augauccacagcguguuccugcucauguuucuucugacccccacagaguccuacgucgacguuggcccugauucugugaagucagccugcauugaaguagacauacagcaaacuuucuuugauaaaacguggccaagaccgaucgacgugaguaaggcugaugggauuaucuauccccagggaaggaccuacagcaacauuacaaucacuuaucaggguuuguucccuuaccagggcgaccauggggauauguaugucuacuccgcaggacacgccaccggcacaaccccacaaaaauuauuuguggcgaauuauucucaggacguuaagcaguucgcuaacgguuuugugguccggauaggggccgcagccaauucgacuggaacagugaucauuucacccagcaccagugcuacgauccgcaaaauuuacccugcauucaugcugggcuccucuguaggcaacuuuagcgaugggaagaugggacgauucuuuaaucauacucuaguucuccugccagacgguuguggcacccuucugcgugccuucuacugcaucuuggagcccagauccgggaaccacuguccugcuggaaauucauauacaaguuuugccacuuaccauaccccagcgacagauugcagcgacggcaacuauaauaggaacgcaucucucaauuccuucaaggaauacuucaaccugcggaauuguaccuuuauguauacguacaacauaacugaggaugaaauucuggagugguucgguaucacacagaccgcccaaggggugcaccucuuuucaagccgcuaugucgacuuauacggaggcaauauguuccaguuugcuacucugccgguguacgacacaauuaaauauuacaguaucaucccccacucuauuagauccauacagagcgauaggaaggccugggcagcuuucuauguguacaaacuucagccuuugaccuuucugcuagacuucucggucgauggcuauauccggcgcgccauugacugcggguuuaacgaucucucucaacugcauuguuccuacgagucauucgacguugaaaguggaguguauagcguauccucuuuugaggcgaagccaagcgguucaguggucgaacaggccgagggcguggagugcgauuucaguccccuucuguccgggacgccuccacagguuuacaacuuuaaacgauugguguucaccaauuguaacuacaaucucacaaagcuguuaagccuguucucugucaacgacuuuacuugcucacaaaucagucccgcagcuauagccagcaauuguuauuccucucucauucuugauuacuucucguauccgcugagcaugaaguccgacuugucagugaguucugcuggaccuaucagccaguuuaacuacaaacaguccuucucaaauccaaccugccuaauccuggccacaguaccccacaaccucacuaccauuacaaagccucugaaauauagcuacaucaauaagugcucuagauuucuuuccgaugacaggaccgaaguuccccagcuggugaacgcaaaucaauauaguccaugugucagcauugugcccucuacugucugggaggacggcgauuacuaccggaaacaguuguccccucucgaaggugggggcuggcugguggccucaggaaguacgguugcuaugacagagcaguuacagaugggcuucgggauaaccgugcaauauggaacugacaccaacagcguaugcccaaagcuggaauuugcgaaugauacaaaaaucgcaucgcagcuagguaacugugucgaguacucccucuauggcgugucugggcguggaguuuuccagaauugcaccgccgugggcguccgccagcaaagauuuguguacgacgcuuaucagaaccugguagguuacuauagcgaugacgggaacuacuacugucuuagggccugcgugucaguuccggucagugugauuuaugauaaggagacuaagacacaugcaacguuguucggcuccguggccugugaacacaucucuagcaccaugucccaguacucacggagcacucgaaguaugcugaaacgcagagacucuacauauggaccccuccagaccccugucggcugcguucuggggcuuguaaauuccagccuguuuguggaggauuguaaguugccacucggacaaucgcugugcgcuuuacccgacacaccuucaacucugaccccaaggucugugcggaguguccccggugaaaugcgccuagccuccaucgcauucaaccacccgauucagguggaucagcucaauagcucuuacuuuaaacugagcauaccuacgaacuucuccuucggcguuacccaagaguauauccagacaacuauucagaaggugaccgucgacuguaaacaguacgugugcaauggguuucaaaagugcgaacagcuuuugagagaguauggacaguucuguucaaagaucaaccaggcgcugcauggcgcuaaucucaggcaagaugacaguguucguaaccuguuugccagcgugaaaucuucccagucaaguccaauuauccccgguuucgggggcgacuuuaauuuaacacugcuugagccuguaagcauauccacuggaucucggucggcacgaagcgccaucgaagaucucuuguucgacaaggucaccauugcugaucccggcuacaugcagggguacgacgauugcaugcagcaaggaccagccucagcaagagaccugaucugugcucaguauguggccggcuacaaagugcuaccuccccugauggaugucaacauggaggcggccuauacguccagucuccuggguucuauugcugggguuggauggacagcaggccuuagcuccuuugccgcuaucccauucgcccagucaauauuuuacagguugaauggugugggcauuacccaacagguacugucugaaaaccagaaguuaaucgcaaauaaauucaaccaggcgcucggggccaugcaaacuggauuuacaaccacuaaugaggcuuuccacaaggugcaggacgccgucaacaacaaugcacaggcucugagcaaacuugccagugaacuguccaacaccuucggcgcaauuagcgccucuaucggggauauaauccagcgcuuggacccgccugagcaagaugcucagauugaccggcucaucaauggaagacugacaacgcuaaacgcguuuguggcccagcagcugguuaggucagaguccgcagcucucagugcccaacuggccaaagauaaggugaaugaaugcgucaaagcucagagcaagcgcucgggcuucuguggucaggggacccauauugugucuuuuguugugaacgcacccaauggacuuuauuucaugcacgucggcuacuauccauccaaccauaucgagguagugagcgccuacgguuugugcgacgcggcuaaucccacuaacuguauagccccuguuaauggcuacuuuauuaaaacaaacaauacccgaaucguggacgaauggucauauacagggaguucuuucuacgcaccagagcccaucacuucccugaacaccaaguaugucgccccucaggugacguaccaaaauauuagcacaaacuuaccgccaccccuccugggaaacucaaccggcaucgauuuucaggacgagcuugaugaguucuuuaagaauguaaguacuagcauuccuaacuucgggucccugacccagauaaauacaacucuacucgaccugaccuaugaaauguugucucugcaacagguggucaaggcuuuaaacgaaagcuacaucgaucucaaggagcugggaaauuauacauacuga

SEQ ID NO: 14838 - RNA, 3876 nt, Artificial Sequence
  MERS-CoV/England 1__YP_007188579.1 spike protein CDS human (variant)
augauccacagcguguuccugcucauguuucuucugacccccacagaguccuacgucgacguuggcccugauucugugaagucagccugcauugaaguagacauacagcaaacuuucuuugauaaaacguggccaagaccgaucgacgugaguaaggcugaugggauuaucuauccccagggaaggaccuacagcaacauuacaaucacuuaucaggguuuguucccuuaccagggcgaccauggggauauguaugucuacuccgcaggacacgccaccggcacaaccccacaaaaauuauuuguggcgaauuauucucaggacguuaagcaguucgcuaacgguuuugugguccggauaggggccgcagccaauucgacuggaacagugaucauuucacccagcaccagugcuacgauccgcaaaauuuacccugcauucaugcugggcuccucuguaggcaacuuuagcgaugggaagaugggacgauucuuuaaucauacucuaguucuccugccagacgguuguggcacccuucugcgugccuucuacugcaucuuggagcccagauccgggaaccacuguccugcuggaaauucauauacaaguuuugccacuuaccauaccccagcgacagauugcagcgacggcaacuauaauaggaacgcaucucucaauuccuucaaggaauacuucaaccugcggaauuguaccuuuauguauacguacaacauaacugaggaugaaauucuggagugguucgguaucacacagaccgcccaaggggugcaccucuuuucaagccgcuaugucgacuuauacggaggcaauauguuccaguuugcuacucugccgguguacgacacaauuaaauauuacaguaucaucccccacucuauuagauccauacagagcgauaggaaggccugggcagcuuucuauguguacaaacuucagccuuugaccuuucugcuagacuucucggucgauggcuauauccggcgcgccauugacugcggguuuaacgaucucucucaacugcauuguuccuacgagucauucgacguugaaaguggaguguauagcguauccucuuuugaggcgaagccaagcgguucaguggucgaacaggccgagggcguggagugcgauuucaguccccuucuguccgggacgccuccacagguuuacaacuuuaaacgauugguguucaccaauuguaacuacaaucucacaaagcuguuaagccuguucucugucaacgacuuuacuugcucacaaaucagucccgcagcuauagccagcaauuguuauuccucucucauucuugauuacuucucguauccgcugagcaugaaguccgacuugucagugaguucugcuggaccuaucagccaguuuaacuacaaacaguccuucucaaauccaaccugccuaauccuggccacaguaccccacaaccucacuaccauuacaaagccucugaaauauagcuacaucaauaagugcucuagauuucuuuccgaugacaggaccgaaguuccccagcuggugaacgcaaaucaauauaguccaugugucagcauugugcccucuacugucugggaggacggcgauuacuaccggaaacaguuguccccucucgaaggugggggcuggcugguggccucaggaaguacgguugcuaugacagagcaguuacagaugggcuucgggauaaccgugcaauauggaacugacaccaacagcguaugcccaaagcuggaauuugcgaaugauacaaaaaucgcaucgcagcuagguaacugugucgaguacucccucuauggcgugucugggcguggaguuuuccagaauugcaccgccgugggcguccgccagcaaagauuuguguacgacgcuuaucagaaccugguagguuacuauagcgaugacgggaacuacuacugucuuagggccugcgugucaguuccggucagugugauuuaugauaaggagacuaagacacaugcaacguuguucggcuccguggccugugaacacaucucuagcaccaugucccaguacucacggagcacucgaaguaugcugaaacgcagagacucuacauauggaccccuccagaccccugucggcugcguucuggggcuuguaaauuccagccuguuuguggaggauuguaaguugccacucggacaaucgcugugcgcuuuacccgacacaccuucaacucugaccccagccucuguggguaguguccccggcgaaaugaggcuagcauccaucgcguucaaccacccgauucagguggaucagcucaauagcucuuacuuuaaacugagcauaccuacgaacuucuccuucgggguuacccaagaguauauccagacaacuauucagaaggugaccgucgacuguaaacaguacgugugcaauggauuucaaaagugcgaacagcuuuugcgggaguauggccaguucuguucaaagaucaaccaggcucugcauggugccaaucuccgccaagaugacaguguuagaaaccuguuugcaagcgugaaaucuucccagucaaguccaauuauccccggguucggcggagacuuuaauuuaacacugcuugagccuguaagcauauccacuggcucuaggucggcccguagcgcuaucgaagaucuucucuucgacaaggucaccauugccgaucccggguacaugcagggauacgacgauugcaugcagcaaggcccagcaucagcucgggaccugaucugugcccaguauguggcggguuacaaagugcuaccuccccugauggaugucaacauggaggccgcuuauacguccagucuccuggggucuauugcaggaguuggcuggacagccggucuuagcuccuuugcugccaucccauucgcacagucaauauuuuaccgauugaauggcguggggauuacccaacagguacugucugaaaaccagaaguuaaucgcgaauaaauucaaccaggcccucggagcuaugcaaacuggcuuuacaaccacuaaugaggccuuccacaaggugcaggacgcagucaacaacaaugcucaggcccugagcaaguuggcaagugaacuguccaacaccuucggggccauuagcgcuucuaucggagauauaauccagagauuggacccgccugagcaagaugcgcagauugacaggcucaucaauggccgccugacaacgcuaaacgccuuuguggcacagcagcugguucggucagaguccgcugcccucagugcccaacuggcuaaagauaaggugaaugaaugcgucaaagcacagagcaagagaucggguuucugugggcagggaacccauauugugucuuuuguugugaacgcccccaauggccuuuauuucaugcacgucgguuacuauccauccaaccauaucgagguagugagcgcguacggcuugugcgacgcugccaaucccacuaacuguauagcaccuguuaauggguacuuuauuaaaacaaacaauaccaggaucguggacgaauggucauauacaggaaguucuuucuacgccccagagcccaucacuucccugaacaccaaguaugucgcuccucaggugacguaccaaaauauuagcacaaacuuaccgccaccccuccugggcaacucaaccgggaucgauuuucaggacgagcuugaugaguucuuuaagaauguaaguacuagcauuccuaacuucggaucccugacccagauaaauacaacucuacucgaccugaccuaugaaauguugucucugcaacagguggucaaagcauuaaacgaaagcuacaucgaucucaaggagcugggcaauuauacauacuga

SEQ ID NO: 14839 - RNA, 3876 nt, Artificial Sequence
  MERS-CoV/England 1__YP_007188579.1 spike protein CDS human (variant)
augauccacagcguguuccugcucauguuucuucugacccccacagaguccuacgucgacguuggcccugauucugugaagucagccugcauugaaguagacauacagcaaacuuucuuugauaaaacguggccaagaccgaucgacgugaguaaggcugaugggauuaucuauccccagggaaggaccuacagcaacauuacaaucacuuaucaggguuuguucccuuaccagggcgaccauggggauauguaugucuacuccgcaggacacgccaccggcacaaccccacaaaaauuauuuguggcgaauuauucucaggacguuaagcaguucgcuaacgguuuugugguccggauaggggccgcagccaauucgacuggaacagugaucauuucacccagcaccagugcuacgauccgcaaaauuuacccugcauucaugcugggcuccucuguaggcaacuuuagcgaugggaagaugggacgauucuuuaaucauacucuaguucuccugccagacgguuguggcacccuucugcgugccuucuacugcaucuuggagcccagauccgggaaccacuguccugcuggaaauucauauacaaguuuugccacuuaccauaccccagcgacagauugcagcgacggcaacuauaauaggaacgcaucucucaauuccuucaaggaauacuucaaccugcggaauuguaccuuuauguauacguacaacauaacugaggaugaaauucuggagugguucgguaucacacagaccgcccaaggggugcaccucuuuucaagccgcuaugucgacuuauacggaggcaauauguuccaguuugcuacucugccgguguacgacacaauuaaauauuacaguaucaucccccacucuauuagauccauacagagcgauaggaaggccugggcagcuuucuauguguacaaacuucagccuuugaccuuucugcuagacuucucggucgauggcuauauccggcgcgccauugacugcggguuuaacgaucucucucaacugcauuguuccuacgagucauucgacguugaaaguggaguguauagcguauccucuuuugaggcgaagccaagcgguucaguggucgaacaggccgagggcguggagugcgauuucaguccccuucuguccgggacgccuccacagguuuacaacuuuaaacgauugguguucaccaauuguaacuacaaucucacaaagcuguuaagccuguucucugucaacgacuuuacuugcucacaaaucagucccgcagcuauagccagcaauuguuauuccucucucauucuugauuacuucucguauccgcugagcaugaaguccgacuugucagugaguucugcuggaccuaucagccaguuuaacuacaaacaguccuucucaaauccaaccugccuaauccuggccacaguaccccacaaccucacuaccauuacaaagccucugaaauauagcuacaucaauaagugcucuagauuucuuuccgaugacaggaccgaaguuccccagcuggugaacgcaaaucaauauaguccaugugucagcauugugcccucuacugucugggaggacggcgauuacuaccggaaacaguuguccccucucgaaggugggggcuggcugguggccucaggaaguacgguugcuaugacagagcaguuacagaugggcuucgggauaaccgugcaauauggaacugacaccaacagcguaugcccaaagcuggaauuugcgaaugauacaaaaaucgcaucgcagcuagguaacugugucgaguacucccucuauggcgugucugggcguggaguuuuccagaauugcaccgccgugggcguccgccagcaaagauuuguguacgacgcuuaucagaaccugguagguuacuauagcgaugacgggaacuacuacugucuuagggccugcgugucaguuccggucagugugauuuaugauaaggagacuaagacacaugcaacguuguucggcuccguggccugugaacacaucucuagcaccaugucccaguacucacggagcacucgaaguaugcugaaacgcagagacucuacauauggaccccuccagaccccugucggcugcguucuggggcuuguaaauuccagccuguuuguggaggauuguaaguugccacucggacaaucgcugugcgcuuuacccgacacaccuucaacucugaccccagccucuguggguaguguccccggcgaaaugaggcuagcauccaucgcguucaaccacccgauucagguggaucagcucaauagcucuuacuuuaaacugagcauaccuacgaacuucuccuucgggguuacccaagaguauauccagacaacuauucagaaggugaccgucgacuguaaacaguacgugugcaauggauuucaaaagugcgaacagcuuuugcgggaguauggccaguucuguucaaagaucaaccaggcucugcauggugccaaucuccgccaagaugacaguguuagaaaccuguuugcaagcgugaaaucuucccagucaaguccaauuauccccggguucggcggagacuuuaauuuaacacugcuugagccuguaagcauauccacuggcucugggucggccggaagcgcuaucgaagaucuucucuucgacaaggucaccauugccgaucccggcuacaugcaggguuacgacgauugcaugcagcaagggccagcaucagcuagggaccugaucugugcccaguauguggcgggauacaaagugcuaccuccccugauggaugucaacauggaggccgcuuauacguccagucuccugggcucuauugccgguguuggcuggacagcagggcuuagcuccuuugcugccaucccauucgcacagucaauauuuuaccguuugaauggagugggcauuacccaacagguacugucugaaaaccagaaguuaaucgcgaauaaauucaaccaggcccucggggcuaugcaaacuggauuuacaaccacuaaugaggccuuccacaaggugcaggacgcagucaacaacaaugcucaggcccugagcaaguuggcaagugaacuguccaacaccuucggcgccauuagcgcuucuaucggugauauaauccagcgguuggacccgccugagcaagaugcgcagauugaccgacucaucaaugggagacugacaacgcuaaacgccuuuguggcacagcagcugguuaggucagaguccgcugcccucagugcccaacuggcuaaagauaaggugaaugaaugcgucaaagcacagagcaagcgcucgggauucuguggccaggguacccauauugugucuuuuguugugaacgcccccaauggccuuuauuucaugcacgucggguacuauccauccaaccauaucgagguagugagcgcguacggauugugcgacgcugccaaucccacuaacuguauagcaccuguuaauggcuacuuuauuaaaacaaacaauacccggaucguggacgaauggucauauacagggaguucuuucuacgccccagagcccaucacuucccugaacaccaaguaugucgcuccucaggugacguaccaaaauauuagcacaaacuuaccgccaccccuccugggaaacucaaccggcaucgauuuucaggacgagcuugaugaguucuuuaagaauguaaguacuagcauuccuaacuucgguucccugacccagauaaauacaacucuacucgaccugaccuaugaaauguugucucugcaacagguggucaaagcauuaaacgaaagcuacaucgaucucaaggagcuggggaauuauacauacuga

SEQ ID NO: 14840 - RNA, 3957 nt, Artificial Sequence
  MERS-CoV/England 1__YP_007188579.1 spike protein CDS human (variant)
augauccacagcguguuccugcucauguuucuucugacccccacagaguccuacgucgacguuggcccugauucugugaagucagccugcauugaaguagacauacagcaaacuuucuuugauaaaacguggccaagaccgaucgacgugaguaaggcugaugggauuaucuauccccagggaaggaccuacagcaacauuacaaucacuuaucaggguuuguucccuuaccagggcgaccauggggauauguaugucuacuccgcaggacacgccaccggcacaaccccacaaaaauuauuuguggcgaauuauucucaggacguuaagcaguucgcuaacgguuuugugguccggauaggggccgcagccaauucgacuggaacagugaucauuucacccagcaccagugcuacgauccgcaaaauuuacccugcauucaugcugggcuccucuguaggcaacuuuagcgaugggaagaugggacgauucuuuaaucauacucuaguucuccugccagacgguuguggcacccuucugcgugccuucuacugcaucuuggagcccagauccgggaaccacuguccugcuggaaauucauauacaaguuuugccacuuaccauaccccagcgacagauugcagcgacggcaacuauaauaggaacgcaucucucaauuccuucaaggaauacuucaaccugcggaauuguaccuuuauguauacguacaacauaacugaggaugaaauucuggagugguucgguaucacacagaccgcccaaggggugcaccucuuuucaagccgcuaugucgacuuauacggaggcaauauguuccaguuugcuacucugccgguguacgacacaauuaaauauuacaguaucaucccccacucuauuagauccauacagagcgauaggaaggccugggcagcuuucuauguguacaaacuucagccuuugaccuuucugcuagacuucucggucgauggcuauauccggcgcgccauugacugcggguuuaacgaucucucucaacugcauuguuccuacgagucauucgacguugaaaguggaguguauagcguauccucuuuugaggcgaagccaagcgguucaguggucgaacaggccgagggcguggagugcgauuucaguccccuucuguccgggacgccuccacagguuuacaacuuuaaacgauugguguucaccaauuguaacuacaaucucacaaagcuguuaagccuguucucugucaacgacuuuacuugcucacaaaucagucccgcagcuauagccagcaauuguuauuccucucucauucuugauuacuucucguauccgcugagcaugaaguccgacuugucagugaguucugcuggaccuaucagccaguuuaacuacaaacaguccuucucaaauccaaccugccuaauccuggccacaguaccccacaaccucacuaccauuacaaagccucugaaauauagcuacaucaauaagugcucuagauuucuuuccgaugacaggaccgaaguuccccagcuggugaacgcaaaucaauauaguccaugugucagcauugugcccucuacugucugggaggacggcgauuacuaccggaaacaguuguccccucucgaaggugggggcuggcugguggccucaggaaguacgguugcuaugacagagcaguuacagaugggcuucgggauaaccgugcaauauggaacugacaccaacagcguaugcccaaagcuggaauuugcgaaugauacaaaaaucgcaucgcagcuagguaacugugucgaguacucccucuauggcgugucugggcguggaguuuuccagaauugcaccgccgugggcguccgccagcaaagauuuguguacgacgcuuaucagaaccugguagguuacuauagcgaugacgggaacuacuacugucuuagggccugcgugucaguuccggucagugugauuuaugauaaggagacuaagacacaugcaacguuguucggcuccguggccugugaacacaucucuagcaccaugucccaguacucacggagcacucgaaguaugcugaaacgcagagacucuacauauggaccccuccagaccccugucggcugcguucuggggcuuguaaauuccagccuguuuguggaggauuguaaguugccacucggacaaucgcugugcgcuuuacccgacacaccuucaacucugaccccagccucuguggguaguguccccggcgaaaugaggcuagcauccaucgcguucaaccacccgauucagguggaucagcucaauagcucuuacuuuaaacugagcauaccuacgaacuucuccuucgggguuacccaagaguauauccagacaacuauucagaaggugaccgucgacuguaaacaguacgugugcaauggauuucaaaagugcgaacagcuuuugcgggaguauggccaguucuguucaaagaucaaccaggcucugcauggugccaaucuccgccaagaugacaguguuagaaaccuguuugcaagcgugaaaucuucccagucaaguccaauuauccccggguucggcggagacuuuaauuuaacacugcuugagccuguaagcauauccacuggcucuaggucggcccguagcgcuaucgaagaucuucucuucgacaaggucaccauugccgaucccggguacaugcagggauacgacgauugcaugcagcaaggcccagcaucagcucgggaccugaucugugcccaguauguggcggguuacaaagugcuaccuccccugauggaugucaacauggaggccgcuuauacguccagucuccuggggucuauugcaggaguuggcuggacagccggucuuagcuccuuugcugccaucccauucgcacagucaauauuuuaccgauugaauggcguggggauuacccaacagguacugucugaaaaccagaaguuaaucgcgaauaaauucaaccaggcccucggagcuaugcaaacuggcuuuacaaccacuaaugaggccuuccacaaggugcaggacgcagucaacaacaaugcucaggcccugagcaaguuggcaagugaacuguccaacaccuucggggccauuagcgcuucuaucggagauauaauccagagauuggacccgccugagcaagaugcgcagauugacaggcucaucaauggccgccugacaacgcuaaacgccuuuguggcacagcagcugguucggucagaguccgcugcccucagugcccaacuggcuaaagauaaggugaaugaaugcgucaaagcacagagcaagagaucggguuucugugggcagggaacccauauugugucuuuuguugugaacgcccccaauggccuuuauuucaugcacgucgguuacuauccauccaaccauaucgagguagugagcgcguacggcuugugcgacgcugccaaucccacuaacuguauagcaccuguuaauggguacuuuauuaaaacaaacaauaccaggaucguggacgaauggucauauacaggaaguucuuucuacgccccagagcccaucacuucccugaacaccaaguaugucgcuccucaggugacguaccaaaauauuagcacaaacuuaccgccaccccuccugggcaacucaaccgggaucgauuuucaggacgagcuugaugaguucuuuaagaauguaaguacuagcauuccuaacuucggaucccugacccagauaaauacaacucuacucgaccugaccuaugaaauguugucucugcaacagguggucaaagcauuaaacgaaagcuacaucgaucucaaggagcugggcaauuauacauacgguggguacauuccagaagcgccccgcgacggacaggccuauguucgaaaagauggcgagugggugcuucuguccacguuuuga

SEQ ID NO: 14841 - RNA, 3957 nt, Artificial Sequence
  MERS-CoV/England 1__YP_007188579.1 spike protein CDS human (variant)
augauccacagcguguuccugcucauguuucuucugacccccacagaguccuacgucgacguuggcccugauucugugaagucagccugcauugaaguagacauacagcaaacuuucuuugauaaaacguggccaagaccgaucgacgugaguaaggcugaugggauuaucuauccccagggaaggaccuacagcaacauuacaaucacuuaucaggguuuguucccuuaccagggcgaccauggggauauguaugucuacuccgcaggacacgccaccggcacaaccccacaaaaauuauuuguggcgaauuauucucaggacguuaagcaguucgcuaacgguuuugugguccggauaggggccgcagccaauucgacuggaacagugaucauuucacccagcaccagugcuacgauccgcaaaauuuacccugcauucaugcugggcuccucuguaggcaacuuuagcgaugggaagaugggacgauucuuuaaucauacucuaguucuccugccagacgguuguggcacccuucugcgugccuucuacugcaucuuggagcccagauccgggaaccacuguccugcuggaaauucauauacaaguuuugccacuuaccauaccccagcgacagauugcagcgacggcaacuauaauaggaacgcaucucucaauuccuucaaggaauacuucaaccugcggaauuguaccuuuauguauacguacaacauaacugaggaugaaauucuggagugguucgguaucacacagaccgcccaaggggugcaccucuuuucaagccgcuaugucgacuuauacggaggcaauauguuccaguuugcuacucugccgguguacgacacaauuaaauauuacaguaucaucccccacucuauuagauccauacagagcgauaggaaggccugggcagcuuucuauguguacaaacuucagccuuugaccuuucugcuagacuucucggucgauggcuauauccggcgcgccauugacugcggguuuaacgaucucucucaacugcauuguuccuacgagucauucgacguugaaaguggaguguauagcguauccucuuuugaggcgaagccaagcgguucaguggucgaacaggccgagggcguggagugcgauuucaguccccuucuguccgggacgccuccacagguuuacaacuuuaaacgauugguguucaccaauuguaacuacaaucucacaaagcuguuaagccuguucucugucaacgacuuuacuugcucacaaaucagucccgcagcuauagccagcaauuguuauuccucucucauucuugauuacuucucguauccgcugagcaugaaguccgacuugucagugaguucugcuggaccuaucagccaguuuaacuacaaacaguccuucucaaauccaaccugccuaauccuggccacaguaccccacaaccucacuaccauuacaaagccucugaaauauagcuacaucaauaagugcucuagauuucuuuccgaugacaggaccgaaguuccccagcuggugaacgcaaaucaauauaguccaugugucagcauugugcccucuacugucugggaggacggcgauuacuaccggaaacaguuguccccucucgaaggugggggcuggcugguggccucaggaaguacgguugcuaugacagagcaguuacagaugggcuucgggauaaccgugcaauauggaacugacaccaacagcguaugcccaaagcuggaauuugcgaaugauacaaaaaucgcaucgcagcuagguaacugugucgaguacucccucuauggcgugucugggcguggaguuuuccagaauugcaccgccgugggcguccgccagcaaagauuuguguacgacgcuuaucagaaccugguagguuacuauagcgaugacgggaacuacuacugucuuagggccugcgugucaguuccggucagugugauuuaugauaaggagacuaagacacaugcaacguuguucggcuccguggccugugaacacaucucuagcaccaugucccaguacucacggagcacucgaaguaugcugaaacgcagagacucuacauauggaccccuccagaccccugucggcugcguucuggggcuuguaaauuccagccuguuuguggaggauuguaaguugccacucggacaaucgcugugcgcuuuacccgacacaccuucaacucugaccccagccucuguggguaguguccccggcgaaaugaggcuagcauccaucgcguucaaccacccgauucagguggaucagcucaauagcucuuacuuuaaacugagcauaccuacgaacuucuccuucgggguuacccaagaguauauccagacaacuauucagaaggugaccgucgacuguaaacaguacgugugcaauggauuucaaaagugcgaacagcuuuugcgggaguauggccaguucuguucaaagaucaaccaggcucugcauggugccaaucuccgccaagaugacaguguuagaaaccuguuugcaagcgugaaaucuucccagucaaguccaauuauccccggguucggcggagacuuuaauuuaacacugcuugagccuguaagcauauccacuggcucugggucggccggaagcgcuaucgaagaucuucucuucgacaaggucaccauugccgaucccggcuacaugcaggguuacgacgauugcaugcagcaagggccagcaucagcuagggaccugaucugugcccaguauguggcgggauacaaagugcuaccuccccugauggaugucaacauggaggccgcuuauacguccagucuccugggcucuauugccgguguuggcuggacagcagggcuuagcuccuuugcugccaucccauucgcacagucaauauuuuaccguuugaauggagugggcauuacccaacagguacugucugaaaaccagaaguuaaucgcgaauaaauucaaccaggcccucggggcuaugcaaacuggauuuacaaccacuaaugaggccuuccacaaggugcaggacgcagucaacaacaaugcucaggcccugagcaaguuggcaagugaacuguccaacaccuucggcgccauuagcgcuucuaucggugauauaauccagcgguuggacccgccugagcaagaugcgcagauugaccgacucaucaaugggagacugacaacgcuaaacgccuuuguggcacagcagcugguuaggucagaguccgcugcccucagugcccaacuggcuaaagauaaggugaaugaaugcgucaaagcacagagcaagcgcucgggauucuguggccaggguacccauauugugucuuuuguugugaacgcccccaauggccuuuauuucaugcacgucggguacuauccauccaaccauaucgagguagugagcgcguacggauugugcgacgcugccaaucccacuaacuguauagcaccuguuaauggcuacuuuauuaaaacaaacaauacccggaucguggacgaauggucauauacagggaguucuuucuacgccccagagcccaucacuucccugaacaccaaguaugucgcuccucaggugacguaccaaaauauuagcacaaacuuaccgccaccccuccugggaaacucaaccggcaucgauuuucaggacgagcuugaugaguucuuuaagaauguaaguacuagcauuccuaacuucgguucccugacccagauaaauacaacucuacucgaccugaccuaugaaauguugucucugcaacagguggucaaagcauuaaacgaaagcuacaucgaucucaaggagcuggggaauuauacauacggaggcuacauuccagaagcccccagagacggucaggcguauguuaggaaagauggcgagugggugcuucuguccacguuuuga

SEQ ID NO: 14842 - RNA, 4334 nt, Artificial Sequence
  MERS-CoV/MERS-CoV-Jeddah-human-1__AHE78108.1 spike protein mRNA gc (1-1353)
aggagagucccgcagucggcguccagcggcucugcuuguucgugugugugucguugcaggccuuauucaagcuuaccaugauccacagcguguuccugcucauguuccugcugacccccaccgaguccuacgucgacgugggcccggacagcgugaaguccgccugcaucgaggucgacauccagcagacguucuucgacaagaccuggccccgccccaucgacgugagcaaggccgacgggaucaucuacccccagggccggaccuacuccaacaucaccaucacguaccagggccucuucccguaccagggggaccacggggacauguacguguacagcgcgggccacgccaccggcaccacgccccagaagcuguucgucgccaacuacucccaggacgugaagcaguucgccaacggguucgugguccgcaucggcgccgcggccaacagcaccgggaccgugaucaucucccccagcaccuccgccaccauccggaagaucuaccccgccuucaugcugggcagcuccguggggaacuucagcgacggcaagaugggccgcuucuucaaccacacgcucguccugcugccggacgggugcggcacccuccugcgggcguucuacugcauccuggagccccgcuccgggaaccacugccccgccggcaacagcuacaccuccuucgccaccuaccacacgcccgccaccgacugcagcgacggcaacuacaaccggaacgccucccucaacagcuucaaggaguacuucaaccugcgcaacugcaccuucauguacaccuacaacaucacggaggacgagauccuggagugguucgggaucacccagaccgcgcagggcgugcaccucuucagcucccgguacguggaccuguacgggggcaacauguuccaguucgccacccugccggucuacgacacgaucaaguacuacagcaucaucccccacuccauccgcagcauccaguccgaccggaaggccugggccgccuucuacguguacaagcuccagccccugaccuuccugcucgacuucagcguggacggguacauccgccgggcgaucgacugcggcuucaacgaccugucccagcugcacugcagcuacgaguccuucgacgucgagagcggcguguacuccgugagcuccuucgaggccaagcccagcggguccgucguggagcaggccgagggcguggagugcgacuucagcccgcuccuguccgggaccccgccccaggucuacaacuucaagcgccugguguucaccaacugcaacuacaaccucacgaagcugcugagccucuucuccgucaacgacuucacgugcagccagaucagccccgccgccaucgcguccaacugcuacagcucccugauccuggacuacuucagcuacccccucuccaugaaguccgaccugagcgugagcuccgccggccccaucagccaguucaacuacaagcaguccuucagcaacccgaccugccugauccucgccaccgugccccacaaccugaccaccaucaccaagccccugaaguacuccuacaucaacaagugcagccggcuccuguccgacgaccgcaccgaggucccccagcuggugaacgccaaccaguacagccccugcguguccaucguccccagcacggugugggaggacggggacuacuaccggaagcagcucagcccgcuggagggcggcggguggcugguggccuccggcagcaccgucgcgaugaccgagcagcuccagaugggguucggcaucaccgugcaguacgggaccgacacgaacuccgugugccccaagcuggaguucgccaacgacaccaagaucgccagccagcugggcaacugcgucgaguacucccucuacggcgugagcgggcgcggcguguuccagaacugcaccgccgucggggugcggcagcagcgcuucguguacgacgcguaccagaaccuggucggcuacuacuccgacgacggcaacuacuacugccugcgggccugcgugagcgugcccgucuccgugaucuacgacaaggagaccaagacgcacgccacccuguucgggagcguggccugcgagcacaucuccagcaccaugucccaguacagccgcuccacccgcagcaugcucaagcggcgcgacuccacguacggcccgcugcagacccccgucgggugcgugcugggccucgugaacagcucccuguucgucgaggacugcaagcugccccucgggcagagccugugcgcccugcccgacaccccgagcacccucacgccccgguccgugcgcagcgugcccggcgagaugcggcuggcguccaucgccuucaaccaccccauccaggucgaccagcugaacagcuccuacuucaagcucagcaucccgaccaacuucuccuucggcgugacccaggaguacauccagaccacgauccagaaggugaccgucgacugcaagcaguacgugugcaacggguuccagaagugcgagcagcugcugcgcgaguacggccaguucugcagcaagaucaaccaggcccuccacggggccaaccugcggcaggacgacuccgugcgcaaccuguucgccagcgucaaguccagccaguccagccccaucauccccggcuucgggggcgacuucaaccucacccugcuggagcccguguccaucagcaccggcucccggagcgcgcgcuccgccaucgaggaccuccuguucgacaaggugacgaucgccgacccgggguacaugcagggcuacgacgacugcaugcagcaggggcccgccagcgcccgggaccugaucugcgcgcaguacgucgccggcuacaaggugcucccgccccugauggacgugaacauggaggccgccuacaccagcucccugcucgggagcaucgcgggcgucggcuggaccgccgggcuguccagcuucgccgccauccccuucgcccaguccaucuucuaccgccugaacggcguggggaucacccagcagguccucagcgagaaccagaagcugaucgcgaacaaguucaaccaggcccugggcgccaugcagacgggguucaccaccaccaacgaggccuuccacaaggugcaggacgccgugaacaacaacgcgcaggcccucuccaagcuggccagcgagcuguccaacacguucggcgccaucagcgccuccaucggcgacaucauccagcggcucgacgugcuggagcaggacgcgcagaucgaccgccugaucaacgggcggcucaccacccugaacgccuucgucgcccagcagcuggugcgcagcgaguccgccgcgcucagcgcccagcuggccaaggacaaggugaacgagugcgucaaggcccaguccaagcggagcggcuucugcgggcagggcacccacaucguguccuucgucgugaacgcccccaacggccuguacuucaugcacgugggguacuaccccagcaaccacaucgaggucguguccgcguacggccucugcgacgccgccaaccccacgaacugcaucgccccggugaacggguacuucaucaagaccaacaacacccgcaucgucgacgaguggagcuacaccggcagcuccuucuacgcccccgagcccaucacgagccugaacaccaaguacguggcgccccaggugaccuaccagaacaucuccaccaaccugccgccgccccuccuggggaacagcaccggcaucgacuuccaggacgagcuggacgaguucuucaagaacgucuccacgagcauccccaacuucggcucccucacccagaucaacaccacccugcuggaccucacguacgagaugcugagccugcagcaggucgugaaggcccucaacgaguccuacaucgaccugaaggagcuggggaacuacaccuacuacaacaaguggcccugguacaucuggcucggcuucaucgccgggcugguggcccuggcccucugcguguucuucauccugugcugcaccggcugcgggaccaacugcaugggcaagcugaagugcaaccggugcugcgaccgcuacgaggaguacgaccucgagccccacaaggugcacguccacugaggacuagucccuguucccagagcccacuuuuuuuucuuuuuuugaaauaaaauagccugucuuucagaucucaaaggcucuuuucagagccaccaaaaaaaaaaaaaaaaaaaaaaaaaaaaaaaaaaaaaaaaaaaaaaaaaaaaaaaaaaaaaaaaaaaaaaaaaaaaaaaaaaaaaaaaaaaaaaaaaaaaa

SEQ ID NO: 14843 - RNA, 4334 nt, Artificial Sequence
  MERS-CoV/MERS-CoV-Jeddah-human-1__AHE78108.1 spike protein mRNA gc (1-1353)(V1060P_L1061P)
aggagagucccgcagucggcguccagcggcucugcuuguucgugugugugucguugcaggccuuauucaagcuuaccaugauccacagcguguuccugcucauguuccugcugacccccaccgaguccuacgucgacgugggcccggacagcgugaaguccgccugcaucgaggucgacauccagcagacguucuucgacaagaccuggccccgccccaucgacgugagcaaggccgacgggaucaucuacccccagggccggaccuacuccaacaucaccaucacguaccagggccucuucccguaccagggggaccacggggacauguacguguacagcgcgggccacgccaccggcaccacgccccagaagcuguucgucgccaacuacucccaggacgugaagcaguucgccaacggguucgugguccgcaucggcgccgcggccaacagcaccgggaccgugaucaucucccccagcaccuccgccaccauccggaagaucuaccccgccuucaugcugggcagcuccguggggaacuucagcgacggcaagaugggccgcuucuucaaccacacgcucguccugcugccggacgggugcggcacccuccugcgggcguucuacugcauccuggagccccgcuccgggaaccacugccccgccggcaacagcuacaccuccuucgccaccuaccacacgcccgccaccgacugcagcgacggcaacuacaaccggaacgccucccucaacagcuucaaggaguacuucaaccugcgcaacugcaccuucauguacaccuacaacaucacggaggacgagauccuggagugguucgggaucacccagaccgcgcagggcgugcaccucuucagcucccgguacguggaccuguacgggggcaacauguuccaguucgccacccugccggucuacgacacgaucaaguacuacagcaucaucccccacuccauccgcagcauccaguccgaccggaaggccugggccgccuucuacguguacaagcuccagccccugaccuuccugcucgacuucagcguggacggguacauccgccgggcgaucgacugcggcuucaacgaccugucccagcugcacugcagcuacgaguccuucgacgucgagagcggcguguacuccgugagcuccuucgaggccaagcccagcggguccgucguggagcaggccgagggcguggagugcgacuucagcccgcuccuguccgggaccccgccccaggucuacaacuucaagcgccugguguucaccaacugcaacuacaaccucacgaagcugcugagccucuucuccgucaacgacuucacgugcagccagaucagccccgccgccaucgcguccaacugcuacagcucccugauccuggacuacuucagcuacccccucuccaugaaguccgaccugagcgugagcuccgccggccccaucagccaguucaacuacaagcaguccuucagcaacccgaccugccugauccucgccaccgugccccacaaccugaccaccaucaccaagccccugaaguacuccuacaucaacaagugcagccggcuccuguccgacgaccgcaccgaggucccccagcuggugaacgccaaccaguacagccccugcguguccaucguccccagcacggugugggaggacggggacuacuaccggaagcagcucagcccgcuggagggcggcggguggcugguggccuccggcagcaccgucgcgaugaccgagcagcuccagaugggguucggcaucaccgugcaguacgggaccgacacgaacuccgugugccccaagcuggaguucgccaacgacaccaagaucgccagccagcugggcaacugcgucgaguacucccucuacggcgugagcgggcgcggcguguuccagaacugcaccgccgucggggugcggcagcagcgcuucguguacgacgcguaccagaaccuggucggcuacuacuccgacgacggcaacuacuacugccugcgggccugcgugagcgugcccgucuccgugaucuacgacaaggagaccaagacgcacgccacccuguucgggagcguggccugcgagcacaucuccagcaccaugucccaguacagccgcuccacccgcagcaugcucaagcggcgcgacuccacguacggcccgcugcagacccccgucgggugcgugcugggccucgugaacagcucccuguucgucgaggacugcaagcugccccucgggcagagccugugcgcccugcccgacaccccgagcacccucacgccccgguccgugcgcagcgugcccggcgagaugcggcuggcguccaucgccuucaaccaccccauccaggucgaccagcugaacagcuccuacuucaagcucagcaucccgaccaacuucuccuucggcgugacccaggaguacauccagaccacgauccagaaggugaccgucgacugcaagcaguacgugugcaacggguuccagaagugcgagcagcugcugcgcgaguacggccaguucugcagcaagaucaaccaggcccuccacggggccaaccugcggcaggacgacuccgugcgcaaccuguucgccagcgucaaguccagccaguccagccccaucauccccggcuucgggggcgacuucaaccucacccugcuggagcccguguccaucagcaccggcucccggagcgcgcgcuccgccaucgaggaccuccuguucgacaaggugacgaucgccgacccgggguacaugcagggcuacgacgacugcaugcagcaggggcccgccagcgcccgggaccugaucugcgcgcaguacgucgccggcuacaaggugcucccgccccugauggacgugaacauggaggccgccuacaccagcucccugcucgggagcaucgcgggcgucggcuggaccgccgggcuguccagcuucgccgccauccccuucgcccaguccaucuucuaccgccugaacggcguggggaucacccagcagguccucagcgagaaccagaagcugaucgcgaacaaguucaaccaggcccugggcgccaugcagacgggguucaccaccaccaacgaggccuuccacaaggugcaggacgccgugaacaacaacgcgcaggcccucuccaagcuggccagcgagcuguccaacacguucggcgccaucagcgccuccaucggcgacaucauccagcggcucgacccgcccgagcaggacgcgcagaucgaccgccugaucaacgggcggcucaccacccugaacgccuucgucgcccagcagcuggugcgcagcgaguccgccgcgcucagcgcccagcuggccaaggacaaggugaacgagugcgucaaggcccaguccaagcggagcggcuucugcgggcagggcacccacaucguguccuucgucgugaacgcccccaacggccuguacuucaugcacgugggguacuaccccagcaaccacaucgaggucguguccgcguacggccucugcgacgccgccaaccccacgaacugcaucgccccggugaacggguacuucaucaagaccaacaacacccgcaucgucgacgaguggagcuacaccggcagcuccuucuacgcccccgagcccaucacgagccugaacaccaaguacguggcgccccaggugaccuaccagaacaucuccaccaaccugccgccgccccuccuggggaacagcaccggcaucgacuuccaggacgagcuggacgaguucuucaagaacgucuccacgagcauccccaacuucggcucccucacccagaucaacaccacccugcuggaccucacguacgagaugcugagccugcagcaggucgugaaggcccucaacgaguccuacaucgaccugaaggagcuggggaacuacaccuacuacaacaaguggcccugguacaucuggcucggcuucaucgccgggcugguggcccuggcccucugcguguucuucauccugugcugcaccggcugcgggaccaacugcaugggcaagcugaagugcaaccggugcugcgaccgcuacgaggaguacgaccucgagccccacaaggugcacguccacugaggacuagucccuguucccagagcccacuuuuuuuucuuuuuuugaaauaaaauagccugucuuucagaucucaaaggcucuuuucagagccaccaaaaaaaaaaaaaaaaaaaaaaaaaaaaaaaaaaaaaaaaaaaaaaaaaaaaaaaaaaaaaaaaaaaaaaaaaaaaaaaaaaaaaaaaaaaaaaaaaaaaa

SEQ ID NO: 14844 - RNA, 4334 nt, Artificial Sequence
  MERS-CoV/Al-Hasa_4_2013__AGN70929.1 spike protein mRNA gc (1-1353)
aggagagucccgcagucggcguccagcggcucugcuuguucgugugugugucguugcaggccuuauucaagcuuaccaugauccacagcguguuccugcucauguuccugcugacccccaccgaguccuacgucgacgugggcccggacagcgugaaguccgccugcaucgaggucgacauccagcagacguucuucgacaagaccuggccccgccccaucgacgugagcaaggccgacgggaucaucuacccccagggccggaccuacuccaacaucaccaucacguaccagggccucuucccguaccagggcgaccacggggacauguacguguacagcgcgggccacgccaccggcaccacgccccagaagcuguucgucgccaacuacucccaggacgugaagcaguucgccaacggguucgugguccgcaucggcgccgcggccaacagcaccgggaccgugaucaucucccccagcaccuccgccaccauccggaagaucuaccccgccuucaugcugggcagcuccguggggaacuucagcgacggcaagaugggccgcuucuucaaccacacgcucguccugcugccggacgggugcggcacccuccugcgggcguucuacugcauccuggagccccgcuccgggaaccacugccccgccggcaacagcuacaccuccuucgccaccuaccacacgcccgccaccgacugcagcgacggcaacuacaaccggaacgccucccucaacagcuucaaggaguacuucaaccugcgcaacugcaccuucauguacaccuacaacaucacggaggacgagauccuggagugguucgggaucacccagaccgcgcagggcgugcaccucuucagcucccgguacguggaccuguacgggggcaacauguuccaguucgccacccugccggucuacgacacgaucaaguacuacagcaucaucccccacuccauccgcagcauccaguccgaccggaaggccugggccgccuucuacguguacaagcuccagccccugaccuuccugcucgacuucagcguggacggguacauccgccgggcgaucgacugcggcuucaacgaccugucccagcugcacugcagcuacgaguccuucgacgucgagagcggcguguacuccgugagcuccuucgaggccaagcccagcggguccgucguggagcaggccgagggcguggagugcgacuucagcccgcuccuguccgggaccccgccccaggucuacaacuucaagcgccugguguucaccaacugcaacuacaaccucacgaagcugcugagccucuucuccgucaacgacuucacgugcagccagaucagccccgccgccaucgcguccaacugcuacagcucccugauccuggacuacuucagcuacccccucuccaugaaguccgaccugagcgugagcuccgccgggcccaucagccaguucaacuacaagcaguccuucagcaacccgaccugccugauccucgccaccgugccccacaaccugaccaccaucaccaagccccugaaguacuccuacaucaacaagugcagccggcuccuguccgacgaccgcaccgaggucccccagcuggugaacgccaaccaguacagccccugcguguccaucguccccagcacggugugggaggacggggacuacuaccggaagcagcucagcccgcuggagggcggcggguggcugguggccuccggcagcaccgucgcgaugaccgagcagcuccagaugggguucggcaucaccgugcaguacgggaccgacacgaacuccgugugccccaagcuggaguucgccaacgacaccaagaucgccagccagcugggcaacugcgucgaguacucccuguacggcgugagcgggcgcggcguguuccagaacugcaccgccgucggggugcggcagcagcgcuucguguacgacgcguaccagaaccucgucggcuacuacuccgacgacggcaacuacuacugccugcgggccugcgugagcgugcccgucuccgugaucuacgacaaggagaccaagacgcacgccacccuguucgggagcguggccugcgagcacaucuccagcaccaugucccaguacagccgcuccacccgcagcaugcucaagcggcgcgacuccacguacggcccgcugcagacccccgucgggugcgugcugggccucgugaacagcucccuguucgucgaggacugcaagcugccccucgggcagagccugugcgcccugcccgacaccccgagcacccucacgccccgguccgugcgcagcgugcccggcgagaugcggcuggcguccaucgccuucaaccaccccauccaggucgaccagcugaacagcuccuacuucaagcucagcaucccgaccaacuucuccuucggcgugacccaggaguacauccagaccacgauccagaaggugaccgucgacugcaagcaguacgugugcaacggguuccagaagugcgagcagcugcugcgcgaguacggccaguucugcagcaagaucaaccaggcccuccacggggccaaccugcggcaggacgacuccgugcgcaaccuguucgccagcgucaaguccagccaguccagccccaucauccccggcuucgggggcgacuucaaccucacccugcuggagcccguguccaucagcaccggcucccggagcgcgcgcuccgccaucgaggaccuccuguucgacaaggugacgaucgccgacccgggguacaugcagggcuacgacgacugcaugcagcaggggcccgccagcgcccgggaccugaucugcgcgcaguacgucgccggcuacaaggugcucccgccccugauggacgugaacauggaggccgccuacaccagcucccugcucgggagcaucgcgggcgucggcuggaccgccgggcuguccagcuucgccgccauccccuucgcccaguccaucuucuaccgccugaacggcguggggaucacccagcagguccucagcgagaaccagaagcugaucgcgaacaaguucaaccaggcccugggcgccaugcagacgggguucaccaccaccaacgaggccuuccggaaggugcaggacgccgugaacaacaacgcgcaggcccucuccaagcuggccagcgagcuguccaacacguucggcgccaucagcgccuccaucggcgacaucauccagcgccucgacgugcuggagcaggacgcgcagaucgaccggcugaucaacgggcgccucaccacccugaacgccuucgucgcccagcagcuggugcggagcgaguccgccgcgcucagcgcccagcuggccaaggacaaggugaacgagugcgucaaggcccaguccaagcgcagcggcuucugcgggcagggcacccacaucguguccuucgucgugaacgcccccaacggccuguacuucaugcacgugggguacuaccccagcaaccacaucgaggucguguccgcguacggccucugcgacgccgccaaccccacgaacugcaucgccccggugaacggguacuucaucaagaccaacaacacccggaucgucgacgaguggagcuacaccggcagcuccuucuacgcccccgagcccaucacgagccugaacaccaaguacguggcgccccacgugaccuaccagaacaucuccaccaaccugccgccgccccuccuggggaacagcaccggcaucgacuuccaggacgagcuggacgaguucuucaagaacgucuccacgagcauccccaacuucggcucccucacccagaucaacaccacccugcuggaccucacguacgagaugcugagccugcagcaggucgugaaggcccucaacgaguccuacaucgaccugaaggagcuggggaacuacaccuacuacaacaaguggcccugguacaucuggcucggcuucaucgccgggcugguggcccuggcccucugcguguucuucauccugugcugcaccggcugcgggaccaacugcaugggcaagcugaagugcaaccgcugcugcgaccgcuacgaggaguacgaccucgagccccacaaggugcacguccacugaggacuagucccuguucccagagcccacuuuuuuuucuuuuuuugaaauaaaauagccugucuuucagaucucaaaggcucuuuucagagccaccaaaaaaaaaaaaaaaaaaaaaaaaaaaaaaaaaaaaaaaaaaaaaaaaaaaaaaaaaaaaaaaaaaaaaaaaaaaaaaaaaaaaaaaaaaaaaaaaaaaaa

SEQ ID NO: 14845 - RNA, 4334 nt, Artificial Sequence
  MERS-CoV/Al-Hasa_4_2013__AGN70929.1 spike protein mRNA gc (1-1353)(V1060P_L1061P)
aggagagucccgcagucggcguccagcggcucugcuuguucgugugugugucguugcaggccuuauucaagcuuaccaugauccacagcguguuccugcucauguuccugcugacccccaccgaguccuacgucgacgugggcccggacagcgugaaguccgccugcaucgaggucgacauccagcagacguucuucgacaagaccuggccccgccccaucgacgugagcaaggccgacgggaucaucuacccccagggccggaccuacuccaacaucaccaucacguaccagggccucuucccguaccagggcgaccacggggacauguacguguacagcgcgggccacgccaccggcaccacgccccagaagcuguucgucgccaacuacucccaggacgugaagcaguucgccaacggguucgugguccgcaucggcgccgcggccaacagcaccgggaccgugaucaucucccccagcaccuccgccaccauccggaagaucuaccccgccuucaugcugggcagcuccguggggaacuucagcgacggcaagaugggccgcuucuucaaccacacgcucguccugcugccggacgggugcggcacccuccugcgggcguucuacugcauccuggagccccgcuccgggaaccacugccccgccggcaacagcuacaccuccuucgccaccuaccacacgcccgccaccgacugcagcgacggcaacuacaaccggaacgccucccucaacagcuucaaggaguacuucaaccugcgcaacugcaccuucauguacaccuacaacaucacggaggacgagauccuggagugguucgggaucacccagaccgcgcagggcgugcaccucuucagcucccgguacguggaccuguacgggggcaacauguuccaguucgccacccugccggucuacgacacgaucaaguacuacagcaucaucccccacuccauccgcagcauccaguccgaccggaaggccugggccgccuucuacguguacaagcuccagccccugaccuuccugcucgacuucagcguggacggguacauccgccgggcgaucgacugcggcuucaacgaccugucccagcugcacugcagcuacgaguccuucgacgucgagagcggcguguacuccgugagcuccuucgaggccaagcccagcggguccgucguggagcaggccgagggcguggagugcgacuucagcccgcuccuguccgggaccccgccccaggucuacaacuucaagcgccugguguucaccaacugcaacuacaaccucacgaagcugcugagccucuucuccgucaacgacuucacgugcagccagaucagccccgccgccaucgcguccaacugcuacagcucccugauccuggacuacuucagcuacccccucuccaugaaguccgaccugagcgugagcuccgccgggcccaucagccaguucaacuacaagcaguccuucagcaacccgaccugccugauccucgccaccgugccccacaaccugaccaccaucaccaagccccugaaguacuccuacaucaacaagugcagccggcuccuguccgacgaccgcaccgaggucccccagcuggugaacgccaaccaguacagccccugcguguccaucguccccagcacggugugggaggacggggacuacuaccggaagcagcucagcccgcuggagggcggcggguggcugguggccuccggcagcaccgucgcgaugaccgagcagcuccagaugggguucggcaucaccgugcaguacgggaccgacacgaacuccgugugccccaagcuggaguucgccaacgacaccaagaucgccagccagcugggcaacugcgucgaguacucccuguacggcgugagcgggcgcggcguguuccagaacugcaccgccgucggggugcggcagcagcgcuucguguacgacgcguaccagaaccucgucggcuacuacuccgacgacggcaacuacuacugccugcgggccugcgugagcgugcccgucuccgugaucuacgacaaggagaccaagacgcacgccacccuguucgggagcguggccugcgagcacaucuccagcaccaugucccaguacagccgcuccacccgcagcaugcucaagcggcgcgacuccacguacggcccgcugcagacccccgucgggugcgugcugggccucgugaacagcucccuguucgucgaggacugcaagcugccccucgggcagagccugugcgcccugcccgacaccccgagcacccucacgccccgguccgugcgcagcgugcccggcgagaugcggcuggcguccaucgccuucaaccaccccauccaggucgaccagcugaacagcuccuacuucaagcucagcaucccgaccaacuucuccuucggcgugacccaggaguacauccagaccacgauccagaaggugaccgucgacugcaagcaguacgugugcaacggguuccagaagugcgagcagcugcugcgcgaguacggccaguucugcagcaagaucaaccaggcccuccacggggccaaccugcggcaggacgacuccgugcgcaaccuguucgccagcgucaaguccagccaguccagccccaucauccccggcuucgggggcgacuucaaccucacccugcuggagcccguguccaucagcaccggcucccggagcgcgcgcuccgccaucgaggaccuccuguucgacaaggugacgaucgccgacccgggguacaugcagggcuacgacgacugcaugcagcaggggcccgccagcgcccgggaccugaucugcgcgcaguacgucgccggcuacaaggugcucccgccccugauggacgugaacauggaggccgccuacaccagcucccugcucgggagcaucgcgggcgucggcuggaccgccgggcuguccagcuucgccgccauccccuucgcccaguccaucuucuaccgccugaacggcguggggaucacccagcagguccucagcgagaaccagaagcugaucgcgaacaaguucaaccaggcccugggcgccaugcagacgggguucaccaccaccaacgaggccuuccggaaggugcaggacgccgugaacaacaacgcgcaggcccucuccaagcuggccagcgagcuguccaacacguucggcgccaucagcgccuccaucggcgacaucauccagcgccucgacccgcccgagcaggacgcgcagaucgaccggcugaucaacgggcgccugaccacccucaacgccuucguggcccagcagcugguccggagcgaguccgccgcgcugagcgcccagcucgccaaggacaaggugaacgagugcgugaaggcccaguccaagcgcagcggcuucugcgggcagggcacccacaucgucuccuucguggucaacgcccccaacggccuguacuucaugcacgugggguacuaccccagcaaccacaucgagguggucuccgcguacggccugugcgacgccgccaaccccacgaacugcaucgcccccgugaacggguacuucaucaagaccaacaacacccggaucguggacgaguggagcuacaccggcagcuccuucuacgcccccgagccgaucacgagccucaacaccaaguacgucgcgccccacgugaccuaccagaacaucuccaccaaccugcccccgccccugcucgggaacagcaccggcaucgacuuccaggacgagcuggacgaguucuucaagaacguguccacgagcauccccaacuucggcucccugacccagaucaacaccacccuccuggaccugacguacgagaugcucagccugcagcaggucgugaaggcccugaacgaguccuacaucgaccucaaggagcuggggaacuacaccuacuacaacaaguggcccugguacaucuggcugggcuucaucgccgggcucguggcccuggcccugugcgucuucuucauccucugcugcaccggcugcgggaccaacugcaugggcaagcugaagugcaaccgcugcugcgaccgcuacgaggaguacgaccuggagccgcacaaggugcacgugcacugaggacuagucccuguucccagagcccacuuuuuuuucuuuuuuugaaauaaaauagccugucuuucagaucucaaaggcucuuuucagagccaccaaaaaaaaaaaaaaaaaaaaaaaaaaaaaaaaaaaaaaaaaaaaaaaaaaaaaaaaaaaaaaaaaaaaaaaaaaaaaaaaaaaaaaaaaaaaaaaaaaaaa

SEQ ID NO: 14846 - RNA, 4334 nt, Artificial Sequence
  MERS-CoV/Riyadh_14_2013__AHI48572.1 spike protein mRNA gc (1-1353)
aggagagucccgcagucggcguccagcggcucugcuuguucgugugugugucguugcaggccuuauucaagcuuaccaugauccacagcguguuccugcucauguuccugcugacccccaccgaguccuacgucgacgugggcccggacagcgugaaguccgccugcaucgaggucgacauccagcagacguucuucgacaagaccuggccccgccccaucgacgugagcaaggccgacgggaucaucuacccccagggccggaccuacuccaacaucaccaucacguaccagggccucuucccguaccagggcgaccacggggacauguacguguacagcgcgggccacgccaccggcaccacgccccagaagcuguucgucgccaacuacucccaggacgugaagcaguucgccaacggguucgugguccgcaucggcgccgcggccaacagcaccgggaccgugaucaucucccccagcaccuccgccaccauccggaagaucuaccccgccuucaugcugggcagcuccguggggaacuucagcgacggcaagaugggccgcuucuucaaccacacgcucguccugcugccggacgggugcggcacccuccugcgggcguucuacugcauccuggagccccgcuccgggaaccacugccccgccggcaacagcuacaccuccuucgccaccuaccacacgcccgccaccgacugcagcgacggcaacuacaaccggaacgccucccucaacagcuucaaggaguacuucaaccugcgcaacugcaccuucauguacaccuacaacaucacggaggacgagauccuggagugguucgggaucacccagaccgcgcagggcgugcaccucuucagcucccgguacguggaccuguacgggggcaacauguuccaguucgccacccugccggucuacgacacgaucaaguacuacagcaucaucccccacuccauccgcagcauccaguccgaccggaaggccugggccgccuucuacguguacaagcuccagccccugaccuuccugcucgacuucagcguggacggguacauccgccgggcgaucgacugcggcuucaacgaccugucccagcugcacugcagcuacgaguccuucgacgucgagagcggcguguacuccgugagcuccuucgaggccaagcccagcggguccgucguggagcaggccgagggcguggagugcgacuucagcccgcuccuguccgggaccccgccccaggucuacaacuucaagcgccugguguucaccaacugcaacuacaaccucacgaagcugcugagccucuucuccgucaacgacuucacgugcagccagaucagccccgccgccaucgcguccaacugcuacagcucccugauccuggacuacuucagcuacccccucuccaugaaguccgaccugagcgugagcuccgccgggcccaucagccaguucaacuacaagcaguccuucagcaacccgaccugccugauccucgccaccgugccccacaaccugaccaccaucaccaagccccugaaguacuccuacaucaacaagugcagccggcuccuguccgacgaccgcaccgaggucccccagcuggugaacgccaaccaguacagccccugcguguccaucguccccagcacggugugggaggacggggacuacuaccggaagcagcucagcccgcuggagggcggcggguggcugguggccuccggcagcaccgucgcgaugaccgagcagcuccagaugggguucggcaucaccgugcaguacgggaccgacacgaacuccgugugccccaagcuggaguucgccaacgacaccaagaucgccagccagcugggcaacugcgucgaguacucccuguacggcgugagcgggcgcggcguguuccagaacugcaccgccgucggggugcggcagcagcgcuucguguacgacgcguaccagaaccucgucggcuacuacuccgacgacggcaacuacuacugccugcgggccugcgugagcgugcccgucuccgugaucuacgacaaggagaccaagacgcacgccacccuguucgggagcguggccugcgagcacaucuccagcaccaugucccaguacagccgcuccacccgcagcaugcucaagcggcgcgacuccacguacggcccgcugcagacccccgucgggugcgugcugggccucgugaacagcucccuguucgucgaggacugcaagcugccccucgggcagagccugugcgcccugcccgacaccccgagcacccucacgccccgguccgugcgcagcgugcccggcgagaugcggcuggcguccaucgccuucaaccaccccauccaggucgaccagcugaacagcuccuacuucaagcucagcaucccgaccaacuucuccuucggcgugacccaggaguacauccagaccacgauccagaaggugaccgucgacugcaagcaguacgugugcaacggguuccagaagugcgagcagcugcugcgcgaguacggccaguucugcagcaagaucaaccaggcccuccacggggccaaccugcggcaggacgacuccgugcgcaaccuguucgccagcgucaaguccagccaguccagccccaucauccccggcuucgggggcgacuucaaccucacccugcuggagcccguguccaucagcaccggcucccggagcgcgcgcuccgccaucgaggaccuccuguucgacaaggugacgaucgccgacccgggguacaugcagggcuacgacgacugcaugcagcaggggcccgccagcgcccgggaccugaucugcgcgcaguacgucgccggcuacaaggugcucccgccccugauggacgugaacauggaggccgccuacaccagcucccugcucgggagcaucgcgggcgucggcuggaccgccgggcuguccagcuucgccgccauccccuucgcccaguccaucuucuaccgccugaacggcguggggaucacccagcagguccucagcgagaaccagaagcugaucgcgaacaaguucaaccaggcccugggcgccaugcagacgggguucaccaccaccaacgaggccuuccggaaggugcaggacgccgugaacaacaacgcgcaggcccucuccaagcuggccagcgagcuguccaacacguucggcgccaucagcgccuccaucggcgacaucauccagcgccucgacgugcuggagcaggacgcgcagaucgaccggcugaucaacgggcgccucaccacccugaacgccuucgucgcccagcagcuggugcggagcgaguccgccgcgcucagcgcccagcuggccaaggacaaggugaacgagugcgucaaggcccaguccaagcgcagcggcuucugcgggcagggcacccacaucguguccuucgucgugaacgcccccaacggccuguacuucaugcacgugggguacuaccccagcaaccacaucgaggucguguccgcguacggccucugcgacgccgccaaccccacgaacugcaucgccccggugaacggguacuucaucaagaccaacaacacccggaucgucgacgaguggagcuacaccggcagcuccuucuacgcccccgagcccaucacgagccugaacaccaaguacguggcgccccaggugaccuaccagaacaucuccaccaaccugccgccgccccuccuggggaacagcaccggcaucgacuuccaggacgagcuggacgaguucuucaagaacgucuccacgagcauccccaacuucggcucccucacccagaucaacaccacccugcuggaccucacguacgagaugcugagccugcagcaggucgugaaggcccucaacgaguccuacaucgaccugaaggagcuggggaacuacaccuacuacaacaaguggcccugguacaucuggcucggcuucaucgccgggcugguggcccuggcccucugcguguucuucauccugugcugcaccggcugcgggaccaacugcaugggcaagcugaagugcaaccgcugcugcgaccgcuacgaggaguacgaccucgagccccacaaggugcacguccacugaggacuagucccuguucccagagcccacuuuuuuuucuuuuuuugaaauaaaauagccugucuuucagaucucaaaggcucuuuucagagccaccaaaaaaaaaaaaaaaaaaaaaaaaaaaaaaaaaaaaaaaaaaaaaaaaaaaaaaaaaaaaaaaaaaaaaaaaaaaaaaaaaaaaaaaaaaaaaaaaaaaaa

SEQ ID NO: 14847 - RNA, 4334 nt, Artificial Sequence
  MERS-CoV/Riyadh_14_2013__AHI48572.1 spike protein mRNA gc (1-1353)(V1060P_L1061P)
aggagagucccgcagucggcguccagcggcucugcuuguucgugugugugucguugcaggccuuauucaagcuuaccaugauccacagcguguuccugcucauguuccugcugacccccaccgaguccuacgucgacgugggcccggacagcgugaaguccgccugcaucgaggucgacauccagcagacguucuucgacaagaccuggccccgccccaucgacgugagcaaggccgacgggaucaucuacccccagggccggaccuacuccaacaucaccaucacguaccagggccucuucccguaccagggcgaccacggggacauguacguguacagcgcgggccacgccaccggcaccacgccccagaagcuguucgucgccaacuacucccaggacgugaagcaguucgccaacggguucgugguccgcaucggcgccgcggccaacagcaccgggaccgugaucaucucccccagcaccuccgccaccauccggaagaucuaccccgccuucaugcugggcagcuccguggggaacuucagcgacggcaagaugggccgcuucuucaaccacacgcucguccugcugccggacgggugcggcacccuccugcgggcguucuacugcauccuggagccccgcuccgggaaccacugccccgccggcaacagcuacaccuccuucgccaccuaccacacgcccgccaccgacugcagcgacggcaacuacaaccggaacgccucccucaacagcuucaaggaguacuucaaccugcgcaacugcaccuucauguacaccuacaacaucacggaggacgagauccuggagugguucgggaucacccagaccgcgcagggcgugcaccucuucagcucccgguacguggaccuguacgggggcaacauguuccaguucgccacccugccggucuacgacacgaucaaguacuacagcaucaucccccacuccauccgcagcauccaguccgaccggaaggccugggccgccuucuacguguacaagcuccagccccugaccuuccugcucgacuucagcguggacggguacauccgccgggcgaucgacugcggcuucaacgaccugucccagcugcacugcagcuacgaguccuucgacgucgagagcggcguguacuccgugagcuccuucgaggccaagcccagcggguccgucguggagcaggccgagggcguggagugcgacuucagcccgcuccuguccgggaccccgccccaggucuacaacuucaagcgccugguguucaccaacugcaacuacaaccucacgaagcugcugagccucuucuccgucaacgacuucacgugcagccagaucagccccgccgccaucgcguccaacugcuacagcucccugauccuggacuacuucagcuacccccucuccaugaaguccgaccugagcgugagcuccgccgggcccaucagccaguucaacuacaagcaguccuucagcaacccgaccugccugauccucgccaccgugccccacaaccugaccaccaucaccaagccccugaaguacuccuacaucaacaagugcagccggcuccuguccgacgaccgcaccgaggucccccagcuggugaacgccaaccaguacagccccugcguguccaucguccccagcacggugugggaggacggggacuacuaccggaagcagcucagcccgcuggagggcggcggguggcugguggccuccggcagcaccgucgcgaugaccgagcagcuccagaugggguucggcaucaccgugcaguacgggaccgacacgaacuccgugugccccaagcuggaguucgccaacgacaccaagaucgccagccagcugggcaacugcgucgaguacucccuguacggcgugagcgggcgcggcguguuccagaacugcaccgccgucggggugcggcagcagcgcuucguguacgacgcguaccagaaccucgucggcuacuacuccgacgacggcaacuacuacugccugcgggccugcgugagcgugcccgucuccgugaucuacgacaaggagaccaagacgcacgccacccuguucgggagcguggccugcgagcacaucuccagcaccaugucccaguacagccgcuccacccgcagcaugcucaagcggcgcgacuccacguacggcccgcugcagacccccgucgggugcgugcugggccucgugaacagcucccuguucgucgaggacugcaagcugccccucgggcagagccugugcgcccugcccgacaccccgagcacccucacgccccgguccgugcgcagcgugcccggcgagaugcggcuggcguccaucgccuucaaccaccccauccaggucgaccagcugaacagcuccuacuucaagcucagcaucccgaccaacuucuccuucggcgugacccaggaguacauccagaccacgauccagaaggugaccgucgacugcaagcaguacgugugcaacggguuccagaagugcgagcagcugcugcgcgaguacggccaguucugcagcaagaucaaccaggcccuccacggggccaaccugcggcaggacgacuccgugcgcaaccuguucgccagcgucaaguccagccaguccagccccaucauccccggcuucgggggcgacuucaaccucacccugcuggagcccguguccaucagcaccggcucccggagcgcgcgcuccgccaucgaggaccuccuguucgacaaggugacgaucgccgacccgggguacaugcagggcuacgacgacugcaugcagcaggggcccgccagcgcccgggaccugaucugcgcgcaguacgucgccggcuacaaggugcucccgccccugauggacgugaacauggaggccgccuacaccagcucccugcucgggagcaucgcgggcgucggcuggaccgccgggcuguccagcuucgccgccauccccuucgcccaguccaucuucuaccgccugaacggcguggggaucacccagcagguccucagcgagaaccagaagcugaucgcgaacaaguucaaccaggcccugggcgccaugcagacgggguucaccaccaccaacgaggccuuccggaaggugcaggacgccgugaacaacaacgcgcaggcccucuccaagcuggccagcgagcuguccaacacguucggcgccaucagcgccuccaucggcgacaucauccagcgccucgacccgcccgagcaggacgcgcagaucgaccggcugaucaacgggcgccugaccacccucaacgccuucguggcccagcagcugguccggagcgaguccgccgcgcugagcgcccagcucgccaaggacaaggugaacgagugcgugaaggcccaguccaagcgcagcggcuucugcgggcagggcacccacaucgucuccuucguggucaacgcccccaacggccuguacuucaugcacgugggguacuaccccagcaaccacaucgagguggucuccgcguacggccugugcgacgccgccaaccccacgaacugcaucgcccccgugaacggguacuucaucaagaccaacaacacccggaucguggacgaguggagcuacaccggcagcuccuucuacgcccccgagccgaucacgagccucaacaccaaguacgucgcgccccaggugaccuaccagaacaucuccaccaaccugcccccgccccugcucgggaacagcaccggcaucgacuuccaggacgagcuggacgaguucuucaagaacguguccacgagcauccccaacuucggcucccugacccagaucaacaccacccuccuggaccugacguacgagaugcucagccugcagcaggucgugaaggcccugaacgaguccuacaucgaccucaaggagcuggggaacuacaccuacuacaacaaguggcccugguacaucuggcugggcuucaucgccgggcucguggcccuggcccugugcgucuucuucauccucugcugcaccggcugcgggaccaacugcaugggcaagcugaagugcaaccgcugcugcgaccgcuacgaggaguacgaccuggagccgcacaaggugcacgugcacugaggacuagucccuguucccagagcccacuuuuuuuucuuuuuuugaaauaaaauagccugucuuucagaucucaaaggcucuuuucagagccaccaaaaaaaaaaaaaaaaaaaaaaaaaaaaaaaaaaaaaaaaaaaaaaaaaaaaaaaaaaaaaaaaaaaaaaaaaaaaaaaaaaaaaaaaaaaaaaaaaaaaa

SEQ ID NO: 14848 - RNA, 4334 nt, Artificial Sequence
  MERS-CoV/Riyadh_14_2013__AHI48572.1 spike protein mRNA gc (1-1353)(R1020Q)
aggagagucccgcagucggcguccagcggcucugcuuguucgugugugugucguugcaggccuuauucaagcuuaccaugauccacagcguguuccugcucauguuccugcugacccccaccgaguccuacgucgacgugggcccggacagcgugaaguccgccugcaucgaggucgacauccagcagacguucuucgacaagaccuggccccgccccaucgacgugagcaaggccgacgggaucaucuacccccagggccggaccuacuccaacaucaccaucacguaccagggccucuucccguaccagggcgaccacggggacauguacguguacagcgcgggccacgccaccggcaccacgccccagaagcuguucgucgccaacuacucccaggacgugaagcaguucgccaacggguucgugguccgcaucggcgccgcggccaacagcaccgggaccgugaucaucucccccagcaccuccgccaccauccggaagaucuaccccgccuucaugcugggcagcuccguggggaacuucagcgacggcaagaugggccgcuucuucaaccacacgcucguccugcugccggacgggugcggcacccuccugcgggcguucuacugcauccuggagccccgcuccgggaaccacugccccgccggcaacagcuacaccuccuucgccaccuaccacacgcccgccaccgacugcagcgacggcaacuacaaccggaacgccucccucaacagcuucaaggaguacuucaaccugcgcaacugcaccuucauguacaccuacaacaucacggaggacgagauccuggagugguucgggaucacccagaccgcgcagggcgugcaccucuucagcucccgguacguggaccuguacgggggcaacauguuccaguucgccacccugccggucuacgacacgaucaaguacuacagcaucaucccccacuccauccgcagcauccaguccgaccggaaggccugggccgccuucuacguguacaagcuccagccccugaccuuccugcucgacuucagcguggacggguacauccgccgggcgaucgacugcggcuucaacgaccugucccagcugcacugcagcuacgaguccuucgacgucgagagcggcguguacuccgugagcuccuucgaggccaagcccagcggguccgucguggagcaggccgagggcguggagugcgacuucagcccgcuccuguccgggaccccgccccaggucuacaacuucaagcgccugguguucaccaacugcaacuacaaccucacgaagcugcugagccucuucuccgucaacgacuucacgugcagccagaucagccccgccgccaucgcguccaacugcuacagcucccugauccuggacuacuucagcuacccccucuccaugaaguccgaccugagcgugagcuccgccgggcccaucagccaguucaacuacaagcaguccuucagcaacccgaccugccugauccucgccaccgugccccacaaccugaccaccaucaccaagccccugaaguacuccuacaucaacaagugcagccggcuccuguccgacgaccgcaccgaggucccccagcuggugaacgccaaccaguacagccccugcguguccaucguccccagcacggugugggaggacggggacuacuaccggaagcagcucagcccgcuggagggcggcggguggcugguggccuccggcagcaccgucgcgaugaccgagcagcuccagaugggguucggcaucaccgugcaguacgggaccgacacgaacuccgugugccccaagcuggaguucgccaacgacaccaagaucgccagccagcugggcaacugcgucgaguacucccuguacggcgugagcgggcgcggcguguuccagaacugcaccgccgucggggugcggcagcagcgcuucguguacgacgcguaccagaaccucgucggcuacuacuccgacgacggcaacuacuacugccugcgggccugcgugagcgugcccgucuccgugaucuacgacaaggagaccaagacgcacgccacccuguucgggagcguggccugcgagcacaucuccagcaccaugucccaguacagccgcuccacccgcagcaugcucaagcggcgcgacuccacguacggcccgcugcagacccccgucgggugcgugcugggccucgugaacagcucccuguucgucgaggacugcaagcugccccucgggcagagccugugcgcccugcccgacaccccgagcacccucacgccccgguccgugcgcagcgugcccggcgagaugcggcuggcguccaucgccuucaaccaccccauccaggucgaccagcugaacagcuccuacuucaagcucagcaucccgaccaacuucuccuucggcgugacccaggaguacauccagaccacgauccagaaggugaccgucgacugcaagcaguacgugugcaacggguuccagaagugcgagcagcugcugcgcgaguacggccaguucugcagcaagaucaaccaggcccuccacggggccaaccugcggcaggacgacuccgugcgcaaccuguucgccagcgucaaguccagccaguccagccccaucauccccggcuucgggggcgacuucaaccucacccugcuggagcccguguccaucagcaccggcucccggagcgcgcgcuccgccaucgaggaccuccuguucgacaaggugacgaucgccgacccgggguacaugcagggcuacgacgacugcaugcagcaggggcccgccagcgcccgggaccugaucugcgcgcaguacgucgccggcuacaaggugcucccgccccugauggacgugaacauggaggccgccuacaccagcucccugcucgggagcaucgcgggcgucggcuggaccgccgggcuguccagcuucgccgccauccccuucgcccaguccaucuucuaccgccugaacggcguggggaucacccagcagguccucagcgagaaccagaagcugaucgcgaacaaguucaaccaggcccugggcgccaugcagacgggguucaccaccaccaacgaggccuuccagaaggugcaggacgccgugaacaacaacgcgcaggcccucuccaagcuggccagcgagcuguccaacacguucggcgccaucagcgccuccaucggcgacaucauccagcggcucgacgugcuggagcaggacgcgcagaucgaccgccugaucaacgggcggcucaccacccugaacgccuucgucgcccagcagcuggugcgcagcgaguccgccgcgcucagcgcccagcuggccaaggacaaggugaacgagugcgucaaggcccaguccaagcggagcggcuucugcgggcagggcacccacaucguguccuucgucgugaacgcccccaacggccuguacuucaugcacgugggguacuaccccagcaaccacaucgaggucguguccgcguacggccucugcgacgccgccaaccccacgaacugcaucgccccggugaacggguacuucaucaagaccaacaacacccgcaucgucgacgaguggagcuacaccggcagcuccuucuacgcccccgagcccaucacgagccugaacaccaaguacguggcgccccaggugaccuaccagaacaucuccaccaaccugccgccgccccuccuggggaacagcaccggcaucgacuuccaggacgagcuggacgaguucuucaagaacgucuccacgagcauccccaacuucggcucccucacccagaucaacaccacccugcuggaccucacguacgagaugcugagccugcagcaggucgugaaggcccucaacgaguccuacaucgaccugaaggagcuggggaacuacaccuacuacaacaaguggcccugguacaucuggcucggcuucaucgccgggcugguggcccuggcccucugcguguucuucauccugugcugcaccggcugcgggaccaacugcaugggcaagcugaagugcaaccggugcugcgaccgcuacgaggaguacgaccucgagccccacaaggugcacguccacugaggacuagucccuguucccagagcccacuuuuuuuucuuuuuuugaaauaaaauagccugucuuucagaucucaaaggcucuuuucagagccaccaaaaaaaaaaaaaaaaaaaaaaaaaaaaaaaaaaaaaaaaaaaaaaaaaaaaaaaaaaaaaaaaaaaaaaaaaaaaaaaaaaaaaaaaaaaaaaaaaaaaa

SEQ ID NO: 14849 - RNA, 2039 nt, Artificial Sequence
  MERS-CoV/Riyadh_14_2013__AHI48572.1 spike protein mRNA gc (1-17_726-1296)(R1020Q)
aggagagucccgcagucggcguccagcggcucugcuuguucgugugugugucguugcaggccuuauucaagcuuaccaugauccacagcguguuccugcucauguuccugcugacccccaccgaguccgacugcaagcucccccugggccagagccugugcgcccuccccgacacgcccuccacccugacgccccgcagcguccgguccgugccgggggagaugcgccuggccagcaucgcguucaaccaccccauccagguggaccagcucaacuccagcuacuucaagcuguccauccccaccaacuucagcuucggcgucacccaggaguacauccagaccaccauccagaaggugaccguggacugcaagcaguacgucugcaacggguuccagaagugcgagcagcugcuccgggaguacggccaguucugcuccaagaucaaccaggcccugcacggggccaaccugcgccaggacgacagcgugcggaaccucuucgccuccgucaagagcucccagagcucccccaucaucccgggcuucggcggggacuucaaccugacgcugcucgagcccgugagcaucuccaccggcagccgcagcgcccgguccgcgaucgaggaccugcuguucgacaaggugaccaucgccgaccccggguacaugcagggcuacgacgacugcaugcagcaggggcccgccagcgcccgcgaccucaucugcgcgcaguacguggccggcuacaagguccugccgccccugauggacgugaacauggaggccgccuacaccuccagccuccugggcuccaucgccggggugggcuggacggcggggcugagcuccuucgccgccauccccuucgcccagagcaucuucuaccggcucaacggcgucggcaucacccagcagguccuguccgagaaccagaagcugaucgccaacaaguucaaccaggcgcucggggccaugcagaccggcuucaccacgaccaacgaggccuuccagaaggugcaggacgccgugaacaacaacgcccaggcgcugagcaagcuggccuccgagcucagcaacaccuucggggccaucuccgccagcaucggcgacaucauccagcgccuggacgugcuggagcaggacgcccagaucgaccggcucaucaacgggcgccugaccacgcugaacgcguucguggcccagcagcucguccgguccgagagcgccgcccuguccgcgcagcuggccaaggacaaggugaacgagugcgugaaggcccagagcaagcgcuccggcuucugcggccaggggacccacaucgucagcuucguggucaacgcccccaacggccucuacuucaugcacgugggguacuacccgagcaaccacaucgagguggucuccgccuacggccugugcgacgcggccaaccccaccaacugcaucgcccccgugaacggguacuucaucaagaccaacaacacgcggaucguggacgaguggagcuacaccggcuccagcuucuacgcccccgagccgaucaccucccugaacaccaaguacgucgcgccccaggugacguaccagaacaucagcaccaaccucccgccgccccugcugggcaacuccaccgggaucgacuuccaggacgagcuggacgaguucuucaagaacgugagcaccuccauccccaacuucggcagccucacgcagaucaacaccacccugcuggaccucaccuacgagaugcugucccugcagcaggucgugaaggcccucaacgagagcuacaucgaccugaaggagcuggggaacuacacguacuacaacaaguggcccugaggacuagucccuguucccagagcccacuuuuuuuucuuuuuuugaaauaaaauagccugucuuucagaucucaaaggcucuuuucagagccaccaaaaaaaaaaaaaaaaaaaaaaaaaaaaaaaaaaaaaaaaaaaaaaaaaaaaaaaaaaaaaaaaaaaaaaaaaaaaaaaaaaaaaaaaaaaaaaaaaaaaa

SEQ ID NO: 14850 - RNA, 2120 nt, Artificial Sequence
  MERS-CoV/Riyadh_14_2013__AHI48572.1 spike protein mRNA gc (1-17_726-1296)(R1020Q)_LeucineZipper
aggagagucccgcagucggcguccagcggcucugcuuguucgugugugugucguugcaggccuuauucaagcuuaccaugauccacagcguguuccugcucauguuccugcugacccccaccgaguccgacugcaagcucccccugggccagagccugugcgcccuccccgacacgcccuccacccugacgccccgcagcguccgguccgugccgggggagaugcgccuggccagcaucgcguucaaccaccccauccagguggaccagcucaacuccagcuacuucaagcuguccauccccaccaacuucagcuucggcgucacccaggaguacauccagaccaccauccagaaggugaccguggacugcaagcaguacgucugcaacggguuccagaagugcgagcagcugcuccgggaguacggccaguucugcuccaagaucaaccaggcccugcacggggccaaccugcgccaggacgacagcgugcggaaccucuucgccuccgucaagagcucccagagcucccccaucaucccgggcuucggcggggacuucaaccugacgcugcucgagcccgugagcaucuccaccggcagccgcagcgcccgguccgcgaucgaggaccugcuguucgacaaggugaccaucgccgaccccggguacaugcagggcuacgacgacugcaugcagcaggggcccgccagcgcccgcgaccucaucugcgcgcaguacguggccggcuacaagguccugccgccccugauggacgugaacauggaggccgccuacaccuccagccuccugggcuccaucgccggggugggcuggacggcggggcugagcuccuucgccgccauccccuucgcccagagcaucuucuaccggcucaacggcgucggcaucacccagcagguccuguccgagaaccagaagcugaucgccaacaaguucaaccaggcgcucggggccaugcagaccggcuucaccacgaccaacgaggccuuccagaaggugcaggacgccgugaacaacaacgcccaggcgcugagcaagcuggccuccgagcucagcaacaccuucggggccaucuccgccagcaucggcgacaucauccagcgccuggacgugcuggagcaggacgcccagaucgaccggcucaucaacgggcgccugaccacgcugaacgcguucguggcccagcagcucguccgguccgagagcgccgcccuguccgcgcagcuggccaaggacaaggugaacgagugcgugaaggcccagagcaagcgcuccggcuucugcggccaggggacccacaucgucagcuucguggucaacgcccccaacggccucuacuucaugcacgugggguacuacccgagcaaccacaucgagguggucuccgccuacggccugugcgacgcggccaaccccaccaacugcaucgcccccgugaacggguacuucaucaagaccaacaacacgcggaucguggacgaguggagcuacaccggcuccagcuucuacgcccccgagccgaucaccucccugaacaccaaguacgucgcgccccaggugacguaccagaacaucagcaccaaccucccgccgccccugcugggcaacuccaccgggaucgacuuccaggacgagcuggacgaguucuucaagaacgugagcaccuccauccccaacuucggcagccucacgcagaucaacaccacccugcuggaccucaccuacgagaugcugucccugcagcaggucgugaaggcccucaacgagagcuacaucgaccugaaggagcuggggaacuacacguacuacaacaaguggcccgacaagaucgaggagauccucuccaagaucuaccacaucgagaacgagaucgcccgcaucaagaagcugaucggcgaggccugaggacuagucccuguucccagagcccacuuuuuuuucuuuuuuugaaauaaaauagccugucuuucagaucucaaaggcucuuuucagagccaccaaaaaaaaaaaaaaaaaaaaaaaaaaaaaaaaaaaaaaaaaaaaaaaaaaaaaaaaaaaaaaaaaaaaaaaaaaaaaaaaaaaaaaaaaaaaaaaaaaaaa

SEQ ID NO: 14851 - RNA, 4334 nt, Artificial Sequence
  MERS-CoV/England 1__YP_007188579.1 spike protein mRNA gc (1-1353)
aggagagucccgcagucggcguccagcggcucugcuuguucgugugugugucguugcaggccuuauucaagcuuaccaugauccacagcguguuccugcucauguuccugcugacccccaccgaguccuacgucgacgugggcccggacagcgugaaguccgccugcaucgaggucgacauccagcagacguucuucgacaagaccuggccccgccccaucgacgugagcaaggccgacgggaucaucuacccccagggccggaccuacuccaacaucaccaucacguaccagggccucuucccguaccagggcgaccacggggacauguacguguacagcgcgggccacgccaccggcaccacgccccagaagcuguucgucgccaacuacucccaggacgugaagcaguucgccaacggguucgugguccgcaucggcgccgcggccaacagcaccgggaccgugaucaucucccccagcaccuccgccaccauccggaagaucuaccccgccuucaugcugggcagcuccguggggaacuucagcgacggcaagaugggccgcuucuucaaccacacgcucguccugcugccggacgggugcggcacccuccugcgggcguucuacugcauccuggagccccgcuccgggaaccacugccccgccggcaacagcuacaccuccuucgccaccuaccacacgcccgccaccgacugcagcgacggcaacuacaaccggaacgccucccucaacagcuucaaggaguacuucaaccugcgcaacugcaccuucauguacaccuacaacaucacggaggacgagauccuggagugguucgggaucacccagaccgcgcagggcgugcaccucuucagcucccgguacguggaccuguacgggggcaacauguuccaguucgccacccugccggucuacgacacgaucaaguacuacagcaucaucccccacuccauccgcagcauccaguccgaccggaaggccugggccgccuucuacguguacaagcuccagccccugaccuuccugcucgacuucagcguggacggguacauccgccgggcgaucgacugcggcuucaacgaccugucccagcugcacugcagcuacgaguccuucgacgucgagagcggcguguacuccgugagcuccuucgaggccaagcccagcggguccgucguggagcaggccgagggcguggagugcgacuucagcccgcuccuguccgggaccccgccccaggucuacaacuucaagcgccugguguucaccaacugcaacuacaaccucacgaagcugcugagccucuucuccgucaacgacuucacgugcagccagaucagccccgccgccaucgcguccaacugcuacagcucccugauccuggacuacuucagcuacccccucuccaugaaguccgaccugagcgugagcuccgccgggcccaucagccaguucaacuacaagcaguccuucagcaacccgaccugccugauccucgccaccgugccccacaaccugaccaccaucaccaagccccugaaguacuccuacaucaacaagugcagccgguuccucuccgacgaccgcaccgaggucccccagcuggugaacgccaaccaguacagccccugcguguccaucguccccagcacggugugggaggacggggacuacuaccggaagcagcugagcccgcucgagggcggcggguggcugguggccuccggcagcaccgucgcgaugaccgagcagcugcagaugggguucggcaucaccgugcaguacgggaccgacacgaacuccgugugccccaagcucgaguucgccaacgacaccaagaucgccagccagcugggcaacugcgucgaguacucccuguacggcgugagcgggcgcggcguguuccagaacugcaccgccgucggggugcggcagcagcgcuucguguacgacgcguaccagaaccuggucggcuacuacuccgacgacggcaacuacuacugccuccgggccugcgugagcgugcccgucuccgugaucuacgacaaggagaccaagacgcacgccacccuguucgggagcguggccugcgagcacaucuccagcaccaugucccaguacagccgcuccacccgcagcaugcugaagcggcgcgacuccacguacggcccgcuccagacccccgucgggugcgugcugggccuggugaacagcucccucuucgucgaggacugcaagcugccccuggggcagagccucugcgcccugcccgacaccccgagcacccugacgccccgguccgugcgcagcgugcccggcgagaugcggcucgcguccaucgccuucaaccaccccauccaggucgaccagcugaacagcuccuacuucaagcugagcaucccgaccaacuucuccuucggcgugacccaggaguacauccagaccacgauccagaaggugaccgucgacugcaagcaguacgugugcaacggguuccagaagugcgagcagcuccugcgcgaguacggccaguucugcagcaagaucaaccaggcccugcacggggccaaccuccggcaggacgacuccgugcgcaaccuguucgccagcgucaaguccagccaguccagccccaucauccccggcuucgggggcgacuucaaccugacccuccuggagcccguguccaucagcaccggcucccggagcgcgcgcuccgccaucgaggaccuccuguucgacaaggugacgaucgccgacccgggguacaugcagggcuacgacgacugcaugcagcaggggcccgccagcgcccgggaccugaucugcgcgcaguacgucgccggcuacaaggugcugccgccccucauggacgugaacauggaggccgccuacaccagcucccugcuggggagcaucgcgggcgucggcuggaccgccgggcucuccagcuucgccgccauccccuucgcccaguccaucuucuaccgccugaacggcguggggaucacccagcagguccugagcgagaaccagaagcucaucgcgaacaaguucaaccaggcccugggcgccaugcagacgggguucaccaccaccaacgaggccuuccacaaggugcaggacgccgugaacaacaacgcgcaggcccuguccaagcucgccagcgagcuguccaacacguucggcgccaucagcgccuccaucggcgacaucauccagcggcuggacgugcucgagcaggacgcgcagaucgaccgccugaucaacgggcggcugaccacccucaacgccuucgucgcccagcagcuggugcgcagcgaguccgccgcgcugagcgcccagcucgccaaggacaaggugaacgagugcgucaaggcccaguccaagcggagcggcuucugcgggcagggcacccacaucguguccuucgucgugaacgcccccaacggccuguacuucaugcacgugggguacuaccccagcaaccacaucgaggucguguccgcguacggccugugcgacgccgccaaccccacgaacugcaucgccccggugaacggguacuucaucaagaccaacaacacccgcaucgucgacgaguggagcuacaccggcagcuccuucuacgcccccgagcccaucacgagccucaacaccaaguacguggcgccccaggugaccuaccagaacaucuccaccaaccugccgccgccccugcucgggaacagcaccggcaucgacuuccaggacgagcuggacgaguucuucaagaacgucuccacgagcauccccaacuucggcucccugacccagaucaacaccacccuccuggaccugacguacgagaugcucagccugcagcaggucgugaaggcccugaacgaguccuacaucgaccucaaggagcuggggaacuacaccuacuacaacaaguggcccugguacaucuggcugggcuucaucgccgggcucguggcccuggcccugugcguguucuucauccucugcugcaccggcugcgggaccaacugcaugggcaagcugaagugcaaccggugcugcgaccgcuacgaggaguacgaccuggagccccacaaggugcacguccacugaggacuagucccuguucccagagcccacuuuuuuuucuuuuuuugaaauaaaauagccugucuuucagaucucaaaggcucuuuucagagccaccaaaaaaaaaaaaaaaaaaaaaaaaaaaaaaaaaaaaaaaaaaaaaaaaaaaaaaaaaaaaaaaaaaaaaaaaaaaaaaaaaaaaaaaaaaaaaaaaaaaaa

SEQ ID NO: 14852 - RNA, 4334 nt, Artificial Sequence
  MERS-CoV/England 1__YP_007188579.1 spike protein mRNA gc (1-1353)(V1060P_L1061P)
aggagagucccgcagucggcguccagcggcucugcuuguucgugugugugucguugcaggccuuauucaagcuuaccaugauccacagcguguuccugcucauguuccugcugacccccaccgaguccuacgucgacgugggcccggacagcgugaaguccgccugcaucgaggucgacauccagcagacguucuucgacaagaccuggccccgccccaucgacgugagcaaggccgacgggaucaucuacccccagggccggaccuacuccaacaucaccaucacguaccagggccucuucccguaccagggcgaccacggggacauguacguguacagcgcgggccacgccaccggcaccacgccccagaagcuguucgucgccaacuacucccaggacgugaagcaguucgccaacggguucgugguccgcaucggcgccgcggccaacagcaccgggaccgugaucaucucccccagcaccuccgccaccauccggaagaucuaccccgccuucaugcugggcagcuccguggggaacuucagcgacggcaagaugggccgcuucuucaaccacacgcucguccugcugccggacgggugcggcacccuccugcgggcguucuacugcauccuggagccccgcuccgggaaccacugccccgccggcaacagcuacaccuccuucgccaccuaccacacgcccgccaccgacugcagcgacggcaacuacaaccggaacgccucccucaacagcuucaaggaguacuucaaccugcgcaacugcaccuucauguacaccuacaacaucacggaggacgagauccuggagugguucgggaucacccagaccgcgcagggcgugcaccucuucagcucccgguacguggaccuguacgggggcaacauguuccaguucgccacccugccggucuacgacacgaucaaguacuacagcaucaucccccacuccauccgcagcauccaguccgaccggaaggccugggccgccuucuacguguacaagcuccagccccugaccuuccugcucgacuucagcguggacggguacauccgccgggcgaucgacugcggcuucaacgaccugucccagcugcacugcagcuacgaguccuucgacgucgagagcggcguguacuccgugagcuccuucgaggccaagcccagcggguccgucguggagcaggccgagggcguggagugcgacuucagcccgcuccuguccgggaccccgccccaggucuacaacuucaagcgccugguguucaccaacugcaacuacaaccucacgaagcugcugagccucuucuccgucaacgacuucacgugcagccagaucagccccgccgccaucgcguccaacugcuacagcucccugauccuggacuacuucagcuacccccucuccaugaaguccgaccugagcgugagcuccgccgggcccaucagccaguucaacuacaagcaguccuucagcaacccgaccugccugauccucgccaccgugccccacaaccugaccaccaucaccaagccccugaaguacuccuacaucaacaagugcagccgguuccucuccgacgaccgcaccgaggucccccagcuggugaacgccaaccaguacagccccugcguguccaucguccccagcacggugugggaggacggggacuacuaccggaagcagcugagcccgcucgagggcggcggguggcugguggccuccggcagcaccgucgcgaugaccgagcagcugcagaugggguucggcaucaccgugcaguacgggaccgacacgaacuccgugugccccaagcucgaguucgccaacgacaccaagaucgccagccagcugggcaacugcgucgaguacucccuguacggcgugagcgggcgcggcguguuccagaacugcaccgccgucggggugcggcagcagcgcuucguguacgacgcguaccagaaccuggucggcuacuacuccgacgacggcaacuacuacugccuccgggccugcgugagcgugcccgucuccgugaucuacgacaaggagaccaagacgcacgccacccuguucgggagcguggccugcgagcacaucuccagcaccaugucccaguacagccgcuccacccgcagcaugcugaagcggcgcgacuccacguacggcccgcuccagacccccgucgggugcgugcugggccuggugaacagcucccucuucgucgaggacugcaagcugccccuggggcagagccucugcgcccugcccgacaccccgagcacccugacgccccgguccgugcgcagcgugcccggcgagaugcggcucgcguccaucgccuucaaccaccccauccaggucgaccagcugaacagcuccuacuucaagcugagcaucccgaccaacuucuccuucggcgugacccaggaguacauccagaccacgauccagaaggugaccgucgacugcaagcaguacgugugcaacggguuccagaagugcgagcagcuccugcgcgaguacggccaguucugcagcaagaucaaccaggcccugcacggggccaaccuccggcaggacgacuccgugcgcaaccuguucgccagcgucaaguccagccaguccagccccaucauccccggcuucgggggcgacuucaaccugacccuccuggagcccguguccaucagcaccggcucccggagcgcgcgcuccgccaucgaggaccuccuguucgacaaggugacgaucgccgacccgggguacaugcagggcuacgacgacugcaugcagcaggggcccgccagcgcccgggaccugaucugcgcgcaguacgucgccggcuacaaggugcugccgccccucauggacgugaacauggaggccgccuacaccagcucccugcuggggagcaucgcgggcgucggcuggaccgccgggcucuccagcuucgccgccauccccuucgcccaguccaucuucuaccgccugaacggcguggggaucacccagcagguccugagcgagaaccagaagcucaucgcgaacaaguucaaccaggcccugggcgccaugcagacgggguucaccaccaccaacgaggccuuccacaaggugcaggacgccgugaacaacaacgcgcaggcccuguccaagcucgccagcgagcuguccaacacguucggcgccaucagcgccuccaucggcgacaucauccagcggcuggacccgcccgagcaggacgcgcagaucgaccgccucaucaacgggcggcugaccacccugaacgccuucguggcccagcagcucguccgcagcgaguccgccgcgcugagcgcccagcuggccaaggacaaggugaacgagugcgugaaggcccaguccaagcggagcggcuucugcgggcagggcacccacaucgucuccuucguggucaacgcccccaacggccucuacuucaugcacgugggguacuaccccagcaaccacaucgagguggucuccgcguacggccugugcgacgccgccaaccccacgaacugcaucgcccccgugaacggguacuucaucaagaccaacaacacccgcaucguggacgaguggagcuacaccggcagcuccuucuacgcccccgagccgaucacgagccugaacaccaaguacgucgcgccccaggugaccuaccagaacaucuccaccaaccugcccccgccccuccuggggaacagcaccggcaucgacuuccaggacgagcucgacgaguucuucaagaacguguccacgagcauccccaacuucggcucccugacccagaucaacaccacccugcucgaccugacguacgagaugcugagccuccagcaggucgugaaggcccugaacgaguccuacaucgaccugaaggagcucgggaacuacaccuacuacaacaaguggcccugguacaucuggcugggcuucaucgccgggcugguggcccucgcccugugcgucuucuucauccugugcugcaccggcugcgggaccaacugcaugggcaagcucaagugcaaccggugcugcgaccgcuacgaggaguacgaccuggagccgcacaaggugcacgugcacugaggacuagucccuguucccagagcccacuuuuuuuucuuuuuuugaaauaaaauagccugucuuucagaucucaaaggcucuuuucagagccaccaaaaaaaaaaaaaaaaaaaaaaaaaaaaaaaaaaaaaaaaaaaaaaaaaaaaaaaaaaaaaaaaaaaaaaaaaaaaaaaaaaaaaaaaaaaaaaaaaaaaa

SEQ ID NO: 14853 - RNA, 4148 nt, Artificial Sequence
  MERS-CoV/England 1__YP_007188579.1 spike protein mRNA gc (variant)
aggagagucccgcagucggcguccagcggcucugcuuguucgugugugugucguugcaggccuuauucaagcuuaccaugauccacagcguguuccugcucauguuccugcugacccccaccgaguccuacgucgacgugggcccggacagcgugaaguccgccugcaucgaggucgacauccagcagacguucuucgacaagaccuggccccgccccaucgacgugagcaaggccgacgggaucaucuacccccagggccggaccuacuccaacaucaccaucacguaccagggccucuucccguaccagggcgaccacggggacauguacguguacagcgcgggccacgccaccggcaccacgccccagaagcuguucgucgccaacuacucccaggacgugaagcaguucgccaacggguucgugguccgcaucggcgccgcggccaacagcaccgggaccgugaucaucucccccagcaccuccgccaccauccggaagaucuaccccgccuucaugcugggcagcuccguggggaacuucagcgacggcaagaugggccgcuucuucaaccacacgcucguccugcugccggacgggugcggcacccuccugcgggcguucuacugcauccuggagccccgcuccgggaaccacugccccgccggcaacagcuacaccuccuucgccaccuaccacacgcccgccaccgacugcagcgacggcaacuacaaccggaacgccucccucaacagcuucaaggaguacuucaaccugcgcaacugcaccuucauguacaccuacaacaucacggaggacgagauccuggagugguucgggaucacccagaccgcgcagggcgugcaccucuucagcucccgguacguggaccuguacgggggcaacauguuccaguucgccacccugccggucuacgacacgaucaaguacuacagcaucaucccccacuccauccgcagcauccaguccgaccggaaggccugggccgccuucuacguguacaagcuccagccccugaccuuccugcucgacuucagcguggacggguacauccgccgggcgaucgacugcggcuucaacgaccugucccagcugcacugcagcuacgaguccuucgacgucgagagcggcguguacuccgugagcuccuucgaggccaagcccagcggguccgucguggagcaggccgagggcguggagugcgacuucagcccgcuccuguccgggaccccgccccaggucuacaacuucaagcgccugguguucaccaacugcaacuacaaccucacgaagcugcugagccucuucuccgucaacgacuucacgugcagccagaucagccccgccgccaucgcguccaacugcuacagcucccugauccuggacuacuucagcuacccccucuccaugaaguccgaccugagcgugagcuccgccgggcccaucagccaguucaacuacaagcaguccuucagcaacccgaccugccugauccucgccaccgugccccacaaccugaccaccaucaccaagccccugaaguacuccuacaucaacaagugcagccgguuccucuccgacgaccgcaccgaggucccccagcuggugaacgccaaccaguacagccccugcguguccaucguccccagcacggugugggaggacggggacuacuaccggaagcagcugagcccgcucgagggcggcggguggcugguggccuccggcagcaccgucgcgaugaccgagcagcugcagaugggguucggcaucaccgugcaguacgggaccgacacgaacuccgugugccccaagcucgaguucgccaacgacaccaagaucgccagccagcugggcaacugcgucgaguacucccuguacggcgugagcgggcgcggcguguuccagaacugcaccgccgucggggugcggcagcagcgcuucguguacgacgcguaccagaaccuggucggcuacuacuccgacgacggcaacuacuacugccuccgggccugcgugagcgugcccgucuccgugaucuacgacaaggagaccaagacgcacgccacccuguucgggagcguggccugcgagcacaucuccagcaccaugucccaguacagccgcuccacccgcagcaugcugaagcggcgcgacuccacguacggcccgcuccagacccccgucgggugcgugcugggccuggugaacagcucccucuucgucgaggacugcaagcugccccuggggcagagccucugcgcccugcccgacaccccgagcacccugacgccccgguccgugcgcagcgugcccggcgagaugcggcucgcguccaucgccuucaaccaccccauccaggucgaccagcugaacagcuccuacuucaagcugagcaucccgaccaacuucuccuucggcgugacccaggaguacauccagaccacgauccagaaggugaccgucgacugcaagcaguacgugugcaacggguuccagaagugcgagcagcuccugcgcgaguacggccaguucugcagcaagaucaaccaggcccugcacggggccaaccuccggcaggacgacuccgugcgcaaccuguucgccagcgucaaguccagccaguccagccccaucauccccggcuucgggggcgacuucaaccugacccuccuggagcccguguccaucagcaccggcucccggagcgcgcgcuccgccaucgaggaccuccuguucgacaaggugacgaucgccgacccgggguacaugcagggcuacgacgacugcaugcagcaggggcccgccagcgcccgggaccugaucugcgcgcaguacgucgccggcuacaaggugcugccgccccucauggacgugaacauggaggccgccuacaccagcucccugcuggggagcaucgcgggcgucggcuggaccgccgggcucuccagcuucgccgccauccccuucgcccaguccaucuucuaccgccugaacggcguggggaucacccagcagguccugagcgagaaccagaagcucaucgcgaacaaguucaaccaggcccugggcgccaugcagacgggguucaccaccaccaacgaggccuuccacaaggugcaggacgccgugaacaacaacgcgcaggcccuguccaagcucgccagcgagcuguccaacacguucggcgccaucagcgccuccaucggcgacaucauccagcggcuggacccgcccgagcaggacgcgcagaucgaccgccucaucaacgggcggcugaccacccugaacgccuucguggcccagcagcucguccgcagcgaguccgccgcgcugagcgcccagcuggccaaggacaaggugaacgagugcgugaaggcccaguccaagcggagcggcuucugcgggcagggcacccacaucgucuccuucguggucaacgcccccaacggccucuacuucaugcacgugggguacuaccccagcaaccacaucgagguggucuccgcguacggccugugcgacgccgccaaccccacgaacugcaucgcccccgugaacggguacuucaucaagaccaacaacacccgcaucguggacgaguggagcuacaccggcagcuccuucuacgcccccgagccgaucacgagccugaacaccaaguacgucgcgccccaggugaccuaccagaacaucuccaccaaccugcccccgccccuccuggggaacagcaccggcaucgacuuccaggacgagcucgacgaguucuucaagaacguguccacgagcauccccaacuucggcucccugacccagaucaacaccacccugcucgaccugacguacgagaugcugagccuccagcaggucgugaaggcccugaacgaguccuacaucgaccugaaggagcucgggaacuacaccuacugaggacuagucccuguucccagagcccacuuuuuuuucuuuuuuugaaauaaaauagccugucuuucagaucucaaaggcucuuuucagagccaccaaaaaaaaaaaaaaaaaaaaaaaaaaaaaaaaaaaaaaaaaaaaaaaaaaaaaaaaaaaaaaaaaaaaaaaaaaaaaaaaaaaaaaaaaaaaaaaaaaaaa

SEQ ID NO: 14854 - RNA, 4148 nt, Artificial Sequence
  MERS-CoV/England 1__YP_007188579.1 spike protein mRNA gc (variant)
aggagagucccgcagucggcguccagcggcucugcuuguucgugugugugucguugcaggccuuauucaagcuuaccaugauccacagcguguuccugcucauguuccugcugacccccaccgaguccuacgucgacgugggcccggacagcgugaaguccgccugcaucgaggucgacauccagcagacguucuucgacaagaccuggccccgccccaucgacgugagcaaggccgacgggaucaucuacccccagggccggaccuacuccaacaucaccaucacguaccagggccucuucccguaccagggcgaccacggggacauguacguguacagcgccggccacgccaccggcaccacgccccagaagcuguucgucgccaacuacucccaggacgugaagcaguucgccaacggguucgugguccgcaucggcgccgcggccaacagcaccgggaccgugaucaucucccccagcaccuccgccaccauccggaagaucuaccccgccuucaugcugggcagcuccguggggaacuucagcgacggcaagaugggccgcuucuucaaccacacgcucguccugcugccggacgggugcggcacccuccugcgggcguucuacugcauccuggagccccgcuccgggaaccacugccccgccggcaacagcuacaccuccuucgccaccuaccacacgcccgccaccgacugcagcgacggcaacuacaaccggaacgccucccucaacagcuucaaggaguacuucaaccugcgcaacugcaccuucauguacaccuacaacaucacggaggacgagauccuggagugguucgggaucacccagaccgcgcagggcgugcaccucuucagcucccgguacguggaccuguacgggggcaacauguuccaguucgccacccugccggucuacgacacgaucaaguacuacagcaucaucccccacuccauccgcagcauccaguccgaccggaaggccugggccgccuucuacguguacaagcuccagccccugaccuuccugcucgacuucagcguggacggguacauccgccgggcgaucgacugcggcuucaacgaccugucccagcugcacugcagcuacgaguccuucgacgucgagagcggcguguacuccgugagcuccuucgaggccaagcccagcggguccgucguggagcaggccgagggcguggagugcgacuucagcccgcuccuguccgggaccccgccccaggucuacaacuucaagcgccugguguucaccaacugcaacuacaaccucacgaagcugcugagccucuucuccgucaacgacuucacgugcagccagaucagccccgccgccaucgcguccaacugcuacagcucccugauccuggacuacuucagcuacccccucuccaugaaguccgaccugagcgugagcuccgccgggcccaucagccaguucaacuacaagcaguccuucagcaacccgaccugccugauccucgccaccgugccccacaaccugaccaccaucaccaagccccugaaguacuccuacaucaacaagugcagccgguuccucuccgacgaccgcaccgaggucccccagcuggugaacgccaaccaguacagccccugcguguccaucguccccagcacggugugggaggacggggacuacuaccggaagcagcugagcccgcucgagggcggcggguggcugguggccuccggcagcaccgucgcgaugaccgagcagcugcagaugggguucggcaucaccgugcaguacgggaccgacacgaacuccgugugccccaagcucgaguucgccaacgacaccaagaucgccagccagcugggcaacugcgucgaguacucccuguacggcgugagcgggcgcggcguguuccagaacugcaccgccgucggggugcggcagcagcgcuucguguacgacgcguaccagaaccuggucggcuacuacuccgacgacggcaacuacuacugccuccgggccugcgugagcgugcccgucuccgugaucuacgacaaggagaccaagacgcacgccacccuguucgggagcguggccugcgagcacaucuccagcaccaugucccaguacagccgcuccacccgcagcaugcugaagcggcgcgacuccacguacggcccgcuccagacccccgucgggugcgugcugggccuggugaacagcucccucuucgucgaggacugcaagcugccccuggggcagagccucugcgcccugcccgacaccccgagcacccugacgcccgcguccgugggcagcgugcccggcgagaugcggcucgccuccaucgccuucaaccaccccauccaggucgaccagcugaacagcuccuacuucaagcugagcaucccgaccaacuucuccuucggggugacccaggaguacauccagaccacgauccagaaggugaccgucgacugcaagcaguacgugugcaacggcuuccagaagugcgagcagcuccugcgcgaguacgggcaguucugcagcaagaucaaccaggcccugcacggcgccaaccuccggcaggacgacuccgugcgcaaccuguucgcgagcgucaaguccagccaguccagccccaucauccccggguucggcggcgacuucaaccugacccuccuggagcccguguccaucagcaccgggucccggagcgcccgcuccgccaucgaggaccuccuguucgacaaggugacgaucgccgacccgggcuacaugcagggguacgacgacugcaugcagcagggccccgccagcgcgcgggaccugaucugcgcccaguacgucgccggguacaaggugcugccgccccucauggacgugaacauggaggccgcguacaccagcucccugcugggcagcaucgccggcgucggguggaccgccggccucuccagcuucgccgccauccccuucgcgcaguccaucuucuaccgccugaacggggugggcaucacccagcagguccugagcgagaaccagaagcucaucgccaacaaguucaaccaggcccugggggccaugcagacgggcuucaccaccaccaacgaggccuuccacaaggugcaggacgcggugaacaacaacgcccaggcccuguccaagcucgccagcgagcuguccaacacguucggcgccaucagcgcguccaucggggacaucauccagcggcuggacccgcccgagcaggacgcccagaucgaccgccucaucaacggccggcugaccacccugaacgccuucguggcccagcagcucguccgcagcgaguccgcggcccugagcgcccagcuggccaaggacaaggugaacgagugcgugaaggcccaguccaagcggagcggguucugcggccagggcacccacaucgucuccuucguggucaacgcgcccaacgggcucuacuucaugcacgugggcuacuaccccagcaaccacaucgagguggucuccgccuacgggcugugcgacgccgccaaccccacgaacugcaucgcccccgugaacggcuacuucaucaagaccaacaacacccgcaucguggacgaguggagcuacaccgggagcuccuucuacgcgcccgagccgaucacgagccugaacaccaaguacgucgcgccccaggugaccuaccagaacaucuccaccaaccugcccccgccccuccugggcaacagcaccggcaucgacuuccaggacgagcucgacgaguucuucaagaacguguccacgagcauccccaacuucgggucccugacccagaucaacaccacccugcucgaccugacguacgagaugcugagccuccagcaggucgugaaggcccugaacgaguccuacaucgaccugaaggagcucggcaacuacaccuacugaggacuagucccuguucccagagcccacuuuuuuuucuuuuuuugaaauaaaauagccugucuuucagaucucaaaggcucuuuucagagccaccaaaaaaaaaaaaaaaaaaaaaaaaaaaaaaaaaaaaaaaaaaaaaaaaaaaaaaaaaaaaaaaaaaaaaaaaaaaaaaaaaaaaaaaaaaaaaaaaaaaaa

SEQ ID NO: 14855 - RNA, 4148 nt, Artificial Sequence
  MERS-CoV/England 1__YP_007188579.1 spike protein mRNA gc (variant)
aggagagucccgcagucggcguccagcggcucugcuuguucgugugugugucguugcaggccuuauucaagcuuaccaugauccacagcguguuccugcucauguuccugcugacccccaccgaguccuacgucgacgugggcccggacagcgugaaguccgccugcaucgaggucgacauccagcagacguucuucgacaagaccuggccccgccccaucgacgugagcaaggccgacgggaucaucuacccccagggccggaccuacuccaacaucaccaucacguaccagggccucuucccguaccagggcgaccacggggacauguacguguacagcgccggccacgccaccggcaccacgccccagaagcuguucgucgccaacuacucccaggacgugaagcaguucgccaacggguucgugguccgcaucggcgccgcggccaacagcaccgggaccgugaucaucucccccagcaccuccgccaccauccggaagaucuaccccgccuucaugcugggcagcuccguggggaacuucagcgacggcaagaugggccgcuucuucaaccacacgcucguccugcugccggacgggugcggcacccuccugcgggcguucuacugcauccuggagccccgcuccgggaaccacugccccgccggcaacagcuacaccuccuucgccaccuaccacacgcccgccaccgacugcagcgacggcaacuacaaccggaacgccucccucaacagcuucaaggaguacuucaaccugcgcaacugcaccuucauguacaccuacaacaucacggaggacgagauccuggagugguucgggaucacccagaccgcgcagggcgugcaccucuucagcucccgguacguggaccuguacgggggcaacauguuccaguucgccacccugccggucuacgacacgaucaaguacuacagcaucaucccccacuccauccgcagcauccaguccgaccggaaggccugggccgccuucuacguguacaagcuccagccccugaccuuccugcucgacuucagcguggacggguacauccgccgggcgaucgacugcggcuucaacgaccugucccagcugcacugcagcuacgaguccuucgacgucgagagcggcguguacuccgugagcuccuucgaggccaagcccagcggguccgucguggagcaggccgagggcguggagugcgacuucagcccgcuccuguccgggaccccgccccaggucuacaacuucaagcgccugguguucaccaacugcaacuacaaccucacgaagcugcugagccucuucuccgucaacgacuucacgugcagccagaucagccccgccgccaucgcguccaacugcuacagcucccugauccuggacuacuucagcuacccccucuccaugaaguccgaccugagcgugagcuccgccgggcccaucagccaguucaacuacaagcaguccuucagcaacccgaccugccugauccucgccaccgugccccacaaccugaccaccaucaccaagccccugaaguacuccuacaucaacaagugcagccgguuccucuccgacgaccgcaccgaggucccccagcuggugaacgccaaccaguacagccccugcguguccaucguccccagcacggugugggaggacggggacuacuaccggaagcagcugagcccgcucgagggcggcggguggcugguggccuccggcagcaccgucgcgaugaccgagcagcugcagaugggguucggcaucaccgugcaguacgggaccgacacgaacuccgugugccccaagcucgaguucgccaacgacaccaagaucgccagccagcugggcaacugcgucgaguacucccuguacggcgugagcgggcgcggcguguuccagaacugcaccgccgucggggugcggcagcagcgcuucguguacgacgcguaccagaaccuggucggcuacuacuccgacgacggcaacuacuacugccuccgggccugcgugagcgugcccgucuccgugaucuacgacaaggagaccaagacgcacgccacccuguucgggagcguggccugcgagcacaucuccagcaccaugucccaguacagccgcuccacccgcagcaugcugaagcggcgcgacuccacguacggcccgcuccagacccccgucgggugcgugcugggccuggugaacagcucccucuucgucgaggacugcaagcugccccuggggcagagccucugcgcccugcccgacaccccgagcacccugacgcccgcguccgugggcagcgugcccggcgagaugcggcucgccuccaucgccuucaaccaccccauccaggucgaccagcugaacagcuccuacuucaagcugagcaucccgaccaacuucuccuucggggugacccaggaguacauccagaccacgauccagaaggugaccgucgacugcaagcaguacgugugcaacggcuuccagaagugcgagcagcuccugcgcgaguacgggcaguucugcagcaagaucaaccaggcccugcacggcgccaaccuccggcaggacgacuccgugcgcaaccuguucgcgagcgucaaguccagccaguccagccccaucauccccggguucggcggcgacuucaaccugacccuccuggagcccguguccaucagcaccggguccggcagcgccggguccgccaucgaggaccuccuguucgacaaggugacgaucgccgacccgggcuacaugcagggguacgacgacugcaugcagcagggccccgccagcgcgcgggaccugaucugcgcccaguacgucgccggcuacaaggugcugccgccccucauggacgugaacauggaggccgcguacaccagcucccugcuggggagcaucgccggcgucggguggaccgccggccucuccagcuucgccgccauccccuucgcgcaguccaucuucuaccgccugaacggggugggcaucacccagcagguccugagcgagaaccagaagcucaucgccaacaaguucaaccaggcccugggcgccaugcagacgggguucaccaccaccaacgaggccuuccacaaggugcaggacgcggugaacaacaacgcccaggcccuguccaagcucgccagcgagcuguccaacacguucggcgccaucagcgcguccaucggggacaucauccagcggcuggacccgcccgagcaggacgcccagaucgaccgccucaucaacggccggcugaccacccugaacgccuucguggcccagcagcucguccgcagcgaguccgcggcccugagcgcccagcuggccaaggacaaggugaacgagugcgugaaggcccaguccaagcggagcggcuucugcgggcagggcacccacaucgucuccuucguggucaacgcgcccaacgggcucuacuucaugcacgugggcuacuaccccagcaaccacaucgagguggucuccgccuacgggcugugcgacgccgccaaccccacgaacugcaucgcccccgugaacggcuacuucaucaagaccaacaacacccgcaucguggacgaguggagcuacaccggcagcuccuucuacgcgcccgagccgaucacgagccugaacaccaaguacgucgcgccccaggugaccuaccagaacaucuccaccaaccugcccccgccccuccuggggaacagcaccggcaucgacuuccaggacgagcucgacgaguucuucaagaacguguccacgagcauccccaacuucgggucccugacccagaucaacaccacccugcucgaccugacguacgagaugcugagccuccagcaggucgugaaggcccugaacgaguccuacaucgaccugaaggagcucggcaacuacaccuacugaggacuagucccuguucccagagcccacuuuuuuuucuuuuuuugaaauaaaauagccugucuuucagaucucaaaggcucuuuucagagccaccaaaaaaaaaaaaaaaaaaaaaaaaaaaaaaaaaaaaaaaaaaaaaaaaaaaaaaaaaaaaaaaaaaaaaaaaaaaaaaaaaaaaaaaaaaaaaaaaaaaaa

SEQ ID NO: 14856 - RNA, 4229 nt, Artificial Sequence
  MERS-CoV/England 1__YP_007188579.1 spike protein mRNA gc (variant)
aggagagucccgcagucggcguccagcggcucugcuuguucgugugugugucguugcaggccuuauucaagcuuaccaugauccacagcguguuccugcucauguuccugcugacccccaccgaguccuacgucgacgugggcccggacagcgugaaguccgccugcaucgaggucgacauccagcagacguucuucgacaagaccuggccccgccccaucgacgugagcaaggccgacgggaucaucuacccccagggccggaccuacuccaacaucaccaucacguaccagggccucuucccguaccagggcgaccacggggacauguacguguacagcgccggccacgccaccggcaccacgccccagaagcuguucgucgccaacuacucccaggacgugaagcaguucgccaacggguucgugguccgcaucggcgccgcggccaacagcaccgggaccgugaucaucucccccagcaccuccgccaccauccggaagaucuaccccgccuucaugcugggcagcuccguggggaacuucagcgacggcaagaugggccgcuucuucaaccacacgcucguccugcugccggacgggugcggcacccuccugcgggcguucuacugcauccuggagccccgcuccgggaaccacugccccgccggcaacagcuacaccuccuucgccaccuaccacacgcccgccaccgacugcagcgacggcaacuacaaccggaacgccucccucaacagcuucaaggaguacuucaaccugcgcaacugcaccuucauguacaccuacaacaucacggaggacgagauccuggagugguucgggaucacccagaccgcgcagggcgugcaccucuucagcucccgguacguggaccuguacgggggcaacauguuccaguucgccacccugccggucuacgacacgaucaaguacuacagcaucaucccccacuccauccgcagcauccaguccgaccggaaggccugggccgccuucuacguguacaagcuccagccccugaccuuccugcucgacuucagcguggacggguacauccgccgggcgaucgacugcggcuucaacgaccugucccagcugcacugcagcuacgaguccuucgacgucgagagcggcguguacuccgugagcuccuucgaggccaagcccagcggguccgucguggagcaggccgagggcguggagugcgacuucagcccgcuccuguccgggaccccgccccaggucuacaacuucaagcgccugguguucaccaacugcaacuacaaccucacgaagcugcugagccucuucuccgucaacgacuucacgugcagccagaucagccccgccgccaucgcguccaacugcuacagcucccugauccuggacuacuucagcuacccccucuccaugaaguccgaccugagcgugagcuccgccgggcccaucagccaguucaacuacaagcaguccuucagcaacccgaccugccugauccucgccaccgugccccacaaccugaccaccaucaccaagccccugaaguacuccuacaucaacaagugcagccgguuccucuccgacgaccgcaccgaggucccccagcuggugaacgccaaccaguacagccccugcguguccaucguccccagcacggugugggaggacggggacuacuaccggaagcagcugagcccgcucgagggcggcggguggcugguggccuccggcagcaccgucgcgaugaccgagcagcugcagaugggguucggcaucaccgugcaguacgggaccgacacgaacuccgugugccccaagcucgaguucgccaacgacaccaagaucgccagccagcugggcaacugcgucgaguacucccuguacggcgugagcgggcgcggcguguuccagaacugcaccgccgucggggugcggcagcagcgcuucguguacgacgcguaccagaaccuggucggcuacuacuccgacgacggcaacuacuacugccuccgggccugcgugagcgugcccgucuccgugaucuacgacaaggagaccaagacgcacgccacccuguucgggagcguggccugcgagcacaucuccagcaccaugucccaguacagccgcuccacccgcagcaugcugaagcggcgcgacuccacguacggcccgcuccagacccccgucgggugcgugcugggccuggugaacagcucccucuucgucgaggacugcaagcugccccuggggcagagccucugcgcccugcccgacaccccgagcacccugacgcccgcguccgugggcagcgugcccggcgagaugcggcucgccuccaucgccuucaaccaccccauccaggucgaccagcugaacagcuccuacuucaagcugagcaucccgaccaacuucuccuucggggugacccaggaguacauccagaccacgauccagaaggugaccgucgacugcaagcaguacgugugcaacggcuuccagaagugcgagcagcuccugcgcgaguacgggcaguucugcagcaagaucaaccaggcccugcacggcgccaaccuccggcaggacgacuccgugcgcaaccuguucgcgagcgucaaguccagccaguccagccccaucauccccggguucggcggcgacuucaaccugacccuccuggagcccguguccaucagcaccgggucccggagcgcccgcuccgccaucgaggaccuccuguucgacaaggugacgaucgccgacccgggcuacaugcagggguacgacgacugcaugcagcagggccccgccagcgcgcgggaccugaucugcgcccaguacgucgccggguacaaggugcugccgccccucauggacgugaacauggaggccgcguacaccagcucccugcugggcagcaucgccggcgucggguggaccgccggccucuccagcuucgccgccauccccuucgcgcaguccaucuucuaccgccugaacggggugggcaucacccagcagguccugagcgagaaccagaagcucaucgccaacaaguucaaccaggcccugggggccaugcagacgggcuucaccaccaccaacgaggccuuccacaaggugcaggacgcggugaacaacaacgcccaggcccuguccaagcucgccagcgagcuguccaacacguucggcgccaucagcgcguccaucggggacaucauccagcggcuggacccgcccgagcaggacgcccagaucgaccgccucaucaacggccggcugaccacccugaacgccuucguggcccagcagcucguccgcagcgaguccgcggcccugagcgcccagcuggccaaggacaaggugaacgagugcgugaaggcccaguccaagcggagcggguucugcggccagggcacccacaucgucuccuucguggucaacgcgcccaacgggcucuacuucaugcacgugggcuacuaccccagcaaccacaucgagguggucuccgccuacgggcugugcgacgccgccaaccccacgaacugcaucgcccccgugaacggcuacuucaucaagaccaacaacacccgcaucguggacgaguggagcuacaccgggagcuccuucuacgcgcccgagccgaucacgagccugaacaccaaguacgucgcgccccaggugaccuaccagaacaucuccaccaaccugcccccgccccuccugggcaacagcaccggcaucgacuuccaggacgagcucgacgaguucuucaagaacguguccacgagcauccccaacuucgggucccugacccagaucaacaccacccugcucgaccugacguacgagaugcugagccuccagcaggucgugaaggcccugaacgaguccuacaucgaccugaaggagcucggcaacuacaccuacgggggcuacauccccgaggccccgcgggacgggcaggccuacgugcgcaaggacggcgaguggguccugcugagcaccuucugaggacuagucccuguucccagagcccacuuuuuuuucuuuuuuugaaauaaaauagccugucuuucagaucucaaaggcucuuuucagagccaccaaaaaaaaaaaaaaaaaaaaaaaaaaaaaaaaaaaaaaaaaaaaaaaaaaaaaaaaaaaaaaaaaaaaaaaaaaaaaaaaaaaaaaaaaaaaaaaaaaaaa

SEQ ID NO: 14857 - RNA, 4229 nt, Artificial Sequence
  MERS-CoV/England 1__YP_007188579.1 spike protein mRNA gc (variant)
aggagagucccgcagucggcguccagcggcucugcuuguucgugugugugucguugcaggccuuauucaagcuuaccaugauccacagcguguuccugcucauguuccugcugacccccaccgaguccuacgucgacgugggcccggacagcgugaaguccgccugcaucgaggucgacauccagcagacguucuucgacaagaccuggccccgccccaucgacgugagcaaggccgacgggaucaucuacccccagggccggaccuacuccaacaucaccaucacguaccagggccucuucccguaccagggcgaccacggggacauguacguguacagcgccggccacgccaccggcaccacgccccagaagcuguucgucgccaacuacucccaggacgugaagcaguucgccaacggguucgugguccgcaucggcgccgcggccaacagcaccgggaccgugaucaucucccccagcaccuccgccaccauccggaagaucuaccccgccuucaugcugggcagcuccguggggaacuucagcgacggcaagaugggccgcuucuucaaccacacgcucguccugcugccggacgggugcggcacccuccugcgggcguucuacugcauccuggagccccgcuccgggaaccacugccccgccggcaacagcuacaccuccuucgccaccuaccacacgcccgccaccgacugcagcgacggcaacuacaaccggaacgccucccucaacagcuucaaggaguacuucaaccugcgcaacugcaccuucauguacaccuacaacaucacggaggacgagauccuggagugguucgggaucacccagaccgcgcagggcgugcaccucuucagcucccgguacguggaccuguacgggggcaacauguuccaguucgccacccugccggucuacgacacgaucaaguacuacagcaucaucccccacuccauccgcagcauccaguccgaccggaaggccugggccgccuucuacguguacaagcuccagccccugaccuuccugcucgacuucagcguggacggguacauccgccgggcgaucgacugcggcuucaacgaccugucccagcugcacugcagcuacgaguccuucgacgucgagagcggcguguacuccgugagcuccuucgaggccaagcccagcggguccgucguggagcaggccgagggcguggagugcgacuucagcccgcuccuguccgggaccccgccccaggucuacaacuucaagcgccugguguucaccaacugcaacuacaaccucacgaagcugcugagccucuucuccgucaacgacuucacgugcagccagaucagccccgccgccaucgcguccaacugcuacagcucccugauccuggacuacuucagcuacccccucuccaugaaguccgaccugagcgugagcuccgccgggcccaucagccaguucaacuacaagcaguccuucagcaacccgaccugccugauccucgccaccgugccccacaaccugaccaccaucaccaagccccugaaguacuccuacaucaacaagugcagccgguuccucuccgacgaccgcaccgaggucccccagcuggugaacgccaaccaguacagccccugcguguccaucguccccagcacggugugggaggacggggacuacuaccggaagcagcugagcccgcucgagggcggcggguggcugguggccuccggcagcaccgucgcgaugaccgagcagcugcagaugggguucggcaucaccgugcaguacgggaccgacacgaacuccgugugccccaagcucgaguucgccaacgacaccaagaucgccagccagcugggcaacugcgucgaguacucccuguacggcgugagcgggcgcggcguguuccagaacugcaccgccgucggggugcggcagcagcgcuucguguacgacgcguaccagaaccuggucggcuacuacuccgacgacggcaacuacuacugccuccgggccugcgugagcgugcccgucuccgugaucuacgacaaggagaccaagacgcacgccacccuguucgggagcguggccugcgagcacaucuccagcaccaugucccaguacagccgcuccacccgcagcaugcugaagcggcgcgacuccacguacggcccgcuccagacccccgucgggugcgugcugggccuggugaacagcucccucuucgucgaggacugcaagcugccccuggggcagagccucugcgcccugcccgacaccccgagcacccugacgcccgcguccgugggcagcgugcccggcgagaugcggcucgccuccaucgccuucaaccaccccauccaggucgaccagcugaacagcuccuacuucaagcugagcaucccgaccaacuucuccuucggggugacccaggaguacauccagaccacgauccagaaggugaccgucgacugcaagcaguacgugugcaacggcuuccagaagugcgagcagcuccugcgcgaguacgggcaguucugcagcaagaucaaccaggcccugcacggcgccaaccuccggcaggacgacuccgugcgcaaccuguucgcgagcgucaaguccagccaguccagccccaucauccccggguucggcggcgacuucaaccugacccuccuggagcccguguccaucagcaccggguccggcagcgccggguccgccaucgaggaccuccuguucgacaaggugacgaucgccgacccgggcuacaugcagggguacgacgacugcaugcagcagggccccgccagcgcgcgggaccugaucugcgcccaguacgucgccggcuacaaggugcugccgccccucauggacgugaacauggaggccgcguacaccagcucccugcuggggagcaucgccggcgucggguggaccgccggccucuccagcuucgccgccauccccuucgcgcaguccaucuucuaccgccugaacggggugggcaucacccagcagguccugagcgagaaccagaagcucaucgccaacaaguucaaccaggcccugggcgccaugcagacgggguucaccaccaccaacgaggccuuccacaaggugcaggacgcggugaacaacaacgcccaggcccuguccaagcucgccagcgagcuguccaacacguucggcgccaucagcgcguccaucggggacaucauccagcggcuggacccgcccgagcaggacgcccagaucgaccgccucaucaacggccggcugaccacccugaacgccuucguggcccagcagcucguccgcagcgaguccgcggcccugagcgcccagcuggccaaggacaaggugaacgagugcgugaaggcccaguccaagcggagcggcuucugcgggcagggcacccacaucgucuccuucguggucaacgcgcccaacgggcucuacuucaugcacgugggcuacuaccccagcaaccacaucgagguggucuccgccuacgggcugugcgacgccgccaaccccacgaacugcaucgcccccgugaacggcuacuucaucaagaccaacaacacccgcaucguggacgaguggagcuacaccggcagcuccuucuacgcgcccgagccgaucacgagccugaacaccaaguacgucgcgccccaggugaccuaccagaacaucuccaccaaccugcccccgccccuccuggggaacagcaccggcaucgacuuccaggacgagcucgacgaguucuucaagaacguguccacgagcauccccaacuucgggucccugacccagaucaacaccacccugcucgaccugacguacgagaugcugagccuccagcaggucgugaaggcccugaacgaguccuacaucgaccugaaggagcucggcaacuacaccuacgggggcuacauccccgaggccccgcgggacggccaggccuacgugcgcaaggacggggaguggguccugcugagcaccuucugaggacuagucccuguucccagagcccacuuuuuuuucuuuuuuugaaauaaaauagccugucuuucagaucucaaaggcucuuuucagagccaccaaaaaaaaaaaaaaaaaaaaaaaaaaaaaaaaaaaaaaaaaaaaaaaaaaaaaaaaaaaaaaaaaaaaaaaaaaaaaaaaaaaaaaaaaaaaaaaaaaaaa

SEQ ID NO: 14858 - RNA, 4334 nt, Artificial Sequence
  MERS-CoV/MERS-CoV-Jeddah-human-1__AHE78108.1 spike protein mRNA human (1-1353)
aggagagucccgcagucggcguccagcggcucugcuuguucgugugugugucguugcaggccuuauucaagcuuaccaugauccacagcguguuccugcucauguuucuucugacccccacagaguccuacgucgacguuggcccugauucugugaagucagccugcauugaaguagacauacagcaaacuuucuuugauaaaacguggccaagaccgaucgacgugaguaaggcugaugggauuaucuauccccagggaaggaccuacagcaacauuacaaucacuuaucaggguuuguucccuuaccagggcgaccauggggauauguaugucuacuccgcaggacacgccaccggcacaaccccacaaaaauuauuuguggcgaauuauucucaggacguuaagcaguucgcuaacgguuuugugguccggauaggggccgcagccaauucgacuggaacagugaucauuucacccagcaccagugcuacgauccgcaaaauuuacccugcauucaugcugggcuccucuguaggcaacuuuagcgaugggaagaugggacgauucuuuaaucauacucuaguucuccugccagacgguuguggcacccuucugcgugccuucuacugcaucuuggagcccagauccgggaaccacuguccugcuggaaauucauauacaaguuuugccacuuaccauaccccagcgacagauugcagcgacggcaacuauaauaggaacgcaucucucaauuccuucaaggaauacuucaaccugcggaauuguaccuuuauguauacguacaacauaacugaggaugaaauucuggagugguucgguaucacacagaccgcccaaggggugcaccucuuuucaagccgcuaugucgacuuauacggaggcaauauguuccaguuugcuacucugccgguguacgacacaauuaaauauuacaguaucaucccccacucuauuagauccauacagagcgauaggaaggccugggcagcuuucuauguguacaaacuucagccuuugaccuuucugcuagacuucucggucgauggcuauauccggcgcgccauugacugcggguuuaacgaucucucucaacugcauuguuccuacgagucauucgacguugaaaguggaguguauagcguauccucuuuugaggcgaagccaagcgguucaguggucgaacaggccgagggcguggagugcgauuucaguccccuucuguccgggacgccuccacagguuuacaacuuuaaacgauugguguucaccaauuguaacuacaaucucacaaagcuguuaagccuguucucugucaacgacuuuacuugcucacaaaucagucccgcagcuauagccagcaauuguuauuccucucucauucuugauuacuucucguauccgcugagcaugaaguccgacuugucagugaguucugcuggaccuaucagccaguuuaacuacaaacaguccuucucaaauccaaccugccuaauccuggccacaguaccccacaaccucacuaccauuacaaagccucugaaauauagcuacaucaauaagugcucuagacuucuguccgaugacaggaccgaaguuccccaguuggugaacgcaaaucaauauaguccaugugucagcauugugcccucuacugucugggaggacggcgauuacuaccggaaacagcucuccccucuggaaggugggggcugguuaguggccucaggaaguacgguugcuaugacagagcagcugcagaugggcuuugggauaaccgugcaauauggaacugacaccaacagcguaugcccaaagcuagaguucgcgaaugauacaaaaaucgcaucgcagcucgguaacugugucgaauacucccuguauggcgugucugggcguggaguuuuucagaauugcaccgccgugggcguccgccagcaaagauucguguacgacgcuuaucagaaccuuguagguuacuauagcgaugacgggaacuacuacuguuugagggccugcgugucaguuccggucagugugauuuaugauaaggagacuaagacacaugcaacgcuguuuggcuccguggccugugaacacaucucuagcaccaugucccaguacucacggagcacucgaaguaugcucaaacgcagagacucuacauauggaccccugcagaccccugucggcugcguucuugggcugguaaauuccagcuuguucguggaggauuguaagcucccacugggacaaucguuaugcgcucugcccgacacaccuucaacucuaaccccaaggucugugcggaguguccccggugaaaugcgccucgccuccaucgcauuuaaccacccgauucagguggaucagcugaauagcucuuacuucaaacuuagcauaccuacgaacuuuuccuucggcguuacccaagaguauauccagacaacuauucagaaggugaccgucgacuguaaacaguacgugugcaauggguuccaaaagugcgaacaguugcugagagaguauggacaguuuuguucaaagaucaaccaggcgcuccauggcgcuaaucugaggcaagaugacaguguucguaacuuauucgccagcgugaaaucuucccagucaaguccaauuauccccgguuuugggggcgacuucaaucugacacuuuuggagccuguaagcauauccacuggaucucggucggcacgaagcgccaucgaagaucuccuguuugacaaggucaccauugcugaucccggcuacaugcagggguacgacgauugcaugcagcaaggaccagccucagcaagagaccuaaucugugcucaguauguggccggcuacaaagugcugccuccccucauggaugucaacauggaggcggccuauacguccagucugcuugguucuauugcugggguuggauggacagcaggcuugagcuccuucgccgcuaucccauuugcccagucaauauucuacaggcugaauggugugggcauuacccaacagguauuaucugaaaaccagaagcucaucgcaaauaaauuuaaccaggcgcugggggccaugcaaacuggauucacaaccacuaaugaggcuuuucacaaggugcaggacgccgucaacaacaaugcacaggcucuuagcaagcuggccagugaauuguccaacaccuucggcgcaauuagcgccucuaucggggauauaauccagcgccucgacgugcuggagcaagaugcucagauugaccggcuaaucaauggaagacugacaacgcucaacgcguucguugcccagcagcuggugaggucagaguccgcagcucuuagugcccaauuggccaaagauaaggucaaugaaugcgugaaagcucagagcaagcgcucgggcuuuuguggucaggggacccauauuguuucuuucguggucaacgcaccgaauggacuguauuuuaugcacguaggcuacuauccuuccaaccauaucgaggugguuagcgccuacgguuuaugcgacgcggcuaaucccacuaacuguauagccccagugaauggcuacuucauuaaaacaaacaauacccgaaucgucgacgaauggucauauacagggaguucuuuuuacgcacccgagccuaucacuucccucaacaccaaguauguggccccacagguaacguaccaaaauauuagcacaaaccugcccccuccgcuucugggaaacucaaccggcaucgauuuccaggacgagcuagaugaauuuuucaagaaugugaguacuagcauuccaaacuuugggucccucacccagauaaauacaacucuguuggaccugaccuaugagauguuaucucuccaacaggucguuaaagcucugaacgaaagcuacaucgaucuuaaggagcugggaaauuauacauacuacaacaaauggcccugguauauuugguugggcuucaucgcaggucucguggcccuggcgcuaugcguguuuuucauucuguguugcacgggguguggaaccaauugcaugggcaaacuuaagugcaaccgguguugcgaccguuacgaagaguaugaucucgagccucacaagguccacgugcauugaggacuagucccuguucccagagcccacuuuuuuuucuuuuuuugaaauaaaauagccugucuuucagaucucaaaggcucuuuucagagccaccaaaaaaaaaaaaaaaaaaaaaaaaaaaaaaaaaaaaaaaaaaaaaaaaaaaaaaaaaaaaaaaaaaaaaaaaaaaaaaaaaaaaaaaaaaaaaaaaaaaaa

SEQ ID NO: 14859 - RNA, 4334 nt, Artificial Sequence
  MERS-CoV/MERS-CoV-Jeddah-human-1__AHE78108.1 spike protein mRNA human (1-1353)(V1060P_L1061P)
aggagagucccgcagucggcguccagcggcucugcuuguucgugugugugucguugcaggccuuauucaagcuuaccaugauccacagcguguuccugcucauguuucuucugacccccacagaguccuacgucgacguuggcccugauucugugaagucagccugcauugaaguagacauacagcaaacuuucuuugauaaaacguggccaagaccgaucgacgugaguaaggcugaugggauuaucuauccccagggaaggaccuacagcaacauuacaaucacuuaucaggguuuguucccuuaccagggcgaccauggggauauguaugucuacuccgcaggacacgccaccggcacaaccccacaaaaauuauuuguggcgaauuauucucaggacguuaagcaguucgcuaacgguuuugugguccggauaggggccgcagccaauucgacuggaacagugaucauuucacccagcaccagugcuacgauccgcaaaauuuacccugcauucaugcugggcuccucuguaggcaacuuuagcgaugggaagaugggacgauucuuuaaucauacucuaguucuccugccagacgguuguggcacccuucugcgugccuucuacugcaucuuggagcccagauccgggaaccacuguccugcuggaaauucauauacaaguuuugccacuuaccauaccccagcgacagauugcagcgacggcaacuauaauaggaacgcaucucucaauuccuucaaggaauacuucaaccugcggaauuguaccuuuauguauacguacaacauaacugaggaugaaauucuggagugguucgguaucacacagaccgcccaaggggugcaccucuuuucaagccgcuaugucgacuuauacggaggcaauauguuccaguuugcuacucugccgguguacgacacaauuaaauauuacaguaucaucccccacucuauuagauccauacagagcgauaggaaggccugggcagcuuucuauguguacaaacuucagccuuugaccuuucugcuagacuucucggucgauggcuauauccggcgcgccauugacugcggguuuaacgaucucucucaacugcauuguuccuacgagucauucgacguugaaaguggaguguauagcguauccucuuuugaggcgaagccaagcgguucaguggucgaacaggccgagggcguggagugcgauuucaguccccuucuguccgggacgccuccacagguuuacaacuuuaaacgauugguguucaccaauuguaacuacaaucucacaaagcuguuaagccuguucucugucaacgacuuuacuugcucacaaaucagucccgcagcuauagccagcaauuguuauuccucucucauucuugauuacuucucguauccgcugagcaugaaguccgacuugucagugaguucugcuggaccuaucagccaguuuaacuacaaacaguccuucucaaauccaaccugccuaauccuggccacaguaccccacaaccucacuaccauuacaaagccucugaaauauagcuacaucaauaagugcucuagacuucuguccgaugacaggaccgaaguuccccaguuggugaacgcaaaucaauauaguccaugugucagcauugugcccucuacugucugggaggacggcgauuacuaccggaaacagcucuccccucuggaaggugggggcugguuaguggccucaggaaguacgguugcuaugacagagcagcugcagaugggcuuugggauaaccgugcaauauggaacugacaccaacagcguaugcccaaagcuagaguucgcgaaugauacaaaaaucgcaucgcagcucgguaacugugucgaauacucccuguauggcgugucugggcguggaguuuuucagaauugcaccgccgugggcguccgccagcaaagauucguguacgacgcuuaucagaaccuuguagguuacuauagcgaugacgggaacuacuacuguuugagggccugcgugucaguuccggucagugugauuuaugauaaggagacuaagacacaugcaacgcuguuuggcuccguggccugugaacacaucucuagcaccaugucccaguacucacggagcacucgaaguaugcucaaacgcagagacucuacauauggaccccugcagaccccugucggcugcguucuugggcugguaaauuccagcuuguucguggaggauuguaagcucccacugggacaaucguuaugcgcucugcccgacacaccuucaacucuaaccccaaggucugugcggaguguccccggugaaaugcgccucgccuccaucgcauuuaaccacccgauucagguggaucagcugaauagcucuuacuucaaacuuagcauaccuacgaacuuuuccuucggcguuacccaagaguauauccagacaacuauucagaaggugaccgucgacuguaaacaguacgugugcaauggguuccaaaagugcgaacaguugcugagagaguauggacaguuuuguucaaagaucaaccaggcgcuccauggcgcuaaucugaggcaagaugacaguguucguaacuuauucgccagcgugaaaucuucccagucaaguccaauuauccccgguuuugggggcgacuucaaucugacacuuuuggagccuguaagcauauccacuggaucucggucggcacgaagcgccaucgaagaucuccuguuugacaaggucaccauugcugaucccggcuacaugcagggguacgacgauugcaugcagcaaggaccagccucagcaagagaccuaaucugugcucaguauguggccggcuacaaagugcugccuccccucauggaugucaacauggaggcggccuauacguccagucugcuugguucuauugcugggguuggauggacagcaggcuugagcuccuucgccgcuaucccauuugcccagucaauauucuacaggcugaauggugugggcauuacccaacagguauuaucugaaaaccagaagcucaucgcaaauaaauuuaaccaggcgcugggggccaugcaaacuggauucacaaccacuaaugaggcuuuucacaaggugcaggacgccgucaacaacaaugcacaggcucuuagcaagcuggccagugaauuguccaacaccuucggcgcaauuagcgccucuaucggggauauaauccagcgccucgacccgccugagcaagaugcucagauugaccggcugaucaauggaagacuaacaacgcugaacgcguucguggcccagcagcucguuaggucagaguccgcagcucugagugcccaacuugccaaagauaaggugaaugaaugcgucaaagcucagagcaagcgcucgggcuuuuguggucaggggacccauauugugucuuucguugugaacgcacccaauggauuguauuuuaugcacgucggcuacuauccauccaaccauaucgagguagugagcgccuacggucugugcgacgcggcuaaucccacuaacuguauagccccuguuaauggcuacuucauuaaaacaaacaauacccgaaucguggacgaauggucauauacagggaguucuuuuuacgcaccagagcccaucacuuccuuaaacaccaaguaugucgccccucaggugacguaccaaaauauuagcacaaaccucccgccaccccugcuuggaaacucaaccggcaucgauuuccaggacgagcuggaugaauuuuucaagaauguaaguacuagcauuccuaacuuugggucccuaacccagauaaauacaacucuccuggacuugaccuaugagaugcugucuuuacaacagguggucaaagcucucaacgaaagcuacaucgaucugaaggagcuuggaaauuauacauacuacaacaaauggccaugguauauuuggcugggcuucaucgcagguuugguugcccucgcgcugugcguguuuuucauucuauguugcacgggguguggaaccaauugcaugggcaagcugaaaugcaaccgguguugcgaccguuacgaagaguaugaucuugagccccacaaggugcacguccauugaggacuagucccuguucccagagcccacuuuuuuuucuuuuuuugaaauaaaauagccugucuuucagaucucaaaggcucuuuucagagccaccaaaaaaaaaaaaaaaaaaaaaaaaaaaaaaaaaaaaaaaaaaaaaaaaaaaaaaaaaaaaaaaaaaaaaaaaaaaaaaaaaaaaaaaaaaaaaaaaaaaaa

SEQ ID NO: 14860 - RNA, 4334 nt, Artificial Sequence
  MERS-CoV/Al-Hasa_4_2013__AGN70929.1 spike protein mRNA human (1-1353)
aggagagucccgcagucggcguccagcggcucugcuuguucgugugugugucguugcaggccuuauucaagcuuaccaugauccacagcguguuccugcucauguuucuucugacccccacagaguccuacgucgacguuggcccugauucugugaagucagccugcauugaaguagacauacagcaaacuuucuuugauaaaacguggccaagaccgaucgacgugaguaaggcugaugggauuaucuauccccagggaaggaccuacagcaacauuacaaucacuuaucaggguuuguucccuuaccagggcgaccauggggauauguaugucuacuccgcaggacacgccaccggcacaaccccacaaaaauuauuuguggcgaauuauucucaggacguuaagcaguucgcuaacgguuuugugguccggauaggggccgcagccaauucgacuggaacagugaucauuucacccagcaccagugcuacgauccgcaaaauuuacccugcauucaugcugggcuccucuguaggcaacuuuagcgaugggaagaugggacgauucuuuaaucauacucuaguucuccugccagacgguuguggcacccuucugcgugccuucuacugcaucuuggagcccagauccgggaaccacuguccugcuggaaauucauauacaaguuuugccacuuaccauaccccagcgacagauugcagcgacggcaacuauaauaggaacgcaucucucaauuccuucaaggaauacuucaaccugcggaauuguaccuuuauguauacguacaacauaacugaggaugaaauucuggagugguucgguaucacacagaccgcccaaggggugcaccucuuuucaagccgcuaugucgacuuauacggaggcaauauguuccaguuugcuacucugccgguguacgacacaauuaaauauuacaguaucaucccccacucuauuagauccauacagagcgauaggaaggccugggcagcuuucuauguguacaaacuucagccuuugaccuuucugcuagacuucucggucgauggcuauauccggcgcgccauugacugcggguuuaacgaucucucucaacugcauuguuccuacgagucauucgacguugaaaguggaguguauagcguauccucuuuugaggcgaagccaagcgguucaguggucgaacaggccgagggcguggagugcgauuucaguccccuucuguccgggacgccuccacagguuuacaacuuuaaacgauugguguucaccaauuguaacuacaaucucacaaagcuguuaagccuguucucugucaacgacuuuacuugcucacaaaucagucccgcagcuauagccagcaauuguuauuccucucucauucuugauuacuucucguauccgcugagcaugaaguccgacuugucagugaguucugcuggaccuaucagccaguuuaacuacaaacaguccuucucaaauccaaccugccuaauccuggccacaguaccccacaaccucacuaccauuacaaagccucugaaauauagcuacaucaauaagugcucuagacuucuguccgaugacaggaccgaaguuccccaguuggugaacgcaaaucaauauaguccaugugucagcauugugcccucuacugucugggaggacggcgauuacuaccggaaacagcucuccccucuggaaggugggggcugguuaguggccucaggaaguacgguugcuaugacagagcagcugcagaugggcuuugggauaaccgugcaauauggaacugacaccaacagcguaugcccaaagcuagaguucgcgaaugauacaaaaaucgcaucgcagcucgguaacugugucgaauacucccuguauggcgugucugggcguggaguuuuucagaauugcaccgccgugggcguccgccagcaaagauucguguacgacgcuuaucagaaccuuguagguuacuauagcgaugacgggaacuacuacuguuugagggccugcgugucaguuccggucagugugauuuaugauaaggagacuaagacacaugcaacgcuguuuggcuccguggccugugaacacaucucuagcaccaugucccaguacucacggagcacucgaaguaugcucaaacgcagagacucuacauauggaccccugcagaccccugucggcugcguucuugggcugguaaauuccagcuuguucguggaggauuguaagcucccacugggacaaucguuaugcgcucugcccgacacaccuucaacucuaaccccaaggucugugcggaguguccccggugaaaugcgccucgccuccaucgcauuuaaccacccgauucagguggaucagcugaauagcucuuacuucaaacuuagcauaccuacgaacuuuuccuucggcguuacccaagaguauauccagacaacuauucagaaggugaccgucgacuguaaacaguacgugugcaauggguuccaaaagugcgaacaguugcugagagaguauggacaguuuuguucaaagaucaaccaggcgcuccauggcgcuaaucugaggcaagaugacaguguucguaacuuauucgccagcgugaaaucuucccagucaaguccaauuauccccgguuuugggggcgacuucaaucugacacuuuuggagccuguaagcauauccacuggaucucggucggcacgaagcgccaucgaagaucuccuguuugacaaggucaccauugcugaucccggcuacaugcagggguacgacgauugcaugcagcaaggaccagccucagcaagagaccuaaucugugcucaguauguggccggcuacaaagugcugccuccccucauggaugucaacauggaggcggccuauacguccagucugcuugguucuauugcugggguuggauggacagcaggcuugagcuccuucgccgcuaucccauuugcccagucaauauucuacaggcugaauggugugggcauuacccaacagguauuaucugaaaaccagaagcucaucgcaaauaaauuuaaccaggcgcugggggccaugcaaacuggauucacaaccacuaaugaggcuuuucgcaaggugcaggacgccgucaacaacaaugcacaggcucuuagcaagcuggccagugaauuguccaacaccuucggcgcaauuagcgccucuaucggggauauaauccagcggcucgacgugcuggagcaagaugcucagauugacagacuaaucaauggaaggcugacaacgcucaacgcguucguugcccagcagcuggugcgcucagaguccgcagcucuuagugcccaauuggccaaagauaaggucaaugaaugcgugaaagcucagagcaagcgaucgggcuuuuguggucaggggacccacauuguuucuuucguggucaacgcaccgaauggacuguauuuuaugcauguaggcuacuauccuuccaaccacaucgaggugguuagcgccuacgguuuaugcgacgcggcuaaucccacuaacuguauagccccagugaauggcuacuucauuaaaacaaacaauacccggaucgucgacgaauggucauauacagggaguucuuuuuacgcacccgagccuaucacuucccucaacaccaaguauguggccccacauguaacguaccagaauauuagcacaaaccugcccccuccgcuucugggaaacucaaccggcaucgauuuccaagacgagcuagaugaauuuuucaagaaugugaguacuagcauuccaaacuuugggucccucacccagauaaauacaacucuguuggaccugaccuaugagauguuaucucuccagcaagucguuaaagcucugaacgaaagcuacaucgaucuuaaggagcugggaaauuauacauacuacaacaaauggcccugguauauuugguugggcuucaucgcaggucucguggcccuggcgcuaugcguguuuuucauucuguguugcacgggguguggaaccaauugcaugggcaaacuuaagugcaaccguuguugcgacagauacgaagaguaugaucucgagccucacaagguccacgugcauugaggacuagucccuguucccagagcccacuuuuuuuucuuuuuuugaaauaaaauagccugucuuucagaucucaaaggcucuuuucagagccaccaaaaaaaaaaaaaaaaaaaaaaaaaaaaaaaaaaaaaaaaaaaaaaaaaaaaaaaaaaaaaaaaaaaaaaaaaaaaaaaaaaaaaaaaaaaaaaaaaaaaa

SEQ ID NO: 14861 - RNA, 4334 nt, Artificial Sequence
  MERS-CoV/Al-Hasa_4_2013__AGN70929.1 spike protein mRNA human (1-1353)(V1060P_L1061P)
aggagagucccgcagucggcguccagcggcucugcuuguucgugugugugucguugcaggccuuauucaagcuuaccaugauccacagcguguuccugcucauguuucuucugacccccacagaguccuacgucgacguuggcccugauucugugaagucagccugcauugaaguagacauacagcaaacuuucuuugauaaaacguggccaagaccgaucgacgugaguaaggcugaugggauuaucuauccccagggaaggaccuacagcaacauuacaaucacuuaucaggguuuguucccuuaccagggcgaccauggggauauguaugucuacuccgcaggacacgccaccggcacaaccccacaaaaauuauuuguggcgaauuauucucaggacguuaagcaguucgcuaacgguuuugugguccggauaggggccgcagccaauucgacuggaacagugaucauuucacccagcaccagugcuacgauccgcaaaauuuacccugcauucaugcugggcuccucuguaggcaacuuuagcgaugggaagaugggacgauucuuuaaucauacucuaguucuccugccagacgguuguggcacccuucugcgugccuucuacugcaucuuggagcccagauccgggaaccacuguccugcuggaaauucauauacaaguuuugccacuuaccauaccccagcgacagauugcagcgacggcaacuauaauaggaacgcaucucucaauuccuucaaggaauacuucaaccugcggaauuguaccuuuauguauacguacaacauaacugaggaugaaauucuggagugguucgguaucacacagaccgcccaaggggugcaccucuuuucaagccgcuaugucgacuuauacggaggcaauauguuccaguuugcuacucugccgguguacgacacaauuaaauauuacaguaucaucccccacucuauuagauccauacagagcgauaggaaggccugggcagcuuucuauguguacaaacuucagccuuugaccuuucugcuagacuucucggucgauggcuauauccggcgcgccauugacugcggguuuaacgaucucucucaacugcauuguuccuacgagucauucgacguugaaaguggaguguauagcguauccucuuuugaggcgaagccaagcgguucaguggucgaacaggccgagggcguggagugcgauuucaguccccuucuguccgggacgccuccacagguuuacaacuuuaaacgauugguguucaccaauuguaacuacaaucucacaaagcuguuaagccuguucucugucaacgacuuuacuugcucacaaaucagucccgcagcuauagccagcaauuguuauuccucucucauucuugauuacuucucguauccgcugagcaugaaguccgacuugucagugaguucugcuggaccuaucagccaguuuaacuacaaacaguccuucucaaauccaaccugccuaauccuggccacaguaccccacaaccucacuaccauuacaaagccucugaaauauagcuacaucaauaagugcucuagacuucuguccgaugacaggaccgaaguuccccaguuggugaacgcaaaucaauauaguccaugugucagcauugugcccucuacugucugggaggacggcgauuacuaccggaaacagcucuccccucuggaaggugggggcugguuaguggccucaggaaguacgguugcuaugacagagcagcugcagaugggcuuugggauaaccgugcaauauggaacugacaccaacagcguaugcccaaagcuagaguucgcgaaugauacaaaaaucgcaucgcagcucgguaacugugucgaauacucccuguauggcgugucugggcguggaguuuuucagaauugcaccgccgugggcguccgccagcaaagauucguguacgacgcuuaucagaaccuuguagguuacuauagcgaugacgggaacuacuacuguuugagggccugcgugucaguuccggucagugugauuuaugauaaggagacuaagacacaugcaacgcuguuuggcuccguggccugugaacacaucucuagcaccaugucccaguacucacggagcacucgaaguaugcucaaacgcagagacucuacauauggaccccugcagaccccugucggcugcguucuugggcugguaaauuccagcuuguucguggaggauuguaagcucccacugggacaaucguuaugcgcucugcccgacacaccuucaacucuaaccccaaggucugugcggaguguccccggugaaaugcgccucgccuccaucgcauuuaaccacccgauucagguggaucagcugaauagcucuuacuucaaacuuagcauaccuacgaacuuuuccuucggcguuacccaagaguauauccagacaacuauucagaaggugaccgucgacuguaaacaguacgugugcaauggguuccaaaagugcgaacaguugcugagagaguauggacaguuuuguucaaagaucaaccaggcgcuccauggcgcuaaucugaggcaagaugacaguguucguaacuuauucgccagcgugaaaucuucccagucaaguccaauuauccccgguuuugggggcgacuucaaucugacacuuuuggagccuguaagcauauccacuggaucucggucggcacgaagcgccaucgaagaucuccuguuugacaaggucaccauugcugaucccggcuacaugcagggguacgacgauugcaugcagcaaggaccagccucagcaagagaccuaaucugugcucaguauguggccggcuacaaagugcugccuccccucauggaugucaacauggaggcggccuauacguccagucugcuugguucuauugcugggguuggauggacagcaggcuugagcuccuucgccgcuaucccauuugcccagucaauauucuacaggcugaauggugugggcauuacccaacagguauuaucugaaaaccagaagcucaucgcaaauaaauuuaaccaggcgcugggggccaugcaaacuggauucacaaccacuaaugaggcuuuucgcaaggugcaggacgccgucaacaacaaugcacaggcucuuagcaagcuggccagugaauuguccaacaccuucggcgcaauuagcgccucuaucggggauauaauccagcggcucgacccgccugagcaagaugcucagauugacagacugaucaauggaaggcuaacaacgcugaacgcguucguggcccagcagcucguucgcucagaguccgcagcucugagugcccaacuugccaaagauaaggugaaugaaugcgucaaagcucagagcaagcgaucgggcuuuuguggucaggggacccacauugugucuuucguugugaacgcacccaauggauuguauuuuaugcaugucggcuacuauccauccaaccacaucgagguagugagcgccuacggucugugcgacgcggcuaaucccacuaacuguauagccccuguuaauggcuacuucauuaaaacaaacaauacccggaucguggacgaauggucauauacagggaguucuuuuuacgcaccagagcccaucacuuccuuaaacaccaaguaugucgccccucaugugacguaccagaauauuagcacaaaccucccgccaccccugcuuggaaacucaaccggcaucgauuuccaagacgagcuggaugaauuuuucaagaauguaaguacuagcauuccuaacuuugggucccuaacccagauaaauacaacucuccuggacuugaccuaugagaugcugucuuuacagcaaguggucaaagcucucaacgaaagcuacaucgaucugaaggagcuuggaaauuauacauacuacaacaaauggccaugguauauuuggcugggcuucaucgcagguuugguugcccucgcgcugugcguguuuuucauucuauguugcacgggguguggaaccaauugcaugggcaagcugaaaugcaaccguuguugcgacagauacgaagaguaugaucuugagccccacaaggugcacguccauugaggacuagucccuguucccagagcccacuuuuuuuucuuuuuuugaaauaaaauagccugucuuucagaucucaaaggcucuuuucagagccaccaaaaaaaaaaaaaaaaaaaaaaaaaaaaaaaaaaaaaaaaaaaaaaaaaaaaaaaaaaaaaaaaaaaaaaaaaaaaaaaaaaaaaaaaaaaaaaaaaaaaa

SEQ ID NO: 14862 - RNA, 4334 nt, Artificial Sequence
  MERS-CoV/Riyadh_14_2013__AHI48572.1 spike protein mRNA human (1-1353)
aggagagucccgcagucggcguccagcggcucugcuuguucgugugugugucguugcaggccuuauucaagcuuaccaugauccacagcguguuccugcucauguuucuucugacccccacagaguccuacgucgacguuggcccugauucugugaagucagccugcauugaaguagacauacagcaaacuuucuuugauaaaacguggccaagaccgaucgacgugaguaaggcugaugggauuaucuauccccagggaaggaccuacagcaacauuacaaucacuuaucaggguuuguucccuuaccagggcgaccauggggauauguaugucuacuccgcaggacacgccaccggcacaaccccacaaaaauuauuuguggcgaauuauucucaggacguuaagcaguucgcuaacgguuuugugguccggauaggggccgcagccaauucgacuggaacagugaucauuucacccagcaccagugcuacgauccgcaaaauuuacccugcauucaugcugggcuccucuguaggcaacuuuagcgaugggaagaugggacgauucuuuaaucauacucuaguucuccugccagacgguuguggcacccuucugcgugccuucuacugcaucuuggagcccagauccgggaaccacuguccugcuggaaauucauauacaaguuuugccacuuaccauaccccagcgacagauugcagcgacggcaacuauaauaggaacgcaucucucaauuccuucaaggaauacuucaaccugcggaauuguaccuuuauguauacguacaacauaacugaggaugaaauucuggagugguucgguaucacacagaccgcccaaggggugcaccucuuuucaagccgcuaugucgacuuauacggaggcaauauguuccaguuugcuacucugccgguguacgacacaauuaaauauuacaguaucaucccccacucuauuagauccauacagagcgauaggaaggccugggcagcuuucuauguguacaaacuucagccuuugaccuuucugcuagacuucucggucgauggcuauauccggcgcgccauugacugcggguuuaacgaucucucucaacugcauuguuccuacgagucauucgacguugaaaguggaguguauagcguauccucuuuugaggcgaagccaagcgguucaguggucgaacaggccgagggcguggagugcgauuucaguccccuucuguccgggacgccuccacagguuuacaacuuuaaacgauugguguucaccaauuguaacuacaaucucacaaagcuguuaagccuguucucugucaacgacuuuacuugcucacaaaucagucccgcagcuauagccagcaauuguuauuccucucucauucuugauuacuucucguauccgcugagcaugaaguccgacuugucagugaguucugcuggaccuaucagccaguuuaacuacaaacaguccuucucaaauccaaccugccuaauccuggccacaguaccccacaaccucacuaccauuacaaagccucugaaauauagcuacaucaauaagugcucuagacuucuguccgaugacaggaccgaaguuccccaguuggugaacgcaaaucaauauaguccaugugucagcauugugcccucuacugucugggaggacggcgauuacuaccggaaacagcucuccccucuggaaggugggggcugguuaguggccucaggaaguacgguugcuaugacagagcagcugcagaugggcuuugggauaaccgugcaauauggaacugacaccaacagcguaugcccaaagcuagaguucgcgaaugauacaaaaaucgcaucgcagcucgguaacugugucgaauacucccuguauggcgugucugggcguggaguuuuucagaauugcaccgccgugggcguccgccagcaaagauucguguacgacgcuuaucagaaccuuguagguuacuauagcgaugacgggaacuacuacuguuugagggccugcgugucaguuccggucagugugauuuaugauaaggagacuaagacacaugcaacgcuguuuggcuccguggccugugaacacaucucuagcaccaugucccaguacucacggagcacucgaaguaugcucaaacgcagagacucuacauauggaccccugcagaccccugucggcugcguucuugggcugguaaauuccagcuuguucguggaggauuguaagcucccacugggacaaucguuaugcgcucugcccgacacaccuucaacucuaaccccaaggucugugcggaguguccccggugaaaugcgccucgccuccaucgcauuuaaccacccgauucagguggaucagcugaauagcucuuacuucaaacuuagcauaccuacgaacuuuuccuucggcguuacccaagaguauauccagacaacuauucagaaggugaccgucgacuguaaacaguacgugugcaauggguuccaaaagugcgaacaguugcugagagaguauggacaguuuuguucaaagaucaaccaggcgcuccauggcgcuaaucugaggcaagaugacaguguucguaacuuauucgccagcgugaaaucuucccagucaaguccaauuauccccgguuuugggggcgacuucaaucugacacuuuuggagccuguaagcauauccacuggaucucggucggcacgaagcgccaucgaagaucuccuguuugacaaggucaccauugcugaucccggcuacaugcagggguacgacgauugcaugcagcaaggaccagccucagcaagagaccuaaucugugcucaguauguggccggcuacaaagugcugccuccccucauggaugucaacauggaggcggccuauacguccagucugcuugguucuauugcugggguuggauggacagcaggcuugagcuccuucgccgcuaucccauuugcccagucaauauucuacaggcugaauggugugggcauuacccaacagguauuaucugaaaaccagaagcucaucgcaaauaaauuuaaccaggcgcugggggccaugcaaacuggauucacaaccacuaaugaggcuuuucgcaaggugcaggacgccgucaacaacaaugcacaggcucuuagcaagcuggccagugaauuguccaacaccuucggcgcaauuagcgccucuaucggggauauaauccagcggcucgacgugcuggagcaagaugcucagauugacagacuaaucaauggaaggcugacaacgcucaacgcguucguugcccagcagcuggugcgcucagaguccgcagcucuuagugcccaauuggccaaagauaaggucaaugaaugcgugaaagcucagagcaagcgaucgggcuuuuguggucaggggacccacauuguuucuuucguggucaacgcaccgaauggacuguauuuuaugcauguaggcuacuauccuuccaaccacaucgaggugguuagcgccuacgguuuaugcgacgcggcuaaucccacuaacuguauagccccagugaauggcuacuucauuaaaacaaacaauacccggaucgucgacgaauggucauauacagggaguucuuuuuacgcacccgagccuaucacuucccucaacaccaaguauguggccccacagguaacguaccaaaauauuagcacaaaccugcccccuccgcuucugggaaacucaaccggcaucgauuuccaggacgagcuagaugaauuuuucaagaaugugaguacuagcauuccaaacuuugggucccucacccagauaaauacaacucuguuggaccugaccuaugagauguuaucucuccaacaggucguuaaagcucugaacgaaagcuacaucgaucuuaaggagcugggaaauuauacauacuacaacaaauggcccugguauauuugguugggcuucaucgcaggucucguggcccuggcgcuaugcguguuuuucauucuguguugcacgggguguggaaccaauugcaugggcaaacuuaagugcaaccguuguugcgacagauacgaagaguaugaucucgagccucauaagguccacgugcacugaggacuagucccuguucccagagcccacuuuuuuuucuuuuuuugaaauaaaauagccugucuuucagaucucaaaggcucuuuucagagccaccaaaaaaaaaaaaaaaaaaaaaaaaaaaaaaaaaaaaaaaaaaaaaaaaaaaaaaaaaaaaaaaaaaaaaaaaaaaaaaaaaaaaaaaaaaaaaaaaaaaaa
